United States Patent Application Publication US 2005/0228172 A9 - sequence listing, part 174

SEQ ID NO: 778339 - DNA, 607 bp, Homo sapiens
aaaagaattgtatcatctaactagcaattccagttttatgaatgtatcctatgaaagtcccaaacaaatacacatagatttacacttaacgatgtttggtaaagcactgttggaagacgctaaaaaccaataaccgaaatattcatctatatgggcaagcctaataaaatacaaaatatatccaaattayagaattacagaatactatctctgttttttaagtggctatatcatggcatataaaaatatctattttgcagaatattgcatattaatgcctcaattttgaaaaaattcatgaatagaataatgcacatgcttgttttgcacaaaaaatttgtggaaactgaaaaaacgtgactctggtgtctcttcatcactggccatggtattcttatctgctacatatgcatattcccattctatccatttatgctttttatttccatatttccattgttttaactaaaccaaatataattttataattctaaaaaaacaaacgagaaaaattttttaaaacactaccacttttgagagataaaaagtttgtatcgtttaaattacatttcttttattatagtgaggctggatattttttcttttt

SEQ ID NO: 778340 - DNA, 534 bp, Homo sapiens
gtcaccttcattctttgtattttttgtgcccattaaccctcccccgaccctccaccatgtcactacccctccagcctctggtaaccgtccttctactctctatctccatgagttgaattgttttaatttttagctcccacaaataagtgaraacatgcaaagtttgcctttctgtgcctcacttattttacgtaacatgatgacctctagttccatccatgctgttgcaagtgacgggatctcattttctttttatggctgaatagtactagattgtttatatgtaccacattttctttatccattcatctgttgatggacacttaggttacttccaaatcttggctaatgtgaatagtgctgcaataaacatgggagtgcaggtatctctttagtattattgatttcctttctttggggtatgtacctaggagtgggattgccgaattataagatagctctagttttagctttttgaggaacctccaaactgttcttcacagtggttatactaatttacattcccatctacag

SEQ ID NO: 778341 - DNA, 625 bp, Homo sapiens
ttctctctgtgtctcggtttccctatttgtctaatggcaatagaggagtacctcttaggatagtcaatagaattaaaatcagtatgctctcaataaaccctagccaataataataagtttcatagagaaatacagatatttatgagactagacctaaggtgwttatctgtgtgacttaggtcaaattaattaaactcattatgcttcaacttctcgtcagtacagtgggtctaataaaatattctctcatggttttatgagaattaaaggaaataatatatataaggaacctataggttctttatcatatatgatgtaaggcacatcatatatgttaaataaatatatctgacatgtttacacctctggattctggggttttttttcttctttatcttcttcttcagttgggttgagccaatagggtgcactcaaagaccagagggagagaagagtgaagttgagtatttatttttctggttcccttcttaagaggttttactttggctgtgctctcatgagaaagtgactgctctttaaagcagtgggctttacgtaaacctctctccctttgagtttcattaaccactgtctttctctgtctttcaggattagagatagtaac

SEQ ID NO: 778342 - DNA, 625 bp, Homo sapiens
ttctctctgtgtctcggtttccctatttgtctaatggcaatagaggagtacctcttaggatagtcaatagaattaaaatcagtatgctctcaataaaccctagccaataataataagtttcatagagaaatacagatatttatgagactagacctaaggtgattatctgtgtgacttaggtcaaattaattaaactyattatgcttcaacttctcgtcagtacagtgggtctaataaaatattctctcatggttttatgagaattaaaggaaataatatatataaggaacctataggttctttatcatatatgatgtaaggcacatcatatatgttaaataaatatatctgacatgtttacacctctggattctggggttttttttcttctttatcttcttcttcagttgggttgagccaatagggtgcactcaaagaccagagggagagaagagtgaagttgagtatttatttttctggttcccttcttaagaggttttactttggctgtgctctcatgagaaagtgactgctctttaaagcagtgggctttacgtaaacctctctccctttgagtttcattaaccactgtctttctctgtctttcaggattagagatagtaac

SEQ ID NO: 778343 - DNA, 651 bp, Homo sapiens
catattaacataaaaactgtattaaatgaggtcatttatatttctcaaaaaatgcttgattagcaaatccatcaactccaataagacatatcagaataaccaaaaagcaagataaaatacaatcctataaaaattaaaatccacctctttctttaccaaattttagaggtgcgagagactttagaagtcgtaactatgacattttctcccatttgaaaaatcaaagcactgaggacaaaaatgaaacagggaaagtggccagatacaatgtccyctactgtattaattagggttctctagagagacagaataggatatacatatatatatgtaaagggagtttattaagtcttaactcatattatcacaaggtcccacattaggccatttgaaggtgaagagaaaggagagccagccaagtcccaaaacgaaagaatttagagtccaatgtttgatgggctaaagatgtagcctgggaggctagataagtctactcttttcacatttttcttcctgctttatattctagctgcgctggaatatatctttgactcccaaaggtcaaagataaagaaaggatcctagagcagcacgagaaaagaacaaacaaaatacaatggatctccaatatatctggcaacaggcttttca

SEQ ID NO: 778344 - DNA, 651 bp, Homo sapiens
catattaacataaaaactgtattaaatgaggtcatttatatttctcaaaaaatgcttgattagcaaatccatcaactccaataagacatatcagaataaccaaaaagcaagataaaatacaatcctataaaaattaaaatccacctctttctttaccaaattttagaggtgcgagagactttagaagtcgtaactatgacattttctcccatttgaaaaatcaaagcactgaggacaaaaatgaaacagggaaagtggccagatacaatgtcccctactgtattaattagggttctctagagagacagaataggatatacatatatatatgtaaagggagtttattaagtcttaactcayattatcacaaggtcccacattaggccatttgaaggtgaagagaaaggagagccagccaagtcccaaaacgaaagaatttagagtccaatgtttgatgggctaaagatgtagcctgggaggctagataagtctactcttttcacatttttcttcctgctttatattctagctgcgctggaatatatctttgactcccaaaggtcaaagataaagaaaggatcctagagcagcacgagaaaagaacaaacaaaatacaatggatctccaatatatctggcaacaggcttttca

SEQ ID NO: 778345 - DNA, 607 bp, Homo sapiens
ttaaattcattttaaaagttttgttttagatagtttaaagcttttaagaaatcatttctgtttacctacttgtttactgttttcactgcttttcattcctttttatgtattcagatttccatttggtatttttccttacttttgttttgttttgttttttgatgctcaggggttgtttattttactttgttgttgattttagtttttgttttttttttggtttgaaatgtctttattttgctttttttaaaaaactcaactttttatttgtggtaactagattcacatgcacttgtaagaaataatatagagaaatcccatgtacccttactgaacctcccccagtgataayactgtaatggaatatcacaagcacagtagtgacattgatatagtcaagatacagagcatttccatcacctacagaacccagcatgtttccctttccaagcccacttgtgtccctgccttccccttaacctctggtgaccactgattctccatttctatgattttgtcatttcaacagtgttacgtgaattatatagtatgtaaccttttggaattggctttttcacctagcataattctctcaagattgatccag

SEQ ID NO: 778346 - DNA, 518 bp, Homo sapiens
taacacatgctagcaaaaatggggagaaattggaattctcatgcattggtgatgggcatgtaaaatcatgaagccactttggaaaacagtttggcagtccctcaaaaaagctgagcacagagttagcgtatgacccagcaattccattcctaggtttgtacccaagagaatcacacaaaaccctgtatatgaattttcacagcagcattattcataatagccaaaaagtggggrcaatctaatgtccatcatctgataaacggataaataaaatgtaaacccatttattcagccatgaaaaacaggaatgaagtactgatacatgcttaaaaattatgctaagtgagaaaagccagttacaagagaccgtatactgtatggttccatttatattaaatgcccagaataggcaaatgatggagacacaatgagattagtgctatcaagggcctgggggcagagaatagggagtgattactaatggtatggggatccttctagtggtgataaaaatgttc

SEQ ID NO: 778347 - DNA, 532 bp, Homo sapiens
acagggtgttgagaaacttgaatgccaagaacttcatgttttagagttttagaaagttatatgttcctgagaacctaagtgttactgaaagaaaagtttaaggaagatcagacacatccaaaatgtagaatggataagaagagagcctattaggatgtgggaaaacataaggtaytaagaatcaggtgaaatgtggccacaaattcccaacagtcaagtcaacaaaatttgttgagtaatgtgatatagagaaagagcaagaagggaatcaaattttaatctgagacttgagaccaggtggccaggagaatactgattaacagaaatgggagacagcaggaagacatgattttacaagaaagatgatgacttttagacagagttgaatttaaggtaacagtggccaccaccacctccagccccttactccctgcagtgccatgtgatgcaatctgctagtcttggctaagaaaaattttcctgaatggtattcccacataaacacaaataaacacagtggagaaatcctttc

SEQ ID NO: 778348 - DNA, 532 bp, Homo sapiens
acagggtgttgagaaacttgaatgccaagaacttcatgttttagagttttagaaagttatatgttcctgagaacctaagtgttactgaaagaaaagtttaaggaagatcagacacatccaaaatgtagaatggataagaagagagcctattaggatgtgggaaaacataaggtactaagaatcaggtgaaatgtggccacaaattcccaacagtsaagtcaacaaaatttgttgagtaatgtgatatagagaaagagcaagaagggaatcaaattttaatctgagacttgagaccaggtggccaggagaatactgattaacagaaatgggagacagcaggaagacatgattttacaagaaagatgatgacttttagacagagttgaatttaaggtaacagtggccaccaccacctccagccccttactccctgcagtgccatgtgatgcaatctgctagtcttggctaagaaaaattttcctgaatggtattcccacataaacacaaataaacacagtggagaaatcctttc

SEQ ID NO: 778349 - DNA, 583 bp, Homo sapiens
atttaaggatctagggagtaggactttgatgtctttgggggctgttgtttagcttaccacaggcttctgtctggtccctaaagatttacatccatcctacatgcaaaacacattcaccatattgtaaaaatcttccaaaatctaaacccattgcattaactcaggtctaaaatctcgttaaatattataactcaaaagtcccaaatctcataatctaatcatctaactccagtataggtgagtttctgggtatgattcatcccaagacagaattcctctttatctatggacctgtgaaactagcaaacaagttatgtgctgctaaaatactgyggtgggacaggcatagaataacaattatatacattcccattcagaaagggagacaatgagaggaaagaaaagagtcactagcaccagacaatttttaaatttaatcaggtaaacttttaggtttcaagggttgggaatagtccctgtggcacccagctccactctatgggccagagggttgtgtatgtattgtgtatggctgtttttatgttacagcaaccaaatcaagtggttatggggtagtcatata

SEQ ID NO: 778350 - DNA, 599 bp, Homo sapiens
acagatcactgcaacctccaacttctgggctcaagttatcctcccacctcagcctcctgagtagccaggactacaggtgtgtatcaccgcctccagttaatttgtgtgtgtgttttttttaaatagagatggggtcttgttatgttgcctatctggtcttgaactcctggcctcagaggatcctctgacatgccttggcctcccaaagtgctgggatcacaggcgtaaaccacgatgygtagcttgttactcattcttaaaagtctgtgtttatttttcccattcccttcttttatctgcagtccttcttttttctttaaggcagcttaatttacaagcttggccttgagttaaaagagaaccccgaacgttgaagttgaagttctcaaaccaacatcagagcaactatcttaatccccatataaacaaagttatctactcctggctccttaaaaaaataataataatgtaaaaatgactgcattgacatgcttacattcccagcaacttcaattgtttagggatggactaaatgactggtatcatcactttaaaatgtgtcttgaacttgatggagctatgtcgataaataaaattta

SEQ ID NO: 778351 - DNA, 606 bp, Homo sapiens
tgtggctctgcccattatgccttgatgtttattggacatcactccaccccactcagtcacccaaagagctacttacctaatgctgaccaaactggatttagtgacaaccctggggcaaaatatagaatgagagccctggaaattgagagctaaataccactttccyagagcttaagaaaagacagctagagcgagcaagagagaagccactggctctagcgccatcataaatgggggcacatccaggtcctcctccgtgtttctaagtcctccttggttcaagagttttcttctccatgtcctcttgacagcaccgtcccattccttgggtgttctccctacttatttaaaaagatgtctgtattagtttgctagggctgccatttaaaaatgaccacagactgagtaaaacaacagaaatttattgtctcacagttctggaggctggaagtgtgagctcaggtgttggcagggttgatttcttctgagacccctcatcctggcttgcagatggtgtcttctccctgcgttttcacatggtctttcctctgtacatgtctgtgtcctcatctcctcttaacaaggataccagtcgtattggatgag

SEQ ID NO: 778352 - DNA, 539 bp, Homo sapiens
caaaatagaaaatgaagagatagtaaatgaagccccaggtacacatcctgtgtttcagcaattatcagcattttgcttacctgtttctttgcacttactccatcgggaatattttttaaacgttccagatatcaaagcatttcattagttaatactatatgatgtatctataaaggaaataacactgttttttttttaaaaaaaaacaaaatcagaacatcattatgtctagtaaaattaataatgatctcttactatcttctgacaaccattcagtgttcaaattcccttattgtttcaaaactgctcattgaccccttgatatgtttgaagcacgttcagagaggatgcacatagtgtatttagtttatactttcttaaatcttttwaaatctataacagcatcccattcttacctccgtttccttgtgccatttgtttggggaagaaactaaaccatttatctggtagaaatttgcatatgctggatttggctgattgaatcatagtggtgtcatttcatttttttcccatcacgt

SEQ ID NO: 778353 - DNA, 589 bp, Homo sapiens
gcaatggtattgctgttgcctagtgagttcctataaatgcatttgtttgtatccttgcgaatcttgttcctgcagagacagtgtgtggcagcctgttcattccagccctttctataacatctgctgacacaatagcctttttctacatataactggatattgtggcatctccccactctctcattcctatcaccacactgctgtggttgagctcaggcttctattcctgaacgtcgtctctgtggatttgatcctatgtggcttgaaacttaagtgggtggtggccaaccacagagaytaagccagggaactggcttttctctccctccaaccttcaggaaaacccaggtcctgatgttgcagtctcaccaatgcaccttaacctagcagttcctcattgtctgaactagtatcctgggttctgtgtcctaaatccaagaaaattaaggaacttggacacaaacttggggttggagcaaaaatttaataagtgaaagaagaaaactctctgcagtggagaggggagtgcaagtggactgccagtttacagctgaattcaaaagcttttttttttttttttttttgacat

SEQ ID NO: 778354 - DNA, 586 bp, Homo sapiens
atcacctccctctaggagccccaagcccatattcctttctgtagctcaggatcctgtataagcttcaatcacatgtctcttctactctgatgttttgtgggactcccatgtgtacttgcatagttcaatatggtttttctcctgttagtctgtcttacatcagtttaatttgtagcccagctaaggaacttacaaggatggaagatagccccgtctttctctgctacattctctagtttaaaaaatcatttgytattaattcctcaagtttaactttattctttccaaagtacaatattgtgcaaggagatcaccaaagagctttctccttggaacccatctctctaggtgcctcaggggcctcatttgaaagtttcttttgttgttgttgttgttgttgttgttgttgttttgagactgtctcactgtgttcgcccaggctggagtccactggtgagatcttggctcaccacaacctccgccacccgtgttcaagagattctcctgcctcagcctcccgagtagctgggactacaggcgcacacccccatgcctggctaatttttgtattttaagagagattggg

SEQ ID NO: 778355 - DNA, 614 bp, Homo sapiens
gaataggtatcaacagatacatgtacataccttagttttccaaattcagggacgtgcataacatctgtttgccataactcattaggttctagtcttctaaggttaacacctgttgaaggaggggatgtgcctgtgagctggcaatctgggcaatgtaaaataatttgtttagtctttgggtaagttgaaattgtttagctaaagttctccaattctgatgaaaaaatagatgtgwttgtgtggcttggtcaagtagtgacctcatgacctgcaaatctgcttgatcattgccatgagccagcggaccaggcagcgagctgtgggcctgaatgtgtgtgataaaaacaggatgtgttcattgatccaacaattgctgaagtcagagaaaaagggcacacagggtgggctcaagagtggatttaatgagagctgtttcaaggttttgcactaaataaacagaataagcagagtcactaacgatattgatgggctgaacggaaaaggtttccagggccaatattagggctccaacctcagctctctgagtgctagtaaatccagatcgagtgagagagttatgcggttcccaccagatagccgcttttcctctgatt

SEQ ID NO: 778356 - DNA, 614 bp, Homo sapiens
gaataggtatcaacagatacatgtacataccttagttttccaaattcagggacgtgcataacatctgtttgccataactcattaggttctagtcttctaaggttaacacctgttgaaggaggggatgtgcctgtgagctggcaatctgggcaatgtaaaataatttgtttagtctttgggtaagttgaaattgtttagctaaagttctccaattctgatgaaaaaatagatgtgtttgtgtggcttggtcaagtagtgacctcatgacctgcaaatctgcttgatcattgccatgagccagcggaccaggcagcgagctgtgggcctgaatgtgtgtgataaaaacaggatgtgttcattgwtccaacaattgctgaagtcagagaaaaagggcacacagggtgggctcaagagtggatttaatgagagctgtttcaaggttttgcactaaataaacagaataagcagagtcactaacgatattgatgggctgaacggaaaaggtttccagggccaatattagggctccaacctcagctctctgagtgctagtaaatccagatcgagtgagagagttatgcggttcccaccagatagccgcttttcctctgatt

SEQ ID NO: 778357 - DNA, 588 bp, Homo sapiens
acactcaactgcactggtgttctcccagtgtagaaccatctattttaccccattctggaaataaacttcacccttttgccagttaaggaaggtgcagtctctgggatgctacacagatctggggagaaggctacggatccaatcaaattcctcctaaagaatacttccaaacaatcctccttatttagtccatatcccctttaccctcacttcttcagggacctgctgccattagtttccaagtcttcagatatgctataaatcagattagtttttagttttctcttctgcctggtgggatttaaatttctcaaatctgctcattttatccctatgtattcatctgttttccagcttccaaaattgwcccttcttcagctctctccatctattgggtttaagccttaaaatatctatttactggtagttttactgggatttccggaagtcaacaaaatagaattgtatgttagtctcctacctttacgcaaagcttgcttttcattttctatttacgggaagtgtgttaatggcttcataactgaatctagcttataatttatttgtgatagatctaaaactggttaa

SEQ ID NO: 778358 - DNA, 626 bp, Homo sapiens
gttcagttgggtgagttctctgctttcctctaaacatgttatgctcacacttggcccccagggtttgcactcagggtgcccaactcacagccatactgcaaagtcccatttcctccttgagtcctttgctgatatgmcctggtttacactgattcctaccctggctttctttagacccaaagacatttaggcaagggcggatgggccatgttgctaaggaggcttacacttgagggccccttaacttggacagtcccctccaagactgtgtggctaatttttatttataattttgtattgtcttaagaagatcatttaaattgtaaaagcctcaggccccacgcaatctgggtctgtccctgaatttagacattaatttatattcttttcttgaaggattttctaactggttaatgtacaacaaacctgttttctcaacttagtatgagcttctttgctaaataatgctgtgcagtatacagtgtggtggttgaaagggtcatcagtagagtcccacagacctgtgtccaaaggtcacttctgccgtttcctagagatgtggcttttgggcaagtttaaattttcatcttcattgatcttcagcttcctcagctgttaaatgggaa

SEQ ID NO: 778359 - DNA, 601 bp, Homo sapiens
ctttgtagtgaaatggtcttaacaaacatctcaataataacattggctaacacttatttaacatggattatgtgccaagcactgagatattaattttacacattgtacctcacttaattttctcaacaatcctatgaggcaggtacatattawtcttaccaatttatggatggagaaacctaacttagagaggttaccttgcttgtccaagtcacatcttctgtaggggagctaagtctgaagcagatctgtataactctagagtccaaacatgtaattatatttaacttctctcaagttactcagttcccttgggatcatttcgggtgtagagagtgtaagtaatttaactttaagtcataaaataagaaatgtagcaaccagaactaaaaggggaaaaaagactcatcatgaatatcacgtgttataaaataatcatgtgtcttgctgaaacttcataaaagagaagttctagaaagttatcccaaagcaagaagtggtgaatgggaatttattactaattttagatacataatatgtgccaaatgtattgtcctatttgaacaaatggttaaggaaaatatgtattctttgtagttaa

SEQ ID NO: 778360 - DNA, 470 bp, Homo sapiens
acaaagactaataaaataaataaccccagcaaattaaaagcaaagaaaggaaagaaagtaataaagaaaaaggcagaaagtaatgaaatggaaaacatactgtaatagagaaaattaataaagctagaagttggttccaggagaaaattaataatacaaactcttgaacactgggggaaaaaaaggaaatatttctaacttttgtatgaggacaattttgacaatttcattgcaagaaaaaaawatatatatagactaatttctctcattcagtagtcataaaaatacattaaaaattcagcaaattaaatccagtaatatataaaaaggataatgcataacaaccaagtctgatttacgtaaggaatccaaaataggtttaaattgggaaatcaattaatgtagttcactatattcacagaataagggggaaaactgtatcattaccaaaaaaaaaaaaaaaaaagaat

SEQ ID NO: 778361 - DNA, 636 bp, Homo sapiens
aagcgctgtagcaccatcatggctcactttagccttgaactcccaggctcaacaaatcctcccacctcagcatcccaggtatctgggaccataggcacatgataccacacctgactaatttttgtattttcttgtagagatggggtcttgccatgctgttcagcctggtttacaaactcctgagctcaagtgatcctcttgccttggcctcccaaagtcctaggattatcggcatgagccgccatgcccagccagcatgcatttagaaacattattgtgagaaggtagtccacaggctgcaccagacagtcataggagactgtagcacagaaacagattaagaacccatgcattaggctatttgaattgttgaaaataatttatagattctccccagcccaaatcacctatcacctttggtgataccagacagattttatgagctaaactatcaagtaggcttgaattttgtttctagttgattacactggcarttctaactacttttgttaccatattcaagtgacattatagtatagggattaagagaatggatactgtgttagacttggaatagatccctgctctaccatgtaccagctgtatgaccttgggcaagttacttaacctctccaa

SEQ ID NO: 778362 - DNA, 639 bp, Homo sapiens
tgttatttatcccattttaggcacaaggaggcagaggtgtaaggaggtaagtcagtgtaccatgatcccccaacaggtgactgaaattcaagttcagatcgacctgagcccaaactgtgtgcttctaagtgctcttccacattgcctcactactgtctaaggtcactaacctccataagaacacattgaacaggtgctttattctatatttgtaattccacaagcaagtggcaaacctaaagtgtgactctttgacattaaggatataygtttatagttatgtgcataaactctatggctgggtttgaatctgacccctgccactaactggcagtattatcttaattgagttagcccatctagagctcagtttcttcatctgcacaatgggtataagaaaagtggccaggcgtggtggctcacacctataatcccagcactttgggaggccgaggtgggcggatcacaaggtcaggagatggagaccatcctggctaacacggtgaaaccccgtctctactaaaataaatacaaaaaaaaaaaattagccgggcatggtggtgggcgcctgtagtcccagctacttgggaggctgaggcaggagaatggagtgaacctgggaggcggagcttgcagtga

SEQ ID NO: 778363 - DNA, 534 bp, Homo sapiens
ctcttccatttatatcagagcaccatgagatgctccagagctgatctgtttaggagaactccagaccagacagggtatctggattcaactatgttctcgactcacagcctaagggaaccccagaacccctaaatgtctctaggttctgggaatttagaatacagagcatgccaaatagcatgatattttcatgatgccatttgttaaaataaaacaaggtacatagtttttactgccaaccccaaaactgtacaaggcaaaaatactgcattagtctaattgacaaygtagcactatcttaacacaattttttccatccctctatttctctaccctactccatcttccgccttatttgtttatttcttgctttgtttaacatccccacaagtgattttgtgagtctttggttacacttcaaattaaaacaacaaaaagttactgtttaaaaagcaaatcccaattccctctttgttcctcaaatatcattctccatgtgtggataatactctaaaatacagacttctcagtatt

SEQ ID NO: 778364 - DNA, 619 bp, Homo sapiens
gcaacttgccgaggacacctcactaataatgtcagagatgagatgattaggccacgactcctgagcctgcacactcaaccacgcacacactggctcccagcagtcagcctgcaatgcttcctacttgccaattccttctggccatgcttcaatgcttgagaaaatagactaattattatattcatattctttttttttttttttgagatggagtctcgcactgtcactcargctggagtgcagtggtgagatctcagctcactgcaacttctgcctcccggattcaagcaattctcctgcctcagcctcccgagtacctgagattaaaggcgcctgccaccacgcccagctaatttttttttgtgtgtgtgtatttttaatagagacggggtttcaccatgttgatcaggctggtctcgaactcctgaccttgtgatctgcccacctcggcctcctaaagtgctgggattacaggtgtaagccaccgcccccggcctgtattcatattctttttcaaacatgaaagaacttattcaagttcctattgccatggggctagaggccaagaatgaaaagggttatcaccatagaaggcggtgtgggtggaggtggtagtaag

SEQ ID NO: 778365 - DNA, 619 bp, Homo sapiens
gcaacttgccgaggacacctcactaataatgtcagagatgagatgattaggccacgactcctgagcctgcacactcaaccacgcacacactggctcccagcagtcagcctgcaatgcttcctacttgccaattccttctggccatgcttcaatgcttgagaaaatagactaattattatattcatattctttttttttttttttgagatggagtctcgcactgtcactcaggctggagtgcagtggtgagatctcagctcactgcaacttctgcctcccggattcaagcaattctcctgcctcagcctcccgagtacctgagattaaaggcgcctgccaccacgcccagctaatttttttktgtgtgtgtgtatttttaatagagacggggtttcaccatgttgatcaggctggtctcgaactcctgaccttgtgatctgcccacctcggcctcctaaagtgctgggattacaggtgtaagccaccgcccccggcctgtattcatattctttttcaaacatgaaagaacttattcaagttcctattgccatggggctagaggccaagaatgaaaagggttatcaccatagaaggcggtgtgggtggaggtggtagtaag

SEQ ID NO: 778366 - DNA, 490 bp, Homo sapiens
tttctgagaaactgctttgtgatgtgtgcattcatctgacagatgtaaacttttctttggattcagcagtttgcaaaaactggattcagccgtttttgtccattctacaaatggacatatgggagtacattaaggctaatggcataaaagcgaatatcccacgataaaaactagaataaaactacctgagaaactgcttcatgacgtatgcattcatcttgcagacttaagcctttctttttattcagcagtttggaaacaatgctttttatttttttttttagaatctgtgaagggatatttgggagctcrttaaggccaaaggtgaaaaagtaaatattctagtataaaaagtagaaggaagctatctgagaaacccctttgtgatgtgtacatttatctcacagagttaaacctttcttttcattcagcagtttggaaacactgtttttgtagtatctgccaagggatatttgggaacgcattgagt

SEQ ID NO: 778367 - DNA, 639 bp, Homo sapiens
acagtgtttccaaactgctgaatgaaaagaaaagtttaacactgtgagacgaatgcacacgtcactaaatggtttctcagattgcttccttttagtttctgtgctgggttattcactttttcaactttggcctcaatgaactctcaaatgtccatttgcagaatggacaaaaagagtgtttccaaactgctgaatcaaaagaaatgtgtaattctgggagatgaatgcacacatcacaaagcagtttcttagaaagcttatttctagtttttatctgaagatgtttcctttttcaccagaggcctcaaggtgttcaaaaatatagcrcagcagtttctacaaaaacagtggttccaatctgctgaatgaactcaaagatataagtctgcgagatgaatgcacacctcacagtgctgttactgagataccttccttctagtttgtgtactggaaattcactttttatcgataggcctcaatgacctcccaaatgtccatttgcagaatggaaaaaaccagtttttccatactgctggatccaaagaaagtcttacctctgtgagatgaatgctcacatcacaaagcagtttctcagaaaccttctttctaatttttaactgaagatgtttcctttttcac

SEQ ID NO: 778368 - DNA, 447 bp, Homo sapiens
caaatatctgtagaaacaatgctaatgattggtttgctgttattaaacttgtgagtaaatctctgtttggagctctcagctccgaaggatgtgagacccttgatttcccacttcacccctctatatttctctgtgtgtctttaattcctctagcgctgctgggttagggtctccccaactgaggtggtctcagcaatgtttccttttacaccatagtcatcagtgtgctcccaaatatttcttcacagattytacaaaaacagagtttccaaaatgttgaatgaaaagaaaatgtttaaatctgcgagatgaatgcacacatcacaaagaattttatcagctagcttccttccagtttttatcctgggatatttgatttttcaccgttggcctaaatgagcttacagatgtccatttgcagaatggacaaaaacagtgtttccaaac

SEQ ID NO: 778369 - DNA, 447 bp, Homo sapiens
caaatatctgtagaaacaatgctaatgattggtttgctgttattaaacttgtgagtaaatctctgtttggagctctcagctccgaaggatgtgagacccttgatttcccacttcacccctctatatttctctgtgtgtctttaattcctctagcgctgctgggttagggtctccccaactgaggtggtctcagcaatgtttccttttacaccatagtcatcagtgtgctcccaaatatttcttcacagattctacaaaaacagagtttccaaaatgttgaatgaaaasaaaatgtttaaatctgcgagatgaatgcacacatcacaaagaattttatcagctagcttccttccagtttttatcctgggatatttgatttttcaccgttggcctaaatgagcttacagatgtccatttgcagaatggacaaaaacagtgtttccaaac

SEQ ID NO: 778370 - DNA, 422 bp, Homo sapiens
gtttgaattcagcagtttggaatcacagtttttgtagaacatgtgaagggatatttgggatctcattgatgccaatggtgaaaaaatgaatattccaacataaaaactagaaggaatgtatctgagaaaccactctgtgaggtrcgcattcatctcacagagttaaacctttcttttaattcagcagtttggaaactctgttatggtagaatctgagaagggatatttgggtagtattgaggactagggtggaaaaggaaatatcttcagttaaaatctagaaagaacctttcggagaaactgcttggtgatatgtgcattcatatcacagaattaaacatttctttggattctgtagtttggaaacagtgtttttgtccattccctgaatggatatttgggagcccattgaggccaatggt

SEQ ID NO: 778371 - DNA, 613 bp, Homo sapiens
atgaaaacacaaactgaaaagaaactgccagagagataggaagagaacacaaaaagagtggtattgtagaatgtaggtgtcttagtctattttgtgctgctgtaacagaataccacagactaggttatttagaaagaaaagagatttattttgctcactattgtagaggctgggaagtccragagtatagtgctagcacctggtgagggtcatcccaaagaggatggacggaaggcagaagcaagtgcatgaggcagagagaggaaattaggctgaactcattgttttatcagaaagccagtcccaagataactaactcactcctacaataatggcattaatccattcgtgaggttctggaagctgggaagcccaagatcaaggcaccagcagtttcagtgtctaacgagggcctgcttcctcatagacagccaccttctcactccactcttacatggcagaaggagtgaagggtgaagcctaaccatctcttaaaggtcccacctcttaatactgttacttttttatgtgtaagagatctgaatatattagtatgctgaggaaatagacccaaaggaaggaaagagattgaaggtagaaaacagggagaatt

SEQ ID NO: 778372 - DNA, 617 bp, Homo sapiens
ctgtaatcccagcactttggaaggccgaagcaggcggatcacttgaggtcgggagtttgataccagcctgaccaacatggagaaaacctgtctctactaaaaatacaaaattagccaggcatgctgacgcatgcctgtaatcccagctactcgggaggctgaggcaggagaatcacttgaacccaggaggtggaggttgcagtgaaccaatatcgcaccattgcactcgaatctgggtaacaaaagcgaaactccatcttaaaaaaaaaaaaccgggcacggtggctcacgtctgtaatcccagcacttcgggaggccgaggcaggcagatcaagaggtcagtagatcgagaccatcctggttaacacagtgaaaccccgtctctactaaaaatacaaaaaaattagctgggcgcggtggcgggcgcctgtagtcccagctactcgggaggctgagacaggagaatggcrtgaacctgggaggcggagcttgcagtgaggcgagatcatgccactgcactccatgcagcctgggtgacagagcgagactccgtctcaaaaaaaaaaaaaaactaattaattaattaattttaaaaaaaaggccaggcatggtggctc

SEQ ID NO: 778373 - DNA, 521 bp, Homo sapiens
atatatatacttggtaaaagtaaactcctgcaataaggtttacaataagcatatataaattcttagccagctcactgggaggtacctaatggttcatttttctttgtcagttttactagatacgcattgtcttagaggcaatgtaagtttggaattaggccaaacaaagtcaaatcctgattctgtgcatccattgaaggttaaccttataatatttacattttgagataaatgatttcatgctcttatttaggaaacttgacggtatgttacctcagggattgttccttgcctgtctttccccaaagaacttgagtttgaagtgattttcacttggcagtaaattgaaggttttcttcattgcttaccaccatgtgccttaytcctgctgctcttgatctccaagtgcccttactgctacagaaaggaaagctcttgaactaagagcttggcagccacttgatcaggatggccaaataatggcagtacaggttgagcatctgaaatgcttcaagatgggc

SEQ ID NO: 778374 - DNA, 572 bp, Homo sapiens
tgggaattaacgccataggaatcccaatggagggaaaactgacaaccattaaaacactcattccattgaaaggttgatgccaggagctatgggtggattttatttagtgcatatggttctgtttttaatgcaaaccctcatatgaaggtgaaagtgataaaaatggctcaaggaagggtccagaattacaaagtctggcagttagatgacaggacagcaggttcaaccacaaacttcagagttaaaaacaggttaccctgtttgtgtttatcaatacmtcctactatactacaaaatctaaatagtactaaaccttttagagttcatttctgccatgtcctgaagatgatttcttactcttcattcacctgccagtttcctgctaaggacactcatatcccttagccttgcctccttctaactcaggcaaactggtgccagataccatgtactgtcctaagaagtctttaagggtttcttattgccttcaaaagaaagaggtcatgatgaaatggaaagaacagatgctaggatccacacaagcatgaattcaaatcctagtggattactaa

SEQ ID NO: 778375 - DNA, 632 bp, Homo sapiens
tagtaattggtataataagcagatggaaaatcaataaggttcaagaacagtctggccaacctggtgaaaccccgtctctactaaaaatacaaaaattatctgggtgtggtggcacacgcctgtagttccagctactagggaggctgaggcacaagaatcgcttgaaccagggaggctgaggttgcagtgagcagagattgtaccagtgtactccagcctaggcgacagagtgagaccctgtctcaaaacaaacaaacaaacaaacaaaaattaataagaatacagaagacccgaacattactgtcaaccaacttaagaacactcaacccaaaactgcagaacacacatatttatcaagtgcatatgaaaactttacaagtaaaatttgtgtttcttaaatacaataacaacaaatataataattaatatatacttataagtatactaattactttaaaagcacakgaatcatgcaaaatatgtctttgaattaagctaaatgataaaattgaattaaattaaactaaaatgatagtggaaacatatttggaaaacccccaaagattgggaaattaaacaaggcacatccaaataactcaagtcaaagaagaagaaaataataataatataag

SEQ ID NO: 778376 - DNA, 578 bp, Homo sapiens
attctgaagtctttcttgaaatctttctttgtaatctttgactggtacccatttcattgatcagtcaaaagataatatgcattttaattttggactaataaatgtggggttggactaaggcaaaagagaaatgttcccatatactctatcagaatttgatctcaaggtaatacaaacatggacaccccagcaatggaaagatacattattatatttttaaataattagagtcctttttaaccatattttgaagmgttgatagttgtagatgtggggaaggggaccattgttccttctccaatcctaaacagcaaatacagaaaaaaattatgtatatgatatatgcaatttatatacatataattacatgtagataaatagtgaccaacacacaatatatcatttttatcatttctgtgacataattatattcatataaattttatatttatatataatatatatcatccatatctatctatataccatcaattatgaaaaataaacttttttataattcttctatcatggaccaacagtgaccactttctttttttaagttttctttcttacttaaa

SEQ ID NO: 778377 - DNA, 618 bp, Homo sapiens
gaagagttattgggcaccctcttttctcttcatttttcaaaggaaaaaagaacaaaagtgtttttatgaaaagtgagatgtgttttattttagctaaccaaggatggcagatttttataacaacactaccatctgctggaatttaagagtattgttgctaacattttggaagccttgggttgcatttttacaactattggcctaaagtggtttttattatatactttttaacagcactacgtgactatttccaaagggaagtttactggtaggtgcaatctccacctccttacaagtcacacaaacacttctacactgctgatgggaatgtaaactartacaaccattatggaaaacagtgtggagattccttaaagaactaaaaattaaattggacttcacctttctctggtgcctccttgattagcttaataatcaacattctgaattctttttctggcaattcagggatttcttcttggtttggatccattgctggtgagctagtgtgatttttggggggtgttaaagaatcttgttttgtcatattaccagatttgtttttctggtttcttctcatttgggtaggctatgtcagagggaaggtctggggctcaa

SEQ ID NO: 778378 - DNA, 603 bp, Homo sapiens
tcattttttattgtgtctatttaataattcttctctcttcttttttagtctggctagcagtctatctattttgttaatctcttcaaaaaatcagctcctggatccattgattttttgaagggtttttccgtccctatctccttcatttctgctmtgatcttagttatttcttgtcttctgctagcttttgaatttgtttgctcttgcttctctatttcttttaattgcgatgttagggtgtcgattttagatcttccccactttctcctgtgggcatttagtgctataacactgcttataacatttactgctaaacactgctttagctgtgtcccagagattctggtgtgttttgtctttgttctcattggtttcaaagaacttatttatagctgccttaatttcattatttacccagtagtcattcaggagcaggttgttcagttaccatgtagttgtacagttttgagtgagtttcttaatcctgagttctaatttgattgcactgtggtctgagagactgtttgttatgatttccgttctttttgtttttgttttgttgaaacgcagtctcactctgtcacccaggctggagtgcagtgg

SEQ ID NO: 778379 - DNA, 420 bp, Homo sapiens
tgcttacttttcactgcactgagcaaactcccacctcacctatatgaacttgtagaacagtctgtggtgttctcttgaggaattcttgctttctctaagcatatttcttgttgctcgcacatttcattaataatttgattaaaaattgggtgccttagttgaaagtaagcatggagctggcttgtgcctctaaggagatttgacctagccattgctgaatagcaatctacatcacattatggcaagcttaaccagtgtttttrgtaatatagacggtaataacttctttttggtaatatagatgtcaaggaaacagagggaaacctggttccccaaactcaggctgatgtacttagactgactgaccttttaaagtctgttgtacatcatagttttggaggatctaggtcccagcgaaaa

SEQ ID NO: 778380 - DNA, 624 bp, Homo sapiens
cctgcaaaaccctgaaaaagaggtggctcatatttttctgcactatggcttggccccaatattctctctctgatggggaaaaatggccacctgagggaggtataaattacaatactatcctgcagcttgaccttttccgtaacagggaaggcaaatggagtgaaataccttatgtccaagctttcttttcatgaaggggaatccacgactatgcaaagcttacaatttacatcccaccaggaggacctctcagcttacccccatatcctagctccccttcctattaatgataagcctyctctaatctcccctgtccaaaaggaaatgagcaaagaaatctccaaaggaccacaacccccccaccccgggctatcaattatgtccccttcaagctgtagggggaggggaatttggcccaacccgggcacatgtccccttctccctctctgatttaaaacagatcaaggcagacctggggaagcttacagatgatcctgataggtatatagatgtcctacagggtctagggcaaacctttgatcttacttggagagatgtcatgctattgttagatcaaaccctggcctttaatgaaaagaatgcagctttagctgcagcccaaga

SEQ ID NO: 778381 - DNA, 624 bp, Homo sapiens
cctgcaaaaccctgaaaaagaggtggctcatatttttctgcactatggcttggccccaatattctctctctgatggggaaaaatggccacctgagggaggtataaattacaatactatcctgcagcttgaccttttccgtaacagggaaggcaaatggagtgaaataccttatgtccaagctttcttttcatgaaggggaatccacgactatgcaaagcttacaatttacatcccaccaggaggacctctcagcttacccccatatcctagctccccttcctattaatgataagcctcctctaatctcccctgtccaaaaggaaatgagcaaagaaatctccaaaggaccacaacccccccmccccgggctatcaattatgtccccttcaagctgtagggggaggggaatttggcccaacccgggcacatgtccccttctccctctctgatttaaaacagatcaaggcagacctggggaagcttacagatgatcctgataggtatatagatgtcctacagggtctagggcaaacctttgatcttacttggagagatgtcatgctattgttagatcaaaccctggcctttaatgaaaagaatgcagctttagctgcagcccaaga

SEQ ID NO: 778382 - DNA, 624 bp, Homo sapiens
cctgcaaaaccctgaaaaagaggtggctcatatttttctgcactatggcttggccccaatattctctctctgatggggaaaaatggccacctgagggaggtataaattacaatactatcctgcagcttgaccttttccgtaacagggaaggcaaatggagtgaaataccttatgtccaagctttcttttcatgaaggggaatccacgactatgcaaagcttacaatttacatcccaccaggaggacctctcagcttacccccatatcctagctccccttcctattaatgataagcctcctctaatctcccctgtccaaaaggaaatgagcaaagaaatctccaaaggaccacaacccccccaccccgggctatcaattatgtccccttcaagctgtagggggagggraatttggcccaacccgggcacatgtccccttctccctctctgatttaaaacagatcaaggcagacctggggaagcttacagatgatcctgataggtatatagatgtcctacagggtctagggcaaacctttgatcttacttggagagatgtcatgctattgttagatcaaaccctggcctttaatgaaaagaatgcagctttagctgcagcccaaga

SEQ ID NO: 778383 - DNA, 634 bp, Homo sapiens
tacctatcattaatttttaaggttttcagacattatccattatttaaggaacagtaatatgcattcatctcaatataaacataaagaatttaatctctttcactggtaattttctgaagtaaagcatttaattttcttacatggcctcctcccctgacataatcaagagcatagtaatgcatgtctattggggcactctatatatagacmacacaaacacttaacagagtcaataaaattatcagccacttcattttaatatcaatgacttttttattgttgaacaatctccttaggctacaaatatctcaataaatccatttttggttgctgctgccactgttattgttgttttaattaatttgacagtagtttggggcaggcattgctactgttcatagacaatcagttcccctctccttcaaggtgcctggaaagattccctagaaggtaagcggtgaacagaagtggtgcatgtcattttcctgtagaggcattcaattgctaggacccaatttcctcttaacatttcacctgccccagcaattataggctccatagtcaaaaaactagaaaaagtacccccttcttcaagactgacattacatatgagcatactgaacacattcagaat

SEQ ID NO: 778384 - DNA, 634 bp, Homo sapiens
tacctatcattaatttttaaggttttcagacattatccattatttaaggaacagtaatatgcattcatctcaatataaacataaagaatttaatctctttcactggtaattttctgaagtaaagcatttaattttcttacatggcctcctcccctgacataatcaagagcatagtaatgcatgtctattggggcactctatatatagaccacacaaacacttaacagagtcaataaaattatcagccacttcattttaatrtcaatgacttttttattgttgaacaatctccttaggctacaaatatctcaataaatccatttttggttgctgctgccactgttattgttgttttaattaatttgacagtagtttggggcaggcattgctactgttcatagacaatcagttcccctctccttcaaggtgcctggaaagattccctagaaggtaagcggtgaacagaagtggtgcatgtcattttcctgtagaggcattcaattgctaggacccaatttcctcttaacatttcacctgccccagcaattataggctccatagtcaaaaaactagaaaaagtacccccttcttcaagactgacattacatatgagcatactgaacacattcagaat

SEQ ID NO: 778385 - DNA, 634 bp, Homo sapiens
tacctatcattaatttttaaggttttcagacattatccattatttaaggaacagtaatatgcattcatctcaatataaacataaagaatttaatctctttcactggtaattttctgaagtaaagcatttaattttcttacatggcctcctcccctgacataatcaagagcatagtaatgcatgtctattggggcactctatatatagaccacacaaacacttaacagagtcaataaaattatcagccacttcattttaatatcaatgacttttttattgttgaacaatctccttaggctacaaatatctcaataaatccatttttggttgctgctgccactgttattgttgttttaattaatttgacagtagtttgkggcaggcattgctactgttcatagacaatcagttcccctctccttcaaggtgcctggaaagattccctagaaggtaagcggtgaacagaagtggtgcatgtcattttcctgtagaggcattcaattgctaggacccaatttcctcttaacatttcacctgccccagcaattataggctccatagtcaaaaaactagaaaaagtacccccttcttcaagactgacattacatatgagcatactgaacacattcagaat

SEQ ID NO: 778386 - DNA, 634 bp, Homo sapiens
tacctatcattaatttttaaggttttcagacattatccattatttaaggaacagtaatatgcattcatctcaatataaacataaagaatttaatctctttcactggtaattttctgaagtaaagcatttaattttcttacatggcctcctcccctgacataatcaagagcatagtaatgcatgtctattggggcactctatatatagaccacacaaacacttaacagagtcaataaaattatcagccacttcattttaatatcaatgacttttttattgttgaacaatctccttaggctacaaatatctcaataaatccatttttggttgctgctgccactgttattgttgttttaattaatttgacagtagtttggggcaggcattgctactgttcatagacaatcagttcccctctccttcaaggtgcctggaaagattccctagaaggtaagcggtgaacagaagtggtgcatgtcattttcctgtagagrcattcaattgctaggacccaatttcctcttaacatttcacctgccccagcaattataggctccatagtcaaaaaactagaaaaagtacccccttcttcaagactgacattacatatgagcatactgaacacattcagaat

SEQ ID NO: 778387 - DNA, 578 bp, Homo sapiens
cctccagttcctggatcccagatggtaccactgtacccacctggggtctgagggaactcactgccctgaaggaaaggacagaagcctggttggcttcacaacctgctgattgtagacccccagcaaacataggcggtatccaggtagtggttacaccggtccttgggcaagacccagtgctgtgctggcttcaagtcacacacagtgcaggcctagtggtagtggccatagtggtacttgtgttaccccaaccccagckccaggtggctcagaacacacacagagatttcatttgggaaaaactaagggaaggtaacagaagtctctttctgataatccagagaattctggatcttgtcccagactatcaaggcaatacctctgtaagttggaagaaccacggtattactgtgcttgtgatgcactctaacacagctttggcttacatcacaacacacaggtccttttgcatacttggaaagccctcttatgaagaatgagtacaaagaataccagatggcaaaaattacaataaataattaactcttcaatgcccagacatgacaaatgtctaataa

SEQ ID NO: 778388 - DNA, 634 bp, Homo sapiens
atagaacttgcaacattaagcctcagtctcacccataacaaagcagatactaaaaatattaattaattcatttatttaataaatgttaattgaaaatctactgaatgccaggcactcttctagggataagaatgcaatgcttcctaaaagagacaaaatgtctactaccctcatggagtttgcattttaatgaggaaagaccagaaacaagcaaattaataactgtttgtcatgtaacagtgctattagtgggtacagaatgatgatggaaatggaaatgctgcagaattaaatgaaatttagaaatttctaaygaaagttaaattaggtaataatgaataatatgtatgaaaagtttctgggttcctggtacaataggcaaatcactatgccttaagtaaacctcatatcaacatatcaacatgagctaatactgtcatgttacagatactgcaactgaagttttgagtagctgtgtagtttgtcaagtaaatgtagctagttagaagtgaagctgacaaaggaattcaagtgtgagcatctgactcatagcaagcactcaattaacggcgttgatgaaatttgcaaatatttttaccctattgagctcttacgaaggttaaagttaacattt

SEQ ID NO: 778389 - DNA, 666 bp, Homo sapiens
gatatgagagcgattgctaagaaaactttatccaagcccatctgggaaaatagcttttcaagttcattacgaaaagaaaggcccagtaaagcttccataagaacaagcttagcttgtggaaagtgctgagaaaagctgatttattctcggtgtgcttccctatttttatgggttgcctcaacttttcttcagacaggaacgattggttccaatagtgtcacatgcagagagacactgtcagtgtaagtctccggggaggtgctatggaaggtgtggtatgcrtggggaggagcccgcctgactttctgaagaaggataattaatgtgtatatggacatgcagggagcctttatcttcagaacacatttcagaaatgaaaaagcaaacaaagcgggtgatgaggaaaatggatttgctgtaactaaggaacagacctgggtagagaagtaaagacgagaaactcagctcttcatcattagaatgctccagagtccagagcttaggagcggagatcactcctaagtgtttgggtctgcaaactaggacacctagtttatacctagtcccagaacaaagggtggaggaggtaggattgaaagccactatttggtggagcttctctgacccttacagtccacccagaaaaaaaggcagacacctccagcc

SEQ ID NO: 778390 - DNA, 618 bp, Homo sapiens
aatgggctttataatttgggtgcctgcgcagacttttattgctatgtctttattggctatctttgttgccaaggtagagttatatcctcccaaaatataatggcaggctattccactttgttgttgtttcttcctsaaagtattagactccctcaagacctcccacctctatcacttccaaaattaaggtgagtaattagagaaatattggttttatcgaatgactatcaaagaaaagagacactcctcctgttatgcaatacgttggtctagaaaatggagcatatttttacatttaagtatttttatggcaaatttaattatttgaaatacactttgaaatctcaatgacagcaaaaaatacagaacttcttttatgatgtaaagtcacatttattgatatagatgtatagatatagatattagattctcttagagtaccatacctacattcatggataattcgtagcatcaaatgctggtagtaagtcattgaccctcaaatgagagcaacatacaaaataaaacccaaatctagacgacgagttaagttcttctgaggcacataagcccatcagattaccttctaagttttccaagaaaaagcgataccagtaa

SEQ ID NO: 778391 - DNA, 633 bp, Homo sapiens
atctcaaaggattagtgagacctaaggctcatttacaaataaaagcttcatcctaacacctggatgatgaaaatatgcaaagaaggacctccatgagagagaagcagaaaataccatcaatactcatttcatatctgacaactaattacaattagaggaaaaagaggctaccaacacataattataggaaatgggtgatgaggtaatgagcaatggctaaattggagctgacggtctaaccatgaggatttctttagctgaaaagaaggaagcaggacctgatttggttctgtgcctggaattagcttcatttttcttcatagtctcttactttgcctcccttcccatatctccaccttatgcttgacaatagcctttcctttggcccttgctgagctgtttcttttggcagcaatgtctgtaactgctctctgaagaatagaggacacaggactggtcctgagacatgttgctacaggtgaccttctgtctgacttcgttacctamccccaccattctcagggcaaaagagaggagcacagcagtccccctccttttcagtgccttccagggaggactggttggctgtcctggccctgctgatggatttgctgcctcggatgttgcctgcgt

SEQ ID NO: 778392 - DNA, 619 bp, Homo sapiens
cccatctcccaaaaaaaaaaaaatacaaaaattagccagccattgtggtatgtgcccgtagtctcttgactgtaggcaactagaagtctttccccaggtacggggggcagtggtataggacagcttttaagggggtagaatgtgactcaggctttcgtggactgggtagtatttggataagcctggtgacagtctgcacactatagactagagcactctgctgtgacaggtatgcctgaatagaactcacgaagatcctgctctggcaatttagtcactgcctatccacggatagaaccctgactattcagtagtcacaatagacaaatgatagcttagcagattttggttattattactattttaaaatttaagtataggagattttgcatcaatcatatagaatcacatatggaatttcttagaatgggatcttagtrccttatcttgtatatgtcctgtataaaacgcacagctgatcctatgaagcctggcaagttttaaagggaaggagtatgcaagcagaaacccagagggctttagcagggtaaatgtagatggagaggcctagagaaaaacttttccttctttataattttcctgcttctattctgtttca

SEQ ID NO: 778393 - DNA, 618 bp, Homo sapiens
taattatccaggaaatctatgctgacaatctcacatgctgcatttccaattaattttcttttgtttgtttattgataggtctgatagggatggagaataactttgtagcatccttcatgtcattggatagtggtttgtccaagttcacrgatctaaaactagtagaatgggctttggagttagtcctcggtttgaaatctagttttatcagttttggctgcatattggacaaataatttagcctatatgtaccagtctcctcatccataaaatgggaataatagctaccttatagcaagtttgcgatcaatggttaactacttattattggtaattatctgtgattaatgtttattattagatgcaggtaaaattgtgcttctgtttggggattttattagtaataaccaactgaagggttgccagtaaaacctttccagtccttatgtccctccctcttggaaatgaatgagcaacaggaattgggtttgctatattccaagtgtgcagaactacaatttcacacttggttctttttaaacagctcctagggtgggaggtgaggggaacatggattaccttcccttggactggcttctgtcttagtcactggggaca

SEQ ID NO: 778394 - DNA, 618 bp, Homo sapiens
taattatccaggaaatctatgctgacaatctcacatgctgcatttccaattaattttcttttgtttgtttattgataggtctgatagggatggagaataactttgtagcatccttcatgtcattggatagtggtttgtccaagttcacggatctaaaactagtagaatgggctttggagttagtcctcggtttgaaatctagttttatcagttttggctgcatattggacaaataatttagcctatatgtaccagtctcctcatccataaaatgggaataatagctaccttatagcaagtttgcgatcaatggttaactacttattattggtaattatctgtgattaatgtttattattagatgcaggtaaaattgtgcttctgtttggggattttattagtaataaccaactgaagggttgccagtaaaacctttccagtccttatgtccctccctcttggaaatgaatgagcaacaggarttgggtttgctatattccaagtgtgcagaactacaatttcacacttggttctttttaaacagctcctagggtgggaggtgaggggaacatggattaccttcccttggactggcttctgtcttagtcactggggaca

SEQ ID NO: 778395 - DNA, 651 bp, Homo sapiens
cactgttataaaggaatacatgagaatggatcatttataaagaaaagaggtttaattggctcacagttctgtaggctgtacaggaagcatggcagcatctgcttctgaggaggcctcagggagcttttactcatgatggaaggcaaagcaggagcaggcatcttccacagcaggagcaggaccaagagagggggraggtgccacacactttgaaacaaccagatctcatgagaactctatcattatcatgagaacagcatcaaaaggatgatgctaaaccatttgtgcaggattcatccccataatctgatcacctcccatgaggccccacctccaacattgggattgcaagtgaacatgaaatttgggtaggaatacagatacaaataatatcacaattttatagttagtagagaaattcaagaaatgtcaactatgttaatgttacttaaatatcatctatttaccatcaaataattactatgtagtaaaaaaaaagtcagtccatttttcagtgtgtttttttgaagttatatatgaggccactttcttaaatatgatgccatgaaaaaaatttgtataaaccaagttattagaaaggcttgcccccaaattcttagcagctttataagcatttggtcactatagaaa

SEQ ID NO: 778396 - DNA, 623 bp, Homo sapiens
aaggaaaaagcaaaacagaaaaagaataatttaacagaaattaaaatttgcatccagtgaatgctatatctgataatatggggcagctatcattcttatacttccacttggacacggctaagtgcatcgtatgagcaagaagcagagcattttactaacaaatgtaagtcctacccaatagagttatcggtgtttttttcacttcactgtgcaagttctgtatacatttttgttaactasaagcagaagctgaaaatatcaaaggctggctattatgatattcatgaagaaaaaaaagttgggtggtaaaaatgctaatgtaagagactgttattcaattaaagtagcacatcataaagtgctaggatgtgagctaataaaatttcaaatcctttaaaagctgaaaccctgcaatacacaagcacatttctagtaggtacttttatttatttacattctagatttaaaacacttaatctcaatttcaagttttttcacttattatcttgtgactgtatcaagacacctaatcactttttgctggttccctaatctataactaaggacaatgatgtttctcctgccttgtttactagatggctataaggacctaataatcttat

SEQ ID NO: 778397 - DNA, 630 bp, Homo sapiens
agtaaatactagagcaatcacattgggcagaagactatcattctgaatcgaacctgttattaaacactaaatatatttaaaagtctcataaagtcaaatttttccatacattttactttgaaaataaagaaaataattccataactactaaaaactgggtttcttgctactttggaacttggacttctcacattctctccagttgctcagcaactgtacttgtaatggaaggatttttagtagatattggatctttccaagctttatttttctttcttataaaaggaaagctattgttaaaccaaatgatttcttcaaggataaaagaatctgaatggtcgcaactgtatcttctaacctgcctaattgaaatcacttttaaacagatataaaagcatgcagttagtgtcttatgtgatgagatctgaaaagaaaaaaaaaaaagaaactggggactaacataaawcttttttcaaaacctgtaaacagtacctggttgatagaattatttaaaggacactgtatgagagagatagccacgggaataaataaattataagatcacggatttttaatgaaacttagacttttgtcctgttttgttttgttattgaggggaagggctatcta

SEQ ID NO: 778398 - DNA, 630 bp, Homo sapiens
agtaaatactagagcaatcacattgggcagaagactatcattctgaatcgaacctgttattaaacactaaatatatttaaaagtctcataaagtcaaatttttccatacattttactttgaaaataaagaaaataattccataactactaaaaactgggtttcttgctactttggaacttggacttctcacattctctccagttgctcagcaactgtacttgtaatggaaggatttttagtagatattggatctttccaagctttatttttctttcttataaaaggaaagctattgttaaaccaaatgatttcttcaaggataaaagaatctgaatggtcgcaactgtatcttctaacctgcctaattgaaatcacttttaaacagatataaaagcatgcagttagtgtcttatgtgatgagatctgaaaagaaaaaaaaaaaagaaactggggactaacataaaacttttttcaaaacctgtaaacagtacytggttgatagaattatttaaaggacactgtatgagagagatagccacgggaataaataaattataagatcacggatttttaatgaaacttagacttttgtcctgttttgttttgttattgaggggaagggctatcta

SEQ ID NO: 778399 - DNA, 624 bp, Homo sapiens
ggtggtgtaaaaccaggactctgattgcaaagaacaaaggcttattccataacagtctcacgattgttctgcgggaaacctgcatccaattcatttttgcccaattccatactgccagacataattctccccatcgtttcagctagcattctttccttacctgcccaaggcatggctggggatctgtaaaaacatggccataaagagattcatgttagaaggctgggcgcggtrgctcatgcctgtaatcccagcactttgggaggccgaggtgggcggatcacctgaggtggggagctcgagaccagcctgaccaacatggagaaaccccatctctactaaaaatacgaaattagccgggcatggtggcacatgcctgtaatcccagctactggggaggctgaggcatgagaatcacttgaacctgagaggcggaggttgcggtgagccaagatcgcgccattgcactccagcctgggcaacaagagcaaaactccatctcaaaaaaaaaagagattcatgttagagtttggagaaagatttccttgtgttaccgccacagaactggaggtctggctcatagcagacggacaataaatatatcatgagtgaaagctgactgat

SEQ ID NO: 778400 - DNA, 530 bp, Homo sapiens
  misc_feature 476: n = A,T,C or G
ctccagtactgcttcttcgacgtcctctaccaccaactaaagctgaggctgacactggagttgcttgccttcacttgcttcaaagactcttatgttcaatagagtctgcctcactcagcactaaagtgtaccactattcaagtacaagttttcttgttttgcctggkaccttattgctctctgaccccacctgatctccccatacactggagtgcctttaactctctccaggagactcaagttgagctttgtctgcggcaccttctcttggcgctggacagcgggtgattttgctttagcttgggtgacagtgtgggagtagcgcaacatcagagacacagccttgagtttaaattaatgcagaatatttgagcaggaaccaacaggaaagaaaaatggaagcaggtagtcatatttcattctgttggggtacatttttcttctcatggggcttgcccttgagaacaaaacatatncaaagttaaatcaaagattattttttgtagtcatgctaggaatagaaaataatg

SEQ ID NO: 778401 - DNA, 534 bp, Homo sapiens
cactgaaactggattctggtgccttacctgggaccgtgttcacccattcccttctttttctgcttgaagaaaagtgttgctcatccttgaaggtaaacttaaactccatgtcctccataaagccacacagtgttaagggccactggttttggactcaggttgacttggattcttatactgtctctcttttggggggatgtcatttaattcttctgaaactcagagttttcatctgttagagaaagacaaaaatacctaccttggaggatgattgtgaggctcagggatgcgggaatatagtaggagctgaattaaaagcaattctgattatttccgtggtcactattgccgccccaccgcacttgattgcagcccctggtgctacaccagctacatktgctttatgtgacagcaggttgtggacaagactgccttgatctctagactgcaagctcgctgtgggccgggctcacgattcacccccggatctcccagccctggcaccaagccggcactgggggcgcgccatgcctg

SEQ ID NO: 778402 - DNA, 661 bp, Homo sapiens
ctgggatcctcacagagtaaaataacctcatttaaaaattctgtctcgccacttctattcaacatggtatgggggtcctagccggtttaataagtcatgcaaaaaacaaggcatacaccttggaacagaagaaataaaaccatttttttgtgaacartgtgatcatatatgtagaaaatcctaaggaattttcaaaaagctactagaactgataaatgaattcgacagtgtctcagaatataaggttaatatgtagaaatcaattgtattcctatatgccggcaaagaacaacccaaaaaataaaacttcagaaattccattgacagtagcataaaaatatttaggaataaatttaataaaagatattttagacttatacactgaaaactacaacatattgctgagagaaattaaagaatacctgaataaacagagagatatgccatgttattgcttggaggtctcaatgtttttaattaaagatggtaattatttttaaattaatctatatatttaatgaaatcacaataaaaatcccagtagacatttttgtaggaattgacaagctgatcctaaaattcatttgaaaagacaaataacctagattaaacagaacaattaaaaaaattttttttaattgtggtaaaatacacacgaaat

SEQ ID NO: 778403 - DNA, 661 bp, Homo sapiens
ctgggatcctcacagagtaaaataacctcatttaaaaattctgtctcgccacttctattcaacatggtatgggggtcctagccggtttaataagtcatgcaaaaaacaaggcatacaccttggaacagaagaaataaaaccatttttttgtgaacaatgtgatcatatatgtagaaaatcctaaggaattttcaaaaagctactagaactgataaatgaattcgacagtgtctcagaatataaggttaatatgtagaaatcaattgtattyctatatgccggcaaagaacaacccaaaaaataaaacttcagaaattccattgacagtagcataaaaatatttaggaataaatttaataaaagatattttagacttatacactgaaaactacaacatattgctgagagaaattaaagaatacctgaataaacagagagatatgccatgttattgcttggaggtctcaatgtttttaattaaagatggtaattatttttaaattaatctatatatttaatgaaatcacaataaaaatcccagtagacatttttgtaggaattgacaagctgatcctaaaattcatttgaaaagacaaataacctagattaaacagaacaattaaaaaaattttttttaattgtggtaaaatacacacgaaat

SEQ ID NO: 778404 - DNA, 618 bp, Homo sapiens
ctattattcagtgataaaaataagtgagctattaagtcacaaaaagatatgatggaacttttgatgaatattgctatttgaataaagccagtcagaaaaggctacatattgtatgatcccaccatatgacattctggaaaaggcaaagctatagagacagtgaaaagatctgtggtggccaaggatttggagggggcaaggatgaataagcagagcacagaggattgttagggcagcgagactattctgcaccaaactgtaatgacggatacagtgtgcagttttcaaactcatagcgctgacaacatcaagagtgagctcttttttttttattattattattatactttaagttttagggtacatgtgcacaacgtgcagatttgttacatgtgtatacatgtgccatgttggtgtgctgcgcccattaactcgtcatttaacattaggtatatctcctaatgctctccctcccccsaccccacaacaggccctggtgtgtgatgttccccttcctgtgtccgtgtgttctcattgttcaattcccacctatgagtgagaacaagaggtgtaaactagggactttagttaataatgatgtatcaatatagttcatca

SEQ ID NO: 778405 - DNA, 621 bp, Homo sapiens
taggcattgggtaaacattcccattccaaaaggaaacaattgaccaaaaaaaaaaaaaaaaaaaaaaaaaaaaaagggtggggggaactgcaggcccctcacaagcttaaacccagcaggggagtcactaaatcttaaagctccaaaataatctcctttgactccatgtcccacatccagggtgcactggtgcaaaggatgggctcccaaggccttgggcagctctgcccctgtagcttcacagggtgcagcccctgaggctgctctcaaaggctggagttgagtttctgaagctttcccaggcacaggatgcaagctgctggtggatctatcattctcagatctgaaggacagtgtccctcttcccycagctccaccaggcagtgccccagtggcaactctgtgtaggggcctccaaccccacatttcccctctgcactgccttagtagacgttctctgtgagggctctgcccctgcagcaggtttctacctggatacctaggcctagtatcccctgaaactaggcagaagccacccagaatccaccactctcgcattctgtgcacctgcaggcttaacaccacgtggaagccaccaaggtttaaggcttgcattctcca

SEQ ID NO: 778406 - DNA, 621 bp, Homo sapiens
taggcattgggtaaacattcccattccaaaaggaaacaattgaccaaaaaaaaaaaaaaaaaaaaaaaaaaaaaagggtggggggaactgcaggcccctcacaagcttaaacccagcaggggagtcactaaatcttaaagctccaaaataatctcctttgactccatgtcccacatccagggtgcactggtgcaaaggatgggctcccaaggccttgggcagctctgcccctgtagcttcacagggtgcagcccctgaggctgctctcaaaggctggagttgagtttctgaagctttcccaggcacaggatgcaagctgctggtggatctatcattctcagatctgaaggacagtgtccctcttcccccagctccaccaggcagtgccccagtggcaactctgtgtaggggcctccaaccccacatttcccctctgcactgccttagtagaygttctctgtgagggctctgcccctgcagcaggtttctacctggatacctaggcctagtatcccctgaaactaggcagaagccacccagaatccaccactctcgcattctgtgcacctgcaggcttaacaccacgtggaagccaccaaggtttaaggcttgcattctcca

SEQ ID NO: 778407 - DNA, 590 bp, Homo sapiens
ctaattctcaatattttttgtctcagtgaaaatgattctgtttctcacttgctaacaggtttcatgatcatgtaaatgaaaaatacaataattataaagagaactgtggaaactgtattcaggtctgttttagcatttgaaacagtcaaaatacaaaaatgagtaatgtggattaaaggagctagctttacatgtcttaggaggtaatttgcaaatcagaaatcttatttcygttttataggcaggcagtgggcatgcacgccacgcacaacacaggaatatgtttgcttaatgacttaccagatctagcaccagttctggtttatgagcatggccctgactgttgccatgtagatgatggattgtaataaatgtgttcaaggacgttagatcacatctgcaaagagattcagagaatatctaccatacagcgtggaagaatgttgcaaacatttcttattaagaaaaggctatttttttgtgtgtggaggtctcacttcatctttctgtcctttattctttaactatgaaaactatacagtaaattcttttgtcattaaatcaactttcaaatctactaaaatatatct

SEQ ID NO: 778408 - DNA, 637 bp, Homo sapiens
aagctgagaatcaaataaaaaactcaattcctttaaaaacagctgcagaaaaaacaaaacaaaacaaaaaacaacctaggaatatacttgacaatggaagtgaaggatctgtaaaaggagaagtacaaaacactgctgaatgaaattataaatgacacaaacaaatggaaatacatcccacactcatggattggaagaatcattcttgtggaaggtatactccccaaagcaatctatagatacaatgtacttcctatcaaaataacaacatcacttttcacagaactagaaaaacaattctaaaatccatatgggaccaaaaaggagcccacatagccaaaayaattctaagcaaaaagaacaaacctggaggcacactaccttactggacttcaagttatactacaaggcaatagttattaaaacagtttggtactgtcataaaagtagtcacatagaccagtaaaacagaacagaaaacttggaagtaaagacaaatacaaccaattggtcttcgatcaagcacacaaaaatgtaaactggggaaggacaccccatttaataaatgatgctagcaaaactggctagccacatgtagaagaatgaaactggatcccttaagcaaaaattaactcaa

SEQ ID NO: 778409 - DNA, 518 bp, Homo sapiens
ctgaaggttgcatgttacttgtcttgcaactatatgtcttggggatgtcaaaagcttaagaccctgaatgattgtgtggaactgagctccttatatcaacccatgtgaaacaaagggtgaaaaagaattttttatatgctaagtcwctgagaacctggagttgtatagtaccatagtacaaacctactaggcctaatacaattttactaaaattaaaaataaatttccaaaataaaacaaatcatacaagcccgtttttcttactggggcaaaacaaaactggtaattaacagaaatgaagcaaaaattttaaatagcagcattttataaagtgtaccctggatttatgaaggaattaaattaaatatgcagattaatcttgaatggaaacaataagtgataacctgttttagctacaaaatagccatcagcaaagcaaaaggatttaaatgaatttatcgaaaataaatataagagaaaacaatccatttaactataaaaaattgaaaaatatgtat

SEQ ID NO: 778410 - DNA, 518 bp, Homo sapiens
ctgaaggttgcatgttacttgtcttgcaactatatgtcttggggatgtcaaaagcttaagaccctgaatgattgtgtggaactgagctccttatatcaacccatgtgaaacaaagggtgaaaaagaattttttatatgctaagtctctgagaacctggagttgtatagtaccatagyacaaacctactaggcctaatacaattttactaaaattaaaaataaatttccaaaataaaacaaatcatacaagcccgtttttcttactggggcaaaacaaaactggtaattaacagaaatgaagcaaaaattttaaatagcagcattttataaagtgtaccctggatttatgaaggaattaaattaaatatgcagattaatcttgaatggaaacaataagtgataacctgttttagctacaaaatagccatcagcaaagcaaaaggatttaaatgaatttatcgaaaataaatataagagaaaacaatccatttaactataaaaaattgaaaaatatgtat

SEQ ID NO: 778411 - DNA, 652 bp, Homo sapiens
atttgcaagatttctctagcgtatattcctagaagtagaattttgagactgcaagcaatgtgctaattcaacttcgctaattggtgccatattgtcttctaaagtggttgtgtcatttaaaactcccacttgtcaggtagtagagctccccttgtttcccattttcagcaacacttggtattgttggctcgttgatttttgccaaacgactgagtgtgaaatggtaatctctttgagattttaatttgcatttttctgacaacaaatgaggttgagcatcttttaatttttttatgggcatttatatttcctttgaaatgactgttgatgtcttttgtatatrtttttttcaattggatgttttgtctaaatttctgttgggtcattttgaggacatttaagttcttaaaatcatctggaattgatatttatgtgtagtgtgaaataggaatccaacttcatgttgtttatattgaaaaccaattgtcccagtacaattttttggatagtacatcctttcttcacttacataccatgccagctgtgtcaggtttccatctatgtgggttttcttctagagtcactgttcttgtacaatagttgatgtatccctatgacatatcacacaatcaccatgattataacttcataa

SEQ ID NO: 778412 - DNA, 589 bp, Homo sapiens
ccattggtcgtcctctttacagaaacactaagaaaagttgcagcatcctctcttgaacccaaagggatctaaggcagtcaactttaattgtacaaaaagcaaactgaggacaagaggggtacatggtttatctgcagttacacagatgacatgcaggtgagaatcctggctctttccaatggcaaatgtacttgagcaactatgactctgactcttaccaaacattcacccatgccttgccaattctcaatgcaggaatggctgcctaagaggccaaatattgagctagggggagatgatgatactggtggtgatactatcaatgaagaaaatggtaactaacactgaatcccaactacgattggttctaaattactttatataaacagaaagtttatgtaatgtggtcaaggtcacacagcctggatagaatcccttcactgtattcaagaaygacatacacacaaaaagtccactaatccatagacgtatggatttggagttcttccattcacctggaactagaactacttgcttgacatgaccgattaaaaaaaattagacacgtatagaaaaatatattcggtta

SEQ ID NO: 778413 - DNA, 528 bp, Homo sapiens
ctctgacactgtgtgtcagtgtcaatattttaagtggatcccaagaaagtcttaagaggatgtcttactgcaccaatagctttcacttcattactgccctgcagttattttacattatttaatcccaaatcccatcttttggattctaccttcctcttgcattttaaatctttaatgggagcctctggcggtccatgggtacaatgattagatacctgcagagagaaactgaaaaattaatcgtggtttccattttatatttttgtattacactaaaaattacttacttgtagagctaacttctacactcctgcaatatgttccttaacattgcaaatgctgagaatgatttcagataaagcatgtccaaactgagccagtraacagccttaagttattctttgagatttgtatgctgggttttcatccaaatttcatttcaaataattttaattaagacgcatttattgatagaggtttgttacatgtggcctaaaaccagggcaagagtaccccaggctaatcata

SEQ ID NO: 778414 - DNA, 649 bp, Homo sapiens
tcaacttcaaactataccgcaaggctatagtaactaaaacaacatgatactagtataaaaacaacacatagaccaatggaacaggttagaggacccagaataaagctacacacctgcacacctacaaccatctgatccatgacaaagccaagaataacaactatygagggaaggactccctattcaataaatggtgctggaataactggctagccatatgcagaagttgaaactggacccctacctttcaccatatacaaaatgaactcaagatggattaaatacttaactgtaaaacctatatctataaaaatcctagaagaaaacctagaaaatagcattctggacatcagccctgccaaaaattttgtaacaaagacatcaaaaacaattgcaacaaaaacatagataagtgggaactaatcaaactaaagaacttctgcacagcaaaagaaactatcaacaaagtaaacaaacaacctgcaaaatgggagaaaatatttgcaaattatgcacctgacaaaggtctaatatccagaacctataaggaacttgaacaaatatgggagcagaaaccaaacaatgccattaaaaaatgggcaaaggacataacagacacttctaaaaagaaggcatacatgtagccaac

SEQ ID NO: 778415 - DNA, 637 bp, Homo sapiens
aaaataaggaacagtgaaagatggttacaaaatttctgttttagaatctgaaatgtcttgtatacaattctgcaccccccaaaaaaacttcattactctggtttggattagggagtggattttgatccacaaagtaaaatgtaaacaaaatattttcttggctgattgagattgctgttcgtaagtaagacacataagatatgctattaatagcaacattagagatattatatagctgatattttcaacatatcaracaagagtattgaaaacttttcaattgtattgaatttgtaaaattacacaaattacgtctagctttgcccccttaaggttttatggaagtcttctacaattttaatcttatattttatatcacattaattcatttgaaattgaccatgctttaaacatgattataggcaatgggaatatatatgctattaagatcacatactcaaaatttaaaatgtattaagccatttactgagcattgcgttgcataaagggaaaaagggcatgctcaccatctcacatgctttgcaacccccaaaccctagtttctcaacaggcaaaaattataggatttcatttatatatatagaatccttgacccattgcaaaacttgcatgtggt

SEQ ID NO: 778416 - DNA, 637 bp, Homo sapiens
aaaataaggaacagtgaaagatggttacaaaatttctgttttagaatctgaaatgtcttgtatacaattctgcaccccccaaaaaaacttcattactctggtttggattagggagtggattttgatccacaaagtaaaatgtaaacaaaatattttcttggctgattgagattgctgttcgtaagtaagacacataagatatgctattaatagcaacattagagatattatatagctgatattttcaacatatcaaacaagagtattgaaaacttttcaattgtattgaatttgtaaaattacacaaattacgtctagctttgcccccttaaggttttatggaagtcttctacaattttaatcttatattttatatcacattaattcatttgaaattgaccatgctttaaacatgattataggcaatgggaatatatatgctattaagatcacatactcaaaatttaaaatgtattaagccatttactgagcattgcrttgcataaagggaaaaagggcatgctcaccatctcacatgctttgcaacccccaaaccctagtttctcaacaggcaaaaattataggatttcatttatatatatagaatccttgacccattgcaaaacttgcatgtggt

SEQ ID NO: 778417 - DNA, 605 bp, Homo sapiens
aaaagctccaaatgtgattacagatctgctgatatctccctataggtaatcactccatgcttcatatattttgaagctcaattaggtgaatatacagattttatgccctccttccaaaatgccccttagtcatcatatctcaatttttaaatgttagtatttttgtctaacgctttttggtcttatattaatatagatgctacagaattaagtttaatgcttttatttttrtcatttcatattcattttatattttatctttccttattttaaattatatatcatataaataccatatagttttattttttatcccaactgacaatctctgctattaaatggagtgtttaatttatttacatttaatatcattatttatatagtgaagtttaagtctaccatttactatttgctttccagttgccacctctttattttttctttttcttctatccctccatttataccttcttttgggtaagctcattagctttcacatgctaatttaaattcctctactgctagctttttagaatctctttaactattcaaataggtgttctagggcagtatttctcaatattgtcactgttgccatttaagcc

SEQ ID NO: 778418 - DNA, 627 bp, Homo sapiens
gttttctgcctatggctagacagttttcccagcaccatttattaaatagggaatccttcccacatttcttgtttttgtcaggtttgccgaagatcaggtggttgtagatttgtgatgttatttctgaggtctctgttctgttccattgctctatatgtctgttttggaagcagtaccatactgttttgtttactgtagccttgtagtatagttwgaagtcaggtagcatgatgactccagctttgttctttttgcttaggattgtcttggctatatggggtcttctttaattccatatgaaatttaaagtagttttttttctaattctgtgaagaatgtcaatggtagtttgatgggaatagcattgaatctataaattactctgggcaatatggccattttcacgatattgattcttcctatccatgaggatgggatgtttttccactcatttgtgtcctatttccttgagcagtggtttgtagttctccttgaagaggtccttcacatcccttgtaaactgtatttctaggtattttattctctttgtagcaattgtgaatgggagttcattcataatttggctctctgagtgtctgtccttggtgtaaaggaatccttgtgatt

SEQ ID NO: 778419 - DNA, 584 bp, Homo sapiens
tacagccaaaccatatcaaattatattaacataaataaaattaaagaaattgtattagaaacaaaggtaataaacactcaaaacccatcacttcctaattattttattgcacttgttgatttatttttgcccccttctcaccataaagccagttgttaacatttaccaggacaccactgtgtttggctagctaattctattttattagttagatacattttttttcttggatcccctagtatattgtaagcgaatcacctctaaatccaataggccaaaacacacattacaaataataaacaagtaaacatttgatatactaatgtgttgagtgcaaaagataaaaacatattatggtaagagggatagrgtgcattgggtagggttgtgagtcacttttgaatgcaaggtgttaagggaagcatagatacctgaagaagataagaacacaatccataaatatgggaggaatagtgaattacaggattagaaattacaaaaggctcgagaaaggagggttccagtgatatctaggatcaggaagactaaccaagtttgtgataaagaaatgagaaaagttggtg

SEQ ID NO: 778420 - DNA, 416 bp, Homo sapiens
taactgtgtcatgaatcaatactttcaatgaatataattatatataccagggttttttaaaaagtaacagcaatgatataattattaaattcagttcattattcatttctataaatatgtttccttattcactaactacatgataaaaatttttaaactaactkatagaaatttataacattttgtttggaatgcaaatctgagaattattaactcgaggtaaatgttacttaataaagacctttgatgaaagataatgacaataaatatatactaatatcattaaagaacatttattttgtgatgtaaagtttatacaactcctatacatatactgtctcacataaatctattctaaaatgttattacttatagatgaagaaaaatctttaaggtgttacaaaaaagtcaaaagt

SEQ ID NO: 778421 - DNA, 607 bp, Homo sapiens
tatgtatgcgtgtgtgtgtgtgtgtgtttgtgcgtgtgtggtgtgatggaatggtctgcggacttaaggcaattgaggagctagacatttaagagtctatttcttgaccacttctcacagaaattgcaagggccatgctgttggtattgagtggtcawtatgaaagcagcacaaaataactgctaggatgagggttgatgaaaacaattctttagtatttactacttgagtccctttcctccaaatctcatgggtggtggattagaactatgaaacatacctctttatgatattctttatttttctctaaaagtttaaaggtgatctcctgactgacagagttgcctttgagagtggcagagagaggaacatacaaagtcattctgtggagtcttggacctatttcttgccctcagttaggatgcggaccaaggccagatctttgacctattacattgtacattatcatagaactggcaccccagaccaatatgactagacacttgaagcttataaatactttacaaaaaaagaaaactttaaatatatggctatttaaaataaatacaacaaatataattttaaaaggggagatattggcaatatg

SEQ ID NO: 778422 - DNA, 616 bp, Homo sapiens
aatttaaaaccataccattatattatcacaccctcaaaatgaaatcctgaggtgtaaatcaaataaagtatgtgcaagatgaatacaaaacacactacaaaactctgataaaataagttataaagctacataaatggagatatactacattttcattgatagaaagattttcaatattgtgatgacatcagtttttcccaaaatgatctgtagattcagtgtaatcccaatcaaaattgcagcaagttattttgtggattcaaaaaaattgattctaaagtttttatattttattttttattttaaataagaagccaaagacctagaatagctaacaagatattccagaataacaaacttgtagtactgtactacctaacttcaagtcttactatacagctacattaatcaagacaatgtggtactggcaaaaggataaaaawaccaatcaatgaacagaatagagagcccagaaagagacccacataaatatagtcaaccgatccgtgacaaaagaacaaaggcaatgtaatgaagaaaagacagtttaccatctgtacaggaacaactgaatatttacatgtgaaaaagaaataatcacaagttttgcatcctt

SEQ ID NO: 778423 - DNA, 623 bp, Homo sapiens
ctggacccatgtttgtatgctctttctgaaagtacaagggaggtaatacccaagggataatccctcatccaataggcaatgaaggccaggggataaatgccaagctggctattcatctgcaggtgggcagtgctggaagctcttctacctgctcctcaggaagcctcaagaatggaacgaagtccctattattcacaggaagcacattgatgacaactttttatctgacttttcttttacttccttgttctattcactcattcctggttcttgaggtcacttcccaaattaacctccagtactcaagtccttttctcagactctatagggagccacagattaaaacatttcgtggtgtagaaaattggcaaaatatgtattactaaaaaaaaaatgcagcttcctagtgaactttttttttcaaaagatggtgtgcatgaaggcagaagcaatataaggatatataaatattagtagccatttrtttaaggattaataaatttgaattaaaaatcatggatttcatcaaaaggaacaagatacaaatttaatagattgcaaaatttgactcttattcttacctaaaaggaatctgagcaaataactggtctcaaagtaatagt

SEQ ID NO: 778424 - DNA, 600 bp, Homo sapiens
cagagaggtaataagggagaaaatcttcattaaagacatagtgcatatacacgtatatttattgcagcactattcacaatagcaaagacttgaactaacccgaaatgtccatcatgatagactggataaagaaatgtggacatatacagcatgaaaactatgcagcctaaaaaagatgagctcatgtcctttgcagggacatggatgaagctggaaaccatcattctcagcaaactatcacaaagacagaaaaccaaacactgcatgttctcactcataggtgggaactgaacaatgaaaacacatggacacagggagaggaacatcacacactggggcctgttagagggtggagggctaggggagggagagcattaggagaaataactaatgtaaatgatgagttgatgggtrcagcaaaccaatatggcacatgtatacctatgtgtcaaacttgcatgttgtgcgcatgtaccctagaacttaagtataataaaaaaataaaataaataaaataaaatagtacaaatactctgaaaaaaaaggcatagcacatatcttgacatttaccctgagtgaattggtaagccactaaatgtt

SEQ ID NO: 778425 - DNA, 641 bp, Homo sapiens
tgaatgatatccacatttctcaatatttcaaacattagctggtgcatgaaatgaactttgttttttgttttgttttgttttgttgagacagactgttactctgtcactcaggctggagtgcggtggtgcaatcacggctcactgcaccgttgacctccagtgcttaagtgatcctcctatctcagcctcrtgagtagctggaaccacagatgtgcatcactatacctagtaatatttttttcattttttgtagagatgggggtctcactctgttgcctgggttggtctcaaacttttggactcaagcaattctccagcctcggcctcccaaagtgttgggattacagatgtgatctgtaattccagccgtatttttaaaatttaaatatagtattcagtttaatatcttttacaggaaagaagcaacttagtacttcaacccacagaatcaaattatagatgttattgacatgaaggaagacaaagtcggataaaaagttaattgatttaaataaaaatattaggcaaataatactatggatagtttacatatatggtaaaaaaaattatgaagatgctcactaatgactgaagaaagggaagctttcaagcaagatgatttctaaatgcctctgtaactt

SEQ ID NO: 778426 - DNA, 610 bp, Homo sapiens
ctgtatttatttagattgttaatttctttaattattgttttatatttttcagcgtaggaatattgtacatatttcctaaggtttataatgaagtattccatgttttggggtgcttttacaaatggtgatttaaaaatatgcaatttcaagtattcattgctactgtatagataagattgatctttgtatattgcccatgtgtgctgtaactttgctaaaattattyattctagtagctttttttttattcggggggaggtttaatgaaaaaaattatgttttcaatgtagtgcatctttatatatatatatatatatatatatatatatatatatataaaatggaatacaattcagccataaaaaagaatggaatcatgtcttttgcagcaacatggatagaactaggggtcgttatcctaaatgaaataaattagaaatagaaagccaaatactgcatgtggtcacttataaattggagctaaacagtggaaacatatggacatacagaatgaaataaaggtgggaggatgatgagggttgaaaaaatacctattggatacagtccagtactcactcttcggtttatgggtgcactaaaagcccaaatt

SEQ ID NO: 778427 - DNA, 613 bp, Homo sapiens
aattggattaaaaatcaataacaaaatctgcaaatattttgaaattaaaaaacaactcttttaactgactcatgggtcaaaggagaaatcacaaaggaaatttaaatttcttcaaatagaatggtaattgaaacccaacacatctacatttgcagactcaaggcaaagcccagcttagagggaaatttctagctataaagttgacaaattcctgctgagattgacagattaagcaaaagagaagtggtataagagaaaaaaactaaaaaattacgaatgtcagggatgaaagaggggatagctccatagatsctacacatatccaaggataataaggaactactgtgaacaactttttgtcactgacttttacaatttagatgaaatgggcagattctttgaaaacacaggtaacttaccaaaattggcccaagatgaaacagaaagtctaaataacccttaagtctgtcaaatagctttaagttattatttaaaaatgtctccacgctaaagatttgccttttcaacacatggtgctagaacaggtggacgtctgtatgtcaaaaattcaatcttcacccttacccgtctcccgcatatacaaaaactgact

SEQ ID NO: 778428 - DNA, 623 bp, Homo sapiens
cattttgggtaggggttactgttctattttgatttttatttttagaaaataatccctatgttttgttatttaaaaagaaaaacaggacaatgaaaataattggaataaagattgcagcagaaattctagtgaccctggccactagattagagagatccgagtgaccctagtcactagattagagagatccgagtgaccctggtcatagattagagagagccgagctctgccagattccaatctcccaggcaaactctttgtgaagtggggatgaaggcattaggtgaaagaaggaccacagggaaaaatacacaaacacttgtccctgctgtgggctcgcaattgctaccgaggtcagggcagctttgggcctgggctgtggcaycgtctccacttgctgattttcctggcacaagtctgaagctgctggaagccccgagccacttgccctgagttacgaacctcagagagtgacacctgtactccccttctcccaacccccaagtcccaggtcgagccccctttggctgtcatctggtgcacagccatggcctcgggccctcaggaaactttttagcaggaacaaagatgattacagaaatgttctacactcgctgagcttt

SEQ ID NO: 778429 - DNA, 644 bp, Homo sapiens
acccccctaggtaaaaatcatttaaaaacaaaaaaagactgcggctttgatgttgttactttgggtttgaatttaagccctgaccccttgctggttctatgtcagtgagcaagtcacttacactcttaaaactttatttttgtcttctgtaactcaggatagcaatggccagtttatgggtggctttgggattgtgagataatttttgtaaacatacattgctcaataaatggcagcctttattaccacctctctggccccactgttaaaatagggagatatagatcctgacctggacacatagatctatgccaaactaattttgttcatttctactccttaacatgtgccatgtggatagcatacagtagatamactgtcaactctgcaattaagttatgaattgaatatgcattctggaaatcaattcatttatagtgtttttgataaagtatgtttttaaattatagttttaatggtttgatttggtttgtctcgacaactctcagcagagcttatttccacaccttcttctgagtgcatatctccccaccactcctcacctgtcaagcactgcatcacggggaactcagaatcaggaactttggatctgacagccacaggagcattggcgtcgaagatca

SEQ ID NO: 778430 - DNA, 606 bp, Homo sapiens
acctgcctcagcctcccaaactgctgggattatagattttaatagtatatttcacaacagtgtgggcaatctgtgtggtagttctgctgaaaaatgacttaacattgaggtttgagttctgtaaaacacaaattagactgcttctctattacttcagtgtgactaaaattcaatgggaaatgctcacttccaaaagatgtgtgcacatatgcatctacaggtgtctcaactttcacacagacgttatttgtttacagctaatacacatggccacagataattttcttaacccaggtagtcacgtggcctctgwgggtattctagaaagaatctaccatttctgcaaaagaatttgaaagagataacttcacatctaacattttccccgtgtttgatctcattgagttggggattcactgggcagcctctgaagggaagactgaataccactgccatgggaaagcaggcctgcattcccccaaaattcttcagcctttatatttgttctggctttgctcccgcctttggatgtgccacgtatacaaaatgtggctgtttcctgcatagcagaatgaggttccagcacttcagcagccacggtcctga

SEQ ID NO: 778431 - DNA, 627 bp, Homo sapiens
atggctgctgtaggtcctggaggcattgatataaggatggagtctcccagggtccttcccagcagatggtgcctagcctcaggggaaccaaggcctgctcagctgtaccaatacagtggcacttgcctcaggaggccatgtgtttcccttgcccctctgctagacagtgagcttccttaacaggaggcagatatcaggatctctacatcccacttcccaaactgaagcagatctgaataatgatcatatgatcgtggaataaaggaaacccragctgtgctactggtgagctgaataaccttgaggaagttcccttgagtccctatgccttactctccccctcagtaaatggagaaaatgccatttctctccaggtcttagatgatgagtggaaatgacgtatgcaacatgaactgctgttctatgcccagggctctgagggagctgccgaaagccacagctgcccttggcacagtggcaggatggaagggttgggagctgctgtcctccctgcaattgtcagccaagtcctctgcagcaccactgggtacacaccctgttccttggcctagctggcggggtcattctgaagtgtgttttgcactgatccagggaattaagtacaac

SEQ ID NO: 778432 - DNA, 627 bp, Homo sapiens
atggctgctgtaggtcctggaggcattgatataaggatggagtctcccagggtccttcccagcagatggtgcctagcctcaggggaaccaaggcctgctcagctgtaccaatacagtggcacttgcctcaggaggccatgtgtttcccttgcccctctgctagacagtgagcttccttaacaggaggcagatatcaggatctctacatcccacttcccaaactgaagcagatctgaataatgatcatatgatcgtggaataaaggaaacccaagctgtgctactggtgagctgaataaccttgaggaagttcccttgagtccctatgccttactctccccctcagtaaatggagaaaatgccatttctctccaggtcttagatgatgagtggaaatgacgtatgcaacatgaactgctgttctatgcccagggctctgagggagctgcmgaaagccacagctgcccttggcacagtggcaggatggaagggttgggagctgctgtcctccctgcaattgtcagccaagtcctctgcagcaccactgggtacacaccctgttccttggcctagctggcggggtcattctgaagtgtgttttgcactgatccagggaattaagtacaac

SEQ ID NO: 778433 - DNA, 633 bp, Homo sapiens
accagttgacattctcccaagaaagagaatgtgaccatttgaagactggaaagttgacttcactcagatgcctagaaaagctggaaattataaattcctgttagtatttgtagctaacttttccagatgggttgaagcttatccaaccagatccagaaaaaaagccactgaagtggccaaagctctgttaaagaaaataatccctcattttgggcccccctgctctatacagagtgataatgaatcttcttttgtttctgagattatataaaaagtaagtgaaacattacagattgattggaagctaacactcattatgaagaccacaatcagcagggaaaacagaaaagatgaatcacatgcaaaaaaagaccttggcaaaactctgccaagaaacacatttaaagtgggatacctcagatcagagtagcaccctgaaatgggcttaggttgagtccttttgaagttgtatatgggatatctttccaaacttccccrccaggaatcccacccttagatttaagaaatgagtaaaaaattaaacaatatatacaacatttaggacaagtattaacaattatacatcactttgctctttccaggcaggatacatttgcctggaatgtatttccc

SEQ ID NO: 778434 - DNA, 573 bp, Homo sapiens
aaaaattccttctggccagaaagagaaaattttaactacatttgtagttgttgttagtgtctcatcagaaaattagttggctcaagtttgagggctgaaactcctgcttctatagaaacctaaaatctcgtttgaaaaaccsattcagaaaagcagtatagtagattgtttttatgttaaactactaatgctaatgtttatctttattttatactcttaatagtgcaaattatttgaatgtccagtgtttaagggcaggacattattcaaggttcattgtattgtatttcaagctttggagaggccgtgcatagtctcacaggtctgtagacacgacagtttgcaggcatctggcaattcactgacttaaacaccacttccaatataggaatgacttctacaatactttcatcctttttctataagaaaacttacagtgacaattcatcaaaatacaacatatatttgttacatttttatctaacatcgatagcaaacttctttataatagagttaactaaaaacctaaatgatgagagaccattagtacattttgttcaaaggaggaaggag

SEQ ID NO: 778435 - DNA, 573 bp, Homo sapiens
aaaaattccttctggccagaaagagaaaattttaactacatttgtagttgttgttagtgtctcatcagaaaattagttggctcaagtttgagggctgaaactcctgcttctatagaaacctaaaatctcgtttgaaaaacccattcagaaaagcagtatagtagattgtttttatgttaaactactaatgctaatgtttatctttattttatactcttaatagtgcaaattatttgaatgtccagtgtttaagggcaggacattattcaaggttcattgtattgtatttcaagctttggagaggccgtgcatagtctcacaggtctgtagacacgacagtttgcaggcatctggcaattcactgacttaaacaccacttccaatataggaatgacttctacaatactttyatcctttttctataagaaaacttacagtgacaattcatcaaaatacaacatatatttgttacatttttatctaacatcgatagcaaacttctttataatagagttaactaaaaacctaaatgatgagagaccattagtacattttgttcaaaggaggaaggag

SEQ ID NO: 778436 - DNA, 621 bp, Homo sapiens
atcatgttgttggtccctctggcaaccagcctccatccgccaagagtcactacattagcataaactcaggtatggttgaaagaggcttattatgaataaccaaaaagctcctcttaccctaaccattctggaaactccaagggttttagaagctactgttccagaaactgaggcagagaacaaatatatatttcttcttatgccacactggcatatagtcatcactaaaaaatagtgtttgttttcttattgttaatgaattactatttttaataaagaaatatgttaaaaaaggaattgtgtccccygaaattcatattgaagccccataacccctgtacctcagaatgtgactgcatttggacacaaggcttttaaataggtgatgaagttaaaatgaggctgttagggtgggccctaatccaatctgactggagtccttttaagaagaggaaatttggacacagatgaagccgcctttgcaaaaataataacagtgagacaattagacagtgaaagggagcttacctaactactccatcttgcttctaacctgcaagctccccttgttattcctgggcgtaggccaaactaactttgggaggaacttagtttatagtt

SEQ ID NO: 778437 - DNA, 590 bp, Homo sapiens
tcatctgtagctttgcatcagcagaatctggtgtagagagatatatatgcatagctacacatttctttattttttaattttatttatttattttttgagatggagtctcactctttcacccaggctggagtgcagtggctcactcatctcagctcactgcaaccttcacctcctgggttcaagtgattctcatgcttcagcttcccgagtagctgagattacaggtgcgcgccaacagkcctggctaatttttgtgtttttagtagagatggggtttcatcatgttggccaggcttgtcttgaactcttgacctcacgtgatccactcaccttggcctgccaaagtgctgggattacaggcatgagccactatacccagttgtttttttagtaagtaaggaaaatgtcgtaagtgggagttgaacaatgagaacacatggacacagggaggggaacatcacacaccagggcctgttggggagtcgggggctgggggagggatagcattaggagaaatacctaatgtaaatgacgagttgatgggtgcagaaaaccaacatggcatatgtatacttatgtaacaaacctgc

SEQ ID NO: 778438 - DNA, 538 bp, Homo sapiens
gctttcacttatttcaaagcagtaggatattaatctcacattcatattacttattttcagcccatttctttccttttttaaaaatcctaccctagaattgactgaccagtcacaacaatcagcagataccttacacctgtccacctcttccatggactgcctcaattgcaaattgccttgtttgtggtctgccctttgcagggcagttcacacctaggtactgaatatgtagggmagggtgtaaatgcttagccatttcaactcagcgtaggacgctgtgatgggcaatactcaacagaggttttatcaagcctgcatcacagttcaactctcttccccgcccagtatgtgtttttagagaacccaacatctgatgaataaataatgcatgaattgctcatacataagtttgaacaaaagaaaccagacacaaaaaagtatatattatgtgattcatttaaattaatttttaaaacaaaactaaaccagaatgatagagatcagaacaatgactaccttcaaatggctattgactgtg

SEQ ID NO: 778439 - DNA, 594 bp, Homo sapiens
cctgggctcaagtgatcctcctgcctcagcttcctgagtagccaggactataggcacgcaccactgtgcccagctaattaatttttatttttctgaaatggggtattgctatgttgccaggctggtctcaaactcctgggctcaagcaatcctcctcccttagcctcccaaagtgttgggattacaagcatgagccactgcaccccgtcgaaaaaaaatcttaatatggtctatttaatcctcatgttctctgaaagagaacattcttstaaaatgctctgtaaagtttagtgttcttaaaaccctattcagtgctttttttcttttgtccagcccttatcctttcttgtggaaggaagaacagacactttctcctagctagcagcatttggttttctctttccttccaccctccacatgattcagttgaggtgaatcagccacaccttctttccattcctggttctctcgatggagactacttgccatgatgagacccatcttgggagcctgtgatggataatgcttacaagtgactgagatgatactaattcatatcaccgctccaactggacacttggcaggatgaactga

SEQ ID NO: 778440 - DNA, 606 bp, Homo sapiens
aaaattcctcacaaatgacaaaaatgttctttttaaagaaatctaattagatagttttgaaagacaggcaattggaaagtgggtgttagggttaaggaggtacagtgtgtttgtgtcccattgtaaatcagtacagacccagcttaagaactgagggcttctgattccttgtaagagtttaggtagattgagttattcagtgaccataatttccatttaataaaagtaggttgtatacagagcacaaatgatggcatctccgcccttgatcatatgttctccctcattatgtatttaaatgggtctgtgtgtgctcaagtcattgcactggtcattggaagtaatccatggttgattctgctggggaacaaacattaacacagattagatttttctgaaacaggatcacaccatcctcttttttaatttwgtacaaaatcttccttcataaaggttcaaatacaccaaaataaattgtaagtgaacagaaaagttaaatataaaagcaaaaacattttccaaaagtaggaaaagaaacagagccaagtattttcctgatctagaaaacagaaaaagatttttttccgcaaaaagaaaccctttgaa

SEQ ID NO: 778441 - DNA, 579 bp, Homo sapiens; identical to SEQ ID NO: 753574

SEQ ID NO: 778442 - DNA, 609 bp, Homo sapiens
tgctttgcattttctgttagatgggactcagaaaagacaaatttttagaacttgtagcactcattcttcagccatgaggttagaaaaatccaaaatgagaagaaaatcaagttgaacagaggtgctgcaaatctgggtcctgctaggattttttttctaccttgtattcacatttcagattaaaactggaacgtatctgtgatggttaatactgagtgtcaacttgattggattgaagaatacaaagtattgatcctgggtgtcttactccagcccatttatcgagtgacccaaaaggctgccagttttgaatggggtacagaacaggagaagactctgcaacaggtccaggctgctgtgcaagctgctctgcyacttgggccatatgacccagcagatccaatcgtgcttgaagtgtcagtggcagatagggatactatatggagcctttggcaggcccccataggtgaatcataggggagacctcaaggattttagagcaaggccctgccatcttctgcatataactactctctttttgagagacagctgttactgggctttggtggaaactgaacttttgactaagggtcatcaagtcaccatgtg

SEQ ID NO: 778443 - DNA, 619 bp, Homo sapiens
ctggggaggcctcagagtacttaaaatcatagcaaaatgtgaagaggaagcagacacatctgtctggagccgcaggaaaagagagagggaggaggtgctacacagttttaaagaaagacctcatgggaattttatcacaaaaacagcrctagggggatggtactaaatcattcatgagaaactgcccctgtgatccaatcacctcccaccaggccccacctccaacactggggattataactgaacattagatttggatggggacacagattcaaaccatatcaatcttcttctactgcacttccatctaatcttaaatctactattttgcctcatacatgtttccttgacttttaaagacagtacttgaaatttgtttctttgacttttatggatgctggttaaaatttacttctgtgtagtatatgttgtttcaacagatgatattatttattttttgtatgtatgtcttacttcctctgtgccacaaaaagtcaccttgttcctttttcttaattttttttttgcatctatatttttctctttaccattaaagaattgggagttctcttttagtctgatatttcagaaataaatacttcagaaataaggttttttt

SEQ ID NO: 778444 - DNA, 630 bp, Homo sapiens
cctgaccaataggatgttgcagaaataacattttgggacttctaagaatatgatataaacatccttggagtttctgtcctagacttttagattactcaccctgggaaagctggctgctacataagaaatcttgctacagtgagaccactatacagttctgaagccctccataactacagagacaggccatacgtaaaacaagggagagttgtccaggcaacccccagcttttcagctatccaagctcaggcccaagacatgaatgaacatgagcaaagaagttatgttaggagacatatcagccccagaagacataacatggagaagatctaaggaattcaaaagacagccagaactaagttgaaaaatatggccccagtcaccaattccaggcawttctagccattcaagtcacctaagctgagactccaggtactgcaaagcaaaaatgcgctgtctcccattatattctgcttgaattcctgaggcacaaatcataagcataatagaatgatattgtttgatatctctaagttttaggaaggtttgttagcaagcaatagataaccaaaatagacccccatttgtaaatcaggtgggtgcacttcaggtagatttatggctaagcta

SEQ ID NO: 778445 - DNA, 630 bp, Homo sapiens
cctgaccaataggatgttgcagaaataacattttgggacttctaagaatatgatataaacatccttggagtttctgtcctagacttttagattactcaccctgggaaagctggctgctacataagaaatcttgctacagtgagaccactatacagttctgaagccctccataactacagagacaggccatacgtaaaacaagggagagttgtccaggcaacccccagcttttcagctatccaagctcaggcccaagacatgaatgaacatgagcaaagaagttatgttaggagacatatcagccccagaagacataacatggagaagatctaaggaattcaaaagacagccagaactaagttgaaaaatatggccccagtcaccaattccaggcaaytctagccattcaagtcacctaagctgagactccaggtactgcaaagcaaaaatgcgctgtctcccattatattctgcttgaattcctgaggcacaaatcataagcataatagaatgatattgtttgatatctctaagttttaggaaggtttgttagcaagcaatagataaccaaaatagacccccatttgtaaatcaggtgggtgcacttcaggtagatttatggctaagcta

SEQ ID NO: 778446 - DNA, 599 bp, Homo sapiens
tccctctctttttttttttctttctcacccccgtgattgcctggagagagtagctccctctcaatgattctcacagaatcctctctaggatggaggcgggtgctcaccttggcctggaactttgatctcatggacagcagaggtcctggtgcaactttaccatgccacaagcagttgtagcagtgcaattgtaaatctcaccagaaggtgacagttgccaaggtgacagcttctcatggtacgtgataaggaaccgggtggagaggagacctagccttggaaagggagcaccataggagttggtgggagcaggtgaaaggcttggttccttgctccctgcctggtgcctggtcactgcagacactgagtcagggaccaaggggaggagggaggcagtcatcgtcatgacaggagcatcagtgaaactgctggcctggtrtcgcctcctgggcctggactccatgtcctttgtctgtccttggtaccccagatgagtcagcaagatccagcctctgaggttcattgcagcacttcccctggaggcagattagaggatgttgcaggacattaagtaatacatctggagcaggcgcggtggc

SEQ ID NO: 778447 - DNA, 556 bp, Homo sapiens
gtgcagaagttatggaaggaatggaaaggactgcttggatccttgtccatagaggaaacatgcctttccatgctaggagaatgagctggtttgcaagcctcattctgtctcatctgcaggtggtcactcaacatctacacagaccgaaatgatacccagagtagcattttcagttagtggcatagggagtgggctctggaatcagatttctgcgtttgaattcaggctctgacactagctaggagacttctgggaaagtgacttaacctttccaaacctcagcttcctcactgtgaagtgggcatgggactcgcctcaccggacttcakatgaggatgaagggaggccatgctggtaacatgcctggcccaaaagaagggtccagagcattttaactgctgtcattactgactgtctttaatctgccatttcccatgagcacttgttactcatttacttcttttttcaacattcttactatgctacaaggtccctgtgcctgttctcatagtttggttagtacaggttagaaaaataaagttttgcccaaggggta

SEQ ID NO: 778448 - DNA, 588 bp, Homo sapiens
tcaactttataagtaggaatgaagattaagctgctgttaataaacaatcagaatttttaaaaacaaaatacaatggcttatgcaaaatagttgttttttactcacatgaaagtgcaaattggtggttcagaaagatgcctgagatcttgcacacttatttcttcttgttctggaatctggaggtaacccttcttcccatggatgaagatatccatgttccagccaacccaacgagagaaaccatgaacctagagggcacacattccagttagtgatacaacacaaaagtggcacacactctatctattcaataccattagctagatcttagtgaaaagacaaaatgttgctctgagagaggctgaaaattaatttttataaggcctggccatcttcagagctaaaatttaaggttgaactaaaatcataaaagagaaaataaataytagaaaaaccatctctgccacacttatagcatgatactgggatcttcatatactcttaagaagctctgatttattttttaatttcatatttaatttggtaaattattttactattatttaaaagttcaaatgcatatttcac

SEQ ID NO: 778449 - DNA, 556 bp, Homo sapiens
taccttgttttaaatatattccttagaacagaaaatttgaagctggtccaatacttggggacttgttactctttatcttggttttacaaagactaccaggaagtttgtaaaccattactaacaaactaatcagaacatttcaagagctattttaagattgatccaggtaatggctcaatattttcagtttgaatgcttttataaacaacagattttacattgtgttaaaatggatttctttgggcttccattccatgtttgagttaataaaaacaaattaaatatctgcaagatgaaatttttagaaacatatacatattgggccaggcaargtggctcatgcctgtaatcctaacactttgggaggccaaggtggactgatcatctgaggtcaggggttcgagaacagtctggccaacatggcaaaaccctgtctcgattaaaaatacaaaaaaattagctgggtgtggtgtcacatgcctgtagtcccagctacgctggaggctgtgccaggagaattgcttgaacctgggatgtggaggttgcagtgagccgt

SEQ ID NO: 778450 - DNA, 595 bp, Homo sapiens
agccacaggggtggtgctgtccaaggccttgggagcccatcccttgcacaagcgtgccctagatgtaggacatggtgtcaaaggaaatcattttggagctttaagatttaatgactgccttgctgggtttcagactcacgtggggcctctagatctcttcttttggctaacttttcccttttttaatggcagtgtctatccagtatctatactccaatagtatcttagaagtaaataacttgttataattttacacaatcatagatgaatggaactcatcaccagatgagactttgaacttgggacttctgagttaattctggaatcagttgagactttagggaactttggaaaggcatgattgtattttgcaatgtgagaaggacrtgagatttttttgggccagaaatagaatgatacagtttgaatgtcttctccaaatctcaggttgagatgtaattcccagtgttggaggtgtggcctggtgggaggttcttgggtgatgggggtggatatgtcacggcttagcactgtccttatgatagagggtgagtcattgagagatctggttgtttaaaagtgtgtgacaccaccc

SEQ ID NO: 778451 - DNA, 670 bp, Homo sapiens
tcttcatctctgtgagcctcagtttccttatctttaaaatatagataatagtatttacctcaaaagggtatgcatgaagcatatatgaaagttcttggcacatagtagccaggaactaaatattgttagtttccttttttggtgaaccagtgtatggcaagagaatttgtgatgtgattttggtgtagagtcttaagcaagcatggcaagtattttttgtttgttttcaacttcacagatgttagaaaagcttgtgttgtacatttatgtttagacattaggagagagattctttcttgggttgcaagattgtaggatttgtttgcagagtatctgtatctggacagagaggcattctcaagctcctggcccatcctacccaattcaggtagcaacaggaggsgaaagaggcagttgtttgtataaggcatgtaaatgaaggctgaaaatcctgtagggtcaattcgtgtgtcctttggagctgaaattaatggatattttcctttgaaggatcgactctccaggctatatccaatacaatacagggacctcacactgtctttttgtgagggatcatatttattttttcaggccttgatgaaaaccaatttgcctttcctgaaactagacatttaagctttgatgagctgacaaaggggggatgggcaga

SEQ ID NO: 778452 - DNA, 575 bp, Homo sapiens
gttgcctaggctggagtgcagtggcatgatcttggctcactgtaacctctacctcccgggttcaagtgattcttgtacctcagcctcccacataaatgggattataggcacacgccaccatgcctggctaacttttgtattattagtagaagcgagatttagccatgttggccaggctggtcttgaactcttgaactcttgacctcaagtgatgcacccaccttggyctcccaaagtggtgggactacaggcatgagccactgtgcccagctgattttgttttttatttttattttttggctataggtgtgaccaaacaatgctgtaatctggtccaaagtacatacagtacacaaaactatctaacttaaattattattattaatttttagagacagggtctcactctgtgtcccatgctggagtgcagtggtacaatcacagctcactgcagcctcaaccttctgggctcaagtgatcctcccacctcagcttgccgagtagctgggactacaggtgcacatcactgtgcctggctaaattttttattttttgtagagactgggtctcactaa

SEQ ID NO: 778453 - DNA, 575 bp, Homo sapiens
gttgcctaggctggagtgcagtggcatgatcttggctcactgtaacctctacctcccgggttcaagtgattcttgtacctcagcctcccacataaatgggattataggcacacgccaccatgcctggctaacttttgtattattagtagaagcgagatttagccatgttggccaggctggtcttgaactcttgaactcttgacctcaagtgatgcacccaccttggtctcccaaagtggtgggactacaggcatgagccactgtgcccagctgattttgttttttatttttattttttggytataggtgtgaccaaacaatgctgtaatctggtccaaagtacatacagtacacaaaactatctaacttaaattattattattaatttttagagacagggtctcactctgtgtcccatgctggagtgcagtggtacaatcacagctcactgcagcctcaaccttctgggctcaagtgatcctcccacctcagcttgccgagtagctgggactacaggtgcacatcactgtgcctggctaaattttttattttttgtagagactgggtctcactaa

SEQ ID NO: 778454 - DNA, 597 bp, Homo sapiens
cagccctttttccagggaagtgaatggttctgtcttgctggggttccaggtgccactggggtatgaaaaaaatactcctgccactagcttggtgtctgcccaaacagccacctggttttgtgcttgaaacccagggtcctggtggtgtaggcacacaagrggatctgatctgcagattgcaaaagccataggaaaagcatagtaacccagcctgatagcagagtccctcatggcttcctttggcttgaggagggaggtacccagcttgctgcatttcccaagtgaagtgacaccccaccctgcgtctgctcaccctctgtgggatggacccacggcctaaccattgccaatgcgatgaactgggtatctcagttggaaatgcagaaattaaccaccttctgcatcggtcttgctgggagctgcaggcttaagctgttcctattcggccaccttggttattgtctttagtgaagtacctcttcaagtcttttgcccatatttttatttggttatgtgtgtttttcttattattttgtaacagcgccttttataacctgaatgtatatatattttgtttaaatttatgtacagtaaaca

SEQ ID NO: 778455 - DNA, 597 bp, Homo sapiens
cagccctttttccagggaagtgaatggttctgtcttgctggggttccaggtgccactggggtatgaaaaaaatactcctgccactagcttggtgtctgcccaaacagccacctggttttgtgcttgaaacccagggtcctggtggtgtaggcacacaagaggatctgatctgcagattgcaaaagccataggaaaagcatagtaacccagcctgatagcagagtccctcatggcttcctttggcttgaggagggaggtacccagcttgctgcatttcccaagtgaagtgacaccccaccctgcgtctgctcaccctctgtgggatggacccayggcctaaccattgccaatgcgatgaactgggtatctcagttggaaatgcagaaattaaccaccttctgcatcggtcttgctgggagctgcaggcttaagctgttcctattcggccaccttggttattgtctttagtgaagtacctcttcaagtcttttgcccatatttttatttggttatgtgtgtttttcttattattttgtaacagcgccttttataacctgaatgtatatatattttgtttaaatttatgtacagtaaaca

SEQ ID NO: 778456 - DNA, 611 bp, Homo sapiens
agcctgctgcagaaatctgcataagtaacaaggggctgaatattaatccccaaggcaatggaaaaaatgtctccagggcatgtcagaggtcttcatggcagcactcccatcacaggcccggaggcctaggatggaaaaatggttaagagggctaggccttgggtccctgtgctgagtgcagtctagggactttgtgccctgcatcccagcctctccagtcatgactaaaaggrgccaaggtacagctcagaccatggcttcagaaggtgcaatccccaagccttagcagcttccacatggtatcaagcctgtgagtgcacataagtcaagaaccggggttttgtaacctccgcctagatttcaaaagatgtattgaagcacctggatgcccaggaagaagtttgctgtaggggtgggtccttcacggacaacctccactagggcagtgtggaagggaaatgtggggtcagagcccccacagagagcacctactagggcactgcctactggagctgtgagaagagggccaccgtcctccagaccccagaatgataagtccactgacagcttgaaccatgctcctagaaaagccacagacattcaatgacagc

SEQ ID NO: 778457 - DNA, 628 bp, Homo sapiens
acagagttaatagaaaagagaaaaatggcaattaaatgaataaaaatgaccaaattcactcactactagagaatcacaaatcaaaactacaatgagatattatttttcaactattacatcaataaattttttaatgtttgataatatgctacattggtgagaatatatggaaatcagcacttgcatacattgttgatgtagatgttggtgtagagtgtagattggtataatttctattgacgaagatttagcaatgacatctacatcctttgatctaacaatgtatcctacagatgtatttgcatataagtgcaaataaatatgtaagaaggatattcgttacaacattgcttataacaaaaattttaaataatctaagtataatacttctccatagaggagtgttaaaatatctacataatggawttctatggacctgttaaaatgaacaaagttgggctgtatgttctgatatgaaaccatctccaagataaaccattaactgaaaaatacacaatgcagacatttttggtttccagtccagcatgtaaggagcttggaagtcatcaccccatcctaacaacaagtagaaagctttttaaaaatgaaaaaatcagcaacttttctt

SEQ ID NO: 778458 - DNA, 470 bp, Homo sapiens
atctaagatttaaaaattaattgatctctgaactctcctaaaccttttacctggattaatggcaaagccattacgttcttttctttcattagggtttttttttttcttcagcaaggctgaacaggaaacaagggtgatcctatcctgtccctagaggcagttcatcagctagctcagtttacagctactaaaaaaaaaaaaaaaaaaaaaaaaamcaaagaaaagaaaagaaggaaagaaagaaagaaagaaaaaaaacctagaggtaagtagcactcaaaaaggtggggctttatcatgaggaactatgggggtaagggagcacacaataggcatttttctggttcgactggaatcttggtattattatttttcattatccattctgaagttaggtttctcagacttctgggctagttaaccatttcctctagtgtgagatatatatatatatatatatatatatatat

SEQ ID NO: 778459 - DNA, 470 bp, Homo sapiens
atctaagatttaaaaattaattgatctctgaactctcctaaaccttttacctggattaatggcaaagccattacgttcttttctttcattagggtttttttttttcttcagcaaggctgaacaggaaacaagggtgatcctatcctgtccctagaggcagttcatcagctagctcagtttacagctactaaaaaaaaaaaaaaaaaaaaaaaaaccaaagaaaagaaaagaaggaaagaaagaaagaaagaaaaaaaacctagaggtaagtagcactcaaaaaggtggggctttatcatgaggaactatkggggtaagggagcacacaataggcatttttctggttcgactggaatcttggtattattatttttcattatccattctgaagttaggtttctcagacttctgggctagttaaccatttcctctagtgtgagatatatatatatatatatatatatatatat

SEQ ID NO: 778460 - DNA, 500 bp, Homo sapiens
atagttttgaaacactctttttgtagtatctgcaagtcgatatttggatctctttgaggccttcgttggaaacgggatttcttcatatacaactagacagaagaattttcagaaacttctttgtgatgtgtggattcaactcatagagttgwaccttcctttcattagagcagttccaaaaccctctttttgtagaatttccaagtagataattagagcgcattgaagcctatggtagaaaaggaaatatcttcatataaaaactagacagactcattctcaggaactacttcgtgatgtgtgcattcaactcacagagtttaacctttcttttgatagaacaggtttgaaacactctttttgtagaatttgcaggtgtatatttagagcgcattgagacctatggtagaaaaggaaatatcttcacataaaaactagacagaagcattgtcagaaactactttgtgatgtttacattcaactcagagagttgaacattc

SEQ ID NO: 778461 - DNA, 500 bp, Homo sapiens
atagttttgaaacactctttttgtagtatctgcaagtcgatatttggatctctttgaggccttcgttggaaacgggatttcttcatatacaactagacagaagaattttcagaaacttctttgtgatgtgtggattcaactcatagagttgaaccttcctttcattagagcagttccaaaaccctctttttgtagaatttccaagtagataattagagcgcattgaagcctatggtagaaaaggaaatatcttcatataaaaactagacagactcattctcaggaactacttcgtgatgtrtgcattcaactcacagagtttaacctttcttttgatagaacaggtttgaaacactctttttgtagaatttgcaggtgtatatttagagcgcattgagacctatggtagaaaaggaaatatcttcacataaaaactagacagaagcattgtcagaaactactttgtgatgtttacattcaactcagagagttgaacattc

SEQ ID NO: 778462 - DNA, 517 bp, Homo sapiens
tggaaacactctttttgtagaatttccaattggatatttagagctctttgaggcctatagtagaaaaggaaatatcttcatagaaaaactagacagaatctttctcataaactactttgtgaagtgtgtgctcaatgcacagagtttatcctttcttttgatagaatagtttttaaacactctttttgtagaatttgcaagtgtgtatttatagggctttgaggyctatggtagaaaggaaatatgttcacataaaaactagacagaaatattctcagaaactactttgtgatgtttgcattcaactcacagcgttcaacattccttttgagagggcagttttgaaacactctttttgaagaatttccaagtggatatttagagcactttgattcttatggtagaaaagaaaatatcttcgtagaaaactagacagaatcattctcagaaactactttgtgatgtgtgcgttcatctcacagagtataacctttctttttatgtagaagttcggtaa

SEQ ID NO: 778463 - DNA, 609 bp, Homo sapiens
agggaagaagaaagggaaggaggcagatgcatttcctaaatcttccattgcatctcaatggaagtctctattttcgaattttaaacctgacaaagacaggtacatttagttttaggttgatgtttattgtcttacatattcaccccagtgccttttctgatctcccgaatactgctagaataggtcaaatttcccaaaagtttagctcataacagtcatccatcattctccaccagtgcattcagggtaataaagcaggctaaacttttattctaggtatttttgacaagagaaaaataattttttaatgataagaaaattatactaackacttgaaataataatgcaaaataataatttgaggcagatagtttttttcttctcaacttacatcattactggaaatcatgcaacatattttaaacgatgtagcataaacttattttacaatactttaccatctaatttccttttccttttgtgacatccaaataccttgaacattcttgcatttattaggtaattcgttcattcaagatccatttcatcagctaccaaatacctaccataacaagacatcttgcccaatatcatggagcctataaggtg

SEQ ID NO: 778464 - DNA, 657 bp, Homo sapiens
attttatatcaacatatatcagtttctctcaacctaaaggcaataaatccatagttctcaaacttcagcggtcatctgaggttttaataacacaggtttctaggttcaactcccagacagtctgggtcagagggtatgaaatgggactggacatccgaagactcatcagtcccaccagtgtgatgcwgaaacacttggcctgaggaccagactctgagaaatgaaatctctgaatcctatgacagtctggagtccagactccccgggcagcttcctgacaatgtggctttttgtgaagcttgcccgcaagggtagaatgcaccagcctgatgattctagtgccttgcctcaaaagttagggattctcgctatgaataaatgatttgacgtccggcttcatgtatgggcctccttcgcttaggaaatccatgggtatggcacagattatttttcaaagggggacttttcctctctgtactattgttgcataaagtttaaaaaaaaaaagatcttgcttgccaaatgaattagtaaattgtaaatgggaaaaaaattaaaaacagaatgtttgcatgtcttttggttagacacaatctctggaagcaaaatatgaaacccaggagcaaaaaaagagtcattagcaggtttcactatata

SEQ ID NO: 778465 - DNA, 636 bp, Homo sapiens
gggacagcctcattatatggttgatttattctgagttggcaggcaagtctttccacaaaaactgaaatcaagcaagttctctctatttttgtttgtagagtagaatttgtaacttatgttcatgattttatatttattyctgttaaataatttgttgtttttagttcattctacatgtcaagaggttggaattctgattttgaatgccaacatattagccatcacacgcaggtttgtgaggcatgtagatgagatcaacatggtatgttctccctcaagcccctgctaaaactacgggcgaggctaacaccagggacagagtgctctgctgttaactccagtttgatccttctagttacatatgatccattcatccacaacgcaagggtgttgcttaattaactaaaagggcactcgaatgccctatatctgatcattcagctcacaatgtacctttggtttaacagagagatcatgagaatatttttcaagtgactcacaatagtgaagatactctgtgtctgccatactcctgtgaacctccagtctattcagttgtgggcaacaatgagattgccttgatatgattgttgttagcaaatgcaagctggctgatattaaccatcacttcctttt

SEQ ID NO: 778466 - DNA, 636 bp, Homo sapiens
gggacagcctcattatatggttgatttattctgagttggcaggcaagtctttccacaaaaactgaaatcaagcaagttctctctatttttgtttgtagagtagaatttgtaacttatgttcatgattttatatttatttctgttaaataatttgttgtttttagttcattctacatgtcaagaggttggaattctgattttgaatgccracatattagccatcacacgcaggtttgtgaggcatgtagatgagatcaacatggtatgttctccctcaagcccctgctaaaactacgggcgaggctaacaccagggacagagtgctctgctgttaactccagtttgatccttctagttacatatgatccattcatccacaacgcaagggtgttgcttaattaactaaaagggcactcgaatgccctatatctgatcattcagctcacaatgtacctttggtttaacagagagatcatgagaatatttttcaagtgactcacaatagtgaagatactctgtgtctgccatactcctgtgaacctccagtctattcagttgtgggcaacaatgagattgccttgatatgattgttgttagcaaatgcaagctggctgatattaaccatcacttcctttt

SEQ ID NO: 778467 - DNA, 626 bp, Homo sapiens
ttcacttagcatagcttccaagtttattcgtgttctcccacatgattgaatttccttttgtaaaggctgaatagtatttcgttgcatacatgtaccacattttctttgtccattcctctgttgatggacactaaggttgattccatatcttggctattgtgaatagtgctgcagtaagcataggagcgtagttaaccctttgccatactgatttcaatctctttggatatgtacccaaaagtgggattgctgaatcatatggtagctctatttttagtttttctgatgagacttcatagagtttctcttaatggctgtactaatttacatttctaccaacaatgtacaacagattaatttttttgataaaagccrctctaacaagtgtgaggtgatatgtcattgtggtttcaatttgtatttctatgatgattagtgatactcagcattttttcatatagttgttggccatttgcatcctttcttttgagaaatatcttttcaggtctcttgcctatttttaaaatgggctatttgttttcttgctaatgcagtgtttgagttccttatatattcttcacattaactccttatcagatatatagcttgtaaatattttccccatt

SEQ ID NO: 778468 - DNA, 497 bp, Homo sapiens
  misc_feature 435, 437: n = A,T,C or G
agcacggggcaagggaggggctgggcgggaagagaggcccccaggcaggaagatctgttcagaactctggtgtgggctcagccacccccatccgatgacctgactactctcccatctccgcagatcctcacagccaccgtggacaatgccaacatcctgctacatattgacaatgcccatctggctgctgctgacttccgcaccaagtgagtcctagctgtgggcttgggcagcctgggtcagctgggggaggatctcagggtacccctcctgaccccaggactccttggttgcttgtggcaaggcccaggagctcaggrtggggcagtcctaggagccccactacttagtccaggatgcagtgaaggcagccagttctgaaggttgctgggcttatgcagggaatataaaaaagggaggggaggcgggaggcananagaagtaaggaagctggtgggcgtaggatctggccctgtgatggtcccaaggccccgggg

SEQ ID NO: 778469 - DNA, 633 bp, Homo sapiens
ataatggatgactattcagcaggagaatgaatggagcattgataattttttgataattgatcattacattgataatgtaacaacatgggtgaatcccaagataacaaagccgtgtggaagcatccccacaaaagagaygatatgttgcacgattccatttatataagattctggtaaacgtacactaatgtgcagtgatggagagcagctgggacgtgggaggagcaggcagtctgggaggagggagcacaggagcttttgggggcaatgggtagattcattctctggattatggggatggtgtctcaggtctgcatatacgtcagtgcttaggaaagtgtatgctttaaatatatgttattgcatgtccacctcacctaagtaaagctggcttagaaatgtaaaaaaacatggggtagtggttgaataaaaagcctatttcatcttagaattctactgttaaaatttggctccggccactattaaggtgaaaaaaaaatccagctttaaattgttaaattctgttattatttgtatgtaaataattcattcttttggaagaatgaattatctggataattatagactgccagcactcattccctatgaccaaggcgatggcatacttcctta

SEQ ID NO: 778470 - DNA, 633 bp, Homo sapiens
ataatggatgactattcagcaggagaatgaatggagcattgataattttttgataattgatcattacattgataatgtaacaacatgggtgaatcccaagataacaaagccgtgtggaagcatccccacaaaagagacgatatgttgcacgattccatttatataagattctggtaaacgtacactaaygtgcagtgatggagagcagctgggacgtgggaggagcaggcagtctgggaggagggagcacaggagcttttgggggcaatgggtagattcattctctggattatggggatggtgtctcaggtctgcatatacgtcagtgcttaggaaagtgtatgctttaaatatatgttattgcatgtccacctcacctaagtaaagctggcttagaaatgtaaaaaaacatggggtagtggttgaataaaaagcctatttcatcttagaattctactgttaaaatttggctccggccactattaaggtgaaaaaaaaatccagctttaaattgttaaattctgttattatttgtatgtaaataattcattcttttggaagaatgaattatctggataattatagactgccagcactcattccctatgaccaaggcgatggcatacttcctta

SEQ ID NO: 778471 - DNA, 538 bp, Homo sapiens
cagggaacatgggacaccaccaggcaagacctgggcgacttctccatcaacacggagtggttgtctccagtacacgacgctatggcccgatgatcagctgaaagaaagcagaacgtcaatgaagaactaatgtcgtgactagagaggcgattcctacttcagaaagaaaaagacagaaagcccaatgggaagctgggaaaaggcttcccaggctcatttgaaatcagtgaaatacaaaacacatcctcgtcgctgccaccaccactgcagagatgagaagccaaattacaggtttgaggacctagttatattccttgyaataccttttaaaataaaatcattaaactattaagataataaacaactgccgtgtgccccaaaaccccctcccatgccaccccgtgccctcctctttggagtctccaagacccaccccagggaaaagttgaacgtcagccaacttcagagtggtcccagtgagccgtggagtgggtggggaacgcagggaggtgggggcctagtgaactcagagccgcgt

SEQ ID NO: 778472 - DNA, 558 bp, Homo sapiens
aatacgtataatagattgttgggtccacaacttataacaaaaataatagcacaggaaggggggaagagagaatggaactaaaaagaagtaacatttctatagctcaatgtaattaagttaatataaatctaaagtagactcacataaattatgaagtttataataagcactagagtaaccataaatgaaataactcaaaaatacagtgaaaaaccattaaaacattaaactagaaaatattcacttagtgtgaaagaaaacagaaaagaaggaagagaagaatccaaaacatcagacatacagaaaacaaaatgcaaaayggaagatgtaaatccaagtgcatcaataatctcatcaaatgtgaatggattaacaatgcaatcaaaagacgtattacaagactagattagtaaagaagatttaattttatgctgtctacagaagacagactttagatctaaatacacaaataggatgaaagtataagaatggaaaaaaattatcatgcaaagagtaaccataagaaaatagtaatggttatattaatattagtcaaaa

SEQ ID NO: 778473 - DNA, 564 bp, Homo sapiens
caagccaaagaggaaattctcatggaacctgcctcgctgggatttggacccgcttgggacttgtcatcctttcctccttccattcctccctgcgggagggagcgcctgttcagtggctgtcatgacattgtgttttggaagcacgtcgcrttgggtttgcagaggcatggctggagaggaatgctgcctcggcatggctctggcctcggcctcccttacttttgatttaggcgatgttaaggcaggctctgggttttaaccctcacagcagctggggtgagttatggctgtgggggctgttgggatggaatgaatgtgttttgcctgtgaggaggacagttggggttggtggcagaattagaggctgggtgtctgcactccccactgccagcatcacatgctgaaatcctaatgagcctccttgttatttccctgttttctcaatccctgaaaacatctttggaatttccacccgacagatactgtgataatagaagttatttcatctccagggaatgtttccaaacttctaatgaacccatctggaatgtaccaattaaccag

SEQ ID NO: 778474 - DNA, 509 bp, Homo sapiens
aactctgtgagatgaatgcactcttcacaaagaagtttctcagaatgtttctgtctaatttttatgtgaacatatttccttttccaccacaggcctctatgagctccaagtatccacttgcagattccacaaaaagagtgtctcaaaactgctcaatgaaaagaaagcttccctgtaacataaatgagcacatcaaaaagaagtttctcagactgcttctgtctagcttgatgtgaaaatatttccttatccaycataggactcaaagtgctccaaatatccacttgcagatactacaaaaagactctttccaaactcctcaatcaaaagaaaggttcaactctgtgagatgaatgcactcatcatgaaaagtttctccaatttcttctgtctagttttcatgtgaagatatttcctttttcaccatatgcctcaaagcactccaaatatccatttcaggattctacaaaaagactctttccaatctagtcaatcaaaagaaagtttca

SEQ ID NO: 778475 - DNA, 675 bp, Homo sapiens
cttttttaaaaaggtaatataatagcggtcatctaacataaccatagactcctctggtatcctttttttttagctaattggagaacacagacaatgaaaaagaaaaaaaaatacatgattgataatatttataatttaggtgaagatcagcaagtgactacttgaggaactaccttcaataatttgtctcaaacacaggggtaaaaaaattatttgagatataactattttagtasttttaaagtataacggtttcagttttttgagtgccaccttcttaaatcagctaatcagaacacttaatttctttatatattttaaaattcatttttatggcagacagagtaaggtctttcaaggcagacctttgatcaacaaatttttatgcccagagaaagaattgtctctgcaagatttaatagtaactaaagaaatgaaaattaagccagcaaagatttttaaaggttaaagaatggtaataaccaacgatgattaggatataagaacccttactgatgtgttaattggtaaaacctttgtagaaagcagtttgaaaaatgtttaaagcaccgtgttctaagatttcttgacagatgatattgccaggtaccatgtgaagtacacatttatacccttaagttaacaattccacttccagatattcatcaaagggat

SEQ ID NO: 778476 - DNA, 622 bp, Homo sapiens
gaggaccaagtgtccccggctcttggatttttgcattctgcaattcagggcacctcctagaatctccaagatcccaagtaacactgtctgggggaaaaaagtgtttaaatatgaaatccttatttgacagatgggtaaaccaagaccaagagactaagtcacttgccttagaaatcacagctacttagtagtggttctgagtacagaactcgtawctcctccctcagaaaataagactctttctaccacactccattccttcattccataagtatctattaacctccaacaatgcctcaggcaccagcttcatcactgaagaaaatgcaatgagaaaaaaaaacaacatgccactggccttatgctgtattcatttcctatattaaaaaataagcacaaaactaaatacttaattatgaattgtggtaagtccaacaaataaatgtgccttaaagcatcgtaatatgcccttcataagactaggaacagaaaagagatttatcacatgggctataggaaggttttgtcttaagaatttacattcttagtaataagcctcccccacgtgacatatgttgactctttgtattttaataaagacttttcatgattgaattcatgc

SEQ ID NO: 778477 - DNA, 534 bp, Homo sapiens
agcccagtagttcgaggttgcagtgagctatcatcactccagcctcagtgacagaacaagaccctgtctctaaaaatataattggccaggcatggtggcccacgcccgtaatcccaacactttgggaggccaaggcaggcagatcacttgaagttgggagttcgagaccagcctgggcaacacggtgaaaccctgtctactaaagatacaaaacttagctgggtgtggtggtgcayccctgtagttccagctactcgggaagatgaggcacaatcatcacttgaacctgggaggtgaaggctgcagtgagccgagatcacaccactgcactccagcctgggcaacagagtgagaccttgtctcaaaaaaaaatgtatatatataaaataatttaaaaaaaaaaactaaccaagaatataaacagttaatagaaaaggaatattttccatgatgtttctagtaagagaaaatatagtaagaaatatagattaatgctatagtaatgccactgtcacctattttattggcaaagtt

SEQ ID NO: 778478 - DNA, 617 bp, Homo sapiens
agtaaatttttaaattttttgtagagaaacggtcttgccatgttgccgaggctggtctcgaactcctgagcacaagtgatctacctgcctcgacctcccaaagtgctgggattataggcataagccactgcacccagactggagatatttttgcagtttttcatgatgtggatgttccataccttattcaataaaaatgtcctatakttggggatttaggtcatttctaatactttaaaattataaataatactacattgaataaccttgtgcatatatatttttatattgttgagatctatcttcagagtaaattccttgaagtgggattattgtaccaaaatgtaaacacactgtggtctgattaggcattgccacattccactccatacggatgtaccattttgtgctttcactagcaatatgtggacttgcctgtttttttcctgcctccctgaaaaagtatattgtcaagctttttaattttttgccattagtttgcacttttctcataacattaaacattttgtatatgattaaaattaaacattttgtatgtgtttaatggccatttcaatcttttttggtgagttatccctcatgtctcttattttata

SEQ ID NO: 778479 - DNA, 626 bp, Homo sapiens
cccggaaaatgcaaggggtcagggaactccctcccctagccaagggaagccatgagggactggcttccctgtgccatgagcaacactgcactccggcccagatactacccttttcccatggtctttgcaacccgcagaccaagagattccctcgggtgcctatgccaccagggccctgggtttcaagcacaaaagtgggcgrctgtttgggcagacactgagctagctgcagtttttttacacaccccagtggtgcatggaatgccagcaagatagaaccattcactcctctggaaagggggctgaagccagggagccaagtagtctagctcaatggattccacccccatggggcccatcaagctaagatccactggctggaaattcttgctgccagcacagcagtctgaagttgacctgggatgctcgagcttggtatggggagggacatccgccattactgaagcttgagttgctggttttcccctcacagtgtaaacaaagccgtcaggaagttggaacttgggggtgcccatcacagctccgcaaagccactgtagccagagtgcctctctagatttctcctctcggtgcagggcatctccaacgcagcagccccagtcagg

SEQ ID NO: 778480 - DNA, 613 bp, Homo sapiens
aagaagaatccaattacaattcaagctaagccttcacacttgatttttgcatctccctgcctcttccaacccctaccaggggccaaagacaccctctaaaatatacacacatccacctctctggctttttttttttttttttgccagtcctgatctcycatcctttgccttaaaactgtgtactaaggcagcagtccccaacatttttggcaccagggaccagttttgtggaagaaaatttttctgcggactttgtgggggcagtggttcaggatgaaactgttccatctcagatcatcaggtattagattcttgtaaggagcacgcaacctaaatccctcacatgcacagttcacaatagggttcgcacccctgcgagaatataatggcaccgctgatctgacaggaggcagaacttaggcagtaatgctcacccacgactcacctcctgctgtgcagtccgattcctaacaggccatggaccagtactggtccaaggcctggaggttggggaccccatatctctgagatattgcagatttggttccagaccactgcaataaagtagatatcacaataaagcgagtcacatgaacttttttgttttccaatg

SEQ ID NO: 778481 - DNA, 613 bp, Homo sapiens
aagaagaatccaattacaattcaagctaagccttcacacttgatttttgcatctccctgcctcttccaacccctaccaggggccaaagacaccctctaaaatatacacacatccacctctctggctttttttttttttttttgccagtcctgatctcccatcctttgccttaaaactgtgtactaaggcagcagtccccaacrtttttggcaccagggaccagttttgtggaagaaaatttttctgcggactttgtgggggcagtggttcaggatgaaactgttccatctcagatcatcaggtattagattcttgtaaggagcacgcaacctaaatccctcacatgcacagttcacaatagggttcgcacccctgcgagaatataatggcaccgctgatctgacaggaggcagaacttaggcagtaatgctcacccacgactcacctcctgctgtgcagtccgattcctaacaggccatggaccagtactggtccaaggcctggaggttggggaccccatatctctgagatattgcagatttggttccagaccactgcaataaagtagatatcacaataaagcgagtcacatgaacttttttgttttccaatg

SEQ ID NO: 778482 - DNA, 540 bp, Homo sapiens
cctcctgacacagtaggttagctggcttttcccagagtgagtgaattcagaaagagtgatacagaggccttaatatcctttatgacctagccttgaaagtcacactgcatcatttctgcgtgtcctattgacaacaaaagtcagccctgttcaatgaggagggggactacaaaggtcattgaaaaccaggagggaggaatcagtggtggccttcttggaggctggttaccatatccagttgagttcctatttcttctgttcaacttgttattaaattccaacctcatgatattcttttctctgaagttcctcaatactttctcaatgaactgytaatgtgggtgtatgaggttctgcctttgctgtttgattaggtgttttaggctcagatgctttccattgtaaagtggctggagggtgacgcagctgcttaggattgcctaggatggggagggtggtagaatgagattcttaggtactagggagtgagttccaattcctctggccaagcctttgtgctgggctgcgcctgcctgagga

SEQ ID NO: 778483 - DNA, 570 bp, Homo sapiens
tgtggaatgttctggagaataccatctggcatttgtatacatcttttatgttgtctaagtgcctttcctcacatcacgtcctcattcgatacctttgtgtcagccagcattcttggtgaccctggctcatctaagtatcgagagatttkttgaactatgcagatgggtcacacaatggcaggacccagagctctctggggctgggacgggggagcgggaataaaggggtcgtctcttcaggctctacctttgccctgccttggtcctgactgttctcaattttgcatttccctgttcaggaatccggggtaagggtgtcagatgggcccagcctgggcacactccttggcccagagactatggagaaaccttgatgagaaggcccttccaagctgggtaaaaagcaaattttgttgttgacaggagaagggggaataagcaacagatgttccctacataccctgtgaggtggggcgttaggtgaaagcattacctccaaggtacaaatgggaaacctgaggctcagagaggtgaactgacatgtctaaggtcacgcagagatatatagca

SEQ ID NO: 778484 - DNA, 525 bp, Homo sapiens
ttgcatttccctgttcaggaatccggggtaagggtgtcagatgggcccagcctgggcacactccttggcccagagactatggagaaaccttgatgagaaggcccttccaagctgggtaaaaagcaaattttgttgttgacaggagaagggggaataagcaacagatgttccctacataccctgtgaggtggggcgttaggtgaaagcattacctccaaggtacaaatgggaaacstgaggctcagagaggtgaactgacatgtctaaggtcacgcagagatatatagcagagcacagttatgtctatagatcctgcttcttacacctaaaggagcaggtgaatcttgtattccgcctaaccctttatccttccttactgcttgaatcacctgcttcttacccctcctctgtagcagcctcattaccccatcacctgccatctctggactgggaaacatagattttgactctactcctggatccccaaatttccactactaacaaaggatgcttctcactgtgtgg

SEQ ID NO: 778485 - DNA, 546 bp, Homo sapiens
tttcctcataatgctgatcagcaaagctttacctcaatcctggttaaatcccactctctgcttactctgtgcttacctgccactgctcattgtgtctgtagaaaaagatacaccttggctgactaatcccacttaaaaytcttgatcgctagcagaggtggacttgtggaatcagaaacacaccatacgtccctcatccagtccctcttccttctttctttttcctaggtgacaactgcacaccttttcatctcctcaaatcccaaacagcttttcctttcctgttcaactaatagcatttcttacttcgctaagaaaatagtgtcctatcaacattctaccccttgctattgctaaatctggtggtcatttttcagttgatctgcttaattgctttcttcttgaaaaacattcttcacttggcttccaagacaccacattcctctcattttcttttggcctcaactgaccactccttagcttccctgatgggtaactcttcacttcccagtctcttaccattggaatgaccaaggctcagtacac

SEQ ID NO: 778486 - DNA, 546 bp, Homo sapiens
tttcctcataatgctgatcagcaaagctttacctcaatcctggttaaatcccactctctgcttactctgtgcttacctgccactgctcattgtgtctgtagaaaaagatacaccttggctgactaatcccacttaaaattcttgatcgctagcagaggtggacttgtggaatcagaaacacaccatacgtccctcatccagtccctcttccttctttctttttcctaggtgacaactgcacaccttttcatctcctcaaatcccaaacagcttttcctttcctgttcaactaatagcatttcttacttcgctaagaaaatagtgtcctatcaacattctacyccttgctattgctaaatctggtggtcatttttcagttgatctgcttaattgctttcttcttgaaaaacattcttcacttggcttccaagacaccacattcctctcattttcttttggcctcaactgaccactccttagcttccctgatgggtaactcttcacttcccagtctcttaccattggaatgaccaaggctcagtacac

SEQ ID NO: 778487 - DNA, 561 bp, Homo sapiens
ggatttattggctcatataattgaattaaaaaatccattggcagatggcttcaggcactggaagatctgaggcccataatgttttcagctttctcttttttactctctcttttactcttcctccatttctcagacataatctttctcagacataatggcaaaaggtagccattttgccaacmtgagattaaatcttgctaaattataaaattgtatgaatcaatcaagattcttggttacaaaacggaagcttaattcataacttatgtaaataagaaaaattattaaatgaatattcagtagtccaccaaattaatgagaggtctaggaaatgggctggaaaaatcggcatatgttatagaagcgagaatcccaaatcacagcacaggatggatcaagatgctgctttgaaggcactagtcactccctcctgctggtactactagtgttggacgatagaaaactggtccaaagtaactcttattttctgaactaaactcacaaagctttctatgtattcctgaatagcagtatcagagtagagtactataggtcttatac

SEQ ID NO: 778488 - DNA, 632 bp, Homo sapiens
cttagtgccattatgatttggtttgctactgttgtaagagagttaatttcctgtgatccattgttgccattcttagtgatctccccctcttggagcataatatttttgtacaaactagggaaggtggtaataatataattgaataagaatatgmgttttaaggaaatagttctaattaaagtactttttcaaatgtcactgaaagaattgtttttgtaacagtatgcaaaatgatactgtattgttagaacaaaaatctgtggagtgttaatactttgtaagccaaattaaagtttctaagcagtataaaatgagaatgacatcatcctttcctagtatttccaagtcttagagtacattttcacaagtaaggtataattcttgagtgattttgcaggagaatagaaaagagtataatcacttgttctccttaaacattaaataggggtagttttaaacatctttgttctggagagttgtagatgagacattaggcttgatttcttttcttcacttgtaaaggagaacctattgttttcagtatttactaaaattttgactttacggaactttaaacctgaaagggattttcaagatcttttttagaaaatgagatgtcagttctatcttct

SEQ ID NO: 778489 - DNA, 604 bp, Homo sapiens
aaaactttcagttacagttacgcaaagggtcacttcctcccccaacgacgcatgggcctctcaaaggagaggagggagtaagtcccatggtagggccagtgcttgctcctgggttttggaatcatttctgcggagctttcaaagccagaccctgggctcagggttgagacttcatagcggtgacagctagacccagcaagatggctgtgaccgtgaaaccctgggcggcgatccaggtgcacatcatgagctgagagcgctggctgttgccccggtggaaggaatagaggctgtaggtgagggcggccgccgtggccaggcaacctatgggtaccaccgggttctcgtgggtcttgtgaaggaacttttccttgaaactctctggattcctgtaaacagtggggctaagcccctcaatgactgggggcttcgatggttcaaaggggacctctggaatcacagggccrgagtcgccatgtctgggccacagcagcaggagaaaatcgcgacctaagacagggtcttgctgtgtttgtcaggctggccttgaacccctgggctcaagagatcctctcgcctcagccccctgagtagctgggagtac

SEQ ID NO: 778490 - DNA, 665 bp, Homo sapiens
tttcagtcagaagccactaaccagataagccagcagcaggactgagggtgcccggggcaagcgccagcccatgccccaggtatgcttgaccattgggggccagaaggttaactgtctcctgaacactggcatggccttctcagtcttartctctggtcctggacaaccgtcctccagatctgtcactacccgaggggtcctaggataggcagtcactagatacttctcccagccactaagttgtgactggggaacttcattcttttcacttgcctttctaattatgcctgaaacccccacacccttgttagggagatacattctagcaaaagcaggggccattatacacctgaacatgggagaaggaacaccgtttgctgtcccctacttgaggaaggaattaatcctgaagtctgggcaacagaaggacaatatggatgagggaagaatgcccgtcccgttcaagttaaactaaaggattccgcctcctttccccaccaaaggcagtaccctcttagacccgaggcccaacaaggactccaaaagattgttaaggacctaaaagcccaaggcctagtaaaaccatgcaatagcccctgcaatactccaattttaggagtacagaaacccaatggacagtggaggttagtgcaagatctcaggat

SEQ ID NO: 778491 - DNA, 598 bp, Homo sapiens
aaaaaaattaaaaattagctgggagtggtggcatgtgcctgtagtcctagctactctggaggctgaggcagggaggactgcttgagcctaggagttccagcctgggcaatgaagtgagactctgtctctaaaaaaataaaaacagctgggtgcggtggctcatgcctataatccctgcacttcaggaggctgaggcgggtggatcacctgaggtcaggagttcgagaccagcctggccaatatcgtgtaaccctatctctactaaaaatgcaaaaattagctgggcttagtgacgtgcacccataatcgcagctactcrggaggctgaggcataagagagaatcggttgaacctgggaggcagaggttgctgtgagccaagataatgccactgcactccagcctgggcaacagagcgagactccctctggaaaaaaataaataaataaataaaataaaataaattaaaagccctagtccccttagtgttagctgagactcagctcagtgtgtcctggaacctcttccccactccaggggtctgaatgaagccagtcttgccacctttcacaagtgtctggcaggcactgtttactttt

SEQ ID NO: 778492 - DNA, 581 bp, Homo sapiens
ttgattgattgctcaattaggcaggggcaggattggaagaggaaagagagggagggaggaaagcataagtatctctactgtatagataaggaaactgaaaagcagagacattaaatgtcttttccaggattcctttaccctkttggtgagttggtggaaaacaagaaatatgcctcctaattctaaagcaagaaatatgcccctttttactctaccaaactttgctcaaattgatttgatgacctataatttaaacttctagaatccaagaaatagaaaagatgccactcctgcctcctgccatacaccctgctggcttccttcctttcaggggcttgctagtaaagccacagcctgcttggatagcagctacgattaagtatacacaacatttcagagattcaattcagcctccatatgtttcttctgtatatatttcttctatatgtgggtctattatctttgttaatagagatttaaggatattacagttacatggatgttggatttaaggggaaataataatggaactctgtcatcatatatcttcccaccaccaaaacacatcgatttgtagtctg

SEQ ID NO: 778493 - DNA, 581 bp, Homo sapiens
ttgattgattgctcaattaggcaggggcaggattggaagaggaaagagagggagggaggaaagcataagtatctctactgtatagataaggaaactgaaaagcagagacattaaatgtcttttccaggattcctttaccctgttggtgagttggtggaaaacaagaaatatgcctcctaattctaaagcaagaaatatgcccctttttactctaccaaactttgctcaaattgatttgatgacctataatttaaacttctagaatcyaagaaatagaaaagatgccactcctgcctcctgccatacaccctgctggcttccttcctttcaggggcttgctagtaaagccacagcctgcttggatagcagctacgattaagtatacacaacatttcagagattcaattcagcctccatatgtttcttctgtatatatttcttctatatgtgggtctattatctttgttaatagagatttaaggatattacagttacatggatgttggatttaaggggaaataataatggaactctgtcatcatatatcttcccaccaccaaaacacatcgatttgtagtctg

SEQ ID NO: 778494 - DNA, 544 bp, Homo sapiens
catagccaccccctccatcaaggggcagccaaagtgctttggtaaactggtcctgctccccttgccacccaactgggtgagatcctccaacaggagttgtcagacaccctatacaggagcattcctgctggcatcaagttggtgccccttgaggtcagaaatcccagatgaaggagcargcagccatctttgctattcttcagcctccttgagtgtcatctccaggtgcaggagtgaaccagatgaatagggcctgaagggaacccccagcaaaccacagcaatcctacagaagagagatctgactattgaaagaaaaacaaacaaacagaaagcaacaacaacagtgtcaacaaaaaagtccccacaaaacctcatctaaggatcagcagcctcaaagttcaaaactagataaacccatgaagatgagaaagaatcaatgaaaaaaaatgctgaaaacccaaaaggccagagtgcctcttctcctccaaatgattgcaccacctctccagcaagggcacagaattgaacagagaatgagatgg

SEQ ID NO: 778495 - DNA, 402 bp, Homo sapiens
attaaagttatatttacatgacactgcattctgttgagtgtgcaatagtattatgtttttaaaaacatgtacaatcatctaaaccttcaatgactcatcatctttttgctggtggaaggtctttcgtcaatgttgatggatgatcagtgatcagggtggtagttgctgagaattgaggtgacttgcaatttcttaaaataagacaacagtaaagtttaccacrtcagttgattcctcctttaatgaaatatttctatatagcatgtgttgctggttaagaagcattatacctacaggagaaattctttcaaaattcagtcagtcttctctaaccctgctgctgctttattaactgagtttatgaaataatcacaatcttttgttgtcatttcaacaatgttc

SEQ ID NO: 778496 - DNA, 585 bp, Homo sapiens
tcatgaggaagagatgtccctttagtcctaaaacagcgcatcctgccttacgacttcttgagtcattgctcaaaaacgaatgggcttgggcgctttcttcctcaaataccacatattgaaaggaaaagcaatgcagcaaaacatcacaaagttgcacaaagacatgcgtgcttgtgtcatcttatttcctcagagttcctggacatgtgagaaggtrcacggaccatcattctcagagataacttgagcttggactcagacccagccaggaccttcctcctctttctgtgtccagcccacacctgagcacctacttcatagacctgctctgctgaggtggtttgaatataccacattccagaatgggattgttttgcacctgtcaagattttcttctgttcactccagatttggtcatgatgaggttcttctgtcctggaactgccctacacattcaacttgggatttggttccagcagtgacagattatgcaggattaagatcccaagtacagtgcactagagcagagtcaggcagcacgggcgttgtcaccacgcagtcctgaattcaaggtctaccaccctc

SEQ ID NO: 778497 - DNA, 585 bp, Homo sapiens
tcatgaggaagagatgtccctttagtcctaaaacagcgcatcctgccttacgacttcttgagtcattgctcaaaaacgaatgggcttgggcgctttcttcctcaaataccacatattgaaaggaaaagcaatgcagcaaaacatcacaaagttgcacaaagacatgcgtgcttgtgtcatcttatttcctcagagttcctggacatgtgagaaggtgcacggaccatcattctcagagataacttgagcttggactcagacccagccaggaccktcctcctctttctgtgtccagcccacacctgagcacctacttcatagacctgctctgctgaggtggtttgaatataccacattccagaatgggattgttttgcacctgtcaagattttcttctgttcactccagatttggtcatgatgaggttcttctgtcctggaactgccctacacattcaacttgggatttggttccagcagtgacagattatgcaggattaagatcccaagtacagtgcactagagcagagtcaggcagcacgggcgttgtcaccacgcagtcctgaattcaaggtctaccaccctc

SEQ ID NO: 778498 - DNA, 585 bp, Homo sapiens
tcatgaggaagagatgtccctttagtcctaaaacagcgcatcctgccttacgacttcttgagtcattgctcaaaaacgaatgggcttgggcgctttcttcctcaaataccacatattgaaaggaaaagcaatgcagcaaaacatcacaaagttgcacaaagacatgcgtgcttgtgtcatcttatttcctcagagttcctggacatgtgagaaggtgcacggaccatcattctcagagataacttgagcttggactcagacccagccaggaccttcctcctctttctgtgtccagcccacrcctgagcacctacttcatagacctgctctgctgaggtggtttgaatataccacattccagaatgggattgttttgcacctgtcaagattttcttctgttcactccagatttggtcatgatgaggttcttctgtcctggaactgccctacacattcaacttgggatttggttccagcagtgacagattatgcaggattaagatcccaagtacagtgcactagagcagagtcaggcagcacgggcgttgtcaccacgcagtcctgaattcaaggtctaccaccctc

SEQ ID NO: 778499 - DNA, 718 bp, Homo sapiens
ttgtaacggagctgatgacattggatccatcctcacgtcatagtgcaattactttcattcattgatttagagacggggtcttgctcccgcaattacattatttatttagagacagggtctcactctgcccaggctggagtgcagtggcaggatcatggctcactgcagcctccccctcccaggctcaagtgatcctcctacctcagcctcccaagtggctgggaccacagatgtgggccaccatgcccagctattttttatttatttatttttttgagacagggtctcactctattgcccaggtggagtgcagtggcaggatcattattcactgcagctttgaccttctgggctgaagccatcctcagcctcctgaggaggccgggactacaggtgtgtgccaccacgcttttttttttctttattgtaaggcggggggggtctcacttttttgcccagactggtctcaaastcctgggctcaaaggatcttcctgcctcagcctcccaaagtgctgggattacacttgtgagccactatgcccagcctaactttatttttttatttttatttttatattttgagatacagtttcgctcttgttgcccaggctggagtgcaatggcatgatcatggctcactgcaacctccgcctctctggttcaagcaattctcctgcctcagcctcccaagtagctgggattacaggcacccgcca

SEQ ID NO: 778500 - DNA, 499 bp, Homo sapiens
aagccaaggcaaatgaaaagctagacctcttataccaaatagccaagttgtaaatacaaaggaaaagttcttgagggaaattaaaattgctactccactgaacacacaaattataagaaagcagaacagccttctgacagatatgagaatatcagaggtcctcatagaaacccagaccagccacagcacttctttaagccatagcctaatccagagcaattccctaactctcttcaattctgtgaaggctgagagaggcgaggaagttacagaaggaaagtttgaagctagcaaargttagtttatgaggtttaagaaaaatacaagggaaggaacaagttctgatgtagaagctgctgcaagttatccagaagatccagctaagataattgatgaaggtggctacactaaataacagattttcaatgaagaagacatggccttatattggaagaagatgccatctaagacttctgtagctatagaggagaagtcaatg

SEQ ID NO: 778501 - DNA, 567 bp, Homo sapiens
aaagattctgggttttactgaatgctttttttgtgtctattgggatgatcatatggttttgtttttaattctgtttatttcatgtatcatagacacatttattgacttgcatatgttaaaccatccctgcatctctgaaatgtcttatgcacttaatcatactctattatctttttgagatgctgtttgattggattagctagtattttgttgaagatttttgcctctatatttattagggatattggcctacagctttctttttctattaagccctttcctgattttggcatcagagtaatactggcttcatagaatgaattagagaggattctgtccttctcaatcttctggaatagtttcagcaatattggtaccaattcttctttgaatgtcaggtagaattcagctgtgaattcatctggcccttrgcttttttggttggcagtttttgtttttttttaattactgattggatcttactgcttgttattggtatgttcagggtttctatttcttcctgatttaatctaggagggttatatgtttccggggatttccatttct

SEQ ID NO: 778502 - DNA, 474 bp, Homo sapiens
caccacaacttaattttgtcctttttgaactttataaaaatagggatcatagctttcactttatgtcttattcttttagcgtatgtctttgagattcattcatgttgttacctgaatcatacggttcattttccattgctgtgtagtattccactgcatacatatactaccttctatagactgaatgtctgtgcctcccaaaatgtatatgttgaaaccctaaccctcaaggtggtcgtattagaaggtggtacctttgggagatgattaggtcatgagggtggaaccctgataaayggaatcgtcaaaatatataagagattttcggagaccttccttgctccttcagccatgtagggatgtactgggaagaagtctaggaaccaggaaatgggccctccctagacaccgaatccattagcaacttgatcttggacttctcagtctccaaaacagagaagtaaacgtttgttg

SEQ ID NO: 778503 - DNA, 622 bp, Homo sapiens
ataaaaatatgcttcattttttagaaattgcctcctgtgttccccattacttctaattatcctcatattatttcataatgtgtatgtatgtgtgtgtgtgtgtattccttgatgcatttgtaaaatcctccagagaakagaccagtaaattcaagacacttcttgtgggaaacttctttccatggggacctgcacataatgtaaggggagaaacaagtcatctgcaaataccaagagtgtgcattgtcaaccctaaaataattctttttcatcttttgtgcttgttctggtgtatgtgtgttctgggttttttcattgaactgagtggtaggcactcaagatgcttagagctctaagaggtagataagtaatggggtcaatcttcaagggacttcacataaagcagagaagactgataattaacaatagtatgtggccttcataaggttctgaggcagacagagtaaggagtactgtccttcaaaaggtcagagagtacagcaacaggaaaggcttcccagcaggagttatgttttaactgagactaacaacctaattgtaaaacaaaacaaaaacattttttaagtaaagtcctgaatttccccttgatcacctaagtaat

SEQ ID NO: 778504 - DNA, 639 bp, Homo sapiens
cttgcctgtggcaactctagttaactatagaaagaaaaaaaaagttctattcctccaaaagaattaaaatgaaggaggacagcatattttctgctttaaaaaatctagaattgtggtttctaaagaaaacccactgtgtacttgataatttctaaagaaaaatttgttatggactataggttataccttgcatttaagaaccacaacgaaaagaccaactttaacttytcctcattaaaatgataagaattggtattgcctataattgtttccactgtgactcctatgtggtttttgttcaatatactagtccaaacaagattttactcttctcagccctgtagatctaatctcacaaaactaagcatatttttttcagtttcatacatcatcaccatcatcttcctgaggatgtatttttttttttttttttgaggcagagtcttgctccgtcaccaggctggagtgcagtggcgcgatctcagctcactgcaacctctgcttcccagattcaagcaattcttctgcctcagcctcctgagtagctgggattacaggcacgtgtcaccagcccagctaatttttctatttttagtagatacggggtttcaccatgttggtcaagctggtctcgatctc

SEQ ID NO: 778505 - DNA, 656 bp, Homo sapiens
tctcgaacacctattgtgtatacattagagtggattcaaaataaatatttaaacagatttctgttcctgtggaatggtatttttccagcaaacctctccagcgattgtttttattaggctttgcaatttctataaaaggatatcaaccctgtcccaacttcattactatttctgctattaattaacaataaaaaaaataggctaggcatggtggctcacatctgtaatcctagcattttgcaaggctgagatgggtagatcacttgagtccaggagtttgagaccagcctgggcaacacagaaaaatcctgtctgtacaraaaatgcaaaaattagctgcgcatggtggcgcatacctgtagtcccagctacttgggaggctgaggcaggaggatagcttgagcctgggaggcggaggttgcagtgagtcaagatggcaccactgcactccagcctgggtgacagagtgaaaccccatctcaaataataacaataacaaaaaatagttgtatttcaagtaatataatctagataatctaatataatataatctagataatctagaattcactgtcattcaatgaattatatctgtgtgaagtgttctctatttggtccaaatcttttaaaaatgggaatactaaagttcacagtaa

SEQ ID NO: 778506 - DNA, 462 bp, Homo sapiens
accacgggcctggcccgcagaggactatgagggcaggggctggcgagtcaagctggctggaaaggcctctctgaggaactgaggcttaagctaaaaaaactctgcatgacgctgggtctctgagatccggaggaaggggctcccggcagcagaagtgsccagggtgcgggcctgaggtacaggagctgcggggctcctcaaacagcagaaagcctggtctcatggctaccgccccccatgagcaggatcagtgccgacgaggctgcagcgagtgtcgggctggccaccgcgaggggcctgggacgccactgccggcagaggctagaaggggcctgaccacacctgggcgtttccaccataagaacacaaaagccctgcgagcagagaagagagcactgcagtacagaaatcaggaaggcagagttgtaagcactgattgcatttgttttaatgtgacttatt

SEQ ID NO: 778507 - DNA, 518 bp, Homo sapiens
  misc_feature 310: n = A,T,C or G
tgcagccacccagctgtcgctgtggatccatgcatccctgcactctcagaggcctgggaatccagctgcccccgcaggctcagaagttcctactcccactgcctggcctctcctcactttcggtgcccgatccaatttcagaccaaagttgaggcccctcctggatgatgtcacaacccggacaggtgtgcatgcacttgaggcagtgctggcacaccagccccctgctgcctcagccccatccggactttcggtgtggagcacaggagagaggctgagtaggrgctgaggctgactcagcgcaggcctngtaggcacctcctcaacagcatggacaacatgattgatggcagctggaggcagacaggttcctttgtgaaaaagagtggatctcctgttaagcctaaccttcaagccaggtaaagcatagggcctgggctgtcagttccctgtggagtcagcagcctggagtgataatttatggtgccttatatgggcccacccatggctgtcgatgg

SEQ ID NO: 778508 - DNA, 636 bp, Homo sapiens
caatgggtaaaatctttgggaggatccactatcattaattttgttctgggtataatttgtgctattggtttattgttcatgtgtacaattggaaaaaatattcttcaatccaatcatgatcagcaccaagctatgattgctatggagtttcatttaaatcagagaaaagggggagatgtagaragaccccctgaaactattgctatggaatgaaagatgaaatgctcctgattattataaatacaaaattgcatgcaggatggtgtaaagacaacgccaggttgggctgccagaatgagccgacagcacatgatgtgcttccccctgcagagagtctaagaatggacgtgcagtcagggaggtttcacatcaccaagattcctatcccagaaaagcagatgttcatagcactggcaacccttgtggagagcctataaatggatgcatgaggggtgcctgtttatatgcccttatcttgccatggctcttttaagcctctttagggttaaggcatactcccttctgagaaattctggtctaactggttgtctagcttcatgtcctgttctttgattgcttgtaaccagattttgctgccactgttactgctgattagtatcttgctaatcataggtt

SEQ ID NO: 778509 - DNA, 598 bp, Homo sapiens
agttgagttttaggatgattgaggaggagagatgggactatgagtgtttatttattacatatgggcatacacatggcgtatacgcaaggaggtgcacatcatgtatacaagactatggatgtttgcatgtgtttctttgaaggtgagtatgtyttaagttttttaatcagcaaacagtttttcagaacctactaagtacaggaccccaagtgtgttttagacattaaacagttcctgccctctaggaattcaataaagaatgcagaaagaaagagcctgtggaggtccctcagctaatgaaacctcctgaactccagtctatattagttttaccacctcttttccctgaaacacccaaagcctccttgtatggaactacagtcacatgtcactgaacaacagggatatgttctgagaaatgcatcgttaggcgattttgtcgtcatgcagacatcagagtgtacttccacaacctagatggtgtagcctagtacacaccaaggttatgtggtatagcctattgctccaaggctataaacctgaacagcatgttactgtactgaatactgtaggcaattataacacaatggtaagtatt

SEQ ID NO: 778510 - DNA, 598 bp, Homo sapiens
agttgagttttaggatgattgaggaggagagatgggactatgagtgtttatttattacatatgggcatacacatggcgtatacgcaaggaggtgcacatcatgtatacaagactatggatgtttgcatgtgtttctttgaaggtgagtatgttttaagttttttaatcagcaaacagtttttcagaacctactaagtacaggaccccaagtgtgttttagacattaaacagttcctgccctctaggaattcaataaagaatgcagaaagaaagagcctgtggaggtccctcagctaatgaaacctcctgaactccagtctatattagttttaccacctcttttccctgmaacacccaaagcctccttgtatggaactacagtcacatgtcactgaacaacagggatatgttctgagaaatgcatcgttaggcgattttgtcgtcatgcagacatcagagtgtacttccacaacctagatggtgtagcctagtacacaccaaggttatgtggtatagcctattgctccaaggctataaacctgaacagcatgttactgtactgaatactgtaggcaattataacacaatggtaagtatt

SEQ ID NO: 778511 - DNA, 603 bp, Homo sapiens
gtgactacttgttatttaataactggcctttcctccacagggcaggcttgaaacgggtggcttactcgttatttaataaactggcatttcctccccagggcaggcttgaaacggtggcttactcgttatttaataaactggcatttcctccacagggcargcttgaaacggtggcttactcgttatttaataaactggcatttcctccatagggcaggcttgaaacggtggcttactcgttatttaataaactggcatttatttcctggtcatgccacgctggctgcacttctaaccttggccttctaacagcaaagcacattggcttggagatgccactgctggcatcagtggatgccgacccaaagcaaggaacaggtcacagtgatccagaaaatggcgagaacccagggatcaaagttaccagagggaaaaaggcattttttggatatacttttggggaaacgacataaaatgcagagaaaatgcaggggtggggctgagtcccaccaggcgggaggaaaaggcaggtgcaggtgggcgtggcgagaaggcgcaccttgtagtcttccccggcgtgcgcgccccgtgactccttccccg

SEQ ID NO: 778512 - DNA, 603 bp, Homo sapiens
gtgactacttgttatttaataactggcctttcctccacagggcaggcttgaaacgggtggcttactcgttatttaataaactggcatttcctccccagggcaggcttgaaacggtggcttactcgttatttaataaactggcatttcctccacagggcaggcttgaaacggtggcttactcgttatttaataaactggcatttcctccatagggcaggcttgaaacggtggcttactcgttatttamtaaactggcatttatttcctggtcatgccacgctggctgcacttctaaccttggccttctaacagcaaagcacattggcttggagatgccactgctggcatcagtggatgccgacccaaagcaaggaacaggtcacagtgatccagaaaatggcgagaacccagggatcaaagttaccagagggaaaaaggcattttttggatatacttttggggaaacgacataaaatgcagagaaaatgcaggggtggggctgagtcccaccaggcgggaggaaaaggcaggtgcaggtgggcgtggcgagaaggcgcaccttgtagtcttccccggcgtgcgcgccccgtgactccttccccg

SEQ ID NO: 778513 - DNA, 613 bp, Homo sapiens
atttggacatttcatctgattttccttagactcatacataatcgtaacactgtaatgcacatcaacctaatggtttttcaggaagaacaaatgaaaaaaattgcatctcagaatctagtattacattctttcatgtccttyagcagcgacgttttcatatcatcttttcgtatttctggttacattatttcaaggcattttaaattttttgtttgaaatgcgaatgagatatttactgatgtctgagcagattactgctggcacattgcaaagctactgatttttacatacaaatctcttatacacataccttactacattcttgttttgtttctgttagtttttccgtttattctctggaaattttttggaaattatatctgtaaataatggcaactgtatctattccttttcaatatttactgccaagaccagctgggtcatggaaaccctaacccagtggcactagaggaagtaaagacacacacacagaaatatagagtgtggagtgggaaatcaggggtctcacagccttcagagccaaaagcctcaaacagagatttacccacgtatttattgacagcaagccagtgataagacttactgaaagtat

SEQ ID NO: 778514 - DNA, 613 bp, Homo sapiens
atttggacatttcatctgattttccttagactcatacataatcgtaacactgtaatgcacatcaacctaatggtttttcaggaagaacaaatgaaaaaaattgcatctcagaatctagtattacattctttcatgtcctttagcagcgacgttttcrtatcatcttttcgtatttctggttacattatttcaaggcattttaaattttttgtttgaaatgcgaatgagatatttactgatgtctgagcagattactgctggcacattgcaaagctactgatttttacatacaaatctcttatacacataccttactacattcttgttttgtttctgttagtttttccgtttattctctggaaattttttggaaattatatctgtaaataatggcaactgtatctattccttttcaatatttactgccaagaccagctgggtcatggaaaccctaacccagtggcactagaggaagtaaagacacacacacagaaatatagagtgtggagtgggaaatcaggggtctcacagccttcagagccaaaagcctcaaacagagatttacccacgtatttattgacagcaagccagtgataagacttactgaaagtat

SEQ ID NO: 778515 - DNA, 613 bp, Homo sapiens
atttggacatttcatctgattttccttagactcatacataatcgtaacactgtaatgcacatcaacctaatggtttttcaggaagaacaaatgaaaaaaattgcatctcagaatctagtattacattctttcatgtcctttagcagcgacgttttcatatcatcttttcgtatttctggttacattatttcaaggcattttaaattttttgtttgaaatgcgaatgagatatttactgatgtctgagcagattactgctggcacattgcaaagctactgatttttacatacaaatctcttatmcacataccttactacattcttgttttgtttctgttagtttttccgtttattctctggaaattttttggaaattatatctgtaaataatggcaactgtatctattccttttcaatatttactgccaagaccagctgggtcatggaaaccctaacccagtggcactagaggaagtaaagacacacacacagaaatatagagtgtggagtgggaaatcaggggtctcacagccttcagagccaaaagcctcaaacagagatttacccacgtatttattgacagcaagccagtgataagacttactgaaagtat

SEQ ID NO: 778516 - DNA, 641 bp, Homo sapiens
cctaggaaaaaccaggccatacagagataggagctgaggggacatagtgaggtgtgaccagaagacaagagtgcgagccttctgttatgaaagaaccgggccaccagagggctccttggtctagcggtgatgccagcgtctgggaagatgcctgttaccaggcggatagcaaaaggtgtcaaggaacaacacccgatacttagcagaccgggaaagggcggggaggggggggggtctccctttccccgggggagtttagagaagactctgctcctccwcctcttgtggagggcctgacatcagtcaggctcgcctgcagttatccggaggcctaaccgtctccctgtgatgctgtgcttcagtggtcacgctcctagtccgccttcatgtttcatcctgtacacctggctctgccttctagatagcagtagtaaattagtaaaaatactaatagtccctgatatgcggaaataatggcataagctgtctttctctctgtctcctctccctctctgcctcggctgccaggcagggaagggccccctgtccagtggacacgtgacccacgtgaccttacctatcattgcaggtgactcacattctttaccctgccccttctgccttgtatccaataaataaca

SEQ ID NO: 778517 - DNA, 542 bp, Homo sapiens
cccacagaaggacactagcctgtgcacgcgcgcgtgcacacacacacacacacacacgagttcataatgtggtgatggccctaagttaagcaaaatgcttctgcacacaaaactctctggtttacttcaaattaactctatttaaataaagtctctctgactttttgtgtctycaaaaccaggaattccattcttgattttcttctggtggccgaagggctggacacagacttctcccaaccatcagagggcacagagtgtggaggttaagtgctgggcagcagtggagcattaggggcagctggatccagtcctaatcagcccggttacccatgctggaaaccctcagttgctccaccccaaccttgcttcatgctccacatcaccttcttcttcccccaccccagcacaggccaaagcttcgcccgctaagaaggagagcgaaagagattccccaagatggagtgccccagactctttcccaggacccctccctgcctgcctgtccatcagtttcacaaaagtcgtaaaaggatcaatgc

SEQ ID NO: 778518 - DNA, 542 bp, Homo sapiens
cccacagaaggacactagcctgtgcacgcgcgcgtgcacacacacacacacacacacgagttcataatgtggtgatggccctaagttaagcaaaatgcttctgcacacaaaactctctggtttacttcaaattaactctatttaaataaagtctctctgactttttgtgtctccaaaaccaggaattccattcytgattttcttctggtggccgaagggctggacacagacttctcccaaccatcagagggcacagagtgtggaggttaagtgctgggcagcagtggagcattaggggcagctggatccagtcctaatcagcccggttacccatgctggaaaccctcagttgctccaccccaaccttgcttcatgctccacatcaccttcttcttcccccaccccagcacaggccaaagcttcgcccgctaagaaggagagcgaaagagattccccaagatggagtgccccagactctttcccaggacccctccctgcctgcctgtccatcagtttcacaaaagtcgtaaaaggatcaatgc

SEQ ID NO: 778519 - DNA, 609 bp, Homo sapiens
cttccttgccaggacctcgagtttgttcagttccaccccacaggtagggcaggacgccttgcccggaaggcgttcggctcgtgtgtcttgtaagcgtgtggtgcctactcattgctcttccatagttttatgtaataacatggttttgaagatcagcttccatagctctcaggtcctaacttcaatgtcatttccttaaggagacttttcccacactccccttcccctaaggcagtttgggccaccatcttatgcatttctcaagagccctaaaccctgccttggtgatacttatgccagcagtaaagcagggattgaggccgggcatggtggctcacrcctgtaatcccagcactttgggaggccaaggcaggtggatcacctgaggtcaggagttcaagaccagcctgcacaacatggtgaaacctcatctctactaaacataaaaaaatcagctgggcatggtggcatgcacctgtgatcccagctacttgggaggctgaggcgggaggaatgcttgaacctgggaggcagaggttgcagtgagccgagatcgcaccactgcgctccagcctgggcaacagagtaagacttcgtctcaaaaaaaaa

SEQ ID NO: 778520 - DNA, 595 bp, Homo sapiens
aaattaaagcgtaaagatacagtaaaataaactcatcatttttaatgtaggtttttcaaactttgacacacacagagctgtgtctgtaagcctcagcacaatcaggaaacagcctctggcaaccaccaatcccttttcttccctagatgtgccttgtccagaatgtcctatcaacaggaccacaggcgtgcagccttttgagtccgactccacagcattctgcgtgagatgctgcatgtgtgagcggtttctcagatgtcaagtatagggtattctcacaaaatgttcttttctgcattttcaaagaaagagaagctcaaaatttctacactgctctgagagaagtggtatcagacctcactgcgacaaagtgcagggctatggagtgagacaagcacaacctgtggcgtcaggagcgaggcacctgaacyccgccttcgccgatgatcagcaacggctggggatgagacgccggctctgcatgtgctggcctcctgagctgtcgtcagatccacagagacacagtgtctgaagtagctacccttttaatactgcctgtacctttctaactacagatagaaaagggtcatgttta

SEQ ID NO: 778521 - DNA, 575 bp, Homo sapiens
aatacgtaatgaacttcccctaaaaataacagcttcctaatagtgctttttctaaacagaaaataatgactgcaaaataatttaaaaaaaaaaaatgtaaccccaaaaatgtcaccttaactgttaagatccccaaccagcctctatctagtctcaacattaccaccatataatctctggatttctcagtttaatcacttctaggggaaaaaacccagactacctctatatgctcactamgcaaatttccagtaagaaatcaaggctttgtaacctggctgggtgcagtggctcatgcctgtaatcccaatactttggaaagctgaggcagaagactgtttgagtctaggagttcaagaccagcctgggcaatattgtgagaccctgtctctaccaaaaaaaatttttttaaattagccaggtgtggtggtgcacatctgtagtcccagctacttgggactctgaaggttgaggtgttgaggactgcttgagctcgggaggttgaggctgctatgactgtgccactgcactccagcctgggctgaccctgtctcaaaaaaaaagaaaaaagacta

SEQ ID NO: 778522 - DNA, 605 bp, Homo sapiens
tagaggggaaaattatttatataataaatgatactgaccctgatatattggttattcatccagaagtaaacaaagttgtaccttttataagctttcataaagatatgaagataaatgaatttaaagaactaaactccaggccaggtgcaatggctcacacttgtaatctcagagctttggaggccaatgcggaaggaccacttgaggccaggagttcgagagcagcctaggcaacacagtgataccctcactctacaaaacattttaaaataattagttgggcacagtggcacatgcctataatcccagctactcagtagtytgaggtgggagggtcacttgagtccaggagtttaaggttgcaatgaactgtgatcttcaactgcattccagcctgggtgacagagcaagaccttatctttaaaaaagaaaaggattaaaaaaaaaaaaaagaattaaacttcaaggagtcatgtatgagcctttcttgagttggcagagaatggcaactgttagaagcattgccaagtatgggcataggtgggtggataatgcagcctgtcataaatacaggggaccatgactaagttaagaatttgttttag

SEQ ID NO: 778523 - DNA, 647 bp, Homo sapiens
cgtgtgcttctccgagatcttattcctaggtttggactgcccttacgaattggctcacataacgggccggtgtttgtggctgacttggtacagaagacagcaaaggcattaggaatcacttggaaactacatgccgcctactgacctcagagttctggaaaggtggagcgaatgaatcagactatcaaaaatagtttagggaaagtaygtcaggaaacaggattaaaatggatacaggcccttcctatggtattgtttaaaattagatgcatcccttctaacaggatactccccttatgaaatactgtatcataggcctcctcctatactagggggacttccaggcactccccgagagttaggtgaaattgagttacagtgacagctacgggctttgggaaaaattacacaaacaatctcaacttgggtaaatgagaggtgtcccgtcagcttattctccccagttcaccctttctctccaagtgatcgcatgtggatcaaggactggaacgtagcccctttgcggccacagtggaaaagacctcacaccatcatcctgaccacccccacggctgtaaaggagaaggaatcccagcctggatccaccacagccgtgtgaaacctgcagctgctgaaacttgggaggc

SEQ ID NO: 778524 - DNA, 636 bp, Homo sapiens
cacttctacctcaagatttgtgtggatgtctacaggaaaccagggggtcaaaaatagaaagagaagaggtgctgaacattggagatggactcaatttccccctccaggcaattcttctccccaggatctctcacgggtttttgctttatacatatatgtaatgctatttttcaaacatataaagagactgttgtggctaatttttaaaacctataaatttatctaaaaatcctattgaaatccaaatgtcttttgccttacatacaccattagataataaaagcacaacttccactacgtaaggtcwgattctttggtggggaaaagggattaaaagaggtcctcatcttgagaaaccactgctatacaccacaggtgtgtaatgacagccctgccttggtgatcctccaggttggggagtggcaccacatccaggttatgttgaatctcaatttacaatgtatagtgtactttttttttttttaagatggagtcttgctctgttgcccaggctggagtgcccattatgagtcatggagactcagattttgagtaagagagaaataaaactttgtgcttttaagtaataataagtcaatcctgactaatatcacatggtaagaagtctggatttta

SEQ ID NO: 778525 - DNA, 744 bp, Homo sapiens
gactcagtggagagttctttagtacatgggacaacataacaaatgagtgggagattattggtagagttcaacaggctattgggcttatcagactccaaaattatttccccctttagggataaagagatgccaacatgacatatattttttttaaatctcatcccaataagttagctggagcagattctgctagtaaaaaaggataggtatcttgtaaaaacccaaggcaaaaagcaatgggctgagcttgaaatgccatcagtggtttattagaaactcctactatttgaataattttataactccaaggcaaggcctggcttaggttggtgggattgagtactgatagggttgcttctgtgtcaatgagaacaggtaggacctcattgccaaggaggttgaggggaagaattggaaaaagcccctgtatatttttggatccctttcattaggaggcaggagtcaaagggctaaatgaagaagactatttagattggttaaatttataacagtttttcttgctgtggccaggttgtttacaataatgacggatgccaggaggtgagtttcatgaattagaggagtggygccattcagagccctaattgttttctctgggacctttcatttgttgtaattggaggtttgggatttttgtagtcttctttttattggtatcctctagggtgctatctaattgatttgccaaattaacaaggtaaaggattggcatgggttttcatt

SEQ ID NO: 778526 - DNA, 589 bp, Homo sapiens
ctcaactgggagtgattctaccccctaggggatgttgggcgatgtcaagagacatttctggtgttcccaaaactgagggttacaactggcatctagtggtagaagctggggatgttgctaaccaccctacagtgcataggacagcctaaatgtcagtagttttaaagctgagaaagcctggtctagaatatttgaatatattataattttttgaattatgaatggttttgtatatacccagaaactgtctaccacacgcaatactttattaaccagaaatccttttctgcaaccttactggagaataagtttaatacctgttattgaggtttacaccttaggaatatcttattgattacaaagtttgagatgacctggaataaataaatgattgaaaaaggatataggacacttttctagagtsctaagaaaggggatgtctctctctgtccaggaggcccatggcatagtctgagctagagggaacaggggatgttaaatgtttttgatgtttactttttgttattacttccagtcttaggatcctactttcacatgaacacctgaaatggcactgagcaccctggga

SEQ ID NO: 778527 - DNA, 504 bp, Homo sapiens
agccagatggtccatttttatgacattttacaagttgtgtcagtgccatttgtcttgcctatgatttactgataaaagaagtatagatttataatatttttaacgtaaattgaactagggagttttctgattccttgtgcttgsagagctgtgaaccctatggtggcctgtccattgctggccttgtctcctggaatttaggcttgcatgcagtttttttccacatcagatggctgtggctgagtcacttgacttgttctggccaatggattactagcaagtgtgattcatgcagcagatgcagcagccttattaacagttgaacaacagggctatctttcagaagtcagttgcctgtatggaatgtagggaagctagtgctagatttcaatagtgataggacacatggaggaagggccctagagcatgagaggccattctggaaattccagccctagtcccagctgaacatagatacatgggagactccatctccatcctgtg

SEQ ID NO: 778528 - DNA, 624 bp, Homo sapiens
cctcccggtgggttcgtggtctcgctggcctcaggagtgaagctgcagaccttcacggtgagtgctacagctcataaagtttgtgcagacccaaagagtgagcagcagcaagatttattgcaaagaccaaaagaacaaagctgatacagtgtggaaggggacccgagcgggttgccactgctggctcgggcaacctgcttttattcgcttatctggccctacccacatcctgctgattggtccattttacagagagttgattrttccattttacagagagctgattggtccgttttgacagggtgctgattagtgtgtttacaatccctgagctagacacagagtgctgattggtgcattcacaatcctctagctagacataagagttctccaactccccattagattagctagacacagagcactgattgatgcatttacaaaccttgagctagacacagggtactgattggtgcctttacaaaacttgagctagacacagagtgctgattggtacatttacaatcctccagctagacataaaagttctccaagtccccacccgactcaggagcccagctggctttgcctagtggatcccaccagtcctgcaccttgtgcctg

SEQ ID NO: 778529 - DNA, 624 bp, Homo sapiens
cctcccggtgggttcgtggtctcgctggcctcaggagtgaagctgcagaccttcacggtgagtgctacagctcataaagtttgtgcagacccaaagagtgagcagcagcaagatttattgcaaagaccaaaagaacaaagctgatacagtgtggaaggggacccgagcgggttgccactgctggctcgggcaacctgcttttattcgcttatctggccctacccacatcctgctgattggtccattttacagagagttgattgttccattttacagagagctgattggtccgttttgacagggtgctgattagtgtgtttacaatccctgagctagacacagagtgctgattggtgcattcacaatcctctagctagacataagagttctccaactccccattagattagctagacacagagcactgattgatgcatttacmaaccttgagctagacacagggtactgattggtgcctttacaaaacttgagctagacacagagtgctgattggtacatttacaatcctccagctagacataaaagttctccaagtccccacccgactcaggagcccagctggctttgcctagtggatcccaccagtcctgcaccttgtgcctg

SEQ ID NO: 778530 - DNA, 643 bp, Homo sapiens
ttcctggcaatttttgtgtaaacaagtttgaattggggccttggaatagctgagaaaaacgtgtcattggcaattgtcctagaattacaaacagtgcaagaaaatgatgaagtcacctattcaagtaatctccaggctcaaaaagagaaaataggacatttattctgtctcacacttttcttggatctgctggagaggaactgaatctcagcaagttctaaaaacaactagatttgtgcttattcttacttattcctagtagaatttctctcatcacagacagaatcatttatcactttataatgtgcatttcccccttacagtctccatgttttaaattaattaaatgaactttaaaatattttaagaactcagtactgagtacttcttcagcgtgttttyaaaatgggactctttggcatactttaaagccctgttagttgagtgtgtgagtgtgtgtgtgtgtgtgtgtgagagagagacagcatgcatgcatgtatgtgtgttaacctactgagccttctttttagtatgtattgaaagtaacttggcagaggtaattttttctgaaaaatgtctgggtatattatggttagtcagttgtagtatatcctgcagacctaataaggacaagttattgttt

SEQ ID NO: 778531 - DNA, 636 bp, Homo sapiens
attgtagtgagttaatctgattggaaaattcttggtctcatttgtgacactggatgtacctcttttggccctgtgtttttactccttttgctaccatgcagatttgtgatgaaaaagaatccccacatatctcagttgtgcaggtttggccacaatagtaatagatcagactcaagtgaaaaaagaagagccgtgaattttcttcatacactgtggactgacaaataaataggtgcttttagttttcttaatgataaaatcagatcaactgttagggaaattcagtcagttgctaggtaggcaaatgacaaaaacacamccagttaaacaaaaatattgattcaaggattttgtatcaaataatagaacttcaaaaatgcctgaattagccaaagcagaatggaatatttgcaaactgcaagtacatagcatttcgaacacaaggaaaatgattatttataaagacttccatgttactctcaaaaatttatattctaaaccaatagaaaagggcaaaagcactgttattctaatatcttcttttcattttcttgaaaattttattttgggaaactccctatctgagtttttaagtatataatgaccaagagattgcattattcccattagttaaac

SEQ ID NO: 778532 - DNA, 637 bp, Homo sapiens
tagttttaagtaataaaatgccattcaagtgtgtaatttattactaaacccattaatatttatagccctaaaatgattttcctgaatggtgggaaaaaaacctctcgatgtcatttcttgcccaggaaaaaaaaagcaacarcaatgacaaatcctgtgacagaaatatattaaatataaactttttttagataaagaacataaactttttcatgaagtcattttctatagaattctgcactctgaaattctaagttaagtttaattcatagattaagtgtttggggatatttatgtgattgtgcagcattctctgtaaactctgattttggaaactttcttttgaaataaacaattcaactgaatgaatgttccatgttatgtatttaagaaagagattatgatgtctagtggcatcagtcattaatttcatttaataaatatttatccacacattaatatgcaccaggcgctgtttgaggcctgaaagtacagcaatggtacaataaatttccaacatctatagttttatggagcttacatttcagtggaaattggggactattttgttttaatttgtattaataaatgaaaagcatgactcatattttatgcatttaattttttctcaaatgtt

SEQ ID NO: 778533 - DNA, 552 bp, Homo sapiens
aagcagggttttttgtagtgagagaaaccataatgagattatggagtagactggacataagcaacacatttcaggtgtcactgtcttccatcacccccagatgggaccatctagttgcaggaaaacaagctcagggctcccacatattctgcattatgtgaattgtgtaattatttcatcatatattacaatgtaataatagtagtaacaaagtgcacaataaatgtagtgtgctcgaatcatcccctccccatccccgcagtctgtggaaaaatggtctttcatggaactggtccctgayaccaaaaaggttggggactgctgatgtagagattaaatttttttcatgtccactctaatgacgaaaacaagcaaattgatggagaaagtcatttcacaattttgttaccattttctaactttgcaaaccttcagcacactgattaatatctctaagcctcaatttttctcatctgtaaaataggtagattagtaactacctcataaagttttagaaggattgaatgagataatgccagtaaagcctttagc

SEQ ID NO: 778534 - DNA, 571 bp, Homo sapiens
gccagtgacataatttcgagtttaaagaaagaactgtgtggtaggtaaatagcaaagcaacagctgattaagaaatgtattgagaagcaattttgtaaacttttttattatggaaaatttgcaaacttgcacagcaataaataagatagcaaaagcaacatagcttgtggttaactagtctgctgctcacaatttgcgtatgttgtttaagccagatactgcattacagaactttcctcatgggtccctgctgtaattaygtataattatgtattttcagtactgtaactgaggcttccttggagttagcagaggccttggcattccaatctgaaaagtttagtgacttgttcaaggttgtagacccaagacaatggttattgttggtgctagggatatactctgttcttcctggttctcttgacacagaatacggcctcatagtggctcaattgtcctggtcaaatcaatgccagttttgtgcaaggcatcaaaatgtgctttttttgggggaggggaccgtgtttcgctcttgtcacctcatgctggagtgcagtggcgcaatctcggc

SEQ ID NO: 778535 - DNA, 577 bp, Homo sapiens
ttaaaaataagtttactttaaaactcatttctagtgaattttataaccagactttctaccacaaaattttaaattatggctgtagtggagtcaaaaaaattcttgaagcccaaattttcaattcttctctgcttctctactgaagcataagggggctatggcccaaagtatcacattcaaaaygcaccacattcattcaggaccaggagagaagagattctttggaactacaagaatgaattatctttaccccaacagacactgtaaaattgaggcatcaataacactttgtctctgcagagcatttaaaactttcatcctgctttaaaatatattaatttagctggtcctcacaaccaccttgtaaggtgctatttcagggtttctcaaccttggcactattgacctttgggctagatcattctttgttgaaggggtggtcctgtacattgtaagatgttttggaccctgggttgtacttaccaatgttagtaatagaacccctccccctcaacacacataaacaactaaaaatgcctccagaaattgccaaatgtcccgggaggaaacagagagg

SEQ ID NO: 778536 - DNA, 577 bp, Homo sapiens
ttaaaaataagtttactttaaaactcatttctagtgaattttataaccagactttctaccacaaaattttaaattatggctgtagtggagtcaaaaaaattcttgaagcccaaattttcaattcttctctgcttctctactgaagcataagggggctatggcccaaagtatcacattcaaaatgcaccacattcattcaggaccaggagagaagagattctttkgaactacaagaatgaattatctttaccccaacagacactgtaaaattgaggcatcaataacactttgtctctgcagagcatttaaaactttcatcctgctttaaaatatattaatttagctggtcctcacaaccaccttgtaaggtgctatttcagggtttctcaaccttggcactattgacctttgggctagatcattctttgttgaaggggtggtcctgtacattgtaagatgttttggaccctgggttgtacttaccaatgttagtaatagaacccctccccctcaacacacataaacaactaaaaatgcctccagaaattgccaaatgtcccgggaggaaacagagagg

SEQ ID NO: 778537 - DNA, 587 bp, Homo sapiens
aaatgtttactttggagatatatttttcttgtataacacgggaaccaaagacattcatatcttctgtgctggatctgttaagaataatagacttaatcactctaaggccaaactaatttaatttttgttttgctgtctgctgtctgttttactgtctgcttattgtttgatgttaatttatctccctyagcaagataagctctcatagatagtccacatacctcataaggcccagcacatagtagtaattcaagaaaaaaaaaaaatcgatgattgaatgatcataatcttatcattgaaatgaacttagttctataaatatgaagcactactttaaggcttgcttcctgccttatatatgtggcttccacttataaatgtggatggggaatcttcagtatcataagccagaataaatgggaaacaaatgtcctatcccaggggggtagaatcctttcaacatagcaagtccaggtgatctagatgaattctaggttgatttgccttgagccaagggtttgggcaagatgctctttgggatcccttttatttacatgaaacatgcccaaacttaaggggaaagaaag

SEQ ID NO: 778538 - DNA, 652 bp, Homo sapiens
aaactgggagaaaatattctcaacacatatatctggctaaggacttagatccagatcacataacaaggccctgcaaattaataaaagtcaagcgaattgcaaattaaagataggcaaaagacttgtacatattattcacagaagaaggtacatgaacaaccagtaagcaygtgaaaagatgcgcagcatctttcagcatcacagaaatgcagtcgtggtaccattcgcaccctctaggatagctaaaatagaaaagactgacgatcaatgttgaagaggatgtggtgcaactcagactctcgtgcgcaaagggatccaatctcttgagaaaactgtttcttgtgaagttaactacagaactactctgtgacccagcacttccttgtatttacccagaaaaataacttaagttctcaaaatttgaacaaaaacattcataacattcttattaatagcatttttattatacgaaacctccaaactggaaataacccgaatgtccatcgaaaagaaaatggaggaattaaggtatagttataaggaactactaccgaatagctcgataacatgagtgaatctcataggcacaagggagtgtgttctgcatgattccatttatatgaactcctagtataagcaaaattaattacag

SEQ ID NO: 778539 - DNA, 520 bp, Homo sapiens
agaatttactcctggcttcaccatctagcagccatgtgacaatgggcaattactcaacattaacctctctaggtctcagctgattttgtagtacaatcggaatcataagactacctgctttgtgtgcttgttgacaggatcccatgacacagaatatgtgaagggacagtgtctggtacacaggagagcccaacacatcctttttttattactatattttgttaggatgtttaccatctgtgatgagttcctttaaagtagagcaagaacctaaaacgtgtgaagaaatctgaatgcagaatcctacagttttagggtccccttcccaccccaattttgacagtagtttcacccacatctactttaacgagcattttagtsacttgcctttcttaagactttccaaggaattcaatatagttttcagagaaagagcagttttcttttttgcaatcacattttatcagtttactataaattagtacatattttttttttaagacagaatctagctcctgtt

SEQ ID NO: 778540 - DNA, 560 bp, Homo sapiens
gaggaatttcatttagggagtttcctccagtgggtcaacccctatcaattggtagtggctcccaaggacactgagctgtgttgggttcttggtagggtaacaatgtatcccctttgtctgtaatagtactggttattcctgcggtcgggcatcccatctagtttgcatttgtcctggattttttcattttttaaaagatatatcattaatatttgcattaaagtaaactgaggtgagtttgctggatctccatttggttatwtccatcttctgccatggtcttgtctagcagcatgtgaggtctgtgttcaggaaacagagttctctccttagcgcacagtaaatctgaaagacgaccagctttaatctttctctttatttccaacactttcctggggcaatttaactaagccctccttttcaaagaaagcatgcaaaaacacttgctaagaaaacaaagtgggcggtggcacatgctgctagggaatgtcaagttttctgtcttaggtggtattgatgggagaaatatttggcggctatttattgtcttctgcggttct

SEQ ID NO: 778541 - DNA, 440 bp, Homo sapiens
agcttgtcctcatcaggatcctccaatactgccccacccaggtgtggggcctgctggggctctgcagtgtctctgaggctggatttcaggactcactcgtctcccacagatgtctggaccatcaggcaagctggacctgtcctggtcactccataactccctggcatctggtgcccacaacccaggacccacagaagmcttggaagatgtctcagaagcagaaacttctgtcctaaggaaaaattccagagaagtggaggcacaaagtgtgggccagggcattgccagacccaccccagggctgcccaacacacacacgcacaccacacccacgctctctgtccagctcaggtattcacgcgtgcacacacacacacacccggagaagagctccggggtgaaaacgtcctgcaacagtgccatctagtgggagccggggt

SEQ ID NO: 778542 - DNA, 598 bp, Homo sapiens
aggttgaaagtggataaaaagacatacatagtaagcataagaagtagctatattaatatcagagtagaatttaatatcactgtattagtatgcaaagaggcattgcctattaataggatatcaaatcaacaggaagatataacagtcataaatgtgtatactacaaaatacatgaagcaaaaattgacagaatataagggagaaagaaacaatttccatatgagaatttccattctcagagatggatattttaacagacctctttcagcaactgatacaataactagaccaaagaaatcagtaaaaatatacatgatatgaacaataccattatcaaccactttgacctaattgatrtttgtagatcactgcacctagcaactgtagaatacacacattctttctgagcatactgaggatgttcaagatacactatatgctggaccataagacagttttaatacatttaaagagcttgaaatcattgaaaatatgtcctctgaagacagtgggatgaagttagaactcaatattatgtatctacaaattcacaaagaaatgagaaaatattttgaactgaaaagtattttcaatgaaa

SEQ ID NO: 778543 - DNA, 599 bp, Homo sapiens
cagagtagaatttaatatcactgtattagtatgcaaagaggcattgcctattaataggatatcaaatcaacaggaagatataacagtcataaatgtgtatactacaaaatacatgaagcaaaaattgacagaatataagggagaaagaaacaatttccatatgagaatttccattctcagagatggatattttaacagacctctttcagcaactgatacaataactagaccaaagaaatcagtaaaaatatacatgatatgaacaataccattatcaaccactttgacctaattgatgtttgtagatcactgcacctagcaactgtagaatacacacattctttctgagcatactgaggatgttcaagawacactatatgctggaccataagacagttttaatacatttaaagagcttgaaatcattgaaaatatgtcctctgaagacagtgggatgaagttagaactcaatattatgtatctacaaattcacaaagaaatgagaaaatattttgaactgaaaagtattttcaatgaaaatatagcatcaggaaacaacagatgttggcaaggatgtggagaaataggaacgcttttac

SEQ ID NO: 778544 - DNA, 531 bp, Homo sapiens
gaaattttactctaggcctagtttagtcctactgtcaaggcatagctatttttgggtttcttctgtgcgttctggatgttgagctaggactttccgctggctgatcaggacttcagtttctccctgccctgtgtgagctctgggaatatttttttaggggatgggagatgtctttttttatgtctgttttttgccttatggagtttcatccacacaagcatgacttaatatcagcagtagagttaaatagaattccaggcaaatttctatagttaatttctctgtgttgctccatcttttctggtattctgttccacatattccatctaacttcaccttcctgaactcttatttctgtcttctcgacttastgagaccactgtcctttgcatctccttcccttcacagtagtcttcaaaaagccagggtgattatgaagctcacatcatttatttcccttcccctaggcatcacagtcctgagatagctattatcttaacgtctaaaaatagttgtttcatatattttatc

SEQ ID NO: 778545 - DNA, 491 bp, Homo sapiens
gctctgtggactagactgctttcatttccagcccccttctgtcccatgaagcagttttggtctcctctttttttttttttttcccaaaacggccttccttagtcctgtaaaacctggaatgcacatagtcctgtaatggccatcccagaagtgaatctacatgattattcaaattcaaatacctaaraaaaaaaatcacttgaagttctgcaacttcccaaatgcaaattcctgagaaagaaacttgactgagccagttcaactttgtgtattggattataaatcctatcttgctggctggtctgtagattggttgctcttgagtcagatgacctctctttagagtttagtcagctatggccattgaggggagcaccacatggatggcataaaacatagctgacgaggcatggatgtaatgcctagaacaagtagtattcataaaacactgaaaaaaagaaggacacaacaaataggaagggagaaggtga

SEQ ID NO: 778546 - DNA, 491 bp, Homo sapiens
gctctgtggactagactgctttcatttccagcccccttctgtcccatgaagcagttttggtctcctctttttttttttttttcccaaaacggccttccttagtcctgtaaaacctggaatgcacatagtcctgtaatggccatcccagaagtgaatctacatgattattcaaattcaaatacctaagaaaaaaaatcacttgaagttctgcaacttcccaaatgcaaattcctgagaaagaaacttgactgagccagttcaactttgtgtattggattataaatcctatcttgctggctggtctgtarattggttgctcttgagtcagatgacctctctttagagtttagtcagctatggccattgaggggagcaccacatggatggcataaaacatagctgacgaggcatggatgtaatgcctagaacaagtagtattcataaaacactgaaaaaaagaaggacacaacaaataggaagggagaaggtga

SEQ ID NO: 778547 - DNA, 491 bp, Homo sapiens
gctctgtggactagactgctttcatttccagcccccttctgtcccatgaagcagttttggtctcctctttttttttttttttcccaaaacggccttccttagtcctgtaaaacctggaatgcacatagtcctgtaatggccatcccagaagtgaatctacatgattattcaaattcaaatacctaagaaaaaaaatcacttgaagttctgcaacttcccaaatgcaaattcctgagaaagaaacttgactgagccagttcaactttgtgtattggattataaatcctatcttgctggctggtctgtagattggttgctcttgagtcaratgacctctctttagagtttagtcagctatggccattgaggggagcaccacatggatggcataaaacatagctgacgaggcatggatgtaatgcctagaacaagtagtattcataaaacactgaaaaaaagaaggacacaacaaataggaagggagaaggtga

SEQ ID NO: 778548 - DNA, 602 bp, Homo sapiens
tttccacagtggctggactaatttacgttcccaccaacagagtagacgcattcctttttctctcagccttgccagcatctgtggttttttgacttaaaaaagtagttgaacattgtcaataattaataaaatactcatgtrtttttacaatttctaggttcatcatttttatatatcctattccttccctctgagctcattttcttgttgaagtataccttttaattatttttagtgatgacctgtggtaactatatttccttatctttgaatatctgaaaatagcttcattttgtcttcattcttgagtgttttactgtgcataaaattctacatgataattatgcattttgaacatattgctgtattggtttttggcagctcttatcgctaagatgaagtttgctaccagtctaactgtacattttacataatctgtctctactctagtagtttaaagtatttttttcttctctttgatcttttgcagtttcactgtgatgcctttattcaattcttgaaaattatcaggtgttttatgtcaaatagtgctaattcttcttttctttccattctcttcatccagaactccaaataaacat

SEQ ID NO: 778549 - DNA, 643 bp, Homo sapiens
aacaggatttgtgtgagcaataaagctgtttatttcacctgggtgcaggtgggctgagtccgaaaagagagtcagtgaaggtagataggggtggggccgttttataggatttgggtaggtaaaggaaaagagggggttgttctctggcaggcaggagtaggggtcacaaggtgctcagtaggggagcttttgagccaggatgagccaggagaaggaatttcacaaggtaatgctatcagttaaggcagaaacaggccattttcatttcttttgtggtggaatgtcatcagttaaggcaggaaccggccatctgtatgtggacgtgcaggtcacaggggatatgatggcttagcttggcctcagaggcctgacattcctgtcttcttatattaataagaaaaataaaatgaaatagtggtraaaggttggggcggcaaaaattttgggggatggtatggagagataatgggcgatgtttctcagggctgctttgagtgggattaggggtggtgtgggaacctagagtgggagagattaagctgaaggaagattctgtggtaaggggtgacattgtgggactgttagaagaaacatttgtcatttagaattattggtgatggcctggatacggttttgtaagaat

SEQ ID NO: 778550 - DNA, 553 bp, Homo sapiens
tttcttctgtagttttctgtggagcactaagcacatgattttaaatatcattggcaaagcaatgtcttcattcctcgcaaaattttttatattagtcaaaaatttgttcaagataaatatttttaaaagatgccacttcatttccaccacacacacacacacacacacacacacacacasagagagagagagacagacagagagagagacagaaatgagaaggtaaatgttgcctttttcttatggaaagaatttcaaccaagagacctgtatgggggtagacagcaaagcatcccattagtggggctttctatgttctgttctttcttctctttgatgcagatacattattattatggatctgagtgattttcataggcaaatacactgaaatatcattcatgatcttctttcacagaattaggcaaatttaataagtattccagaactttgttttaccatgtccagaactaggataacatacactacatgctaatatatttaaaacatgtataaagaatataattgtattacttatatgaatactagctat

SEQ ID NO: 778551 - DNA, 604 bp, Homo sapiens
agagccagcacatttccaagttaacttttataaatttaaccttcctgttactcagctggtacagctgcagtgatctgcaaaccctacaaacacagctgttcaaaataaatccatagtgctttttattcaaaggaaccaagaggaactcaaggcttcccattcatttttttttattttgtatttttctgctattttcccttgaaaatgaatattctgcagttttggaaaagctccagtttttcttttatctacaagaaaattgtatcttttgtgaaatggaatctatttttttcagtgtttagtttaacaacacatctaaaattttgaattggcaggtactttttaaataatgtcatcaagtaaaccagagctgcgttattgtatttatyatgcacacaatgagatgataggaatctattttaatcatgctcttaaaggcaaagtcttgaacaaagtaaaagatatttctctttgcttcatgtagtaattggataatagaatggaaatctatttgggataaaattttatgtttctttgttagttctgtgaaggtaggaactgggtttttgtcacgatggtgactcagtacctaagaaaaggaaac

SEQ ID NO: 778552 - DNA, 634 bp, Homo sapiens
gccacatatactatgtttgaaccaactagaaattctgcccatgccacaaacatgtaatgctcccattctttttgaacgtagtacttaatacattacatattaattagttgcaaactctcacttgaattactcaaggacagagacggtgtctttgttcacctttgtacctatcttagggccgtgcctggaatagaacaggtgttgaataaatgttkattaaatttaactatgctcattcaacaaggctatacatttatttttcaatttggaagacactgcacattgcaggaatcgaaaatttatcataggccctgatgattctcctccatttgtgaagcatcagtaataattgccttgtgttatgaaaatttatttgcttagaaattctgtgtcatggatgataggcagaaattacaaagccgagaaaaattataaaaggccaatgtcacctcttaactctaagtttctttttattcttcctcaagtttagccattcggatgcatttaaatatatttatatcatactaatttggtttttgctaaggattttttgtaattttatgttgtctctaaagctcagttttcttgacaagttgaaaaaccccatacatatgtaataggatgttatatttag

SEQ ID NO: 778553 - DNA, 634 bp, Homo sapiens
gccacatatactatgtttgaaccaactagaaattctgcccatgccacaaacatgtaatgctcccattctttttgaacgtagtacttaatacattacatattaattagttgcaaactctcacttgaattactcaaggacagagacggtgtctttgttcacctttgtacctatcttagggccgtgcctggaatagaacaggtgttgaataaatgttgattaaatttaactatgctcattcaacaaggctatacatttatttttcaatttggaagacactgcacattgcrggaatcgaaaatttatcataggccctgatgattctcctccatttgtgaagcatcagtaataattgccttgtgttatgaaaatttatttgcttagaaattctgtgtcatggatgataggcagaaattacaaagccgagaaaaattataaaaggccaatgtcacctcttaactctaagtttctttttattcttcctcaagtttagccattcggatgcatttaaatatatttatatcatactaatttggtttttgctaaggattttttgtaattttatgttgtctctaaagctcagttttcttgacaagttgaaaaaccccatacatatgtaataggatgttatatttag

SEQ ID NO: 778554 - DNA, 624 bp, Homo sapiens
cctggatttcccaattcatgctaattccctacacaatctataacaataacatcatactgctttcaccttcatgacttctacccctcctattgacttataaaaagtcagacaggctaatttacatgtctaatgaaaaagactgtcacaaaatgtaactattataagtctgttaacactatatcctgatatgaaaagtagaatctcttagtatttcccaaattacattttggaagtttagaatctgtttttcaaaaagaaaaaacataaacaacatcaaaaagatgtgttcaattattgaggagctttttaccaagaatatctgtgtaataggtaatctatagttgccaaaacatgagtaccacagaatcaactactggaggttgggaggmttaaaagactggatataaaataggaagtgaagtgatttgtatcttctctaaattctaccactgattacgagatctataacacattttaaattctaagcgattttattcctaccaatgagaaagggtatcaaagtagacgttttttgtcctaagttacccttctaattctgggaagcctaagattctgtccatgtaataatagttgttaataattaaggacattgtctgcctacag

SEQ ID NO: 778555 - DNA, 654 bp, Homo sapiens
tatgttggaaaatctattagccagagtataagtttatattggtaattttgatgctgcatctaagataatataaaaactatttttagattgcataaaatttcatagtatcagaatcatagtagcttgttatgtataacttctgtcttttctttttttcttttttttccttgagacagagtctcactctgttgcccaggctggagtgcagtggcgggatctccactcactgcaacctctgcctcccgggttcaagcaattctcctgcctcagcctcctgagtagccaggattacaggygtgcaccaccatgcccagataatttttgtatttttagtagatacggggtttcaccatgttggccagactggtctcgaactcctgacctcgtgatccacccacctcggcctcccaaagtgctaggattacagttgtgagcaactgcacccagcccaacttctgccatttcttaagcatatttaataataacatgcatattttatactgaaactaaccaaggaaaactgtgacaatcagtacatacatattaatcaaactatatgtcagaataacctcatattaggcaagtgattctcaggttttccttttctcataaataattttgaacatttcatttaagtgctgcatatttgcatat

SEQ ID NO: 778556 - DNA, 654 bp, Homo sapiens
tatgttggaaaatctattagccagagtataagtttatattggtaattttgatgctgcatctaagataatataaaaactatttttagattgcataaaatttcatagtatcagaatcatagtagcttgttatgtataacttctgtcttttctttttttcttttttttccttgagacagagtctcactctgttgcccaggctggagtgcagtggcgggatctccactcactgcaacctctgcctcccgggttcaagcaattctcctgcctcagcctcctgagtagccaggattacaggcgtgcaccaccatgcccagataatttttgtatttttagtagatacggggtttcaccatgttggccagactggtctcgaactcctgacctcgtgatccacccacctcggcctcccaaagtgctaggattacagktgtgagcaactgcacccagcccaacttctgccatttcttaagcatatttaataataacatgcatattttatactgaaactaaccaaggaaaactgtgacaatcagtacatacatattaatcaaactatatgtcagaataacctcatattaggcaagtgattctcaggttttccttttctcataaataattttgaacatttcatttaagtgctgcatatttgcatat

SEQ ID NO: 778557 - DNA, 610 bp, Homo sapiens
gttgataccttgcaaattccgaagaacttctctagtactgaactatctcaaaaagggttttccagatgtgaaaaataaatataaatgttgtttttaaggtgctttcatagatttttacttaatcttgagtcatttatttatttctaatttttgtcttgttatcttggggtaaacggaactaactaaaactttctgcaaattttacaaacctctgaaatttgaacatgctagaatatacccaagaatctagtccaaaactaaacgacctgtagtaaaactggtgctaacctaaaatagacgggtatttgaagctagaataataaaaaaaaaaaatcattctgttgattgctttaaatctacaggagtaaatttacyggagtaaataagaaattagtcctcccctttctcttctcttcccttgttttcttctgccttttccctccctcccttcctcttcttccctttttcatttccttctctttcttccttccttccttttcttccttgcttcttttctttctctctttctttctttcctatttttactcagtttccttgccattccatatttccatggcttaggaaaaaattcataatgctcagatttatt

SEQ ID NO: 778558 - DNA, 642 bp, Homo sapiens
ctgctgtattgaaaaaaaaggtttaactctgtgagatgaataaacgcatcacaaagtagtttatcagaaagaatcttgctcagttttatctaaagatatttcctttttcaccataggcctcaatgcactgccaaatatcatttcacagtttctacaaaaacagtgtttccaaactgctgaatgaaaataaaggtttaactttgtgcagtgaatgcacacatcacaaatcggtctctcagacagcttccttctagtttttatcctgggatattagcwttttcacctttggcctcaatgaactccaaattgtccatttgcagaatgcacaaaaaaagtgttttcaagctgctgaattcaaagaaaggtttaactctctgagatgaatgaacacatcacaaagcagtttctcagaaagcttctttttaattgttatttatagataattccttttttaccatatgcctcaaagcactaccaaatatccattcatagtttctacaacaacagtgtttccacactgctgagtaaaaagaaaggtttaactcagctaggtgaatgtaaacttcacaaagcagagtctcagacagcttccttctagtttttatcccgggatattcactttttcaccattcacctcattga

SEQ ID NO: 778559 - DNA, 646 bp, Homo sapiens
atataaatttgtgcctagcttagaaggttaaagaattgttttaaattagataagataaagctaaaggtttaaacaagttgtggaaggtttgtaaaattaatcttgcacaagaaattctttacgtgaacatactgactaaattcaaaagggcattatgtggtttttccataaattgagcatgaaacaaaagcacaacaaggttttcttaaggtactgatcttctctaacaaaaatttgaaaagagttataaagggtttataagaatctcacctcatggtcaaactggttaagattagacagaattatctataatgttttattttttaaaaactgaggttgacattaatagttgactaatgaaagggggaaaattggctttctctcctatgaacaagatttacgtgtactagtaaaggatamtgaaaatttttcatttgccttgtaaatactgaaaaaagaagaagaagacagaagacagattgtttggaaagctaagtcttcctcttaatgagtaaaggattttgcctttttaaagtatctttgagtcatcattttggctaaataacttatggtaatctggaattctatttcataatgtcaagtgttttaaacctctaatatgtttaacagccttccccaaatcaaa

SEQ ID NO: 778560 - DNA, 588 bp, Homo sapiens
tactgaaaccaaattgttgttgccctaataaaatatatacgcttttctctgattgcaaatttaacacttgtttatgatagaaaacaaaactaaggacaaaaaaaaagtcatctgtgatcgtatggctaacactgtgtgtgtatactatcttctttttctgtatgtatctacataatatgtttaacaaatggaattgccctaagaataacatctgtaacttgtttttttccattaagcaatatttttccatgccattaaagagtcttataaacatcagctttaatagctgtaaagtctcacattacatggaagaatcattatataatggtttctttagtctcttaaaatagatatttatgtcatttcaattttttattcttataaaggatgctgtgataaaccacctggtaataawaacagctaatgtttattcagtttatgtggaatgcattgtggtaagcaatttacaactttcaactaatttaatgtgtacccaaatcctatgaaatggatacaatgaaaatcttccctttagaaacgaagtaaactcagacgaaaagaagttaaacaatatggtcgaggtcacac

SEQ ID NO: 778561 - DNA, 570 bp, Homo sapiens
ctggagggctcgttaaaatacatatggctgggcccactcccaatttcttattcagaaagtttgagttgggaactaagactctccatttttaataagctcccagatgatcccatgctgctggtccaaggactacactttgagaaccaccggattagtcaatcacctarggaaattctgtgcccagttgctcccttggttgttaataattagtgctcaaggggtccataaaagagaaatggagccagttacaacatttttcgtctttctagttgcaaagagagttgaaatcatcagtgactacaaatggaaagtctgagtgaacacatgaatcaaactatattccttttggccaaatcccaaataaaagggatcattaataaagagaagggaaattggaaaggctgtatcctggtatactaaggttgcccaaaatttctctataaacaagaaggcacacctccccatcttgctgcctcctaaaccacctttattgaattaaattacatgctctaaacatgtaatgagtttaaatgtaaattctgcagaggtcccaagaatatcacgtttggc

SEQ ID NO: 778562 - DNA, 621 bp, Homo sapiens
acactgttgttttagtactagttgcaggaataaaattcaaaatagaagatagaacaatattttttaaagcacaagaagcatagttaatgtaaaagcatagcacaaaataaaatgtagacataaatcaaaatatatcaataacccaataaatacaaagggactaaatttgcaagtaaaggacagatattgcaaattatatttttatgctttttgcaagacacacaaataaaatacaatgacacagaaaagttgaaaataaaaagatgaagaatgacaatgaacagaagaaagtgagacacttgtagagaggcaaaaaaggcacattggaaataaagaagtttctayggaacaataaagaaggaatcagcaaaaaatatagtaattccaaactcatatgtgagaaataacattgtccagaatatacaaagtaaaattgagattagaaagagcaattgtcacagatcaacaataatgggagatttcaatgcacttttcttataactgatacatcaggcagcagaaggcattagtggattgtgggagatacaaataatgcaactaagaagtttgttccaatggctatatgtaaaaccatggaccctacaattagagaacacacat

SEQ ID NO: 778563 - DNA, 621 bp, Homo sapiens
acactgttgttttagtactagttgcaggaataaaattcaaaatagaagatagaacaatattttttaaagcacaagaagcatagttaatgtaaaagcatagcacaaaataaaatgtagacataaatcaaaatatatcaataacccaataaatacaaagggactaaatttgcaagtaaaggacagatattgcaaattatatttttatgctttttgcaagacacacaaataaaatacaatgacacagaaaagttgaaaataaaaagatgaagaatgacaatgaacagaagaaagtgagacacttgtagagaggcaaaaaaggcacattggaaataaagaagtttctatggaacaataaagaaggaatcagcaaaaaatatagtaattccaaactcatatgtgagwaataacattgtccagaatatacaaagtaaaattgagattagaaagagcaattgtcacagatcaacaataatgggagatttcaatgcacttttcttataactgatacatcaggcagcagaaggcattagtggattgtgggagatacaaataatgcaactaagaagtttgttccaatggctatatgtaaaaccatggaccctacaattagagaacacacat

SEQ ID NO: 778564 - DNA, 608 bp, Homo sapiens
atatgtgagaaataacattgtccagaatatacaaagtaaaattgagattagaaagagcaattgtcacagatcaacaataatgggagatttcaatgcacttttcttataactgatacatcaggcagcagaaggcattagtggattgtrggagatacaaataatgcaactaagaagtttgttccaatggctatatgtaaaaccatggaccctacaattagagaacacacattcacttaaatacataataagctttaaaactgaacatatacataaagcaaatctcaatcaacaccaaaaattcagtatcactcagaacttctgtgcatataagacaattaaattagaaatgtatttattactattttagttataaagaaaacggaagacagggcaaaagttaataaaattggaacactatagaaacacagaaaaccctcatatttcaaaattaaagatatttgtactacttttatttatcattttcaattgatggtttgcactcaaatatttcattaagacttcagttatttcaagaatttaaacatgattttatgcattaaaaggtatcagttaaaagacctgtgactgaataaaaatgtaaatcaatt

SEQ ID NO: 778565 - DNA, 621 bp, Homo sapiens
acactgttgttttagtactagttgcaggaataaaattcaaaatagaagatagaacaatattttttaaagcacaagaagcatagttaatgtaaaagcatagcacaaaataaaatgtagacataaatcaaaatatatcaataacccaataaatacaaagggactaaatttgcaagtaaaggacagatattgcaaattatatttttatgctttttgcaagacacacaaataaaatacaatgacacagaaaagttgaaaataaaaagatgaagaatgacaatgaacagaagaaagtgagacacttgtagagaggcaaaaaaggcacattggaaataaagaagtttctatggaacaataaagaaggaatcagcaaaaaatatagtaattccaaactcatatgtgagaaataacattgtccagaatatacaaagtaaaattgagattagaaagagcaattgtcacagatcaacaataatgggagatttcaatgcacttttcttataactgatacatcaggcagcagaaggcattagtggattgtgggagatacaaataaygcaactaagaagtttgttccaatggctatatgtaaaaccatggaccctacaattagagaacacacat

SEQ ID NO: 778566 - DNA, 608 bp, Homo sapiens
atatgtgagaaataacattgtccagaatatacaaagtaaaattgagattagaaagagcaattgtcacagatcaacaataatgggagatttcaatgcacttttcttataactgatacatcaggcagcagaaggcattagtggattgtgggagatacaaataatgcaactaagaagtttgttccaatggctatatgtaaaaccatggaccctacaattagagaacacacattcacttaaatayataataagctttaaaactgaacatatacataaagcaaatctcaatcaacaccaaaaattcagtatcactcagaacttctgtgcatataagacaattaaattagaaatgtatttattactattttagttataaagaaaacggaagacagggcaaaagttaataaaattggaacactatagaaacacagaaaaccctcatatttcaaaattaaagatatttgtactacttttatttatcattttcaattgatggtttgcactcaaatatttcattaagacttcagttatttcaagaatttaaacatgattttatgcattaaaaggtatcagttaaaagacctgtgactgaataaaaatgtaaatcaatt

SEQ ID NO: 778567 - DNA, 608 bp, Homo sapiens
atatgtgagaaataacattgtccagaatatacaaagtaaaattgagattagaaagagcaattgtcacagatcaacaataatgggagatttcaatgcacttttcttataactgatacatcaggcagcagaaggcattagtggattgtgggagatacaaataatgcaactaagaagtttgttccaatggctatatgtaaaaccatggaccctacaattagagaacacacattcacttaaatacataataagctttaaaactgaacatatacataaagcaaatctcaatcaacaccaaaaattcagtatcactcagaacttctgtgcatataagacaattaaattagaaatgtatttattactattttagttataaagaaaacggaagacagggcaaaagttaataaaattggaacacyatagaaacacagaaaaccctcatatttcaaaattaaagatatttgtactacttttatttatcattttcaattgatggtttgcactcaaatatttcattaagacttcagttatttcaagaatttaaacatgattttatgcattaaaaggtatcagttaaaagacctgtgactgaataaaaatgtaaatcaatt

SEQ ID NO: 778568 - DNA, 567 bp, Homo sapiens
ccttttcctatggattattttttttccaatggagagaaatgcttttttacctggataataaattaaaaagtggtttcttgacattttactgcttttatttattccatttaaagaaaatgatttccaaagccagacaatggtgctgttcaatagaaaatgatgacctttaattaaaactctgccccttactaattttcacatctttaccaacctcctcatcaatgtggaagaggcataattgaagggagaaaacacctgatctaaatacactttatctaaatcacttcccccaagcagacattctctatctcarttcctagttcatttccttcattgtatttcctaattcaaaattatttctttcttcacctgttcattgtgcctgtgatcacataggccataggttttatatgggagggagctttgtagactagtgacttcccagtgttattgctgaagaaaggaatagataagggaagaggaggcaaaggtgaatatatctgatgaatcggaaaaaaaggtatgtggtctcaaatcgcaattaatctctaaatgtaacaagcaaaa

SEQ ID NO: 778569 - DNA, 511 bp, Homo sapiens
tgacttcccagtgttattgctgaagaaaggaatagataagggaagaggaggcaaaggtgaatatatctgatgaatcggaaaaaaaggtatgtggtctcaaatcgcaattaatctctaaatgtaacaagcaaaagcaaaagtaatgcttttgtttattttactccatctttttttttttttttttttttgagacggagtcttgagctgttgcccaagctggagtgcaatggtatgatyttgactcactgcaacctccgcctcccaggttcaagtgattctcctgcctcagcctcccgagtaactgggattacaggtgcatgccactatgcctggctaatttttctatttttagtagaggcagggtatcaccatgttggctaggctggtctcaaactcctgttctcaggtgacctgcctgccttggcctcccaaaatgctgggattacaagcgtgagccatcgcacccaacctactccatgatttttttgattatttattttgaaattattca

SEQ ID NO: 778570 - DNA, 511 bp, Homo sapiens
tgacttcccagtgttattgctgaagaaaggaatagataagggaagaggaggcaaaggtgaatatatctgatgaatcggaaaaaaaggtatgtggtctcaaatcgcaattaatctctaaatgtaacaagcaaaagcaaaagtaatgcttttgtttattttactccatctttttttttttttttttttttgagacggagtcttgagctgttgcccaagctggagtgcaatggtatgatcttgactcactgcaacctccgcctcccaggttcaagtgattctcctgcctcagcctccygagtaactgggattacaggtgcatgccactatgcctggctaatttttctatttttagtagaggcagggtatcaccatgttggctaggctggtctcaaactcctgttctcaggtgacctgcctgccttggcctcccaaaatgctgggattacaagcgtgagccatcgcacccaacctactccatgatttttttgattatttattttgaaattattca

SEQ ID NO: 778571 - DNA, 581 bp, Homo sapiens
cttaaataatgctggtaaataactgaatgaagagtggtttttataaaacctaactcctgcctaaaaggttcctttttttccctttctgggccagtgagaatcttccaggccacacccatagtacaaggacttcaccagtcacggccttcctcatctgtttctctagcctcctcttgctagcgtccatgctctcatttcatcatccatgggacttcttgtatgcctttccctcttcctgaaccttcctgtttctacctttaacctggttaacttctgaccattctgtaggagtcggcycaaggcctctcagtcttgagttttgtgttccttgttgcgctcctgcagtagcaccccatgctcacctccattagtccttaccattgaggagcaatccttgctttaagtgaattctctgctactgcatctgaagctccattctgacagaagctgtggtgtattaatcttagtatccaagaacatcacccctacttttattgagttctcagcaaaagtttattgaatgaatgaatgagattacccatcctgaatcctgataggtctcatgcttaaaatgtctgctt

SEQ ID NO: 778572 - DNA, 527 bp, Homo sapiens
actcattaatatgaatgaacacagaagaatcttaaccgtagagaaacgcctccaacatgaaatgggccaacacgaactggctaaattacctcagaagaagtagtggcaccgcagcaagcagtataccaccaaaaaaaaaaaaaaaactgcaaataatatcctcacagtgagaaaaaatggcacatccatgagagtaacagtatgctatgaagaaggggcaaaaagayaacttaaaaagagctcatggagctaaccaatatgatcacctaaattaggatgggagttgggggatcagcaaactgtttctgtaaaaggccacgtagtaaatattctaagttgcaggatttgccatctctcaactctgccattgtagcttgaagacaaccatagacaatgcataaaagaatgcacatgaatgtttctttatttacaaaaacttaattttatttatattgcttgacccagtggtatcattgctggatttgattgtgccataatcttctgacatctggccaaaatttgtaata

SEQ ID NO: 778573 - DNA, 628 bp, Homo sapiens
caaataattgctgttgctaagggtaaaaaggcaattgtgatgggatgtgaagaacagaaatcctggtgatatgaatgttaaccaataaagttctcaaacttgccatttagcgcattcctgaattctctgatggcataaataccacaaagtagaagtacaactttactctaagctctaagtcctgtattactcaaaagttcttcaaatcttaaactgctaccaagaatgaatagatgcccmaaatatccactttggggctggatattctgctcaaattaatgaatagactcttgttaaacatatatgccatgaaaactgactatgtgcaagttaaagcctacaatgggaaaaccaccaaatgcagaacatggaaaaagctaaagtccaaatgacgtggcatccaacacatcaatggcattacaaaatgaaagagacttcaaatacatcaaaaacaaatgcaatgtgtgggctttttctaagatcttgatacgaacaaacctacttgaagaacttgttaattttattaggtataataatgctagatggttaaattaaaaggctgttaggaatgcatcctgaaatgtgcatgtgtgtagatagataaatagagagagagagagaggttata

SEQ ID NO: 778574 - DNA, 625 bp, Homo sapiens
attatttttaaataaaatgcctctacatggcagatgttattatgttctactttggagatgaaaagaatcgaacattattagtcatgatccacagaaccagaagatttattttaaagataaagttcagatgatgaacataaaggaagttatctcatcaaagaaggcaagactgagtaaatctcagaaatccaccatgtacaatatttaaaaatgctcactaaagttgttctttgtgagttaatgaaggtcagtatagtcaatattcagtacgtaatcctagcaagtacaaataaagttaatattattcaaatatcttacacaggcttattgcatgcaacacactgttctaagtaacatacagatattaaaatgacttaattctcaaaacatgaagtgagtttttgtttttatgcccgttttgcagatgagaaaactgaggcatagggaaggtaagtaacgygcttaaggttacatagctggtaaattgtagccaggagttggaatctaggtgccaaaatctatgctgttaatcactaaactacgctgccttagtttttatacttctttaggaacctcagaccaaaagaaatttaggcaattctaatagaacaagcaagaatttgct

SEQ ID NO: 778575 - DNA, 648 bp, Homo sapiens
ctgtcactttttaatgcctaactttactaataaacataataatagataagaacgaaaataaaatcccttaggtggtaaaactcattttgatttgggacatgaaattatgggaaaaaagttctttctttctcctcactctttgagaatgaatcttctgtaattctcagtatcttctgagcacagatatataattyttgtagatttaataactagtttaccactgtaaattttaaaacgccaactgccagtctcctgctcaaaagttgttgcctcacctccatcccatggtactttctggactacatatcataaatctatttgtataagtatttcaagttcatgcagattagagaaatgtgattgatatttatttttctagtacgtatttacataaaatattggacttccctcaaaggtgacaacagttaaaaaaaaaaaaaaaaaaagcctgacctgttgaactatacaacagaacacagaatactttgctttaccaaaacagagaagaaatgggatttagtctctaaacttcatgtgagtttttttccatttttattaaccccagtacacatagtgctaccacagcatgtagttaaatagtcccagtgccacagtcttgtaagcaatacttatgcaagatatattgca

SEQ ID NO: 778576 - DNA, 648 bp, Homo sapiens
ctgtcactttttaatgcctaactttactaataaacataataatagataagaacgaaaataaaatcccttaggtggtaaaactcattttgatttgggacatgaaattatgggaaaaaagttctttctttctcctcactctttgagaatgaatcttctgtaattctcagtatcttctgagcacagatatataattcttgtagatttaataactagtttaccactgtaaattttaaaacgccaactgccagtctcctgctcaaaagttgttgcctcacctccatcccatggtactttytggactacatatcataaatctatttgtataagtatttcaagttcatgcagattagagaaatgtgattgatatttatttttctagtacgtatttacataaaatattggacttccctcaaaggtgacaacagttaaaaaaaaaaaaaaaaaaagcctgacctgttgaactatacaacagaacacagaatactttgctttaccaaaacagagaagaaatgggatttagtctctaaacttcatgtgagtttttttccatttttattaaccccagtacacatagtgctaccacagcatgtagttaaatagtcccagtgccacagtcttgtaagcaatacttatgcaagatatattgca

SEQ ID NO: 778577 - DNA, 648 bp, Homo sapiens
aattcccaatcaaatgttgatcctgtcagaaagtcacagggtcagtttcatggttggagtcatcggacagatggactagattgaactctacagcgcaatctagtcaactctgagatgtctgccttgtgtcttctcagcatcccatttccatgtattttctctatttggaagtagtatccatattgaaattcctccatccagtggtgcccagagctttcttggtttcttatgcgttatcaaatatctgctcccagagygagagcaggattactgtcccttccaagggcactcacctttaaatagagatgaaagtcttcagctaaaggtaagaaagttatatattaagagcaggcatagccagcagggttggggaaagttcttcttaggcaaagacctttgtaaagcactctgaaatcatcctctatagattcctcagtatttttctcaaacatgagtttgggcctttccaaaggagccaaggcagggtaaataatccatgtttcattcaataaactatatttgagaatttttttttcagtgaatcgccattatacaaagtctttctccttaaatttttttcatggagagacaactttgtataccagaaagaacttggactatggatccagtttgaattctgtttctggg

SEQ ID NO: 778578 - DNA, 633 bp, Homo sapiens
aaaatgcacagttacaacagactttcttagagcctgcagctgaatgactgaagtctccattttactccagtgtcacacagaacatgaagaggcaaacatactgcctgaacacaatttgactcactaaaatccagcactataaacacaaaatacatttctcgagtgcattttaaaagacttattatcaagatttatgacataaggatagaaataatttgcaactaggcactgccaggagaatatcttaggttcctctcaaggtaattttaagtaaaatttacaaataaatcttaaggttagagtccactttgaacgcaggaatcttcacctctttcctttcaactgtatggaatttgaatctgacaaacaacctgtctgttgctagaatttataagtgatytgaaaaaaaatcaaaggccataaaagctatttgtcaaataaactgcagaacacgatatcagtctgcagggctcatttgcagaactcatgatgagcatgggaggaggggatgctaacagctgcagccttgaccgcactgcccgtgccagccagaattcaagccgcgtgagctgagtgtggctgaaagagggagcacacaaatgacatcttagaagacaaaagcaaaaaatgaca

SEQ ID NO: 778579 - DNA, 632 bp, Homo sapiens
gtagcggtcagatcatagccagcctcctaaaccactttaaggagtttggaattctcccaagagcaacacagtcttcaaaggcactaacataatcaggtgcataatggaggaggatttttctggctacagagaataggggagatcagagagagctgcatagaggaggccagttccaaaactgttgtcacgggtgaaggcagaggtgaggagagggcggtgaaaatggaaaggcggccttaagaagaagctagaacttgtaacatgcagtaatgagtagccacagraatgggagtggaaccaaagatacttccagtaactattgagcacttacggtgtgccagccactgccataagctcttagtggcatcatctcgtttaatcctacaacagctttgtgaagcagatatggctattatgcccaccttacatatgtggaaacttaggttcatagaggttttcctctctgacttactttaggacaaagagctagcaactggcaggaccaagatgattcaaggtttcatgagaaccaggtgggcgtgcatgtcattgccctgaaaggaagaaaggacccaatgggcttgtctgaggactggaggacattaaggcagcaatgaacaggggaatatgtg

SEQ ID NO: 778580 - DNA, 668 bp, Homo sapiens
cgctaccaaggttgacagcctgtgccctctgaagtggcagcccaagctgtaccagggccctcttgagccacacttgagcctcagctggggtggctaaagagcactgcaccagaagtatgaagcaaaaattggaggtggctctgggcagcaagcccaaggtcccacaggcacactgagcccctcccttgaaacagttctaccaccctcaaggccctggcactctgggcctgtgatggatgtggcagccctgaagatctccaaaatacctttagggccgttcttccagtgtcctgatggaaagcatctggcttctttctgtccctactaatctkatcaaacagtcgcttagccacattgtagatgctgtctcctgaacacattttttcaggtgttacaggctgagaattctccaactctttgagttctgcttcccttttgagtataaattctatatttaatttgcttctctcttcccacattttactctaagcagtcaagagaagtcatgatgcacctgtatgaggtgttggggctgagatctgacctgcattctagcaaccaccctggatgatttttagacacctcagaaatcactgaggtaaggaacaggcagagggagaatattccctgactgaaagggaagaggagggataataaaatcagaataa

SEQ ID NO: 778581 - DNA, 451 bp, Homo sapiens
ccaattactgtggccaaggggaatccgatgcactgatttgccaggcctgggtccatgtccatcctggagttaatccacccaatccacctggactcaaagtggggatggagtaaattcctgagaaaaaaggtgttctgctgccagaaaagggaggtgaatgttgggcaggcaatggatgcctactattgtaacaagcaaagagccctgtttaggtccaaggggagagcgatgatggtcagaarccttctgggcccaggaccaccccctaggaacccacctccctctttacagtgcagctgctctgctagcatctacaggcttcaaccctcagtagaaaagaccccaaaggttttatgagtggggtgtttgttaaggaagaaaacatggaaaactgaaagagatgggagagggcttctcccagcagtcttattcccattaaaaattacagcaa

SEQ ID NO: 778582 - DNA, 644 bp, Homo sapiens
aaaaggattggcatccgttttacacaatctcttccagaaactagaagaggaaaaagcacttctcaattcattttatgaaaccagtattaccgaaatatcccaacctgtatacagtaaagaaaaaagctaaaagttaaaaatagagactaatattttttatgaacttagatgcaaaaatatgaaaacaagaaaatgctaccctatcaaatccagcaatatataaaaacaattatagatcataaccaaatggggcaagggctagaataaaccagtaaggctgttttgatgcttgaaaattaattcattgatagagaaaaggcaactgacaaaattcaacatccattcatgataagaactctcagcaaattaggaataggaggaaacttcctccacctaataaagagcatctgtaaaaatctataactaacatgatacttaasaatcaaagactgaatctctccttctaagattaggaaccaagcaaggatgtccactctcactactcttactcaatggagtagtggaagtcctaatcagagcaagaagaaaaggaaataaaaggtgtatctgttggaaaggaagaaatagaactttaaatttgcagatgatgaggttatttacataggaaatctcaagaagtcaac

SEQ ID NO: 778583 - DNA, 607 bp, Homo sapiens
aagggatgggatccccgcctgttgaaccagaggaatctgaggagtaccaggtttccactgaagactaaatcatgatccagagaaggaatctcagaagtcattcttgtcgtgggcatggcttaacgtctgtctccccactgtgggccctgccctcgagagcaagggtctccttattcatttttatattcccagtgcctaccactttgtggagcccttagtagaaaaggtattcaataaacgcacattgagtttaagctttctatttctcctcccccaactagtatatattacagaagcactgaaaattcagaaatcagccagtgtcagggctcctgggtaataaaccattcacagggatagctgtaggaatttggcatwagcatttattccaatctcttgggggtaatcaagtggcataatcatgccctgctttactgtgtagcataaggccagtagagaaaaacatcaagaggggaggaggacaagggatggagttcaatacacaaatatctactgagcgtcaattacgtgtcccacactattcaaggtgctgggcaaagaaagataaaaaaagcagaagctctgaccttgaggaacttaacaggta

SEQ ID NO: 778584 - DNA, 617 bp, Homo sapiens
caggataactgcatagatccctcgctgtctgattcacttcttaccatgcactttcctttgatgctgaggagaaatggaagtgggcgaaaaatctcaaggctgcttcatgtggaccttgtcaagctgctccctcccccagcgtcaaattgttatcaggtgccaaacactgctagaaaggagggcctagtcagaagcctctttccatacgagttttggttttgtttttaatatttttttctattaaaatactcatgcatttaaccttcccrttattcaaccagtctcttggttgcatccctagcacttctactacaagtgagatggtagtgtttgagtgcttattgagtaaagcataattcggtcataatgaaatcgttcacattccctcatatgcacaagcccaccaaccccttcacaccccccttcacaggggtcgtatgagtaaggggatttggaaactgtcaacttacaaaggcactataacaattacagaatcatgattgccatgggccactttatttacatgaagacaactggagaacgactaagaccaaattatggaaaataagaaaaagctgttgctggcaagaccatcaagactgttctgacaccctgtc

SEQ ID NO: 778585 - DNA, 495 bp, Homo sapiens
ccatctgagaacaaggagaactctgcggtaccagtggaggaatagaacaggagcagtgtgacatgaggtgacctacaggaacatgggaggggaaggcagatgtggatggcaggttgtacaagtgactttgttgcccacaactgaagtgactttaaatttggtcccttaggtcactgtctaccctgcctggggtccccgccctcagggtaattctttaagtcasaaagctctgtatgatgtcagcgcttcggaaggtgaactgctttgacctgagtgtcgaggcaatctgaacttgcccatggtaacagaggcacaggattctccaactcccttctttggtcaaagaatttttgggctgggctgggctggactgggtgggaaattctcagtgagttattttatctttggtaggtggcctgaacacctgagggactggacatcccatgttcagcaatgtcaatggcatcaggagggcgccccaagggccccatcgct

SEQ ID NO: 778586 - DNA, 650 bp, Homo sapiens
tgatgggaggtcctcctgtcctctcttctctcccactgaatgactcaggcagggatcttccaaaccacagcagttggagagtacagctgggccccctctccttatctgaggcaggagttcaaaatcttagtccccagggcagacatgaagggtaatattcatatgcagaccccaccgccggctttgacaatwgtctgatgatttatggattaggcacaattcctgcatgggagcctcacctccaccttatgatggccatcgcagaacacaaaggggtaagattcacagcagtaaaggaattaacctctaatctagtcatcaggctattgctcaatattctaattcttctccttctcttcatggaggatcacacttccccttcttgctccttgttaggcaagtttgtatgtcttattttggccaacaaaatgtgaacagtagtgatatgtgtctccttcaaccttcaagagccaatgagggatttgcctgcttccttctgctgaccgcagtgactggagacattccatataaggtttcatcaatttttatccctgagtgtgaataacctgagaagagcccccagattacccacaatagacacacagtataaacaagataaaacttcactgttttaggcaaccaagatctca

SEQ ID NO: 778587 - DNA, 653 bp, Homo sapiens
accataccacgtcatacctccttccatttggaatcaaaagatatgtgccctccaccctcacactgatctcttcctcccattgcctctagaaattgcatcattcattattctgtcattcctcgatcttcactttctccttctctattagctctttttccattccacrtataaaaatattcaactctcctttgtctgaagatatgtacaaagattttttcctgcctttgcgtccatggtaactactgttgtttctcctttgtatcacagcatcatacttaagagtgtggtctatatttgcagtcttcttttcttcactttccgtagaactctagcttgtgtctccactatgcagatgatttcctacatgattcattcagtagatattttctggtttttatttctgcagcatctggttttgttggttgctctctccttcttaaggtgttctctctttgtattcacaacaccacatacttttatcttttacttctatacccatctctttagggtattctcaggttctatgtttttaatcctcatttcatgtcagcaccagaatttttatataggaatggcttcctgacttggaaaaaggaagatgatgggtgagtgggtagatgggtcgaagccgtgtttgcaaacattttggcaag

SEQ ID NO: 778588 - DNA, 653 bp, Homo sapiens
accataccacgtcatacctccttccatttggaatcaaaagatatgtgccctccaccctcacactgatctcttcctcccattgcctctagaaattgcatcattcattattctgtcattcctcgatcttcactttctccttctctattagctctttttccattccacgtataaaaatattcaactctcctttgtctgaagatatgtacaaagattttttcctgcctttgcgtccatggtaactactgttgtttctcctttktatcacagcatcatacttaagagtgtggtctatatttgcagtcttcttttcttcactttccgtagaactctagcttgtgtctccactatgcagatgatttcctacatgattcattcagtagatattttctggtttttatttctgcagcatctggttttgttggttgctctctccttcttaaggtgttctctctttgtattcacaacaccacatacttttatcttttacttctatacccatctctttagggtattctcaggttctatgtttttaatcctcatttcatgtcagcaccagaatttttatataggaatggcttcctgacttggaaaaaggaagatgatgggtgagtgggtagatgggtcgaagccgtgtttgcaaacattttggcaag

SEQ ID NO: 778589 - DNA, 653 bp, Homo sapiens
accataccacgtcatacctccttccatttggaatcaaaagatatgtgccctccaccctcacactgatctcttcctcccattgcctctagaaattgcatcattcattattctgtcattcctcgatcttcactttctccttctctattagctctttttccattccacgtataaaaatattcaactctcctttgtctgaagatatgtacaaagattttttcctgcctttgcgtccatggtaactactgttgtttctcctttgtatcacagcatcatacttaagagtgtggtctatatttgcagtcttcttttcttcactttccrtagaactctagcttgtgtctccactatgcagatgatttcctacatgattcattcagtagatattttctggtttttatttctgcagcatctggttttgttggttgctctctccttcttaaggtgttctctctttgtattcacaacaccacatacttttatcttttacttctatacccatctctttagggtattctcaggttctatgtttttaatcctcatttcatgtcagcaccagaatttttatataggaatggcttcctgacttggaaaaaggaagatgatgggtgagtgggtagatgggtcgaagccgtgtttgcaaacattttggcaag

SEQ ID NO: 778590 - DNA, 604 bp, Homo sapiens
tatcaggcttgtccacctctctaacatttgtccacatgggtgttagaattctccagaatggtggcagaacttagaggagattcaagagcgaatatctaaggttgctgatgaaagtgggaggatgaacaggaaactggaagatggcagcttgaggaggaccagggtagtgtgaggctgtacagaaaatattttgtttctgtatggttagggctttctgagcacgaaaacctggcatatgggtcaaaggacaagtgttagtatttaaagggtgattagatagtgagagaccaacctgagaggtttaccttcctgaaggcaagtgatatggtttggctgtgtccttccccaaatctcatcttgamctgtagctcctacaattcccatatgtcatgggagggacccgatgggaggtaattgaatcatgggggcaggtctttcccatactgttctcatggtagtgaataagtctcatgagatatgatggttttataaagggacgttcccctgcacaaattctctcttccctactgccatataagacatgccttttgccttccactgtgattgtgaggcctccccagccacatggaactgtgaggcatta

SEQ ID NO: 778591 - DNA, 604 bp, Homo sapiens
tatcaggcttgtccacctctctaacatttgtccacatgggtgttagaattctccagaatggtggcagaacttagaggagattcaagagcgaatatctaaggttgctgatgaaagtgggaggatgaacaggaaactggaagatggcagcttgaggaggaccagggtagtgtgaggctgtacagaaaatattttgtttctgtatggttagggctttctgagcacgaaaacctggcatatgggtcaaaggacaagtgttagtatttaaagggtgattagatagtgagagaccaacctgagaggtttaccttcctgaaggcaagtgatatggtttggctgtgtccttccccaaatctcatcttgacctgtagctcctacaattcccatatgtcatgggagggacccgatgggaggtaattgaatcatgggggcaggtctttcccatrctgttctcatggtagtgaataagtctcatgagatatgatggttttataaagggacgttcccctgcacaaattctctcttccctactgccatataagacatgccttttgccttccactgtgattgtgaggcctccccagccacatggaactgtgaggcatta

SEQ ID NO: 778592 - DNA, 491 bp, Homo sapiens
cttcctcctggagatgtttattgacattatgaaggataagaacttgggatccttccattctttttccaaggagaatttgtttatattagggagaaaaagtttctctctagtcaagcactctccctttctcaggcggggagaggagacagctgtcttcctagataagctccagaaaactcatgccacctttcaggataaatgagtaaacacagatactaaaaacttaycagctgctggaatcagatggtttgaacctcaggggtggtggtgggaggctgtgaagtagaaatgagaatggcctggagaatgccgttaggaggttgctgagctgatcaccaactccaaggactctggagcatgatggggaggaagcaagagaagcagaaattttgtgcaagcacatttatctccactggaagaaatctttaaattgtttaggaaagttttacactggataataggctccaggcttcaagtggaatttaggcaca

SEQ ID NO: 778593 - DNA, 636 bp, Homo sapiens
atttccagttggctcccagccaatgactgaggatggtggggctactaatgcaggctattcctacaggatgcatggcttctcttgtgggcaacttttgttcaggtaatgtctgtcagcctagttgagacttccataggactgcactgcagtctgagaattttctagctaatctcctcctgcccctttcacagatatcagacctgcatcatggtccgaaggcacttctttttactaggtaagacagctaagggagaagggaacataaaatgaatagagaaggagagcaaggatgagtgtctgttgtggcactgagattaactacagtggtggcaaccataattcatctttctaacctgcctcttaagtttcccttctgggagggaggccttgggaaccacagaggagctgctcctcaaacctgcatagagaaatagatctgtgaggtataatctgtggaatttgatggtcatgaaaatgmaccaactgtatctcctgctgtaggaagcacagttgactgatggccccattgttccacctctgatccacaactgagtttacaccatggccacatatgccctggactgctcccagacagtcactgggccctgagaagctactggtacagactcatctctg

SEQ ID NO: 778594 - DNA, 636 bp, Homo sapiens
atttccagttggctcccagccaatgactgaggatggtggggctactaatgcaggctattcctacaggatgcatggcttctcttgtgggcaacttttgttcaggtaatgtctgtcagcctagttgagacttccataggactgcactgcagtctgagaattttctagctaatctcctcctgcccctttcacagatatcagacctgcatcatggtccgaaggcacttctttttactaggtaagacagctaagggagaagggaacataaaatgaatagagaaggagagcaaggatgagtgtctgttgtggcactgagattaactacagtggtggcaaccataattcatctttctaacctgcctcttaagtttcccttctgggagggaggccttgggaaccacagaggagctgctcctcaaacctgcatagagaaatagatctgtgaggtataatctgtggaatttgatggtcatgaaaatgaaccaactrtatctcctgctgtaggaagcacagttgactgatggccccattgttccacctctgatccacaactgagtttacaccatggccacatatgccctggactgctcccagacagtcactgggccctgagaagctactggtacagactcatctctg

SEQ ID NO: 778595 - DNA, 617 bp, Homo sapiens
atgacgttccaggagattttaacgcattgaaggcacatttgcctgaagaagtcagagatgttactgactggttcaaaaataatcatgtgcatggtatgataaaaagacacactttttaaagaattagaaatagaagaatttcaaaaagagcagtacttcatagaaaatgattgtgaaaatattatctgagacagccatgtcctgaaagataaaaagcagctattcttcatgatgtaagacttcaaaatataatgattgtgaaagtcagtcagctcttattaactatttccttgcaattgcccataatctatagtacattttttccatacrttgaattttcttttaagttttttgtttttctttttcttttaaatgttttttgcactattttaaattgtcagcattattattttacaatttgctatgctatgtgttttgtttttgcattatttcaatactggaggtataaactatatagagagttttagagagttccagttttatgcatttttttggcaaatttgactccatgaaagtgatctatcacaattttgaatttgtgtgtaagcactgtgtttgtgcgtgtaaaaaacgttgaaacttcctcagcaaatgaa

SEQ ID NO: 778596 - DNA, 454 bp, Homo sapiens
aagaagacaaccagctcgatgggatccacatcgtgtgcaatcaccaccagctgagctttcttgttctccaccaaggtggcgatggtgttaactcctgctcgaaggacaggtggtctcttggtgggggcgtcccctttgccagcagctttcttctcggcctgggccaacagccttcttctcttgctttgtctctggtctgtacttgtgggccagcttaagcagctgagtagctgtttggcggtccagggcctgggtgaactggttaatcgcaggaggcactttcagccmcttatagaggatggctctctgccgctgcaacctgatatagcagggccatttcacaaagcgggtgaagtgtcttttgggctggatgtcctgtccaatgccaaaattcttaggccgtttctcaaacaggggattcaccactttcttagcctcctgcttcttcatgaca

SEQ ID NO: 778597 - DNA, 463 bp, Homo sapiens
gtctgcgggtgcgctggttgcgtccgcctttgcatctcggttcctgtccgcgctcgctccgcacccaggctgagtcaggaatacaaccgaagatttccgactatgctcccctgagctggccaagagtaatgttccctgaaatcatgccctcccaaaaagcctcaaaaatcaaggacatgggaagtggggtttggggtggtgggttgtggtcgcggaatccaggaaagccctccccctcaacccgaaagcattttgacagagtgctaggcttggaagacctgagacytagtgagagcaaggagtgtgagcgtcaaccaagcaaattaactgtcccctgatttcttagaaaatttcaccggaaacatttctatgaagaaaaattaaagtcagtttatgttattgacgcttttccatagcccttcaatgtttttctccccatccccactcccgacttctttctgaa

SEQ ID NO: 778598 - DNA, 646 bp, Homo sapiens
ttatcacaatttaaaaattctagtaacataaaacaatataattttacaacaaggaaaaggcatttcttgaaagttaattcacaaagttgcatgaattgctaaacaaaacaatttcaataaccaaaacagctctagatatctcaggcagaatgaattcaaagaaaatgactgcacatattacttctcgacattagcttcacagtggaatttcctggggcaattttttaaagaaacgattgcctacrtatcatgtccagattctgatttatttgttattagatatggcctggacatcgctctactcctgacgtccctgctcaagaatcaacctccaggaagagagactgggactcactgattttggtgctattcagttgaactatgtccttactgattttccacctactagttctattcattattgatagagagatgttaacatctccaattataatagtgcatttatctgtctgttcttgcaattctgttttcacctcatgtgtttttgacagcctgttacaggcaaacacattaaggattgttatgctttcttggaaaattaaaccctttgttactatgtaatacatctttgtatccccctataattgttctttctctgaagtctttttgttagaaatcaatatat

SEQ ID NO: 778599 - DNA, 646 bp, Homo sapiens
ttatcacaatttaaaaattctagtaacataaaacaatataattttacaacaaggaaaaggcatttcttgaaagttaattcacaaagttgcatgaattgctaaacaaaacaatttcaataaccaaaacagctctagatatctcaggcagaatgaattcaaagaaaatgactgcacatattacttctcgacattagcttcacagtggaatttcctggggcaattttttaaagaaacgattgcctacgtatcatgtccagattctgatttatttgttattagatatggcctggacatcrctctactcctgacgtccctgctcaagaatcaacctccaggaagagagactgggactcactgattttggtgctattcagttgaactatgtccttactgattttccacctactagttctattcattattgatagagagatgttaacatctccaattataatagtgcatttatctgtctgttcttgcaattctgttttcacctcatgtgtttttgacagcctgttacaggcaaacacattaaggattgttatgctttcttggaaaattaaaccctttgttactatgtaatacatctttgtatccccctataattgttctttctctgaagtctttttgttagaaatcaatatat

SEQ ID NO: 778600 - DNA, 577 bp, Homo sapiens
acaaagaaaaaattcaaattacttaccaggttctactaagtcctgttttcaccgatctttataccattcctagtcctctggttaccctccccattgccgattccagcttgctgtatcacaaacatgctaggcatgccgtctcttcaaggtcattcagtgctggttgttcctgcctggaaagttctttcccacctatctacatgctgtgctcccattttaggaactgtcagaactggaaattgttcttcacttgtttttcagcatctcttgtaacagtgaccaaagcacggaatgtaagcttttcagttggatatacscaaaccaaatttcaaacttcaactacaaagctagttacgtcatgtacaaggttacctttttttttttccagtagtttcctaccagttataattctgtgaaatgatttggagcaatttttccctcactgcttagcactcccaagtatctgttgagaaatccagtattctataatattttttaaaactcagcctgactcaacttgtgtgtcttgtaactaagaatcccaaaagataaaatatccatagtaaataaacaactc

SEQ ID NO: 778601 - DNA, 577 bp, Homo sapiens
acaaagaaaaaattcaaattacttaccaggttctactaagtcctgttttcaccgatctttataccattcctagtcctctggttaccctccccattgccgattccagcttgctgtatcacaaacatgctaggcatgccgtctcttcaaggtcattcagtgctggttgttcctgcctggaaagttctttcccacctatctacatgctgtgctcccattttaggaactgtcagaactggaaattgttcttcacttgtttttcagcatctcttgtaacagtgaccaaagcacggaatgtaagcttttcagttggatatacccaaaccaaatttcaaacttcaactacaaagctagttacgtcatrtacaaggttacctttttttttttccagtagtttcctaccagttataattctgtgaaatgatttggagcaatttttccctcactgcttagcactcccaagtatctgttgagaaatccagtattctataatattttttaaaactcagcctgactcaacttgtgtgtcttgtaactaagaatcccaaaagataaaatatccatagtaaataaacaactc

SEQ ID NO: 778602 - DNA, 622 bp, Homo sapiens
gtgcagtggtgcaatctcagctcaccgcaacttccgactcccgggttcaagcgattctcctgcctcagcctccctagtagctgggattacaggcatgtgccaccacacttggataattttgttggtggtggtggtgttttggtttgttttgttttttgagatggagtttcactcttgttgcccagactgaagtacaatgacgtgatcttggctcactgcaacctccacctcccgggttcaagctattctcctgcctcagccttcccgagtagctgggattgcaggcatgygcaaccacgcctggctaattttttgtatttttagtagaaaagtggtttctccatgttggtcaggctggacttgaactcccaacctcaggtgatccgcctgcctcagcctcccaaagtgctgggattacaggtgtgagccaccacacctggccttttttgtatttttagtagagacagggtttcaccatgttggccaggctggtctcgatctcctgacctcaggtgatctgcctgccttggcctcccaaattgctgggattacaggcataagccactgtgcctggtccattttaagtttttttaaaaagatttttttaattagcaaaaatgtt

SEQ ID NO: 778603 - DNA, 597 bp, Homo sapiens
ggactgccatgccaatggattccttggagtcagaagctttggtgttcagtattttttatggagacatcggtggtgcagtttggactaagcctcacctgacaggttcctcccatgtgaggaggggctaactcaccattgttgagtctgctgggtctcagctcttaacttcytctaaacagaacatccacagaacagggacatgcacgctcacaaagacctgtgaccatgcaggcaaagtaggctcacatcttgcctggaggctcttcccctcaggcaacctgatctcgggggggatgagctctgcctacagctgggccctcttgtacctgatcacagaacaatcaggctttttaggtcttagcttctcaaatgtctttatttcatagatctgcaaatagtctttgctttttcatttacataaccaaatggttgggtcaagtggtttcattaaaacaagagtagtctgcacacactatagctgtggacaggagagccaggggccttctgggaagggtgacggtggaattaatgtggaaaatgactctcagaccaaaggtgtaaactggagtgccccctgcaaggagcatcccatgctcc

SEQ ID NO: 778604 - DNA, 557 bp, Homo sapiens
aatctccgaagaactatactgaatgaaaaaaagctaatcctaaaagcctacctaccctataatgccacttacatataacattattgaatgcaaaattatagagatggagaactgattaatggtttggaggggttaaggaggaggtgatgtgggagggaaataggtgtggctatagaagggcattttgagggatccttgtggtgatagaaatgttttatatagtagtttgtgcttatcctggggagayacgttccaaggcccccatggatgcccaaatcctcacatagtatcaaaccctatatataccctgttttttcctatacatacctatgataatttttttttctttttctttttcttttttttttttttgagatggagtctcactctgttgcccaggctgaaatgcagtggcactctttcagctcactgcaacctccacctcctgggttcaagtgattctcctgcctcagcctcccgagtaactgggattgtaggcaaccatcaccacacccggctaattttttgtatatttagtagagatggggtttcactat

SEQ ID NO: 778605 - DNA, 631 bp, Homo sapiens
aaatgggtcatggttgagaacacagaaggcatcaaacttgatgtagagaggaggaatttttaagagtcaggcattaccttgtagcaggcatggctcatgatagctatcaactggagtggattcaaataaagacagggggtgagagcactgtaatttattagttggccaaggcacaaatcttgagaaggagggtttggccaccatgggagaaatgatcaggggacaagctgttttgcagagtgggacacatttctttcaagacagaatggaagagagaggagtcaggtggtatcagattgagaagggcttgtccttgtagcttcacagcctggctgaagttccacacagacgtgaaagatsggaagtagtatagatggcagaaggcaaacactagtgtgcccagattaaattatttgatcacatgtggaagtgtacagacctcaaaacagcaaagcatacaagatgtatgtaaagacttagaatgacatgaaaataaaaataacccttttttccctaactagttttcctcacatttttttaagagatggggtctcactatgatgtccaggctagactcaaactcctggattcaagcaattctcctgcctcagcctccggagtagctaagact

SEQ ID NO: 778606 - DNA, 553 bp, Homo sapiens
actgtaactatggctaactatggtacacaggttgagaatccctaatgctgaaactcaaaatccaaaatgctccaaaatccgaaactttttgagaattgacatgatactcaaagaatatgctcattggagcatttcagatttttggatcagggatgctcaactgagtgcattctggaaatattccaaagtatccccaagattgaaatccgaaacrcttctggtcccaagcattttggataagggatactcaacttacataatattgtataaaacaactggaaagaaatatatcacatattaactgcagttatacttaatgatggttctgtaggtattttctacttttctccacctatttttctttaataagcatatattacttttatcacaatcatacaaaataaaaaacaagaaaagttaaaaataaaagaccttaacaaactccttaacaaagcataataatagctgatgaaatgtggcctttggcagaagacggaccacagtttgactctcagcatctcccatacataatccattatgtgagcttcagctt

SEQ ID NO: 778607 - DNA, 642 bp, Homo sapiens
gtggcagaagaatataaatggcagtatgccatttatgtatataaatttaaaaaaccacaaaacaataatacacaagtccaaaaaaatggatggaaatgatataggaaaggaatgaaaaggttttaatcatatattaacatttcatttcctttctaaaagggttatctgaattaaatatgacaaaatgctaatatatattaaatctgagccatgtatgcggtatttataatattrttttgtgatttcacaataaaatattttaagtacgtttcttaagggaaatttcccatttagtatctgcctcagccctgagcccatggccttgttgaggacagggatgagtctgacccatcactgtaccctcaggcatgtagcatagtgccaagtgctgaaaaaatagttgctgcatcaacacataatctaccatcacccaatcaggcttgatactggatttctgtgtccctttgagatttccatctggctccttacagcagctgtataactggctcataacacaccctgcaggctgtgcttggaactgcctccaccccagtactacagatgacactccaggacacctcgtcctcaggaagaccagttctgtccttccacatatttccctgggtgccagttgcatggcga

SEQ ID NO: 778608 - DNA, 614 bp, Homo sapiens
tttctttccctatgaatatttatttgtttctgctcaatttgttgaaaaaattatccttacacccactgaattattttgacatcttggtcagaaaatctgttggtcgtatatgtgtgtgtctatttgtgatctctgttttgatccattgttctattcatctgtccttatgccagcactgtattttgttgagaatttctccatgtatgttttatgagggatataagtctgtagtcttyttttattatgtttgtctggtttttgtattgagtttctactggtatatccttttattacatgtttatctgtgactttgtatttaaaatgcatctatttaggtaccatatagttcagtatcattttttaatgtattctggtgatttctgccttttaattaaatgtttagtctatttacatttactgtatattgacatgttagttttagatctaccattttaaaacttgtttcctatatgtcttatcctttagacttttaaaaaattctgtgtctctgtttattgaatatttttagtataacatttacatttctctcaggttttctttgcactactgttttgtagttactctgcagatcacaatattcacccttagtaaaa

SEQ ID NO: 778609 - DNA, 599 bp, Homo sapiens
aaacatcactatgtagcccccatgtatatatataataattattattatttttagagatagaggtctcattcttttgcccaggctggaatgcagtggagcaactataactcactgtagacttgaactcctgggctccagtgatcctcctgcctcagtctcccaagtagctgggactacaggtacatgccaccacatccagctaatttgtatttgtttatttatttatttatttttagatggggttgggggacttgctatattgcctaggctgatttcgaactcatggctttaagcaatcctcagcctcctgagcagctgagattacaagcatgagctaccaagcctggcttattatttgtcaatttaaaataaataaaattaaaactggaaaattcataaatatatggaaattaaacaatgtagtcttaaacaaccaatgggtcaaagaagcaawcacaagagaaattaggaaataccttgagacaaatgaaaacataaatacaatatattaaaacttatgggatacagtaaaaacagtgctgagagagagattaatagttgtaagtaaacatattaaaaaagagggaagatctaagtaa

SEQ ID NO: 778610 - DNA, 535 bp, Homo sapiens
aatcaacttagtaaattctacaagaaaaatggccaagaatttgattgaaaaatccattgaatgtatagatttggagacaactgcctttcttaggatactcagtcttcccaaatatggacacggtatagttctctatttacttaggtctttctgtatgtcattcaacagagcactgcaattttctccatattgtatattatactttctatatacctatattattcagatccttaaacaagatagaatatctcataaaaatccagagctaagactcatgcctctggtatagtaaatctgcactttcctggaacccaggctgcttctagctttctgctctaccarccctggagtgtagccctggctctcatggtctaagatggcatttcagccaacacatccatattacctgtagcaggatggcaggagttggaagggtccagcccctctcttcagtaaacacactccagaatgttatacacgtcacttcctcatacttccctctggccagaccttaatcaaatggcaaaatctggtt

SEQ ID NO: 778611 - DNA, 535 bp, Homo sapiens
aatcaacttagtaaattctacaagaaaaatggccaagaatttgattgaaaaatccattgaatgtatagatttggagacaactgcctttcttaggatactcagtcttcccaaatatggacacggtatagttctctatttacttaggtctttctgtatgtcattcaacagagcactgcaattttctccatattgtatattatactttctatatacctatattattcagatccttaaacaagatagaatatctcataaaaatccagagctaagactcatgcctctggtatagtaaatctgcactttcctggaacccaggctgcttctagctttctgctctaccagccctggagtgtarccctggctctcatggtctaagatggcatttcagccaacacatccatattacctgtagcaggatggcaggagttggaagggtccagcccctctcttcagtaaacacactccagaatgttatacacgtcacttcctcatacttccctctggccagaccttaatcaaatggcaaaatctggtt

SEQ ID NO: 778612 - DNA, 579 bp, Homo sapiens
gattagaaattttaaacaatgttacttgtggttgtatatatcctcaattttaaaacaaatatgctttttaagtaatatataaattaaaagtataaagatattttactgcaatcattatcgtctctattactaaaagcatcagtctcatttctctcttccccttttagatataactatgttttttgcaaagcacacaatttataacacagtataaagaaaaagtataaaaatacatttctattttacccaataaaaataataatcaaaatttatatttaaattcttctatcamacttatttggttcttgaaagaagtaatttaatgacataaccaatgtattcaattgatatcaaatatcccaagtactgactcacaattgtggaatgaaatgtctataatacccttctggaccttttctggtttatagaattctaaatcttcaagccctagttcaaacctattccacaagcctagtactctgccaatatttgctgaattaaatgtaataaaaaaactgctctatgacaaagttaggaagcaaggaaattaatatgtccagtgcctgttataatactggc

SEQ ID NO: 778613 - DNA, 618 bp, Homo sapiens
ttgaggaatatattatctactgggaagatcaacagataataatattatgcaacagtgaatataacatactgctgactgtcagtgcagataaatcaaaattattatggactttccagatgcggtaacactttgtggaacattgcaacaagtttcaccaaaagggaactatctgtgtctgaaaagaatagtagttctcctgtcaaaattctcccagtctgctttagctgttagtaagatcatcttaacmggagtaaggatgccccttacccaagaagtatactcagtgacagtcagcctgacatcctcaacatttttaacccatgtcttgaatctgttcattaaattaagtcgctggaaatactgggctgctttttggagaagcatgtgttagtttggagccaaatgatttgaattctagtccagattttgccaggaatgggttgttaccttattttcctcataatggaaattcagttaaaatccctgctctacctgttttataagaccattttgaaaatgaagtaatataatagataaaagtattctttgtaaggttaaatgcattatgcagatgggtgttgggtggtggtgatattagctgtaaagtaccattgaagt

SEQ ID NO: 778614 - DNA, 618 bp, Homo sapiens
ttgaggaatatattatctactgggaagatcaacagataataatattatgcaacagtgaatataacatactgctgactgtcagtgcagataaatcaaaattattatggactttccagatgcggtaacactttgtggaacattgcaacaagtttcaccaaaagggaactatctgtgtctgaaaagaatagtagttctcctgtcaaaattctcccagtctgctttagctgttagtaagatcatcttaacaggagtaaggatgccccttacccaagaagtatactcagtgacagtcagcctgacatcctcaacatttttaacccatgtcttgaatctgttcattaaattaagtcgctggaaatactgggctgctttttggagaagcatgtgttagtttggagccaaatgatytgaattctagtccagattttgccaggaatgggttgttaccttattttcctcataatggaaattcagttaaaatccctgctctacctgttttataagaccattttgaaaatgaagtaatataatagataaaagtattctttgtaaggttaaatgcattatgcagatgggtgttgggtggtggtgatattagctgtaaagtaccattgaagt

SEQ ID NO: 778615 - DNA, 602 bp, Homo sapiens
ctttaagagctgtaacactcaccgcgaaggtctgcagcttcactcctaaagccagggagaccacgaacccaccagaaggaagaaactccggacacatctgaacatctgaaggaacaaactccggacacaccatctttaagaattgtaacactcacactcaccaccagggtccctggcttcattcttgaagtcagggagacaagaacccaccaattcaggacacagtgatacaagttagtagtgatacatgttacaatgtggaagaacttcaaagatatgctaatgaaataagccagacataaaagattacatattgtatcactcaattgatatgaagtttctagaaaaggcccatgcatagagactgaaaacacatgagtgtttgccttaaggctgggcattgagtggttgccttagggctgaggttgacagaaagaaacaaaaaaaawtttttgagctggtggaaatgttttaaatgtttagttatggttgtgtaagtctatgagcctcctaaaaataactgaaatatttacttaaaatagttaaattttatgatagtaaataaaactgttaacatatgtaggaaagtataaataaacctg

SEQ ID NO: 778616 - DNA, 543 bp, Homo sapiens
gaacttcaaagatatgctaatgaaataagccagacataaaagattacatattgtatcactcaattgatatgaagtttctagaaaaggcccatgcatagagactgaaaacacatgagtgtttgccttaaggctgggcattgagtggttgccttagggctgaggttgacagaaagaaacaaaaaaaaatttttgagctggtggaaatgttttaaatgtttagttatggttgtgtaagtctatgagcctcctaaaaataactgaaatatttacttaaaatagttaaattttatgatagtaaataaaactgttaamatatgtaggaaagtataaataaacctgtcacctcaataaaactgttttaaaaagaaaagttaaggccacgtgtgttggctcacactgtaatcccagcactttggaaggccgaggtggaaggactgtttggggccaggagttcaagaccagtctgggcaacatagtaagacactgtgtctgcaaaatataaattaaaatcctagcagagtttggcagagtgtgtctgtagtc

SEQ ID NO: 778617 - DNA, 628 bp, Homo sapiens
aacaacttcagcaaagtctcaagatacaaaattgtatacaaaaattagtagcatccttatacactaaacagcacccaacgcaaaagtcaagtcaggaatacaatcccattcaaaattgcctaaaaatataaaatacctaggaatacagctacccaggaaagtgaaacatctttacaacaagaattacaaaacactactcaaagaaatcagagatgacacaaacaaatgggaaaattatcccayactcatagataggaagaaccaatatccttaaaatggccatactgaccaaagcagtttacagattcagtgctatttttatcaaactacaaataacattcttcacatttaaaaattcatatggaactatttaactaactcatatttaactaactcatatttaacttaattcatatggaactatttaaaaattcatatggaaacaaaaaagagcccaaatagccaatgcagtcttaagcaaaaagaataaagcaggaaacatcatgctacctgactttaaactatactataggactacagtaaccaaaacagcatggtactggtacataaacagacatataaaaccatggaacaaatacatcacccagaaacaaggccacacacctac

SEQ ID NO: 778618 - DNA, 594 bp, Homo sapiens
cttgtagaatgagtttggaagtattccctcctcctcaatctttgtcagaatagtctgagtaggattggcagtagttctttaaacatttggaagaatacagtagtgaagtcatcaggtcctaggtttttttttatgggagacattttattatggctttaatcttattacctgttaytggtctgtcaaggctttggatttcataattcgatcttggtaggttgtaagtgtgtaggaatttatccatttcttctagattttccaatttgttggcatatagttgctcatagtagccactaatgggcctttgaatttctgcagtatcggttgtaatgtctcttgtttcatttttgatttttttatttgggtcttctatatctttttcttggttagtctggctaaaggtttgtaaattttgtttagcttttcagaaaaccaacttttgtttcattgatcttttgtattattttcatttcaaattcattcatttctgctctgatctttattatttcttttcttctattaattttgggtttggtttgctcttgcttttctagttctttaagatgcagtgttagattgtttatttgaagttta

SEQ ID NO: 778619 - DNA, 630 bp, Homo sapiens
cagtatagacaagaaaacaaaatgttctgcccactttgccacaaaattcctcctcctacattctctatctttatatagttacaccattcacccaactgtcaatggctctattttattagggtttctcaaatccccatacttctctccatttctttttttttttttttttttctgaaacaaagtcttgctctgtcgcccaggctggatggagtgcagtggcgcgatctcggctcactgcaagctccgccccccgggttcacgccattctcctgcctcagcctcccgagtagctgggactacaggggcccaccaccacgcccggctaattttttgtatttttagtagagacggggtttcaccrtgttagccaggatggtctcgatctcctgacctcgtgatccacctgcctcggcctcccaaagtgctgggattacaggtgtgagccaccacgcccagcccctcttttatttctaatgtcacatctttggcaccatcgtctctcccctggaccactgcagtagctctctccagtctcatggctcccagcacagcttccacggcatttccaaaatgagatctctgaaaacaaacttgacctaattgctcccctactaaaactctttcagtgct

SEQ ID NO: 778620 - DNA, 608 bp, Homo sapiens
gagtaagtctcatgagatctgatggttttataaagggaaactccttttgcctgactctcattctcttctcttgtctgccgccatgtgaggcgtgcctttcactttccaccatgattgtaagacctccccagctacggaaccatgagtccattaaacctctttcttgcagggcgtagtgactcatgcttgttatcccagcactttgggaggctgagacaggtggatcacttgaggtcaggagtttgagaccagcctggccaacatggcgaaaccccatctctactgaaaatacaaaaattagccgggcatggtggcccatggctgtaatcccaactactcaggaggctgaggcaagagaatcgcttggacctgggagatrgaggttacagtcagccaagatcgaggcactgcattccatcctgggtgatagagtgagactctgtctcaaaaaaacaaaaaacaaacaaacaaaaaatctttcttttgtaaattgcccagttttgggtatgtcttcatcagcagtgtgaaaacagactaatatatcttgccttcataagtgtttgcagtttagtaaaggaactaaatgaccaagcaataagcaataaaaa

SEQ ID NO: 778621 - DNA, 627 bp, Homo sapiens
cccgagctctgccctccccacagtctgcccttctaggagagaaacaaggagatagtggcacacagggagggaggcctgtttcttatgctacccatacatcgaggccagctgttctactcaatatggcacaccagcatgctaattcccaatcccatcaacttgtgatcctcattcattttccttataccctgtgagctactgaagcaaggggtcttctgtgctgcattttaattactacgatgagctatgggatctcaagggcttttgaataataacacttcaacatttacacattttcattcacctctgcccacttaaattaaggctraagaatgcagctcatgtgaggagttgctaattcaaatctcccctcaggcccagagaagaaggctgggggacccagtgtctcatattgttttgtgttctccgtatcattaggattggaatcctccagctgcctagtcactatagtgagcatcaaaaaccatgggtgtgcaggagaactcccaagtacatggctgctttcagagggtcaccaggctcttcctggaaggaaggtcctgaccaagttattcagacacttgctgaagactgcaatttgataagacaaatagactgagagttcat

SEQ ID NO: 778622 - DNA, 612 bp, Homo sapiens
tttggaaggattaaggtcttcatactcatgcacaaactgtgcacagactcaaatgcgtagctctcagaaatactgacttaatctcaaaaacctctgaagtgtaactgcacgccagaaagtccacatgtatcactgtcttcagataatcattcatgattgtcctctgttaagtaccacttcacctggacccaagcactattagtggatgctacaaaaaagcaccacaragaacaagatggcttttagagctcttggctacattcccatttactatcaaacatggaaagttgtccactatttctccaagtggtaatatgtccagaacatccagcgagcaaagagttaaacatgaaagagaaataaatgactacgctatacaaaacaggaatcactgctcttggttatgcttgccctgtatgatgatttcagaagactttttctacttttgaaataattcaacaggaatacccagttaaataaaactaccataaaatcacatgggccttgtgtctttttggaggatgggctttctacttcatagatctattaaggctttccacttctgccagcttttgtttcttctataggcacaaatggcatttctgggtagga

SEQ ID NO: 778623 - DNA, 615 bp, Homo sapiens
attttatatttaataatgcttcttatatgatttttataccagataagctaaattttacctttatattagtgtgttattaacgttaaacttaattttaataaaaccttgtagacatatttatccaatttttcatgtttgaccataaggtaagtttttatagactctttttaacctttcataatttttgttaaagagcaggttggtgctttaagaaaaacctgttgcatttttactttaatgtccagttcacagaaaaactgaatgatacctttttaactttagctaacatgtttacacacagaatttttttttttacaattaacattttaaaacttgcttaaactttcaaagcaataattttttttaaccttttaatgtaggtaaaaatccacattcttatgcctccttataatccttttaccaaaggtataktttactttccttatacaccttgcacataaactgtttctttaatagtactcaggaggctttattacttttaaattatacaacattttttgcataaatttttttataacattttttctttcatgactttcacagataattcttcaacatgtctcaactttctgacttattacaaacatttttttc

SEQ ID NO: 778624 - DNA, 646 bp, Homo sapiens
caaaaaaatacttctgcaaggacatctgctcagcaactgactgtccaaccccaaactggccccaccgttgttattgatccttgtagccaaggataattatctcaaaacaattatgtaatcctcatttttcctttgaaaacctctgtcttccttcaggtccctgaatatgcacatggtttactatcacacatgtattcccattgcaataccttattaccaaataaatatcattttcttttattagagggcctcactccatttgttattgagattgacataaatgttgtcagaagtgggatgaggcaggctcacttcagaagaatcagaggcccctgaaactgagtgtattctgactgagccctttgtgctctccatcttcatgagttgccttttccagccaggtgaatctcctgtaggattctcagactccctctctttggtgagttgtttttcactttatagaggatttgtttcagttacaagtctgyctttaataaaggacactacatccctccctcctgggatgataaaagactttttgtcctttctggaaagtcctttctgggatgaggacaagggcccttctggtttgagtgctctggtttctacagaatttatatcctatctgtgaggcaagtcttttctg

SEQ ID NO: 778625 - DNA, 622 bp, Homo sapiens
caagaaatttctctaagaggagagaaaggagagagatcatggcagatgggacagaggtaggaacaagattttacactctatatattttgtataattttgatctatgtacatataatcagctcatatgcgaacctacatctggctcttcttttagacagttgtttattatgtatgtttgtatgtctcaatttttctagcaaactaggggggctagtttggtgagtggtagaatttcaaatgactgttgagaaagggacattattgtagtcttgctaaaaaggtgactttgaagtaataaaacatttcctcttttgytatcttttaaaatctttgttcaccaaacatctttaaattctttaacaaattgatttcatattcagagattaggtcattataaaacaaaatacaaaccaaaaaaaccctcacataatgataagaaaaacaaaatttaatattatgacttctttggtgaattattagtttaaagagtatattaaatatatctggcagtaaaaagcatgcaactttgccaactataaaatattatatatcaacaatgttcaatatttcaacttcatatgaagttgagcattttgtatattttgttatcttgtctaaataa

SEQ ID NO: 778626 - DNA, 595 bp, Homo sapiens
ctcacttaccctgcacctggtcacccaagagctctgatggagatgtataaggagacaaatgttttcatgcctgataacataacatccattctacagcccacgtatcaaagagtcattttaattttcaagtattagtattaaagaaatacatttttttttcaggctatagctgccatagattatgagtcctcygatgggtctgtgcaaagtaaattgaaaaccttctggaaaggagttaacattctagacaccatgtagcacatttacgattcatggggggaggtcaaaatatgaacattagaagaagttcagaagacatttattccaaccctcatggatgactttgagagcttgaagactttagtggaagaaataacagcagacggggtgaaactagcaagagagcaagagttagaagtgaagcctaaaatgtgactgaattgctacaatctcatgataaaatttattgaatgaagagtttcttcttatggatgaacaaagaaagtggtttcttgatatagaatctactcttggtgaaaatgccatgaacatagttaaaatgacaacaaaagatttagaatattacagaaactta

SEQ ID NO: 778627 - DNA, 547 bp, Homo sapiens
ccggagtgcaatggcgcaatctcagctcactgcaacctctgcctcctgggcctcccgggttcaagcgattctcccgcctcagcctcctgagtagctaggattacaggcacccgccatcatgcccagctaatttttgtatttttagtacagacggggtttcaccatgttggccaggctggtcttgaactcctgacctcaggtgatccacccaccttggcctcctaaagtgctgggattacaggcgtgacctacctcacctggccagcctttattttcttagaagatgctcagatgcagtcgcattgccggkcctggctgtgcatttgaaagcaatagaatgtgttctcctaatatacctctgaaactggtccaattgtcccatagaactgatatttatggcttcttttgaataaacatagaaactgatcctcccagtcttgaaacttgaggaagttacatttgtctttgctcagtttctttctcaggcatccaaccatcaggcttcctagatagtgtcaataaactgaaatttaccagatcactgcat

SEQ ID NO: 778628 - DNA, 547 bp, Homo sapiens
ccggagtgcaatggcgcaatctcagctcactgcaacctctgcctcctgggcctcccgggttcaagcgattctcccgcctcagcctcctgagtagctaggattacaggcacccgccatcatgcccagctaatttttgtatttttagtacagacggggtttcaccatgttggccaggctggtcttgaactcctgacctcaggtgatccacccaccttggcctcctaaagtgctgggattacaggcgtgacctacctcacctggccagcctttattttcttagaagatgctcagatgcagtcgcattgccgggyctggctgtgcatttgaaagcaatagaatgtgttctcctaatatacctctgaaactggtccaattgtcccatagaactgatatttatggcttcttttgaataaacatagaaactgatcctcccagtcttgaaacttgaggaagttacatttgtctttgctcagtttctttctcaggcatccaaccatcaggcttcctagatagtgtcaataaactgaaatttaccagatcactgcat

SEQ ID NO: 778629 - DNA, 620 bp, Homo sapiens
gaataactgtgcaataggatccatgctgcaatggccttgtgcaagaacagccacctgtgcacaaaggtaggagcattgcatcagccaggcaggagcagacaagattatttccaagctgattatagaagcgcagaagaggagcaccacccacaggcaaaacagcctttactatacatgcctctgctgctatttttaataaattatttttccttttaaaaaatcatatgggtttattctagaaaaaatacaaaatatagatgaaagaaaagagaagtaagactcttccataawaccccacccgagatgactactgttaacattacgatatgtacatcccgcttaccatttttctgtacatgtacaagtgtatgtgtgtgtatatacacacacattctgtacaccacatacattctatataccacattgtgacattttcaaaaaataatacgtcatgaatatttttctaggtcatattccgtagtagtacattatgggctacctatattctgttatatggataggcataatttatttagccaatcctgtcttttagggcattttggttttatttcagtttctcacattacactcttcccatctatttgtataaacttgttgac

SEQ ID NO: 778630 - DNA, 632 bp, Homo sapiens
tacattgcatgtacacaaaatggcggtgatcttcacttagcagaggggattttagtatgataatgatatgttaatcattcaaaagtaactagaggtcacctcctttggtctgcaccaatttctcaccagtcttgacttcctctgatagggggtcacaaagttgcttttggcatccagtccatttggtttatatacaagctgttgtgcctatcaataaagagactaaaagaaaaaaaaacagctaaagtttttccactgcagggcagttctggtgacagaatttctttttttgtctcagcaaagaatttaagttgctttcattcaaattcaacttcaaaattaatttaaaataattttaaaataactctaaaactatgtcragccttgtagttctaccagaataaatatgcttcttgggtatatccatactgacagctgcatttcttcaagaaatgacatgacagaagagtgtcctcctaaaattcaaacttggaagaccaaccggtctcaagctacttgtttgaaaggatgagttatataaaatggcatgttctttatctttaaaaaaaaaaaaaagtattacaaagccccaaggagacaataaaatgtaaaaggatctgttaccttgattt

SEQ ID NO: 778631 - DNA, 616 bp, Homo sapiens
aggagaaattgtaaaatgtctacttaaaatatttaattaaattcaattccttatttaatgtattaaaatccctgtgagaaacaggtgcatattcaaaaaagatttttttttttttttttttttacagattaataagagtagttagtgtgtaagggaaccaacaagaggtagtgcaataacctgggatttgtgtaactgcctggtgggttgtttttgcccactgcacagatagagtcgattcattgagacagcagtattactgtgaagagagtttaataaatgcagagccggccaagtggaaagaagggagtttactgcacaaatcagcctccccacagagctccgaggctagggcttttcaaggatgggcagsgggctggtgaatggggggaatggtgattggttgggttcagcatgaaattgtaggggatcaaagctatcttcttgagctgactccctgcctgggtaggggccaccagaccagataagccagtttcttggtatgtgtaatgggtctgggtggagtcagttgggtttccagaatgaaaaagtctgaaaagtatctcaaatactagtcttaggtcttagaatactgatgttatctaaagggacaatt

SEQ ID NO: 778632 - DNA, 630 bp, Homo sapiens
tctgacttccttttagtctccctctgtttagcatggttcacactcattactctcttgatcaagttacagacaaaagcaggctccaaattaggcctattaagatttgtttttaatgaggagataatttttctaacaacacaggccagattcatgtgggtatgattacaaaatcaggccatattgcagaaaagcaaagcaaagcagatttttgcctggtcttcaaataatttcagccagccttgattaacttgatgacacttaaaagcacaaagcaaatataggatctgggactttggagtgatgaagcaatcacatggcctctgttctgctatgacagtgcgaaagtttctgtatcagggattagaacttcttagaaggcaaatgctcagatttaaaatattagaaatcacagaggaaaagrtaaatgcattctttccaccagtgtgagctttagaaagcaagctgtctcgctttccttaaattcatttgccagtcctttttgtcgttcaggaagaaatgccctgctctgtgtgactgaggataaggatttgataattaaccccaagcttttggggtctctttgcatgtgttttattttcatttttagttataataatataataactgtaa

SEQ ID NO: 778633 - DNA, 600 bp, Homo sapiens
ggctgctggcatatgagttgccattcaggagtcttccctgggatacttatttttgtgttttctttcttagagatagttattgagttcctggaacatagatcctggcctcgtaccctggattgtgatgtggctggctccatttcattgttgaatttgcgggtatctaactgattgcctcttcagagaggccctccctgttagccctatctaagctcttaccccagtccccttcatagttacttgctatctcaataacctgttatattgttgtcttagcactatctgacatttgtttatacttactgcagtaagttatccattgctccccrtagaatatagctcagtgtgggcagcaacttcatccagcccactcatctctatatcctcacctaccctatggtgaaggaatgattattattatctccactttacagatgaggaaactcaggctcaaataaatcagataggtttcccaagttcatagaactagtgagtggtagaaccaggattaagatcaggaaatatggctgcactttccaatatggtagccactagccacatatgactattgagaacttgaactgtagctagtccaaattg

SEQ ID NO: 778634 - DNA, 635 bp, Homo sapiens
aaaaaaaaaaatggtggaaggtgggtctcatctactcctggcatgaaaaatattgggtgttgtgtggatgcctcataccctgtacattttgtcccattttgtatcacaaaacacttctgcctcctttttattttcatttttcattctttctagcaagaagtcttattttcctttctgtcctttaggcttgccttggcagggagcacctgtttatttgtcaaggatgtcctggccagcctgtcctcctagagaccccacattatgccccatgcttcarggtcagtagtcatttgatttgttccttttacagttgtatctttattttcttattataataatacctgcttattataaagataaataccacacagtacagaaagataaaaggcagaaaaaaatcacttctgttccctatggttaatagtttgagtttaggcttctatggtgttagaaataaattttcggtgccgcaaaagaaatagcactcgaacgtaaatttaatttctcagcaaggcaattttacttctatagaagggtgggtctcgtggattgagcaatggtgagagcacaactgaacaagggaggggaaggggttcttatcctaacgcagctaatctctactgctgtgtctttca

SEQ ID NO: 778635 - DNA, 640 bp, Homo sapiens
catgactgcttggctccaaagtttagttttattgactgttttgaacattcccagtgtatggaaatttttaaaagagccctcaagccatttctggagtctatgacacagactttagatctcattctattaagagtttgattccaagcccacttctgaaaagtgaaagtatgtactcagtaaattcctgaaactgacaagaactctttggctattactcaaaaatgtctaataccatgaactaaagtggtgagttatttccgcacttcacacacaacccccacaatccttgaaagtggagtactaaactatgttaaccactgggtgcaaaaccgtttccccttaaagataatctgaaataatctgataatgatggtggattggaaggcagtgttgatacaaattatttaaattttctatgcttaaattttcttaagtaaacacattttgtatasaataaactattcatgtaagatttttcaattaaatttcacactgttaactagatacattagtaaacacaactatttcctcttacattaacgtagctgcattgagtgtgaactcacttttagttctttttccccaaactagagtcagtttttcatatatgaacaatacatttttatgtgggcagggccag

SEQ ID NO: 778636 - DNA, 608 bp, Homo sapiens
caccataaggagtctcaaactgcaacaaaacctgcaatgagcattttgattatattcctgaatgttggattcattacctaaccaacattaagggcagatgttccagaggctaactgcccagcctttaatcccggtctttgctggtttgcaagcttgggcatattgaatgaagtttgggaacttctgtttctctctttcattttctatcaaatagagcaaataataaaacccacttgatgaaatcattgagaagactaattggtcaatataaacgaaaggtgcttagcacaaarcctggtatatattcaatattcaatacacgttgttattggtaaggttcattttgattggatctttgatcaaggtttgaattggaactcagaaaatgttcagttcttttctgctcttatactagggaagaagatcactctagtgtgccctccacagttcatctatcattttatccttacttgggatagaagaggccactttggcctttcttgttaatcttatacacagctcctagcaggtttttagtttaggacatgcaaatgagtatataataaatgaacctgctaggctgctaaatctcatatgaatttttaccc

SEQ ID NO: 778637 - DNA, 606 bp, Homo sapiens
tacatccttattgtgtggattaatggaaaacacctagcaaaaagcccagccctcagaagatgcttaaaaaatgatagtaattattgctacaatgattatggacttcctaaacttccttggtatgatgacatctcagctttgctttctgctcactccartgagagactcatttgcatttgaaagtgcaagaaaatggttaaatttttatctcattaaaaccacaaactcaatggacaggacaggaagagataagataatgaactgctttctttctggcacagtttagcaacacaaaaataatcctcattcccaaagactcccttttaaagtacatcttgtctttttagcaggtaaactctgtgaaagcagggattatgtcttacatgggttttgtagatcctcagccacacattgtgggtgcttagtaagtgataaagatcaaaatagcccaagaaaataggatgagtattaaaattatttcatttagggaatacaagttgtgaaaataccaaagttcaaatatttaatgttggcatattacctaacaatttttttctctatataattattcttcttaaatagcatagataataggacaaactcata

SEQ ID NO: 778638 - DNA, 635 bp, Homo sapiens
cagggagaatgttacttcacttgagaaagcttcatgattccctgactcagagatgccagagattcctggccgagcagtctgcagccgggatacatgcacctctagaaggcatccaggcctcacctctttcatgtgcagctttttctggacaggatatgatttcccacctcccttgtggaacgtacattttggagtgactacctgccaatataaggagtagaaacttattttaataaaaagcaacataatctgtgaatagacatagacattcaatgttaagcaatgcaaggaaggagaaagtgtctgtaytgggagtcaagagacctgggctctagcctgattctgccacaaccaactgtgggacatcttctctgggccttggttctttatttgcaaaataaaacttggcaggtcatctttgtggttccctccagctctgataattaatgagtataaatttgaggaaataaaaaggcaaagtagaatatactattatgttaagatgttattattctctcaagatgagaattttatattggaaaagaacctggtttttacgtaatatcagaaaggaggctgagtgcagaggacatttcccaggcctactagaagatgtattcttgactcttgcttct

SEQ ID NO: 778639 - DNA, 592 bp, Homo sapiens
ggatatgatttcccacctcccttgtggaacgtacattttggagtgactacctgccaatataaggagtagaaacttattttaataaaaagcaacataatctgtgaatagacatagacattcaatgttaagcaatgcaaggaaggagaaagtgtctgtactgggagtcaagagacctgggctctagcctgattctgccacaaccaactgtgggacatcttctctgggccttggttctttatttgcaaaataaaacttggcaggtcatctttgtggttccctccagctctgataattaatgagtataaatttgaggaaataaaaaggcaaagtagaatatactattatgttaagatgttattattctctcaagatgagaattttatattggaaaagaacctggtttttacgtaatatcaraaaggaggctgagtgcagaggacatttcccaggcctactagaagatgtattcttgactcttgcttctgctgctgacctgcctttctcactctggacctcaatttctccatccttaaaattgattcactcaacctctttctacagctaattccagagaaaatttgctagacagatg

SEQ ID NO: 778640 - DNA, 584 bp, Homo sapiens
taatggttggaagacctagatctgggcccaatggccagacaccctgcttgaccttggcccaagcattaggggactcatctttaaaatgagggtatgggactaggtgatctgggccttaggagaggagtctagactgtggatacatagacttgattcactccacctagattcattcatttcacaaatacttattgattgcctcctggacaccccatactgggctagatgcacatttaagaggagctaaggtgtttgagaaggaacagtcttaggaggaggagaacaaaaagaatgttataagaattaatgatgttacaggaaaaaattaaaaaaaaacataaagaaggtcattttaagaaagaggaggcggccagccatgcagcacgacactgtggataggttcactgggattggartgttctagggcggggtctcggcagctatagcctgtgtgccaatgtttgaacattccatgaactaggaatggtttttacagttaaaaagtaaaagaatattttgtgccatatgcaaattatatgaaatttaaatttcattgtccctaagtaaaaggttattggaacaca

SEQ ID NO: 778641 - DNA, 584 bp, Homo sapiens
aaactttcaaattcctaacaagttggtcttctgggactgaacaaaaatgggttgaagggggcagtggtggaagtaaaaatcatcctttgctctcaccgaagtagagacagcagtggcgtgttatcctaaacctggaactgggatcagaagatatgaattcaaggcactggctctgcaaccattgtgcttgttgacattgtgaaaattatataatctctcagcctcagttaccttagacacaaaggggaataagtatgacttattctgtgctatttctgaagataaaataaatatattttgtgatttgtaaagaataataccarttattaccaagagtactcacacaattcatttttgtgtgtatgtaaatataaaatcatcatcattctttttccagagaagactgaagaacaggtaggctccatccctgacttgagatcaagcagcaggttagccaaacccaaagattagaattcaatagtctatgattcccactaggttcattaattcttaactgcggcatgagccagtttctctacagaattactgccaatagaacatgattcacttcttaattgtaattt

SEQ ID NO: 778642 - DNA, 640 bp, Homo sapiens
tattagaatttggggcaggacccacttgaagaccctagttagcaccaaacaagtacctgctgagaactaactgaactgttggatatctttttcttgattttgttttctaaaaattgaaaattaaaaaatgatatttcctatctctttattgaataaatcactttacatcacttttatggtaagatgaagtagacccaatctaaatgtaacgaatagtataaattttggcaatattatatatatatgtrtgtgtgtgtatatatacatgtttgtctctgtgcatacgtgtacacacacacacacacacacacacacacacatatatgtttctcaaaggttgctcaaaggaggcaaacagaacaactagaacgttgtaattattttgtaacaagtgattttacctaacttctatgacgttggataaatctatgacctgccatattctctccaaaaaatagaagggttaatttcagctagcaaacaagctcagccaggtcctgtatctcatccaccccatcagtaatatctcacatcattccagcaatctcaagaattactccaactgagtcacattctggaaatgtgtttggactattcagtaagtagtctgactttgatggattgatactaaaattaaagt

SEQ ID NO: 778643 - DNA, 640 bp, Homo sapiens
tattagaatttggggcaggacccacttgaagaccctagttagcaccaaacaagtacctgctgagaactaactgaactgttggatatctttttcttgattttgttttctaaaaattgaaaattaaaaaatgatatttcctatctctttattgaataaatcactttacatcacttttatggtaagatgaagtagacccaatctaaatgtaacgaatagtataaattttggcaatattatatatatatgtgtgtgtgtgtatatatacatgtttgtctctgtgcatacgtgtacacacacacacacacacacacacacacacatatatgtttctcaaaggttgctcaaaggaggcaaacagaacaactagaacgttgwaattattttgtaacaagtgattttacctaacttctatgacgttggataaatctatgacctgccatattctctccaaaaaatagaagggttaatttcagctagcaaacaagctcagccaggtcctgtatctcatccaccccatcagtaatatctcacatcattccagcaatctcaagaattactccaactgagtcacattctggaaatgtgtttggactattcagtaagtagtctgactttgatggattgatactaaaattaaagt

SEQ ID NO: 778644 - DNA, 615 bp, Homo sapiens
ataacattggaaaaacttctctggacatcggcttatgcaaaaaactcatgactaaaaccccaaaagcaaatgcaacaaaaataaaaataaataaatgggacttaattaaattaaaaatcttctgcacagcaaaagaaataatcagcagacaagccacagagtgggagaaaatattcacaaactattcacccaacaraagactagtatccagaatctacaaggagctaaaacaaatcagcaaggaaaaacaaataatcctatcaaaaagaggcaagaggacatgaatagaaaattctcaaaagaaggtgtacaaatggccaacaagcatatgaaaaaacacccaacatcactaattattagggaaatgcaagtgaaaaccatactgagataccaccttactcctgcaggaatggccataattaaaaagtcaaaaaacagttgatgttggtatggatgtggtgaaaagggaacacttttacactgctggtgggaatgtaaattagtacaaccgctatggaaaacagtatggaggttccttaaagaactaaaaatggaaccgccatttgatccagcaatcccactactgggtgtctacccaatgaaaagaagtcatta

SEQ ID NO: 778645 - DNA, 595 bp, Homo sapiens
aaccagttctgtgatcctacttaggatgagaagacaaggaaaatccacttcgactccctattatctcatctgaccaatcaacactccccacttcccgaccccctacccaccaaatcatccttaaaacccccaatccccaaatttttgaggggactgacttgagtaataataaaattctggtcttttgtccagccagctttgtgtaaattaaactctttctctattgcaattccactatctagataaatcggctctgtctaggcatcaggcaaggagaacccgttgggcggttacagaaccaaacactgcctccacagttgctgaaagattcatctcaattcttcattgttgctcttttctgtkttcacatttcccgtgggtgtatctgataggtggaagttaagctatgtgtctgccctgtagaggcaagggattctggggatgtgaatttcctgtattctaccttgggaatgtagaactcataatgtgagaagttatccaagacgtaggatgaatgttgaaaatatatcagtcgcaaacgataaatgtatcctatattaacctataaacatgggaaaagaagagggcacataca

SEQ ID NO: 778646 - DNA, 648 bp, Homo sapiens
tggccagcccgggtccgccggtgccagggagggctaggcctcagagccagactcacaccagccttcctggaggaatttgccatccttcactctccctcgccctgtgtaccccatgtgctgaggagttgcagtgtgaagacaggagcctcaacaagtctgcagtttagcgagcaagaaaaggaagcatcaaagctgcatcaaacttagtgaggatggggagaaagaggagtttccacaatgcccttggtattttctcctcctgagagaagagccagccagcgctgcccattctagagagtgatatatgcatgcatcctatgtgtgattgcaggactggggcatggtgcatgtgtgtgtgtgcgtgtgtgtgtgtgtgtgtatcaaaagcccactttccctccggtygcccatgcctgaaattctacacgtaaaggccattctcttcttccctcttcagacaccatcatctcaaagagaataatactttatgctttatcagtaattggcatcattggggaaattcattcatcagactctcctcttcatgggagcaaaaagggctgaaaatgagaatgccgagtactggtatgggaccatgcaggagagagagatgtgctgggcttcccagctgtgctcagggatccacac

SEQ ID NO: 778647 - DNA, 622 bp, Homo sapiens
gacatcagcaattatgtagctgtcattgcctaagcttaaaaaaaaaacaacaaaaaaaaccaccatcaaagtctgaagggcaggtggcagtcacctggaaaggtcatggaacaatcagggagcactcttatcatccgtagggactgttatttggtgagggagaaaagaagcaaaaagtgaatcaggtgagtatagcaattcctaaagtagaagtcaaagaagtcaaactcttcaataattacagggccatcttaagaacttagcaccattggctttagctctttcatgggttctttcaagaaatgctgtatcggccgggcacggtcacgcctgtaatcccagcactttgggaggcagaggcaggcggatcatgaggtcaggagatggagaccatcctggckaacacggtgaaaccccagctctactaaaaatacaaaaaattagcctagtgtgatggcgggcacctgtagtcccagctacttgggaggttgaggcgggagaatggcgtgaacccaggaggcagagcttgcagtgagccgagatcacgccactgcacgacagcctgagcgacagagcaagactccgtctcaaaaaaaaaaaaaaaaaaaaaagaaatgctgta

SEQ ID NO: 778648 - DNA, 471 bp, Homo sapiens
agtttgagagttaaaaactctggtggagtggggagggttagaggtgtccctacacttttgtgagttttacctgcaactcacttttgtgaggttattacagtgaagatcagaacaaaatttcaacctgcttccagcagagggagggaaaaaggagtcattttgaaatatactcagagcattctgttcttaacaagacctgtcctcaagagaaactmgtttccacttaaaactagtggaaactagtttacttaagtaaaactttatccaagtgaggttttacacacagcctaaccaaactgaaggaagagatatgcccacctccagccatctccagccttccaggtaggggaagagagaagaaataccaactctagccttcctgtctcccctaataaaagaaaaataaatcaacctgagaagcacttgtgaaggtcacagcccaaggacacaggctcactaaaagactgagtc

SEQ ID NO: 778649 - DNA, 583 bp, Homo sapiens
gatgccaatctaaacaaatcaactacaaaaagacaatatgggacaactaatgtaatttaaacactaactacatgttagattatataaagaaatgttaattttcttcactatgataatggtctttaggattaatagtgtaagcacagggtgaggagaagtgcttatctgctctgtaaggtttttacaggtggaagggtacaatgtctgagatttgcattaaaataatgaaatgtaagagtagcaaataagagaatataaatcagcaagatttgccaaggatgatcattgttgaagctgggggttcaatactattctctctgttcttgtgtgtttaaarttttccataaaataactcaaaaaacaaaaacaggtgaggtgatgaacatctaggtacagagaataacagcccccaaagaacctgtgaatatgttagcttatatggcagaggggaattaaggttgcagatggaatgaagactgctaatcaactaaccttgtaatggggagattaacctggattatcctggtgggcccaatgtaatcataggcatccttaaatattaaaaaagggaggcaggaaagtc

SEQ ID NO: 778650 - DNA, 669 bp, Homo sapiens
catcttatagatataacaagtttatttgaaagagatgacaacttatattagatcatacaaagaataggacaaatgaagaagagtgggaaaaaatctctatactttaactccctcttccctcattttgaattttgttatctccatttatgtttttaattgcttatctcttaacggattgctgtgggtattattgtctttgataggtttgtcttttaggtttcatagtagaattataggtggattgcacactacagctycagtattagagtattctgggtttgtctgtgtacttaattttaccagtgggttttatgctttcccatgttttgtttttgtaagttaatttttttttaaattttagatggaagaactccctttagcatttcttgtaagatgggtctggtggtgttgaattctctgagcttttgtttctctgggaaagactttgtctctccttcatagttgaagaacatgtttgctggatatagtattcttggagacaaaatacttttttttttttttctttcaccactccctgctggcctatatagtttccattgagaagtctgaatggattaaacctcctttttatgttatttgcgtattttctcttgctgcttttaggatcctctctctgtctttgactattgagagtatgattatgcctgg

SEQ ID NO: 778651 - DNA, 607 bp, Homo sapiens
ttaatttttttcttttctttagggagagaggcaccataaaagcaccatggaatcaccttaggcctctccttcagaagggaaattactgtggaatctgaaggtggtttctttcagacaggcaggtggataggagttcttagagtctgaactcaacagttgctgtctaraataaggggggtataattagatgctttgcattttgacagttcaaaagcaaaggctacataacccttagctgcagattcccagatagagaaaagggatagcagctgagggtcccctaatgtcctggcaggtatctgtaaacggctcttatctttgcttttcctgctgtgtacctgaaatttcccacttcctcttatcaagtttctagctcaaatatcaactaccctccctgaagcttttctagccacctcaggtaaaattaatctgttttgcattcctagagtgctgcatgcatatttctattcccgcacttgtcaccttatattacagttacttgtttacatgcttgtcttccttcacagctagactctgaacttcctaaaatcagagacttcacttttcatctttatataataaatgtcaagacataaatgacttttga

SEQ ID NO: 778652 - DNA, 608 bp, Homo sapiens
atgtcgtctgcaaacagggacaatttgacttcctcgtttcctaattgaataccctttatttccttctcctgcctgattgtcctggccagaacttccaacactatgttgagcagaagtggtgagagagggcatccctgtcttgtgccagttttcaaagagaatgcttcaagtttttgcccattcagtatgatattggctgtgggtatatggatattaggtagagtagattttagagagaaaaattacttgtgacaaatgaaaacattatgtaatgataaaaggatcaattcaccagtgggacataacaatcctaaatgagtgcaaaccaaaccacacagcctcaaaatacgtaatacgtaaaacaaaaactagtagagcgggaaagagaaatgsagaaacataaaattcgagttatagtccccaatttactccactctcagcatattatagaactaccagacagaatgggacaaatatttgcaaactatgcatccgacaggttaagtcacatgcagaatctacaaggaattcaaacaactcaacaacagcaaaaaaagcaaacccattaaagagtgggcaaattacatgaacagacattttgcaaagga

SEQ ID NO: 778653 - DNA, 520 bp, Homo sapiens
ttctgtcccatcatatagatgtaaaagactatccatctttttcccatctgattgcatatacttgaagtacactgagaatttagtgagtggacccactaaatctgttgccccatctctcttatttataagttatgtacatatttggagtgtagagccctgaaagcattatattatgggtttgaatggacttgtaatgcgtgggttttgactgcctccagataggacatttttgagcttttcttattatcagcactaaaggagactgacatcattaacttcactgtgaaaccattagacattagaatagcagttgttttatgtaaattcagattcttaataagaatctccactcctgtttttcaaatcaaatcggagtttytcttttgttgcccaggctggagtgcaatggcgcggtctcagctcactgcaacctctgcctcccgggtttaagcaattctcctgcctcagcctcccaagtcgctgggattataggcacctgccgccatgcccgactaatttt

SEQ ID NO: 778654 - DNA, 639 bp, Homo sapiens
tggcagtttacatagaccccagtgccaaagaattaaagagtcttgagttttcttaaaagaggccagcttttaaaaagttaagtatgttttctttttgcagtgacctgagctcttaaacctaagtagagaattaagacttgctcagctttgtgaagcagtcaacttayttgtacgcaccatagaatactcttgttagagaagtgaacacattatgaccaattaaccatggaaagtgagtgccctgggaaaattttacatagttaaaacaaaacacatagctttcttaggaactggaattgcctttcctctattatacctggagtccaacaaaggctatgcctttgtgccagtccttttacaatgaatcaaccaattgctcaattgtattcttgtggaggaggaggataacattcttttatgatcccagtttagatcagtttaccacccaaagcatgatatttgattacccttattaggtttctttgcatagctacaaatgttactaatggtttggccttgtctagccattaaaaaaaagtctgcctctgtgatgacttaacagtcagtgctgtaaaaggcactattgcttggaactctggaaatacgagctcaaagagaatagagcagtactttggggtt

SEQ ID NO: 778655 - DNA, 639 bp, Homo sapiens
tggcagtttacatagaccccagtgccaaagaattaaagagtcttgagttttcttaaaagaggccagcttttaaaaagttaagtatgttttctttttgcagtgacctgagctcttaaacctaagtagagaattaagacttgctcagctttgtgaagcagtcaacttacttgtacgcaccatagaatactcttgttagagaagtgaacacattatgaccaattaaccatggaaagtgagtgccctgggaaaattttacatagttaaaacaaaacacatagctttcttaggaactggaattgcctttcstctattatacctggagtccaacaaaggctatgcctttgtgccagtccttttacaatgaatcaaccaattgctcaattgtattcttgtggaggaggaggataacattcttttatgatcccagtttagatcagtttaccacccaaagcatgatatttgattacccttattaggtttctttgcatagctacaaatgttactaatggtttggccttgtctagccattaaaaaaaagtctgcctctgtgatgacttaacagtcagtgctgtaaaaggcactattgcttggaactctggaaatacgagctcaaagagaatagagcagtactttggggtt

SEQ ID NO: 778656 - DNA, 639 bp, Homo sapiens
tggcagtttacatagaccccagtgccaaagaattaaagagtcttgagttttcttaaaagaggccagcttttaaaaagttaagtatgttttctttttgcagtgacctgagctcttaaacctaagtagagaattaagacttgctcagctttgtgaagcagtcaacttacttgtacgcaccatagaatactcttgttagagaagtgaacacattatgaccaattaaccatggaaagtgagtgccctgggaaaattttacatagttaaaacaaaacacatagctttcttaggaactggaattgcctttcctctattatacctggagtccaacaaaggctatgcctttgtgccagtccttttacaatgaatcaaccaattgctcaattgtattcttgtggaggaggaggakaacattcttttatgatcccagtttagatcagtttaccacccaaagcatgatatttgattacccttattaggtttctttgcatagctacaaatgttactaatggtttggccttgtctagccattaaaaaaaagtctgcctctgtgatgacttaacagtcagtgctgtaaaaggcactattgcttggaactctggaaatacgagctcaaagagaatagagcagtactttggggtt

SEQ ID NO: 778657 - DNA, 522 bp, Homo sapiens
accattatgaagtgttaagccaggaacagcgcaccgggggtaaagtgacactggttccaaactgactaactcttttgtgatcttttttttttttttttttttgagacggaattttgttcttgttgcccaggctggagtgcaatggcatgatctcagctcactgcaacctccacctcccaggttcaagcgattttcctgcctcagcctccctggtagctgggattgcaggcgcccgccaccacgcccagctaattttttgtatttttagtagagacggagtttcactatgttggccaggctggtctcsaactcctgacctcagccgatccacccacctcagcctcccaaagtgctgggattacaggcatgagccacggtgcccggcttgtgatctcttaaagggaggcctgacaatctcctacaaaaacaaaaaataacaatacactgttattttaacattgggacttttttctgcttcagtcttcccaagtatttaccatttcattataccccacattgcca

SEQ ID NO: 778658 - DNA, 605 bp, Homo sapiens
tgattgaattgagtcttgccaatctctggtgagtccagtgagagagtgattgggaaagggagtttctgtaagcctatgttatttcctctaagagctgacttattttatcatgaatgcatttgagatgttcaggcaggaaaatatcttcattaaggcattcttctatctttagcatgtagttagttatttcttaggttttcagtacaaaagattatggcaagccaagaagaataatttcagtgtgttcaatttaagcttagttataaaaaatttattccaccgtttggggttcaagtatttgtctattttktgttattggtaaaatgatgaaagttatctgtgtatacaagcaataagtacaactgactagtatttaatttggtgtcatttcaaataaagaagtgtaaataaatatccattttgtcaggtttttattgattatctgattctcaattttacttatgttccattccagctaatgcaagaattaaaaagcatagatatcagcaaaacattccgaaaaataattaacaagagggaatggattactgctattgggaggaacttcaactatttccagtgagggcacacagcattcttattca

SEQ ID NO: 778659 - DNA, 628 bp, Homo sapiens
atggcttttataaaaaatagcagctttattgagatataattgacataccatggaatacatttttaaagtatacagttcagtagtttttagtgtattcatagttgtgcaattgtcatcactatttaatttcagaacactttcattacaccaaagaagaacactatattcattatcagtcactccccatttccctcttcccgaaggctctgcaaccattaaactgctttctatttctacaaatttgcctattctggaagtttcatatamatggtatcatactgtagtggcctttcatttgacaggcttcttcactggtgtaatattttcaaggcttatccatgttgtcacatatatcatacttcattcctttttttctgactgcagcctcgacctccagagttcaagggatcctcccacctcagcctcccaagtgcataaccatgcctcccaaatgtgtaccaccatgcccagctaatttttctatcttttgtagagatggggttttgctatgtcacccaggttgatcttgaactcctgggttcgagcgatctgcctgccttgggattacaggtgtgagccatggtacctggccccttcattcctttttattgctgaatattccattcta

SEQ ID NO: 778660 - DNA, 502 bp, Homo sapiens
gaataggaatgcccatgttttaaaataataaaatacagatattattaatctcctagttccagaattccaaggccctaccgcccacccacctctcaaaaaaccctgtgaactatggatgatagccctgggttttattacggcatctagtgaaacttattttttattttttgttcctccaataatcaggcyagaagccaaaagcagtacttcacattcatcagactagaaatatgcagcttttatagaagcattttgtcaagggaaccccagtctccaataagggctgctcgtcagggtccctgctatcagagtgatatttttaatttatcgggatgcttcaattatattaagcagcagcctaagtctcctcactttgcttatgaagtgaagctgcggttcaaaacaaacatcaagttactagatgtcttcctgctataattggatttaattcattatctttcatttcaataaaatcacaggaaaacacagggatgtaaatgtg

SEQ ID NO: 778661 - DNA, 502 bp, Homo sapiens
gaataggaatgcccatgttttaaaataataaaatacagatattattaatctcctagttccagaattccaaggccctaccgcccacccacctctcaaaaaaccctgtgaactatggatgatagccctgggttttattacggcatctagtgaaacttattttttattttttgttcctccaataatcaggccasaagccaaaagcagtacttcacattcatcagactagaaatatgcagcttttatagaagcattttgtcaagggaaccccagtctccaataagggctgctcgtcagggtccctgctatcagagtgatatttttaatttatcgggatgcttcaattatattaagcagcagcctaagtctcctcactttgcttatgaagtgaagctgcggttcaaaacaaacatcaagttactagatgtcttcctgctataattggatttaattcattatctttcatttcaataaaatcacaggaaaacacagggatgtaaatgtg

SEQ ID NO: 778662 - DNA, 502 bp, Homo sapiens
gaataggaatgcccatgttttaaaataataaaatacagatattattaatctcctagttccagaattccaaggccctaccgcccacccacctctcaaaaaaccctgtgaactatggatgatagccctgggttttattacggcatctagtgaaacttattttttattttttgttcctccaataatcaggccagaagccaaaagcagtacttcacattcatcagactagaaatatgcagcttttatagaagcattttgtcaagggaaccccagtctccaataagggctgctcgtcagggtccctgctatcagagtgatatttttaatttatcgggatgcttcaaytatattaagcagcagcctaagtctcctcactttgcttatgaagtgaagctgcggttcaaaacaaacatcaagttactagatgtcttcctgctataattggatttaattcattatctttcatttcaataaaatcacaggaaaacacagggatgtaaatgtg

SEQ ID NO: 778663 - DNA, 633 bp, Homo sapiens
ctcttatatgggatgaagcacagtgatttaccaggcctgagttatgtgactaattttatggtgtggattgggatggataatgtgttttctgaaaaaaaaaaaaaagaaaagaaaagaaagaaagaaaaaaagagaaagaaagaargaaagaaagaaagaaaaaatgcaagatactgttaacagaaaaggaaacaggtgataggtaagtcaatattacagatattcacatttaatgacaatttaaaatataatgcatgtattgcttttttttcttttttttttaactggcgcctggctcatttttgtgtttttagtagagatggggtttcaccatattgcccaggctggtctcaaactcctggccccaagtggtccgcccatcttggcttcccaaagtgctgggattacaggcatgagccactgtgcccagcctatacttgtttttttattgtggtaaaatgtttgtaacataaaacttaccatttaaccacttttaagtgtacagttcagtgccactaaagtgcattcacaatgctgtacaaccatcaccattatccatttccagaacttttccatcatcccagacaaactctgtacccattaaacagtgactccccagcctctagtaaccat

SEQ ID NO: 778664 - DNA, 633 bp, Homo sapiens
ctcttatatgggatgaagcacagtgatttaccaggcctgagttatgtgactaattttatggtgtggattgggatggataatgtgttttctgaaaaaaaaaaaaaagaaaagaaaagaaagaaagaaaaaaagagaaagaaagaaggaargaaagaaagaaaaaatgcaagatactgttaacagaaaaggaaacaggtgataggtaagtcaatattacagatattcacatttaatgacaatttaaaatataatgcatgtattgcttttttttcttttttttttaactggcgcctggctcatttttgtgtttttagtagagatggggtttcaccatattgcccaggctggtctcaaactcctggccccaagtggtccgcccatcttggcttcccaaagtgctgggattacaggcatgagccactgtgcccagcctatacttgtttttttattgtggtaaaatgtttgtaacataaaacttaccatttaaccacttttaagtgtacagttcagtgccactaaagtgcattcacaatgctgtacaaccatcaccattatccatttccagaacttttccatcatcccagacaaactctgtacccattaaacagtgactccccagcctctagtaaccat

SEQ ID NO: 778665 - DNA, 633 bp, Homo sapiens
ctcttatatgggatgaagcacagtgatttaccaggcctgagttatgtgactaattttatggtgtggattgggatggataatgtgttttctgaaaaaaaaaaaaaagaaaagaaaagaaagaaagaaaaaaagagaaagaaagaaggaaagaaagaaagaaaaaatgcaagatactgttaacagaaaaggaaacaggtgataggtaagtcaatattacagatattcacatttaatgwcaatttaaaatataatgcatgtattgcttttttttcttttttttttaactggcgcctggctcatttttgtgtttttagtagagatggggtttcaccatattgcccaggctggtctcaaactcctggccccaagtggtccgcccatcttggcttcccaaagtgctgggattacaggcatgagccactgtgcccagcctatacttgtttttttattgtggtaaaatgtttgtaacataaaacttaccatttaaccacttttaagtgtacagttcagtgccactaaagtgcattcacaatgctgtacaaccatcaccattatccatttccagaacttttccatcatcccagacaaactctgtacccattaaacagtgactccccagcctctagtaaccat

SEQ ID NO: 778666 - DNA, 617 bp, Homo sapiens
ataagtgcattgtaataataccttacttgaacgcatattctaatacagttacttatcattctacccgtctgtctcctccatcgtcttgactcatttttgaatcaccactgtttagcacagtgcctggcacttaggaggcacactgccaacaggctatgaatgaatgagtgaatgaatggactacctagtgccttcccttcagctctcacctgacttatacagcagcactgtgaggctgataggacaagagtgataccatttcatagatgcagaatctggccatcagaaagattcgaaaacttgctcctgatctcacagctgataaaggtgggaccaagactcacacggaggacctccagtgcttgagctatgtccctaactcacagcttcctctacaatttataatagactggtatgtactgataattgaaaggatgagggggcctactaagatacttttctgaggacagaaagagwaatcattgtaacagtaatagctatttattgagtccttaagatgagtactcaataaatgccaaacacttcatataagtcatcctaacaaactaatatactgctaagcagctattatcgttacttgcattttatacatgaag

SEQ ID NO: 778667 - DNA, 659 bp, Homo sapiens
tgtgaaaccaaatatttgcagaatctaagcacttatgtaaaaaatctacatttgtagctgtgtgcccttaaataaataaactagttgatcactgcaaattaaaagaacttaaatggtaaaaactgccatttctttaaaaacgatgacagtgaagaaaaagcttttgcaaataaaattgggtggagaatctaataaacagggagctatgscatcccaaaggagaaaaaagcaaaaagaaatttcagaaaagataacaaattagtttagcaaagtcacaaaaagagagggcagacaaaaataaaggcataggatgcagcgtccagggaaagaggaaggggcgagtggaaacagctggaattgttcagctgtgtcaacattcggctgtttcacagattgactagcaaagtgtcatctgaaaccaattacattcccaaaaccccacggacccagttcataacattgattaatccacattgtgaaaaagtccccaagcaaaactagaacagctgtcagcccttggagctcaaaaaacagcaattgcttgaggaaaaaaaaaaaggaaagaaaaaagaaaagaaaagaaaagaaaatctcctcttgaaattttagggattttcaggaggtatgtctactgaaaccgaagatagatttaaaacgaa

SEQ ID NO: 778668 - DNA, 580 bp, Homo sapiens
ttcaagtggcatcactttcttaatttcatgtttggatttttcattgtaagtgtatagaaagacaactgatttttggatattgatcttatatcctacaactttgttgaactcattaactctaataatgtgtgtgtatgtatgtgtgtgtgtgtgtgtgcacgtgtgtgtttctttaggattttttagaaaatcatgtcatccactaatagaggtagttttaacttccttcttctaatctggattctctctttctctcttccacttctctcatttctaactctctttctcayctaattgccctggctaaaatttctagtaaaatgttgaatagaagtggtgagagaaaacatccatatcatgtttctgatattacagggaaagcttccagtctttcacagttaagtatgatgttagctgtgggtttttcatagatgccttttattaggtttaggaagttcccttctatttctagtttgttgaaagtttttatcacgaaaggatgtgagatttggttaaatcctttttctatatctattgagatgatcacatgggttttcccctcttcattgtattaatatgg

SEQ ID NO: 778669 - DNA, 601 bp, Homo sapiens
gacctttcatattatatttattaaagtgttttttgacagacaaacgtctctgtgggggggccaggcatggtggtacatgcctgtaatcccagcactttgagaggctgaagcaggcagattgcttgagctccagagttcaagaccagcctgggmaacatggtgaatctccgtctctacaaaaaaatattaaaaaattaagccaggcctggtggtgcatacctgtagtcccagctactcaggaggctgaggtggtaggatcacttgggcccaggaggcagaggttgcagtgagcagagatcatgccactgtactccagcctgggtgacagagtgagaccctgtctcaaaaaagaaatgtctcagggataactcagcttgggtcatgtgctgaccaaaagatattcattgtggccagagaggaaggaagctctatttgatgtgactggggtcacccatctttgaatcaaagagatgatgtggcccacctcaccctccatataaattttgcaggacctatctgttgagtagaggagggctgcctccaaagaagggataatgaggagacaaagtaaatatgtgtacagtgctcctatatgatgctt

SEQ ID NO: 778670 - DNA, 601 bp, Homo sapiens
gacctttcatattatatttattaaagtgttttttgacagacaaacgtctctgtgggggggccaggcatggtggtacatgcctgtaatcccagcactttgagaggctgaagcaggcagattgcttgagctccagagttcaagaccagcctgggcaacatggtgaatctccgtctctacaaaaaaatattaaaaaattaagccaggcctggtggtgcatacctgtagtccyagctactcaggaggctgaggtggtaggatcacttgggcccaggaggcagaggttgcagtgagcagagatcatgccactgtactccagcctgggtgacagagtgagaccctgtctcaaaaaagaaatgtctcagggataactcagcttgggtcatgtgctgaccaaaagatattcattgtggccagagaggaaggaagctctatttgatgtgactggggtcacccatctttgaatcaaagagatgatgtggcccacctcaccctccatataaattttgcaggacctatctgttgagtagaggagggctgcctccaaagaagggataatgaggagacaaagtaaatatgtgtacagtgctcctatatgatgctt

SEQ ID NO: 778671 - DNA, 575 bp, Homo sapiens
  misc_feature 292: n = A,T,C or G
gggaaattacaatgccctgaatttaataggtttcatttttcaaagtgaatatttcgcttttacaatctctcactgccagcgatgctcttggattagaactgattggagagttttcttttatctagaaacaagacccttggctattcatacagactgattagctttgtccaatggaaacgaaggccacttgccttcctcttcctcctttatgttccaatgtttttgattacctcagacaggccttcawtttttttttttttccattttagcacagcagtgacagtataagganaaataaaaggtgtcagaagacctgagttccagtccaccaaccccagcacttggatgggtcatgcatcatctgatccccaggttcctcaaccgagttaataattacattctgcacatatttattgagtagctagtgcttcaggctctgttacgtattagggatatggtgataaaatcgtcctcgcccctgacctcaaagagtttacaggattccccatccccacccacaaacaaaatgttttgtaaaattaatgggacagacaaatgtacacttattagaattt

SEQ ID NO: 778672 - DNA, 587 bp, Homo sapiens
ggggaaaattatgaggcctcacatatacagaagagcaggcagctctgactggcaacattgtgtgtgtgtgtgtgtgtttgtgtgtgtgggtgtgtgggtgtacgtgcacatgcgtgttccatattcagcactttaaaggatcatgtatttgaactccaattgctttaccaaaagccaagttgtattacaaaaatatgacaaaatttgtattatcggcatcaattactcgggaatgataaatcatcaaactgaagcaatgtagataattaggctgtttatatttgtgtgtatggtggtttttgtttttatttattcttctcctttttttctatccccactcttcccccagtcagtccatccctaccttctttaaaggaattggatacatacgatttaatttaggggcyactggatctctttgctattctagaacagtccacagatcagcagcattgacatccacctggaagcttgttagaaatgcggaaccccaggccccatccccagacccactaaatcagaatctgcattttaacaggatcccaggtgattcatgtgcgcattaaagtttgagaagccctgctgaa

SEQ ID NO: 778673 - DNA, 611 bp, Homo sapiens
tttatttctaagtaccttttcaatgatatcttttaaaataacatttaataaatgtttgtatttaaaaatgtaatttaggcagaaatgtaacaaactaaatttctgcttgttttaatttgtggatatatattttgaattttctattcacatagttatagtacctgctaacatggtccttttattcctgttaaaattacaattctttaaaaactgtaatgtttcatatactcaattaatatttagtagctgtgatgctagtgagtatctttgtctcatttacgatctctgatagacagtttaaaaattcactagcaagtatgtttgctgtagtattttctyaatagaaattctatatcagatgaagaaaatgacagcctatttattacatggctttctgtatatgttgaaatgtttctgatttttgttttcttaacatgataaattctctaattacattttaacattcataaaaacttagcagagaatgaataaatccaatgtataaatatattccctctatttaaaaggaaccacattctttatattctatttagggacatttcatctatgttcgtgaacaattgacctctaattttcctttcttgtaatat

SEQ ID NO: 778674 - DNA, 614 bp, Homo sapiens
gtgactgagatgagaaagaatgttgtgattggcttctgtctctgacattacctgagcctctagacaaatcacttttcttttttcaggtctcagttttcccatatgtgaagagagagagcatttccttcatttaactactgtataggcttgcattcaggagaagtgaactgaatgttccccaaagtataattgggagctctcctagtgatttgcggkataagttggatgttaaacaggagaataaggaggaacatattcttctccccttgaaaacttcccagaggctggaggtcagaagaatttacccagtcatctttgcggacgtcatcagatacaaacaagtaaaacatgtcagtgtattttgagtgcattggcagaaattatattacttatattcacaaattattttatatgcatcaaaagttttcaaaggattggagttgattggaaagtattttttatattctgaatgcttattttagaagggtatgaaactctctataagcaagacaatgcatcttcatcataaagagttatcatccaaattcgcaaattattaaaatcaccttctccacctcaaatttttctttcatttgtggcaataattttgttct

SEQ ID NO: 778675 - DNA, 635 bp, Homo sapiens
ctagctgaggggtatggatattaaaacattaaaaggcatctcatggctttagggaaataggttatgatatgaactaatgtaatcattattgaagttcacctgttacactttttcttcaattctagccactatattcttttttttttttctcttccttcccagcaagtttctagctcagtactctttttgtaattgactyccccaggctctgtccatttttattaagagccaaaatgtcagctagttagccaaaagatgttcctgaactctgcatggcacactgcacatacatatttaaagttatacatgcacagaaggggtcttgtgcagagccaggagtaagtcacaaggagcaggaaagcctctcttcccttcattccctgtagatgccagaatttcctcttagaacaaaatcccttcagtttaaggctgaaaacttcagggaaatccaaatacctacaaagtggaaatagaacatttgtaccttatgtgaaggaagaaaccaggatctgcttagttaggtatctggaagcagaggctgctggaaggcagtgatttcaaggtgattcagaaacagaggctgtcctgtggaggaggagagctggagaattcaagggctggagacaccaccatta

SEQ ID NO: 778676 - DNA, 664 bp, Homo sapiens
atcctcctctaaacgttcattttcttggtttcatcttttgaccaaagacatcagatcaatttggccaaccaagccaggctgtctcttacttctacagcccagtagttaccaagtgatgtctaactttatttataaaatgagttttgtatttgctagtgtctcatcgttttcatacctattgccgtaaatcagacccttattatccctattctgggttatgcaataaatgattaccctgcctccaatctctccttttccaattcatcttaaattagctttttaaacacagatttaattatgttatttctctgctcaaagatttttggtgagtccccactgactatagaatagkatccaaatgcttttcacataatcttttacacctgatctcaacctacctttcaggagttcgccaactctgagcaatttcctgaatttaaaatgcaatgtcatattctgccctgtttacattattctctttctcctggcacaataagaatccatcacatttgtatgttgttttccagtttacagtgaaatttcccatgcaccttctgtgaggtaggcagagatatttccccccagacttagagctggaagagtcaaggttctgaatgtgtaggtgacatactgagcaagctaatcttgcttatgattagcaaga

SEQ ID NO: 778677 - DNA, 538 bp, Homo sapiens
caaaatcaagttaagatgaatcatattggattagggtgggtcctaaaaccaatgatattatgacaatgacatatttctattttctacccaacctgtctgcttactttccttgtctcctaaacaaatcctattacartgtaaatatcatctagcacaggctaatagcactttacgtacacagtgatggaaatgtcctgtatctttgcagtctaacatggaagtcactagccccatgtgactattgtatgtgttaaatatggctcgtataactgagaaactcaatttctaattttatttttatttaagtaaccccctgtggcaagtggcttctgtatgaacagcacagctctaggtagtagagagttcacattcccacagaggcactgcctgccatcctcaccctccccatctccctacaggcaaggaaacaaataggtgacccccacgaaataaggaaagtcaaaggacacccaatgaaccacgtgtgagcctcattctaggtactgagatttcatcttttggcttctcattttctcct

SEQ ID NO: 778678 - DNA, 538 bp, Homo sapiens
caaaatcaagttaagatgaatcatattggattagggtgggtcctaaaaccaatgatattatgacaatgacatatttctattttctacccaacctgtctgcttactttccttgtctcctaaacaaatcctattacaatgtaaatatcatctagcacaggcyaatagcactttacgtacacagtgatggaaatgtcctgtatctttgcagtctaacatggaagtcactagccccatgtgactattgtatgtgttaaatatggctcgtataactgagaaactcaatttctaattttatttttatttaagtaaccccctgtggcaagtggcttctgtatgaacagcacagctctaggtagtagagagttcacattcccacagaggcactgcctgccatcctcaccctccccatctccctacaggcaaggaaacaaataggtgacccccacgaaataaggaaagtcaaaggacacccaatgaaccacgtgtgagcctcattctaggtactgagatttcatcttttggcttctcattttctcct

SEQ ID NO: 778679 - DNA, 554 bp, Homo sapiens
tttcattaccataatcattaactttatcaaatatcagtagctgctcttgtgtgtacataaacatttcatgggattaaattactccttccactttagagctttcattttaaaaaatgataaagtatcctttttttgtccttattcttgtcaaaacccaagtcatttcccttacttcaacaataatgaaaggacatatgtgcagataaggggatgtgtaatggttgtttggtttcaatctatcattaaatttgcaaagattcaatatgctatattgtttttgtcacaaatacatgtaaataagtttccagatgtaattccaaagacaatccatgatggttctcataatttaaatgtatctttaatgcccagttcatttgctaatctcagcaytggggcttcatcttctatgtcttactccatctgatttcagccctaaactgaaaagcctgaatagatatggatacagtgtaaaaccaggaggcaggcactactgagtacttttgctaggcagagtaacctttcttgaccattgaaaaattgttaagtttcccata

SEQ ID NO: 778680 - DNA, 627 bp, Homo sapiens
acgatagaacctgtaatctccaaactaaactggtctctgtatccagaaagagctgtgtcttcacatttacactttgtgccttaagcatttgcattatggcacctcggagagcaacaggggataagagggtcagaggaagtcctrcctgtggacctgaggtagcaactaaactcttagagttgatcaaaaaattgagcaatgtaaagatgttgattcctttcaccaacacaacagactcaggtctgtgatccatttgtacttcatgtttctttttacgcagcttgatagaaagtatgtctggctttttaattttatcttgcacagtcatctcttctatatttataactggagatcctgaacaccaaagtaagcctaaaaggaatctttgaggaaaaaagccttgtagcaagcaaagtcaaaattcttgaagttaaggaaatatactttaaaatattgaaatgtttataaacattaacttttattacatgcactgagcagtagcattttaaggttttaaatcagtgttttctgcttttactattttcagattaaatttttagatataaagataaaaaactcagagaactcaaatgagatatctatatccctacaaccgaattatatagt

SEQ ID NO: 778681 - DNA, 601 bp, Homo sapiens
ctaagagctaacaaggatttactgtaacacctaaaataatgatgcacattcaacaggcaggaaaagcttatcttagcttcaaagaatttgtgatctgcttagaaaaaccaaatatttagatacgaaaacaagaatattaacaagcaatatctcaggctatgaagaatgctatagtagaaacaggtgcaatactgatatgtaactgattcccatgggaaggcctagatagaaacactccccaggtgggctctttctgttagacatctctctctctctaaaaccttaacaaaggtcaactaggccaaatgactgtggaccctgcatttaagcctacaatacgcacrgtgccataaaagccatgaagattttgaggtcacttctcttctctgcccctgagtagtgagtagggagctcacccctacttgaaagggaagcagacaatacaagcaaggagaattgaaggcagagataggaaagcataagggaacatggcagcaggagatttctgcagagtagaagacctcttagtgtcaggaaaaagaaagagaagtctgtgggtgataggagcaaagggaccctgctgcctggcaacaccctaggg

SEQ ID NO: 778682 - DNA, 584 bp, Homo sapiens
ctggcaaccccggagtgggcacttcctgggagccggtgcttccctgtcacctgcaaggctaagactccctgtgcaagtcaccctttgagtctggaggcgacaaaacctgctgtctcttccattcatctccagttgagaatgaatcagtgggscaagtctggctgagatccaaatgcatctcatttttagaggcagcatgtgctttatggaacctagcagtttaacctaattgtttgcatatttagtgctgcggctctgcagtttgggcgagccagttgcagacagaggcatcctgtgacaatacagctgtgctctcctggaaagagcctctggtcaggggatggggtggcatggacaaaggtgtgtagggttcaagggcagagcctcgggggctggaacagagggtgtgggagaagcatggtctggctttgtgatcagatcagaaaatgcaccagattccaggcagtttggtgcaggttgagggtggggcatctacagctagacggtctaggtcaaatcccagcttggccactgcgaggctatgactgagcaatcattgagtctcgctatgtcccgattttctt

SEQ ID NO: 778683 - DNA, 584 bp, Homo sapiens
ctggcaaccccggagtgggcacttcctgggagccggtgcttccctgtcacctgcaaggctaagactccctgtgcaagtcaccctttgagtctggaggcgacaaaacctgctgtctcttccattcatctccagttgagaatgaatcagtggggcaagtctggctgagatccaaatgcatctcatttttagaggcagcatgtgctttatggaacctagcagtttaacctaatwgtttgcatatttagtgctgcggctctgcagtttgggcgagccagttgcagacagaggcatcctgtgacaatacagctgtgctctcctggaaagagcctctggtcaggggatggggtggcatggacaaaggtgtgtagggttcaagggcagagcctcgggggctggaacagagggtgtgggagaagcatggtctggctttgtgatcagatcagaaaatgcaccagattccaggcagtttggtgcaggttgagggtggggcatctacagctagacggtctaggtcaaatcccagcttggccactgcgaggctatgactgagcaatcattgagtctcgctatgtcccgattttctt

SEQ ID NO: 778684 - DNA, 627 bp, Homo sapiens
taaacatacgtgtgcgtgtgtctttatagcagcatgatttataatcctttggatatatacccagtaatgggatggctgggtcaaatggtatttctagttctagatccctgaggaattgccacactgtattccacaatggttaaaccagtttacagtcccaccaacagtgtaaaagtgctcctatttctccacatcctctccagcacctgttgtttcctgactttttaatgatggccattctaactggtgtgagatggtatctcattgtggttttgatttgcaaagaagacatttatgcagccaacagacatctgaaaaaatgctcatcatcactggctatcaragaaacaatggatatattttttaaactactcatagatcaaaacagaaaaaaaagagaagctcaattaggctaattatttgggactgcagagaattctagtttattcattatgagtgggttgacctgatattctggtttgctgggatattcttacattattcctgctgtcttggcatatttattattagtgactctttcaccctcaaaagtgttttagtttgcaggtaaaatatacagacatctaatttatcatttgaatgcaactgttaaataaatacaaatta

SEQ ID NO: 778685 - DNA, 655 bp, Homo sapiens
acaataggcaaatatatgttatgtgcatttctagaaatacataacacatatatatgtctgtatcttatattcaattgcaagtatataataaataaacctgcttccaaacaacaatacatttgttgtcatttcattaggtctgcagatcatagaccttgactcctaggagttgagcattatgactcacttgygagaactcagaaaaaatagacaggatgaaggagccaaggacataacaaccttcattcaaaaagacccaatgttgagggtcagtgggatggggttgtatgaaaaatgggttagagctgctttctcacagcagcaaagacatagcaattcagaatagtctaggttagagtcctttggggaaaccactgtctaaacattaaggacaccaggattaatgaccaagtccagtggtccagacacagaagaaggcctcagtcattgagctcagagttgcaagcagtgaagatgggagatgggttgggtgcaagagcaggaggggaaacataagatggctctttctaagtgtgtttgtttctaatagcagtaatgcttttgaatgagtcagaggcagaggagaacataattgaagacctgagaaataaggcaaattgtaggttgggggcctgaacaacagagtctggctgca

SEQ ID NO: 778686 - DNA, 655 bp, Homo sapiens
acaataggcaaatatatgttatgtgcatttctagaaatacataacacatatatatgtctgtatcttatattcaattgcaagtatataataaataaacctgcttccaaacaacaatacatttgttgtcatttcattaggtctgcagatcatagaccttgactcctaggagttgagcattatgactcacttgtgagaactcagaaaaaatagacaggatgaaggagccaaggacataacaaccttcattcaaaaagacccaatgttgagggtcagtgggatggggttgtatgaaaaatgggttagagctgctttctcacagcagcaaagacatagcaattcagaatagtctaggttagagtcctttggggaaaccactgtctaaacattaaggacaccaggattaatgaccaagtccagtggtccagacacagaagaaggcctcagtcattgagctcagagttgcaagcagtgaagatgggagatgggttgggtgcaagagcaggaggggaaacawaagatggctctttctaagtgtgtttgtttctaatagcagtaatgcttttgaatgagtcagaggcagaggagaacataattgaagacctgagaaataaggcaaattgtaggttgggggcctgaacaacagagtctggctgca

SEQ ID NO: 778687 - DNA, 617 bp, Homo sapiens
tgtctcaaaaaaaaaaaaaatacgctatttaagcatgaggtctcagaaaaatagagattcctgcaaggtatttgataatgtccctcaaattcactagggcaaaaaataagtagctcttatcttgagaatatcatttatagatttagagacaacactgaggtgcaataaattttctcctagtaatattacgatctgcaaacttgtcaacatttctgtaatatccccttttaggaaaaaacatcctacatggggaggacagataattctctgtccttgaaccaaaggtccttctctggaaaggttgccttttttgacttaaagtccaatcctcagaaagaacacacatgaaatctacctgcttagtgagacaggtccccagaaktgagcctgatacacatggggactgggatgtgatagacaggatgtctcactggggcagggaaagaatcacacatctgggttatgctggagagattatgtcaccaatttttaatatgatagaactaacattgatatcagagatctagattcaacagcatattacattacaagctgtctgctatagctacattacatagggtgtgtggactagcaggaagagtgtttaaaacaatatt

SEQ ID NO: 778688 - DNA, 609 bp, Homo sapiens
tcttttgtggtttatttttgcaatcttcctgtcttaaagccacagtgtcagactgggaaggaagcgaatataccctcccccattcacagaaagaaaactaagactcagagtcattaagaaaaacatgtcctaagatgatacccataaygagagacgagccaggacagaatccagacttcatgagttttaggccaagcctatttacttctaaattctctcatgcctctctgtcattggtgaggtatgtgtaatttatcataaatccacagtagagactcctagaatacacgtgtatggataaggatttccagaggagagagggtagggactgacaattgattgagaaatggcagaaggctgggcccaatgattgcatgagaaatcactgaccttcaggtaactttccttctatctatctaatctatcatctatcattgatctctctcatctatcttacctatcatacatctatcaatcctatctatctatatattttatgaatcatctatttatcatctatcttctctgtcatctgtctatcttatctatttatcaatcagctatctcggggagtaacacctttcctcagtactccatttccttaaatgt

SEQ ID NO: 778689 - DNA, 537 bp, Homo sapiens
agagcgtgtaatatactgtttcccatcaggcttttgtccactaattttagtatccatttataattcctatctaaaacaattactactgtggttactattgcagatggtggttttctatttccatcattcttctgtattcattaactagaattctactgtgagaaagagccttcccttcttcatttatttggatcttcaattatttgtttatatcagtatagactcatgggtatttgctttattctatgggttataatccattactatcattatttattttgttgcacaaattgctccagattttgycattggaagcctcccctgttggctcctgtgtccttctgacatattcccaagtattttgagcatttccttacattctgtcaccacaaaaagtccttatcttgtacttcgcttgtcccagctctgttaccaccattttgtccaggagctctgctttctttttttgaaagaaggagtttagaaatcaagatcttggtgtcagatatgctgattactattgggatgtcattgctt

SEQ ID NO: 778690 - DNA, 629 bp, Homo sapiens
aaatcagcatatggccctgggagggcagtgagggtctcaaaggagcttcccagggcaggtcatacctgagctaagtcttagaggatgaattgaagttagtcaagcaaagatgtgataagctagaagttctggtgtgatcccgatgaagacagccagcagagaaragcagggcctggaaggtaaaaacagttcacactgccatggagtttctgattggtgtctattctgttgtcctgagaagcaagtcaagcaaggcttgggttatttgaatctctaagaagtatagtggcttttccaccatgatgtcatcatgaaggtgctgaagaggtgcatgctgacaatcctcccagaacgacagaggtattgaacaggagcatgctgggctgcagctcagaatggggaccatccttgctgcttcttagtcatctgctgcagggatacacaggggtcttactcttcagccggtgttgggccattacttttcatcatgatttttggcagaaccaaattgggttgacaatactgctggccttccctctaaggccccaaggtagctcacttcagttcttttctttcttcatatttcctaattttaagaacaaacaaaaatatcaaagcatcttgttatg

SEQ ID NO: 778691 - DNA, 629 bp, Homo sapiens
aaatcagcatatggccctgggagggcagtgagggtctcaaaggagcttcccagggcaggtcatacctgagctaagtcttagaggatgaattgaagttagtcaagcaaagatgtgataagctagaagttctggtgtgatcccgatgaagacagccagcagagaagrgcagggcctggaaggtaaaaacagttcacactgccatggagtttctgattggtgtctattctgttgtcctgagaagcaagtcaagcaaggcttgggttatttgaatctctaagaagtatagtggcttttccaccatgatgtcatcatgaaggtgctgaagaggtgcatgctgacaatcctcccagaacgacagaggtattgaacaggagcatgctgggctgcagctcagaatggggaccatccttgctgcttcttagtcatctgctgcagggatacacaggggtcttactcttcagccggtgttgggccattacttttcatcatgatttttggcagaaccaaattgggttgacaatactgctggccttccctctaaggccccaaggtagctcacttcagttcttttctttcttcatatttcctaattttaagaacaaacaaaaatatcaaagcatcttgttatg

SEQ ID NO: 778692 - DNA, 648 bp, Homo sapiens
taaagtagactacatcaaaatttaaaactattgtactgcaaataatactttaagaaagcaagaaaacaccccacagaatgagacaattatgtgaaaatcatataatggctaaatgacttgcacccagaatatataaagaacaccttacaactcaatattttcaaaaagcaaataacacaattttaaaatgaacaaagtatttcaatagacatttttccaaataggatgtacaaattgccaatcatcctatgaaaacactctcaatgtcattagtcattaaggaaatacaaatcaaatccacaagaagagactaggttacaccycctcgaatggctacagttaaaaagatagaccatagcaagtgtcggtaccgatatgagaaatcagaacccttatacattgctgatgggagtataaaatggttcagccactttggaaaacattttggcagctcctcaaaaagtttatcacggagttaccatatgtctcagtaattctatttctaggtacatacctaagagaaatgaaaacatacatccacataaaaactttaaatgggtgaatcatatggcatataagttatatctcaataatgctggataaaaaaaggctagagtgaattaattgtggttcatctgtacattaaat

SEQ ID NO: 778693 - DNA, 630 bp, Homo sapiens
aacaaaaaaaaaaacaagggagattatgaaaccacgagtcagcctagttgaatattccatatttgtttatttcaacatcaacactgttgtgtattaaacattgcaataggaaataatgctatggagatgaacaagacacatatctgccctccgggagctcakagcttggtgagatgggagtgtgagcagctgatgattccccagcaagctctccgatggaaggaaatgcacacagaggctgtggatgaccacagctggggagtggtgatgtctcagtgaaaaggacagctgaagtgagtcccgagggaatggtggcatttagggatcagtgtgtgctgagttgtcctctgaaggacatacactatctgtggaactaggagtgataagagatgagccaggaagattcagtggaaatcccttcaagggccctgtggccataccaaggcctttgggtttatcctatagcagagtgtgaggctgggagaaccatgtgggtggatggctaaaggccacctctcattctgaaaaggcaaagaagacttctaagaggttaccctgtttgacacatggaaaatgttcagagatcctatgggagtgtagagacctgagaacagaaagtcacacggcagg

SEQ ID NO: 778694 - DNA, 630 bp, Homo sapiens
aacaaaaaaaaaaacaagggagattatgaaaccacgagtcagcctagttgaatattccatatttgtttatttcaacatcaacactgttgtgtattaaacattgcaataggaaataatgctatggagatgaacaagacacatatctgccctccgggagctcagagcttggtgagatgggagtgtgagcagctgatgattccccagcaagctctccgatggaaggaaatgcacacagaggctgtggatgaccacagytggggagtggtgatgtctcagtgaaaaggacagctgaagtgagtcccgagggaatggtggcatttagggatcagtgtgtgctgagttgtcctctgaaggacatacactatctgtggaactaggagtgataagagatgagccaggaagattcagtggaaatcccttcaagggccctgtggccataccaaggcctttgggtttatcctatagcagagtgtgaggctgggagaaccatgtgggtggatggctaaaggccacctctcattctgaaaaggcaaagaagacttctaagaggttaccctgtttgacacatggaaaatgttcagagatcctatgggagtgtagagacctgagaacagaaagtcacacggcagg

SEQ ID NO: 778695 - DNA, 630 bp, Homo sapiens
aacaaaaaaaaaaacaagggagattatgaaaccacgagtcagcctagttgaatattccatatttgtttatttcaacatcaacactgttgtgtattaaacattgcaataggaaataatgctatggagatgaacaagacacatatctgccctccgggagctcagagcttggtgagatgggagtgtgagcagctgatgattccccagcaagctctccgatggaaggaaatgcacacagaggctgtggatgaccacagctggggagtggtgatgtctcagtgaaaaggacagctgaagtgartcccgagggaatggtggcatttagggatcagtgtgtgctgagttgtcctctgaaggacatacactatctgtggaactaggagtgataagagatgagccaggaagattcagtggaaatcccttcaagggccctgtggccataccaaggcctttgggtttatcctatagcagagtgtgaggctgggagaaccatgtgggtggatggctaaaggccacctctcattctgaaaaggcaaagaagacttctaagaggttaccctgtttgacacatggaaaatgttcagagatcctatgggagtgtagagacctgagaacagaaagtcacacggcagg

SEQ ID NO: 778696 - DNA, 544 bp, Homo sapiens
agagcagaaagggattcagtttcaattatcaaatcataactgaattgtaaccataggttggctacagatactgcagcttggcaaaaatcagtgaaagtattctgtaagaattaattgcttatgtaaaatttgcaataaagagtattgtgtattttattatttgtaaattgtgtgatatacatcctttatatgagtaaagtttataatgacattatatacatgtatatatattctagcaatttttatttggcgagcttgttgttaaatatttacctgcaaatcactgtgtgcgttcttcattgtaaaatgcaatcatagttgattttgaacaagggaatgtaragccctagctacgttatgggcattatctccccacttttcctagagatgtatcctctcctattactttataaaatatatgtagcttaacttttgttttctggggggtaagggcattcagaatatccccatctctgctctgcctgtaaaatacctatacatgctttatctttttttatatcataaagcatacaactaacatatg

SEQ ID NO: 778697 - DNA, 435 bp, Homo sapiens
ccaagtccatctcccaggcacagtccaccgcgtgtgcccaaggcttcgttcattgaagcttctaaataggagatggagggagatgcatttctggctcctggttgggaggtagcgaggggaaaaagagagaaaaaagagacagagcaaaatgttcatagacacccacagcacagtgctgaggtgtgcagggggaagttgttcatctactttgtgggcccacacgtgggagcaggcagctggcaggggcacaaatgggcgcatcgtttytatcgctcatgctgcataggcctggaggagcagggctggtgagtatgcataagaaaactgttgagccccacaccagaaaacatgcccgcattgcattccagtcaagtggtgttcaaggcagcaaaaatgtctgagctaattctaaggaccagaattctaatagagccg

SEQ ID NO: 778698 - DNA, 667 bp, Homo sapiens; identical to SEQ ID NO: 741315

SEQ ID NO: 778699 - DNA, 643 bp, Homo sapiens
gaataatttgagcaacaaaataaatgatggaattttggattataactcaacatataataaatatatatgagtccatactgatagaaaaattaatacatgaataaataaataagggagaatagaaaaaaaaaactttcctgtacagaaggatatcaaataacttatgtggattctttaccctgaaaaagactgagcacagccctccaacccttaactgtcagctgtgaatagtgacttttttccaaagggtacggtatggaaggcaggcaaagaaaataacttcacaatgcataaacctgacaaacactacctcagccaggagatcaagattcgcatcaacagtaataagtcatgttgacagtgtgtgcccttgatatgatgtgaagaagatattatttcrcctctgtagtctccctccacacaatatttaactccattctactagtaatcagacaataacaaattgatagatagtctacaaaatacctgatcaattctccttcaaactttttaggtcatcaaaaacaaagaaagtctgtaccagccaatttatctacagaaaaaaaaaaaaaaagtctgagaaacagtcacatccaagagtagcttaagacatgacaagtatactgtggtttaacagacggga

SEQ ID NO: 778700 - DNA, 686 bp, Homo sapiens
atacacaagttaattgtaaataaattgaatcaatataacacagtcagttaagtctgtgaacctggagagcttgattttattgaccgttataatatactgcctttcacatcgaatagcgttcagtaagagcaaacatgtatggtgttgaaaaggaaatcttactcccattgttgtactatgtagtttcctttgccagatgctaccattgttgtcagttgttcatatcattccagagacatcctatatccaaacatatacgtaaaatcaaaatgactgtacatgagatacttagcccgattaggatacaatagcatacatccttcatttttatgtagaaaatatatcctgggaatctgaatatgttaatttgcttaggacccatcacagtatgtaaaatgtgtactgaaccatgaaacaaaggaaatcttttgctcttctgctgcacaatttattgccaagaactattaacggtttgagattttgaaataacttcatactaacaagttggctacagttttataggtgccgataaaagacacaaaactcttgaatcagagacgaataactttattattcgtggcttcatttttatgcctatttcttttgtccgtaattcccaagggaccgatgtggaasagtcactgtggatgcagctgacacagtaggtttgcatcacagctaggaac

SEQ ID NO: 778701 - DNA, 518 bp, Homo sapiens
ctttgatttgaggttaccatgtggcaatactattttataagtcattattttaagctgataacaacataacactgtttgcataaacaaagacacaaacaaggaacaagaaaaactaataatgactctatgccataacttcattcccttgctttttaacttcttgttgttaatatttataccttgttgtactgaatatgtcttgaaaagttgttgtagttgttatttttgattagttcatcattttgtctttccatttaagaatagttttcacaccacagttatagtgttataatattctatgtatttttgtgtacttattattaccagtgagttttgtaccttcgatgarttcttattgcccattaacattgttttctttctgatttaagtactccttttagcatttcttgaaagacatgtctggtgttggttaaattcctcagcttttctttatcttggaaggtctttttttcctccttcatgtttgaagtttatttaaccagatatactcttctatg

SEQ ID NO: 778702 - DNA, 551 bp, Homo sapiens
tattgtccagcaatcccacttgtaggtatatatcccccaaaaatgaaatcagtatatcaaagagatagctgcactctcatgtgcatggcagcattattcacaataaacaagatatgaaattaacctgtgtccatcatcagatgaatggatccataaatgtggttatatacaaaatgaaatactatttagccataaaagtaataaaatgttctcatttacacatcatggatgaacatggagaacattgttaagtaaaataagccaggaacagaaagatgtgtactgcatgatcwcacttgcatgtagaagctaaaaacctgaatttatagaagcagagagtagaacgatggttgacagcggctgcgtgtgggggatggaaaaatgttggtcaaagcatataaagttacaattacatgaataaattatgaatatctaatatataacttgctgactatagttaataataaagtttttaatacataaaattgctaagagaccagatcttaaatgttatcactacaaaaaaaagtatgtgaggtgatgaatatgtt

SEQ ID NO: 778703 - DNA, 608 bp, Homo sapiens
gtaagaaggtaaagctttatgatataacacatccaattttgatgctgcatgagggaaaagacagtcttttaagttcagattaattctgagtcacatgttcttcctcacacgcctgtttgccttgagtgaagtctgttttttttgagcacaggatgctactgactgtaactcactcaaaacatrggccaggaagatttattttgtcatttcagctgagaaaatggtaaaaagctataaaatgaaggtattaggcctttggtgtgcttcatattacacaccactattaaggtggcaaagtatccatctcctcaatacagcatttataaaacattatgtgttgaatatactgaattatttttacttgctaaacaggcttaacagtaagaatttaattcaaactcctaccattaagcacagtttttaatatcaatgtaagcttcaatcttaaataaaacataaaattatcctcttatagcaacagaacataaatttattattcctcttgagtgtttatctctctatccatgttattaggctgtgttaattgcctgtcaagagagaaagcttctgttctgcctgtgacaatcataaccacatattgtgcataa

SEQ ID NO: 778704 - DNA, 608 bp, Homo sapiens
gtaagaaggtaaagctttatgatataacacatccaattttgatgctgcatgagggaaaagacagtcttttaagttcagattaattctgagtcacatgttcttcctcacacgcctgtttgccttgagtgaagtctgttttttttgagcacaggatgctactgactgtaactcactcaaaacatgggccaggaagatttattttgtcatttcagctgagaaaatggtaaaaagctataaaatgaaggtattaggcctttggtgtgcttcatattacacaccactattaaggtggcaaagtatccatctcctcaatacagcatttataaaacatkatgtgttgaatatactgaattatttttacttgctaaacaggcttaacagtaagaatttaattcaaactcctaccattaagcacagtttttaatatcaatgtaagcttcaatcttaaataaaacataaaattatcctcttatagcaacagaacataaatttattattcctcttgagtgtttatctctctatccatgttattaggctgtgttaattgcctgtcaagagagaaagcttctgttctgcctgtgacaatcataaccacatattgtgcataa

SEQ ID NO: 778705 - DNA, 608 bp, Homo sapiens
gtaagaaggtaaagctttatgatataacacatccaattttgatgctgcatgagggaaaagacagtcttttaagttcagattaattctgagtcacatgttcttcctcacacgcctgtttgccttgagtgaagtctgttttttttgagcacaggatgctactgactgtaactcactcaaaacatgggccaggaagatttattttgtcatttcagctgagaaaatggtaaaaagctataaaatgaaggtattaggcctttggtgtgcttcatattacacaccactattaaggtggcaaagtatccatctcctcaatacagcatttataaaacattatgtgttgaatatactgaattatttttacttgctaaacaggcttaacagtaagaatttaattcaaactcctaccattaagcacagtttttaatatcaatgtaagcttcaatsttaaataaaacataaaattatcctcttatagcaacagaacataaatttattattcctcttgagtgtttatctctctatccatgttattaggctgtgttaattgcctgtcaagagagaaagcttctgttctgcctgtgacaatcataaccacatattgtgcataa

SEQ ID NO: 778706 - DNA, 571 bp, Homo sapiens
catctcaaaaaaacgaaaaaaaaaaaaaaacagcaattacttttgcaccaacctaatacttattccctcttctatgctacccagacctttacttctgctacagtggtctttcttttatgctataaccatttgttagtttctgaaatcttctcaatggcaggaccrtggctcactgttctctttatgaagtccaatgccatgttaatttaaaatagtaggcagcaataaactgctgaatgaactaattaattaaaattttaaaagaacagtaaaaataaaagtccaagtattcaaactaaaagaaatgaactttatatattatttcatcccccaaaccacaactccaaatacttttggtataatatcagataatccttttgttgttgttctttgagacagggtctccctctgtcacccaggctggagtgcagtgatgcaatccgggctcactgaagcctccacctcctaggcttaagtgatcctcccacctcagcctcccaagtagctgggagtacaagcatgcaccaccatgcccagactttttttttttttagtagaggcgggattttgc

SEQ ID NO: 778707 - DNA, 570 bp, Homo sapiens
ctccaagaggccactttcaaagagctaatgaagtcttccatttgtttattctagtccttttctgaattcagaatgaaattttatgacaggcgtagacctatcccactttggttatccctcttcaggtccataaaatgttctgtaacttaccatctcatacatggattcccttgttatctttcagtttttataaggctcatttttcagactaaattgccaatccatactctgctgcctaaraattgtgtatactatattattgtttttattatctagtttctctgatgatgagatacagtgttaattctgccactgggcagatttatctttttcttttttgaagtgcagttatagaccagtcacaatgttgttatctttgaagttgagtgtcagctttctacgcttgacatggtggagagtagacatggtgctgcttgtttggcatcctctgataactggtaatagggaggggtccatttgtctatggggtaaaaaactcaaggagattagtatgtggccaaagacatagcagaccttttcatgtatgctatggatacctccacttgtcca

SEQ ID NO: 778708 - DNA, 594 bp, Homo sapiens
acattctcaccaatgcttatcttttgtctttttgataatagacattacaacaggtgtgaggtgatattttattgttgttttaatttctattattctgatgattagtgatgttgagcatttcttatgtacctgttagccatttgtatgacttattttagaagtatgtattctggtcctttgcaaakttttaaagtgagggttattattattatttgttttggggttgtttgagttcctaatgtattgaaaatatcaactccttatcagatgtatggtgctttggtttgaatgtttgttccctctgtaagttatgttgaaacttaatcttcaatgtggcagtaatgagaaatggggcctttaagagatgcttgggcattaaagtaatccattcatggattaatgaattaatagattaatgggttaacgaattaatgggctatcatgggatgacactggtagctttataagaagaggaagagagaacagagctaggatgctcagtcccctcaccatgtaatgccctataccaccttgggactctgcagtgtccccactagtaagaaggtcctcactggttgtggcacattgttgctg

SEQ ID NO: 778709 - DNA, 554 bp, Homo sapiens
gttttaagttctttaagaaatcttcaaactgctttccacagtggctgaactaatttaagtccccacacgaatgtataagtgttcccttttctctgcagccttgacagcatctgttgttttctgactatagccattctgactggtgtgggattgtatctcattgtggttttgatttgcatttctctgatgtttagtgatattgagcgtttttttaatgttcattggcaacatgtatgtccttttttgagaagcatctgttcatatcgcttgtctatttttaatggggttatttgactttttcwtgtaaatttgtttaagttcctgatagattctggatattagaccgttgtcaaatgcacagtttgcaaatattttctcccattctgtaggttgtctgtttactctgttgatagtttcttttgctgtgcagaagctctttagtttaattatgtcccacttaatcaatttttgttttgttgcaattgctttcaagtgcttagtcataaattcttttacaaggccagtgtccggaatggcgtttgcttcaaggtttc

SEQ ID NO: 778710 - DNA, 580 bp, Homo sapiens
ttttaaaaatgcaaggattatttgatgttagagaatcgatcaatataatccaccatatagtaggctaaatttaaagaaaaaaagaccatatcaatattatatcatatcaattgatacagaaaaaacatttgacaaaatgaaacacccattcatgcccctccccccaaaaaaactctcagaaaactaggaaccaagcatgataaataaaaaagtgcattttcaaataataaataagtaaagcctatagttatcattgtagttaatggtaaaaagctggatgttttcctcctataattaggagcaaggcagggatgtttattmttacaaatgttatttaacacagcactaggagtttggtggtgcaataaggcaagaaaggaaaacaaaatgtatgtaggccaaaaaagaagaaatataatttttcttatgtcgtaattatcaatatagaaaaattccaaaggatctatttttaaaaactccaagaattattgattaagcaaagttacataagataaaaatacaaaaaagttgtatttctatattttaatgacagatatatggaccccaaattatttggaag

SEQ ID NO: 778711 - DNA, 634 bp, Homo sapiens
aaaagaattgtatcatctaactagcaattccagttttatgaatgtatcctatgaaagtcccaaacaaatacacatagatttacacttaacgatgtttggtaaagcactgttggaagacgctaaaaaccaataaccgaaatattcatctatatgggcaagcctaataaaatacaaaatatatccaaattayagaattacagaatactatctctgttttttaagtggctatatcatggcatataaaaatatctattttgcagaatattgcatattaatgcctcaattttgaaaaaattcatgaatagaataatgcacatgcttgttttgcacaaaaaatttgtggaaactgaaaaaacgtgactctggtgtctcttcatcactggccatggtattcttatctgctacatatgcatattcccattctatccatttatgctttttatttccatatttccattgttttaactaaaccaaatataattttataattctaaaaaaacaaacgagaaaaattttttaaaacactaccacttttgagagataaaaagtttgtatcgtttaaattacatttcttttattatagtgaggctggatattttttcttttttcttacatttaccagaaattattttct

SEQ ID NO: 778712 - DNA, 529 bp, Homo sapiens
gatgggaatgtaaattagtataaccactgtgaagaacagtttggaggttcctcaaaaagctaaaactagagctatcttataattcggcaatcccactcctaggtacataccccaaagaaaggaaatcaataatactaaagagatacctgcactcccatgtttattgcagcactattcacattagccaagatttggaagtaacctaagtgtccatcaacagatgaatggataaagaaaatgtggtacatataaacaatctagtactattcagccataaaaagaaaatgagatcccgtcacttgcaacagcatggatggaactagaggtcatcatgttacgtaaaataagtgaggcacagaaaggcaaactttgcatgttytcacttatttgtgggagctaaaaattaaaacaattcaactcatggagatagagagtagaaggacggttaccagaggctggaggggtagtgacatggtggagggtcgggggagggttaatgggcacaaaaaatacaaagaatgaaggtgac

SEQ ID NO: 778713 - DNA, 647 bp, Homo sapiens
tccaaaaaaaaagaaagaaagaaaagaaacaaggaatgttgagttctacggctcatctggggtgagtagggtttattagtcttgttagataagccttacagtaactgacattttgcttttctgaaacttgtcttttagtaacaaagattcacgattgcatttttaaaaaatctccctgctatggccatttgcaaatagaatcctggcaactatttttcccctctaaatatacattaatttttttttaaatagacccctagaatctcatttcattgtaggacattctccctctaaaatttagcctcctaattctccttagatgcggctaaccaggaagatggttttagcctctgggcaggtctgaattaagctgggtacgcatacactgggtatgaccgtgctgattggtcatatcaraaaggcctggtgctggtgggtaaagagccactatgctgagccccatcagctgcagcccccgcccccaccgagatattctccctttccacagatccagcaacaccacttagcatccaggaaaggaggggtaccctggaggaatggtacactgggggagtggtacttcctgcagtgccactgcatctgttctgattgaggagggaagtgctgtgctcatagttaactgtgtt

SEQ ID NO: 778714 - DNA, 504 bp, Homo sapiens
aggtgttgcttagagacacatggagttctgttctagacttatacattattgacttcccagctgaccactacagtggcagtcttgctatatttcaaatatgacagttatggtctcattttttcctgtgaagcatagagccttctacttagttytaaattgagaccaaaaattcattttcggttggtttccacaaagaccatcatagaattacctacctttggaaattggtcctgagatggatttaaaacagtaagctgatgttcaaagtcagtattttttgagctgcccagatccatatttctgagctactagcttccataaaatgaacttatactgattctttggtaacctagagagatctttcgagctttcgatatttattcccgtatttttcccatttcactgaaactgaattccatcttacctggacattttctgagcaggagcaaacaccaaaattagtgatgggttctccactggtgttccatttttccagactgtctt

SEQ ID NO: 778715 - DNA, 436 bp, Homo sapiens
gaggtaggctattatcttaggaaaaatttagtaataagtcaggatagaggtgtctttcaaactggtttcctaaatgaccttgcaattcacataaagtaactcttctcccttcctttacagaaaatctaagactcctgcagtccacaatacgatttaaaaaatcttttcttcgcaatggttcctatgaagattactttcctccagttcctgaagtcctaaaatcaaaagtaagccatgaaagtaaaaaaaaaacaaaaaacamaaaaaaaaacaaaaagacaaaacaaacaaaaaaaaaaccttaacacttctcataatatttggcaagatacacttttaagttttaaatctgatctttgtaaataatgatgctattttaactctagatttataatggccctacttacgactctagaaaaatggtgacaaaagagtt

SEQ ID NO: 778716 - DNA, 615 bp, Homo sapiens
tgaaataacgtggactgtgtcagtgttatgattggacagtgtcaatgaggtagactgtatccattcaatgagaatgacctctctccacccatgagtggctggctcctcactgcctttgcctggggcccctgagaaactaagccataaccagcttaggattttgccaaccaacacatacctcaccctactcccagatgatgctgacatcttctgaattcgaccctatgaaattggcagattcttcaatagcttttctcctggagatgggcatgaatgttatcctgggatgagacttttgggaatcatggtaccatggactttatcctgcttaaacactctatctcaaaaccctgcctgagatttttttatttttatttttacttgtatrgggctgccatggtttgcacaatcatggtcttcctttacttgtgtccttaaatttgtgctttggctgggaacatagacactcaattattagctttaattttgcaattcctatgcttgctgcatggaagtttcgtgaaagaaagagagaggcttctcttttttctttatcctagcactggggaacttaaaggggaatgtaatttcagaactgaaagtgccagaaacacc

SEQ ID NO: 778717 - DNA, 670 bp, Homo sapiens
tcgggatgtgactgtatttgaagataatgtctttaatcaagtaaggttaaattgttacaggtagttaggcgtgagcgggcaggagagggctctccccgccacccactagaagtcttgagtgatggttcagtaattgttgcattgcctctctaaaagtgatacattggcagccggtgctagggagaggccattcagtgatggtccacacctgttaacgttaaaaactgttaattagaggcagacctcatggagaagaaatttcctgggcgtgcacattaacagacaaaaatagcggagtgtgatcttcggcgtatcctctacctgaaaaaggaagaaagcctcagataagcatgcgtacaatttactgaacacactacatgagctcacttcccaagggtaagaagggctctggccgggcgcggtggctcaygcctgtaatcccagcactttgtgaggccgaggcgggcggatcacgaggtcaggagatagagaccatcctggttaacacggtgaaaccccgtctctactaaaaaaaaaacacacacaaaaaaattagccgggtgtgttggcgggcgcctgtagtcccagctacgccggaggctgaggcaggagaatggcgtgagcccgggaggcggagcttgcagtgagccccgagatcacgccactgcaa

SEQ ID NO: 778718 - DNA, 613 bp, Homo sapiens
gactggctggcttagtcacctgaggagagatgaccaggaaaatccagagagaaggcatttgctgggctgaggggaataaactgcctgtggaaaggtggattggtccttggatctcttcacctgggggctgtcaagttgggacagagccaagataagagccctttttcaaatgtgttctttcatcttttaatggagttggtttctttggcaggctagcaaatcctgcagggcccctgtgcagccactctggagggtcagggagacactctgtggttggcacctgcgaaggagcaggggtgagaaatgaggagaaatgtctgtctgtgccgaacccccagtggagagcgtgtgggctcrgaattagggtaaatgaaggcacgggcgcactgcagacccctgatgggagaggcagtgggcgatgcttccatggtgaaatggaatactgggagccaggtgccctggcgcctcatggcaacgcctccttactctaggtcggcctccctggcattcctctttgagctgatgagggaccagaccagtcccaggttagcacctggatccactttcctgcattttgggtaacacatgttgcgtctttcctctggttatgaaa

SEQ ID NO: 778719 - DNA, 613 bp, Homo sapiens
gactggctggcttagtcacctgaggagagatgaccaggaaaatccagagagaaggcatttgctgggctgaggggaataaactgcctgtggaaaggtggattggtccttggatctcttcacctgggggctgtcaagttgggacagagccaagataagagccctttttcaaatgtgttctttcatcttttaatggagttggtttctttggcaggctagcaaatcctgcagggcccctgtgcagccactctggagggtcagggagacactctgtggttggcacctgcgaaggagcaggggtgagaaatgaggagaaatgtctgtctgtgccgaacccccagtggagagcgtgtgggctcggarttagggtaaatgaaggcacgggcgcactgcagacccctgatgggagaggcagtgggcgatgcttccatggtgaaatggaatactgggagccaggtgccctggcgcctcatggcaacgcctccttactctaggtcggcctccctggcattcctctttgagctgatgagggaccagaccagtcccaggttagcacctggatccactttcctgcattttgggtaacacatgttgcgtctttcctctggttatgaaa

SEQ ID NO: 778720 - DNA, 577 bp, Homo sapiens
cagtgttctttgataagtgtcaaataaatcaattgacagttaatagtagcactaacttcagctacctagaagtcgtattggaacccactggcccatgaaatattttttttttctgagataactccctaatatttctttctcagctagtgtttttttttctagatcaattcagatatttttctagatttcctagaaaatttggagtcaaatttccatgtcccatactcaaattaagtgtgtgcactatgaaaatggtgatagcatatgattgaatagtgtgacatggaatttaaatatatttgagtaactacaattgtttgctatgagaaataatacttttwataattgttatgaaattaaaaatatgaattagtctatcccaatttggcaatacacagcttttttcgtgagtctgttggtttggttttgtttggcagtggtagttggaggagaaaattacctgtcctgcaactaggttgtaaagaaaaatgtcagaaaccaaattcttgccgccccccttctctctctctgtttctcttgtccttggaaaccttggaaaacactttatctcaaagtt

SEQ ID NO: 778721 - DNA, 567 bp, Homo sapiens
ctctacttgtctacctcagcctcatttcttccttttcatttatttatgtttgtttttaaatgtcacctaggaaaataactcatagaaagtggaaacattctgtatgcttagtgtatttgtttttgtttgtttgtttgytttagtttctccttactctaatttccctgtgttacatggtcttctctttggcaccttttggattgttgttttgtactttgtgactcctttatgtgctttcaaaatatagatatatttatgtaatatgttcttttggggaaggcaccaaatcttatacttacttttcatttgccctgatatatattttggtttagaaaataaaatggcttcttcatgattaatttatttcccttgtattttgccttaataaatggcacctgtgatggttaatttaggtgtcaacttgactagatagccacatagctggtaaatctttatttctggctatgcctgtgatgatgtttctttaatagattgacatttgaatcaatgtactaagaaagtttcaccctcaccaatgtaggtgggcaccagccaattagctgaggg

SEQ ID NO: 778722 - DNA, 567 bp, Homo sapiens
ctctacttgtctacctcagcctcatttcttccttttcatttatttatgtttgtttttaaatgtcacctaggaaaataactcatagaaagtggaaacattctgtatgcttagtgtatttgtttttgtttgtttgtttgttttagtttctccttactctaatttccctgtgttacatggtcttctctttggcaccttttggattgttgttttrtactttgtgactcctttatgtgctttcaaaatatagatatatttatgtaatatgttcttttggggaaggcaccaaatcttatacttacttttcatttgccctgatatatattttggtttagaaaataaaatggcttcttcatgattaatttatttcccttgtattttgccttaataaatggcacctgtgatggttaatttaggtgtcaacttgactagatagccacatagctggtaaatctttatttctggctatgcctgtgatgatgtttctttaatagattgacatttgaatcaatgtactaagaaagtttcaccctcaccaatgtaggtgggcaccagccaattagctgaggg

SEQ ID NO: 778723 - DNA, 604 bp, Homo sapiens
gtcctttatcagtttagcaattaatatgttgaacacgacaaagataagcatctgtcaattccacttattcttccccatcatcattcttcaactacgtctcctctaagcaagtgggtcttaacctaagcaactcctgggtctcatctccaaagattcagcagatttagagcaggggctcaggaacctggactattaacaagctaaatgaatctaacattttggtaaaaatatctcactttaaaaatggtgccctaaactttttctggtcatatcagcaaagtcaacatctccttcctctcagctcctataactacatagtaaactctgtaacagcaaggattctatctgacttgttctccactatatctctagtacatagcaggtgcctgagaacattaagggctcaataattatttgttaagygaatgaattaatatgatctttattgttcatgccactcaggtaacacaggaatgtgttaaacccactagtaaacaggtggactctgaagctcaattatatccccaaatagccactgttatgtaaaatacaggtttgatcaggctgggaagcaaggcgggcagatcacttgaggtcaggagta

SEQ ID NO: 778724 - DNA, 603 bp, Homo sapiens
aagactccttataaaaggcaaataaaaatcttaaatgactaataagaaaaattaaatccgcttatctttttgcttagttacaatactgccccaaagacaaaaaagaaagctatcctggataaaaagtttatataaggtaggccctacagctgggtagaaaaccaagtaggctctcacggtacctgatttcaggacttggtttttagatggcatttctggacttgccttaggccagaagggacctcactgctctaaagggtgagtcccaggccaggcagcattcaacacaagctgactgaagagcccttgagcctaaagggaacatggtggtagtctggcagtactccctgtgggcctgaggtggccgtggccatgrggtgaggctcgctgcatttggaaaggggagggaagcatgggaagcgctgcgtcttgtggtttgagtgccagcttagccacagtacaatagaacaccaggtagacttctaagatttttgactctagtttctggctcctgaatggcacctctggaccctcctggagcttgggcttggagaaactcatcaccctcaagggaagaacataggcctggctggctctgtcacc

SEQ ID NO: 778725 - DNA, 645 bp, Homo sapiens
aaacattatttctgggtgtggctatgatggtgtttctggataagattagcatttcaattggtagactgagttaagcagattaccctccccagtgttgttgggcatcatgcgatccattaagggcatgaatagaatgagaaggtggaagaaggtccagttaactgcctggccgcttgagctgaacattgaacttcttctgtcctcagtgctcctggtttttaggccttcaaacccagactgcracattattggctctctggctcttaagcttttgaactacacctctggctttcctgggtctccaacttgcagatgacagatcatgggcctttgcatcctctaaaatcatttaagccaataccttataatgagtctttatatacttatgtatgtgtgtgtgtatatatatatatatatgcttatatgtgtgtatatatgtgcttatatgtatatatatatatgtatatgtatctgcccctagttctatttctctggagagctctgactatagtatagtaaaagagatacttgacttgactctggcaagtgaatgtcttttttaacttactgatactattcatgattcctctttctctaagagatgctccagaggaaatggtgagcatataactaattccaacttta

SEQ ID NO: 778726 - DNA, 571 bp, Homo sapiens
ttttattttttggtatttcaagtcagaaaggtgggagaaaattggaaatgttagtttggagagtcatagccagatattggaggaaactagaagaattcaggatacagtccagtttacagaaagataacaaaacctcaaagacaatgaacaaggctagaattgaattactatagttttctacagtgcacataatttttctgtctatagtcaccctcatgtttcacaaacataatcatagtaagactaatttgtttgtaaaataagtctagyctcattaaatttggcctgattatttaaataagcaaagcaagaatagtgactggtcatatagacactttttaaatctgctttgctggaacttttaataaggaatctctgattagacttttaaaagcctctccattccagactcaatggtgcatgcctatagtcccagttactcaggaggctgacgcaggaggattgtttgagcccaggagttcaagactcgcctgggaaacatagcaagacctcatctctaaaaaaaatacaataaatatatatacataaatagttaaacatagaattaaaa

SEQ ID NO: 778727 - DNA, 647 bp, Homo sapiens
gtttcttggtgagttttatttcattagtttgttagtcacattgtgttcaatactatgatttatttttaggcaccttggctattagagagccgaaatatattaaagaacaaaatttttctcttatttgttggcaaattgacaaaatgggcattagttaaaagaattaagggtatgtaatcaatttttaaataaggaatattaactcctgaaacatcaacatgccttggagtgatttttggaaatgcacatcctcagctcgttcacgtgcatttatggttttacctccatttcattaatgaaacagactaacaaagtgggtcagaaaacattataacaccaaaaaatttgggagtacttgcatgagaatatrttcttatttaattctaagaaattataattacacaaactaaataatccagctatcatttttttcacatgtgatctttcctcctgatatttacctgtggtttttatttcaaacacacattttgcaatagtttctgattggccaccttgcttctcttcctcatacataccacagttagatccatgtttccaaatatcattttaattggttgtgtctgctcaaaactagctgtgacttcctattgttttcaggacaaatacaaacattttaggcttgcatt

SEQ ID NO: 778728 - DNA, 517 bp, Homo sapiens
acatgtccaggtccagggaagtctttctaaagagaaagttctataaacttcggcatagacagcatagactttggttaattatccaaaatatgctttttattgtgtatggttatatgtaacatataaaatacatgtagtatataaaagaatatatatgaaaaagacttccacaaaaaagaaaaaatgaatgatggattctaataatttctaagcaactgtgaagataaactgttktttctcaaaaaactcaccttgtattgcaatgtatacaattgaaaacagtttgcttaacgttcaaatttcctttgcccaccagcttttataaatggcagcttaaaattactatctttccaatttacttgcatcatatttactagagttcatagttttagggaacaaaagattaaagttaagcagccttttcagaacctatcatgagaaagccaaccaaatttaattgaagctagaatttatgatacaggttaccttcatatcaagacattgcagattctagtca

SEQ ID NO: 778729 - DNA, 583 bp, Homo sapiens
agacaataaagcttaccatattgattcactattcctttcaggaaagatttttcagtagcatgcaatgctgtgttatagcattttatccacagtaaaatgtctttcaaatttggagacaatcctctcaaactctgatgttgctttatcaattaagtttatgtgataytttgaatcatttgttatcacttcaacaatcttgaatagaagtagattccatctcaagtcatcactttctttggtcatccctaagaagcaattcttcatttgttcaatttgtatcatgtgactgtagccatttagtcacatcttcgggatccacttctaattctagttcttttgctatttgtaccacatgtgcagttacttcctctactgaagtctggaaccccctcaaagtcatccaactttccaaactcctggtaatgttgatgttttgccctcctcccataaatcataaatgttcttaatggcatctataatggtatatcctttccagaaggtttttaattaaccctgcccagatccttcagttgaattactgtctacagcagctatagccttggaaaatatatttcttaaataa

SEQ ID NO: 778730 - DNA, 583 bp, Homo sapiens
agacaataaagcttaccatattgattcactattcctttcaggaaagatttttcagtagcatgcaatgctgtgttatagcattttatccacagtaaaatgtctttcaaatttggagacaatcctctcaaactctgatgttgctttatcaattaagtttatgtgatattttgaatcatttgttatcacttcaacaatcttgaatagaagtagattccatctcaagtcatcactttctttggtcatccctaagaagcaattcttcatttgttcaatttgtatcatgtgactgtagccatttagtcacatcttcgggatccayttctaattctagttcttttgctatttgtaccacatgtgcagttacttcctctactgaagtctggaaccccctcaaagtcatccaactttccaaactcctggtaatgttgatgttttgccctcctcccataaatcataaatgttcttaatggcatctataatggtatatcctttccagaaggtttttaattaaccctgcccagatccttcagttgaattactgtctacagcagctatagccttggaaaatatatttcttaaataa

SEQ ID NO: 778731 - DNA, 576 bp, Homo sapiens
gatggtttctgcttgtgctgccagggaagtgttttcactttcttaatatgccttgagtttggtaactggttaagcttagtttgtcattttctttttttttttttttttctttcttttttgagatggagtttctctctttttgcccaggttggagtgcaatggtggcatgatcttggcttactgcaacctcygcctcccaggttcaagcgattctcctgcctcagcctcctgagtagctgggaatacaggcatgtgccaccacacgaggttcatttttttgtatttttggtagaaatggggtttctccatgttgatcaggctggtctcgaactcttgacctcagatgatccgcccaccttggcctcccaaagtgctgggattaccggcatgagccactgcgccaggcctccattttctttctttagcacattatgcagtaaatagttgaatccattatttctttctatgaaacaaaggtaataacaacacagaattcactggaccattataaatatcaaaacagaaaatccaagtaaaagtatttagcatatcgtgtttggctcatagtaaactata

SEQ ID NO: 778732 - DNA, 601 bp, Homo sapiens
gctgcaaatcagagaaatgcaaattaaaacagtaatggtaggcaatgtttttctcatcaaattggactcgttgatttttctttggaaaatggtaatgctctgactgcttagtgtatgatttggtaaaaatcttcatatcactgcaggagtaactataaaattacatggtattgtgtatctagcactttaaaattattatactctttaaatccactactaggccttgtcagtgtttaggaaagataatatgggtagaaaaactgtatgtgtatagaaaaatttatcatttataatagggaagggtataaatatcctaaatgaccaacagtaaacaataaataaagtgtactatgtctgtgaaatggaatgacaagtytagtgaatgagaataatgtttacaatattgtgttaagtgtagcaggattagaaaccctatatatattgttaccccagttatgtgacaattgatgtacacacatggtcataaggaaatgaatattaaatttatgaaatgttaccaatgtttttctctgtgtggtgtgtttatagttgattatttctgtaaaattatttgcaaagtcctttatgatcttatcttgct

SEQ ID NO: 778733 - DNA, 645 bp, Homo sapiens
aaagtgaggatgcttgttctaaaaatttatccaccatgttgtgatgagtctcagtgcacatggagaagccatgtggagaaaccattctgacagcctcagctaaacccaggcaacagtcaatatcaatgtgtgagtgaatgagtcttcagrtaattccagcctccagcctttgagtcttccagttgaggcttcaaacatgatgagaaagtgagcattgattcccataggccttgtctgaattttctatccatctccaacctctggagaggaaaggggggctgaagattaatttgattaccaatgaccgatagtttaatcagtcatgcctacatattgaagcctccataaaaacccaaaaggacaaggtttaaagagcttcttgatagtcgaacatgcggaaatgcctggaaggtggtgtgcctgagaaaggcaggaaagctctgtgcctcttctttcgtacatctcttcatctgtattctctgtaatattctttataataaactggtaaatatattttttaaaaaacaaattcacagtgagatcacaaataatgattgctttttgaagccactaggtttggagtaatttgtatcgtagcattagatagctaatattggttgcaaagatgtcgcaaccctgttctgc

SEQ ID NO: 778734 - DNA, 621 bp, Homo sapiens
aaaatcagaaaacaatagatgttggcatggatgtggtgaacagggaacacttctacactgctagtggaaatgcaaactagtatagccactatggaaaacagtgtggagattccttaaagaactaaaagtagaactaccatttgatccagcaatcccactattggrtatctatgcaaaggaaaagaagtcattattcgaaaaagatacttgcacaagcatgtttatagcagcacaattcacaattgcaaaatcatggaaccaacccaaatgcccatcaatcaacgagtggataaagaaactctgataatgttaattcattcctttttatggctgtatactattccatcatatatatatatatatggctgtatagtattccatcatatatatatggaaaaaggaatgaattaacagcatttgcagtgacctggatgagattgaagactattattctaaatcagcaactcaggaatggaaaactaaacattgtatgttctcactgatatgtgggatctaagctatgagaacccaaaggcataagaatgatacaatgaactttgaggacttgggagcaggagttggagggaggtgagggataaaaggctgcaaatatggttcagt

SEQ ID NO: 778735 - DNA, 646 bp, Homo sapiens
taatcctgctctgaagaggaagagaaggagggagaatgacatctattgagcacctggtttattaccaaaatacatacttttgctaaattcctggccttataacgtttgcattattttctccattttataggtgagggaactggagttcagagaggtagagtgacttacccaaggtcactcagataaactgtggcactgaccacrcaaccctggtctttctggctccaaagcccaagactacctttcccagtgccaaacgaggctttccacagcctcttgttccagcagtgtcctgagggagggagagatttggcctgctcatgaggctccagtctatgtttccatgacaaggccatgtggtcagcacaatgcaagtgggaggaagcctgcatcagccagggcgtgaatgagggctgcaagtcaggagctcagcacctcccatccatctgccttacctcccacaatttaactattaccctcaccgcccacccccaagatcaggacaggagagaagatgctgggattgtatgcgtgcttctgtgttggccttgcagtgagagatgatcaagaaatacttagaaactctatgtgcatgcaatttgggtacctcctgagtgtgaagagctcattgatcccattgcaagta

SEQ ID NO: 778736 - DNA, 646 bp, Homo sapiens
taatcctgctctgaagaggaagagaaggagggagaatgacatctattgagcacctggtttattaccaaaatacatacttttgctaaattcctggccttataacgtttgcattattttctccattttataggtgagggaactggagttcagagaggtagagtgacttacccaaggtcactcagataaactgtggcactgaccacasaaccctggtctttctggctccaaagcccaagactacctttcccagtgccaaacgaggctttccacagcctcttgttccagcagtgtcctgagggagggagagatttggcctgctcatgaggctccagtctatgtttccatgacaaggccatgtggtcagcacaatgcaagtgggaggaagcctgcatcagccagggcgtgaatgagggctgcaagtcaggagctcagcacctcccatccatctgccttacctcccacaatttaactattaccctcaccgcccacccccaagatcaggacaggagagaagatgctgggattgtatgcgtgcttctgtgttggccttgcagtgagagatgatcaagaaatacttagaaactctatgtgcatgcaatttgggtacctcctgagtgtgaagagctcattgatcccattgcaagta

SEQ ID NO: 778737 - DNA, 646 bp, Homo sapiens
taatcctgctctgaagaggaagagaaggagggagaatgacatctattgagcacctggtttattaccaaaatacatacttttgctaaattcctggccttataacgtttgcattattttctccattttataggtgagggaactggagttcagagaggtagagtgacttacccaaggtcactcagataaactgtggcactgaccacacaaccctggtctttctggctccaaagcccaagactacctttcccagtgccaaacgaggctttccacagcctcttgttccagcagtgtcctgagggakggagagatttggcctgctcatgaggctccagtctatgtttccatgacaaggccatgtggtcagcacaatgcaagtgggaggaagcctgcatcagccagggcgtgaatgagggctgcaagtcaggagctcagcacctcccatccatctgccttacctcccacaatttaactattaccctcaccgcccacccccaagatcaggacaggagagaagatgctgggattgtatgcgtgcttctgtgttggccttgcagtgagagatgatcaagaaatacttagaaactctatgtgcatgcaatttgggtacctcctgagtgtgaagagctcattgatcccattgcaagta

SEQ ID NO: 778738 - DNA, 559 bp, Homo sapiens
ggcagttctgccacttgctttgtgaccttggccaagtttcttatcctctctgggtctctctcttcatctgtcaagtagacatgaagatataatctcttcttcacacaggagtacaaaggcgtgtgagaatgagtagaggcgtgccccacacgtaggagatgctcaattagtagagatttctttcatttctccagcatgaccatgagaatttaatgcttaataagaagcattatccatcaaaacatttttctygttgagtctttattggtattttctgcctattaattgtatcagtttagatttcttattaataatcatgaagtctgtttttccacttgaagagtaggccctttcttcttgctttagagccatcatttttgccattccctttgtctggaacactcttgctttgtgttttgtgtgctttctcccttctttcatgcaagcctgtgttgcgatgccatgtcagagataccttccttcactcgcctggtgacacatggcacccgtatcactgaatatgctgcaaagcctttatcataacctggcatggtgctgt

SEQ ID NO: 778739 - DNA, 615 bp, Homo sapiens
tgattatcacctgctttaacagatttgtattttataagaatttgtatttattcactcatttattttccaacttgcttattccagtccagggttgagggtggccacagcccatcccagcagctctgcaagctgcaaggtaggaatcgaccttgaacaggacaccatcccattgcagggtgcacacacacacacacacacacacactctctctctctctctctctctcwcacacacacacacacacacacacacacacacactcagattaggaccatgtagataccccagttcacctaacgtgcacatctttgggatgtgagagtacccagagaaaacccacacagcatgagagaacatgcagtctccacacagagagtggccccaaccgagaactggtttttattcccctcctaaaagttatgacacaatgatgttgaacaaaaccattgctgtttgaggacctgctgtactacagcaaagaagtatgcagtactcctctaggggacaccatccacagtgtgttctccatggaggttacgttgtatttatatataatgaatggcgcccccgacagctgtgtcacgttttgagcataggagcaaacattcctatttt

SEQ ID NO: 778740 - DNA, 624 bp, Homo sapiens
ttatatctcaccaacacatttctatctgcataccacatacgtgtttcagttattcactgctgtgtaacaaccgccccaaaagaagtagctgaaaatgacaaagatttattctttgtcctgattctgtgtgttgactgagcagttcttctgtagccagctggcaggttgactgagactggatgtccctcccatgtttggaaactcagctgggatggctggaaagacccctctccctacatgatgtcagaagcaggagaggaagttgcaaagcctttggagaccaagagttggaagttacagaacacttctgccatgttctgttggtcaaaggaagtcccaggtcragccctcattcaaaggtttggaaagtaggttccacttcttgatgagataagccacaaagaatttgtggccatttttaatccaccctaatctacatttaaccaagatagatgccctttagttttcattttctgattgcaggaatttggtggtgtgtttcagaaacgtgactcttttccaaaaactcatgcccttctggccctggaactctgggtcttcaggtgaaattcgggcagcattatagttaagccccctgtgtgcccagcagctctttttctgctt

SEQ ID NO: 778741 - DNA, 623 bp, Homo sapiens
gacacgtgatttaagagcctctgagccaccgcttcagctttaatatcatttagccaaccattatttttaaccttccgcttcttgaagagtgctgtgaccacctaggttaaactaggttttctcccatcatacaaaagggaatgctactttgggataccagaaaatctgcctgataaaaccgggtccatttttaaaacaaaacaaagcttgcaaagatgttgaatagagattctcctctgtaatggttgagcttacctgagagaaatggattcaccagaggcagatgcatttgaaggatggatccagcctgggctatacatctgagagtccatgttctcctggtgtccaccagcccagacctcagcccaactgggctatttctcargaagatagagagttctaagaccacagtgttttctctgcacttcctactccttgctctctccagtgtttggacctaattttacagactcttcactttgcctccgtaatttttcaccagtgtttcagatacaggcttacacggtagacattaactagttaaaaatctagacagtaatacctccaccttactcactttcactgtaagtcacgagttttttaaataccctacgccttttgat

SEQ ID NO: 778742 - DNA, 454 bp, Homo sapiens
tggggttgtgaactttgaaaggacttgttatctgtgccacggggtttagccttactgtctcatgggtgctagtccccagatcactttgtccctgtctctaaaattaccactgccttctcttgttaatcatatgtttctgggtctgtcactagattgtgacttcccggcaggtatttgtatttgtctttatagtaactatactgttcctggcacatagtaagtwtgaagatacctttttattgagtgaataagtgaatagccttgtcagtgaaactgtagggccagagatcgtgatagaaaggttttaaaaaaatattttctatgttatttaaaataatgcagaatgcaccaaaaccagtccatgggtactacttttttgacatattaaaaaatagcatagaagagtttccattcatagtttcaaagtcaggcccattagcagcgtgagtgagac

SEQ ID NO: 778743 - DNA, 621 bp, Homo sapiens
tgacatcagccatgtggcctagtatttggcagactagactatttctgactggtgaaaacaagtttagaacatctgaaacgctgaccctttgataagatttttttgtgttgaagtcttgtgtattcccaccttgattttgtttgtgtgtgaagaaatgttggttttatttttagagtatgatggttgggtaaagggatctctttttctaaatgggacatctctttttaatttgtgatatcaataacatggtcttacaaatcacaaactagctattatggcttgcaataatatgagttctgtttttgataaagtctgatttacttatctaaagaatacttagcagagaaatagatctcattaagcagatgctgatggaatcctggaaatacagttctaggatggtgggccaccaatgagcagttaacacaaaaagagtcttaccrtatagctcatttattatgctgtaattagcctatgaataaatccatttttttcagtgtaatgttcatttgtatctattttgaaaggacatcgtggctgggcacggtggctcgcgcctgtaatcccagcactttgggaggccgaggtgggctgatcacctgaggtcaggagttcgagacc

SEQ ID NO: 778744 - DNA, 624 bp, Homo sapiens
aacagggaccttagctcacagaaccagcatgcattggaatgaggatgtggagttatttagaggtggatggaaggatccttggcttgaattttcgttttctgagctttgcaaggatgttgtaaatgggccttggggatcttggcccatttcttcgtctttcagattttggtgaatttttataaatctatatcctgtttatacattgttgctactggttttgtctgagaaaagtttccagataaggactgattttgagactttcaatasatacttatgccagggaaggaaacaaccacgaggcagtggtgagtattctcagcgtaaatactggtgttgaagctgtgtattgaataccctcttcctccgtccttgccacattactttggcatttgtcagtagtgagggcaacaataaagtaaatactgtaatgcttaatcatttccctgctcacaaatgggctcctatcaaaaattccatcctgagagggggcattttatagcactattaactccttcctaaagacgtagtgggaaatggatgaatcaattacaaaataacttcagattcagaattttcaccagttcttcactttgaatttgaacacttggattctttatttcaaac

SEQ ID NO: 778745 - DNA, 459 bp, Homo sapiens
tagttgagatggctcagtaatgtctgcaaccacacatttaataaagaaaacctaaattacatctgcatgttacgaaattgaaactgcatcaacttttgttttttctagtgacaggaattggctttctgattgcgaaaacaaagctagtgtttttggaatgtgctttccaaatagaaagtgtgtcttagtttcctgataggtggattctgaaactttttatctagctttagattttatgaatttgtatctagcttaaacatgctcatagataatggagccaggtaatatagactaagtacttaaaarcaagtactcttctctttgtcacatttgaaagaaaatatattttatgaaaataatttaaaaaataaactgacttggttatttgagaatagtttctcataattgttattatatactctgaagcctaagatgttatctcatttgataatctgctta

SEQ ID NO: 778746 - DNA, 642 bp, Homo sapiens
ttggtaaacacctgactttagttggctgattttgttgttagtgttttgtcagtttaggatgtaaatgatgcatataattgtttatttttataagaatgaagccaaaaatggctgtgacattaaatacaacagtaactctagtgttgatttgtactttttctgtttttcttaccttgtgaaatatttatgagctaaaattttgggaaaaagcataacctaaatctccatcatctcttacatgtttaagaacatatccatttatcataaataaaattccttatggatcttatatatctatgattgtcagtaactgaataggaaagatttacggtaaacactttttatttcttatgaatgtagaacccraggtagtagttataggtagaacataaattgacagtgatgttttaagaacatgcattcattcagcaaatatttagtgaaggcctactctgtaccaggccatgatctgggcacttgggatactttagtgaacaaagcagacaaagataatgcaccttcaaggggcttgccttaaaaaaaaaattgttagatttaaatatacatgatattgagtatctcttatgatggccgcaaatgagccttgaattctggttctatccctgttattttcagggatat

SEQ ID NO: 778747 - DNA, 627 bp, Homo sapiens
ttcatgaatctggtaattatatttatttatatattgttatagtatttaattcacatcaatgcacatattcagcattttctctcattcattcattcatttattcgtaattttggctgcctaattgttaagcactacacttaatcaaaatcagattttttatactaattatctcttcatttgatattgtctttttaataggaaataaaaagtaagttcaaaataagactgcagcctccttacaacatattctttgaaaacttgaaaatcctcttagattaatacaatctgtttattaacatctgtttactaacatgacccaagtcyttaaacagtgctttcatttttcttttgttaaatatttaatattttagaatccaaaataagctaccaaaagctaacaagttaattttctataaaatttaatactgttttcaaattgatgttacttgacatttttataatgaacaatacattaaacagatatctttaaaattaatgtttaattaaaaattgattttatgtatgatttccacgtgagattttaaataatttacatatttacttatgtaggtaggtaacaaattcaaagtattgacaattagcagctattaaatattcaatatattt

SEQ ID NO: 778748 - DNA, 576 bp, Homo sapiens
taatacaatattattgtatgcagattttatttatccaaacttagttttataaaggaaattgatacttttcctaggtgttcatacagctgtagaattttctttcctcttttctttctttctttttttttaacttagttttcttgctagaggcagagatgtttctggagcaaggcattaaatcaagctgttagctctgccccattattttatacacttcaggttgcaactggaaacacstacatagaaatttatatggttgcattaaataacttcaagctcaatgtgtttcttcaaggatgaactaaatgttcatatgcagcttgtacttaatagtcaagcagaagcacactgaagctacttaaagggtaagaaagagctgagaccttccatagttttcggtgctcaaaatgaaagtttcagtaatgacaaaaaaaaagtcctattaaacacattgctttttatggcctaatttttctgggagctgtattgatcaaaagtattttggcagctgaaactggacaacagaataatgtccaagttcttacatgtggccaaataatagcctgatgtagtaaa

SEQ ID NO: 778749 - DNA, 619 bp, Homo sapiens
actggaaaatgtgggaaagtttggaattcctagagacttagagggctcagaagacaggaagacatgggaaagtttggaacttcatagagatttgttgaatggctttgatcaaaatgccgagagtgatatggacaatgaagtcctggctgaggtggtctcagatggagatgaggaactttttgggaactggagtaaaggtcactcttgttatgtaaagagactggtggcattttgcccctaccctagaggtctgtggaactttgaacttgagagagatgatttagggtatctggtgaaagaaatttctaagcggcaaagcattcaagaggaagcagagcatgaaagtttggaaaatttgcagcctgatgaygtgttagaaaaaaaccatttttctgaggagaaattcaagctccctgaagaaatttgcataagtaatgaggagccaaatgataatcaccaagaaaatggggaaaatgtctccagggcatgttacagaccttcatagtagcccctcctatcacaggccaggaggtgtaaaagggaaaactggtttccccctgctctatgcagccttgggacatggtgccttgcatcccagctacttcagcttcagccatga

SEQ ID NO: 778750 - DNA, 619 bp, Homo sapiens
actggaaaatgtgggaaagtttggaattcctagagacttagagggctcagaagacaggaagacatgggaaagtttggaacttcatagagatttgttgaatggctttgatcaaaatgccgagagtgatatggacaatgaagtcctggctgaggtggtctcagatggagatgaggaactttttgggaactggagtaaaggtcactcttgttatgtaaagagactggtggcattttgcccctaccctagaggtctgtggaactttgaacttgagagagatgatttagggtatctggtgaaagaaatttctaagcggcaaagcattcaagaggaagcagagcatgaaagtttggaaaatttgcagcctgatgatrtgttagaaaaaaaccatttttctgaggagaaattcaagctccctgaagaaatttgcataagtaatgaggagccaaatgataatcaccaagaaaatggggaaaatgtctccagggcatgttacagaccttcatagtagcccctcctatcacaggccaggaggtgtaaaagggaaaactggtttccccctgctctatgcagccttgggacatggtgccttgcatcccagctacttcagcttcagccatga

SEQ ID NO: 778751 - DNA, 594 bp, Homo sapiens
gaaccaacaaatagaatccagcaatatatgaagatgattatatggcacaaccaaatggattattctaggaatgcaaggttgattaaacaaaagaaaattaattaaggtaccatattgtattaataaagtataaaacaaaaacaagtgattatattaatacatggggaaaaagcatttgataaaattcaacacacttttatttaaaaaatactcaacaatctgtgatgaarcaataaattcctcaacctgataaaagtaatctatagaaaagcccaagattaacattataattaatggtgagagactaaaaagctcctacttaatatcaggaagaagacaagaatatccaatcttatcacttccactcaataacatactgcaggttctagccaggccaacatgcagaaaaaaaacaaaaatctagattaaaaaggaaggaaaaaagacatcattattcacagaaaatatgatcttataaataataaaagatcctaggaaatccataaaaatataagctattagaaccagtatgtaagttcagcaaagttatataatacaagatctatataaaaaagtcagttgtacttctatgcc

SEQ ID NO: 778752 - DNA, 594 bp, Homo sapiens
gaaccaacaaatagaatccagcaatatatgaagatgattatatggcacaaccaaatggattattctaggaatgcaaggttgattaaacaaaagaaaattaattaaggtaccatattgtattaataaagtataaaacaaaaacaagtgattatattaatacatggggaaaaagcatttgataaaattcaacacacttttatttaaaaaatactcaacaatctgtgatgaagcaataaattcctcaacctgataaaagtaatctatagaaaagcccaagattaacattataattaatggtgagagactaaaaagctcctacttaatatcaggaagaagacaagaatatccaatcttatcayttccactcaataacatactgcaggttctagccaggccaacatgcagaaaaaaaacaaaaatctagattaaaaaggaaggaaaaaagacatcattattcacagaaaatatgatcttataaataataaaagatcctaggaaatccataaaaatataagctattagaaccagtatgtaagttcagcaaagttatataatacaagatctatataaaaaagtcagttgtacttctatgcc

SEQ ID NO: 778753 - DNA, 594 bp, Homo sapiens
gaaccaacaaatagaatccagcaatatatgaagatgattatatggcacaaccaaatggattattctaggaatgcaaggttgattaaacaaaagaaaattaattaaggtaccatattgtattaataaagtataaaacaaaaacaagtgattatattaatacatggggaaaaagcatttgataaaattcaacacacttttatttaaaaaatactcaacaatctgtgatgaagcaataaattcctcaacctgataaaagtaatctatagaaaagcccaagattaacattataattaatggtgagagactaaaaagctcctacttaatatcaggaagaagacaagaatatccaatcttatcacttccactcaataacatactgcaggttctagccrggccaacatgcagaaaaaaaacaaaaatctagattaaaaaggaaggaaaaaagacatcattattcacagaaaatatgatcttataaataataaaagatcctaggaaatccataaaaatataagctattagaaccagtatgtaagttcagcaaagttatataatacaagatctatataaaaaagtcagttgtacttctatgcc

SEQ ID NO: 778754 - DNA, 495 bp, Homo sapiens
aatttgcttcaatggatatgttctttagtgcaaaacagtgtcattttaatgagaccaaaatattctctgtatttctttaaaatgaaaagatatttttgctatatttaagttaaaattaacattaagggttataagtataacatggccatcaaaagtgtaatggaatatatgtgtaatggaagagtaatagagtagatgcctgtacaggcatatcgaacatttgacttccttcatggyatttataaatacattgctttctctcgtggaaattttaatataaattaataaaattatttttagttaaatagagttcacaggagaaaatcatgctttttacagcaggtaaagaattggcacatgcattattttaagaatgtcaataagccagctgatttttaccaaaatacaaagccatataaccaaaatggagttcacaattctgcacatgaggaaaagaaaattacttagactatgtggggaatagtggtacctact

SEQ ID NO: 778755 - DNA, 614 bp, Homo sapiens
tttcctgggggtttttggaagaaatgaaagtaaacatatggatccacattttcatgttttcctggaagtccctacttctcttggcgattttaaatcatcttggatctttcaggaacaatgcattcacctcacttggaatcattggtaaattttcaggagcattcttcttttgtctgacttctactcagtattgaagatatttagtctgattttctgtacttctatcaagtttctatagacaatttctctgcaggatactgtggaccctgatgcttcttgtatgtgttccacgtcttcctcactctgtgctttcacatgctagacccagtgtctctgtaacatgaccctgttgcctgttgacacacaaactttcatgagaaggattgaatgatgatagaggggaggggtcagcgcagaagattcttaggcaaattctcccaatgccttgacggtgaaaataggcttacytaacctgtaggctcataatattcagctgcaagagtctagaccatagttaatgaattttataaatgatatggaaacttgctttttgtttcatgtcattgatcaaatgaatgtttgcacaatgccgtatcaactaaggtcattattta

SEQ ID NO: 778756 - DNA, 629 bp, Homo sapiens
gtgagtgagggagcaagagagatgctggctccttaaacaaccagctcttgtgtgaacttataaagtaagaactcactcattaccatgggagggcaccaagccactcatgaaggatctgctactatgacttaaactcctcccattaggccccacctccaacactggggatcacatttcaacatgagattcggaggggacaaacatcccaactatatcactacctaaacattatcttgcaattcctaaacttcagttgactgtatccctgacctctagccccrccccattccaggagctgtggccttttagtacggcttaccttgctcattgtgactttattgcattttttacaaattaaaggtttgtggcaaccctgcatcaagtgagtccattggtgccatgtttccaacagcgtgtgttcactttgtgtctctatcacattttggtaattttcacaatatttcaaaccttttcattactattttatcttttttttctttttctttttctttttttttttttgagacagggtcttgctctgtcacccaggctggagtgcagtggcataatcatggctcactgcagccttggtctcccaggctgaagcaatcctctgatctcagcctccc

SEQ ID NO: 778757 - DNA, 588 bp, Homo sapiens; identical to SEQ ID NO: 772594

SEQ ID NO: 778758 - DNA, 622 bp, Homo sapiens
ttgaataatgttttctagtgtgataaagctatccattaatatgaaaaaactgtatatatttaacagttcatccttgcaccatgtagaagcatcatttgatatttaccacaaaactgtgtgcctagattaggtattattatccctcttattatttataagaagagattctcatatcagagatctcatatctcttcttataaataagaagaaggataatatttaccacaaatctgtgtgcctagactaggtattattatccctcttcttatttgtggaagagaatgctgaaggtcagagaggttggctaamtccctcaaggttacacagctggtaatccaggactgctgactctattttctcaagatatttaaatatattatctagttattcctgaaccatatacagggatttattttgttgaaagaaatgcaaagtcattcagtcaattaaagctatttcacatcttctctagcttagggatgatttaaatatctaaataaatattttgggataactgtcctagatatgactagaagctcatttttaccctgaatttgtggaattgagatatgacagtcataaagggcaaaaggaagagtagaaaaagttttcacaaacatat

SEQ ID NO: 778759 - DNA, 529 bp, Homo sapiens
gaattttctgcatttgattattttaatcttattgctactgtgcttgtaaatttagtttttataaactaacttttaaattaaaatataacattttaaaaggtgcacaaattataagtacacagctcaatgaatttttagagtaaacagacacgtacaatcaccaactaggtcaagaaatagaactttactaacaccctagaagaatggaatcaagtaatacatgttcttttgtgtctggtttctttcattcaacattatgtttgtgagattcatccatgtcactgtgtgtaggtgtagctaattagttttctcttgctatatagaatttsactataagcaatgtgctgtaatttgtctatccttataacattaatgaatatttgggttatttctagtgttttgttattaaaaaatgtgccattataaatattattctgtacttttaaaattaatattatttttaattggcaaattataactgtacacatttatggagtaatatatacaatgtagaatgattaaatcaagt

SEQ ID NO: 778760 - DNA, 581 bp, Homo sapiens
gatcattcaattcctttcaatatgacaggcttcatcctgggagcaagttttgatggagaagagtaagagagattaataagaatcattattctttacagcccttgacgacagggattgacgaagcccggatagtaaatattttaggctttcggagcctgaagttctctgtcacaagtactcaattctaccattgtaacmaaagcagccatagataatatgtaagtgaatggatgtggctgtgtttcagtaagactttattagactctgagatttgaatgtcatataatttccatgggtcatgaaatatttttcttcttttgcttttttctcaaccgtttgaaaatgtagggccgggtgcagtgcttgcacctgtaatcccaacactttgggatgccaaggcagtaggacaactggaggccaggagtttgagaccagcctgggcaacatagcaagaccctgtttcaacaaaaaaaatttttttttgaaattagcagaatgtagtggccatgccagccacatgcctgccatcccagctcctaggatgaggagaaaggatccttgagctcaggagttcaagcctg

SEQ ID NO: 778761 - DNA, 640 bp, Homo sapiens
gaaaaatggactataagtcaaaaactgtcacaagagacaaaggccattacaataaaatggctaattcaataggaagacagaacaactacacatatatatgcacccaacttcaatgcacctaaatatataaagcaaacatggasagatatgaagaaagaaatagacagcaatatgataatagcaattcaatactccacttttttttagtggatagatcaaccaaacagaaaatgaaaagaaatgaacaacattacagaccaaatggacccaacagacacacagaatttccccaacagcagaagcatacatgttcttctcaagtgaaaatgaagcactcttcaggatagatcctatgttaggtaaccaaaaaagtcttaaaaaatttaaaagatcaaaataatatcaagtatctttatcacaaaggaatgaaacagtaagtaatcaagcaaaagtatcaactacttactgttaagtaatcgataacagtaagaaaacagaaaaatcacaaatagataaaaactaaacacacttgaacaatcattaggtcaaaaaggaattaaaagagaaattttaaaaacaagacaaacaaaaaacagaaattactaaaatttgtggaatgtagcaagagcagtacaaaaag

SEQ ID NO: 778762 - DNA, 640 bp, Homo sapiens
gaaaaatggactataagtcaaaaactgtcacaagagacaaaggccattacaataaaatggctaattcaataggaagacagaacaactacacatatatatgcacccaacttcaatgcacctaaatatataaagcaaacatggacagatatgaagaaagaaatagacagcaatatgataatagcaattcaatactccacttttttttagtggatagatcaaccaaacagaaaatgaaaagaaatgaacaacattacagaccaaatggacccaacagacacacagaatttccccaacagcagaagmatacatgttcttctcaagtgaaaatgaagcactcttcaggatagatcctatgttaggtaaccaaaaaagtcttaaaaaatttaaaagatcaaaataatatcaagtatctttatcacaaaggaatgaaacagtaagtaatcaagcaaaagtatcaactacttactgttaagtaatcgataacagtaagaaaacagaaaaatcacaaatagataaaaactaaacacacttgaacaatcattaggtcaaaaaggaattaaaagagaaattttaaaaacaagacaaacaaaaaacagaaattactaaaatttgtggaatgtagcaagagcagtacaaaaag

SEQ ID NO: 778763 - DNA, 640 bp, Homo sapiens
gaaaaatggactataagtcaaaaactgtcacaagagacaaaggccattacaataaaatggctaattcaataggaagacagaacaactacacatatatatgcacccaacttcaatgcacctaaatatataaagcaaacatggacagatatgaagaaagaaatagacagcaatatgataatagcaattcaatactccacttttttttagtggatagatcaaccaaacagaaaatgaaaagaaatgaacaacattacagaccaaatggacccaacagacacacagaatttccccaacagcagaagcatacatgttcttctcaagtgaaaatgaagcactcttcaggatagatcctatgttaggtaaccaaaaaagtcttaaaaaatttaaaagatcaaaataatatcaagtatctttatcacaaaggaaygaaacagtaagtaatcaagcaaaagtatcaactacttactgttaagtaatcgataacagtaagaaaacagaaaaatcacaaatagataaaaactaaacacacttgaacaatcattaggtcaaaaaggaattaaaagagaaattttaaaaacaagacaaacaaaaaacagaaattactaaaatttgtggaatgtagcaagagcagtacaaaaag

SEQ ID NO: 778764 - DNA, 640 bp, Homo sapiens
gaaaaatggactataagtcaaaaactgtcacaagagacaaaggccattacaataaaatggctaattcaataggaagacagaacaactacacatatatatgcacccaacttcaatgcacctaaatatataaagcaaacatggacagatatgaagaaagaaatagacagcaatatgataatagcaattcaatactccacttttttttagtggatagatcaaccaaacagaaaatgaaaagaaatgaacaacattacagaccaaatggacccaacagacacacagaatttccccaacagcagaagcatacatgttcttctcaagtgaaaatgaagcactcttcaggatagatcctatgttaggtaaccaaaaaagtcttaaaaaatttaaaagatcaaaataatatcaagtatctttatcacaaaggaatgaaacagtaagtaatcaagyaaaagtatcaactacttactgttaagtaatcgataacagtaagaaaacagaaaaatcacaaatagataaaaactaaacacacttgaacaatcattaggtcaaaaaggaattaaaagagaaattttaaaaacaagacaaacaaaaaacagaaattactaaaatttgtggaatgtagcaagagcagtacaaaaag

SEQ ID NO: 778765 - DNA, 604 bp, Homo sapiens
gggattcaacagtgagaatccctgaagtatgctttgcttggtgccttatattcattcttctcgaatcctctatgagaaccttaggtggacgttagccagattttatacatgaagatgctgaggctcagagaggttgaaagtctccaaaagctgcggagtaagagtggtagccgactcttactttaagagtaaaagcacaagtttgaatctgtatctccgtggtacacttaaatagaactctaatagcacttcacttctaaatgtcaggaatataatccactgcttgaatctrtattgagtaatgtaacccctttgttatgagtagcaccacaaaaaaaccctactattaaacatatacgaaatccatatgaaagggtttttttttcccccctcagatcacctattagtccatactgagtcaacatcagatgagttccgagacatcattcctctctggttttcccccaccctcctttcttcccattcttgctctctgctcagggtccagttgcttctggctgtcatttggtttggttttattaattggggagaaaaagatgggagggctgccggttcctcctatcttgttcatagcaataaggat

SEQ ID NO: 778766 - DNA, 553 bp, Homo sapiens
aaggccttataaaagcttcatattgaacaaaattccctgatgtataattaagggcttgtcttagtccattttgtgttactgtaacagaatatcacagactgggtaattgagaaagaaaaaaatatatatttttttacagtgctaaaggctaggaagtccaaagtcagggagccaacatctgatgaaggtcttgcaaaccagatggatatttattccaagttcctaattcgaattaagttgataaawttctaggtttgggttagcctttgagctaagggatttcaatgaccactgcattgctttgggtgcacaatggagttcttccttctatactctttgcttcatctccagaattcaaaatctgtttcttattccaggaagactgtctacagtctgaaaaacatttgctgtggaatgaaatgtctattacattttcattcctatttcatcaaattatttttccctcagcaactaggcaacatcccctgagcatgtgtgaccactggttagagacaaattactgcaagtggtcacctactggaaaactgaaggt

SEQ ID NO: 778767 - DNA, 552 bp, Homo sapiens
cagtatatatgtatagtatagaattattagagttattagaattagaattagaattattaagtgaaccccatgggacacaactttatcaactagtgtacagtgtttgtatactgctacttttaccttctttcttagagacttcactcattttcaaaattacttaggtcagcacctttttaccccatccccttcagtgacgttgtttcatatgtttgtaatatatttaaattctcttgtaattgtctacattccattttagggtatccccatatcctaaatgcttgtttaaaacattgaatgaattgaagttcactctttgttatgggaagtgttttgggttttgacaatgcaaaatgtcacttagcattacctttcagtatcatagatascatagcatttctgtcattacaatactatacagacgtttcaccactttaacaattctctcatatttcactaattcaaacagaaaaccacaaacatgtataaacacgtacacatacacacacacatccctggtaaacactggtatcattccttttatcactgaat

SEQ ID NO: 778768 - DNA, 616 bp, Homo sapiens
ggaaagtacaatgtagagcatctgattaaaataagtacattaaaaaattcaaacaatatttttggaagtatttatgttactgtagccagggctatttttgttaccaggtgcagagatcctcatagacttgttaaggacagaaaatgtccttgaaccacagacaccatgggagtgatatattctctttgtctttttttctggacaacatggtttcactttaattgatttctggtttgtgtgtatcttctcaattggcttctcctactgtctcataattcctagaccttataaaagtgctgtgacatctcttgctccttattttctggcaaactcagcacatattcctgagatagatatattgttatatcttcacagtttttccaggccttkggtccctggccacctagaaattggctgcatttgtttcatttgcccatttctgatcccataatctctggaaagatttagggagaagttagagatataagagcctgtgacagagaatatttctgctgcttcttcatcagtaatggtagaacagaacttattagaagcagggaagttgctgagacaactttaagtaatataggttcagcttttgccaagaaattattct

SEQ ID NO: 778769 - DNA, 616 bp, Homo sapiens
ggaaagtacaatgtagagcatctgattaaaataagtacattaaaaaattcaaacaatatttttggaagtatttatgttactgtagccagggctatttttgttaccaggtgcagagatcctcatagacttgttaaggacagaaaatgtccttgaaccacagacaccatgggagtgatatattctctttgtctttttttctggacaacatggtttcactttaattgatttctggtttgtgtgtatcttctcaattggcttctcctactgtctcataattcctagaccttataaaagtgctgtgacatctcttgctccttattttctggcaaactcagcacatattcctgagatagatatattgttatatcttcacagtttttccaggcctttggtccctggccacctagaaattggctgcatttgtttcatttgcccatttctgatcccataatctctggaaagatttagggagaagttrgagatataagagcctgtgacagagaatatttctgctgcttcttcatcagtaatggtagaacagaacttattagaagcagggaagttgctgagacaactttaagtaatataggttcagcttttgccaagaaattattct

SEQ ID NO: 778770 - DNA, 634 bp, Homo sapiens
aatagctgaagtgatcctcagcaaaaagaacaaagcatcacattacctacttcaaagtaactttaaggatacagtaaccaaatcagcatggcactggaacaaaaacagacactttgaccaagggaacagaatagggaacccagaaataaagccgcatacctacagccatctgaccatcaacaaagccgacataccaagcaatggggaaaggactttctatgtatatggtgctgagataactggctaaccacatgcagaagaatgaactgggcccctttcttacaccatgtacaaaaattaactcaatgtggattaatgatttaagtgtaacacctcaaactataaaaatcctagaagaaaacctaggagataccctttttgacatcagctggggcaaattatttttggctaagtctgctaaagcaattgcaataaaagcaaaayggacaagtgggaatctaattaaatgaaagagctcctgcacagcaaaagaagctatcaacagagtaaacagacaagctacagaaaatatttgcaaactatgcattcaacaatggtctgatgtccagaatctataaagaagttaaacaaatcaataagcaaaaaacaaataacaccattaaaaaatgggcaa

SEQ ID NO: 778771 - DNA, 629 bp, Homo sapiens
aactaataataaatttggcaagtacaaagagctgctgattgcaatatctgtcaaagggagaaactgaatatataagatataactcttcattatatgatttgagtttattttcctggaatatatccaatcacaaaagaatattgtttttctcagaaaaactgagccaagtagattcttctttataccatactggtaaaggagaaaaagcaatgctactaagttccaataagaaatttcccccatctctatgttagtctayctttataaccattcaggtggaaaaggctgataaggcaatgttgggcaattctttctaattacttcctttgaaatgtctactactaacaggactgatcaatattctcattatgcaaatgtttcttatctattgttcaactttcatatgaccactggatatcagagatgtatgagaaggtagtatataacagacactgggaagagttagtaaatttagaagacacggacccttgcctcaaagattttacaatgtatgattcattccagctaacaaatatacaaggaaaattgaacaggaaaaaaaacatgttttatggtatcctgaaaacaagatgggaaaatcacattactggtcccatagataaaattta

SEQ ID NO: 778772 - DNA, 629 bp, Homo sapiens
aactaataataaatttggcaagtacaaagagctgctgattgcaatatctgtcaaagggagaaactgaatatataagatataactcttcattatatgatttgagtttattttcctggaatatatccaatcacaaaagaatattgtttttctcagaaaaactgagccaagtagattcttctttataccatactggtaaaggagaaaaagcaatgctactaagttccaataagaaatttcccccatctctatgttagtctacctttataaccattcaggtggaaaaggctgataaggcaatgttgggcaattctttctaattacttcctttgaaatgtctactactaacaggactgatcaatattctcattatgcaaatgtttcttatctattgttcaactttcatatgaccactggatatcagagatgtatgagaaggtagtakataacagacactgggaagagttagtaaatttagaagacacggacccttgcctcaaagattttacaatgtatgattcattccagctaacaaatatacaaggaaaattgaacaggaaaaaaaacatgttttatggtatcctgaaaacaagatgggaaaatcacattactggtcccatagataaaattta

SEQ ID NO: 778773 - DNA, 525 bp, Homo sapiens
ctcccattttttaagattccattggacataataataaagatattcaggcctggcactgtggctcatgcctgtaatcccagcactttgggaggccgaggtggtcagatcgcttgagcacaggagttcaagaccagcctgagcaacaaggcaaaaccctgtctccacctaaaatataaaaattagccaggtgtggtggcacatgcctataattccagctactcggaaggctgaagcacgaaaatcacttgaacctsggagaaggaggctgcagtgagccaagactgtgccactgccctccaacgtgggtgacagagtgagactgtctcaaataaaaaagatattcaacattccagcaattcgtttccccaaataagtactccatatataatgtataatgccaatctaatggcataatagaaggtaagtcaaacttcaggatggctactgagtgatcatatggacaagaccagctgagtctagctacagaaaagttctgttatagctcatgtgcattcactcaacaaa

SEQ ID NO: 778774 - DNA, 613 bp, Homo sapiens
tagctctttactgtggacaagtgtcctgaccttgcctgagccttttttgttttccctctcttttttgatatctactttgcagttttgttttgaggattaaatgagaaaacgtatgcctggcacatatgagctcagaaaatacwaattgccaaagggctaatacatttagttgagggagacactaggaataagacataaagctgcttttgcctctaaggcaataaaatgccctctccattctattctccacactacagcaagaacaatcttttgcaaacatgtcatgtgatgtttatctcttcttaaaatttcccctgccttcctttcagagtaaaacggaaattcctaccgtagtctagaaagttctatggtatgccaatatctctcagtcccctcaccttacaaaaccagtgcattttctaccactccatttgctatataattcagccatattggtcttgctcttctcaattactatgaacatgagtgtctgctttcagagctttgcactgtttcctccacctggatagtctttcctcaaatattccgtgattcacttccttacttcaggtgtatgctcaaacgtcatttaccagaggccaaccctggccac

SEQ ID NO: 778775 - DNA, 635 bp, Homo sapiens
agttatttgcatcagtgcaataaggatccatttttttttcaacagtatgcaattggagaaactggttattttaccaaggctttgactggaagggtatgcttccctttaagaagtcaatcttgacttgcagagctgctaaaagccctgtaggaagaactggcctcatacccttgcctacacagtccctgtacagggttcctggcctgtggtcagtaaagaatgtcactttgtaacaggcctaggagctccaagtttatcttgggaccttaaaaggagagaatcacccaacttacaggtatttgaggatacaaacccatggctgggctcagcttaaaaagtctcacctgagattccttgtggaycagtgttccatcaaagccaatccaaaaggactatgtacaaataactattcttgctgcaccttatgcaaataatcaggccaagtataagactaaagtccattttggaaaccacttagtcctatgatggtttgtgttttttaaacaaaaatgatgactggtgacagaaaaattaggtttcaaaatttatcatacatttgttattaaattctaaactcattagttgtttttaagttttcacctacattttagattaaccctacttgttcctgtgaa

SEQ ID NO: 778776 - DNA, 635 bp, Homo sapiens
agttatttgcatcagtgcaataaggatccatttttttttcaacagtatgcaattggagaaactggttattttaccaaggctttgactggaagggtatgcttccctttaagaagtcaatcttgacttgcagagctgctaaaagccctgtaggaagaactggcctcatacccttgcctacacagtccctgtacagggttcctggcctgtggtcagtaaagaatgtcactttgtaacaggcctaggagctccaagtttatcttgggaccttaaaaggagagaatcacccaacttacaggtatttgaggatacaaacccatggctgggctcagcttaaaaagtctcacctgagattccttgtggaccagtgttccatcaaagccaatccaaaaggactatgtacaaataactattcttgctgcaccttaygcaaataatcaggccaagtataagactaaagtccattttggaaaccacttagtcctatgatggtttgtgttttttaaacaaaaatgatgactggtgacagaaaaattaggtttcaaaatttatcatacatttgttattaaattctaaactcattagttgtttttaagttttcacctacattttagattaaccctacttgttcctgtgaa

SEQ ID NO: 778777 - DNA, 648 bp, Homo sapiens
cagttatttgcatcagtgcaataaggatccatttttttttcaacagtatgcaattggagaaactggttattttaccaaggctttgactggaagggtatgcttccctttaagaagtcaatcttgacttgcagagctgctaaaagccctgtaggaagaactggcctcatacccttgcctacacagtccctgtacagggttcctggcctgtggtcagtaaagaatgtcactttgtaacaggcctaggagctccaagtttatcttgggaccttaaaaggagagaatcacccaacttacaggtatttgaggatacaaacccatggctgggctcagcttaaaaagtctcacctgagattccttgtggaccagtgttccatcaaagccaatccaaaaggactatgtacaaataactattcttgctgcaccttatgcaaataatcaggccaagtataagactaaagtccattttggaaaccacttagtcctatgatggtttgtgttttttaaacaaaaatgaygactggtgacagaaaaattaggtttcaaaatttatcatacatttgttattaaattctaaactcattagttgtttttaagttttcacctacattttagattaaccctacttgttcctgtgaaccaaccagcaat

SEQ ID NO: 778778 - DNA, 579 bp, Homo sapiens
cttcttagagctaagctcattccatctgtgtatactattgttggtttcccgaggggacccatgaaactctggaagaaccacagtcaaatcattagagaaacatgctacacagcttgtcttttcttatggtacccatataattgatcatccaaaccaggttttctggagagttaaagayggtgatcaataatttcaccaagaaaacaagtatacatcagggataccctggacaaactggaatatggccaccctactgatgctccatgtctccccagctacccacattcacattgcactgagaggcaatctgttatttcacactctgccaagggcggcacctttcactatgcattacctgaggatgcaaaactgaaaacctaagcaagcattccagatcttccatcatggtgataacatctttaccacttctgaaatattcttagcctcttttcatgcacatcttgaatctttctgtctcattaaactcagaaactaccttgcaggatcttcatggttttctctgtagcaactgtgcccagaaagccattaggactgagtcattttatgttattaacaact

SEQ ID NO: 778779 - DNA, 583 bp, Homo sapiens
caaacaacaacaataaaaacaagtaaacatcacctttgcttatgtttaatatacaaaagaattgttgtctggatcatgtccactttttttttaaatggagtctcgctctgtcacccaggctagagtgtagtggggcgatctcrgctcactgcaacctcctcctcccaggttcaagctattctcttgcctcagcctcccaaggagctgggattacaagtgcttaccaccatgcctggctaattttttttgtatttttagtagagacgaggtttcaccatgttggccaggctgatctcaaactcttgacctcaagtgatcctctcacctcagccccccaaagtgctggaataactggcgtaagctgctatgggatcttgtccacttaataccagtattctcttgaattaggaatgacaaaaaaaatttctggcatgccacagggccttccaagtaagtgatatacttttctcccatgaggattcacagctgtatgttttgctcttattcaaaaccaaattttctgtctacctctcacagttaggtaagatcctgtttaaaagtgctaattttatttctagttcca

SEQ ID NO: 778780 - DNA, 584 bp, Homo sapiens
acttatcttagaccttccatagaccccaacaaccctgaaggccattgtagaattaaatttgtactcaatagtggttcctcaaccttttctcataaacaggactctgattttatcaaaggctgtggctgaagccactttcccaatttcttcctttatttcttcctcttttttttttttttttgaaatggagttttactcttgtcgcccaggctggggtttcagcatgttggccaggctggtmtcgaactcctaacctcaggcagtccgcctgctttggcctcccaaagtgctgggattacaggcgtgagccactgtgcccagcctcttccgctttcttctctcttttccacccatctgagcaagaaggtgtgggaggattaactgggaggctctgacttcattggcgagtactgttattgcctttgataaatgcatgcagcagcacagacaccacttagccccaggctgcttccattagagtctcactgtaggaatgagatggctctgtgtgtaaaatgatttttttactataccagaaaaaaatattattagggaagtgactctgaatcctctagtttaggaat

SEQ ID NO: 778781 - DNA, 584 bp, Homo sapiens
acttatcttagaccttccatagaccccaacaaccctgaaggccattgtagaattaaatttgtactcaatagtggttcctcaaccttttctcataaacaggactctgattttatcaaaggctgtggctgaagccactttcccaatttcttcctttatttcttcctcttttttttttttttttgaaatggagttttactcttgtcgcccaggctggggtttcagcatgttggccaggctggtctcgaactcctaacctcaggcagtccgcctgctttggcctcccaaagtgctgggattacaggcgtgagccactgtgcccagcctcttccgctttcttctctcttttccacccatctgagcaagaaggtgtgggaggattaactgggaggctctgacttcattggcgagtactgttattgcctttgrtaaatgcatgcagcagcacagacaccacttagccccaggctgcttccattagagtctcactgtaggaatgagatggctctgtgtgtaaaatgatttttttactataccagaaaaaaatattattagggaagtgactctgaatcctctagtttaggaat

SEQ ID NO: 778782 - DNA, 585 bp, Homo sapiens
gtatatctatttacagtatatatctactctgatttacttaaaataatccaaaaccacaacatcaagtttttctcccagccttaagtatcacctaataccaacttgcagagccatctttaaactgatcccttatgtcaatgtaatgcaaaattctaaaatccttgaataataagaattaatgcaaagttaaggagattttggaattaagcaatttatttgtacaatgccaaggcttgatggaataatgttttattaacyacacaggaaagaaatattacagttatcgtaagttggattcagtatcttgagggtccattttctttgggtgtgtaaaactaccatcacataaaaagtatcaagtctgcatgattaatttctgagttgtttgtgtgtgtgtggggggggggtggtgcgtgtgtgtgtgtgtgcgtgtgtgtgcgtatacctgtaatttagtgagatctaattttgggtcctcgtctgaacgaatcattctggttatatggaggggaaaaaacaattttctacacactgctcaaaactatcgatccgctgtttatcaggcattatgactaaagctctgat

SEQ ID NO: 778783 - DNA, 636 bp, Homo sapiens
cccaagcaagtctgtaacctatcagagaaaattccattaaagtctaagttctgagaataattctccgtgactctttccattgaacccactgagatggctccctatccccttctggtattcaatagcagtggccctgccctcttgatccacagtggtaaccatcccaccctcccagacattgaaaatcccactggcatctgagccacccttaaaaattttcttatttttttcttgaaggctaacagaggttgctagccaagcagctctagctgcccattttctgtttgtggaaccaaaaagtccaacagccttcctgccctttgttcatttctatcatctttcatccaaggtgaccgtttctactgasatagttgattggatccatgagtcacacgcttaatctctgtagcaaaaatttattcagacacacctatggtgttttctctccagaacatgctttcccattctttgaaatatgaatagctgagaattttccaaatcatcaaactctcaattattttataaatagggttgccttttctccggtgtccaaaacatgatcttcatttccatctgagaccccaccagaacacctttaatgtccagatttctaccaacagcctcttcaagacaatc

SEQ ID NO: 778784 - DNA, 654 bp, Homo sapiens
gatcatcagagaaatgcaaatcaaaactacaatgagataccatatcacctcagttaaaatggcttatattcaaaacacaggcaataacaaatgctggccaggatgtggaggaaagggcactcttgtatattgttggtagaaatgtaaattattgtggagatgagtttgggggttcctaaataaaactaaaaatgsagctactttatgacccagcaatccccactgctgagtatatacccaagagaaaggaaatcagtatatcaaatatatatctgcattcctatgtttgttgcagcactgttcacaacagctaagatttggaagcaacaacagatgaatacataaagaaaatgtggtgcttatacacaatggattactattcagtcattaaaaagaatgagaatctgtcatttggaacaacatggatggaactgcagattattatgttagattaaataagcaaggcatagaagaacaaacattacttgttctcactcatttgtgaaacctaaaaatcaaaacaagtgaactcatggacatagaaattaggagaattgttaccagaggctggaaacagtagtaggggactgggggagaggtggagattgttaatggatactaaaaaacagagttagaaagaatgaataagacctg

SEQ ID NO: 778785 - DNA, 654 bp, Homo sapiens
gatcatcagagaaatgcaaatcaaaactacaatgagataccatatcacctcagttaaaatggcttatattcaaaacacaggcaataacaaatgctggccaggatgtggaggaaagggcactcttgtatattgttggtagaaatgtaaattattgtggagatgagtttgggggttcctaaataaaactaaaaatggagctactttatgacccagcaatccccactgctgagtatatacycaagagaaaggaaatcagtatatcaaatatatatctgcattcctatgtttgttgcagcactgttcacaacagctaagatttggaagcaacaacagatgaatacataaagaaaatgtggtgcttatacacaatggattactattcagtcattaaaaagaatgagaatctgtcatttggaacaacatggatggaactgcagattattatgttagattaaataagcaaggcatagaagaacaaacattacttgttctcactcatttgtgaaacctaaaaatcaaaacaagtgaactcatggacatagaaattaggagaattgttaccagaggctggaaacagtagtaggggactgggggagaggtggagattgttaatggatactaaaaaacagagttagaaagaatgaataagacctg

SEQ ID NO: 778786 - DNA, 496 bp, Homo sapiens
agggcaggtgatagaagagggatggatccagttatcagatagaagaatagccatgccacaactgctaggagctgcagtcgtactggctgttcatgagaccacccacctaggccaagagtcacttgaaaagttgttaggctggtagttctacaactcacatccggcagcccttgccaaaacagtggtgtatcagtgtgtcacctgctggcagcagaaaggtaggcaaartgcaaatgtcccgcccagcatacaagcctgtggagcagacccctttgaagatctccaagtagacttcaccaagatgcccaaatgtggaggtaacaagtatttgctagttctagtgtgtacatactctgggggtggtggtggtggtggtgtggaggtctgtccaacacgaactgagaaaactcttgaagtaacctgtgtgattctccgagatctcatccctaggtttggactgcccttacaaatagactcggacaacaggctggcattt

SEQ ID NO: 778787 - DNA, 496 bp, Homo sapiens
agggcaggtgatagaagagggatggatccagttatcagatagaagaatagccatgccacaactgctaggagctgcagtcgtactggctgttcatgagaccacccacctaggccaagagtcacttgaaaagttgttaggctggtagttctacaactcacatccggcagcccttgccaaaacagtggtgtatcagtgtgtcacctgctggcagcagaaaggtaggcaaaatgcaaatgtcccgcccascatacaagcctgtggagcagacccctttgaagatctccaagtagacttcaccaagatgcccaaatgtggaggtaacaagtatttgctagttctagtgtgtacatactctgggggtggtggtggtggtggtgtggaggtctgtccaacacgaactgagaaaactcttgaagtaacctgtgtgattctccgagatctcatccctaggtttggactgcccttacaaatagactcggacaacaggctggcattt

SEQ ID NO: 778788 - DNA, 692 bp, Homo sapiens
ctctgggggtggtggtggtggtggtgtggaggtctgtccaacacgaactgagaaaactcttgaagtaacctgtgtgattctccgagatctcatccctaggtttggactgcccttacaaatagactcggacaacaggctggcatttgtggctgacttggtacagaagacagcaaaggtattggggatcacayggaaactacataccacttaccgaccacagagttctggaaaagtggagcagatgaatcagactatcaaaagtaatttagggaaagtgtgtcaagaaacaggattaaagtgggtacaagctttccctatggtattgtttaagattagatgtaccccttctaaaagaacaggatattccccttatgaactattatatcataggctccctcccatactacggggattcccaggcactcctcaagagctaggtgaaattgagttacagtgacagctacaggctttaaggaaaattacacaaacaatttcagcctgggtaaatgagaggtgccccatcagcttattctccccagttcaccctttctccttaggtgatcgggtgtggatcaaggattggaacgtaacccccttgcagccattgtggaaaggaccccagaccgtcatcttgaccacagccacaaaggtagagggaatcccagcctggatccaccacagccatataaaac

SEQ ID NO: 778789 - DNA, 692 bp, Homo sapiens
ctctgggggtggtggtggtggtggtgtggaggtctgtccaacacgaactgagaaaactcttgaagtaacctgtgtgattctccgagatctcatccctaggtttggactgcccttacaaatagactcggacaacaggctggcatttgtggctgacttggtacagaagacagcaaaggtattggggatcacatggaaactacataccacttaccgaccacagagttctggaaaagtggagcagatgaatcagactatcaaaagtaatttagggaaagtgtgtcaagaaacaggattaaagtgggtacaagctttccctatggtattgtttaagattagatgtaccccttctaaaagaacaggatattccccttatgaactattatatcataggctccctcccatactacggggaytcccaggcactcctcaagagctaggtgaaattgagttacagtgacagctacaggctttaaggaaaattacacaaacaatttcagcctgggtaaatgagaggtgccccatcagcttattctccccagttcaccctttctccttaggtgatcgggtgtggatcaaggattggaacgtaacccccttgcagccattgtggaaaggaccccagaccgtcatcttgaccacagccacaaaggtagagggaatcccagcctggatccaccacagccatataaaac

SEQ ID NO: 778790 - DNA, 633 bp, Homo sapiens
gaaatgcttgtgaccataagtgttttcagattttgcattttggggggattttggaatatttgcatatacataatgagagattgtggggatggaacccatgtgctaaacataaaattcatttatgttttatatacaccttatatacatagcccaaaggtaattttgtacaatattttaagtaatttgtacatgaaataaagttttggctgcaacccgatgcatgaggtcagttgtggaatttacttgtggcatcatgttgatgctcagagtttcagagtttggagaattttagatgtcagatttttggattggggtgctccaaactatgtattctgatcacatgccttggcttcctttactgaagcatcattttcctctatacacagcattcctgaagaattcatyagttctgactgatgtctttctgcctttttgccagagggcttaagatagcagacattgtaggccataaggtaatagatttacctcctttagtagcgataccatcactatgcttaaagttgggacaggggaaatccaagccatgggagaccgatagcaaatagaaggggaagaagtagtgaagtgtacatttatttgatcctgcatgtatattattttttggtgagagga

SEQ ID NO: 778791 - DNA, 815 bp, Homo sapiens
catcttaacaagaactgtgtagacagggtacttataccaagaagacagtaaaagctaaagaatatgaaagggtaaatgtacccaaatgggagaattacaagttataagtgtgctgtttttaaaagtcacctataaattcaaggaaatctgaaatgaaatgtccaaaatatatatatttttaaataaaactcgacaagctgattccataattcatctggacmagaaaatgcacaagattaggcaaaactacttttgaaaagggatgggtcttaggtaggaaagctcagtgaaaggggaaggaatttgtcctaataacaaaacataccatatcacgtttttttaatttataatttttatgggtacatagtacatgtatatatttatgggatacgtgagatatcttgatacaagcatatagtgtgtaataatcacatcagggtaaatggggtatccatcttagcattatttgtgttatgaaaattccggttgtattctctgttattaaaaagtatacaagttaacattatttaaaatgcatagacagacagctcatttgaacaaaagggagtccagaagcaaactaatatatttgtaggtgtctgggatgtgataaatgtcttttttttttttttctttaaagctctgggatgtatgtgcagaacgtgtaagtttgttacataggtatacttgtgccatggtggtctgctgcacccatcaccctgtaggtccagccccacagggtcggttgtttttctccccttgtgcggagacgagagattgtagaaataaagacacaagacaaagagataaaagac

SEQ ID NO: 778792 - DNA, 656 bp, Homo sapiens
tcctccatcttctaagctagcagtgtagcatctttaaatctgtgtcctcttgcactttttttttttttttgagatggagtctcgctctgttgcccaggctggtgtgcagtggtgccatcttggctgacctcaacctccgcctcctgggttcaagcggttctcctgcctcagcctcccaagtagctgggactacaggtgccaccacacccagctaatttttgtatttttagtacagatggggtttcactatattggccaggctggtctcaaattcctgacctcgtgatatgcccgccttggcctccsaaagtgctgggattacaggtgtaagccactgcgcctggcctcctcttgtacttttttctgctgtcacatcactttctctttgactctctctcctcctaagaaccctgtgattacattaggcccacagctaacccaggctaatcatgcctctcgagatttttaacatcattacatctgctaagtcccatttgtcatacaaaataacatacaggttctggggattaagatatagacatcttggggggccattaaatagcctaccacaccaagtaaacaaattattttatcttttctgcaatgtcagatttataattagtttaacgaaccatatgtcaaggtttattttcttt

SEQ ID NO: 778793 - DNA, 629 bp, Homo sapiens
ttcagggatgagcagcaggatcaaatacattttgagaagagatgattatcttccctccagaatatttatagatatgattgtttaaagacatgaaggaaggagctaggcaagtaaaacagcaaatatgctgacatcaatgaggatgataagtgaaaggacccctgtctccagaggaggttggaggggaggtccagtgtccggacagttttgacctgactgggcaggaagaagtgcctctatttttggacattagagagaaggataagagctagtatggattctgaagtgaagtgcagtgctatgagygtgctcacaatcaatttgatggttcttctggatttgtcttggggaattaggaggtaaggccacctgtcgagaatgaagttgacatagacctgaaaaaaagaaaggtcagttgagaatagtcactctatggaaggtgaacaataaaaatgaatcaagatgatgagagtttgaagggagtcagagatcaacccaggggactgtaacattctgtatttgaaggaagcagggaagaaaccacaaagtggggaagattcaaagtatttatgacagaagatagaggagcaagaactgaatgctttgggtgccaggaagtggagagtctc

SEQ ID NO: 778794 - DNA, 594 bp, Homo sapiens
gaatagctcagttggttaaatttatcatcagttagttaatactgtagagaatttaatgaactgggagataagaaaacatttattacgtatttaaatcccatttggttttcctaacttaatttttttcccagggtgtctcacttcagagatgactttcctaactttaatatcttyttacaataactttgttatgcctttaagaaaggactaaaatatttgtaaaattagttcaataggaatatttccaggtcaaatggatccaatttcctcttactcctgaaaaaataaagacaaataaaattatttttattttacaatggataaatcttcttacacaatagattgttcctttttttattttacaatagataaatgttcctacacaatagattctgatctggtatttagtgatgtcaaatgtataatcaataagagaagtaatatcatcatcatgttttggtaatatcatccaccaccttatcagctgaatacaaagtagtgatttttcttctccctcagataccatcggaacagttctcggactcacaggcttgttacctctttactccaataagaagggggaaaaaagcaaac

SEQ ID NO: 778795 - DNA, 594 bp, Homo sapiens
gaatagctcagttggttaaatttatcatcagttagttaatactgtagagaatttaatgaactgggagataagaaaacatttattacgtatttaaatcccatttggttttcctaacttaatttttttcccagggtgtctcacttcagagatgactttcctaactttaatatctttttacaataactttgttatgcctttaagaaaggactaaaatatttgtaaaattagttcaataggaatatttccaggtcaaatggatccaatttcctcttactcctgaaaaaataaagacaaataaaattatttttattttacaatggataaatcttcttacacaatagattgttcctttttttattttacaatagataaatgttcctacacaatrgattctgatctggtatttagtgatgtcaaatgtataatcaataagagaagtaatatcatcatcatgttttggtaatatcatccaccaccttatcagctgaatacaaagtagtgatttttcttctccctcagataccatcggaacagttctcggactcacaggcttgttacctctttactccaataagaagggggaaaaaagcaaac

SEQ ID NO: 778796 - DNA, 551 bp, Homo sapiens
agttctatttgtagttttatgaggaatctctaaactattctccataggggttgcactaaattacattctcaccaacagtgtatgaggattttcttttagctacatccttgccagcatttgttattgcctgacttttgaataaaagttgttttaactggggtgagatgatatctcatggcagtattgatttgcctttctctgatgatcaataatgttgagcaccttttcacataccygttttccatttatatatcttctttggagaaatgcttattcagatcatttgccgattttttaattagattactagatttgctttcctatttagttgtttgagcttcttaagtattctggttattaatctcttgtcagatgaagagcttgcaaatatcttcctgtattctgtagtttgtcattttgttgattgtttccttttctatgtagaggtttttaacttgatgtggtcccatttgttcctttttgttttggttgcctgcactggtaggggtgttactcaagaaatccttgtctagtccattgtcctggagagt

SEQ ID NO: 778797 - DNA, 621 bp, Homo sapiens
ttgcactactcctgcatgaaaccaactctcccagaacctagtcacaacttcatcttgttaagaccttttttgacttctcatctgtaagatgtattatttcttccccgtggaaaattaccagtgagactcattaatattctagcctccagcctgacctcctttcctgagattcatgaggatgctgtgtgaatgcagcagagaaaacagttcactgaaagtcttgtttggggtaaccctctgctccctttgcrtgacttactgtgagatttctttgcctttttgtttcttttgttaacttttttttctaactctaaaaaatacaaaagatagatttcaaatcaaaaaggctccatacctacattagtatgtgttttctattgtatatattttggttttatgtttctcaagaaaataaaaaccttgagcaccctggcaagctccatatatagttgtgaagtgggcaaagtttacctctgatttccctccaattatgtctgcagccctccctcatatgctgtgggctcctcaaaccctgactctaactctagctactcgagttctgtttcaccaattccagcatgggtttgctgtccccactcatcagtctattctttacaaccc

SEQ ID NO: 778798 - DNA, 647 bp, Homo sapiens
cagtatataaatatttttgaacataatttaacctaccacaattactgtgattgataataacctaatatgtttaccttactcaggaatgtctacattttcatgagactattaacacagagaaacaaataaatggaatctacagcaaatgattactacagagtaagaaatagttgttttattcaataattcattgaccatatctccattatctattaattttatacattttaaaattagtactctattggatttgtcccagaagctcacagttgtattttccttytagaatcattattatagaactactgagattaaaacatttttcactggttgattctaatgtagacttgatttttcaaaagtgacttatgtatgtatagactaacaaaaacagagtactagaacaacagagtctatttaattatgcttaggaaccacatcaagacttgaatgatcaagaagcttctgtgcaatccttccatataacttcaagccaaccactcagactcattattttacagaagaggaaaagaaaaaattggagaatcatccacatagataataaccatcaggagctgagacatacttctactctccctgggggtacagatactaaaatacattatagcctaattcctgatgaaatc

SEQ ID NO: 778799 - DNA, 529 bp, Homo sapiens
gaaataaaatatagtattcaaataagctatgtagtgtggggggcttattgtacagttaaagtacagatatcactaatatggctgagcttatgctatttgctagataatatttcaataacataaaatgtgaagaactagatttttgtatttcataaamtaaagatatatgggagaaatgatattgtcaaaagtcaatagtttctttaatagaaaaatgttttgtgagaccacaactaagaatggccatcaatggagatagcactttgactctaataaaggttgaaatctggagtgaggtcacgttcacagattgttgctgtgattcctaaagggtgtatggtattctccctctctctccttgcttacctcgtctataaacattctctataaaccactgcatgaataaaaggaaaccctaggttgagtcaggtaagggttgagcagtactaattactgcctttgccatccaacttctcccagtttaggaaaatagaagaataatgaaggagagccagcttttgtttgttac

SEQ ID NO: 778800 - DNA, 454 bp, Homo sapiens
gcaagcaaatagaaatgtaacaatttaggtaaaatatttgtagaaaactatttttgtagatactgagaactatagagggaagaaagttaaattcatatcatgcatgtatagatggttaattcaaaatacaacttagaattcttgagtttatgtctattgctctaatgactagaccccagattggccatatcaacatgtgataccatcaatttctagtccgtggttggttgatccgytgaagtaagtcatctgagtggcctcgacctctgcttctgcattgatgatctgctgcactacagcctccgcaatgggcatcaccatggcagccgtcgaggtgttgctgagccacatagacaaaaaggcagtgctgctcatgaaccccagcgtcagcctgaaaccagagagccattattgtggagctgtgctcttagcttaactagcaccgtattattta

SEQ ID NO: 778801 - DNA, 589 bp, Homo sapiens
gtgcttatttgtcatttatatgtcttctttgtgaagtgtcccttcaaaacttttgcctccttttaattaatttgtctgtccaattattactaattcacaggcttaatttatatattcttgatagaagctttctgtttgatayatgttttggaaagattagaaagattttctctggcttgccttttcatttcttgaatgtatatttgaagagaaggttttcattttgataaaatgtgtatattttttgtctacagttcctaccttttaaaatctttgtataagaaacttttacctaagtcaatgtcacaaatatttctcaaaagcttttgtttagaattttaaaaattttatgatttacaattaggcctataatccacattcaattaacttttttgtgtaatgttaggtaagggtctaggttcttgttttcccaatatatgtattcagatgttccagcaccaagtgttgaaaaggttatatattcttaattgcattacattggcttcttggccatatagtaattaatcataccagtttgggtctatttccagaaaatctgttttttccaattggtctatatccttagcct

SEQ ID NO: 778802 - DNA, 589 bp, Homo sapiens
gtgcttatttgtcatttatatgtcttctttgtgaagtgtcccttcaaaacttttgcctccttttaattaatttgtctgtccaattattactaattcacaggcttaatttatatattcttgatagaagctttctgtttgatacatgttttggaaagattagaaagattttctctggcttgccttttcatttcttgaatgtatatttgaagagaaggttttcattttgataaaatgtgtatattttttgtctacagttcctaccttttaaaatctttgtataagaaacttttacctaagtcaatgtcacaaatatttctcaaaagcttttgtttagaattttaaaaattttatgatttacaattaggcctataatccacattcaattaacttttttgtgtratgttaggtaagggtctaggttcttgttttcccaatatatgtattcagatgttccagcaccaagtgttgaaaaggttatatattcttaattgcattacattggcttcttggccatatagtaattaatcataccagtttgggtctatttccagaaaatctgttttttccaattggtctatatccttagcct

SEQ ID NO: 778803 - DNA, 494 bp, Homo sapiens
  misc_feature 10: n = A,T,C or G
accaagcttntaagtgatacttagtggatattttcattactcactgaccactcttccatgtatatatatatcacctccatcacagaatataccaccttgttaatttaactctaaaatacttctatttccctggaaaatgtcaaagtttttcctgaggtttaaaacaagttatataagatctgagcattcaggccaggtgtggtggctcacagctgtaatcctagcattttsggaggctgaggtgagaggattgcttgagcccatttattcacaatcagccaaggcaaaatagatccaatctctaaaaaattaaatttaaaaaaaggtctgagcaggcaatattcactttcaagaaaattcatgtaaggttatgtggcatgttcactgggcaaagttacttatgttttcccttttccattatgcctgtgttctagcccttctctttgtttcaaatgtatccctgccttagttctctacataaggctttacctggg

SEQ ID NO: 778804 - DNA, 611 bp, Homo sapiens
aatacaagcattgggaacaacatgtatacatggaattatcttgcattgcaatatctacaaatagtttggaaaacaattcgacagttccttgaaaatttaaatacacaccaccaggtaaaataatcattgcattactacatattcaccccaaagaaggaaagcatatgtccatgcaaagcytagcacaaaaactactcagagcacctttatttgcaatagccaacaattggaaagcacccaaacacccatgaacatatgaatggataagtaaactgtagtgtatccatataatgaaatattactcagcaataaaaacataatgaattattgatatacactgcaatataagctaatctaaaaaaattacactcagtgagaaaagccagatggaaagaagacatattgtataaatcataaaataaaatttttggaaatgtaaactaacactttggaaatggtagtgtaagaaaacagataattgtttgcttggtgaaggagggttgagggatgtgttgtgcagagacaagggatgcctttttttgatgattacattcattatcttgattgtaatgatgaatttagccaaaacttattaaattctacacttaaaa

SEQ ID NO: 778805 - DNA, 677 bp, Homo sapiens
tacgtcaagatataagctcttaaaatccaagtacagaattcccaaaatatagaaaaatataaataataaaaataagaatacattacaatgacagtccccttctgttgtcacaatgggtcgctttgcagttacacacagccaaataaccctatgcctttttcagatgaagagaattttagctccaaccataatggagctgtagaaatagatacaaccataacgtccttgtaacagatcataggagactagtacgccttgtcatctgttsctatattacaagtcactccaaaatgtagtagcttagcacaacaattattagtactttgtactggaatcggttggataattgttttgctgcctttgcttagagtcattcatggagctacagtatctgtcacctcagctgtggctagaagatataagatgatcatctatgtctgttgattggtgctgactgctggctatcagattagtaaagaatctagtaggctatcccagtcttcctcatatgacagtcaaaaaaatgattaggcttaaaatttatacagtatctctactgccatgttctgttggttagggcaactaacaaagccagtctagattaaggtatgagcaaagagaccccaccttttgatgagagttactgcacattgtttgtggttatattttaatctacc

SEQ ID NO: 778806 - DNA, 612 bp, Homo sapiens
ttcatcaaggctattttaaggaaaaattgcttcttttggcaggtatatgtgggtgtgcatatgggtgaagaatccagtaagtactaacacaggtcgacgttaacatttttatccactgttgcttttgtgctgccagtacaaatgccctcccagtgaaagaggcaaataacatcacattatagtattgttatgcaataattattaccttgcrgaccccctgaaagggccttggggacgacactttgagaactactgctctataccacttctggatacaagaagttaaggtaggcatcacaaaatcagcatcaagcgtccaaccaagtcatcagtctgaaatagaattctgcccattcaaatgatagctccatcctagcaatcgctccacattcacccttctggctctcatctggctcagtccaaggaactgggaagtctggaaccttcctgccattaaggtgaggtgacttttctctcctgtctggtgagggggttgcaaagatggctgctctgcctggaaaaaacatgcttctctgaaggactgtgcttgccagccttgccaatcacaagagcttttgaagtgacccagcaattgtgagtgcagccagcctg

SEQ ID NO: 778807 - DNA, 612 bp, Homo sapiens
ttcatcaaggctattttaaggaaaaattgcttcttttggcaggtatatgtgggtgtgcatatgggtgaagaatccagtaagtactaacacaggtcgacgttaacatttttatccactgttgcttttgtgctgccagtacaaatgccctcccagtgaaagaggcaaataacatcacattatagtattgttatgcaataattattaccttgcggaccccctgaaagggccttggggacgrcactttgagaactactgctctataccacttctggatacaagaagttaaggtaggcatcacaaaatcagcatcaagcgtccaaccaagtcatcagtctgaaatagaattctgcccattcaaatgatagctccatcctagcaatcgctccacattcacccttctggctctcatctggctcagtccaaggaactgggaagtctggaaccttcctgccattaaggtgaggtgacttttctctcctgtctggtgagggggttgcaaagatggctgctctgcctggaaaaaacatgcttctctgaaggactgtgcttgccagccttgccaatcacaagagcttttgaagtgacccagcaattgtgagtgcagccagcctg

SEQ ID NO: 778808 - DNA, 645 bp, Homo sapiens
atatatagagacatagctacatacagatagatgattgatagatacatagatgatagatacaaagatacgtagagacagatgatgatggatagagatagatagatagatagatagatagatagatagatagatagatagatagatagattttaaggagaaggctcataacattatggaggctgacaagtctagactctgcaggttagactgtcaggcgagacctggggaacagctgatgctgcagtgtaagtcaaggccagccatctgctgtcagaatgtccccttgcttaggggagatcagccttttgttctattcacatcttctactgattggatgaggtctacccgcacaaggtggggcgatttgctttactcaaagtccaccaatttaaatgtcaatctaattcaaaaacaacctcataggaacatccagaataatatctggccacrtatccagatactgttgccagccaagttgacacataaaattaacatcccatgtatcttggttgtggtagtggtcacacacatctagatatgtgggaaaatgacatggaactatactcatagattgtaccaatgtcacatattaggttttgacgtactatcattatttattcaataattatttcaattacttaaaca

SEQ ID NO: 778809 - DNA, 643 bp, Homo sapiens
atagatgatggctggagagatggatgaacagagagatgggtggatggatgaatggatggttgggtgggtgagggatagatgatggatgaaggaatgaatgaatggatgggtaatgaattaatggatgactgggtggatggaatgcatgcatagaatgaatgggtgactgaatacataaaagaactaactaaataaataatgatgaaaggcaggggacactaacagggtgwaagggtttgttcctggacactgaatgtgtcctttggaaagattggaaactggcagttatcagggtaaattgggctgcagacatattttgtttgatcttcacagggtttttaattttttgaattgtcattattttaaaattagaaaatttcacattgaaaatctagacttctggtttctcctgcaaaattgggccagcacccataccaggaaataatatactgggactgacggggccgagccttctgagtgctcacagtccccactgctccacaacgcagccctgctatcgaggttgtgtcagctgccatttatcatggcaatttgggctggtgtttttctcagtaccattatgaggaaaatgaaaaatctcttacaggtggctcttcgtcaaaagtggaaaatgaacttaggt

SEQ ID NO: 778810 - DNA, 620 bp, Homo sapiens
atattttcctaattaattattctaattaagcaatatttactattttgcagatatgtcctaattgtactaattaatccaatgataatttaattattaatttcttaattaccttaatgatccaattattattacttgaagatgttggtcaataaatttttatttgtcctttttagaaaatgtacatgaaaaatattactcctgatatgcaaattattttttcctagataagtttttgcaatcttttcgtgttgaaggtatgtatttatacatatgcaattatagctgcaaaaaaatcatttcttttaactgctgtatagaattccatattatgaataagtcacatcaattgtctactttcgatgctcatttagrttaccttcatttgtcccttctattttgttatttttaagcactgttgtaatgattaactttctatagttttcttgagcatgaatgcaaaaaccatgctaggatatatgcctatatttagaactgcttttaaaagttttatgagacaaacattgacttatgagacaaatctccaaaatggttctatccatttatatttctacggtaacatatagcattcccatttctctgctttcttgccaacactaaag

SEQ ID NO: 778811 - DNA, 609 bp, Homo sapiens
atacatctccatgacactaagccatatgctagaggattgggggaggggtggcaggagaattgagggagagggagaggaagggaggtgggattgaaacaagggggcaaataacaggaaggaaaggattttggatattaggcctcaaaaggtagaaattccaccttgatgtctttggcgtgatgttgccaaaggataggacttggaatggacatgatcaagtgggccaggtgggttttccattttcctttttcctgaaagcccaccagtagacaattgatatggttaggccttatgtccctaccaaaatmtcatcttaaattgtaatcctcataatccccacatggcaagggagagaccaggtagaggtaattgaatcacgggggtggttttccccatgctgttctcatgatagtcagtgagttctcatgagatctgatggtttataaggggctcttccccctttactcggcacttttcctgccttcttgtgaagaagttgcctggcttccctttcagcttctgccatgatcgtaagtttcctgaggcctccctagccatgttgaacagtgagtcaattaaacctcttacttttataaattacccaatctc

SEQ ID NO: 778812 - DNA, 612 bp, Homo sapiens
cagccattttggtagtttctttcaaagctaaacatgatcttaccatacaatccagcaatcatgctcctaagtatttacccaaatgcattgaaaaagcatgtccacacaaaaacctgcatgtgaatgtttatagcagctttattcataatcaccaaaaactggaagtaaccaagatgtccttctatatgtgaatggataaacaaactatggtacatgaatataaaggaatatttttcatcataagaaataagtaatctttaaaagacacagatgaatcttaaatgcatattgctaaatgaaagcagccaatccaaaaaggctacatactgtatgattccaattatatgacatctagaaaagacaaaactttagcaatagtgaaaagatcaggggctcagggagagagaaggagggttaaacaggtaaagcacaggggattttgtgggcagcaaaactattctrtatgatactataattacagatatgtaatttgtcaaaacccattaacttcacagcacaaagaataaacctcaatgtatgcaaacttaaaaaaaaaatcattcaggaggttgggagtcccagaatggaaagtagaatgtgataaaaccaatc

SEQ ID NO: 778813 - DNA, 507 bp, Homo sapiens
tctgtatatgcctgtacatttgctaagtaattttaaaacaatcattgtcatatttattttggacaatttttttcttggtgttataggcaagttgattacagactcatttaatttttatgactgaaatgaatgatgaaaattaccaggtccaatttcatgctcaaggctgcaaaagcttatattttaatgaaaacacatagataccctgcccgtgtkgaaactttccagtgtccacttttcatctgcccccacacagcagtgtcccttccatttgggggcatttctagttagttaataattttccattatctctctaaagtgcattcatacagacttatataggagaaagaatttcctgattaaaaaattatctgtcccagaaaatgtcccagaggtttatgttagcaatagatccacctaacattaatcgctaaaggcaaattagcatgtactttttgaaagaaattgtaagttactattgagtaaatttgtaacaattatgtgata

SEQ ID NO: 778814 - DNA, 640 bp, Homo sapiens
aaaccacaccaacctagcattctatatccagggaaataatccttcaaaaatgaagaataaaaaacactttctcagaccaacaagaaccaagggaatttgtcccgactagatctgctctgcaaaaatatggtaaaagaagttgttgagagaaggaaaacatatgtaaaaattctaatctacatgaagaaaaaagatattcagagaagggataaacgaaaataaaataaaaatatttttctttttcttaattgatctaatagataactctctcttcaaagtaatagcatcaataacatattgggtggttataatatatggtaaatgaaacacataataaaaataacatggatcagartacagaaaataagaacatctctgttttaaggtacctacaccacatgtcaagctatatagagttattttaaggtagacttagatcagttaaatatatatagtatactctgaaaaaaaacactactttttttaaagatgtataactgatacactaagaaaggaaacaaatcagaatgatacaaaatatttgactaaagctagagacagcagaaaaagaaggaagaaaaagaaaaaatataacagtagaaaaaagcttaaaatgtggctcatatgcataactaaccaa

SEQ ID NO: 778815 - DNA, 605 bp, Homo sapiens
caaccagtgggatttatttcagatttgcaagactactttaacagttaaaaggcaattaatgtgatctaccacatcgaaggctaaagagaaaaaataatacaattatataagttgatataaaaacatttgaaagaatccaaaattcattaatgtaataacaacaatctcggcaaactagaactacaggggaaactcttcactttatcaaaatagtttctcacagttaattataatggatacagtaggtttattgtttatctayaataataaacctactgtgtatctacaataaacctgctgcatccattgtttatctacaacaataaacctattctttatctacaataagcctactgcatccgttataattaactgtgagaaagtagatgctttcctcctaaaattgggagtaaggaaggatgtcctgtcccactcttcttatccaatattgaactgaagttgtaactagtgcaataagataaggaaataaatcaagggtgtacagaatgagaagagagcactaaaaccatctgtcatttacaggtaacataattgtctatgtagaaaaattctgaagaattgccaaacatatcccttgaactgtg

SEQ ID NO: 778816 - DNA, 621 bp, Homo sapiens
catagtgatcaaattcaatgagaccatgccttcaatatttttatcagatttattgaggatatataaccccattatcaagatatgcatcactcccaaagattctcccatgcccttttttccccccatgtccttttgtagttaacacttaccctcacaccatgtgtctggcaacytaataaccactgagatattttcattttctttagttctgccttttccaaaaattcatgtatgtggaatcatccaatgtgtggttttctgagcctagcttccttcatttagcactatgtgtttgagatttttctatgtgttacatataccactagttttttttatcgttgagaagtattctgttgtgtgatgcactatgtggtatattaccagtctaaaaacatttagtttattttcagtttggagtaattaggaacaaagccttattgtgaaatttcaaataacagattttgtgtatatacaaatttttatttttttcagataaataccttaaaagtggcattgctagtgcaaatgttaactatatgtttaacatcataataaattattttctgaagtgactgtaacatgtcccatgttcatgaatgatgcataaacaatacagtttgt

SEQ ID NO: 778817 - DNA, 634 bp, Homo sapiens
tttaaatattttccccagtgcatcactcatctttttattttcttaagactgaattttttgaatagcagaagtttttaatgtgttaaagtcaaatttgtcaattcttatttgtgtgtgtttgtgtgtgtgtgtgtgtgtttaygtgtgtgatttctaagaatttttttgcctaaaccaaggttaaaaaatttcttctagatattactctggaaaatttatagatttaggtaatgcatttaggtgtatgatcaatttgagctaatttttatatatgctgtgtgtgtgtgtgtgtcaaggtttatgttctgcatataattagatgattaaagaattactcatttattattatttttggactaaaacctctattttgctacctgttttctgtttgcttcaaatgtcctttgaccactttgcactctgcctgcatttggattgagtatattttacccaattattagctttcatttatactttttaaaatcactttctttattactgtcttctgtttggttagtttgctttcttttgttttaccctggctttgtggttgccctaggattcacaatataattttcgtataaatcactttctgtatttttgaagaacaatgtacatgttggtaaagtttaaa

SEQ ID NO: 778818 - DNA, 599 bp, Homo sapiens
tcccccaattactttaattgtaatcccctaattactttaaataaaaattattgtgctgttattacaatgctgtatgactttttagagtaatggtcaaaatacaagttctgaggtaaaacaatattacataaacacagaattacacttctgacaacttgagtctgatctttttttgtttttatttattaaaaaatctcagtaagaaacaaaatactgtattatccaaattctattcactaggcatatttagaggacttctttctttgaaaactagakaattcaagttgaataaggcacagaccccacaaaaatgtaagccattgtgtagtaggggaggaagagccacatataaaaactttgtgtataatatatgtaccataacagagatggggaaaaaagtagatgaattgcacagaccagaggatgtttaaatctaatgttgtgtttattatataagaacataatgtgtgtattcttatgcgtatataaggagagaacttggtactgaatattttacttgaactgagctttgacaggtaagtaaacttccttcaaggtaattgtgcatgagacactaatggacaataaaagagcaagag

SEQ ID NO: 778819 - DNA, 599 bp, Homo sapiens
tcccccaattactttaattgtaatcccctaattactttaaataaaaattattgtgctgttattacaatgctgtatgactttttagagtaatggtcaaaatacaagttctgaggtaaaacaatattacataaacacagaattacacttctgacaacttgagtctgatctttttttgtttttatttattaaaaaatctcagtaagaaacaaaatactgtattatccaaattctattcactaggcatatttagaggacttctttctttgaaaactagataattcaarttgaataaggcacagaccccacaaaaatgtaagccattgtgtagtaggggaggaagagccacatataaaaactttgtgtataatatatgtaccataacagagatggggaaaaaagtagatgaattgcacagaccagaggatgtttaaatctaatgttgtgtttattatataagaacataatgtgtgtattcttatgcgtatataaggagagaacttggtactgaatattttacttgaactgagctttgacaggtaagtaaacttccttcaaggtaattgtgcatgagacactaatggacaataaaagagcaagag

SEQ ID NO: 778820 - DNA, 599 bp, Homo sapiens
tcccccaattactttaattgtaatcccctaattactttaaataaaaattattgtgctgttattacaatgctgtatgactttttagagtaatggtcaaaatacaagttctgaggtaaaacaatattacataaacacagaattacacttctgacaacttgagtctgatctttttttgtttttatttattaaaaaatctcagtaagaaacaaaatactgtattatccaaattctattcactaggcatatttagaggacttctttctttgaaaactagataattcaagttgaataaggcacagaccccacaaaaatgtaagccattgtgtagtaggggaggaagagccacatataaaaactttgtgtataatatatgtaccataayagagatggggaaaaaagtagatgaattgcacagaccagaggatgtttaaatctaatgttgtgtttattatataagaacataatgtgtgtattcttatgcgtatataaggagagaacttggtactgaatattttacttgaactgagctttgacaggtaagtaaacttccttcaaggtaattgtgcatgagacactaatggacaataaaagagcaagag

SEQ ID NO: 778821 - DNA, 599 bp, Homo sapiens
tcccccaattactttaattgtaatcccctaattactttaaataaaaattattgtgctgttattacaatgctgtatgactttttagagtaatggtcaaaatacaagttctgaggtaaaacaatattacataaacacagaattacacttctgacaacttgagtctgatctttttttgtttttatttattaaaaaatctcagtaagaaacaaaatactgtattatccaaattctattcactaggcatatttagaggacttctttctttgaaaactagataattcaagttgaataaggcacagaccccacaaaaatgtaagccattgtgtagtaggggaggaagagccacatataaaaactttgtgtataatatatgtaccataacagagatggrgaaaaaagtagatgaattgcacagaccagaggatgtttaaatctaatgttgtgtttattatataagaacataatgtgtgtattcttatgcgtatataaggagagaacttggtactgaatattttacttgaactgagctttgacaggtaagtaaacttccttcaaggtaattgtgcatgagacactaatggacaataaaagagcaagag

SEQ ID NO: 778822 - DNA, 563 bp, Homo sapiens
tgagcaaggtcatctgattcacctatttttttcaagtacatttttctttaaagaaaaaatattgatttctacaagtttgaaaattacttctgtatggcctccaggtcttctcccagcattaacaggctatggatctgcattttagtcccartgaaccctgcttagacttactctacaatttggctagagtatccattatcacccaccatcagggataaagtcctgtgaacattttatctttaaatgaggcagaacaaacacaagtcatcaaatataatttcaataatgaaccttagcattttacatttgaatacttccccaaatggttgcaatttattaatgtcagattagagggctccattcatttttcctgttcagtaaagagacagttaatgaatgatggtgacttggtcaggcttctactgaatgagtctgggagtgtgtagcctcagtgtgaagggaggcaactaatgccagaagactattgacatgtttttcatccatgtagaatatgtctccttatacaacttttggctaatgagatggtaattatgtcatcaaga

SEQ ID NO: 778823 - DNA, 514 bp, Homo sapiens
cttatgatattcggagtaatattattatctccccctgcatatattaggaacaatatcacaaagggggtgtaaaccccttgcaatattgaggataatgtcatactccctctcttggatattaggagcagtatcacacggggggtgtacaccccctgcgatattgggagtaatatcatcctctycccccctacatataaggaacaatatcacagggaggatgtacacccccttcgatattgggattaatatcatcctctgttccactggatattaggaacaatatcacacgaggggtgtacaccccctgagatattgacattatatcgtctccccctgaatattgttaacaatatcacaagggggatgtacacctcttgctttacagggagtaatatcctcctctccacccacgatattaggagcaatatcatgggggggggtgttgtacatttcctgcggtattaggagtaatattctctcctcccctggatatgaagaacaatatcacaggggg

SEQ ID NO: 778824 - DNA, 619 bp, Homo sapiens
attcccctgcaaaatagttggtctttttccttgctggcatatttgttcacagacatccgcagaagctgttctggaaaactttctgaccctgaagcacctcaaaaattttgatcccgtgctccttgctgtgagtcatcccacactggagctctggaggactctctagcaggtcagctttggttggcttcagctccccatctcaaggaagtcagtgcagttttcctgcctgtgtcttatttaatatatgtctgtatcytctggctgtcttggaatgggggtctaaggggccattcagtttgacaccagaggcactgtctgtgtatagccagtcataatgaataactgtaaacatgagtagatgcctgcccaaaggggatgttagccgagaggtgtgtgaatctgcttggaggggcaacagctgaaatgtcagagtagtttactatctcctgggtagagacactgggggaatattctctgtctgaaaaatattataggcatcaggtcccagatttctcttcctgtggctgcacgtgctcatctttctgatttagaaactagcgaagctccgtcagtattacaagtataggagattcagactgagaaagaagtaaaaaatgga

SEQ ID NO: 778825 - DNA, 651 bp, Homo sapiens
ctctctcctgattggccaaggggatcctaaagaaaacctaaaagctatttcaggctatgaggggaagggaggtcaaacgtgcctcattataccccgtgttgttgaagtttaagcaaaattgaccagcattaatattaaaacagagatcctaagactgacaaaacagactatttgtagcaatgagatactgtactccaacctacccctgatatagcatcacacaaaatatagcaggccctgaaggaaatcaaagtattttatcccaaaatatatttctttgacatgtattgaaatggccctgcaaagccatcttttatggggaaaatttgcattttgtagagaattcccttccctttcyaggtcttctccttattcaggagagacttaactaagagactggcatcttttaaggtctaataagagactgttatcatctattctctctgaaccctgctacctggagtcttcatctacataataagaaccttggcttcccccttatcttcactcaagcatttctttctgctaacttcaattcttcaggcaaagcttaaccttttcaaccaattgtcactcagaaaatcattgactctgcctatgacccatagctaccctcttcaagatatcccacctttctgggccaaatcaatg

SEQ ID NO: 778826 - DNA, 549 bp, Homo sapiens
aagttgggaggtacgaaagttggggacacaggaggattctctacatttcaaaatggccccatctactggtaacattacacactttatatcactcccagaaacatcactttggctttatcctgaagtttagggatctctaagagcccaccactccccaaatctgctgagattgacagcagagaggaaagcctgatccgcagcagtaactcttctctcctccactccaccatgggcagacaacttccatcacyacctcttgtatacttcctaacagttttccatcccttagggacccccagttgagctcaaggctaaaaggaaaatgaaaatagtctttcttctgtgctagcggaaagagcgacacttaccttctgattcgccgcagaggtggagtagcagcactgacatcaaagcagccaggagcaaactcttggtacagcacatggtttttagctcaaagaacagatctgctcagtgttgagtacccagttctttgggagtgctgttatattctgacagcagcctgggatggccctatttatagcaaat

SEQ ID NO: 778827 - DNA, 590 bp, Homo sapiens
gccaccatgcctggcccaaaacattatttttttaagatatttatttcttagattcatagagctttatcagagttcagagtggaaaatgaaaatcgctgcaagtaatttaatcaagaagggatttaatacaggaaatctggccatagaaaattactggaagggctgaaaggattggttcataattggttctctgggaataattatagaaacagaaagaagtgacccaccatgagagctgtgctggaattaaraatattgattggagtaggtcgggcatggtggctcacgcctataatcccagcactttgggaggccaaggcaggtggatcacgaggtcaggagttccagaccatcctggtcaacatggtgaaaccccgtctctactaaaaatacaaaaacttagccggacatggtggtgcatgcttccagtcccagctacttgggaggctgaggcagaagaattgcttgaacccgggaggcagaggttgcagcgagcagagatcgcaccactgcactccagcctgggtgacagtgtgagactccatctcaaaaaaaaaaaaagaatattgattggagtcaccaactgctgt

SEQ ID NO: 778828 - DNA, 597 bp, Homo sapiens
ttttctgaggagaaattcaagcctgctgtagaaatttgcataattaaggaggagccaaatgttaattgccaaggcaaagggaaaatgtctctagggcacgtcagagatctttgcagtagcccctcccatcacaggactggagggctagaaggaaaaaattgttttatgggtggggcccaggcccccctactctgtgaagcctagtgatttgtcaccctgtatcccagctactttagtcatggctaaaagggtccaaggcacagctcaggccatggcttcagaggtgtgctgcaggggtggagccctcatgaagaacctctgctagggcagtgtggaagggaaatgtgggktgtgggcccacacacagaatccctactgggacactgcctagtggagctgtgagaagagggccaccatccttcagaccccagatggtagatccactgacagcttgcactgtgcacctggaaaagccagaaacactcaatgctagcctgtgaaagcagtgaaaaagggggctatacactgcaaagccacaggggtggagctgcccaaggccataggagcccacctcttgcatcagtgtgacctcgaagt

SEQ ID NO: 778829 - DNA, 597 bp, Homo sapiens
ttttctgaggagaaattcaagcctgctgtagaaatttgcataattaaggaggagccaaatgttaattgccaaggcaaagggaaaatgtctctagggcacgtcagagatctttgcagtagcccctcccatcacaggactggagggctagaaggaaaaaattgttttatgggtggggcccaggcccccctactctgtgaagcctagtgatttgtcaccctgtatcccagctactttagtcatggctaaaagggtccaaggcacagctcaggccatggcttcagaggtgtgctgcaggggtggagccctcatgaagaacctctgctagggcagtgtggaagggaaatgtggggtgtgggcccacacacagaatccctactgggacactgcctagtggagctgtgagaagagggccacyatccttcagaccccagatggtagatccactgacagcttgcactgtgcacctggaaaagccagaaacactcaatgctagcctgtgaaagcagtgaaaaagggggctatacactgcaaagccacaggggtggagctgcccaaggccataggagcccacctcttgcatcagtgtgacctcgaagt

SEQ ID NO: 778830 - DNA, 593 bp, Homo sapiens
taatttttactattgttaattattagcaataatcataataaattataattcaaccatgatcttcttgcttaacttttgttatttttcttatagcattctattcagggaagcacatatatagggtcattattgaaagtataccaaattttactgctaaatttgtcatacaaactgcctctgagaataagccttgcaccatgtatttaatagaatcattgaaatacggaaatatttgtgtgtaacaacttataatttcaaaagatgaacagaaagagcattatytaaaaacaaagagtatagattatacaatctgaggttaataatatattttaataattagtaccagagcaaaattattttttgcaaagatcagtggtgatttgcaaggctctaaagatgaacaatttaagatacttaggaataaaacaatgaaataaactccacaagtaaagtagtaaaatgaaatctacctaccatacataaagtagaaaaataagccacaagttgggaagaaaatatttgtaacccaaataaaccacaaaggagtcacaccaggatatatatttttaaaatccacaaactaatcaaaaaaa

SEQ ID NO: 778831 - DNA, 643 bp, Homo sapiens
tcccataaaatgaaatggaaaataattatctacaaagaattgaaagactttaattgtgtccctgattcttcctttacataaaaaatttggcacacaccctaaataaggagttggggaggaagtaactttctgttccaagcagtgagacatatgtggggtcttcccctgaaggtgcagtacttcagatctctgagtaattgaaggactggcaggcagcatgggtttccattaggttcatgtgtcacaaacttctaatgccacttaaaatcccatcctttccttcttccactttcttagaatcttcccagtggtgctgaccatgacataagccagccttacatcaagctcagcaatgtgagraagctatgcactgactcaagaacagtgactttgcattatttatgttactaaatgtaaaggcgaccaaaaaaggaaggtcactaaactttttttatttgaatattgaaagtatcaagcatagtgattaagtgttttaataataacaatcactaattctaatatggaactcatgaggaaggcattattctaagtactttatgtatgttaactcagtaattctcttaataaccatagaaggcaggtacactcttcttaccccattttagagatgagcaaactgaga

SEQ ID NO: 778832 - DNA, 637 bp, Homo sapiens
aatgtgtggtatttggttttctcttcctgcattagtctgctagggatgacagcctccaactctatctatgttcctgcaaaaaacatgaactcattcttttttatggctgcataatattccatagtgtatatgaaccacattttcattatccattctgtctttgatgggcatttgggttgattccgtatctctgctattgtgagtaatgctgcagtgaacattcatgtgcaagtatctttatggtagaatgctttatattcctctgcatatatactcrgtagtgggatcactaggtctaatggtagttccacttttagctatttgaggaattgtaatactgctttccacaatggttgagctaatttacactccaccaacagtgtacaagcattcccttttctccgcaatctcaccagcatctattgttttttgactttttagtaatagccattctgactggcatgagatggcatctcattgtggttttgatttgcatttctctaatgattcattatattcagcatattttcatatgcttgttggctgcatgtatgtcttctcgcaaaaaaaaaaaaaaaaaaaaaaaatgtgttcatgtcctttgcccactttttaacggggttgtttttttcttgta

SEQ ID NO: 778833 - DNA, 618 bp, Homo sapiens
gatgatttagggtatctggtggaagaaatttctaagcagtaaagcactcaagtggaagcagagcataaaagtttggaaaatttgcagtctgataatgcaatagaaaagaaaaacccattttctggggagaaatgcaagtctgctatasaaatttgcgtaagtaatgaggagccaaatattaatcaccaagacaatggggaaaatgtctccagggcatgtcagacatcttcaaagcagtccctgccatcacagatctggaggaggcctagaagggaaaaatggttttctgaacccagcccagggtccccctgctctgtgcagcctcagggcatggtgctctgtgtcccagctgcttcagctccagccatgactaaaaggggccaaggtacagctatggcctttgcttcagagggtgcaaaccccaagacttggcagcttccatatggtgttgacgacactgtaggtgtccagaagtcaagaattaaggtttgggaacctctgcctagatttcagaggatggatggaaatgcctggatgtccaggtagaagtttgctgcaggggtggagccctcatggagcatctctgctgagcagtgagaaagggaaatgtagggttgg

SEQ ID NO: 778834 - DNA, 642 bp, Homo sapiens
tggtatagaatgcatagataatacattttctttatcctatcaaacattgatggacatgtgattgatttcatgagtttactgtgtgaatagtgctgcaataaacaaacgagtgcagatatcttttttatacaatgatatatttttatttgggttgakactcagtagtgggattactgaattaaatggctgttctattttcagttctttgagaaatctctatagcgttttccatagaggttgtacatccaaccaatagtgcataagcattccctttcttcttcatccttgccctctgttatttttgactttttcatagtagccattctgactgctgtaaaaatggcatctcattgtggttttaattgcatttctttgattattagtgatgttgagcatttttgtatttttttttggccacttgtatgtcttcttttgaaaactgggtggggacacagcaaaaccatatcaaagaatgtgtgaaagagaccctacctatagaaataagaatagaaataacaaaatagtgtgttttggaaaccaagagcatatcaatttttaaaaagaaagggggccagtcatggcctttgctcatgtcctttgctcacttttatttgcccatggtaaaatttcccttttattcca

SEQ ID NO: 778835 - DNA, 626 bp, Homo sapiens
aactacccaccatcaatcaaggtccaaaataggtgagtacagtataataagatattctgagagagagagagagagagagagagagagagagagaaagatttcattcacaaactttttattacagtatattcttataattgtattattattagttattgttaatctcttattgtgcaaatcattctaatgatcttttacaaagaacagcaaaaaaacaatactgaagcttagaaaaaagaagacataaattaatgggaaaattaccaactccaaagattggaaaactctatatkaaagagtctgtaattatctttaaataaatctacaaattaaatataaacacaaagtcttacctgacaatttcattgaagttgacaaaagactaagaatttcaaagacaaatttgaagaggaacaagaaggggagggggcatattatataaagcaatagtatttaagactgtctggtattagctcagggtattagctcaagcaagtagaagtgatagctcaaaagtagatctactcacatatggaaaccatatatgacagatgtgtgagaataaacacaccattcaatacagagggctggggaggggaggacatggagcaagatggccaaataca

SEQ ID NO: 778836 - DNA, 639 bp, Homo sapiens
gttaacgctaatggactccactggcattcatggctaattacttaagaaaagattaaaagacaaccgtcaccatttcatacttcgcattggaatcatacattgtaaagcatttgtttcttatttgtctcttaattacaattcttaccactaggtggcattcacccaaagttgtatctccctgggaaagtgatgcagaggctgcaaattggcagggcctggacgtggctcacaaatatgctttgattggyccattgtgttttcaaacatttggatgactggtcaatatttaagattagagaattttaccctataaaattgtctttcttgcttttcttgacaaatagaagacttggcaatactaggtctttctccacctgccaacaatcacttgatgggacaaggctgctcccacagagggaaaatgcactcttcatatcaggccctgctgcttcttcgcttcttatgtgctttaattgattatatccctgcttggcccctgcaggtattcaacttggtgacccttgcattatagtttcaccagaacttttgagcaatgaccatttattctaaaacactaacaaaaatataatttcacattggagtgcctttcagaaatgcagatgtaaagttaaaacagaa

SEQ ID NO: 778837 - DNA, 642 bp, Homo sapiens
cctctcactttaataagattattttttgtttacatttgtatgtttttgagatgctcattatgagatttaaaaatctttctatttctaatgtactatgtatgagtcactatgaatgtgtgttgaattttaccatgcttttcctgcatacattgagaagactatataatttttttcttgttaattgcaaaattacactgcttgattgtcaaatgttaaaccaacatcatatgctcagaataagtccttcttgcacatgatatattatcctttttatatatagctggattgtgtttgcaagtgttttgtttagaatttttacctaagttgaagaaagagccttgtctttaattttcctttttagaaaagagaatgtctttgttgggttgtaggaatcaagaaaatgtttagctcttaagtaagttagaaggcgtttcstcttttttattttctggaagaccttgagtaaaattgatgttatttctcagtgtgtgaagggtttaaatttcaaattgaatttctttaatagatatagaggtatttataacttcctttacttcatatgacaatagcaattgtttttctagaaatttgaccgttttgaaaaataaattttaaaattggtatagtgttctaaataatatc

SEQ ID NO: 778838 - DNA, 538 bp, Homo sapiens
tattagtttcctcatcacagaatgggaataaaaatatcagttggtccttggtaaaggctgattgtttccccttctagtttcttcttttccctttgagcactgaatagcattgatttgaaaataaggctccaaacaaaatgtaaaataattgaaacctaagaattgtatctttcaaatgatgtagcgtaattgctaatctttatgttttataagatgctggagtaaaagtgatgtcaaggcctgctaaatccttggtctggctgtgaatttttggcactgatccagactaaatatagcaagtcttgcttyttgggtcaatataatttctaatctctaggttgaatgggcaaaccttcccagacaagatttaattcacaaatccatttaggtagatactggatatatctaacaatgcatcaccaagtaataacaggtcatcagcactagcttggctaactaaaaagaaacttgcattaggaatccagcaatctcactaacaaaccctgctggggattgactaaacataactgttaattga

SEQ ID NO: 778839 - DNA, 538 bp, Homo sapiens
tattagtttcctcatcacagaatgggaataaaaatatcagttggtccttggtaaaggctgattgtttccccttctagtttcttcttttccctttgagcactgaatagcattgatttgaaaataaggctccaaacaaaatgtaaaataattgaaacctaagaattgtatctttcaaatgatgtagcgtaattgctaatctttatgttttataagatgctggagtaaaagtgatgtcaaggcctgctaaatccttggtctggctgtgaatttttggcactgatccagactaaatatagcaagtcttgcttcttgggtcaatataatttctaatcyctaggttgaatgggcaaaccttcccagacaagatttaattcacaaatccatttaggtagatactggatatatctaacaatgcatcaccaagtaataacaggtcatcagcactagcttggctaactaaaaagaaacttgcattaggaatccagcaatctcactaacaaaccctgctggggattgactaaacataactgttaattga

SEQ ID NO: 778840 - DNA, 646 bp, Homo sapiens
agatgggtgatttctgcatttccagctgaggtacctagttcatctcactgggactggatgggcagtgggtgcagcccatggagggctaggaaaagcagggtggggcactgcctcacccaggaagcgcaaggggtcaggggatatccctttcttagccaaaggaagccatgacagactgcctggataaacgggacacttccacccaaatactgtgctcttcccatggtcttagcaaccggcagacaaggtgattctctcccgtgcctggctcagtggctcccacgcccacagagccttgctcactgctagcacagcagtctgagatggatctgtgagacagccccctggctggaggaggggtgtcctccattgctgaggcttgagtaggtaaacaaagccacctggaggctcaaactgggcggagcccactgcagatcracaaggcctactgcctctacgcttcacctccatgggcagggcatagctgaataaaagacagcagacaacttctgcagacttcaatgtccctgtctgacagctctgaagagaacagtggttctcccaccacagcgtttgagctctgagaacagacacaatgcctcttcaagtggatccctgacccccgtgtagcctaactcgaagacac

SEQ ID NO: 778841 - DNA, 632 bp, Homo sapiens
atgtctaagattgttaccagatggagaatcttgactatgaatcatccaggttattggcgcattgaacaaagaattgggcaaacacaaaccaacagaagaaagtgtaaattcattgatgcaaaagtacattctagagtgggagtgggctcaagcaagcagcctgagagccctgattgtaatgtaccttagtttttattaaactaaaggaatttggtaacccttctaggtactcattagaggcctccaattggttataccctatgtgagtgatgtcttgtcccatggccaatcagaggygtttcacctttgtgacataagagaaaagggagttttgtagagggaagggtctttggcccccttagcatttgggtgtggaggggtgtggtttctcttctgaataacttccaagaagtcacccttagattggccttagactccttgtctccagaccgtcttctgcctcaagctctgaagggggagggtaactgctctgataccgtttggctgtgtccccacccaaatctcatcttgaattgtaactcccactattcccacgtggtatagaaggaacctggtgggaggtaattgaatcataggggcaggtttttcctgtgctgttctcctaatagtga

SEQ ID NO: 778842 - DNA, 611 bp, Homo sapiens
caaattcacccataaactgtgatgcaataacggacggacaattactataacatagagaaaaatgggtctagaagaagctgagaagagaggcagctgcctcagcctggtggacagtttcatggagggcttcctggagaaggtgacacccaagctgagtcttttaggttaagtgaacacctgaagaaatgggcaggggcaggtattccaagcataggatacactgtgagaagtgaaaccrccccttgatgctcctctgtatcattaatccagtgtagtgccccatacattgccattcaccataggctcacctgtacacatggagatcaccccagagtctgcttgcttgccactctccaccccaacccagttcctgactcttggatctggcttggattcaacatctcgctctggcccctgtagcctctgtgcctgtatcagagttctctggtcaggaacctgtggttacaatcagtgactcccatcagggttctccctaccagcttccttccctgccctgcttccttgcgtggttcaccttctgtagttcctgctcccttgagctgcatctctagcttgggctcaccagttagcccaaccagctacctccaatt

SEQ ID NO: 778843 - DNA, 654 bp, Homo sapiens
tggtctgtgtgcttatttttatatcagtatcatactgttttggtgactatagccttacagtctaaagttggttaatgtgatgtctccagatttgttcgttttgcttagtcttgctttggctatgtgagcttttttggttccatatgaattttaggattgtttttgctagttctgtgaaggatgatggtggtatttggataggaattgcaaggaattttagattrcttttggcagtgtggtcattttcacaataatgactctacccacctatgagcatgggatatgtttccatttgcatcatctatgatttctttcaacagtgttttgtaattttccttgtggaggtctttcacttccatggttagctatattcctaagtattttattttagcagctattgtataaggggttgagatctatgatttctcagcttggttgttggtgtacagcagtgctaatgatttatgtacatcagttttgcatcctgaaactttactgaaatcatctattagttttaggagctttttagagatgaatttttagggttttctaggtatacgatcatattggcaaacagtgacagtttgacttcctctttacccatttggatccaagagattaaatcctttgtctttagctaccagggctggtaga

SEQ ID NO: 778844 - DNA, 654 bp, Homo sapiens
tggtctgtgtgcttatttttatatcagtatcatactgttttggtgactatagccttacagtctaaagttggttaatgtgatgtctccagatttgttcgttttgcttagtcttgctttggctatgtgagcttttttggttccatatgaattttaggattgtttttgctagttctgtgaaggatgatggtggtatttggataggaattgcaaggaattttagattgcttttggcagtgtggtcattttcacaataatgactctacccacctatgagcatgggatatgtttccatttgcatcatctatgatttctttcaacagtgttttgtaattttccttgtggaggtctttcacttccatggttagctatattcctaagtattttattttagcagctattgtataaggggttgagatctatgatttckcagcttggttgttggtgtacagcagtgctaatgatttatgtacatcagttttgcatcctgaaactttactgaaatcatctattagttttaggagctttttagagatgaatttttagggttttctaggtatacgatcatattggcaaacagtgacagtttgacttcctctttacccatttggatccaagagattaaatcctttgtctttagctaccagggctggtaga

SEQ ID NO: 778845 - DNA, 657 bp, Homo sapiens
acaaaatagacttcaagacaaaaaccataagacgagacaaagaaggtcactattaatgataaaatgatatatttgacaaaaagatataacaattttaaatatatatgcacccaacactggagcacccagatatataaaggaaatattattagagctaaagagagagataggtcctaatacaataatagctgsaaacatcaataccccactttcagcattgggcagatcttccagacagaaaatcaataaagaaacatcagatttaatctgcactattgaccaaatgtatctaacagatatttacagaacattttatccaagagctgcagaaaacacattttcctcagtacatggatcgttctcaaggatagaccatatgttaggtcagaaaacaagtcttaaaatattttttaaaaattgaaataatatcaagcatcttctctgaccacaatggaataaaactagaaagtaataactagaggaattttggaaactatacaaacacatagaaattaaacaatatgctcctgaatgaccagtgggtcaatgaagacattaagaagggaattgaaaaatttagtgataatggaaacacaacatacccaaacccatgggatacagcaaaagcagtactaagagtgaagtttatagctataa

SEQ ID NO: 778846 - DNA, 594 bp, Homo sapiens
tgcctagagtattgcaggaggagtaaggataccaatgtgctcagaacagagtgacaggggaaattaccaagataggtctcagagaagacaattacaagatctggtatttactctgcatgacacgaaaaaacattgcaacattttgagcggaatgacagtatcacatttatttttcaaagactatctgcaatagaatcaatttttctggcgtaagaatcaaacaagagcattaattaattggcagcttattacagtaatccaagtaataactcatggtggkttgttccaggattatagcagtggaagagataaagaagggtcatattttgtttatattcttaaaaacagactcaatacaatttcctgatggactgaacatggattgcaaagggcagtcaagaatgactccattgttcttaatctatacaactgtaaaggcagttttagtaaactgaagtgggggctgtggatggagcaggtttgggggtgatggtcaaaaagtcagcttttgatttattaatatttaggtaataaaacagccattcaaatagcaaagttaataatgtagttgaatataacagtctagattttggt

SEQ ID NO: 778847 - DNA, 636 bp, Homo sapiens
aatgtatataattattacatagtatccagaacacatttctaataaaaatcttggcaaattaatagtagaagagcatgtcttgatctgatgatgaacatgtaagaaaggcctacagataaaaatatgcttaagaataaaaaataaaatattttcttcctaacatcagaattaagacaaggattctagcttctcagcatttctattcagctttgtagtagagtactagctagtgtaataatcaagaaaataagtagcaggcatcaagtgtaaaagrtagaaataacattgtttttatttgtggattgaaaaaatgtgatatagcatcaaaaaccaagaaaactaacaactgtgtttatcaaggttacaatattcaagaacaatagacaataatcaattgtatctttacatattgtatatactaccaaaaagactagaaattgaaacttaaaagtaatactaattaaattaccatcaacaatataaaatacttaagaataaatctctttcaaatgtgaaagaccacatctactcatggtttaaaaaagaaaaaaaaaaaactcttaatgaactaggaactaaaaggaagttccttaacttgataaagaaatctgtcaataaaatagaaaaattcaaaca

SEQ ID NO: 778848 - DNA, 679 bp, Homo sapiens
tgtctaatgccttgagctgaagaggccagtggctttggtttatactggactcagggtgtgggcctgggtgagggtttcaacaggcaggaagagaattgtgctttgaatatccttccattgacaagagagagagtacctgggttttcttattggttgtccagatgcgacacaagaaggaatgaaagacagctggggattgaacactgtcactggtcaagcatccaaatgttgtcagactcttaattataataacctaaatctataacttcctagctgtggcatctcaagtaaatcacttatttttactatataattggcatagtagtaatctctactgcatagatttgtctcacgtaacttcatatataaaattgtcatgatataaatttttattacatagaatagttacaragattagaggaattatgaatatatgtatcttttagaaacttctctggaacgtagaatccagctcagagatggttgttctgcttgcagaaccattacaaactagtctctatgctaagcagagtatgcgccaattgcctgtcatcaagaactgtcattgtcattggaaaggaagctaaaaatagctataaggttagtgctataaatttcatatataataaatttatatgtaacataaattatttatgctatatatatatatttatacatt

SEQ ID NO: 778849 - DNA, 679 bp, Homo sapiens
tgtctaatgccttgagctgaagaggccagtggctttggtttatactggactcagggtgtgggcctgggtgagggtttcaacaggcaggaagagaattgtgctttgaatatccttccattgacaagagagagagtacctgggttttcttattggttgtccagatgcgacacaagaaggaatgaaagacagctggggattgaacactgtcactggtcaagcatccaaatgttgtcagactcttaattataataacctaaatctataacttcctagctgtggcatctcaagtaaatcacttatttttactatataattggcatagtagtaatctctactgcatagatttgtctcacgtaacttcatatataaaattgtcatgatataaatttttattacatagaatagttacagagattagaggaattatgaatatatgtatcttttagaaacttctctggaaygtagaatccagctcagagatggttgttctgcttgcagaaccattacaaactagtctctatgctaagcagagtatgcgccaattgcctgtcatcaagaactgtcattgtcattggaaaggaagctaaaaatagctataaggttagtgctataaatttcatatataataaatttatatgtaacataaattatttatgctatatatatatatttatacatt

SEQ ID NO: 778850 - DNA, 496 bp, Homo sapiens
ttaaattggtacaagtagaatggggtgctgctataagaacaccaaaaatgtggaagcaactttggtactgggtaacaggcaaaggttgaaacagtttggagggctcagaagaaaacaggaagacgtgggaaagtttggaacttcctaaagacttattaaatggttttgaccaaaatgctgatagtgatatggacaattaaattcaggttgagatggtatcagatggagatgaggaacttgttggaaactgcagtagaggtcacccttgctatgttttagcaaagggagtggtggcatttcrctcctgccctagagatctgtggaacattgaacttgagagagataatttaggttatctggtgaaagaaatttctaagtagcaaaatgttcaaatggaagcagagtataagagtttggaaaatttgctgcctgatgatgcaacaacaacaaaaaagcccattctctggggagaaatttgagaggactgcagaaattt

SEQ ID NO: 778851 - DNA, 563 bp, Homo sapiens
tcataacagtgtgtgagatcagaaaattcctcctgctccccccgccaccccatttacaggtctcctatagagagaagcgttgactggggacactcgctgcttgcgttttgctggtagctgggctggaaggtccacaaaggttcacttcatgtgagtggcacctcagggctcttccacaggcccttctctccatgcagctctcttgggcttcctcacagcatggcggggtttttcacggtggctggcttccaagaggaagcacttcaagctgggtgagagcagatgcctcaaatctctgcagcytcagcctcggaagtcacacagcgtcgcttctgctgcatcctgttgatgaaagccagtcctggagtcagcccagatccaaggggaggaggaaaagactccaggtcttgctgagagtaatgactaagaatctgcagccatctccaatccaccacgcccatgcaagagacgggagtgatatttgcaaccaagatggtgaacggcagcagattggtcactgtttccagttattcaccatcccctcagtgagaggattatccatc

SEQ ID NO: 778852 - DNA, 619 bp, Homo sapiens
tgaggggactgtgagagaacggcaggtccccagtgctctctggctcacaggacagccctcccgcctccgcagccgccttgattccaccattccccagatggaaaaactgaggctgggaggcttgtttacagtgtcagggccccgagcttggcccctgggacagcccctcaccccacaaccgccactagctggcaaccaggtggaggaaagttctggtccacgcccagccttcccacctccctgatctctggcctcagtttccctggttgtaaagcaaggatccccacggcatggtgtacgctgcagtggcgggggagttrgggggctccatggagcttctcacaccccagtgttgatttaagattctctaagcgcagcagaagcgcggtgaggcgaatgtgagagggccgggactggagatgctggggatggggtgggcatacttaggagaaggggccccacaggtcccggagcggccaggtagctggggcaccacccaggccccctcaggcgcggaaaccttcctgctacctggtatcctgcctaccccccccagctcggccgccctggggcctctccggctccagctcttggctgggcctcggtgcagcacaagccc

SEQ ID NO: 778853 - DNA, 562 bp, Homo sapiens
aaataggagaatcccatgttaggaagtactaggtaatctttactgttggttggatattccaagttcacaacataaaaataaatttaggctgcacgcagctgctcacgcctgtaatcccagcactttgggaggctgaggtggtaggatcgcctgagctcaggcattggagactagcctgggcaacatagcaagaccttgtctctactaaaaataaaaatacaaaaattasccaggtgtggtggtgtgtgcctgtagtcccagctattcaggaggctaatgcaggaggattgcttgagcccagtgacagagcaagactggaccctgtctcaaaaaaataaaaataaaaaagttttggacccaacatagtaaagatgtcgattctcctcaaaactgatctataggtttagcagcattaccatcagaatcccagcaagattcttttgtagatagaaaaaaagcttattctaaaatttatgtggaaaggcaaaggaactagaagagctaaattacttttgcaaaactataataaagtgagaggaatcactcctacccaacgttaaga

SEQ ID NO: 778854 - DNA, 616 bp, Homo sapiens
ttctttcttctttcctttccctcagacttagaccagaacctctttgtcggtacaggcagacaccatctgcttccatcctttcccatgaccatggcaaatgttgacattgcaaaggcagattctgaccacggaattctcatctctggaggaaggtatccccatcacagagagttgtgacgaggttgagagaatgtctctaagagccgagtgcagtaccaggcagatagtaggaaaaaaatgttggctgctgttgtttttgctgaagctgctgttgctcttactaaaagtagaccttagcaagcctgtatcctgcagttgagatccagataaggaaagctgcttacctggaatcacaaaatagctggtcccctgaccccttctttacttacaggagtccccgcatagacctctgaaccatggaccgcgtctggtggttgtactggccacatggcatcaaarcgtattttcatgcaagtctgtcttccgtactggactctgagctccctaagagtaaatgctttgtctatttctgtctgtttccccagcagctagcaccatgccttgcacatggtggcatctcaatacctatttgttgaattacatgcaaagtaaaaaa

SEQ ID NO: 778855 - DNA, 641 bp, Homo sapiens
ctctttagtggtgaaatagtactgctgatcatctcaaatcagtagcacatttcttaatcattcctaaaaagttctccacgttttcagtttctgagttttcagaaacatagttaacattctgaaaaaaacatgtaaatgtcatatccagttttgtaaaaacacaatttaaaggatctaaatcttacatatcaatgtatgcagataagatactcaggggcaaaatggacytaatgctcatctctggctcagcaaagctcatgaaaaggtttagttttgattctttaaattagatgaaattctgaaggaaaatgtgctctcattggcaaatagaaacattattaaaaagcatgtgagtggctagttccacacaatagtcaggaaaacagatagttgccttttgtgtttcagactgaaaccacttcaataagatgagcatttcctactaaaatactagttctcgtgccaataagcctgggtctagaggattttcaaaggttatcatttcattccagcaaaaatattatccacttcttctattaggtagacattgaaagtgattgttgtatctttggattaagctatattaaaatggaagcagcagctgaatgggttaggtttagaataagccaatattagaaaga

SEQ ID NO: 778856 - DNA, 623 bp, Homo sapiens
aaagtactatgtacaaggcacattaaaagtgcaagttctctattagtattaatccctttaatctccacaagaaaactatgacataaatgctgttagaatcattctcattacacagtggaggcacagacacttaaaggcataaccaggcagccagcccactttagagagtggctctaaccagccatgctattctgtctctaatgcaagtccgtcttgcataccaaaggagagaaaatctttctaggtgaaaatattttattcttttttcaattttgaattttgtacttcttctcagaacctcttttttctcttttataagcaggaaaatgagacccaggtaagattaagaccgtcttttgccaaatgctactctataaatcagcagccagtggggacttggacttagatgggaggtctgtgctttagaaagaaatctattagctgctaagtctctgggactgacactatactgccatgacatagctgastgtttgaatttagcaggttctcctaaaatacaatcattgtaatctattaagagataagtttgaagacaaacactttaacaacattgaacttcagttcctctttagcttttttagctaacaaaaattttcttatgt

SEQ ID NO: 778857 - DNA, 576 bp, Homo sapiens
aacatttttgtagatgtggtattttttcttcttatcattactgatatatgattggttcttggaaaaggagatcaaaacacacatattaatgttttgtatatattaccaaattgctttccaatgagttttatcaaggtcataaatataaatatatcaaaaaccatatcaaaaacagtaatgtgctataattcattcaactcttccttctcctatcattatcattataatcatcatcctattattattattctagctatactataattataccataattatataatgattgaagatttaaaaagactttggtatgttcttttgtcctttgtaagttaaaaaatagttayagtttctactttttgaattatctgtcaatatctttcggaatctatgtaaaataagaatgtgtgtgggagtttatagctcttgttctttaatggactacaaataagccttaatcattatgcttcacaattttactcctaaacttgcatacctacactttataccccatctaaatgtctaattgcctgtctaggaatcaaatatcttcctgtaggatcttgtctcttgtca

SEQ ID NO: 778858 - DNA, 633 bp, Homo sapiens
caggtaaaatcataaccctagttaatacacttttaaaaggttctgcctatgacttcttttttttcagtttttaccagccttgtatttgtccttccctccagccaaactcaccttcttttttttttttgaaagataattcagtagttactgcccggtacttttaaacaatttgttctttttgataaacccaacactcctccttcattaacaaacacgtgaartataaacagtgtatacttcctttactagtatgtatgtttgtgtttttacatttattcctaaagccagcattatttttttaatagtcaaacattggaatatttccatcaattcaggaataagaaaaaaatatctattttctttacgatatttaacattgttatagaagtactggccaaataaatttcaacgtagaattaaataaaaggcacaaatattggaaaataagatttaaacagttttatttgccagaaatatgattttatacacattgaatccaagagcatcaaatagccatcagaactaaatgagaattagttatttaattggttaaagattaacatgtttaaatccacaggtttcctttctgaaaattataataatttagaaaatattatgaatagttatgacatt

SEQ ID NO: 778859 - DNA, 564 bp, Homo sapiens; identical to SEQ ID NO: 729112

SEQ ID NO: 778860 - DNA, 607 bp, Homo sapiens
ttttcctgatctgatggtaggtggtgtatacattgtttcttttaagaaaactttccacctataaatctataagagggaaaaagatgaagattaaagcattttttcccttctccaactctctgagacttgctgtgctacaaataaagctcaaaagatcatttttaaaagtgacaggaacataaaggggtagcgggaaaacttagttattttgtgaaatgtactgaaagtcatattttgagaatgtatctgttgtttagaaccctgcatttcacttcaattacctttgytttgatttattaagaacaactttctaatgattttcccatagtatttttggctcctgttctatctgtgttttatggaacaagttcactacgttaggctaattaagacataaattttaattaatcaattttaacaaaaccttcttgaatttgcctgtgaagtactcaaggcataaattatgattccaatttagaaaatgtaaaacaaaaataaattaagtatgatcaaatttattcatacatgcaacacatatttattgaccatttgctatgtgctaggtgctttcttggtcctatggcttagaagactgagatcaaattca

SEQ ID NO: 778861 - DNA, 574 bp, Homo sapiens
tgagtaacagtcggctccagtattattacgtcacatgataactatgtagttttctccatacctgggaaacatctcttatacttgatatgggaagtgaaaataatttcaacagatacagattttagactgtttaaaatcactttgtatgagttaagaggataatctttaaawacacttccaattcaggattaagccccaaacttcaagagtttcatttgattttggctgtttctcagttcattcaatatcattagctgtgcttagtggcagattcttaagaagaggtcttacttgcatgtaagtcaattgttttagagaaaatattaattaaaataagtggtgagtgaatttaaatcaagcagggccatgcctctattctgagtttaaatccctgactcatttttttctgtcttcctggatacaatatagaaatatgtatttgataaatatctccatccagaaaaatgaattcaaaatcacatttagagctttgaaccaaatctttcacagtaacagatgctctttcctgaaacaagcttattccacccagtgtatttaatagcatcacttttac

SEQ ID NO: 778862 - DNA, 574 bp, Homo sapiens
tgagtaacagtcggctccagtattattacgtcacatgataactatgtagttttctccatacctgggaaacatctcttatacttgatatgggaagtgaaaataatttcaacagatacagattttagactgtttaaaatcactttgtatgagttaagaggataatctttaaaaacacttccaattcaggattaagccccaaacttcaagagkttcatttgattttggctgtttctcagttcattcaatatcattagctgtgcttagtggcagattcttaagaagaggtcttacttgcatgtaagtcaattgttttagagaaaatattaattaaaataagtggtgagtgaatttaaatcaagcagggccatgcctctattctgagtttaaatccctgactcatttttttctgtcttcctggatacaatatagaaatatgtatttgataaatatctccatccagaaaaatgaattcaaaatcacatttagagctttgaaccaaatctttcacagtaacagatgctctttcctgaaacaagcttattccacccagtgtatttaatagcatcacttttac

SEQ ID NO: 778863 - DNA, 559 bp, Homo sapiens
  misc_feature 156, 157: n = A,T,C or G
ttgctcagcttcttgaatctgtaggtgtttgtctcttgccaaatttgggaagttttcagttatcgtttatttgagcacatttttagccctcctttttctgatgaaatgtacgttagatctttatttatttatatatatttaaagagacggagccannctctgtggccaggatggagtgcagtagcccaatcttggctcactgaaacctctgcatcccgggttcatgcgattcccctgcctcagcctcccaagtagctgggactacaggtgtgtgccaccacatctggctaatcttttttattttagtagagatgggggtttcaccatgttgaccaggatggtctcratctactgacctcatgatccacccacctcggcctcccaaagtgcgggattacaggtgtgagccatcgtgcccagtctagatcttttattatagtctcacagatctctgaggctctgttcaaatttttcccagtcccttttctctctgttattcagactgggtaatttatgttgttttgtcttctagtacattgctttttttacccatctgttc

SEQ ID NO: 778864 - DNA, 595 bp, Homo sapiens
tgttgttcaaaaggagagcagagcgcctcacttggaagctactgtaggagggtagagggctgtgtctgtgtccaaagggtgaggtttgtgcagtctgtgccacatgtataaaataggactgaagaggtgtgagtgctgtgttgcatttgttaatgctgcctgtgttttgcttttgcataacaggttgaaatagaaaaraagtggattaaaatcgatggagaagacccagataaaattggtgactgcataactcagtaggagtagcaagagtttatgatgacagcccacttgtcaaatatgtaattcaccgaaaccacaccaagtcctgctactgtagagtggaaatgacttctgaatagcggttttaggacaggtctgatggctgtgtttagagaagtttagacctaaaaccgaacaatctgtattttttgcttttcatgtgtttttgtcctaggggttcgatctaaaatgtttctataattcgtgtgatgttttgcttcctattgaaactcaaaggcactgttactcgttgtgtgaccccgcagccagtatgatttttgattactcagtggctgactgttttgctctctggatt

SEQ ID NO: 778865 - DNA, 607 bp, Homo sapiens
tcatgtgtatttgctttttgttaaagatccccagggattgaaacacaaattgtcaagaatgatccactgcatatcagcttaatgccaggggcttaattatttttgtccaacaaatctcttttctggtatgttacccctttgacttgtttcattgtgcattaacagaaggaactctccttctatgtgctcacatcttagtatagtctcctgggataacccattctctaggccaggcatggtggctcacgcctgtaatcccagtactttgggaggctgaggcagacggatcacctgaggttcaggagttctagaccagcctggccaacatggcgaaaccccatctctactaaaaayacaaaaaaaattagccaggcatggtggcaggtgcctgtaattccagctactagggaggctgggccaggagaatcacttgaatccaagaggtgtaggttgcagcgaaccaagatcatgccattgcactccagcctggttgactggagcaaaactccatctcagaaaaaaaaaagaaagaaacaaaaaaagaaaacccattctctcataagctaaatctcttcctgcctccaaagtttcctagtccgtttaatgc

SEQ ID NO: 778866 - DNA, 588 bp, Homo sapiens
caaggctacagtaaccaaaatggcatggtactggtaccaaaacagatatatagaccaatggaacagaactgaggcctcagaaataacaccacacatctaccaccatctgatctttgacaaacctgacacacacaagcaatgggggaaaagattccctatttaataaatggtgttgggaaaactggctagccatatgcagaaaactgaaactggacctcttccttacaccttatacaaaaatcaactcaagatggatcaaagacttaaacgtaagacctaggaccataaaaatcctagaagaaaacctgggcaacctgggcaataccattcaggacataggcatgggcaaagacttcatgtctaaaacacgaaaagcaatgggaacaaaagccaaaatwgacaaatgggatctagttaaactaaagagcttctgcacagcaaaagaaactatcatcagagtgaacaggcaacctacagaatgggagaaaagtttgaatctatccatctgacaaagggctaatatccagaatctataaagaacttaaacaaatttacaagaaaaaagcaaacaaccccatcaaaaaatgg

SEQ ID NO: 778867 - DNA, 641 bp, Homo sapiens
cctgtcatctcaccactttgggaagctgaggtaggaggatcacttgagtccaaggagctccagaccagccttggcacacacaaaaaatgaaaaattagctggttgtagtggctcacaccagtagccccagctacttgggaggctgagtgagtcgtgaatgttccattgcatttcagcctgggcaacagagcaagaccttgtctcaaaaataataataataataataaattattttctctctytttttttttaaagtcctactctctaatttagagggaaaaaaatctcctagaacatgttcgtgttagaccatctagaatgctaggcagggtttctgccttcaaagagattgtcttataatgtcgtgaatcaaactagaattcacacaagagtgtcaggagagaaggttaggccaataacagaaatgtggaatgcaactcgtgctatgtaatacaatagtggggcttatggttaactggaaagagcaggcttacctaaaacacaaagccttcctgctgaccttttatggccttgagtggttttacaacctccattctgacccaatcagtatccgctagtttcccttcccccagagagggtagtaacagatcactgaccaggaagggagtaaaataacagaa

SEQ ID NO: 778868 - DNA, 632 bp, Homo sapiens
ctactgtctcaaaaggaaattttttagtgaaagaatctcgacgtcctctggccctccagctttccttgtggaattaataaactgcagatgtcttcaaagtgaagaaaaagccagtcatgctcctttgtctttcagcccrcgaatgtcatagagtttggagtcgagtctctatgtgacatcaaatattacacaatgggagcaactacttgaaaatgagatgttatgattgggggaatgaaagagtttaattgtaaaccagtcaacttagtcttgcaagtattggttaagagccgcttaaactgttttttttttcttctttcttcttcttcttaaaatagacagagtatagtttgtttacaaaagagaaatggaaaatgttctcccctttagcacggcgcaaatgtgaagggccgcatgcctctggagtgagtaagggctttgccggctgactcttactcaggggagctcacgtatacgaagttgttcctctatgcagcagagacacagcccacatgatttctggaggaggagtaacttggaaattccttcatgaaggaaggaaaaaatgtgttggaggctgagaaataaatcacatgttgcactgtttctgcctctagagatcgcagcacggt

SEQ ID NO: 778869 - DNA, 477 bp, Homo sapiens
tttctcagaaagtgccttgaagcaggaccttgaaggactgagccacaggacaggtaagttttgtacaggaaaagaattggcagaagatgcagggtgtggctcagagggcaggcctcagcgggtaccacagtgggagccaggaaacttaaagacactgggtgcccagcaaatgtcagggggatggaagatgggwggggggaagattgaaaaagtaaccaagaccagcttcataattggcctagaaattacctttttctgttatgcctaacaaatcccgtcatcataatatcagagtaaccacgtgctcatttggtccttttttttttttctcactccgtcaccagggctggagcgcagtggtgtgatctcagttcactgcaacctctgcctcccaggttcgagtgattcttgtgccttggcctcctgagctgggattacaggtgtgcacaaccacgcccagctaatttttgtatttta

SEQ ID NO: 778870 - DNA, 477 bp, Homo sapiens
tttctcagaaagtgccttgaagcaggaccttgaaggactgagccacaggacaggtaagttttgtacaggaaaagaattggcagaagatgcagggtgtggctcagagggcaggcctcagcgggtaccacagtgggagccaggaaacttaaagacactgggtgcccagcaaatgtcagggggatggaagatgggaggggggragattgaaaaagtaaccaagaccagcttcataattggcctagaaattacctttttctgttatgcctaacaaatcccgtcatcataatatcagagtaaccacgtgctcatttggtccttttttttttttctcactccgtcaccagggctggagcgcagtggtgtgatctcagttcactgcaacctctgcctcccaggttcgagtgattcttgtgccttggcctcctgagctgggattacaggtgtgcacaaccacgcccagctaatttttgtatttta

SEQ ID NO: 778871 - DNA, 477 bp, Homo sapiens
tttctcagaaagtgccttgaagcaggaccttgaaggactgagccacaggacaggtaagttttgtacaggaaaagaattggcagaagatgcagggtgtggctcagagggcaggcctcagcgggtaccacagtgggagccaggaaacttaaagacactgggtgcccagcaaatgtcagggggatggaagatgggaggggggargattgaaaaagtaaccaagaccagcttcataattggcctagaaattacctttttctgttatgcctaacaaatcccgtcatcataatatcagagtaaccacgtgctcatttggtccttttttttttttctcactccgtcaccagggctggagcgcagtggtgtgatctcagttcactgcaacctctgcctcccaggttcgagtgattcttgtgccttggcctcctgagctgggattacaggtgtgcacaaccacgcccagctaatttttgtatttta

SEQ ID NO: 778872 - DNA, 618 bp, Homo sapiens
caaaaacccccaaatagattaataaaaatgaaaaataggtttaaattttaaaataggggatacgtatcttctaaatgctgtaattaatagaaaatgctttagtacatggtctttaatttttttcttttttagccgagtatatgcaggtaactgcagttcagctgtgaatctgtgctgaaggatctaagtgcactatttctgttttccgagagagtttaaaaaaaatttcccccgctttttcatttccagattatgttcagttaattattagaatgctgaacattctgtccttaatactcaaaagttcctgacttctgggtaggcaaagggaagcataatggatccaagggaaattcttcyagccctattttactggccttctcttcaagtacattcgtaagaaattctgtttaaataaattggattgtactttcaatttcagctaaatgcaatttggaagtggcttattagatactcataaaaatgttccggctttcggaagttaactttctgtgaaaataatagcaaaaaatgggttatgttaactatgtatttggggagaactgatttctaacacagaggctcagggaggatggagcaagggggtgcacactattg

SEQ ID NO: 778873 - DNA, 632 bp, Homo sapiens
tcttcatatggctggatgtttcttgccattcatatctcagcttaaaggtcagtgaggcctcccctggcctttcagtctaaatgcgctaccgaagcattgggtattgtttcacctgtcacacttctctgcatggctcatattactacctgatcttttatttctacatttattgtgtcactccaccatcattagaatgttagctcaatgagtgtagaggcttctctgtcttattcacagccatgtccccagagcctaaaacttcattggcacatagtagaygctgaatgaatgaatgaatgaatgaaggattgaagtatcgaaaaatttaaacaattaaaaatcatgacccagcactgtgggaggccgaggcaggtggatcgcttgagctcaggagtttgagaccatcgtgggcaacatggaggaacctcatctctattaaaaataaaaaaaaaaatcccccaggcgtggtggcatgcacccgtagtcccagctactcagaggctgaggtaggagatttgcttgagcccaagttcaagactgcagtgagctatgactatgccactgcactccagtctgggtgacagagtaacaccctgtctcaaaaaaaaaaaaattcatgaggccaggtgtgg

SEQ ID NO: 778874 - DNA, 590 bp, Homo sapiens
tgcaccattcaaggttctctaaaccctaagctttatgtttaaatagtgcaaagtgcatctactccttatccatctgttgaagtctcttccattctaaatgactcagctggagtattgattactttctttacaaagcatctgatgctttccacctactgtgatttctgtcttctgaatctggatagtgttttaattgttatggtgtgtttagtttactgtcttaaagttacttatttctttttttaatgctcattgaggataataatgattatttatctttctgttttctacagcaccttgtttcttaattaagggaggggaacaatgtatgctgtgtttttttttwaaattatttatttatttatttcaataagggcttaaattcaggggtaagaatatgctgtttgaatgaatgaattcattgatttatttatttaggaattaaatttggaacacattgagttttctcttagtaaaatagcatgattccagtgtccttaattacattaaaatatgcacatttatctttactttgatatttctatttctattttttaaaaatatatgctataaacagaagcattgtgata

SEQ ID NO: 778875 - DNA, 606 bp, Homo sapiens
ttctcatctatcttgaattattatagtatatataactttatcgtccaaaacagtgaacacattttctttttatttttcttacagcacaaaacaaatgtctgctatatttgaatctgaaattaattcctttgatttgggggccactgagcaaaatgtcctagtgctttaaaatgactgaaagaaaagtaacatgtgaggttagcaaagtaaacagaaagaaaccaaagattatttggaatgaaaaagggacataactatatagatgcaaattatattttttcaataataakagaaaatcatgggcaatatttgccaataaatttaaagatgtaaagtagataaagtctcaataaaatataaaagatttaatattaaaaataaattaaaatcttgaatagttcaaaaccattgaaggaatcaaattgttaattataaatatcttcccaagcaccaaaaaccaaacagacaaatcaaaaaaccactagacccagttcattttaaaagtcaaacaaaatgtttgtgaaaatgaaaaaattataagccaatatcatttatgaatgtggatgcaaaaataaaaaatattaggacatagaagccaccaacata

SEQ ID NO: 778876 - DNA, 632 bp, Homo sapiens
tatgaagatacacttgtatttgtgcaactacagacatatgaaaaactagaaacaaaaaaaaaatttccatgaggagaggaatagatacataaaatccagtggaatctagtactagtgacaatgaatggtctacagcccatacaacaacttggatgaatttatgatataaaaaaagaggttgcagaagaatacatacaaaaaccaatttgtgtaattgtcaaagcatgcaaaacacgaatatatagtgatatgyagttttttgataaaacgatacaaaaaagcaaatggaaaatatacatataattgaggagtgttcacctctgatgggaaatgaaagatattggagcagagcacacagggttttaaagaatacatcttaagatgaatggtatgaaagtaggtatttctttttccttttttttggtaatacattttaactctcctgtgtgttataaactaataaatatattgaatattctataataaaggagtaatccctaattagtactaaccttaattcagactgctaatctctactttcattgtctttaatagctgcttttataaaactgtctacatagttctccaccctaaaacaattctagggagagacatttcttctttatctcata

SEQ ID NO: 778877 - DNA, 645 bp, Homo sapiens
gtatgtaccattaagacagaaaaactactaaactatgaccaaaactttcatatcacatagaatttttattttatgtatattgaaagagctttttaattttatttttatgtaacagtgatgaaaatataagtaactatgaaaaacttcatgaaaaagcaggcaatgacaactccattggaacagctgcctaggtactcataagaataaatgttgtaatttttttttttttttttttttttttgagacagagtctcactctgtcaccmaggctggagtgcagtggcttgatctcgcctcactgcaagctccacctcctgggttcacaccattctcccacctcagcctcccgagtagctgggactataggcacctgccaccatgcccggctaattttttgtatttttagtagagacagggtttcaccgtgttagccaggatggtctcaatctcctgacctcgtgatccacctgcctctgcctcccaaagtgctgggattacaggcgtgagccaccgtgccaggccaaatgttgtaattttaatctacatcctaatttcagagatttaaaagataaaatagtgcatttgttagaactaataaaatatagggtctatactctgtctctaagagctgtcctttctgtttgc

SEQ ID NO: 778878 - DNA, 645 bp, Homo sapiens
gtatgtaccattaagacagaaaaactactaaactatgaccaaaactttcatatcacatagaatttttattttatgtatattgaaagagctttttaattttatttttatgtaacagtgatgaaaatataagtaactatgaaaaacttcatgaaaaagcaggcaatgacaactccattggaacagctgcctaggtactcataagaataaatgttgtaatttttttttttttttttttttttttgagacagagtctcactctgtcacccaggctggagtgcagtggcttgatctcgcctcactgcaagctccacctcctgggttcacaccattctcccacctcagcctcccgagtagctgggactataggcacctgccaccatgcccggctaattttttgtatttttagtaragacagggtttcaccgtgttagccaggatggtctcaatctcctgacctcgtgatccacctgcctctgcctcccaaagtgctgggattacaggcgtgagccaccgtgccaggccaaatgttgtaattttaatctacatcctaatttcagagatttaaaagataaaatagtgcatttgttagaactaataaaatatagggtctatactctgtctctaagagctgtcctttctgtttgc

SEQ ID NO: 778879 - DNA, 678 bp, Homo sapiens
gccttttccgggatgtcatataattgaaatcatacagtatgaagccctttaagattggcttctctcaccccatgaattaagtttcctccatgtcttcatgtggcttgatagctcgtttcttgtttatcgctgaatgatattttattgcatgtattatcagagtttgtttatcctttcagctaccaaaggacactttggtggcttctaagtttgggcagttatcaatagagcttctataaacctatatgaggctttttctctagacgtgagtttttaacttgggtaaataccaagaaggacaagtgctggaatgaagatgtttaattttagatgaaactgacaaactatcttccaaagtggctgtccatttgcattcccaccagcagtgaatgagttcctgytgctccacatcctctccagcatttggtgtggtcggggttctggattttggccattcctataggtgtgtagtggtgtctcatggttgttttaatttgtgttttcctgctgacatatgatgctgagcatcgttttatatgcttatttgccatctgtatgtcttctttggtgaggtgcctgttcaaatctttttttctgctttttaaattgtgttgttttgttgttaagttttaagagttctttgtgtatttggatccagtccttgatcagatatttgtt

SEQ ID NO: 778880 - DNA, 558 bp, Homo sapiens
gatgaacctacacggatccatcattatcagccatggtctgtattttacattagggttcattgttgtggttgtacatctgtgggtgtggacaaatgtatagtgacatgtatccaccattacagtgtcatatggggtagttcactgccctaagaatctcctgtactctgcctgtttatctctccctccctcatccctggcaaccatggatggatcttttactgtctgcgtactttgccttttccagaatgtcatatagttggaatcatactgtatgtagccttttcasatttgcttctttcacttagcaatatgcatttaaggttcctttcatgtgttttcacatggatagttcatctctttttagagctaaacaatattctgttgtctggatgtaccacagtttactcacccactgaagggcatcttggtttcttccaagttttggcaattttgaacccagctgctataaacatctgtgtgcaagtttgtgtttgcatataaattttcaactccttggagtaaataccaaagagtgtagttgctgggtagtttcataag

SEQ ID NO: 778881 - DNA, 558 bp, Homo sapiens
gatgaacctacacggatccatcattatcagccatggtctgtattttacattagggttcattgttgtggttgtacatctgtgggtgtggacaaatgtatagtgacatgtatccaccattacagtgtcatatggggtagttcactgccctaagaatctcctgtactctgcctgtttatctctccctccctcatccctggcaaccatggatggatcttttactgtctgcgtactttgccttttccagaatgtcatatagttggaatcatactgtatgtagccttttcagatttgcttctttcacttagcaatatgcatttaaggttcctttcatgtgttttcacatggatagttcatctctttttagagctaaacaatattcygttgtctggatgtaccacagtttactcacccactgaagggcatcttggtttcttccaagttttggcaattttgaacccagctgctataaacatctgtgtgcaagtttgtgtttgcatataaattttcaactccttggagtaaataccaaagagtgtagttgctgggtagtttcataag

SEQ ID NO: 778882 - DNA, 531 bp, Homo sapiens
aactagtccataagacccaatttaaaacttttctttttagtagttctagacagaaaggagaaaaaaaaaatagaagagaggatatattcattgaaataattctggaaatgttaagaagtgaaggacatgagtttccacattaaaggtgtctacaatggataaaaccagacacaccrtctgaggcacattatagcgaaatttcaaaacaatggagacaaagagaaaatcgaatgagaaaaacatggtcatacacagaggattaggaatctgaatgccttttgagttctcaattactgcaaggaaagctgaaagacagcaggtccaacctcaaagggggaatagtttccagccaagaattctatatccaaatcaaatgcgtagggagaatgaaaacacgtttggacattaaaggtctcaaaaagttgtactttttacatgccagtttcttaggaatctcctagaagttgtgtttcctgtgaatgaaggagtaactttaggaaacacaggatcccagagacatttcactcaaga

SEQ ID NO: 778883 - DNA, 637 bp, Homo sapiens
tcccccagagttcaattaaaattaagtccccaagtaaagtatatattttatatctacctagagtaaactcaactcggatatacttatgttgtttgttttataatccttatgttccaaataatatctctttgccatcataacttcatataatttctttwtaattatttgtaatacaatatttgctgtttacgttgaaaatttaaaaagtattttatgattgatttcagctgctttacccacattttacatcagaggttttattccttctgttaaagtgatgaagtttttgcctcaaggaatttacatgctagtgaaagaatatgacaattaacacatgaactaacaatgagagtataatttcagattgtcaggaatgctatacaaagggataaaaaagaaagaaggataagcaaagagtatgagtggaatattttagattggatggacgggggtgtgtagctatgtgaggagagaacaaagtcaagagaaagagtcaagtaaagatggaaaagaaaaggcacatgttacaacaaatatgatggtccttctcagagacaaacttggtacatttgacaaatagaagaaaacaaacagaaagactgggacataataagaaaggagaagaatgttttgaggg

SEQ ID NO: 778884 - DNA, 565 bp, Homo sapiens
ctttacatacatgtgctttacttcgaatatggctgtcatttatattgtaggctaaaattaattctgtaggaagtttgaaattatagtaaagatcaataaatgttattgttagatttaaactgatatgattatgggttttcaggaaagtagttttacaacaaggaacaatcatttagttatagaaacataaataattgaattttgtatattctaacttaattatgtaaagtatctatgtattaatagtcatagatgccacaaaataactgcatgtaaattgttttgggaaaaggggaartgtgtttgttcaattgttttatagctggcattctgtattcttcctatgcttgttcatctttggaattccagaacagctcttatatctagtattgtgctcccacggtaggtgggaattcagcttattcacaggctacatttgtatggtttttaaagctcagctggtataatttacagtgttctacagagtagtttctctctttatgtgtatagtatatgaatagaaggtacttgtgagggagacttaataatcatacgaaattacaag

SEQ ID NO: 778885 - DNA, 584 bp, Homo sapiens
tattattttaaaattaattatgataatttactatgtaactttctctatgttaaagaagtgtctttaatttttatggaatggaattgggaaaaatatggtttactgaatcaaaatgacaataaactagagacagtgaaagcattgctttttacctgtaccaaagtcaactcacatttacctcctaagagcattgagtttgtttgtatggacatytttaaaatttctttactcttttcctaatattatatatcttcgtcattttttcccatcaatcatttgtcacttgatttgaatttataacccacaaattcactttttttgttttttggttgagacagggacatagtatgttgcccaggctggtcttgaacttctgggcttaagcaatcctcacactttgacctcacaaaacactgagattgaacgcataagctactgtacctgctccactagttgaattttaaaagtcttaaaggaaataaaaatgaaaatgtatcctctatttgtatttttcatgtaacaataactacatacataaaatattgctaacaatgttacatcaaatgttaatagttgtttaaaat

SEQ ID NO: 778886 - DNA, 587 bp, Homo sapiens
aattattttaaaacacacaacttctgcccttcataaaaattagttaagaaaattaaagcacaaatgacaaactgggaattggcagtttcttataaaggtaaacatgcacctaacctaagacctagcaatttactgttcagtattaattaactcaagagaaataaaaatatgtatctatgaaatgactcataaaataatgtttatagtatatttattcatgatatctacaactgggaaccacrttaaggtatatactcacagaagaataaataaatttgataaattcacttgttggaatatttctcagaaatgataatgaatgaataaatgctatacaatttggctaaatcataaaaatgtaatgttgagcaataaattcagaaatgaaatataacattctctatgttttcatttatgtgcgtttcaagaataggcaaaactaatctctggtgataaaaaagtatcagcacagtggttatctattgggtatagaagatgacttcaaaagagagaaatagctttctttgttcatggaaatagtctatagattgataaaggaactggttatatggagatatttgccaaaa

SEQ ID NO: 778887 - DNA, 616 bp, Homo sapiens
cactcattatgaaaaaacagtaaataaatttctcaaaaaaataaaatggaattacaatagatctccactctttcaggtttttgcttcccttgtctcagttatccccagtcaacctcagttttaaaatattcaatatacaattcctgaaacaattcataaattttaaattcaatgtttttctgagtaatgtaagaaactctcatgctgtcccactctgtccctcccagaacattagttatccctttgtttagcatatgcatgccgtatgtgctatgtgcaattagtcacctagtagccatcttgattatcagatcaactgatgtgttttgcagtgcttgtgtttaagtgaccagtattttactttaacagctgcaaagcacaaaagtagtgatgctgataattcagttatgccaaagagaagccataaagtgctctctttagtgaaaaagtgaaagttctctacttaataaggwaaaaataaacattctgaggttgatgagatatatggtaagactgaatcttctgtgaaattatgaagaaggaaaaaataaatttgtgcgtagtatatatagggtttaatactatctgcggtttcaggcatccactgaaggtcttg

SEQ ID NO: 778888 - DNA, 609 bp, Homo sapiens
agacagataaaaacaagtattgacagtatgtagagtagttggaattcttatacactgatggtgggaatgcaaaatagtgcagccaccaaaactttaagagtgagtgcactcttacttgaaaaccaaaacttcattttatccagttctcctctctattcttgctccaaattgttttttctcattttttctagttttcattaatgttctacatcttctgcttccatttttttcttcatgcgttccttaactaatttttaatattctattctactatgctttagaaagcagtctagctgttcctcaaatgtttatgcagtgacataagatacagtaattcccctccaaatatatacctaagagtaataaacacatatatccacacaaaaattgcatgtgaatgtttatagtgtcattatttatgatagtaaaaacatggaagcaatacaaatgtccwtccattgataaataggtaaaacaaatatgttacatccatatgatgtgctattttttgccaataagaagaaatgtgctgatacatgttacaacattgatgaatcttgtgaacactatgctaaatggaaggaaccaatctcaagggatcatatattg

SEQ ID NO: 778889 - DNA, 628 bp, Homo sapiens
gaaaagaaaatcccattttctgaggagaaattcaagctggctgcagaaatttgcataagaaatgaggatcaaaattataattcccaagataatagggaaaatgtcttcagagcatgtcataggccttcatggcagttcctcccattacaggcccagaggctaggaataaaaagtggtttctagggccggrcccttgtgctgtgtccccatgctgtgtgcagcctagggacctggtgccctgcatcccagctgctccagcctgggttgaaaggggttcaatatagagattcgagccatggcttcagagggtgcaagtcccaagccttggcagcttccatgtggtgttgaacctgtgagtgaacagaagtcaagaactgggtttggaaacctctgcctaaatttcagaagacgtatggagatgtctggattcccaggcagaagttttctggtggggcagggccctcatggagaacctctgttagggcagtgcagaagggaaatgttgggtcagagctcccacacatagtctctactggggtactgcctagtggagctgcgagaagagggccacagtcctccagaccccaaaatggtagatccactgacagcttgcagcgtgcacctggaa

SEQ ID NO: 778890 - DNA, 621 bp, Homo sapiens
aatctggctaggttgcatgtgtccaggaatttattcgtttctccttcagctatctaatttgttaaatttagttgttcataatagtgttttatgatcttttgtatttctttcttttcttttcttttccttttttttttttttttttttgagacagtctcactctgttgtccaggctggagtgcagtggcataatctcagttcactgcaacctccccctcctgkgttcaagctattctcctgcctcagcctcctgagtagctgggattacaggcatgcaccaccatgcccaactaatttttgtatttttaatagagatggggtctcaccatgttggccaggctggtctcaaactcctgacctcaagtgatccacctgcctcagccccccaaagtgctgagattataggcatgagccaccacgcctggccaatcctttgtatttctgtggtattagttgtaatgtctgctttttcactgctgatttaatttatttgggtcatctctcttttttcttggatagtttaaactttgtcaagttgttcatatttggggaaaaaaaactattttgttaatattttgtattgttttttagtctatattttatttatttctgctctaatgt

SEQ ID NO: 778891 - DNA, 621 bp, Homo sapiens
agatatttgcaatacacatagttgacaaaagcctcaaaccagaatctataaagaactcctgtaagttaacaagaccaagaaaaataacccagtagaaaaaaatgggcaaagagatttttattagcaattttacaaaagaagaaatccaaaagactgctggagtggaaaagggtgctcaaccttattagttattttgaaaatgcaatacgaaaacaatcatgrgatatcaccacctactcaaaagctacaatttaaaaatgacgtaatgccaagctttagctaggttttagggcaactggagcttctcattactgctgatgggaatgtttaacggtacaaggactgtggaaagctgttaatatatgcttaagttcaacaagcacataacctacaaccacgcaaaccctctcctaagcatatgcttaaaaaatgcatattacacaaatcattagacatacataataatggccacaccagtactatctataatagccaaaaaaatcagaaaaagtataattgtctgtcaggagtctagtggacaaatattgcttcactcaatgcaatacaacatggctatgaaatttaacaaaccattgctacatacaacacaacagcatctca

SEQ ID NO: 778892 - DNA, 668 bp, Homo sapiens
ctcatgagcctcactgtggcttagcagacgatagttactttctcaactttatttgagaaattaactgaagagtgtgtgaatcttatatttatattttgtacactggctagcacattacaggtccttgggagaggctgaggagattatcaataaatatgagaataacattgttctctaattgttagaaacacaggcagcagacttcacctaaagccaaacaaatacaagaagaagaattaggtgctttggtcaaacaactggttaatggaatctaaaacaaacaaacraaaacacactaaatgtagtttgactgaattcgttttgtatggttagcctagccataatgtgttactagtaatacttaagctaaagaaagtagttgcatttttaaaatgactaacatttgtcaacaacaaaaatttctcaagcctcgacttacatgcaagaacttggatattgatctcataaagcttaatatcactctaaagagacaaagcctaatactgactcaaaagaaaaaataatcaaagagcctagtagtgtctgtaccaagaactttagtgttcagaaaatcggttggggctagaaagctcaatggctgaagaaaagacaagtgctgagctgcaaagcttacgggaaggataaatgcagggtacgattgagggtat

SEQ ID NO: 778893 - DNA, 593 bp, Homo sapiens
ctgaatgatcttgatgcttattagacatttgtcatgtctgggcattgaagagttaattatttattgtaatttttgccatctggtattctttgtactcattcttcataagagggctttccaagtatgcaaaaggacctgtgtgttgtgatgtaagccaaagctgtgttagagtgcatcacaagcacagtaataccgtggttcttccaacttacagaggtattgccttgatagtctgggacaagatccagaattctctggattatcagaaagagacttctgttaccttcccttagtttttcccaaatgaaatctctgtgtgtgttctgagccacctggmgctggggttggggtaacacaagtaccactatggccactaccactaggcctgcactgtgtgtgacttgaagccagcacagcactgggtcttgcccaaggaccggtgtaaccactacctggataccgcctatgtttgctgggggtctacaatcagcaggttgtgaagccaaccaggcttctgtcctttccttcagggcagtgagttccctcagaccccaggtgggtacagtggtaccatctgggatccaggaactgga

SEQ ID NO: 778894 - DNA, 610 bp, Homo sapiens
gacagatctggtctctcaatacttgactgagatctttatttttaacattaggtagtgtttttctatttttcattaacttttgttcatcactttcagcatagaacttccacagtgtatccttctgtttccttaggtcttacatcacagagaataagcaaaaaagaaaacaagcaaacgtacaattatagtgagtaatgtacatagttattggcttcatgtgggacattgtggggaacctgccatcggtgcatcctgcctgcacatgtgccattttattacctcttgtgggtgtgcttgtgtgtgggactctgggcctgtgccaaaatacagcagaaggagaataaaaaggtcttttttcttttggggatgctgaataacttmactgtgcgcctgcattttgactgcgacccatcgcatgagattagatgtggaattttccacttgtggtgtcacactgacactcgcaaaagttcagatttttaagcatttaagattttgggggcttgaatttggaatgctcaacctgtatatatttttggccaaatagcactgaccttccacctgaaaagtttattttcaagtgagtgggcggctttgggagggatacaca

SEQ ID NO: 778895 - DNA, 610 bp, Homo sapiens
gacagatctggtctctcaatacttgactgagatctttatttttaacattaggtagtgtttttctatttttcattaacttttgttcatcactttcagcatagaacttccacagtgtatccttctgtttccttaggtcttacatcacagagaataagcaaaaaagaaaacaagcaaacgtacaattatagtgagtaatgtacatagttattggcttcatgtgggacattgtggggaacctgccatcggtgcatcctgcctgcacatgtgccattttattacctcttgtgggtgtgcttgtgtgtgggactctgggcctgtgccaaaatacagcagaaggagaataaaaaggtcttttttcttttggggatgctgaataacttaaytgtgcgcctgcattttgactgcgacccatcgcatgagattagatgtggaattttccacttgtggtgtcacactgacactcgcaaaagttcagatttttaagcatttaagattttgggggcttgaatttggaatgctcaacctgtatatatttttggccaaatagcactgaccttccacctgaaaagtttattttcaagtgagtgggcggctttgggagggatacaca

SEQ ID NO: 778896 - DNA, 652 bp, Homo sapiens
  misc_feature 1, 2, 3, 4, 5, 6, 7, 8, 9, 10, 11, 12, 13, 14, 15, 16, 17,18, 19, 20, 21, 22, 23, 24, 25, 26, 27, 28, 29, 30, 31,32, 33, 34, 35, 36, 37, 38, 39, 40, 41, 42, 43: n = A,T,C or G
nnnnnnnnnnnnnnnnnnnnnnnnnnnnnnnnnnnnnnnnnnnagttgttaaatatgtatacttatcagaagagaatgggtcaatggaaggtacattcttgaagtctcaccagaaggggacaagagaatgaagcagtgtgactatatagtcagggctctcttctcaataattctgaagrtattagggtttctgtttaatgggttttgtagctctgaaatgagcctaaattgaaatataattatgataaaaatattctgtcacatgaataataattaagtggtatacatttcatttaatgaacagtggaaaaatgatgcaaagcattcttagatttacaacaaagcattagctcttgctcctaaagtagtgagttagcttggctctctggtggaagactcatcttagtcttaggtattcacttccatcactccatttcttaaatagattagcagagatggaatgtttaaaaatttaagcacattttggagtttaaaaatcagatggtatgtttgtttctctgacaggctttgctccatcaggtgagaactattctttccaaggttgagatcaggcttgtggagtaccccagagactggagatttaatgttctcttaccaatggtgttaaaagtgggatttagtgttctatgct

SEQ ID NO: 778897 - DNA, 659 bp, Homo sapiens
  misc_feature 1, 2, 3, 4, 5, 6, 7, 8, 9, 10, 11, 12, 13, 14, 15, 16, 17,18, 19, 20, 21, 22, 23, 24, 25, 26: n = A,T,C or G
nnnnnnnnnnnnnnnnnnnnnnnnnnagttgttaaatatgtatacttatcagaagagaatgggtcaatggaaggtacattcttgaagtctcaccagaaggggacaagagaatgaagcagtgtgactatatagtcagggctctcttctcaataattctgaaggtattagggtttctgtttaatgggttttstagctctgaaatgagcctaaattgaaatataattatgataaaaatattctgtcacatgaataataattaagtggtatacatttcatttaatgaacagtggaaaaatgatgcaaagcattcttagatttacaacaaagcattagctcttgctcctaaagtagtgagttagcttggctctctggtggaagactcatcttagtcttaggtattcacttccatcactccatttcttaaatagattagcagagatggaatgtttaaaaatttaagcacattttggagtttaaaaatcagatggtatgtttgtttctctgacaggctttgctccatcaggtgagaactattctttccaaggttgagatcaggcttgtggagtaccccagagactggagatttaatgttctcttaccaatggtgttaaaagtgggatttagtgttctatgctcaaataaggacaaagggctgagaa

SEQ ID NO: 778898 - DNA, 641 bp, Homo sapiens
ccacataatttgtaatcgtttctttacaaaggacattaagctaaccgtgatccggtgctgaattatgtagcatttaccacgctcctgtttttagattccttatccctttctagtggattctaaaaatatcagttaagccaccaactaatttctaatccttgcttctattaatattgaccgttcgtctcttakcctttgtccttgcttgattaaggaattcaaatcttttcctgaaaatgtgattgttgacaatatgaccgcctctggctagagcaccaggcaggaagggattctggctcgcgggggtccggagaccagcttagccacagaaagcccttcaggtaactcggagtgttctctccccgtctcactctctcgttaggcaagaaaccaacagtatcttaacatatagattaaattttaaattctccattatcagcaccctgcacggtgagacaggcctccagattttgaggttggcttaaaaggcctcccaaccgtgaggcggcccgggtggaccacttaacctcgagccgcatctgtcaacgcagacagcttctctgatgagtgagattcggctgagatctgaagcgggtagtgggtgctggagtccaccatccagagccctgcaaaacggaggt

SEQ ID NO: 778899 - DNA, 641 bp, Homo sapiens
ccacataatttgtaatcgtttctttacaaaggacattaagctaaccgtgatccggtgctgaattatgtagcatttaccacgctcctgtttttagattccttatccctttctagtggattctaaaaatatcagttaagccaccaactaatttctaatccttgcttctattaatattgaccgttcgtctcttagcctttgtccttgcttgattaargaattcaaatcttttcctgaaaatgtgattgttgacaatatgaccgcctctggctagagcaccaggcaggaagggattctggctcgcgggggtccggagaccagcttagccacagaaagcccttcaggtaactcggagtgttctctccccgtctcactctctcgttaggcaagaaaccaacagtatcttaacatatagattaaattttaaattctccattatcagcaccctgcacggtgagacaggcctccagattttgaggttggcttaaaaggcctcccaaccgtgaggcggcccgggtggaccacttaacctcgagccgcatctgtcaacgcagacagcttctctgatgagtgagattcggctgagatctgaagcgggtagtgggtgctggagtccaccatccagagccctgcaaaacggaggt

SEQ ID NO: 778900 - DNA, 641 bp, Homo sapiens
ccacataatttgtaatcgtttctttacaaaggacattaagctaaccgtgatccggtgctgaattatgtagcatttaccacgctcctgtttttagattccttatccctttctagtggattctaaaaatatcagttaagccaccaactaatttctaatccttgcttctattaatattgaccgttcgtctcttagcctttgtccttgcttgattaaggaattcaaatcttttcctgaaaatgtgattgttgacaatatgaccgcctctggctagagcaccaggcaggaagggattctggctcgcgggggtccggagaccagcttagccacagaaagcccttcargtaactcggagtgttctctccccgtctcactctctcgttaggcaagaaaccaacagtatcttaacatatagattaaattttaaattctccattatcagcaccctgcacggtgagacaggcctccagattttgaggttggcttaaaaggcctcccaaccgtgaggcggcccgggtggaccacttaacctcgagccgcatctgtcaacgcagacagcttctctgatgagtgagattcggctgagatctgaagcgggtagtgggtgctggagtccaccatccagagccctgcaaaacggaggt

SEQ ID NO: 778901 - DNA, 370 bp, Homo sapiens
gctaaaatcagtacttcctaatgatagcagcctggtctccccgtgcgccccttacttacgacaccccagagagctgagtaactgccaattattattgcggggaaggaggtaagaaaccttaactgtgttctatacctttaccctgaargagactgtcagggaaaatgggaagggatggggtcctgtgcctgtgggactcaattttaatgcttgtgtggatgtggcacgtcgggcccatctccccgccgggttcctggccctggatggatggggctggggaagcttagcgctgcttatcgagctctgctgcggaagctgcagccacataattactcatttgccttgtttgtgcctgtcttcacggcacact

SEQ ID NO: 778902 - DNA, 639 bp, Homo sapiens
aatagaattctagataatcttttatcacaacaagacacccatatagaattatttaaacagattggacggcggcagcagcaaatttcaattattctaatgctttaataaatgtggtgcgtgtgtattaaattcaagcttcttaatccaaattttacgatgtaactgcactgatttttcatttctgcaacacccacacgcggcaatggccgctcctctctcggggagggtgatcccagctcggaaaagccgagagggcgcgcggagtcgggcggccgagaggaaagggagtcacggctgggcgaggggcgcgggcgcgggagaccccggaaaggcaaggagagagcggcccgggaggaagcgcaggacgcccagcggggcccagagagccgcagactggccagccccgcgccccgctcctcccagctcsgggtttctgtccccacgcgccccctccatactcacgccagctctgcccggcccggtggttccccgcgcggggctctccgtccgggccccctgctggcggcgccccgggcagaggggcccacgaggaagggtctcggggtgcgggcagccctcggccacagccccggctcctcgtggccaccgtgtccggggtgcgccagggagccgctgggc

SEQ ID NO: 778903 - DNA, 597 bp, Homo sapiens
ctcttccgagggggccggcctggggagcgtgggggccgcagaggccggggaagggggcgcctgaccacatgaggggtgttcaggatggaccctgcctctgagagagctggagactgggggcgtgaggacacctccagtgtctgccatgcagacccctgccctcagcagaaagcgctgtgagccggtccaggggctggactggggcaggcctgaccttctctggggctccaccctgctgtcccttctggtcccaccatcctggaacgtggtgaccccaggacgccatggtctggagaaaattcgccaagacagcaagaggtcaggagtgggcaggggtcactggggagccaggtacctggcagccctccctcggtcgggcaggagcccggacggaaggaatcgtcctggtctgagctgaacttgcggcaggaggggaccgkctccggggtggccgtcgccgagaaggctattagctccgcgaacgttcgccatcgcacggggtttgggctaggtgtcggggcgtgcacgcgctgagcaccctctaatagaacagacagtctttcctctcttcatctcccgtccccatagctttgttat

SEQ ID NO: 778904 - DNA, 636 bp, Homo sapiens
tcatcatatttaagaatgacttattgaaagtgtttcccctagagatcaagaatgacaccaggatttcctgccatcaccacttctatttaacattgaattggaagactgagccagtgcaataaagaaaaaagaaacgaaaatcttaagattgtataggaaaaaataataccatcacartgtgcaaataacatgattgtgcatgtaaaacattgaaaattatttacaggccgggcgtggtggctcacgcctgtaaagaagccaaggtgggtggatcacgaagtcaggagttcgagaccatcctggctaacacggtgaaaccccatctctgctaaaaatacaaaaaattagctgggcatggtggcacgtgtctgtagttccagctactcaagagtctgaggcaggagagtgagtcgcttgaacctgggaggcggaggttgcagtgagccaagatggcgccaccgcactccagcctgggtgacagagcgagactgcatctcaaaaaaaaaagaaagaaagaaaatcatctacagagaatgagaaataataagtgaaattagcaaagtcactgcacgtagatcaatatacaaaaatcaattgtatttctgtgtaccagcatcaaacaacagaaaataaaat

SEQ ID NO: 778905 - DNA, 619 bp, Homo sapiens
gtatcaggaacacctgagaatttgttagacattaaatttgtggcttctatctcagatttactgaatcagaaactctgaaaatcaggaccagtaatcttttttcagtaagccctccaggtaattctgatggtctctaaaatttaggaaccactgctttaaattctccattattggccgggcgcagtggctcacgcctgtaatcccagcacgttgggaggccgaggcgggaggatcacgaggtcaggagatcgagaccatcctggctaacacggtaaagccccatctctactaaaaatacaaaaaaaaattagccgggcatggtggcgggcacctgtagtcccagctacttgggaggctgaggcaggagaatggcgtgaacccgggaggtggagcttgyagtgagccgagatcgcgccactgcactccagcctgggcgatagagactccatctcaaaaaaataaataaatacataaatacattctacactacttatggtttcattctttatcattgtgattgctcatttgacaatttcactgtcaaaaaaagaacatactgtaaaagtttaagaatattccaaataaggaaataaagttcctcactaacacaatatttaat

SEQ ID NO: 778906 - DNA, 618 bp, Homo sapiens
aggaaacagacacttctgttttcaaaacaggtctacttttattagaaactcattaacagaacttaaatttttccccgttaagttcttacactgaaataaatgtaatgactgacctttagttatctaggtgcctgtaatattgaatagcttattgagatattgaatagcttaataaagtgaaatgtatttcatatgaacatatttcatatatatgtgtataaaattaaaaagtttccaaaatataatgcattttcttatatgatatgtgatagatcatatgacagatgtaatgcttttacaaccataccttcctatctcccatctaagtttcagaaaaggaagaggctctgaaaggataagaaaaggaaagaagataagataaggaaaggataagagaaggaagaagttaasaatcagagacagtggcaaggttgctgttcatatttgctaaagatgtgcatcagaattagacatgaaaagttattttaaatgtacgcaatctagaaacatttatatggaagaaaaccacaatatacacgtaactagttatgactactgagacaagaaaaaaggactttatttcacaaaaatggccagttacagtgcaatcagattact

SEQ ID NO: 778907 - DNA, 629 bp, Homo sapiens
acttaaaataagccttggccctgcccttcacattttttttttttctgagacggagtctcgctctgttgcccaggctggagtgcagaagtgcgatctcggctcactgcaaactctgcctcccgggttcacgccattctcctgcctcagcctcccgagtagctgggactacaggcgcccgccacaacgcccagctaatttttttttgtatttttagtagagatggggtttcaccgtgttagctaggatggtctcgatcttctgacctcgtgatccgcctgcctcagcctcccaaagttctgggattacaggcgtgagccaccgcgcccagccctgcccttcacatctaaagagttagaaacctatctgaatctaccyattccaccctgaaggtacactcccatcatgaattcctttcctcactcaggagataaaccaagtaaaatagcttgagtgtcatttaatatgaaaatttttagtcataggctctcttaaaaattatttactgttactttaccatttttattctctatcgaataacatgacattaagcactagtatatgtatgcatgtatggcattatggtataataattcagtctaatatgatttctataaaattttcaattaaaa

SEQ ID NO: 778908 - DNA, 621 bp, Homo sapiens
ggattcaactgaagcggtcaattcatgagtcaaggttttcaaattatgacacattttattatttttattttcctataaaagcttggccaataaatacttggatgatgagagctccctgtgttttatgattcccatgttacagattggaaaacttaaaggcccaggaaagtcaaacaatgtgctcaccgccgcatgtctcgtaagtgatagaatcggaattccaaagcagcttgactttcgtgggtaaccactaagcagtgtagggggtgggtcaagtgcccctagttgtccattagggataaatcaaggcttcaaatttacaaaacactagaagctcatctttcctacattgcatgctaacttataagtgttmtttttctcctaactttaatattagacagagagtttattttcttttttataaatcagtataaactcgcatttttaaaaaattttctatttccataggttcttaattctcaatctgcgtttttcctaatatttgtcatcaatgcatttaaagattggttagcttaaactcacaagttttgatataacagtctcttcattgatccataaattattttgaagtatgtttttaaatttctaaacagaaggatt

SEQ ID NO: 778909 - DNA, 602 bp, Homo sapiens
tatgctgtctatgataattatcctggattattaaaaaatttataattcctatgatctgaataaaaactcaggaaatatacatttctaaaaaaagtttatccacagtggttttgtttgtttgtttcgtatgagaatgataaaactcttagcagtctttaaaaaaaaaaaaacctattagaatgtatagtccatccccacacctggctccaggggtactagataaatacaggggcattatattttgacgtctttttaaatgttttaaaattttgtcttttatagctatatcagtttgagttttttttaacagttgctggcattttatgttgggtttgtaaaaacagtaatgttgagaaatatgtataaatagtaaattggctttttctaaaatatawttttaaaggatcacataaaattaaagctacttcagcaaagcggggttaaatgtctttctgtatacattagttgtgaataaagacataaaaacacattactgcaaaatttcataatggcctctttgtatatacacatgtacatatatgcaaataggcctttaagaaattttagagcaatatccattcataatattgtaacttgttagt

SEQ ID NO: 778910 - DNA, 559 bp, Homo sapiens
ttttaaagaccagaatatgattatatcagaaagaagacccatgaaacctcagtgaaataaaataatctgaaaagaaaaagaatgaaaaagattttcaataattagatttacttctcttaaacagataataattgaaagtctttaaccttatagaaaagtgaattaagcattttatattttcatttaactccagattagacaatgtaaggtgaaaatctatgtgttgtgtgtgtgggtaaacagattataacagattatcatgattatttatgaaataaataattataacatagaagcccactcttagaggcaatatataagtaaaaaattattccrcctttggctagaactagtcttgcacagtttgctgaaaaagtaatttcttattttcactaatatctttatttatttatttttttttttttactctagattcctattctatcttttatagcaaagggacaaggtgtaaagtagtattatcccacacttctgattacattttcctttttatatatgtaaagtcaatagaactaataccaattattagttagtttat

SEQ ID NO: 778911 - DNA, 610 bp, Homo sapiens
tttgagaatttgattattttatgacttggagtagtattatttgggtcagttctatttggtgttctctgacctttttgtacctggatatttatatctctctcaggctttcaaaagtttttaatattatttatcttgtagacaatcttcactgcttttcattcttttttctcttaaatttgttaagacttgttttgtggctgtattagtccrttttcatgctcctgataacgacatacccagggctgggcaatttacaaaagaaagaggtttattggacttacagttccatgtggctagggaggcctcacaattgtagtggaaggtgaaaggcttgtctcacatggcagcagacaagagaagaaagcttgtgcaggcaatctcccctttctaaaaccatcagatctcttgaggcttattcacagtcacgagaacagcatgggaaggacctgcctccgtgattcagttacctcccactgggtccttctcacaaaacatgggaattcaaggtgagatttggatagggagacagccaaaccatatcattccacccctggtccctcccaaatcatgtcctcacatttcaaaaccaatcatgccttcccaacagtcc

SEQ ID NO: 778912 - DNA, 610 bp, Homo sapiens
tttgagaatttgattattttatgacttggagtagtattatttgggtcagttctatttggtgttctctgacctttttgtacctggatatttatatctctctcaggctttcaaaagtttttaatattatttatcttgtagacaatcttcactgcttttcattcttttttctcttaaatttgttaagacttgttttgtggctgtattagtccgttttcatgctcctgataacgacatacccagggctgggcaatttacaaaagaaagaggtttattggacttacagttccatgtggctagggaggcctcacaattgtagtggaaggtgaaaggcttgtctcacatggcagcagacaagagaagaaagcttgtgcaggcaatctcccctttctaaaaccatcagatctcttgaggcttattcacagtcaygagaacagcatgggaaggacctgcctccgtgattcagttacctcccactgggtccttctcacaaaacatgggaattcaaggtgagatttggatagggagacagccaaaccatatcattccacccctggtccctcccaaatcatgtcctcacatttcaaaaccaatcatgccttcccaacagtcc

SEQ ID NO: 778913 - DNA, 610 bp, Homo sapiens
tttgagaatttgattattttatgacttggagtagtattatttgggtcagttctatttggtgttctctgacctttttgtacctggatatttatatctctctcaggctttcaaaagtttttaatattatttatcttgtagacaatcttcactgcttttcattcttttttctcttaaatttgttaagacttgttttgtggctgtattagtccgttttcatgctcctgataacgacatacccagggctgggcaatttacaaaagaaagaggtttattggacttacagttccatgtggctagggaggcctcacaattgtagtggaaggtgaaaggcttgtctcacatggcagcagacaagagaagaaagcttgtgcaggcaatctcccctttctaaaaccatcagatctcttgaggcttattcacagtcacgagaacagcatgggaaggacctgcctccgtgattcarttacctcccactgggtccttctcacaaaacatgggaattcaaggtgagatttggatagggagacagccaaaccatatcattccacccctggtccctcccaaatcatgtcctcacatttcaaaaccaatcatgccttcccaacagtcc

SEQ ID NO: 778914 - DNA, 584 bp, Homo sapiens
ttggcttccactgcaaatgtattttgaaatttttcacgtgttgttatagataatgagtttcctggaccaataaagttctttgtactaagggaaatgatgagctttttgttttttcagtgttttaaaataaaaactgtatttcctcctggttctatataaatggcatatactttttttgaaacgcaacaattagaggtacatgwaaagcatttggcaaaagactgagagagccttctattatttttcagggcaaatgaaaattcatgtctgttacactggccccttaaatcttgatgtacccacacaggaattattagtcctctccaatataatggaaataaagtctcattgaaacaaggtcatttagaaagagcagtttctctgtgtaaaccctgaaatgactgaactggaattttgttcactaagatgatcataaagagatagttttatagttttgattattggggttattacagaataaaatggagaacctgtctaatatcagatatgttcctcaataatttatagaagaaaaaaatttatatgacccaaaagaaaaataaaaacctttaacctctaaataa

SEQ ID NO: 778915 - DNA, 584 bp, Homo sapiens
ttggcttccactgcaaatgtattttgaaatttttcacgtgttgttatagataatgagtttcctggaccaataaagttctttgtactaagggaaatgatgagctttttgttttttcagtgttttaaaataaaaactgtatttcctcctggttctatataaatggcatatactttttttgaaacgcaacaattagaggtacatgtaaagcatttggcaaaagactgagagagccttctaytatttttcagggcaaatgaaaattcatgtctgttacactggccccttaaatcttgatgtacccacacaggaattattagtcctctccaatataatggaaataaagtctcattgaaacaaggtcatttagaaagagcagtttctctgtgtaaaccctgaaatgactgaactggaattttgttcactaagatgatcataaagagatagttttatagttttgattattggggttattacagaataaaatggagaacctgtctaatatcagatatgttcctcaataatttatagaagaaaaaaatttatatgacccaaaagaaaaataaaaacctttaacctctaaataa

SEQ ID NO: 778916 - DNA, 595 bp, Homo sapiens
atgatcataaagagatagttttatagttttgattattggggttattacagaataaaatggagaacctgtctaatatcagatatgttcctcaataatttatagaagaaaaaaatttatatgacccaaaagaaaaataaaaacctttaacctctaaataagcagataaaggctaattaaaatatctcacctagcaaagtggaaaacattttaaatatcatactaaatgatatcaagaatgtggtgagatggacatttttgttcccatctatacaaactttttgattcagagatactagttcaaataaattctagaaaaaagaattggagatttaggcaacagagttttgtttgtttgtttgttttgttttgtttttttctgagacagagtttccctctgtygcccgggctggagtacagtagtgtaatttcggctcactgcaacctctgcctcccaggttcaagtgattctcctgcctcagcctcctgagcagctggaattacagacacatgccaacatgcctggctactttttgtattttcgtagtagagctggggtttcaccatgttggccaggctggtctcgaactcctgacct

SEQ ID NO: 778917 - DNA, 515 bp, Homo sapiens
aacccatagtattgactggcctctttaccacctatatatttttgccttttccagaatgtcatataaatggaatcatacagtagtcctctgtgactggcgtcgtgcatttgatattatgtatttataattcttttatgtatttgcaatgctggtagttcattccttttcatcctaaatagtattcaattgtatggatgtctcrgagtttgtttatctattcacctgttgatgaatttcttaactgtttcaggattttggtgattattaacaaagttgccataacattcaaatgcaagttcatgtgtggatatacattttcaaatcagttgggtaaacacctaggagcaggattggtagaacaaatggtatggtgctggttagttttgtaataaactcttcccctgccagagtcatgaagggatctttcttgttagaaactcttgggtttctgcagataagacccatgcaagtgtaagagttccacctctgggaattttttactctcatactggtcc

SEQ ID NO: 778918 - DNA, 617 bp, Homo sapiens
gctaggttttcttctaggtttttataattcaagaccttacatttaaatcgctgacagatcttgagttaatttttgtacatggtgaaaggtaggggtctagttttttttttctgcatgtggctagccaattatcctagcaccatctattgaatagggagtcctttctccattgcttgtttttctctgctttgttgaagatcagatggttgtaggtgtacaggttaatttctgagatttttattctgttycattagtctatgtgtctatatttgtaccagtaccatgctgtttttatgactgtagcctgatagtatagtttaaagttaggtagtgtaatgcctctggctttgttctttttgcttaggattacttttactattcagatcctttttggtctcatacaaattttagaatagttttgactaattctgtaaaaaaactaacgttggtttgataggaatagcattgaaaccatagattttaatcatattcattatttcaacccatgagcatagaatgcttttctgtttatttatgtcatctctgatttctttcagtagttttccttgtagagatatttttccccctaggttggctgtattcttaggaatttcatt

SEQ ID NO: 778919 - DNA, 637 bp, Homo sapiens
gcacttgaaaagatgctcaacatcattagccatcagggaaatacgatttgaaaccataatattttcaaaaagttaggagatttttaatggtcgcaacacaaagaaaagatgaacgtttcaggtggtggacatactaattacctgatttgatcactacacattgtatacatttatcaaaatatcactctgtagtccctaaatatgtacaattattacatgtcaacgaaaaagaatgaaaacacaatgacacacacttcacacccactggaatggctagaatcagaaagacagataatgacaagtgttggcaaggagtgagaaatcaaaaccctaatacactactggtgcgaatgttaaaaagatgcacactgatgctttggaaaacagtctgaccatttcttaaaatgttaaacagagctaccatatgacccagccatttcactcctaggcacatacgcaagagaaatgaaaacatgatgtccacacaaaaagttgtargtgaatgttcacagcagcattacacataatggccaaaaggtggaaacaatccaaacgtccactaactaatggaaaataaatcgtggtaatacccataaaagattaaccagcaataaaaaaaagtactgacacatgctat

SEQ ID NO: 778920 - DNA, 617 bp, Homo sapiens
cttaaaatacagatgcttgcctggcacggtggctcacgcctgtaatcccagcactttgggaggccgaggagggtggatcctgaggtcaggagttcaataccaacctggccaagatggtgaaacccatctctactaaaaatacaaaaaaattagctgggcgtagtggcgggcgcctgcaatcccagctattcaggaggctgaggcagagaattgtttgaacccaagagrcggaggttgcagtgagccgagatcacgccactgcactccagcctggacgacagagtgagactccatctcaaaaaaaaaaaaaaaaaaaaaaaaagagagagatgcttgtctcccactctttcaggttctggtctgaggtttggatgtaggtgtgcagactcttagtggacattgtaagggctgcaggggatccacagttcacactgaggaacccactggtggaagccctgggcctagctcatgtccctaatctcaaaaatagctggtagcctcatctttctggcccatgggatgaccagtgtttttataaggcagccaagaaagcaggaaaggggctagatgtggtggcatcatcttgagttttgtaccctgactcaggcctccatctt

SEQ ID NO: 778921 - DNA, 631 bp, Homo sapiens
atgtggtggcatcatcttgagttttgtaccctgactcaggcctccatcttcctttttgtaaaataaggataatgataatacctactaaactgaattggcttgggaattaatgacataacatactttgaactttaaagtgttatttttcttattccattagcagaagaaaagagaagaggctgggggtgaagggtgggattgtctcagcgcttttggatgttgactctggagttatggcagggccctggggcaatgaggctgattcttctattatgcccttccctcttcaggtaacctggatggagaggaccatgccgcagagcgaacggtggaggatgttttccttcgcaagttcatgyggggtaccttcccaggctgcctggctgaccagctggttttaaagcgccggggtaaccagttggagatctgtgccgtggtcctgaggcagttgtctccacacaagtactacttcctcgtgggctacagtgaaactttgctgtcctacttttacaaatgtcctgtgcgactccacctccaaactgtgccctcaaaggttgtgtataagtacctctagaacaatccccttttttccatcaagctgtagcctgcagagaatggaaacgtgggaaag

SEQ ID NO: 778922 - DNA, 612 bp, Homo sapiens
ttttaaggcaaactttctcctcttttataatggggagacaacagcatcttaagttgactggaacaccaaggaattattttgaaatataaaaatcaccacaaaaaagttttaaatcaggaacaccaaggtattattttgaaatataaaaaagtaccacaaaaaagttttaaacaatcacaaaattagtaaactttgattactktggaatgtggaaattgaattctggtaatatccagaaagtgtttcttttcatttgataactttgaatatcctttgaatattgttacagtgtacaccaatcacttctaaaagactttcctcctccctccttgtgcatagaaactttatcgagcaggagagaaggtcattatgagtggaatctaaaatcagatctagaatcagggagctttacttgttttaatcacctagaaaaaaaatgctgtaataaaaggttttctttttatgcaaaatagaaagttgaatattctgtttattgatcagatcaagactaatccgtgttgggaagtctctaagttaatgagatcatttaaggaaatttatttttggtcaaccttttttagaaaggccatcaccaaaaatgctcccgccatc

SEQ ID NO: 778923 - DNA, 656 bp, Homo sapiens
aatgatccacctttagtttcaaattgcaagttgtggctatttcactccaagcaaacaacaaaaacacaaaggtgggaaaccgtcacatccactgccttgctgttatctctgcatcttgttgccccctgctttgcctttaaaggatcaggttttaaagcctggaaattcaaaaccatcaaggcaatgaggaggactggctatccttgtagtaattgaaggtcccctcaactggaccaatagttccccaggggtgaaccaaccctgactctcaaaatagaactacacgttgaggcaggttttcttcaccctaaacagtgcsatttccttcaccaagattgtcagcatgtgacgatttattatcaactgagatttgcttttgaagttgcaagtatcacattacgttgatttttgtgtgagtctttaatgaaatattgcaaattacaaggtgctctgttatgccttgtcctatgtgtgtgctgatttcactgacctgacactgcttgaggtacagcccaacagctgtcttgagaacaaatcctccaaagcctataaattcacccagtcttcattcactttaagccatcacatacaaatatttgtgttgttttccttgatggtactattgggaaaccatatttacaacaatctagactttt

SEQ ID NO: 778924 - DNA, 661 bp, Homo sapiens
tactgacatctaggggagacagctgggatcctgctataagatgcacaatgcacagagtagctcccctacaacaaagtattaaccagcccaaaatgtcaatggtgcagagattaagaaaccctcttctaggcacttacatcgaagttgtaggctccacgccattggcaatagattcacatctctggccctgatatctgagtttcaaacacacttatcgtatttaacctcccttacttggataattcaaaagcacttcaaactcaaattatcccaaaacaaacttgtggttttccctccagatattggttctcttacttggtatttcagcttagcaaattgtgttcatccagaaactcaggagccaataactccctttcctctaacctataaagttcatcamcctgagctaatttactttctaaatatatctttggttcatccatttctttcatttccattgagagtaacttttctcctctaagctgtcatttgtctctcccttggaatgatgtcattcagtttgccaattagcaatcaaatgattactctcaaaattattgagcattctctttataaaatacaaatataaacatgacacttcactgattcaaaacaaacagaaaacattctccattgttcttaaagattgaaatccttaatg

SEQ ID NO: 778925 - DNA, 532 bp, Homo sapiens
acatacaccctcccaagactaaaccaggaagaggttgaatctctgaatagaccaataccaggctctgaaattgaggcaataattaataccctaccgaccaaaaaaagcccagggccagacagattcacagccgaattctaccagaggtacaaagaagagctggcaccattccttctgaaactattccaaacaacagaaaaagagggactcctccctaactcattttatgaggccagcatcatcctgtaccaaagcccggcagagacacaacaaaaaaagagaattttagaccaatatccctgattaacatcgatgcaaaaatcctcaataaaatactggcaaaccgaatccagcagcacatcaraaagcttatcgaccgcaatcaagttaccttcatccctgggatgcaaggctggttcaacatacgcaaatcaaaaaacgtaacccatcacataaacagaaccaaagacaaaaccacatgattatctcaatagatgcagaaaaggcctttgacaaaattcaacagcgcttc

SEQ ID NO: 778926 - DNA, 573 bp, Homo sapiens
ttctccacatcttctccagcatctgttgtttcctgactttttaatgatcgccattctaactggtgtgagatggtatctcactgtggttttgatttgcatttctctaatgaccagtgatgatgagctttttttaatatgtttgttggttgcataaatgtcttcttttgagaartgtctgttcgtatcatttgcccactttttgatggggtcatggtttttttcttttttgtgtgtgtgaatttaagttccttgtagattctggatattagctctttgtcagatggataggttacaaaaattttctcccattgtgtaggttgcctgttcactctgatgatagtttcttttgctgtgcagaagctctttagtttaattagatcccagttgtcaattttggcttcgttgccgttgcttttggtgttttagtcatgaagtctttgccaatgcccgtgtcctgaatggtattgcctagattttcttctagggtttttatggttttaggtcttacatttaagcctttaatccatcttgagttaatttttgtataaagtataaggaagggatccagtttca

SEQ ID NO: 778927 - DNA, 402 bp, Homo sapiens
tgttgggattacagtcatgagccaccgtgcccagcctgtcttttctttccaaagccacccttggtgattaaatgttaaatatgtactagtggatattactttgctgaatattgcctagtgaatattaagtatttattctcaccttgcagacatgaacttgtgaattcaacamgtgaagatttacaacttgataaaccagcttcaggaggtaggtcttcagtcttaagtcagattagaagattatgtgaaataattatttaatgcttaacattgattttttaatggtatcttccacatgaaataatattcctctaacatttaattacatgccaggacaggagaattcatgttgtcaaaattctaatactctctagaacagtaaactcattttatttgtattaa

SEQ ID NO: 778928 - DNA, 402 bp, Homo sapiens
tgttgggattacagtcatgagccaccgtgcccagcctgtcttttctttccaaagccacccttggtgattaaatgttaaatatgtactagtggatattactttgctgaatattgcctagtgaatattaagtatttattctcaccttgcagacatgaacttgtgaattcaacacgtgaagatttacaacttgataaaccagctkcaggaggtaggtcttcagtcttaagtcagattagaagattatgtgaaataattatttaatgcttaacattgattttttaatggtatcttccacatgaaataatattcctctaacatttaattacatgccaggacaggagaattcatgttgtcaaaattctaatactctctagaacagtaaactcattttatttgtattaa

SEQ ID NO: 778929 - DNA, 571 bp, Homo sapiens
cgaggcgggcgggtcacgaagtcaagggatctagaccatcctggccaacatggtgaaaccctatctctactaaaaatacaaaaaattagctgagagtggtaggtgcgcatctgtagtcccagctactcaggaggctgaggcaggagaattgcgtgaacccagcaggcggaggttgcagtgagctgaggttgggccactgcactccagcctgggcaacagagcaagactctattgaggcaaggtttctcattctcaggtccgaggggttcaataactgggcccttagggaggtgtgagccccctgaaacgatgcaaggttttgtgtggagagtgtgcacatgcgtttccgggaaaacagcccacagytctcattctcagcaggctccacactcaaaaaaggttagactcttgctacagagctgtgggagcagctaggtgaggggcctgccaagggcactctggggactacctgggcagtcttgacccacctgggcagtcctgagcccactgtcccctaggcaggctgcgctgcttggtatttgcagagctgagggggtggggcatgcgggac

SEQ ID NO: 778930 - DNA, 566 bp, Homo sapiens
gatataatgtgtgaagagttgattgatagttgccaactgtcattgagcactttgaacatgtgaagttaagtgcttgatcatagttctcacatcctcataactcccctgtgaaatatatggtgttttttcatatccgcgttaaagaaactgggatttacaatgatgtaacattggacaaattaaggtctcaggacaggaggtcacggagtgatgagccctgaattactctaggtgggtttaactccaaagcccatgcccttacccaggggaacacactgcttctgaagatctcattcaccatgttaatgaccacmcccccgccaaccccaccacgtgcctcctaacactaggcatgctccatgtgtgatgagtgaatagatgactaatacttcgtatgcttaaggtcatttacaattcacaaaacttgttgacagctatacttgatttccatatgatttccccaacatctctgacgcagctccacaggaaatgttatctccatttcacagaggctgagagagttcagagtcctccagaagctcacattgctatttagtaacaggcat

SEQ ID NO: 778931 - DNA, 639 bp, Homo sapiens
tgaaactgtgggcatagagatctcccagggagagtttatagaatgagaggagtagagaatagaagacagcctgaaggagaatgaatccatcttggacttttcccatggctcttaatttgatatgagttactttatatatatataaaatatggggcttcagtgtgttgctcaggccagccttgaactcctgagctcaaatgatcctcccacctcagcttcctgagtagctgggactttggtgtatggcattgcacctggctgatgtgcagtttttgtttttttgtttttggagttttttttttttttgagacaggggcccagtctgtcaccaggacggagtgtagtggcacaatcatggctcactgcagcctcaaactcctgggcacaagtgatcttcctscctcagcctcccaagtagatgggactataggcgtgcgccaccacacttggctaatttgttttttgtgtgttttgttttgagatagggtctcgttctgtcaccaggctggagtgcagtggcacgaccttggctaactgtaatttctgcctcccaggttcaagtgatcctcccatctcagcctcccaagtagctgagagaacaggcgcacactaccacagccagctaattttttaatattt

SEQ ID NO: 778932 - DNA, 626 bp, Homo sapiens
cactcatgaaattggattaagtaaaatctgtaaggcataacaaaaatgtgctaatgaaaattccttcaatcttgaattgtaggtatacaataaatacttttcaaatatgtaataacatataggttttaacttatagatgtgttgattttctttttatctctttccttattaagaagagcttaaaattcaaatagattattactaaattaggtaatattataaactttcacatgaagaagaaataatactcattttagttcaaacacgaattccactttttttttttttttttcgagacagagtcttgctttgtcacccaggctggagtgcagcgatgcaatctcagctcagtaaaacctctgcctcctgggttcaagcaattcttctgcctcagcctcccaaatagctgggattacaggcatccgccaccacacatggctaattgttgtatttttagtagagatggggtttcaccmtgctggccaggctggtctcaaactcttgacatcgtgagccgcctgccttggcctcccaaagtgctgggattacaggtgtgagccacggtgtcgggctgaattccacattttaaagtaagataatagccacctagagttaaatgtttttga

SEQ ID NO: 778933 - DNA, 624 bp, Homo sapiens
ttttttttttttttcgagacagagtcttgctttgtcacccaggctggagtgcagcgatgcaatctcagctcagtaaaacctctgcctcctgggttcaagcaattcttctgcctcagcctcccaaatagctgggattacaggcatccgccaccacacatggctaattgttgtatttttagtagagatggggtttcaccatgctggccaggctggtctcaaactcttgacatcgtgagccgcctgccttggcctcccaaagtgctgggattacaggtgtgagccacggtgtcgggctgaattccacattttaaagtaagataatagccacctagagttaaatgtttttgagaagcattaacttttaatcttaaaaaatttaatgttactgctgtaaagactgcatattgctattccttaaattacctacrgtttctttaatgaacagacattatctccacaataagttttattttaaatttgaaatttcgacaaaatgaatggttatataaaagtaatacgaacatgttacctcaattctgaatgttaaaggtttaataattgtatttcttatatgatataatactgcatatacatttaatattattaacaggatactgtgtttta

SEQ ID NO: 778934 - DNA, 624 bp, Homo sapiens
ttttttttttttttcgagacagagtcttgctttgtcacccaggctggagtgcagcgatgcaatctcagctcagtaaaacctctgcctcctgggttcaagcaattcttctgcctcagcctcccaaatagctgggattacaggcatccgccaccacacatggctaattgttgtatttttagtagagatggggtttcaccatgctggccaggctggtctcaaactcttgacatcgtgagccgcctgccttggcctcccaaagtgctgggattacaggtgtgagccacggtgtcgggctgaattccacattttaaagtaagataatagccacctagagttaaatgtttttgagaagcattaacttttaatcttaaaaaatttaatgttactgctgtaaagactgcatattgctattccttaaattacctacggtttctttaatgaacagacattatctccacaataagttttattttaaatttgaaatttcracaaaatgaatggttatataaaagtaatacgaacatgttacctcaattctgaatgttaaaggtttaataattgtatttcttatatgatataatactgcatatacatttaatattattaacaggatactgtgtttta

SEQ ID NO: 778935 - DNA, 615 bp, Homo sapiens
aaattatcattctgctttccacattgaattttgtaccctagattcagcatctctgagtacataagctctggaaatctggcagatcagattcctgagcatgtgaggactagataatgggccttgttgaatacaagattattctactttgtgtggctttttaaacattaatttttagaatatttcctggagataccctaaacttactgaagctgctctttattcaagtaataggcaataggcaatggmaacagaggaaaaccagcagaggataaagataataccataaatcctagaatgctctttcaattttataataggcatcatagattcaagctcttcctcttctctatgagggtgtgtgtgtgttttaaattcttgttattgatatcctatcacagaaggttgcatccttggctggatataaatgtcacttgagaagcttttagaaatcctgatcctccggcagcaccctgaaccaattttatcataacacctaagggtgagactcagcacttttttcagcactaaagttgagttctcaacacttttattctttaaaaatatttggcaaataaaaaattgaatatattcaaagccaatgtaaacctacatata

SEQ ID NO: 778936 - DNA, 615 bp, Homo sapiens
ttgtggttcctaatggtaaaaaaaaaaaaaatttaaggaactaaaagagatctctaggtttgtctcagagatgagggaacaggaagatcctgggaaagtgtttcttgttctaatctagtctgggtctagaacttcagtagctcaaattcattggcggcaatttgagtcaaaaagagaatgtcttttcttgctgttttcctgtccactctgtgtgggagttgaacattaatgtgttgttttctgtcccaacagaacaagcgggagcctgtgtcaggaaagcatgtcagagcagagctgccagatgtccgaactgcggctcctcctcctgggraaatgccgctcgggaaaaagtgccacaggaaatgccattctgggcaaacatgtgttcaagtccaagttcagtgatcagacagtgatcaaaatgtgccagagagagagttgggtcctgagagaaaggaaggttgtggtaattgacacccctgaccttttctcctcaatagcttgtgctgaagacaagcaacgcaacatccaacactgcttggagctctctgctcccagcctccatgctctgctcttggtaattgccatcggccatttcacaagggaggatgagga

SEQ ID NO: 778937 - DNA, 505 bp, Homo sapiens
caacttctcaaagatatttctaagcctaaattagtttcattgattcttgactagcctcaaatatcacaattctcaagtttcatactgatcaacttttaaattttatatagaattaaaactctctaaaattaatctgtcatttactttcaagttgtgaccacaattasaactactatttaggttcaatttcaaattaaaatttactccttaatattagtacgttttcaaaagtactacttcatcttcctaattactttctcatttttctctttttcagacaattttaaacttacagcaaaaattttaagaatactatgaagcacattttattccttctgaatcacttaaaagtaagctgctggctgacttttcatcatccccagtattttactctgtaatttctacaaacaagaatatgctcttatataaccatgacaaaccttagaatgagggtttttacatctattactactatctaatgcacaaagcttatttagagttcccc

SEQ ID NO: 778938 - DNA, 606 bp, Homo sapiens
atagccaaggcaatcctaagcaaaaagaacaaagctggaggcattacattacctgattttaaattatactccaagtctataataactaaaacagcatggcactgatataaaatagacacatagatcaatggaacagaatagagaacccagaaataaagccacwtacctataaccaactgattttcaacaaaggtgataaaaatatgcactgagggaaggacaccctattcaataaatgatgctgggaaaagtggatagccatatacagaagaataaatatggacccatatctctcactatgtaagaaaattaacacaagatggataaaaagacttaagtgtaagacctgaaactataaagatcatagaagaaaacctaagaaaagctcttctggacattggcctaggcaaaaaaattatgaccaagtcctcaaaattaaacacaacaaaaatagataaatgggacttaataaaattaaatagcttctgcacagcaaaataattaacagaataaacaatttaaaacttggagaaaatatttgcaaattaagcatctgacaaaaggatagtatcaagaacctacaaggaactcaaataagaaaaaata

SEQ ID NO: 778939 - DNA, 603 bp, Homo sapiens
tatattctgagaaattaacccaatgctaataaacattcccccatgcagccatctattttgccttttttgttccgatatccacaagatgcctttacatacgttcctccaattcttgtcagtgcatatttgatattcacaatttgttagtcaaatgaaatatttccttgtagaacaaggcaayatttatcacttgcactccagtgacacctaaatattgatctagttgcaaaaagggaattttctgggaaaggacatgaggcctttggtgaggtggctttctgcaacttctacagatattgaaagggctaatatctgaaagttgtctgtgaacagcgtgcccagcaactggaaatatatatccttctttcctaaaggaagggcaaggaagtacatccttttatctatcacagcctacctattatgtcacttgaatccatttcttcatatacacttgagaacagcttctttaagattctcttcctgggggaaaattaaaagagaaaggttaagggacaaatattgtctcttgccaccatggctgatcatagagttgcaactgctatgtaccatcttattcctttattgtcaattctatttctccca

SEQ ID NO: 778940 - DNA, 624 bp, Homo sapiens
cggcctggtggtcccgggagcggccatggtgtccagccccgcggcctcaccctgccctcgaaccccgtgtcaagcacccgcggattctcacgtcctcttcttccacggcggcaggcgcttctcctgcaccttggcctggcgcttcttctcggcctcctcagcctccggtttctcctccgtggccaccttgtayggccacttgggtgtccgcaggtggcgggtgtccgcaggtggccactgtccttggtgctgcccttcggcaccggcctctggcgctggaaggtgggcgcgggcgtatgctgaggcggatcggggcaccaccacgccgggccgcaagctgctccgccgcagctgcaggcgcaggaggctggccttccgcggggcggggtcggcagagccccaggaccccggcaaaggggcaggtgggaggccagctcttggggagccctgccgggagcccgcggcctctgggcagggccacttgtgctgctctgcgccctccgcttcgcccgcctcctgcgcctgcctccccacccccacgccgcgtcaccagaatttcctgagccgccaggatttcctgcaccgccagcagcctcttccccaggcacagggagctctggaggc

SEQ ID NO: 778941 - DNA, 600 bp, Homo sapiens
ccccatgtgattttaaaattaaaatcccccaggaatattactaataataacacagtgtgtacacccttgtgacgttaggagtaacatcctcccaggatattacgaataatatcagaaggtgtacacacattgtgacattagtagtaatatcgcacgagtaaagtgtgaataatatcacagggtatacacacctgtgacattaggagtaacatccccctggaatattctgaataatatcgcagggtttacacctcctgtgactttaggagtatcatcccgctaaagtattacgtgaataattgtaaaattacgagcatctccctaagatattatgaataatatcrcaaaatgtgtacatacatggcatataccccatgtgatgttaggagttacatccttttagtatattaggaataataccacaaaggtgttcacacatagttaacagcatatgtaatatttggattaacatccctcgagaatatcacaaggaacatcacaggggctgtgcacacatgatgtacatgcccttagacattacgagtacctttccctgacacatttccagtaatatcacagcgtttacaccttctgcgacat

SEQ ID NO: 778942 - DNA, 577 bp, Homo sapiens
tatatattataattatatatatatataatatagggactcgattagtttctgctagtgtgaagacaagtcatatcatgtctaggggccatgatgataggagcagtcagaggatttcttgcattgtgatgagtgcatatawgttaaacgagccacttatcagtagaattgatagcaggataacggctagggttacttcatatgaaattgtttgggctacagtttgtaatgcgccaaatagtgcataatttgaatttaattgctcttcctgatcatagaatagatggctaggcttgatacggttagtaaaaataggaggcctatatcaaaattaattagaggatctggtatagggatgggggttcacaataggagagcgaaagaaagggccagggttggagcaataatataaaggttaatagtagatgttgagggccataggggttctttgctgaaaagtgttattgtgtcagtgaaaggttgaagcagtcccgaagggcttacaatgttaggccctttgtgtagttgtatgtagcctgagtttttgttaaatgagtgatttaaaatcaataatgataat

SEQ ID NO: 778943 - DNA, 719 bp, Homo sapiens
tggtagagatttaataggtgagagaaaacagaaaaactctcctgcagagagagagagtgactcctgagtgggtcttctggttttgtagtgaaatgcatcgggttttatagatgagcttgaggaggtggtgtctgatttacatagggcccaaaagattgattggaccagctgtgccatttacrtagcatgtgaagaagctggctgccccatcctaatcttctattatgtgaatgggttctctacttggttggtgccatgttgcctgcttctttactgcacacgtggttgacaaagaaaaggggaaaattgagcctccatgctcaatatgcctggcccccagttagccttttcctattggcacagctgccagcattcacccatgcaagctgccagcttgcttttccatgtctgcagcttgatttttcaggctgctctttgttagaaaagaaatgattttggggctgctttttattaaaaggggaaccttaccaaggactcttaccctcactatatgcctaagtaatttatttctagccctgtattatttccccccatcagcagtggcaaccctaactgctgttagtgggtgttggatgacaactctttctgcctacttcctgctgaaagaggggcactgtgtggggaacagctcctcctggggtcaatctaaggatccttggaagaatggtgtgttcatgtatgttccatcttcagtagca

SEQ ID NO: 778944 - DNA, 590 bp, Homo sapiens
atcgggttttatagatgagcttgaggaggtggtgtctgatttacatagggcccaaaagattgattggaccagctgtgccatttacatagcatgtgaagaagctggctgccccatcctaatcttctattatgtgaatgggttctctacttggttgktgccatgttgcctgcttctttactgcacacgtggttgacaaagaaaaggggaaaattgagcctccatgctcaatatgcctggcccccagttagccttttcctattggcacagctgccagcattcacccatgcaagctgccagcttgcttttccatgtctgcagcttgatttttcaggctgctctttgttagaaaagaaatgattttggggctgctttttattaaaaggggaaccttaccaaggactcttaccctcactatatgcctaagtaatttatttctagccctgtattatttccccccatcagcagtggcaaccctaactgctgttagtgggtgttggatgacaactctttctgcctacttcctgctgaaagaggggcactgtgtggggaacagctcctcctggggtcaatctaaggatccttggaagaat

SEQ ID NO: 778945 - DNA, 590 bp, Homo sapiens
atcgggttttatagatgagcttgaggaggtggtgtctgatttacatagggcccaaaagattgattggaccagctgtgccatttacatagcatgtgaagaagctggctgccccatcctaatcttctattatgtgaatgggttctctacttggttggtgccatgttgcctgcttctttactgcacacgtggttgacaaagaaaaggggaaaattgagcctccatgctsaatatgcctggcccccagttagccttttcctattggcacagctgccagcattcacccatgcaagctgccagcttgcttttccatgtctgcagcttgatttttcaggctgctctttgttagaaaagaaatgattttggggctgctttttattaaaaggggaaccttaccaaggactcttaccctcactatatgcctaagtaatttatttctagccctgtattatttccccccatcagcagtggcaaccctaactgctgttagtgggtgttggatgacaactctttctgcctacttcctgctgaaagaggggcactgtgtggggaacagctcctcctggggtcaatctaaggatccttggaagaat

SEQ ID NO: 778946 - DNA, 564 bp, Homo sapiens
atcgggttttatagatgagcttgaggaggtggtgtctgatttacatagggcccaaaagattgattggaccagctgtgccatttacatagcatgtgaagaagctggctgccccatcctaatcttctattatgtgaatgggttctctacttggttggtgccatgttgcctgcttctttactgcacacgtggttgacaaagaaaaggggaaaattgagcctccatgctcaatatgcctggyccccagttagccttttcctattggcacagctgccagcattcacccatgcaagctgccagcttgcttttccatgtctgcagcttgatttttcaggctgctctttgttagaaaagaaatgattttggggctgctttttattaaaaggggaaccttaccaaggactcttaccctcactatatgcctaagtaatttatttctagccctgtattatttccccccatcagcagtggcaaccctaactgctgttagtgggtgttggatgacaactctttctgcctacttcctgctgaaagaggggcactgtgtggggaacagctcctcctggg

SEQ ID NO: 778947 - DNA, 617 bp, Homo sapiens
tgtaataagtttaatgagcagatgtgatttatgccatgtgtttgtaacagcccgaactttgatattgcatttttcatcactggcttccttgcatttgagatattttcaccaggtttagaaagactcttttctgttttgtttacaacagatgctagagaagtatagccaagaaagaaaagagtaatgagacttatctccatrtcctcccatcggtttctcaactagatctgaaaaatgctacaggcagccatacgaagagcaccggaatgcaaagggttggttctctcttaaagacacacagtcttggggtcgtatttttcaaactgtagttcattcatacaacagcttttttgagtaattgttacagggtgaaatgcaaaaacaaataacacggaagtccctaccattaagaggcttactgacagacttgaaaataggaattgtcactattttaaaataccatgctaggaaatggagaatgtttcctaatggctatgaggttttttagaggggaaggggtgacaaaaatattctaaaaatagaccatgttacacatgatcaaaactctgtgaatatactaaaaaccattcaattgtccaatttaaatgggtgaacta

SEQ ID NO: 778948 - DNA, 604 bp, Homo sapiens
ctccttggtcagcttagtgggtagctaatcaacggacagatatttttcagagtttcctggaactgataaatctccctaccttggcagagggtctctgtgtgcatgttgggacacaccttcaatgttcagccaggtagttgaaaattaccttagtcttcacttcctgcttgtgcggaatctgaagaacagacaaaagtgagagcttagggccttcttgggtatgagcatgaaggtagccttggacatgaacatacctctatacatgtgtttgaacttccagagtccaggaatactttgaggctttttaaagatttctctggaaattccatkcaccagcttttcttttccagctttttggtttacctattgttggcttcaactgttgtgtgttgcttcagagagctgaaacattaaacaattgtctcttacggcttttgccaaatgtatctggggaaaagcttgtttgcccttgctgagctttaaattaggtcaaataatgagggcctattaagtgggttcttccagggaattccatgacaggtaaaacaatgaaagtttttttagtaaaagagccttgatggagctcgagaactattctgctttt

SEQ ID NO: 778949 - DNA, 592 bp, Homo sapiens
tggccttgggctggggtgatgtacttaagagtgcaaatggctactttgacactaattgtatgtataaaaatcaaatttaaaattgttcactcatatcttcatcttagaatgaggggaagagacttttgtcctggattagacttacactcacagattttcaagtgggaagagctcaaggatggtttcattcaatgccccattcacaggtaaggaaattgttatagaggcaacctgggcagagaccagacaagagataagcctgcagctcctggttccttctacagggaaaacaaaacatgttcacttacatattatctatgtgatccttaaaaygtatctatgacatctttaggaaaatcttgctcctaccccgtggacatcaatgcctgcaggggctgagaaatgtgcccacatcctcattcacaagctgtccaggggacccagctctcctgagacaactgtctattcctttagccactttaatatcactttagaccatacgttttgcttaaaatgtaatttaaaatagttttacttctgctttaatgtcatgatttacagctataacttgaatttctattacaaattgttt

SEQ ID NO: 778950 - DNA, 626 bp, Homo sapiens
cacctgcgacctccaaggctgcccaccttagtatacaacactgtcatctctcatttgacttttcctgaggtctcttgcttccacccttgttccctgacaagcctcttctccctatagcagccagagggatcatttaaaacacaaaacagatcatgtcagtcttctgctgaaaaacttccagtggcttcttatcttatggagaatgaaacccaaggttcttggatctggccctggttccctccatgactcagtactcatcattctccccttacttactctactttagttacaatgattttctccaaacaaaccaaacaggttcctgcctcaggacctttgcacctactgttcycttggcctgtccacccttctccatgtcagcaatgccactccctcccttacttgatagatctctgctcaaccacgacttcagcagagagggcttccccgtctgccctatcttaaataacaccagcccagtcattctctattccctcaccttgccttatttttcttcttagcacttatcactgcctaccatttatatatttattggtttatctgtttattatctccccttgctaacatgtaaacatcatgagaataggaaaccttctctgtttgtt

SEQ ID NO: 778951 - DNA, 554 bp, Homo sapiens
taatccttttatgccagcatgctgtaaaatatttagaggattcgggctggctttagtgatggattcaatgtgccgtggagttttgtcctttcccaaactttagctgcaatggctgaattcccaccacaccatctgttcctgacacttggtctcattagtacgagtatttttattgatacacrcagtaatgcttctcataccatcttagctaagcattatttattgtatctatatatacaacaatattaacacagtcaagcaccaggatcggtacttgagggcatcattaaaatcagccagtgttcagtgagagacttaatgatggatttaatagtattaaatgggcaaaaatgcccttggcctttacatgctcatttaaaaacatataaaagagcagtaattcaggcagttatacttctctcaaagattttgctctaaatcacagatggcagcgggaggccacggctgtgtgctggctcacaccccactcactccaaccgaagccagaagtgctcgttgggtcataattagcaaaccacccgcaaactcgactc

SEQ ID NO: 778952 - DNA, 576 bp, Homo sapiens
catgacttttgctattgtgaatagtattgcaatgaacataacagtgcaggtgttttttgatgaaatgatttattttactttggatatacacccagtagtgagattgctggatggaatggtagttctatttttgttctttgagaaatctccacatcattttctataggaattgaagtaatttgcattmccaccaacagtgtataagcattccctttcctccacatcctcaccaacgtctgttatttgttgactttttagtaatagccattctgactggtgtgagatgggatctcattgtggttttgatttgtatctccctgatgattagtgatgttgagtattttttcacatgtttgttggatgtttgtatgtcttcttttgagaagtgtctgttcatgtccttgggccactttttaatggagttattcacttttttcttgttgatttgtttaacttccttatagattctggatattagacctttgtgggatgcacagtttgcaaatattttctcccattctgtaggttgtctctttgttgattttttcttttactatgccgagctctttagtttaa

SEQ ID NO: 778953 - DNA, 634 bp, Homo sapiens
agaggagagtacctgaaagttctgaaacagacaagccatggggttattgttagctgggcaaggaattgtggactgtccttggaacgcctggagattctggtacccctggagaagttgctgctgttgctgatttggaggaaacatctgattgttgtttaacagcgactgtagatgagtcagttgatggttactcaaagtattgtttattgatgacatatcacctacagtttgaaaaacataaaatataaataaatgtgattcttcggagattygatgcctctctttgtacccgagaattcctgaaacagaaactaagtgctatgcttacttgggtaatgcttttcttttttacttctcaaagtcttactaagtggtaaggaaagagtagctttattatttagttttatcttgtataattagttttttaattttacatcatggaaagactacttagtctttgctctattcattaggcagtccttatatattgagctgcagtgtcatatgattccttcatctatttttagattttagatctattttagagcacctaaaattaaaggttgaaattagtcctataatgttttagcaattgtaagtatctgaccagataattaaaataagtgagcctgat

SEQ ID NO: 778954 - DNA, 598 bp, Homo sapiens
ttcagcaatacacttctagaacaagcagtactcatgctgctgaaggatgaggctggacatcatcctgaaatcaaatagactcatctaaatagcctactcctattggcaaaccggcccaattccatatttcttaaactaaaatgaaaatcatttaacttccttttmcaacttgaaatgctgagaccaagtacatgtggatgagtaagaagacagaaaaaaaaaatactggaatcacaacttgaatgaaaacttgttttaagaattgcctattttgtaccagatgttctgtcaggtactttgaatttctttttaaatttattatcttagcaagccagtgaagtgagtattatttttcccattttacagataaagacatagtctgagagaaagttggtggcttcctaaaagtcacacacctagtaaatgtcagaatcagaactcaggtcattctgaaggttctttccactacatcaccctcctctcacattttagatactgagtaataaacatttaatattagatcacagaagaataccacagacatttgagtaagaagagcattatttcatataaatatggcgcttctcctcagtacacc

SEQ ID NO: 778955 - DNA, 598 bp, Homo sapiens
ttcagcaatacacttctagaacaagcagtactcatgctgctgaaggatgaggctggacatcatcctgaaatcaaatagactcatctaaatagcctactcctattggcaaaccggcccaattccatatttcttaaactaaaatgaaaatcatttaacttccttttccaacttgaaatgctgagaccaagtacatgtggatgartaagaagacagaaaaaaaaaatactggaatcacaacttgaatgaaaacttgttttaagaattgcctattttgtaccagatgttctgtcaggtactttgaatttctttttaaatttattatcttagcaagccagtgaagtgagtattatttttcccattttacagataaagacatagtctgagagaaagttggtggcttcctaaaagtcacacacctagtaaatgtcagaatcagaactcaggtcattctgaaggttctttccactacatcaccctcctctcacattttagatactgagtaataaacatttaatattagatcacagaagaataccacagacatttgagtaagaagagcattatttcatataaatatggcgcttctcctcagtacacc

SEQ ID NO: 778956 - DNA, 641 bp, Homo sapiens
ttagcataaaacagataaaccttttaaaattataattaaatgttttattcagagaaattaagagtgatatttataggcttatactttattaaatatatttaaggtttctcaagataaatatgttcattatttgtaggatgttgatgcactgatgtgtgtatatatttctttgtggaatactcctaataaaatttcaagttacatactagttaacctttgccacctagcttatttctgagctgccttagcattcttgtgcaaaaatttactcagggaaggccgactaatttagtaccaggccaagtaaatgacaataccttatatatcacaaaaattaataaaaaccattttaattcctagtacaaatttagggttactcttctggcttacctaaatttctgttttcaaatacttaatgtgatcacatctttttacgttcatctattgatataatttacaaaaraagattatacttgtaaacaacaaacctgttacctttgtaatcattcaatgatcttagttataaagatgatataattagcagatcagatctactctaaataaaacattctttaaaatactatacaatattttttcatttttattactttattatatatatgtgtatatatatatttata

SEQ ID NO: 778957 - DNA, 311 bp, Homo sapiens
tagagtccacatagcaagaagcttcaagaggtgatgagctcaagcagggaaagtgggatgtcactgctgccttactcccatgcctctttgggcctgataatttagaggaggcttacattcctcagagaaggtttcttttytttctcactcttaaaacaattaagtaccttgcttgttgaagtcacacagcgagcaagttacggatcttgacttcaagcctaggtttgagactccgaagcctattttctttataatatattataccagagcttctgaaccttgggcatacattagagtcaaatggttaaatt

SEQ ID NO: 778958 - DNA, 573 bp, Homo sapiens
tagaaaatatgcacgatggttgcagtctacacaatttatgaggccatagtaggtatttgtaactccctcttccacttcccttcccatgctccctttgctcagttatcattttagctaggtgttattatttatcagtcagagtgacctgaaccttcattcctgaaatatctgaaccattgtggttcttgcttggcttggtttgctctaatcttgtaaattttaccatggatatggaaggaattgctcagatatggatatgaaaggagttgctcagagaatgtcttgcctttgagacatggtcttccctctgttttgtagtaccaccacttttcccactttatgattaggattaattgtcccagygaatacagtaatccctttctttccttgttggttcagtgccttgaagacctcaaagtggctgatgtggcagtctcagcttccattcaaaggaacccttctagtgtttcctggaaaaagtattccttccatggaaactaagagcacaacattgtgaggttggaaacaaaagttatgtgagtaggtcattaggaataataatggaaccaccaa

SEQ ID NO: 778959 - DNA, 622 bp, Homo sapiens
agtatgcagagcaaaagtgttggaagtacttaaacatttaaaggacatatccattttatacttttccatacagaaatactcaagaacattttccaagcgtgtttctctttcaaacaaaggatctctaaaggccattttctcactctttaaagcattgaataccactgcctcaaaacatggccattattgagttacacttccccgcacagtccatgtgatgcctgcatctgcccagcatgatttctagcaatagtaaaagtcccaagagaactacaaaagaaccattattttccttgtgttctacaacggattagtcaatgcgaaattcatgcttgaagggrccttagtgataattttgactccacattacagatgaggacacagaggcccagagttcagcagtacaacgaaagagagtggaacttaaaaaactaacaatctataaactgagacttagctctttgaaggtacattatagtaaaaaataaacctagattgcagaagagttgagaagtttaagttacacaaaaatctagcccagaatctcagattttaaatgaatcaagcattcttatttttatccaggcttaaattagctaaggttatatacaaacccagtggc

SEQ ID NO: 778960 - DNA, 544 bp, Homo sapiens
aagagactatcatttgcatatataacaatctgaaataaaattataggatatatgtgcaccacacctgcatttggaagcatggtatatatgtgtaatgaattgtatatctttggaagcctgtcacttagcttaatttagtttttccaatttttaaatatttttcattaattagttgtgatttctstatacattatacctcttttgtaactgtgggaatgtctaagtatatttctgaaatttatattttaacaatttggctcataattacacttgtctttgccaagtactgtggtagatgctagagataaaattaaggagaaatgattcctcaaaatgcttatacacctcctagtttatttatattgtgttagagaacaaatgcttatattttgaaatgttaaaaaggcacagcataaggaaagagataatcaaaattgataatctgaatggtttgggattttgtgttttctatctggtaaagttgacctcatttacatgcgaattcctatattttgcacatgaaactgaaggtagagagtcagaa

SEQ ID NO: 778961 - DNA, 573 bp, Homo sapiens
agcactaactctgaagtctttgtcttgtctgtcatatatgatataggcaaaaaatactttatgttgtacctgagaaaggatacattttgatgtttattagccaaatatatgaactttaatagacatttgccattatttgaaaaaaatattgctatatgtcctaactctccttcatgttttgggggaactcctcattttatgagtactgttggcaagtagagtgctccttttttctttatgaaacctaaagatgcctgcttgctttcccagtctcacttggagctaaggtgcaaacccatgatytaggtccactaataaaatgtacacacctcagactttgaatcaagagctagtggtgctaagactggaacatacatataattctgcaagaggccatggtgataacaccaaaatgatgctcttcagtcagcagtggtattaagtctgaaagaagcatccagacagcaacatattcagagtgggttggtatgaaaattaaatgagattttatgagtcatggtgttacacaatgttctgatggttgtgttcttaacagctaattccagccactga

SEQ ID NO: 778962 - DNA, 573 bp, Homo sapiens
agcactaactctgaagtctttgtcttgtctgtcatatatgatataggcaaaaaatactttatgttgtacctgagaaaggatacattttgatgtttattagccaaatatatgaactttaatagacatttgccattatttgaaaaaaatattgctatatgtcctaactctccttcatgttttgggggaactcctcattttatgagtactgttggcaagtagagtgctccttttttctttatgaaacctaaagatgcctgcttgctttcccagtctcacttggagctaaggtgcaaacccatgatctaggtccactaataaaatgtacacacctcagactttgaatcaagagctagtggtgctaagactggaacatacatataattytgcaagaggccatggtgataacaccaaaatgatgctcttcagtcagcagtggtattaagtctgaaagaagcatccagacagcaacatattcagagtgggttggtatgaaaattaaatgagattttatgagtcatggtgttacacaatgttctgatggttgtgttcttaacagctaattccagccactga

SEQ ID NO: 778963 - DNA, 621 bp, Homo sapiens
attagaagaaatagataatgcatataattagtggtcttggaaggataaaagaaaaataagccacattcctatctcattagaaataagaaaatttgctttctgaggtgctggctaaccatgaaccaaatctctgggagaatttttaccaatgagtaaagtctctcattcagtggttrtatttattgcctaaaaaagtgattcttaattttttggaggttatttttgtttcatgatactcattcatcctaaatatcctttctttagagtatttgtgatttcaaaaaagattaaatgaattaagatctactttgttctgaaatctttaagggatagtggggcttgagatttctatgatgctgttgaaaataattttggacattccgggttattgcacaagcagattgagaagctctggcttatgtcattcaatggtgccactttcttaacaagaacacatattgtgcattttataaacatctagccagaattaaatacgtaatcagattttcagcactttgaatcaaaatttaatgatatggtgaatctaagaaaatttttggtttgacttgcgtaattcattaagtctctctatataacctttttacatttattaatagccac

SEQ ID NO: 778964 - DNA, 621 bp, Homo sapiens
attagaagaaatagataatgcatataattagtggtcttggaaggataaaagaaaaataagccacattcctatctcattagaaataagaaaatttgctttctgaggtgctggctaaccatgaaccaaatctctgggagaatttttaccaatgagtaaagtctctcattcagtggttgtatttattgcctaaaaaagtgattcttaattttttggagkttatttttgtttcatgatactcattcatcctaaatatcctttctttagagtatttgtgatttcaaaaaagattaaatgaattaagatctactttgttctgaaatctttaagggatagtggggcttgagatttctatgatgctgttgaaaataattttggacattccgggttattgcacaagcagattgagaagctctggcttatgtcattcaatggtgccactttcttaacaagaacacatattgtgcattttataaacatctagccagaattaaatacgtaatcagattttcagcactttgaatcaaaatttaatgatatggtgaatctaagaaaatttttggtttgacttgcgtaattcattaagtctctctatataacctttttacatttattaatagccac

SEQ ID NO: 778965 - DNA, 616 bp, Homo sapiens
ttggatgtggaatgtaacaatatgaaaggtaatgatacgaaatgcactttaatgttggtaattaattccctaagggatataaaaaagtcttgttcagaagttctcctttaattctctcttactcttaatatcccctggctgcttcctttctaatagttaatgtttgagatttttaaggttcattttttcttccactggaaactccctggacctcatccattgccattgccattaccatagtttcagctactttcttcatagagcccatctcagatccagagctcagtagtgcaagaaatgtttatttgattttctgaaatgaactaagtttctgcctccagtagtagaatacatagtcccaatcaattcattggtcttgcctgaccctctttttgctaarctggattctgacttctaacaggctgttgtgctccctcatcttggtgataaaggttctcatcactccctcctggaattagtagatgtatctgtgttcccgctggcctctagctgtggacatctttatcaagtagaattacatttggctgttacctaaactaataagatttaaagattcatgttatatggctgtcatgtaaaagtctagacagtgggc

SEQ ID NO: 778966 - DNA, 593 bp, Homo sapiens
acgtatattaggtcaactgagcttggacaagggtgctaagaatacacaatagggaaaagatagtcacttcaacaaatgttgttgagaaaaccgaacatccacatgcaaaagaatgtagagattcctattttacagcacacacaaacaaaactcaarattaattaaagacctataaactcaaaattaattaaagacttaaaggtaagacctgaaactgtataacttctacgagaaaacatagaaaaaatcttcttgacattagggcagacaatagtgtcttgaataagtcccccaaagtatgggcaatagaagcaaaaataaagaagttggactatgtcaatctgaaaagtttctgggctgggcgcaatggctcatgcctgtaatcctagcactttgggaagccaaggcaggcagatcacatgaagctaggagtttgaaaccagcctggtcaatgtggtgaaaccagtctctactaaaaagacaaaaattagctgggcattgtgcttcacgtctgtaatctcagctactcagggggctgaggcaggagaatcacttgaacctgggagacaagttgcagtgagccaagatcatgc

SEQ ID NO: 778967 - DNA, 593 bp, Homo sapiens
acgtatattaggtcaactgagcttggacaagggtgctaagaatacacaatagggaaaagatagtcacttcaacaaatgttgttgagaaaaccgaacatccacatgcaaaagaatgtagagattcctattttacagcacacacaaacaaaactcaaaattaattaaagacctataaactcaaaattaattaaagacttaaaggtaagacctgaaactgtataacttctacgagaaaacatagaaaaaatcttcttgacattagggcagacaatagtgtcttgaataagtcccccaaagtatgggcaatagaagcaaaaataaagaagttggactatgtcaatctgaaaagtttctgggctgggcgcaatggctcatgcctgtaatcctagcactttgggaagccaaggcaggcasatcacatgaagctaggagtttgaaaccagcctggtcaatgtggtgaaaccagtctctactaaaaagacaaaaattagctgggcattgtgcttcacgtctgtaatctcagctactcagggggctgaggcaggagaatcacttgaacctgggagacaagttgcagtgagccaagatcatgc

SEQ ID NO: 778968 - DNA, 618 bp, Homo sapiens
tgcctctacctgcaagcggttatgtaaatggaagggcatgccaggtttcctagcactccagctggtcacacgttaagtctgctcttgtgcacattttaaactgaggggcaaattacaccaaggagcattcagagcccaaaggtcgacctgcaactattatgctcctaaattctctttctggtttcttttctgcctgctttaagtcagctgctacttttctactgagctaaaatccactatttacatctaaccatttagttttgcaaaccagtgagttttatattgatatctcatggctagagttctgaaataaaatctaaaggatttttgtttgtgtgagtgtgagtgtgtgtgtgtacctacacatattttgttatgtttttggccacatggtaccaaattggcttaaacttraaagtactcataaattaaataataagcccaaatgcttttcaaattcacatgacttaagtaaaatctttaataaataagccggttttaaaattattgataaagtaatatcagaaatgtcttaagaattgtcagcatacttttgtgtttgcattcattgatcaaatgatttcatacttatccctggcaaatactataaggtatcag

SEQ ID NO: 778969 - DNA, 626 bp, Homo sapiens
tcagaagatgtaccctgttgcttcagttccttgtctcttttgagaaggcctgggatggtaactctctcctttaatttttgttgtaacttttaaaaattaatactctaaagtaagggagataatatttgaaaataggcaaataaatcttttgaatctgtttttgtctgatgtttgttgtatctatatgtttatgtgtgtcatgtggaagtgatattttaggattaaactgtatgaaagagctataatcaattgacttaaagaaaagtaagggcttatcagactcatggaagctagctcaggtctcttttaactcacatgacttcggtaatcttcagtaagattaatttggtaaatttaatctcaaaattatctccaatagtttaaaatcttgaagtcatgttatgttaaattaaaacctcgtttttaaccatggtggctcaygcctgtaatcccagcactttgggaggccaaggagggtggatcacctgaggtcaggagttcgagactttgactgacgaacatggtgaaaccccatctctactaaaaaaaatacaaaaattagccaggcgtggtggtaggtgcctataatcccagctgctcaggaggctgagacaggagaatcactt

SEQ ID NO: 778970 - DNA, 573 bp, Homo sapiens
gtgaagacctctgggtccttccctccttttgagctgggaggattgcaccagaagacaccacatgccctttctgttggtttctatttcctttctcttatccatttaattttttagaactgacttattctatctgaatagtaataaagacatcattttttcctaatgctgcaatgtttagatgttccactactatattctgggtagaatacttgttactaaacttcctctgcaacttttcaactttaatgtttctattcaaagaccatgtggctttgggtggctgcamtgtttcaaaatatttcctggattttagtcttttagtgatttcttaagtttacagaacaagattgatgaaattttttatgggcgagctctttgaatcttttcctgatgttaatttttaataatttcattgatttgtatacgttttgaaaagacccatggcatgtggagcatatgggaggaagcttcggttaagtgttcatcagtgaatgaggacgtgtgtgtatgtctggaaattgggcaatcatgctatagggtaccgagaatgcaggagacacagggctcaagctg

SEQ ID NO: 778971 - DNA, 594 bp, Homo sapiens
atggctgtgattgtcttccatctgactttaaactataatattgtaaaaattgaattccaactgtgatattactaagagtttgtaaaaagtggttttcattttaaagctatttattttgtctgcttggaacattttgtcactagcacgtgttaaatgtctcagatttttctgttattaatgttcattttatcttcatgtatttccttgcatccttctgatcatggttttttccacataaatccrttaatgtggtaatttgcattaatagatttatcacgttgaaatattttttcacacctgagactaaatttatctcgtaatgacgttttgctagttttcatttaccattttttatttaggatttttcactttgctcataagttagatggggccttaattttttctgggagggggctctagttgtcttattttcttatcaatgctgcattacactcttacaaaaaataaaagttttacttttttcatattctctaaatcactttgaatttggtaggaattgttttttttcttgaagattcgtagaacttgtttataaaaccatctgtaattagttcctttggttaaggagtacag

SEQ ID NO: 778972 - DNA, 594 bp, Homo sapiens
atggctgtgattgtcttccatctgactttaaactataatattgtaaaaattgaattccaactgtgatattactaagagtttgtaaaaagtggttttcattttaaagctatttattttgtctgcttggaacattttgtcactagcacgtgttaaatgtctcagatttttctgttattaatgttcattttatcttcatgtatttccttgcatccttctgatcatggttttttccacataaatccattaatgtggtaatttgcattaatagatttatcacgttgaaatattttttcacacctgagactaaatttatctcgtaatgacgttttgctagttttcatttaccattttttatttaggatttttcactttgctcataagttagatggggccttaattttttytgggagggggctctagttgtcttattttcttatcaatgctgcattacactcttacaaaaaataaaagttttacttttttcatattctctaaatcactttgaatttggtaggaattgttttttttcttgaagattcgtagaacttgtttataaaaccatctgtaattagttcctttggttaaggagtacag

SEQ ID NO: 778973 - DNA, 560 bp, Homo sapiens
acataaagattttatggataacagatgtagagaaatgtagagctttctcagattgaccgtagacatattttcttaagagatacatacatagagtagttattctgttaaccaatgtttaagatcataaaattgttacataaatatagrccttccaaattttgattgaattcttgtgaactaaatgcaaactgtttacattagggcttaaaataacggtaaaataatcatctgttcagtttcttttatattgcctagtatgagcagacataacaaaatgatattaaagcatccaaattttacacgatctagtggacatacacaaattaaagctcacatgctgtgcattctttttttaaaccaccatttcccttttcattttataaaaatttatttataaaaaagtgcatttaaaaagaattgtataaatggaaaaatggattggaagtgaaaatatttgaagttactttactttagagtgaggacgatttgttgtgacaagaaatataaaacaatttttttatttcttttttaacaaatagggatactgaaaatacaatttt

SEQ ID NO: 778974 - DNA, 598 bp, Homo sapiens
ccagagttgcaaaacatttccttctactattctggcaagacatcatgcaacaatactcatacaaatagatgcatattcacattatatatattatgtatatataaaaattgtgtgtgtgaacatatatatatatacacatatatatatataaacttttttttttttagagacaagatctccctatgttgcccaggctgttctcraactcctgagctcaagtgatcctcctgcttcagccacccagagtgctaggattataggcgtgagccaccgtacccagcctcacgtaatatttctccttcagttatgaactttatctttgccatatttcatatatgcctcataagtcagaaattaaactttttaatgatagaatgcaagttgctaggcaaagaagtagatgcataaatagccattctatattaaaccttaactctaataatattttaaaataagtaaatgaaagcataaacagcatgacatagggataatgtcgattaaaacctcattagaggaaaaaaaatccacagacttgaatcaagggcaacaagaattactcattgtgatgaaaaattatataaatctaaattaggtaaac

SEQ ID NO: 778975 - DNA, 598 bp, Homo sapiens
ccagagttgcaaaacatttccttctactattctggcaagacatcatgcaacaatactcatacaaatagatgcatattcacattatatatattatgtatatataaaaattgtgtgtgtgaacatatatatatatacacatatatatatataaacttttttttttttagagacaagatctccctatgttgcccaggctgttctcgaactcctgagctcaagkgatcctcctgcttcagccacccagagtgctaggattataggcgtgagccaccgtacccagcctcacgtaatatttctccttcagttatgaactttatctttgccatatttcatatatgcctcataagtcagaaattaaactttttaatgatagaatgcaagttgctaggcaaagaagtagatgcataaatagccattctatattaaaccttaactctaataatattttaaaataagtaaatgaaagcataaacagcatgacatagggataatgtcgattaaaacctcattagaggaaaaaaaatccacagacttgaatcaagggcaacaagaattactcattgtgatgaaaaattatataaatctaaattaggtaaac

SEQ ID NO: 778976 - DNA, 598 bp, Homo sapiens
ccagagttgcaaaacatttccttctactattctggcaagacatcatgcaacaatactcatacaaatagatgcatattcacattatatatattatgtatatataaaaattgtgtgtgtgaacatatatatatatacacatatatatatataaacttttttttttttagagacaagatctccctatgttgcccaggctgttctcgaactcctgagctcaagtgatcctcctgcttcagccacccagagtgctaggattataggcgtgagccaccgtacccagcctcacgtaatatttctccttcagttatgaactttatctttgccatatttcatatatgcctcataagtcagaaattaaactttttaatgatagaatgcaagttgctaggcaaagaagtagatgcataaatagccattctatattaaaccttaactctaataatattytaaaataagtaaatgaaagcataaacagcatgacatagggataatgtcgattaaaacctcattagaggaaaaaaaatccacagacttgaatcaagggcaacaagaattactcattgtgatgaaaaattatataaatctaaattaggtaaac

SEQ ID NO: 778977 - DNA, 629 bp, Homo sapiens
cattttgttaagattggatattaaggaattcaaatgaccaggtctgttattagaataaggaaacaaattccacttaactatttagatttttttgccttctccttcaatatgtagagcatgtgcattgtgtagaggctaacttacaatatgtatgtttctgtgtgttttatataatatctaacaaatactttaatagtattaaatagtacagttcagaagttttaaactcatatgagttaaaaagctcataggagcttttcagagtcaaacaaagcccatgaatgaataaagtggtctcttrgcaataaataaggaagtgatggagactgtgacaaaactggagatggcagtccccttttgaaggtattcaaattcagttgctttaaaacattttgtctactgtcactatcaaggaaaacacttctgctgactaaatgtggtctttgaaaataccagtttgagacttccaaaaagcccagcttttcagtatatcctcacccagggattgtctaccatggaggaatcattgttgtggcccctccaatcagacccccttattctcaagagtatatcataatttgccagtataagtaataataagttactaaatatcatcatctgactaatag

SEQ ID NO: 778978 - DNA, 549 bp, Homo sapiens
tgatataagatatctgtcatgccatgataggaaaaagtttgcagtttttttgtggggctaaaggattgtcttatggacagtggtgagaggttgatgtggagtctatgaagaaaacctatcccatttgataggaattagttacttctccaaagcccaatctcattacagacagggtaaraaatcctcttcttgcccattatctagtgggttgaagaattcaggagtattatttcctggtccgtcaaattagactttgtgacttccagttagaaaactgtatattgtgaagaacactgtaaatataaattttaaactattagaattattctaagagccattattatatgctaaattgcacccacccctcaagaaaaattatagttgaagtcctaaccctcagtacctcagaatgtgactgtatttagggacaggatgtttatagggtcaattaagttaaaatgaggtcattagtgtgggccctttagatacagacaggtatataggaaagattatgtgaaaacacactacaagctaaggagaaaagtctga

SEQ ID NO: 778979 - DNA, 614 bp, Homo sapiens
cttaagcccaacaggttgaggctgcagtgagctgtgatcatgccagtgtactccagcctgggcaacaaagtgaaactctctctccaaaaaaaaaaaaaaaaaagattggagtggagataagcaaaatagaaaatagaaaatagagaattaataaaaataagggtttttttgaatatccatatttatagtagtattattcacaatacctaaaagactgaagcaactttactgtctattattggaagaatggataaacacaatgtgttatatacatacaataaaatattattttcccttaaaaagaaatgctgacacatgctaaaataagtaaaccctgacgacrttgtgctaagtgaagtaagccaggcacaaaagaccaattattgtttgattccacttatatgcggcacctagagtcatcaaattcatagagatggaaagaaagtagaatggtggttgccaggacctaggaggagggcaaaaagcggatttagtacttaatggtacaaactatcagttttgtgagatgaaaaagttctggagatgcatcagtgatgatggttgcataagaatgtgaatatacttaatgctacagaactgaacacataaaagtg

SEQ ID NO: 778980 - DNA, 627 bp, Homo sapiens
actgagtggtattcaatattacaggactggaggatcttaagtaattcctgaaacagtgttagagaaacctcagggacctcccacagtggtcactggagccagcttgcacagctcatgggagttgattgttagcatctcttcccaactccacattcaatgacattgtgttgatagcttaaaatcggccacagtggaattatttacaccacagaaatcagtaaacactaggaattggtgcttctcctcacccttgccaccagccagttgttaagcatttaccagaacactgctgttcctaaaatatattccaagaattactgctacagagaaggcagtatgctaatgaaaaggcatatagamataaaaatgatgaaagagacaactttgaaggacaggaataaaatcggatctaaaaataaaaggagattcttatgataaactctaaacaaatgcattgaagcattaagaataaaaatgccttccctagctgagaaaaaatatattttagtgttcaaaaggtttaaaatgtaccaggaaaaattaattgaaggaacacaattaagcttggaaatgtctttaatttctcagagaaaaggaaagtcttgcaagcatctcttagcaggaaaa

SEQ ID NO: 778981 - DNA, 527 bp, Homo sapiens
agattaccctccgtaatgtaggtgggccttgttcaagcagtggaaggccttgtgcaaaaagactgaagtccctagaaggggaatgaatctgcctccaggccaccttcagattcaagattggattattgacctctgttggaatttccagcctgccagcctgtgctgcagattttatacttgccaactgttagggacaaactgccccaaaaagtttcttggtgctgcccacccctccccctaatgctctgcaactcttctccatgctgcccacccttcccccaagcctctttatgtttctaagcccttatctagacgccgcggtgaagccagcagacttcacttatcagaccttgctgtgataaggaaaccccaaytacaaaccatccagacggcacagggggaggtcatgggaagcataaacaaactttacctacaccctcctgtaagttcctgttcatctagctgctaccataaacgtcacacggtgatatgtggcaaaattaaccagcaaacaacctcgggatgcg

SEQ ID NO: 778982 - DNA, 499 bp, Homo sapiens
accccaaattatggtatatacattctactgctctaaatgaaccaaaaacattgccaacatacctaatatccctatcagatgagtccagctccctggcctcctcaggtctctccttctcagactggcccagctggatggaagagaggcgggtggccacgttggctatgccaagagtttgaggaaaagggggacctggagctttgccttctccaaatgctgaggagtcaattacagattcacaggcagggttgtgattgagcccactggcatgtgaggcaaggaggtgaatgctgataygcttggtacagaagactgtattgtccaaccccaaggtatctgaggcaccagggaggacccgcctgaccgatccagcatcctcctgaggaaactgctgatttaccgcaggaggtttccaccgcctgctcctgttgaggacattccactggaagctggggttcaggaaactagactgttcaagctggcagccttgcctcggcat

SEQ ID NO: 778983 - DNA, 438 bp, Homo sapiens
gtgattttttttttttttgccagccccagtttccttatctgtaagctgaggggcatgatatctgcctcataggatgactgtgagaatttgaggaaagaattttaggtacataggataaaaggtgctcaataaatgatagctattagtatgtatgatatattatttgcaaatacatttatttytgaatttcagtttgggatatcgaatctctgccacccctgcctaaggttgcacaggttctccgaggggtatgagtggttgttagaagtgggagagcagtggtgatttgatattcatatatatttgtcagatctgtctgtaggagaaatagtatcatgttccatttgtgcatctactcacattgcctcaaccaccactagaatgctgaaactccacatctgtacctgtagtcccaacttccttattttctggattctg

SEQ ID NO: 778984 - DNA, 595 bp, Homo sapiens
tatttattaatattacatacacatacttatgtgtgcagcaccctggaaccctgttcctggcatgtgggagaccatcaagatgaggatcctgcccctcccctcatctgtgccttcctgtgtaaagacactccttatgctacagcttttttaaaaactaaactttaaaagaaactgctagaatttcttattattggagttgattccttatgtttaacttttatgtttgtttaaccactgtgtttgtatttctgacaaatacacctctatccctgaacatagatgtcagggaggcacagactattaaatatttagaagagccaggaagtccaccctcagcttatccgtctgtgtcaatcaagctccatgttcctgagcagatgggtctgcctgtgcccgcaggcagctggggttggtacctagggggcggggaggagcacagatgctgctgagatggtgcacaaagggaagaggccttctccaggcctcagagctgcttctattctttggaacatgacagattacaycctattcaccaagcccacgcatttcaaatgttcagtatgaacagttaagcaaaaatgttaaaagtacacag

SEQ ID NO: 778985 - DNA, 548 bp, Homo sapiens
atgctgacattcatagaaacaggactttcggatggctttgcagtccaggtttccagttccttttggaagcagagctacattcctgcccttggatccatggagcatcgcacaaccaatactatcacaggaaacaagctgacatgcacagaaaatacagactcagaatggggataatgaatgccagaagmatccactccgttttgattagcaataattcacacagttcagcaaaatgctttaatggggaacagagtttcagtttagggagattaaaatgttttggagatggacagtgatgatggttgcacaacaacgtaaatgtacctaatgccactgaattgcacacaaaaatggttaaaaggatccattttatatgttatgtaccttttatttcaattgaaacagacaatttttttaaaaagagtattttttgcgcacttaaggagcctctgtttgtgcttataaataaaaacttgggttctggaaattaagattaaggaatatatacttaattatattgcatctccttataatatttgtattgataa

SEQ ID NO: 778986 - DNA, 598 bp, Homo sapiens
gtcgtcttcgcccctatgatctttgccactactttttatagcagtttgttcacatggcctaactttgggccatgtcatcacctggaacttgttttgctttgcaagattttttaactcatcattcctctttgaccagaactttctgtcctgtccrtaaatgtcaccctctctgcctgttttcccactatcagcttcctctaggtttcatttatcttttccatgccattttggaccccatgttgttctggacatctccttcagtgtctttctttttctcaccacacccatggtgggcgtctcttgtgctgaatgtgaatccatttacattctctgcttctttgatctcattactgctaaagaaaatcatctaacagtgtcagcataatttttcagtctcattccgaaactcaaatctgcatggcagtactctcactcattcttaggcagctctctgtttgtccctatagcagctgttataggcttttaagctccctggtatcctggtcttcccactcctcctcggtctcagcaaatgatctacaggcaatgctgcacaaactctttgcacctccttcccttcacctctattcttgccctt

SEQ ID NO: 778987 - DNA, 598 bp, Homo sapiens
gtcgtcttcgcccctatgatctttgccactactttttatagcagtttgttcacatggcctaactttgggccatgtcatcacctggaacttgttttgctttgcaagattttttaactcatcattcctctttgaccagaactttctgtcctgtccgtaaatgtcaccctctctgcctgttttcccactatcagcttcctctaggtttcatttatcttttccatgccattttggaccccatgttgttctggacatctccttcagtgtctttctttttctcaccacacccatggtgggcgtctcttgtgctgaatgtgaatccatttacattctctgctkctttgatctcattactgctaaagaaaatcatctaacagtgtcagcataatttttcagtctcattccgaaactcaaatctgcatggcagtactctcactcattcttaggcagctctctgtttgtccctatagcagctgttataggcttttaagctccctggtatcctggtcttcccactcctcctcggtctcagcaaatgatctacaggcaatgctgcacaaactctttgcacctccttcccttcacctctattcttgccctt

SEQ ID NO: 778988 - DNA, 626 bp, Homo sapiens
cacagccacatttgaaaagctcctattgtgcaattcctgctctcttcgctggcacctaaacccagtcgccaggcctgttgatttttccctccagtatctcttgcattcatatgctcttctcccttcattctcccccaccctgtcactttcttttatttacaaatgttytctgagtgcctactgcatgctaggtaaggcgccaaaatggtctggagataaagtgtgagcacagcaggagacagagggagatagccattcttgagcagtagttggcaaacctttgctgtaaatgattaggcaataaatattttgagctttgtgggccattaggtctctgttgcacctcttggactctgccacagacaatgtgtaaaacaatagtggacgtgtgttctaataaatgcttaggcagtgactcagatttggcccatgtgttgtagttttccaaccctgttctagagggtgagggaggccgttaacaaatacacaatgtgtgtatgtgtttgtcaagttataactgctacgaagagaatggaaagctaggtatctttttgtgtgtggtggcggggggtgttcttttttatatacgctggtagaggaagcctcccccatctccagacagtggg

SEQ ID NO: 778989 - DNA, 552 bp, Homo sapiens
gttgcttctctgacctcatctcctgccaccccaatcccccagtggctccagccacactcccttcttgctcttcctcaaatacatcaagctccttcctgcttcaagggctttgtcctttgttgttgcctctcctggggacacttttccctacctcctccatgccagacctccacctgacacctccagctcaggtgtcaccgcctcagggaggcctcccctgactgccatctattgaaactccatcctcagtcattacaacatcctgtgttgatttcctccaggacagccggattttactgttactggttttgtctgtctcaccattaaaatgcaagctctataaggcagggaccttgtctccctctctttttttytccccccctctagaactgtattccctaggaattaaaacagccctggcacagaatcagctctcaataaatcttcctgtaatgcaatgagaacagcaagtgggctttctccctaggcgcacaggggatactgcagttgtcctgagggaatgagttctttttgtttattgttttttttttt

SEQ ID NO: 778990 - DNA, 552 bp, Homo sapiens
gttgcttctctgacctcatctcctgccaccccaatcccccagtggctccagccacactcccttcttgctcttcctcaaatacatcaagctccttcctgcttcaagggctttgtcctttgttgttgcctctcctggggacacttttccctacctcctccatgccagacctccacctgacacctccagctcaggtgtcaccgcctcagggaggcctcccctgactgccatctattgaaactccatcctcagtcattacaacatcctgtgttgatttcctccaggacagccggattttactgttactggttttgtctgtctcaccattaaaatgcaagctctataaggcagggaccttgtctccctctcttttttttyccccccctctagaactgtattccctaggaattaaaacagccctggcacagaatcagctctcaataaatcttcctgtaatgcaatgagaacagcaagtgggctttctccctaggcgcacaggggatactgcagttgtcctgagggaatgagttctttttgtttattgttttttttttt

SEQ ID NO: 778991 - DNA, 616 bp, Homo sapiens
tagtgatgatggacctagaatatgacagagagtaagacttcaatggtgaaaagggaaggaggcaggaagggtgtagagagagtcttccaacagcatgtgcaaagtctctgtggctggaggaactaaaaccaatctggtttgtcgttgttgttgttttgaagacagrgtcttctctgttgcccaggctggagtgccaagctgtgatcatggctcactatagacttaatctcctgggttcaagcaatccacctccctcagcctcctgagtaactggtaccacaggtgtgcaccaccacgcctggctaatttttatatatataaatgtatttttttttggtagagatgggatcttgctgtgttgcccaggctggtttcaaactcctgggctcaagcaatcctcttctctcggcctaccaaactactgggattacaggcatgagcaatcgcgcccagccaacctaaagacagtctggatggtatggagtgaccgaggggatttacggtcctgtgacgcttgcaggccctactaggaagtgtgatcctgattcccgagggcagtagaagccttgggagggttttagcaggagattgacatggtcaaatgtgtcattctggt

SEQ ID NO: 778992 - DNA, 616 bp, Homo sapiens
tagtgatgatggacctagaatatgacagagagtaagacttcaatggtgaaaagggaaggaggcaggaagggtgtagagagagtcttccaacagcatgtgcaaagtctctgtggctggaggaactaaaaccaatctggtttgtcgttgttgttgttttgaagacagagtcttctctgttgcccaggctggagtgccaagctgtgatcatggctcactatagacttaatctcctgggttcaagcaatccacctccctcagcctcctgagtaactggtaccacaggtgtgcaccaccacgcctggctaatttttatatatataaatgtatttttttttggtagagatgggatcttgctgtgttgcccaggctggtttcaaactcctgggctcaagcaatcctcttctctcggcctmccaaactactgggattacaggcatgagcaatcgcgcccagccaacctaaagacagtctggatggtatggagtgaccgaggggatttacggtcctgtgacgcttgcaggccctactaggaagtgtgatcctgattcccgagggcagtagaagccttgggagggttttagcaggagattgacatggtcaaatgtgtcattctggt

SEQ ID NO: 778993 - DNA, 495 bp, Homo sapiens
ccaggattggggacatggggtggggatgggggggtcccggaatggagttgtgtggggtgaggggactgctgagcctcttaggagtcagggtgtggggtgaatgggctgtcaggggccccagaagtcggggacgtaggatgggggtgcaggtgggtcccagggaatgaggttgtgtgtgctgagggggcttctgtgggccccaggagtggggggcataggatgggggtgctgggggtcccaggaatgrggttgtgtggtgagggggctactaggggtcccagaagtgggaggcataggatgggggttctggggggtcccaggaaaggtgttgtgtggagagggctgctaggggtccctgaagtgggggacataggatgcgggtgctgggggggtcccaggaatggggttgtgtgtggtgagggagctttctgggggtcccaggagaggggggcataggatggggatactaggggtcccaggcaaggtgtcgtgtgg

SEQ ID NO: 778994 - DNA, 621 bp, Homo sapiens
ggactctacgtgcttcagtgggaatctggacacgtttcttatcctttgggcctcagtttcctcatctgtagaatgggaatgacaacagtacctacctcatggggttaaggctcaggccagttaacaccctaaggagcgatgccttggatgtcgtaaatgctagaaaagcatgakttgttatgaataggtcctggtgccccccaccttccttccacaaaccaagacaaccaaggagccacacctgccacctggctttgctctctgaggtttcagtgtgtctgcagatcacagatcaccccaggtggcactttcagggagctggggactgaaagggggctggcagatgtcttcttccctgtcccatgatgtcctgtcctgctcatgaatgatggttgtcactgctccctaaatggtggcctgtgctgagcacatggggacccctttatagatgctaactcccatttcctcactcattcaggaactgtgctaggtgctagggccacggggtgaacaagaagtaggatcccagccctcacagagctcaattgctggtgcgagtggccaggaaggagataagatggggtgatgtgacagtcctgggggaaggatggccagggaggg

SEQ ID NO: 778995 - DNA, 621 bp, Homo sapiens
ggactctacgtgcttcagtgggaatctggacacgtttcttatcctttgggcctcagtttcctcatctgtagaatgggaatgacaacagtacctacctcatggggttaaggctcaggccagttaacaccctaaggagcgatgccttggatgtcgtaaatgctagaaaagcatgagttgttatgaataggtcctggtgccccccaccttccttccacaaaccaagacaaccaaggagccacacctgccacctggctttgctctctgaggtttcagtgtgtctgcagatcacagatcaccccaggtggcactttcagggagctggggactgaaagggggctggcagatgtcttcttccctgtcccatgatgtcctgtcctgctcatgaatgatggttgtcastgctccctaaatggtggcctgtgctgagcacatggggacccctttatagatgctaactcccatttcctcactcattcaggaactgtgctaggtgctagggccacggggtgaacaagaagtaggatcccagccctcacagagctcaattgctggtgcgagtggccaggaaggagataagatggggtgatgtgacagtcctgggggaaggatggccagggaggg

SEQ ID NO: 778996 - DNA, 653 bp, Homo sapiens
gggccacggggtgaacaagaagtaggatcccagccctcacagagctcaattgctggtgcgagtggccaggaaggagataagatggggtgatgtgacagtcctgggggaaggatggccagggagggtccctctcgggaggtgactaatgagctgaggctgggagaatacrgaggaggcagatgtgtgacagtgtaggggaagagcttttcctgctgtgggaacagcatatgcagcctgccacaagaaatggcatgtgggcccggcacggtggctcatgcctgtaatcccagcactttgggaggccaaggcaggcagaccacctgaggtcaggagttcgagaccagcctggccaacaaggcaaaaccctgtctctactacaaatacaaaaattagccgggtgtggtggtgggcacctgtaatcccagctactcaggaggctgaggcaggagaaacgcttgaacccaagaggcagaggttgcagtgagccgagatcaccccatggcactccagcctgggtgacagagtgatactccatctcaaaaaaaaaaaaaaagaaaaagaaaaaggaagggaaatttccaaggcaagattccaacccagcctgcctttcagagaggcgcaattgcaaagtgttcatgagaacggactgcgaa

SEQ ID NO: 778997 - DNA, 649 bp, Homo sapiens
tgttgattgaagggccagtcctttctcaggagcctcttgtggaacatcttatcagactacctaattagcaggtgatgtcctataggtattgacaaagaagctaagccaagagtctaaatgtattttaattgggttcaaattaggccagaataccctacctttggttaaaggcaggctcaaaccctgtcctcatcttgtaataaatacttccttatttctttaaagaaaatactatggaaactaaggatctcagaaaggaagtgatcagctcctttagtctcaagtctgaacttatctaaccaagaaaaatatttgtagggcctggaaaaaacatccaggctttttttatttctgccacagcgtgttaggctggcagggccccaccttccactccctggtgaaggaaagtttgccgaagaaagggaggcagtgtgttctttgctttctrtttcttttgctccatgttccatggtctgtactgggtctgaggtaggagtgtagccatggctgattggcctgggctagcatctcagcatgctgcccccaaaccagttctgttccatgagctgaaatctcatcttccgtggttgacagtaaactgtggacttgactatgggatggacttgacaatggtgtgcaggagacagct

SEQ ID NO: 778998 - DNA, 612 bp, Homo sapiens
cactcacccaatcagtaccattacttgaggtggagccccatgtgtgctccaccccagcataggtgccttccacaaaaagaacctgccagtgtcagaaagtgagaagggaaatatcaggccttccgcagaaggggcaaagcatggggcttctggaaggtcaagctgcagggagaccttgagtagggaatgtcctctttcctaaaactcacagcaccgggtgatagggggatgctgtgccacgtacagagggatgcagcttcaggaaacagctctttaactcatccagtacagactggtccctgtgagtcattgagaccttcagacattttatatatyctgtacacctgagtttctcaaatacaccatgttccatagtgaaaagagtagggcttaggttcagacagacctgactttaaatcctctttctacaacttatggggtcatctgcattttacttaactatcttgcttatacatgctgcactgtaaaagcagggatactactatttgccttgcaaatgtcttgggatgaataaatgatctatctatcagtctgtgaaatctgctaactcaattgcattaattaattggtaaatgcttataaatggtggct

SEQ ID NO: 778999 - DNA, 612 bp, Homo sapiens
cactcacccaatcagtaccattacttgaggtggagccccatgtgtgctccaccccagcataggtgccttccacaaaaagaacctgccagtgtcagaaagtgagaagggaaatatcaggccttccgcagaaggggcaaagcatggggcttctggaaggtcaagctgcagggagaccttgagtagggaatgtcctctttcctaaaactcacagcaccgggtgatagggggatgctgtgccacgtacagagggatgcagcttcaggaaacagctctttaactcatccagtacagactggtccctgtgagtcattgagaccttcagacattttatatattctgtacacctgagtttctcaaatacaccatgttccatagtgaaaagagtagggcttaggttcagacagacctgactttaaatcctctttctacaacttatggggtcatytgcattttacttaactatcttgcttatacatgctgcactgtaaaagcagggatactactatttgccttgcaaatgtcttgggatgaataaatgatctatctatcagtctgtgaaatctgctaactcaattgcattaattaattggtaaatgcttataaatggtggct

SEQ ID NO: 779000 - DNA, 556 bp, Homo sapiens
ccttcccaagaaggatgggtacaaacaagcacagactgtgaagactataataaatacctaactcttcaatgccaagacagcaacaaacatccacaagcatcaagaccatgacttcaccaaatgaattaaataggggaccaaggaccagtcctggagaaacagacatatgtaacctttcagacagagaattcaaaatagttgttttgaagaaactaaataaaattcaagatagcacagaaagggaactcataattctatcaataaatttaacaaakagattaaaataattagaattgaacagaaattcgggagttgaaaaatgcaactgacatactgaagaatgcatcagagtctcttaattgcagaattgattgagaagaaacaatctgtgatcttgaagacaggccatttgaaaatacacggtcagaggagactaaagaaaaaataaaaaagaatgaggcatgcccacaagatctagaaaatagcctcaaaagggcaaatccaagagttattggccttaaagaagaggttgagaaagagacagggatggaaagtt

SEQ ID NO: 779001 - DNA, 618 bp, Homo sapiens
aaacttcaaataaataacttaatgattcatcttaaagaactagaaaagcaagaccaaaccaaacccacaattactagaagagatattcaagatcggagcagccgtaaatgaaattgacattacaaaacatcaatgmaacaaaaagttggttttttgaaaagataaacaaaattgacaaaccttcaggcagactaagaaagaaagtaaaaagatccaaataaataaaatcagagatgaaaggagacattacaatcaatactgcagaaactcaaaggatctttagtggctactaggagcaactatatgccaatagattggaaaatctagaagaagtggatgaaattcttagacacacacaacctaccaaaattaagccatgaagaaatccaaaacctgaacagcccaataaaaagtaatgagactgaagccataataaaaagtgtcccagcaaataaatgcctgggacctgacaacttcactatttaattctaccaaacatttaaagaaaaactgataccaatcctattcaaactacttcaaaagatagagtgaatacttccaaactcattctacaaagtcagtattaccctgataccaaaatcagacaaatacacattt

SEQ ID NO: 779002 - DNA, 618 bp, Homo sapiens
aaacttcaaataaataacttaatgattcatcttaaagaactagaaaagcaagaccaaaccaaacccacaattactagaagagatattcaagatcggagcagccgtaaatgaaattgacattacaaaacatcaatgaaacaaaaagttggttttttgaaaagataaacaaaattgacaaaccttcaggcagactaagaaagaaagtaaaaagatccaaataaataaaatcagagatgaaaggagacattacaatcaatactrcagaaactcaaaggatctttagtggctactaggagcaactatatgccaatagattggaaaatctagaagaagtggatgaaattcttagacacacacaacctaccaaaattaagccatgaagaaatccaaaacctgaacagcccaataaaaagtaatgagactgaagccataataaaaagtgtcccagcaaataaatgcctgggacctgacaacttcactatttaattctaccaaacatttaaagaaaaactgataccaatcctattcaaactacttcaaaagatagagtgaatacttccaaactcattctacaaagtcagtattaccctgataccaaaatcagacaaatacacattt

SEQ ID NO: 779003 - DNA, 626 bp, Homo sapiens
aagcagtactaagagggaagtttatagctatgagtgcctacatcaaaaaggaagaaaaacttcaaataaataacttaatgattcatcttaaagaactagaaaagcaagaccaaaccaaacccacaattactagaagagatattcaagatcggagcagccgtaaatgaaattgacattacaaaacatcaatgaaacaaaaagttggttttttgaaaagataaacaaaattgacaaaccttcaggcagactaagaaagaaagtaaaaagatccaaataaataaaatcagagatgaaaggagacattacaatcaatactgcagaaactcaaaggatctttagtggctactaggagcaactatatgccaatagattggaaaatctagaagaagtggatgaaattcttagacacacacaacctaccaaaattaagccaygaagaaatccaaaacctgaacagcccaataaaaagtaatgagactgaagccataataaaaagtgtcccagcaaataaatgcctgggacctgacaacttcactatttaattctaccaaacatttaaagaaaaactgataccaatcctattcaaactacttcaaaagatagagtgaatacttccaaactcattc

SEQ ID NO: 779004 - DNA, 566 bp, Homo sapiens
attcaagtacattctcatgaagacttccaaaaaacctttgccagaaaatttgccagccgcaacaatcattcatatcttattgagcaaatactaggtgctgtgcattgcgtgctaaaacattttaggcactctacgtggattctctccctacattcttacaccaatcctatgarataggaacaagttacactgatgcagtgctggcatgtagtatagactttagatatattaactcacatcttcctgtcaacaaccctaggacagaaccgctgctattatctctattttatggaatcaaagaggttgtgtaacttgaccagggtcacgcagctattgaacgtcagatccagaattcacacccagacagtcccattccagggttcatgctttgaccaacatgctaccctaccagagtgccacaggctgtggctctgaaatagggaaaggttaatgagagatgggtcagaactgtcagaagtattcctgtcttcttctgtgtgagctagctttccaaggagcttagggctctgcttcacatgccttcagctaagacatcccaggaccag

SEQ ID NO: 779005 - DNA, 601 bp, Homo sapiens
gtcatcacggagtatcttcttgccttctgtctcgacctcttggctatctttccaataagtttccatagtgaagaaggcagttgtacttaaattagatcttccccatctctttaaaacacccttgttctctctcctccaagccactgagtcatactttcccatcttctcaaagacttccctgtcactggagatgagggctaggacttggcactttctccttttctgattttacttcctacttcaacaagaaattaatatcacaacttgaaaagccttcctaactggtaaaatcgttctgctggaaaagctcattatcttttttcttttttytttttttctttcctgattaacctgcttctcacctatcctctgtccttcggaatctttttctttgtatggctgtctcaactcagcctaactttctttcaaagccctgctgagaagaactttaaaacattttgtatgccaggcacagttgtgcacgcctgtaatcccagcactttgggagactgaggcaggtggattgtttaagcccaggagttccagaccagcctgggcaacacggcaagaccccatctctacaactacaaaaaaatgtatc

SEQ ID NO: 779006 - DNA, 658 bp, Homo sapiens
gcttaaaacaaacggggtaaatgccactgctgaaattacagcttctgcttacattctttcagcttatcctttatttttataaaaatattcctcttgctgaacatatattttgagattaagcagtgtcttttctttctcagggaagaatatttctcagccctccgttctcaagacagatgagtgctttagaaagaggactctgcagcggygaggaggatggaatgacaggcaaagcacgcaggaccaggagatggcttcgttccctcaatcactcatccaaagacgtttaatgagcacctattgtgtgtcaggcattgtaccgggcaatggggatatcgtagtcagtaataagtgaggagagatgagttcatttgtgagaggctctgaccagtggaatcagaggaagggagttcccctgggtgggccaggttcaaagacattttggaagtagaatctgcagaacatgatgatcttttggaaacagggcagggacgtgaatgagcacgtaatgtccccatgggtttgtctttccgaaggtttaaaatcctcaagaataaggaacataggcatgtgtcgtaacggtctccacagtgggggagtattatgttagtgcacctgcatgttaactctgctcatgaaggggccacgtcttcaccac

SEQ ID NO: 779007 - DNA, 658 bp, Homo sapiens
gcttaaaacaaacggggtaaatgccactgctgaaattacagcttctgcttacattctttcagcttatcctttatttttataaaaatattcctcttgctgaacatatattttgagattaagcagtgtcttttctttctcagggaagaatatttctcagccctccgttctcaagacagatgagtgctttagaaagaggactctgcagcggtgaggaggatggaatgacaggcaaagcacgcaggaccaggagatggcttcgytccctcaatcactcatccaaagacgtttaatgagcacctattgtgtgtcaggcattgtaccgggcaatggggatatcgtagtcagtaataagtgaggagagatgagttcatttgtgagaggctctgaccagtggaatcagaggaagggagttcccctgggtgggccaggttcaaagacattttggaagtagaatctgcagaacatgatgatcttttggaaacagggcagggacgtgaatgagcacgtaatgtccccatgggtttgtctttccgaaggtttaaaatcctcaagaataaggaacataggcatgtgtcgtaacggtctccacagtgggggagtattatgttagtgcacctgcatgttaactctgctcatgaaggggccacgtcttcaccac

SEQ ID NO: 779008 - DNA, 630 bp, Homo sapiens
gtggaggtggtgagtctctgggtctcatggaatagacactttgcccagcaggggcaagtgctggaggagagacccaacagcagctgtggtggaaactcatgacaggcagggaggactacttcagttcctgaagggaagataggacaactttcaaggcagtaattcaaggcaatttcaaggcagggtgctggcagagtctcagcgtttttgggctgtggcaatcagccccatgccaaaaaggacatagttaaaaagagccaggatgtggatctcaaagaacygagaagagcagaactgccatgctccggacgaccgggctggaggtgggtgcgggagagagagtgaagccacctgagttgggggcaggatgatttgggatggtgagctggccaggtcattctattaacagttttctgattcttctatatttcttagtattataatttcaatcctgatgactttcgtcaatccaacgactcctagtgatcaagagctcttgaaaatcatgggtcctcagatggaaacctcagagcacacagacattttctgtgcagtgtcacctttatttccattgtcatcgcagaaattcctgagtggatgctcagtggctctgccagaccgagggctttg

SEQ ID NO: 779009 - DNA, 518 bp, Homo sapiens
caaacaccaagtatcggcaaggatgtcgagcgacagggagtcccgtgcactgccaggggaggtgtgaatcggcacatccaggtgggaaagcaaagtggccatagacaggaagggagccacatgctgagcccagggctcccctcctgggtccacctgggtgtccatgtgcagcagtgatggtgaggtcccgggcacgctgacagcctcttyccttcatgccagcgcctctcccctccttgctcttgtgtgatggaactcagcccacgtacgcggcagcaagaagcaccgagagtcagatgtacctggaacagccttcaccaatacaagagaggagtgcgtaccacagccgcaggatgatgagtagagaatggttattaaaggggtgtgctctgtgcttcaccaggcagtgctctttctctgtttctggttaagaaagaattatggaatctttcactccaaaaataaattctgctcccatgggatgagcagacacttcctcgagccacgagatggattct

SEQ ID NO: 779010 - DNA, 442 bp, Homo sapiens
aataatattcagaatctataaggaacttaattcaacaagcaaaaaacaaatacccctattaaaaaatgagcagaagacagtaacagacacttatcaaaagaagacatacaagcagccaatgaacatatgagaaaagcctccaaatcactagtcatcagagaaatgcaaatcaaaaccacaatgagataccatctcacaccagtcagaacgactattattaaaaagtcaaaaaacaacaaatgctggtgaggctgtggagaacagsgaatgcttacacactcttggtgggaatgtaaattagttcagccactgtggaaagcagtctggagatttctcaaagaacttagaactagcatgtgacccagcaatcccattactgggtatatatccaaaagaacacaaatctttctaccaaaaagacacatgtacctgcctgttcatc

SEQ ID NO: 779011 - DNA, 442 bp, Homo sapiens
aataatattcagaatctataaggaacttaattcaacaagcaaaaaacaaatacccctattaaaaaatgagcagaagacagtaacagacacttatcaaaagaagacatacaagcagccaatgaacatatgagaaaagcctccaaatcactagtcatcagagaaatgcaaatcaaaaccacaatgagataccatctcacaccagtcagaacgactattattaaaaagtcaaaaaacaacaaatgctggtgaggctgtggagaacagcgaatgcttacacactcttggtgggaatgtaaattagttcagscactgtggaaagcagtctggagatttctcaaagaacttagaactagcatgtgacccagcaatcccattactgggtatatatccaaaagaacacaaatctttctaccaaaaagacacatgtacctgcctgttcatc

SEQ ID NO: 779012 - DNA, 516 bp, Homo sapiens
agtgtctaatatatgccaattctatgtaaattttttaaaaaaacttttgttcttgctttccaggagtttggaaaggcaaggtcagcatgctctacaggaaaactgggttggcgataaccttgttggtcaatggcactgcctggagacttcccaagggctgccattttgttaggctcattgagagatatagaaaaacaggagtaaaaggtttcrcaattttaagcatcctgaggaagaatgctgtgcaaggggttggatgatgcctccccaaccccccaaaattagtccacttggagcccatgaatgggacctcattcggacaaaagggtctttgcagatgtaattaaggacctcaagatgaaatcctcctggactaatcaggtaggcccgagaccccatgacacagacagagacacagggagagttccatgtgacagtggaggcagggactggagtgatgtatctgtgcccaaggaacaccaaggattgccagcagctcccaggaggagatgggat

SEQ ID NO: 779013 - DNA, 625 bp, Homo sapiens
atgttggctaggctggtctcaaactcctgacctcagaggatccacctgtctcagcctcccaaaatgatgggattacaagcgtcagccagctgcgcatggccgctattttttaaattttactctcttaataaacttgtttttgctttgcaccgtggactcgccctgaattctttcttgcaygagatccaagaaccctcacttggggtcttgggattgggattggcaactgtttcctgtaacacttccaccaatagaggatggtggaaatgatgccatatgatttctcaagtgggtcattaaaatgtcctgcacttctgctttgttctcttgacatattggctcctggaatgcagccaacatgcaatgagaaaacccaggccatgtggggaggccacatggtgatgtcacagccagcagattcatctgaggtcctagtcagtatcaacacccagatttcttcagatggtttcaccctccagctgtcatgtcactcacagcctttgaggctttctagctgaggccccagacattgtagcgcagaaactagctgttctccagtgtccttctcaaatttcagacctacagaatccatgagcataacgaaacggccgttttatgtcactaa

SEQ ID NO: 779014 - DNA, 625 bp, Homo sapiens
atgttggctaggctggtctcaaactcctgacctcagaggatccacctgtctcagcctcccaaaatgatgggattacaagcgtcagccagctgcgcatggccgctattttttaaattttactctcttaataaacttgtttttgctttgcaccgtggactcgccctgaattctttcttgcacgagatccaagaaccctcacttggggtcttgggattgggattggcaactgtttcctgtaacacttccacmaatagaggatggtggaaatgatgccatatgatttctcaagtgggtcattaaaatgtcctgcacttctgctttgttctcttgacatattggctcctggaatgcagccaacatgcaatgagaaaacccaggccatgtggggaggccacatggtgatgtcacagccagcagattcatctgaggtcctagtcagtatcaacacccagatttcttcagatggtttcaccctccagctgtcatgtcactcacagcctttgaggctttctagctgaggccccagacattgtagcgcagaaactagctgttctccagtgtccttctcaaatttcagacctacagaatccatgagcataacgaaacggccgttttatgtcactaa

SEQ ID NO: 779015 - DNA, 644 bp, Homo sapiens
cttgccgacgctgctcaagcctgagttcttatcctgacataccaattgattatataacttcaggactaaataagaatgtgttcaaaggtgctggaaaaggtcagaaaacctgggttccagttcagctcttaggaactgtgtgaccttagaaaragaatcattatatgttacctcaggatgttgctatgagaacaagtaaaataaagtctttcgtaaagtagaagattatacatttatatatttgctcagtagtagagaataggtatatattattaaagcaacaaaatatttccaatgaaaagtactggaatggaattaggacattggggttctaggcttaacaacatgttaaataaattcttctagttgtatgctgtggtggctaatatgggattgacctgacgttatcggtaatataaggcggctattttgaagatctggctagtatcctatattttatttctaaaagttctacctgtcagaccttgggttagtcacttaacttctctgggacactagtttataggaatgtaaatgaattagattagatgattattaacttccattctagtcttaaaatggcctaccacattcacctatctccttctttgtgttgaaatctggtaaggtcagcacagaaagga

SEQ ID NO: 779016 - DNA, 615 bp, Homo sapiens
aactcacaacatcaacaacacatgtggtccagaaactgctaatgaatgtacagtgcagtggtggttcaattgtcaaagccgatgttcttacaactacatgagaagctgctgaaggactcaacgtctaccattttatggtcatttgcaatttgaagcaaattgtaaaggtgaaaaagctcaataagtgggtgcctcatgagtgactgaaatttttttaaaaattgttgttttgaagtgttgttttctcttattctatgcaacaacaatgaaatatttctcaatcagattgtgatgtgggatgaaaagtggattttgtaagacaaccagccatgatcagctccatggttggacccagaagaagctccaaagcacttaccaaagccaaacttgcacgcgcgcgcgygtgcacacacacacacagccttgcactgtttggtggtctgctgccggtctgattcactacaccactacagctttctgaatcccagagtaactattacatccgaggagtatgctcagaaaaccgatgagatgcaccaaaaattgcaatgcctgcagctggcattggtcaacagaaagggctcaattcttcttcaggacaatgcccaaccacac

SEQ ID NO: 779017 - DNA, 590 bp, Homo sapiens
aaaccctcaagacaatataacagacatagataaatgtacaattaaaaaaaaaatggtctgtacaaacatgcaaaccccctctttggaatagtagattaaaaacatctaaattgctctgaagcttcataggcatctgaatttttaatgaattgaaaaatatcatattgactctttacaagttgtaacatgcttacatatttatatgatccttgttaaacattactgctataattggttctggattaaaagcccaataaaatataaatgaaataaagtcttatagaggatgttagtgtttctctattttcatctctccctcaactccaattcacttctactcgtctctgtgcctgcaaatgttgarccctttagtgtaaattaccggggctccttgtcttctggcttccaggtgaattgggccaataggaggaactcacaggaaacaggagggtcgggggagagagaggctgggcattgcatccccttctttctttctgtatctccagtctggtaggggctgcctaatccacaactacaggtcctgttgagcaactgactcctgttgcatggctgcagctcctcagactctt

SEQ ID NO: 779018 - DNA, 631 bp, Homo sapiens
taatagaatctctcaaataaaatatacaaaaggtcaacaagaatatgaaaagatgctcaacatcattcataaggagaatgcaaataaaaacgaggcacaacttcacacccacaaggatggctaatgataaaaagttaaaaacaacaacaacaactaacaagtactggaaaatatgtggagaaattgaaatccttgtacactgctggtgggaatataaaatggtrtcttttctatgaaaactggagatttctcaaaaagttaaacatagaattaccatacaactcagcaattccactcataggtagaaacccaaaagaagtgaaaactagtacttcaaataatatgtacacccatgatcacagcagcattatccacaatagccaaaaagtgaaaacaacccaaatgtctaccaacaaatgaatggatgaacaaatcctggtgtatagatacaatgaaatactatgtagccataaaaaggaatggaatgttgggccaggcacagtggctcacagctgtaatcccaggactctgggaggccgaggcggacagatcacttgaggtcaggagttggagacccgcctggccaacatgttgtggaatcccacctctactaaaaatccaaaaattagcc

SEQ ID NO: 779019 - DNA, 493 bp, Homo sapiens
agaaatgcatttctcttatttaaggctttaagcctatgctattttgttgtggagcccaagctgactaatacacatacatatattttactatattgacattgaccgagttttgaacttttcatttaatattactaggattaatttttgtttatatggagtgggtgtgcaatatcacatttttcacatcyataacccaagtcccagctttttaattgaaattctgtaatttctgtactaagctgccatgctatatctatcacattttaaaagttcatgtatgaagttcagctcttctcaacttagattctatttgattccttgtccttgttctttgttcctattttgtctttgtctttactgtttttctgttttgtttctttttgtggttttaattgagcattttatgattccattttctctccttttttagcataactaattatacttccttttttactttttttagtgttgccctgtagtttgcaatttacat

SEQ ID NO: 779020 - DNA, 625 bp, Homo sapiens
ctttatcggattgggctgtgatctctatattacaatacctcatgctctgataatattctctaaacaaacttaaaaatacattccccttatcttttccccaaagtagatattgaataagtatttgttgacctagttttctttctttattcttaaacattcacaagaatcactcaaatctggaaaaagtttaataagaaaaatttacaacttaagkttgcatgtacaattaattcaagttgtttagagtcagattacaaatattagctgtgtttcttagtggaatttttttaaatgtgcaatactataatttgacttttttaatacaaatgagctttatctcaaaactttaataaaaaataatcagaactagaaaaatgtaaaatgttttcatccttctatattttaaatcatgtaatgggtcatttttgtaaaggcaaaattgatgaaatctacttaaattaaaatgtgtaatcctaaagatttactaaatccactaatctagttttccctcttaggaatatttagagtgatcagaaagaacctaacatatttaaacataaaatggtcagaacttagaatatattgcatatttatttgattcattttcatttatacatatagaaac

SEQ ID NO: 779021 - DNA, 604 bp, Homo sapiens
ttaaattatgtattattatttgcatgtttaaactttgaaacattctatcattttgtattggatattcttctatatttgttaaatattatgtttagcaatttaccagtgctgacagatgaaactttagttcactggctgctaaatattattttactatatgaacatatcacaatttatcttttcttctgtccattgatgttttaggttgcttataatttactcctattaaagataatacttagtaaagatttttcttcattttatatcatgtatttaaatgagagttcctcaaaggttcacattcagaaatgaaacttctcatgcggtaactgcttaatttcttcttcgacgttaccatatcccgccagactgttcttcaaatcgttgtgacaactcaaacaactgccaacatgtcatgagaactttttttgccagaccrtctgagcaacaattgttattgtcaactttttaattttcaccaatctgatgggtataaaataatgccttattgtttgcatcggcattttatgaatagctattaaaatgaacatctgttcaaatgtttattagccttttgggtgttcatgtctgtgaaatacttgtt

SEQ ID NO: 779022 - DNA, 621 bp, Homo sapiens
atgtaactgtcgcctgctaaggaaggatcctcatagacagggtggagatggttttacactttcaacagttcaattgtcagctttgagcaactgaattctagaaataaatgacagaaaagtgagaaggtttaaggaggcctgaagatagagacaaaggaacaatagagaaattgtatacttcaataggttatatttaaagtaacttttttrgatgaaaactcatgggttgggcaacaactaaaattaattcccatcctttagaggagaaataggaaaataaacattcataccaagtcaataattgcttaaataaattacatatctcataaattctaatatacattacatgtgaatggaagaaaactataaataatatcttaaaactatgcatgcaaaataggacaaaatttaaatgactagtatgtagacaaagttgagattcaaatacagcagctctaattttggtaatctgtgcaatttgaatacaataattttttttcttgaaaattaagggcacttttcatggtatactttactctcatttcgccagttgacaactctcaaccatcataccataaattgtgcactgtgttcctaagtaccagcatttttcatatgttg

SEQ ID NO: 779023 - DNA, 526 bp, Homo sapiens
ataacacttttataggaagaataaaaccatccattaagtgatgctacacaggaaaattgagaattggagtaaaatatttttggtgattctatatttaaaatgttgcttatgcatggacacaaagatgcagaattcaaataaatgttgtctttttatatttgacataaactacttcctccacccaaacataagacatattcatataagacagatgcttagaaatatrtttaggtggttgcagattttatccctacatttttcatttagttatttaattttatggcaaatattacagtttatttttaatataatattattgttttaatgacagttttacatgcttaaaatctagattaagtctttatgtctatgtatacatagatagctcagaaaagcactcagaaataacaaaaacttttccattaattcttaaaattttcaatgcatacaattccctaggtgtcaagaatagctcccaagaagcttttaaatgtgtaatattgacctgatttcaagacatataaaa

SEQ ID NO: 779024 - DNA, 549 bp, Homo sapiens
gcctcactctttgtatgccacattcatgttttttatcatactgattacaatcagaagaaagtatgagataaatgcttgttttttttatcacgatacatttggataaaaataatgaaaactgaataactctctcactgtaaagcttcatagaacagtccaactgttgcaagaagaaggctaccataggtggattttcagagtcacttaactctgtggctaatgtttttgtggcagccataatattatgtggggagaagttatttccatcttttcwttttattattctttagtattttagcaaacgagtgtagcaaattgccatggggctaggggagagaaaagcagaaagcaggatgatgatttttagattctatcttgttttttatcctgaaaatataaaccaaaaaaaatggcttcaggagtcgttgagggaaatcatatatggaattccactgtggaaattttataatcacttccctaaaaataactacagtttaattgcctatggaaaaaaatctacatgcataagaaccactgtggaaaaagaaa

SEQ ID NO: 779025 - DNA, 495 bp, Homo sapiens
aatattgaatatatattttgatcaggaaatgtgataaaacttctatggattatcttcacttcagttctaatttatttctaaacgtatttgaagatgcttgcatattatattctataaagtatttgaagatacatgtatattatattcagtacactaattagatgctaatattaaatgtttatttttaacattagaaacaattttagttcttaacartttaaaagtaatctgcttaagacatcgttccatctaaatctgaatatatgatatatttcaaacatagactcagaattttgaaaaatgaagtgacttctggtcccatagggttctgtctgctcatatttcataagaggggactgaggctcagtgaggttacataatttgactaaattcacatagttaattaaataattatgctttggagatatatatttacatgtcacaaatgtaaaatcattacatgtatttataaatgagaaacagactcaaagtgat

SEQ ID NO: 779026 - DNA, 617 bp, Homo sapiens
agtatttatgtgctaagttgacgatgggtagacttgtgatggttaattttatgtgttgactgggccacgggataccaaatacttggtcagatgtgacactggttatttctcagcatgttttgggtgacattaacatttaagttgggagactgagtaaaggaaactgccctccacaatgtgggtcagctttatccaatcagatgaaggcctgaatggaacaaaaagctgattctcctccaagtcagagagaattctttgtgcctgatggatgcggactgggacactagcttttgctctgcttttggactcaaagggaaacacrggctcttccttggtcttgagtctgccagcttttggaatggaaatacaatactggcttctatggttctcaggcatttggactcagtctggaattaaaccgtaagatttcctgggtctcctgattgctgaatcaccctgcagatattgggatgcaccatcttccataatcacatgagccaattctttgttgaaaaagtctatttttgtgtatatcacatataatatagacaaatatatttatgtaaatatatattatgtataggcagaaatatatatatttggctattttcctctga

SEQ ID NO: 779027 - DNA, 617 bp, Homo sapiens
gagaaagaatggaaagtacgtagcagtcactgattcatagccattcagaatatccctctgggaaaacttgtatgtgtcccttaccttgggagtatacgatatttctaaagaaactctggttttcttgactgtggatctccatattccttggttttaccctataggagtttttaatattattttccttggctgcatcataaggtctttatagatttagcagttgtctaatgctacytcttgtctgaagaaatctgaatactaaaggtcattttatatctcaaacagtctttcattgttgtggtttattttactatttgattccagtcagattggcatcccaatagccaatttatagcttctttgggactacctctttctaaaggtaattatgggtattataggtattttgaatatttcatgcttctgggtgaccacattctttgtctttttttgctcaactattccaactaaaaggatttcctggggaccgccttaattcaatcagaggctttaacaaaggctgtgcagatttcacccttgatttggtctttgctcaaagactgaacataaaccagccttaattgctcagagaggaatatttgcatctttcaacaatg

SEQ ID NO: 779028 - DNA, 620 bp, Homo sapiens
gaaaatactttgtagccatcatagagaaattatcaccttatgtgactaatcattgtctaaagtaatttatttcattttcagtgtaatttcattaaatatggcagcagtggttacctacaggaagagaagaaatccaagtaatgagcccaatactcctcctcaggagtggaacaggctgtggaaaagaggaaggaccaataaatgagactggcaaggtggctcatragtaaaggagaaaaccagaaaaatggaaatcaattaagaaaatgtttggaggatgaaaacatcagttaaatctgtgtaatactgagaataaatagggtaactatagaattaacatctgaatcaggatgctttgagaataagactatacatggttgattacatgagaaaaaagtataaaccaagactctccaaggacaacaggattgagaagtttctccaaaattttggagacagtaaaactaggcaaattcttagaagaattattctaaaatgataaattttaaaaaaaaatgaagttctgctgctggagaagtaaggaaagagaatatttgtttaagatgagggaactaactgtatgtttgcataatggtggatgatccagtagagaaagaaaa

SEQ ID NO: 779029 - DNA, 643 bp, Homo sapiens
tctttgataataaactgaaatatttaactaaaattgtatgagcctgtattgtaaaaacaactcatgatgctcttctccctgccagttcccaaaggatatttatcttagaattttaagaggtaaaattattttggttcttcttctytttggagtaatgctgtttttctcattccttttaaagttaagaatcatgtagcattaaaaaatatatacagtaggctatggcattttcctagttgctacaagaaataaatgtaggagaaagttctttaatgtaaaaattcctaactgttaacagatcgtgaaaatcagcaacaactgttgtgctgaggatcatgatctacaagtagagggcagataattccactgagatgaaaagagtgcgtctggtgtttgagctgtggccacatttgactttcatgtccttttgggacacaacacactttgtggaagaagaaagttaatgcagctgccttcgctaatcattcagtgtgacccagcccctcagggaggaaggtaaaaacagctacactctgagacccaccaaccttgctgattaacagcaaatgctggtaaagtgaccctctaagtctgtctagcccatcaggcctagaaatgtaatttagatgattatctctatgcc

SEQ ID NO: 779030 - DNA, 623 bp, Homo sapiens
aacacttatacactgttggtgggaatgttaattagttcagccactgtggaaagcagtttggagatttctcaaagaacttaaaactgagctattatttgacccagcaaacccattactgggtatatttatttatttatttccttcccaaaggaaataaattgttctgccaaaaagacgcatgcactcgtatgttcatcaccacactattcacaatagcaaagacatggaatcaacctaggtgcccttcaatggtgaactggataaagaaaatgtggtacatatatacattccatggaatactacacagtcataaaaagagcaaaatcrcatcctttgcagaaacatgaatgcagctggaggccataattctaagcaaattaacacaggaacagaaaataaaatactacattttctcacttgtaagtgagagctaaacattaagcagacatggacataaacatgggaacaatagatgctacagactactggggacgaaagggaggggctataggtagaaaaattacctattgggtactgtgctcactatctgcatagcaggcactccatatctcaaacctcagcatcatgcaatatactcatgcagcaaacctgcacacatacgc

SEQ ID NO: 779031 - DNA, 632 bp, Homo sapiens
gcgtttttttttttttttttttttttttgccaaattttatgtctgagagtgatttgcctaagtgtcaatcttatatttgtttttgactgcaaacatcaatttggctgctcatctacatccaacttaattaaaatgcacaattggaaaacatttattgtaaccgcatcacatttcacagagggatgctttgttgagctagtttttcatcatgacctaaatatcattagccgtctgaccagtctcagcttcatattacaactgaaccacccctttcatcatttaraaatgcatgtttatcttaggagatcagtggttttcgaccttagggctcatcagtatcactgtagagctttctaaatatgtgggttatgcttggctctggacctagatgtaacaaataagactcctccttacctcacttttatttcccttatctatagcaatgtgaaagctctccagtaaacaggcattacctggattcatggacaattagctcttactgcactcctatataacttcccctttgggaaggttctagtgggttcctgttaactaggctcagtcttgtgttgaaatctacgtgcactttattggatccagagaaaagctaccacttctgtaaatattgacga

SEQ ID NO: 779032 - DNA, 590 bp, Homo sapiens
ttatatttcctgatgcagttcaaaggttttacagtgaatctttgacatcaagatcctggtcatcactagagccactttttgagtcagcaactttactccactttaagttgttggagatttagcacagttagaatccgtatgtgatgtcatcactggacattttatcccaagcccacagttgtatcccgctcccatactgagagtgggagggatgacctgcagcgtgccaccacatgtgtaccctttgagaaactgatctcaaggagccttcttgtgatgaacccctggctccctgccctggaataattagagaatctgtattaacaatttttgcctttttcccaagccaggtgactttttgtaagcatcacaaactagcagtggttgaggttctttcaggctgccttgcctccccrtcgagtattttctttgttgttgaaaataaagcagtgaggaggatgtccaataatcggggagactctgtaaggcctctcctccagtgcgttcacagactctcctcctcctgcctccttcagtcacactgaagccggctacctgcagttccctcactgctccaattcatgcccttc

SEQ ID NO: 779033 - DNA, 653 bp, Homo sapiens
tagaagtagcaatagttatacttctttaggttgaatcctatagagttggcccttttttcttgtagacatagcaagtatgcattgttatctttttgcaaagtggtctggattttttttggttgtttaatttgtaaaatgtattctaagagcaatacaaaatgagattttagaatgagaaagagatttctaaatgattcattgcattggattcttttgcttaataaccctggaatttgccagtggagaggtaccaaaatttgacccatttgttctagtttctctctctctctctacacacgcgcgcrcacacacacacacacacacacacacacacgcagaacgtgatttgaagagagactggatacaaatgagggcaagacagtcttcttttctaaaacattgcctcattaattaatttccaggtggaattgcttcatgtaaaatagtcgtaaattatgtgagggaagaagtcttgtgtttcagatcctttccccacttaaatatatttatctgtcacacatctaggtctgaagggggcgaacacagttgtatgaataatatgggactttgtcagcctgaggaaacctgatgtttccttggagctatcaaggagggcaaaaaccactgaaaacaatcaagtactttataaattg

SEQ ID NO: 779034 - DNA, 603 bp, Homo sapiens
gtctcaaaaaaaagagaatggagtctctcaccttttgatgaacacacacacacacgcacgcgtgcacacaaactgattcattattttgagctccagtcttttctgcattttgctataactagggacagatttcagagattccaggcccataccatcctctcttgcrcacacctttcttgccagaaggggtctgtacaacaacttactggcagagtttagtggcagaagtggaacacagaaactgaaagctttctgcttctcccttcccactagacgctgagcacctcaaggccacaggtaatcataaccagcattgagttctcggcacctgcataatgcctggcatagggggcttcttaatcaatacctttgcacagacagagcagccttgggttgaagattccaatctgatgcgcttatgcaccatacatcagaatggaggctgtgctatggggagacttgtggggaccctggagtgatagggctggatggcttgtcttggctccagggaactgaaacatttgctacagtggctccagctggtagtcaagaaaacagtcaaaggactcaaaggcaggctgtttagcctgctttattgttaag

SEQ ID NO: 779035 - DNA, 610 bp, Homo sapiens
aaagttctcatttgctaaactggggatgaagggaggtggagagtgaagtggtgatgcctagctaattaaaatgacataaatgttatacactttatagagcacttttacatattttaactcagagaaactctaggaggtgggaaaarcacagtatcattttacaaataatatcagaaaacttatttgaaaatgagaaaactgagcttagagaggttcaagattaccagatttccatgtggatttagccagactgcaaacctggttctttaaaggtacctttggttgtaaatggctgtggttttcttgttttctggtcttgttattacgttaaatgctgatgaattccagtttttagatccctgggtaaatgccaggttgaagaatgttaaatttatcacaagttacatattttttcctcctttaaaactgcattagttgttttctctgacccggtgattcataaagtgtggtctggaaccagcagcagtagctgaatacttagaaatgcaaattgtcaggctgcacgcatctcagacctgaagaataagaaaccccgggggtgggatccagtaatctatgttatatcaagccctcctggggatgctgaaac

SEQ ID NO: 779036 - DNA, 610 bp, Homo sapiens
aaagttctcatttgctaaactggggatgaagggaggtggagagtgaagtggtgatgcctagctaattaaaatgacataaatgttatacactttatagagcacttttacatattttaactcagagaaactctaggaggtgggaaaagcacagtatcattttacaaataatatcagaaaacttatttgaaaatgagaaaactgagctyagagaggttcaagattaccagatttccatgtggatttagccagactgcaaacctggttctttaaaggtacctttggttgtaaatggctgtggttttcttgttttctggtcttgttattacgttaaatgctgatgaattccagtttttagatccctgggtaaatgccaggttgaagaatgttaaatttatcacaagttacatattttttcctcctttaaaactgcattagttgttttctctgacccggtgattcataaagtgtggtctggaaccagcagcagtagctgaatacttagaaatgcaaattgtcaggctgcacgcatctcagacctgaagaataagaaaccccgggggtgggatccagtaatctatgttatatcaagccctcctggggatgctgaaac

SEQ ID NO: 779037 - DNA, 597 bp, Homo sapiens
tcctcctcattccacaggacattgcagccacactggcctctctaccctttcatccctccaggctcattctcatctctgcatcttctgcctagaatgctgttacccaagttatgtaggtatcagctcagaagttaccttctttgagaggtgttttttgatcaacttttcttaaaarcaaacaaaaacaaacaaaaagaacttccataattattctaacaattatttatttgcagtgctaataactatgtgaaattatattattcatttatttgtgtatttttattatcatatccttcccctggactggaaactcttaaaagcaggaagccctgtcttactgctgtatctccattccctaggatggtgcacggatgtataatcacaaattactcagtgcaagtgaagaaaaactacagaagttatgtgagtttctatggcattgaaaaatagaactcaaccttctgtgaatggacccaaagaatcctgtttctttttctcagtataagactttagccaatagctacatttggttaagatttaataatctagcgctcaattggacatttctgtcttatttcctttggaaaaatttaacca

SEQ ID NO: 779038 - DNA, 594 bp, Homo sapiens
tagaaatactctcccttggctccttcaactttagccattttatcagagttataggtgaaatgttgaaaatctgtatttgggcagagtgcagtggctcacacctataatcctaacactttgggaagccaaggagagaggatcgcttgagcccaggagttctagaccaatctgggcaacatatggagaccctgtctccacaaaaaaataaaaataaaatttagccacgcatgtcggtatgtgcctgtggccctagatacttggaaggctgaagtggaaggatcgcttgagccagggagtttgaggctgcagtgagccatcattgcaccacygcactctagcctgggcaagaataataataataagtaaaaaatttataaatgttgtaaatgaaaaaccgtgtgtgtgtgtgagagagagagagactttaccattccttttgcaagtccagcataggtagactaggtagtcaggcacctattgcttcattctttttttcttttttcgttcttttggaaccacagccaacactgaaagagtcccattttaacatcccacttagtttctttcattcctgatagaaaagaggctgagagt

SEQ ID NO: 779039 - DNA, 594 bp, Homo sapiens
tagaaatactctcccttggctccttcaactttagccattttatcagagttataggtgaaatgttgaaaatctgtatttgggcagagtgcagtggctcacacctataatcctaacactttgggaagccaaggagagaggatcgcttgagcccaggagttctagaccaatctgggcaacatatggagaccctgtctccacaaaaaaataaaaataaaatttagccacgcatgtcggtatgtgcctgtggccctagatacttggaaggctgaagtggaaggatcgcttgagccagggagtttgaggctgcagtgagccatcattgcaccactgcactctagcctgggcaagaataataataataagtaaaaaatttataaatgttgtaaatgaaaaaccgtgtgtgtgtgtgwgagagagagagactttaccattccttttgcaagtccagcataggtagactaggtagtcaggcacctattgcttcattctttttttcttttttcgttcttttggaaccacagccaacactgaaagagtcccattttaacatcccacttagtttctttcattcctgatagaaaagaggctgagagt

SEQ ID NO: 779040 - DNA, 467 bp, Homo sapiens
ccattctcctcatttcaaccagagtaatctttctaaaacaccgatctaaacaatggctttacacttgtccttagaacaaagtccaagcttattcgtctaactgtataaggtcttttctgatcttgaatattctatatcctcacctctgacaccttctgccttcaggtctacactggcatcgtcataatcagttcccagaatgkgtcctgtaatccttctcctagcttttacatatgctgttcctcctactggaaattttctttcctcgtgccattacatggctgacatttgttcaaccttacagtctcagttgggtgttatctgcttccaagaagactcctgaactcctaagtctaggttgggttctctcctctcccagagcacctttcctcccccttaccccagcccttataatgctgtattgcatctgtctatgccccagcaaattgcacactccagcagcaggg

SEQ ID NO: 779041 - DNA, 635 bp, Homo sapiens
ctttttgtgagacagaaataaactgctgttttgttcaagccactttgtttatatatgaattttgtaagtacatagagtgtatactctcaaaaagaggagcaatgttcatgccatgtggtccatggggagtgttcaatgttgatgatggaggtgatgacgatgaaatgaaagccaagaaaacaaaatggcttaaataactatgtattttctttatatttctcttctttatttccacatcccagctccttccaacatatttccaatagtggaatagacctttatcaatgataaatttgtgataatttacaattacaaagcaattgttacaatagtgactttttcctcttaaactcatggtctttgartgcaaaagtaatgcttgcttctgctactatactttgcttatattatagatttgcaagaaagcttcttggatctaataaggcagatttccaaagcaaaggtagccttgtttagctgcatttaatccggattctgtaatatcaaacaatctggcataacaacagacgaaaggcatactcttgtctctttaggaaacaatatacccactgaattttatttctattctagctttgtttcaaatgtcgagaaagaaatatttttggatttttttt

SEQ ID NO: 779042 - DNA, 591 bp, Homo sapiens
acaaggtctaatcattttataaggggcttttttcttctctgggcactcattcttctctctcctgccaccttgtaaaaaaggatgtgtttgcttccccttctgccatgatcgtaagtttcctgaggcctccccagccatgcagaactgtgagtcacttaagcctctttcctttataaattacccagtcttgggcagttctttatagcagcatgagaacgtattaatacasacacgcacacattcttttattacctgagaaaatttctggcaattagtatgtctgtcctcctctgcctccatctctgtagctaacatttggacattcctctgtttcagtttcagatttgctctcataatgtttttgaatgttacatctttccctttcttatttcagttttctttttttctgacattgagtacgtgctttgtgatagtcactagagatacaaatagctcagaatcaaagaaagagtgtacatgaagtattttcaagaatatgcctataaaatattcaacgatttctcagaaaatatcaattgtaaaataaataaaatacaacaaaactttcttatttgcacaaatgcgtaaagt

SEQ ID NO: 779043 - DNA, 559 bp, Homo sapiens
gttttcaagtaatttttaggaaacaggatattcatatggtgacatagtatcacttcatgtggaacttgcaaacagcaaagggaaaaatgtacctttgcaacagagagacttgtcagtcactttctgaaactagtaaccaggtattagtggtatggcttgacacagtgtatctcctgacctgatgcaatctgaagaacacagtgttacctatgacattttcttgctaaaaatgtgtaacccaaatccaattaatcaagtcctcaaatgtaagtgccaatatatacagaaatacacagaactaactatttaaatacaccacraagaaataataagacacctaccattcaatgagactggtgtcctgaaaaattaaatcataaaaagggcacggtatggtttttatattaaaaagaaataatcaaatgcaacatcagaaccttgaaaacctgactataaaacatactctttgagaaaattagaaaatttcatatttggactaaatggtaggtgttactagggaattcctgctaattttctttgatgtggccatgatgttgta

SEQ ID NO: 779044 - DNA, 593 bp, Homo sapiens
gtaattttctataaatatataggcaaggaaacaatgacttactgtatctgcatgtgtaatattttatggttaaaaaaataaagaatgaaaacaacaaaacctaacataaaatctttttatatcccttaggagcacataaagattrtagagatagagatgattagagaacaaccaatttaactgcatgcaaagtaacatttttgttttttgtatgtttaggttacaaaaaaacaatgaaattgtgcccaacctgagttagcctggtaaaatgcagcagcatcatcattgcagttttaacactatggattctggttgtcagatacaaatataaaaaaaagaagagatattaactgacaaaaactgtttaaacttacctttttagtcaatccagagaaaaagctgccaaggtaataaaacatccagaagtttttaagttaaaacgagtaatttaaattaaaaggggtgagggggcatgagcaagcaagggagaagaaaaaaggggtgaaaacgacaggcactttgcttcctgggcctggctgtatctgatgtaaattaaccagcagtggggagtgtattgtttccaactccacata

SEQ ID NO: 779045 - DNA, 564 bp, Homo sapiens
ttttcacaaaaagtcaggccctaaaaatggcattagagaaaggaatatgcccactccaagagattcaatggtacatcatttcatttaagtctcaaaataagcaatgcatttagactcagcaccaacagtcccatcacttttwtttacacccagaaaagttgagactcagaaaagttaatttgcccaaagtcacacaacagatagaggaaataaaagaactcagatctgagttcagatttctcatgtaagtgctcttttcactatacctaatgcacttctatactgcaattaattgttctgctgcccatcagtcagaatttcctgcttatccaaaactgtccattttacaaagcaaaaagagtaggccccaaatttccaaaccatctgaatagtttcttcttgatactttcagaagcactaaaaaacatcaaggtttctcatggaaccaagtcagcaaaaaataagcactgtacttaacagacctctagtttgaagattttaaaagggacatctgctattgcttaaccaccacccacctaatccctttagagctctacatctatc

SEQ ID NO: 779046 - DNA, 560 bp, Homo sapiens
acttggtatatgacagataatatttattgaataaatgaatgagcatttgatactcatacataccaattagaaaagatcaatgcctagcacagtgcctggcaaactgtaagtactcaagaaatagctgctgaatgaataaatctaataaaattacgcataaaggacaggaattagcaatcactttttaaaaaggcaaataaatggctaataaatgttcttaaaatgctcaaacaagatcgtaatttggaggaaaaaaagaaaagaaaatcaaaaccacactatactattttttacttcttattagactagaaaagaaatgtaaagataatgtatcagttcccccaaacagattgttgcaaatgtatgaataaatgctctttttccttttgtgctcctacaacaaaacayctgacactgggtaatttataaagaacagaaaagtatttctcacatttctgagactaagaagtccaagtcaaggtgccagcaggtctgttgtctggtgagggttccagctctgcctccaagaaggcaccttgaatgctgtgtcctctggaggg

SEQ ID NO: 779047 - DNA, 697 bp, Homo sapiens
acgttatttgcaagacggagttttaaaaatcatattctccaggggcattaagttaactgtctttgtgctccagctatttagctttcaggagtttagtgttttattgtaaaccgacattgtgcaccatcttgatctgaggtgaatgccaaggaattgctttttaaagtgatttttagaataaaagaaaaccatttcatctctgatttgccctccctttaaaaaccccactctgcatttctgtcttacggcttctgtactgcatcagtcctcctcaagccagccagctccatgcggaacattctgttgctctttcagcataagcaggtctattgtgatatttatctgaattcaggcaaggctaattaaaagagctgctgacagttgttgtgatctgactttgactgcagcttgatggtcattatgggtaaataatgaaccaggtctgcaaatgtagcagctgccaacttgggatagaagaacggctattgcttccaatttaaggatctatcgascgcttctcttctccctgcagatcttctgcagaaaactaatgttttctgctgctgtgtattgtggtttcagctgtttcagatatagcctataatttccttctttaatatttaacttaggacattattagctttcagagttaacaacttttctattttgaagaatctcagctttgtccttgtgtagg

SEQ ID NO: 779048 - DNA, 648 bp, Homo sapiens
atcctaatttaatataactgatatctaatttgttcaagcctctgttttagaagttgcagagaagaatgagatacttaatgagtttgtattaggagggaaaagcaatgtatacaatgtgtcagatgctttacatgctatattacttgtaacttactctaatatatattagtaatacatgcatataaatgcattatattagccttaatttaaaccctgagggtgatacatttcttcatttactaatttgttcattcacttgyctaatatttattgagcaccaattatgtgactggcattgctttttgtattttgaatgcagtggtatataaaacacattttaaaagccttcctggagctcatattttggggcagaaacagagatcaggaaatcacagcatagtatgattagttcatatttgtaggggtgcatccaggagtccacactctagatataacagtgcaagtgcttagtagcactatccatgtctacatcagagggtttgctgattagcataaggatgccagaaataattccttggtgaaataaatgatattcaagatgtgtagttgacaagaaacattataagacaagtctactctttcatgaataaagcagatgacattgacaagcccagtagcctaacatct

SEQ ID NO: 779049 - DNA, 538 bp, Homo sapiens
tacaactgaaaaaacagaacttaagtttagccaatctgaaatcaccaactaacctccaactagagacttcccactagattgtacctaaacaaggcaaaaggcctatctgtaaccaatcaagcaatttctttactttgctttcatgtgcactctacagaagcccgctgctcatgctgctgaagcagagttctctgaaccttttccaagtggagttctgcctgattcaygctcaaataaactttgttaaattaattttgtctaaattttttaaacaacatatataggactagaatgaaatgtccatcacctagcatagcaccaagctcatttcagggattttagaacggctttaaaaaaaaagaataaataaataaaagctttattgaagtataattgatatacaaagacctgcacatatttaatgagtgatatttattgcaatttgatgagtttggatatacgcaaaaaccatcagtacaattaaggtaatggacatgcccattaccttccagttttgttatgttggcagtaagaacat

SEQ ID NO: 779050 - DNA, 620 bp, Homo sapiens
atatattaagttcaaaacagccctttacttactttggaaacacaaagcacatttcacatcttgtcacttcttaatgattagtgtgctgaataccatttgacatcatttaaaacagatggactttgcaattattgcttagttacatgcrgacatgtgatagaatcacagcatttaatatatgcatgctcatgtatatagctgtgtgcaacttgtttccaaatccaataccaatctgaacaattcaacaggggattttgttaatttatgaatttctttaaattaatgttctatggtgcaatgcaaattgatcaattttaggtatacatatttgaaaagaatgaaattatcagaaattgagactgttgccaaaataagaagtacagtcattctgtgaacaagtatgtgtaatataattaggaaaaataactctatgagctttatgcaaactcaaagggtagaaaaatcatttcaattaaaacttaagaaagaagtgcttttgtgatacacacatatatggtaaatacccttaacatattgaactatgaggaacagcaattttatgatgaaagcattggtttttaaagtgatgtagtcttagatatgggtccctgttctaccag

SEQ ID NO: 779051 - DNA, 556 bp, Homo sapiens
cactagagtgcctaatttcattcttggcgcatagaggggactcagtagttgtatttttgattctcactgattctaagtgacagggttgagactggaatctaggtgtacaccaatccccaaaactcttctttttctgctgtggcaagctgctcctcagcctggattctcacctgccacaatgttctttttgagggtatttttcctccctggaagctcttactttataagaaamgataggttcatccactccggccacctctgtaacgatcagtaattcgtggtggtttctagatcaaagagttcgggagcgtgcctgggtggagtgtgggaaccctctggatgtttgctggaacgctgctccacactgtgtacctgggagggtaatctttcatcctttctgagccttccttagaagcctatcaaacaactccatgccttttccttgtcccttttatcgccctcgggagcaaagttgggacttgtgcaactgcagggctcttttctgtgggaacaataatctcatttcaatatgtgtgggtgggtagattatacgtta

SEQ ID NO: 779052 - DNA, 633 bp, Homo sapiens
ttatttattgtctgtctccactaaaactcacaagatgtctttactgattttatacactgcctggcacatcaaatgaacttaataaatattttgagagtgaattaatatatacagtaggaaagacacatacacacaaggcaggctgcagtaagtgctgtaaaagagacaatgagacagtagaggaattctgcaacagaagctgtggtgagaattaatcyatgatgtgttagactctccagctatatatatgcctggaccgatgtcaccacttatctgcagttctcctgtgatgtttccagggtacatgattaagactcatttaacattccaggaatgttctgctgatgaataatcactgagctggagtcaagagaagaagctttagatactaaccgaccctgtgatcatgagcaagtcacttcccttctctgtgcctcaatttcctcacttataaagtgaaaacaaagggccaagtgagggtggaaggatccccctaccctggagatctgtgattctataacatatgggcaggaaagacttgataacacactcagggtctatgtgggctgttctgaaggcatctggccacccatcacctttttatggccaagtactaggttggttctgtggttc

SEQ ID NO: 779053 - DNA, 633 bp, Homo sapiens
gcacaaatgagtttctgtttgttgtttgtatcccctcaacttgaatgtaagctttataaaggaaagcatctttattttgttcactggtggatcccaagccgctagaaggatgattggccactgttgggtgttacaaatgtatatatttattgaataccttgaatggaaagtaattttatatacatatatatatatatatatatatwttttttttttttttgagacagagtctcgctctgtcgcccaggctggagtgcagtggcgcgatcttggctcactgcaacttccacctccgtggttcaagcaattcccctgtctcagcctcccaagtagctgggattgggattacaggcacacaccaccatgcccagctaattcttttgtgttttcagtagagacagggtttcaccatgttggccagacttgtctccaactcctgacctcaggcaatctgcccacctcggcccctcaaagtgctgggattacaggcgtgagccacagcgccaggcctatataaatatattagtggtaattatattagataatttttactgagcatttactatgtgccaagtggtgcacatgtatcatatcatccaacactcccaatgaacttatgaagcaggtataatt

SEQ ID NO: 779054 - DNA, 633 bp, Homo sapiens
gcacaaatgagtttctgtttgttgtttgtatcccctcaacttgaatgtaagctttataaaggaaagcatctttattttgttcactggtggatcccaagccgctagaaggatgattggccactgttgggtgttacaaatgtatatatttattgaataccttgaatggaaagtaattttatatacatatatatatatatatatatattttttttttttttttgagacagagtctcgctctgtcrcccaggctggagtgcagtggcgcgatcttggctcactgcaacttccacctccgtggttcaagcaattcccctgtctcagcctcccaagtagctgggattgggattacaggcacacaccaccatgcccagctaattcttttgtgttttcagtagagacagggtttcaccatgttggccagacttgtctccaactcctgacctcaggcaatctgcccacctcggcccctcaaagtgctgggattacaggcgtgagccacagcgccaggcctatataaatatattagtggtaattatattagataatttttactgagcatttactatgtgccaagtggtgcacatgtatcatatcatccaacactcccaatgaacttatgaagcaggtataatt

SEQ ID NO: 779055 - DNA, 614 bp, Homo sapiens
cagatatcacagcaagctggtagtttggggacagcagtgcatttcttttgcaaacttacaccaaattgatttcccaacacatgtttatagatgtgctctcctgagctccacacacagagaaccatttcccttttgaacagcttgtctggttacatcttgtagtaatttatytgtgtgctctctgccaactagtttgtagggaaaacatgtttgatacataacaatagatcatttggggataaatcaaactcttaatgaagtcctgcttctcttcagccaggcatttcactctgaagagtctctctgaggcgctggtgacttgaggaaagggaacgtgggtgccccagtctgcgagacaagtagacgcatggaaagctgggtttctccaagacaagactaaagacacagcatccctggggtcccttctcatggagtccaactaaaaccactgaagttggattggagactagagcctggagacagttcagattagacctatgtttggaagaaatgagagatctattttgcccaaagcctcacactttccttggaggggagccatgaccgcccacacacccttgtctttcccagttcctgtagagaaaggaaagtta

SEQ ID NO: 779056 - DNA, 598 bp, Homo sapiens
ttaagatacttcactcccatctcttccatcccatcaattcattccataattatgacaattataaaaatgtcataatacattgattttttaaaaaatgagacatttgactgtcatcttcttaaaactttaaataataagtgtataaatctacagtgcctatcttgtaaatggaacccccatgggttttgcactgcycaacttacacaaagatggtggccatgcctgtgcttcctagagcaggaaaccaggttgatatatttagaaataaatatttacctctaaaaatcagaaatcagaccatcctgtgaaccagctacttggtcttatttctgggtattttgctgtgaaggactgcaagcctaatggcacattgggacttaccatgaagtcagtcctttcacttggttcatctatcctccttagtcatgcctactctgggacttctgtcagcttttcctctcagcagtgagatatgccataaaagggcatgggctggaagccaaaagacttgggttttacttccattaactcaccactgatcagttaggtgatcttgtgtaaatctcttaactgatctgagacttagttcctccttaga

SEQ ID NO: 779057 - DNA, 495 bp, Homo sapiens
tacatccctgtgttttcctgtgattttattgaaatgaaagataatgaattaaatccaattatagcaggaagacatctagtaacttgatgtttgttttgaaccgcagcttcacttcataagcaaagtgaggagacttaggctgctgcttaatatarttgaagcatcccgataaattaaaaatatcactctgatagcagggaccctgacgagcagcccttattggagactggggttcccttgacaaaatgcttctataaaagctgcatatttctagtctgatgaatgtgaagtactgcttttggcttctggcctgattattggaggaacattgctataaaaaataagtttcactagatgccgtaataaaacccagggctatcatccatagttcacagggttttttgagaggtgggtgggcggtagggccttggaattctggaactaggagattaataatatctgtattttattattttaaaacatgggcattcctat

SEQ ID NO: 779058 - DNA, 603 bp, Homo sapiens
aagctggcccagagactctataacttttatgtattacactcaagatgaatgaggttttcagcagaaagataagtgtcccagaccctgctgggcatgtatgtaatacatggcttatgcactctttacctttctaaaagacatttctgaatttggaagcacatctgagcaaagagtctcaaagaaggttttgtggatcttgcagaaagcctaaaagaactgactgtgtcggcaaagtccagakgacacaagtgaatatcctacctttggatattagagggtatggtgacatggcccatctcatgcttatcaaaagcattagtgccatttttatattttctcaattaactgaattaaatgaccatgcttggcacaaaaacaaaacaacagccaaaaaaaaaaaaacaacaaaaaacatcaaaaaacatgggcctctcaaatttcactgggacaaagtcattttaaaaaaaatttcctgagaagtaaaaataagctgggaattttttattgagtgtggcttataattaagttttggttttgcccttggagggggatggcagagggaatttttaaatcttactcatattttacccatgtgaggaagag

SEQ ID NO: 779059 - DNA, 625 bp, Homo sapiens
ttcaggggagatcagggccctaaactccagccccatgaccctgtcttgggttccctggggagcaggcgggtaaacaagggtgtgggagaggacatcaggccctggacacagaaagattgctccatcagttctggacctggcacccccaaaacagtggctgggggaattctggggatgsgtggggaaatagctttggaggccttaaatgacaaagatcttggccctggtctctggggacactggctagcgagtaggagcagcttggaggaggacccagggacgggctggcccattttgacagagaatgtctcctggcagacaagacaggtgtctccaccaaaaagcatggctggcctgggaccagcattttgggaagtgggtcaaattgttcccaaagctcagtattggaaaagtgccttttgccaaaactgggttctgggttctgggggaggagagagggtgacggcaaggttttctgggtcctaagcacagcagctttcttgctggctaagacgtctgtggcaggtggcagcagaagggtccaggtgtgcaggggctggggagggggccatccctccctttggggctgtagagagtacccaggaccccggggcctcgggtggtg

SEQ ID NO: 779060 - DNA, 604 bp, Homo sapiens
aacttgctgatggttttctaaggcaggaagcattgctttattgagagtgaggaattgtaccctttgaaagctgccccctgaaaagggagtggagagagatggctccagttggagttcaggatgggggtatctttcagtgaacttggggggagggctgagtggtggagcttggggctcatgtcccaggccttctctggtcaggaaagcagagttgaaaagggcccttttaatctggagggcccagaatggtccagccagttgccccggaaaggaagcctcatgtggcatgcrtgccagacgctgcacagcttgagttggtcctatgtgtgtggcacagccttacaaggttgaggtatttacctttattcctataaattgatggataaggggggttaattgatttctcttggcacttggcaagaacagaggtcagatttgaacctaggtctaggtttcagttgcacacccagcatgttctgctccacagccttttcctaaaatagtttagatgttggtataaacctgtgcgtactgaacgtgcctgaccgtgtgctagtatgatggcttttctacagtgtctccctagactccatgcttgcagacc

SEQ ID NO: 779061 - DNA, 624 bp, Homo sapiens
tccactatttctattcctagtaacagtgctacaaaacaacagcctattcaaaaaatcagatgaaaatcaaaattataaacaaattcttaaatttaatctataacatatcaagactagcttctattcaacaatctcactgtccattactaaaacatcctctttagaaaaataaaagattcaatgagagaaggaagtcaaatagtcactaattaaagctttctaaattatctgtaagttgtgacaaactatgtcaaatatagtctatactactgagctcttttctccttacatctytgatcagagtgttaacaacccactcttgtgaaaatataagtccccaaagtcatgaaaaaatacctaacctaacagataacttcgtaagaaagaagatcctgccaagcaggaagaattgctgctgaaagcaacatggcaggacttaaaggaaacatgccacaaagttatctttgggacaagtgatcagagatggggacaaatgttaacagggctgaaacagatgaacatgagttcacatcatgagtcacttaaaacattactgaaaatattcaactgaaaggaaattacggttcttaaaaatcttaggttccagctgggctcagtggctca

SEQ ID NO: 779062 - DNA, 598 bp, Homo sapiens
ccctctgggcttcagagacagcacttcagatgatgccggggtgaacatctcagacacgctcctgaagatgggaggggagatctcagcccagagccgaaggtgtagacgggtctgatgagtgggaagacaggaagggaaatgggaacttcacttggaaaaggagagatgccacatagttccgaagggcagggcactggccacagactgcccttcatgcccagctccacaagaaaccagggacccggcagaggatcagattccacacagggaccctcactgaggttgcacacacattatctcagtgacctttccagcccctacaggacttctggggaatccgaagccggatagctctgcacagccacccaccggtgacacaggcgtgcccacaaaacagtagagggccatgaattgagggccatggaggcttttytgaatcactgcccctccccagaggcccactgagagctttccaagctgaacatgaccctctccctgaataaggcagatcccatctacactgtggatgccagaaaaagaatcaatcccatggcccccggggacccccaaccttttggaattcatgtccttgtacaag

SEQ ID NO: 779063 - DNA, 606 bp, Homo sapiens
aaaacagtccctagcccttcaagtgacctcctcagtcatatgaccccttccctgcactcaaataacctaatcaagacaggaagaaaatatgcttccatgcccccaacctcacacatgtccccactttaaagacaccctccggcagaagtgaggaagtcacttccattcctcccagctctcaagcygcccaccctcattttgtactcactttatccaatatcacctgctggaagagcgaccaaagtaaccacatgagaccattttaggcatgcttaccttacacagtgttgtttttctccttaactgccatttcagtagttggacagagcctaacttgtctatttacaggcttttagtctgagtttcaatgggcaggagaaagggtacgattctccaaacttctaagagagatcatgctaatcctttactgcttgaaaaccaagttcgacattttgacaaaataatgtagaggttaggacttactaccgattctatttaaccacaatcatgtaattagtgaacagagactccccatcatagagaaacccatcctatgcaggaggcaacagccgtccatgaacatcagccacagaaagcatcgtgatg

SEQ ID NO: 779064 - DNA, 571 bp, Homo sapiens
attcagcaactataaatgatgcaaacatcctaacactggaaaaacagctaaatcagattatttaaaacagagtttacaaaaaagaaaacatcaaagtttatgcaaaacactcaacagataacctgagaacccaaataacgaacattttgtaagaaaaaaaaaaagtttacctagttttaccagtaggatccatgtacgttgttttttcaagcttgacccattttccttctgaaattaactaaaaggatatcagataataagttgggaaactttcaaaccaagttgtttttatctaaaagggtttttctttcacatttcctctgtctttccccagactcccaataatcatstttccttcccaataatctgtgggcacgtttttcagttcagagtaggtaggtattcagggttgtttttttaaagggcacttctgcttctttttgaaatttcttggctggtagtagttaacaggtgaaaagaaatgacagtctaaaaactcctgggggctgggggaaggggtggggcatggaggtaactggaagggagcacatggggtgagggtgtcctggga

SEQ ID NO: 779065 - DNA, 594 bp, Homo sapiens
attttgatatgttgtatttctgttttcatttgattgaaaaattttaatatccattgtaatttcttccttgacctacaaactatttagaagtatatttaatttccaactaaatggggtttttctagatttttttctattgtgaatttcaaatttaattctgctatggtcagagaacatacttcatatgatttcagtcttttaaaacttgggagttgttttgtcaaccagcatactatgtattgtggagaatattccatgtgcrcttgagaagaatgtgtattctgaaatcaattggtggggtgtcacataaatgtcagttatgtcaattggttgatagtgttgttcaagtcttctatgtacttctatattcacgcttttctactgagttgttctgtcaactgctgagagtgcagtattgaaatctccaattagtattgttaaataatctatttatcttttctattacttgttgtttcacataccttgggtgctgttttaggtgtatatatatttagaactgttatatcttcctaatgcattaacacttttatcattattaaatgtccctattttttctctagtaatatttcctgt

SEQ ID NO: 779066 - DNA, 624 bp, Homo sapiens
tactgaatctgtaaattaatatttttcaacaaattgatttcttcaaatattgttctaaccctctcttctcttctgggattcttattacacatatgtttgttgctatatttgatgtctcacaggtctctgaggctctgttcacatttcttcaatttaaaaaaaacctgttttttggccaggcacgggggctcaygcctgtaaccccagcactttgggaggccaaggcaggtggatcacgaggtcagatatcgagaacatcctggctaacatggtgaaaccccgtctctgctaaaaatacaaaatatcagccaggcgtggtggcacgcacctgtagtcccagctactcgggaggctaaggcaggagaatcacttgaacccaggcagtggaggttgcaatgagctgagatgacaccactgcactccagcctgggcgacagagcgagactacgtctcaaaaaacaaaacaaaacaaaacaaaagcctatttttttagattgaattatttcatttgctttaccttcttataagtggtacttataaaagaacttataagttcacttattctttcttctgccacgtcaaatctgttgagtccctctagagcactttcagttcagttattgt

SEQ ID NO: 779067 - DNA, 637 bp, Homo sapiens
ccacaggaggactttgcctgtttgctgtccacccctccattatccctggatgctgtgctctgctgcagtttcccagttgccagaaatagtgtggggtttgtagtcttatacacatagttgcaaatcctagctgtgactttggactaggttttaaccctgaggctactcaggggcctcctgtctgtctcctaggatgattctgctaaatcagtgagcaaatgtgtatcaggcacctgacaagtcacctggctcacaacaggcactcacttcttcccacgctccaaactgagttgatcacttgtgcattgttaygacttcaagacagggggactttcttctcttccccattgccctctctcttcctggtttctcatgtctgtgaaagcctctgtcgcttttttggtcagcaggtagggatagggagctggcagccttttgccctctctctggcacacgcagcagtctagggcttatctgaaaggagaaagctgattgaggcacagttcccacattggggcagactggggagcaactcacaaattcaaggtccacagtagaatgtctgggacatcccagctggcacccccagacaggaagctctacaccctaggagaattctaattcagttggatttacc

SEQ ID NO: 779068 - DNA, 547 bp, Homo sapiens
acccctagtggttttccctggctgatggcacatggagcagagatgagctgttgtcaaactctgtccaaactgcaaaagagtgagcaaataaataaaacaagtgaaagtgattgttgttgtaagctactaagttttgcaattatttgataatgcagcaaaagataattaaaatggttatagatttcactttacagatgaaaaatctgaagttcaaagaggccataaaactttcctcaaatgctatagctagatagtaacagatgcagaaatggaatcaaggagtgggagtgcagaggagcactctaaccaccatgctctactccctctgttggtgtatctgcaaggactgcctyaatgtccaaggaaggtcagcctgtgtgaggctgtgccaggagtgttacgatataaaattcctggcccctgcctacctggcctttctgttctggttggagcttacacttcccttagaatacttgccagtgtagcagcatgctgcaatatttactgaactccaagaatgtaccagaccctttttagttggcttatc

SEQ ID NO: 779069 - DNA, 596 bp, Homo sapiens
ccttcccgtctcccaaggtatgtaaaagcacatcgctgggctctagctcaactcatggaaaggagggtgtgggaggagtttgttccacccccttgaagggttgacctaaccaggtcaccccacttgatgaaggacaatgcacactatagcccagtcatggagagggacagttaaagtgatcagggatgcttacaggtgggacaatataggtgtctttaaattgtcatgtgcaagagagattggaattgctctatgcatcctctgagtgttgacctasagccaatggctcccataatcagggaggcagatatcaattcaatataggagacaactttctgactttccaagtcattcaagatgaaatggggtgcctcaggagtagcgacgtcccatcccaggaagtgcctgagcagaaggtgagcagtgctctctttacagtgccgtgttttctaagaaggttgaccatttgtgagaggtaaagctttatcatgcactgacattcttcagcaatgattctccagtccggctgtgtttaagaacctcctagggagctttaaaaaagagggtccccaggccccactgctagggatcctaat

SEQ ID NO: 779070 - DNA, 603 bp, Homo sapiens
tggaatgaatccaaagctgttgctgttcctattagaccacttgcctaagctgcaaccctagtgtgagagtcgtactgtatggtaattagtgagagaaacttgccgaaaatctctggagtggctaaatgaaaccatccagtccctcttccagctctctcctcacttacaatagagcccatgagctsccaggaaggcctcaagcccttttcctggcttctgtctggccttgacttcactccctctagcatctctgacctggctccaggtattttgctttgcagccaggtctctcctctgccatgcccatggccttgacactctgacctctcttttgcttctcaaatttactcttacctggaatgcttttttggttcctggaattttatgctgcagtgttcctaggtcacccagagccctgggctcctgcttgcatggggatgagtgtttaaatagtgacagcatctgcttgcttgccttacctttgctaatggactctgtactgtgcataacctacaatatgagggagggaggcaaggacttctccaagccgggcctcattctctgcacctgtggcctgtgactccagcctgggctgttggcccc

SEQ ID NO: 779071 - DNA, 646 bp, Homo sapiens
agagcacttaagagcctgtgtgcttatccttccatctcttctttagtggcagccatatagttcacaagttgatggggtagaataacaggatagatgttgcctggatccctgagtcactgcatggagaagacattccctagagaaacacctggccacatcaggctttctgtgaacaagaaataaacctctattgcattaagcctctaaaaataacagtctagcctatcctgaccataatacatcccctacataggacacagagtgacattycagaaacataaatcatgttatactactccttcatttaaaatgttcccttggcacccatttaaaataagatccaaattcccaagcataacctacaacattctatacgatctgaccactgcctagctaataatatcctatcacttcctcctagtaatctaaaacagccacactggcccactttctgttcctcagacagtccaaaactattcccagtttagagcctttgtacatgctctccttctggaaacattttcaccctagaactactcttaatagacttcttgcattagtcagttatcattttccctaaagggattccttatcatcctaagtagactcccctactaagtccttctctgtcctgtattcctattgt

SEQ ID NO: 779072 - DNA, 514 bp, Homo sapiens
gcatgtaatgttcagcttcttcgtgatttcctaggtggggctgtgatgtaaccactctccaacatgtcaaaccttcagcaaaatctgctacagattaaaaaggagctggggaacatcttgcaaaggaaataatgtaaatattaagaaaactgaaacatgraccttctcttgcaagaattattttgagggtctaaacaggaatcatctagctcaagatgttaaaagcatgccagatgtaaattaaagaacttttactttcaatagtggggtctttgctcatctctgaggctctgactacataaaccaatcctcaagcccataaacactccacagcatgcacctcaggtgtgtccaggaggctaatgggtagtacagacctctagacagaggatcagaggccacagaggacaatgggtcaagggagttcttcctaggggacagaactagagtctgtccggggcactctgtccaccgccatggctaatgtgctcatggggcttcccaggaattcagc

SEQ ID NO: 779073 - DNA, 588 bp, Homo sapiens
gacatttccaacatcaaaactctataaacatttattattgtctactgttcacaatggacaagtccatgcaaatgtacctccagagtccaaggaagctgagaggccaaagagtctgataaatccagttttttagaaagaaacatttaatagggacttaggaacaaaagccgtatctgtgtctcgggatccccatgccattacaccccacatycgggatttatatgctatatggaaagcataattcagaatggatgtgtagggctattgcagtgtacatcaaggttgtttgacataagggcaggatatacagtaagtacctgattttacactaggatcaatgggtaaactggaaattttagaggctttcccagaacagatgttaatcagaagccaggctgggcggtgtggctcacgcccataatcccagcactttgggaatccgaggtgggtggatcacctgagaccaggagttcgagaccagtctggccaatatggtgaaaccccatctccactaaaaatacaaaaattagctgtgcgtggtggtgggtgcctgtattcccagctacttgggagtctgagacatgagaa

SEQ ID NO: 779074 - DNA, 588 bp, Homo sapiens
gacatttccaacatcaaaactctataaacatttattattgtctactgttcacaatggacaagtccatgcaaatgtacctccagagtccaaggaagctgagaggccaaagagtctgataaatccagttttttagaaagaaacatttaatagggacttaggaacaaaagccgtatctgtgtctcgggatccccatgccattacaccccacatccgggatttatatgctatatggaaagcataattcaraatggatgtgtagggctattgcagtgtacatcaaggttgtttgacataagggcaggatatacagtaagtacctgattttacactaggatcaatgggtaaactggaaattttagaggctttcccagaacagatgttaatcagaagccaggctgggcggtgtggctcacgcccataatcccagcactttgggaatccgaggtgggtggatcacctgagaccaggagttcgagaccagtctggccaatatggtgaaaccccatctccactaaaaatacaaaaattagctgtgcgtggtggtgggtgcctgtattcccagctacttgggagtctgagacatgagaa

SEQ ID NO: 779075 - DNA, 588 bp, Homo sapiens
gacatttccaacatcaaaactctataaacatttattattgtctactgttcacaatggacaagtccatgcaaatgtacctccagagtccaaggaagctgagaggccaaagagtctgataaatccagttttttagaaagaaacatttaatagggacttaggaacaaaagccgtatctgtgtctcgggatccccatgccattacaccccacatccgggatttatatgctatatggaaagcataattcagaatggatgtgtagggctattgsagtgtacatcaaggttgtttgacataagggcaggatatacagtaagtacctgattttacactaggatcaatgggtaaactggaaattttagaggctttcccagaacagatgttaatcagaagccaggctgggcggtgtggctcacgcccataatcccagcactttgggaatccgaggtgggtggatcacctgagaccaggagttcgagaccagtctggccaatatggtgaaaccccatctccactaaaaatacaaaaattagctgtgcgtggtggtgggtgcctgtattcccagctacttgggagtctgagacatgagaa

SEQ ID NO: 779076 - DNA, 588 bp, Homo sapiens
gtagacttagtaaagcagatggccctctccaatgtgagtggaacttatccataaactttactgtttctacttgactgtctgtgacctgggacatcagtcttctcctgtctttggactgagtcatgaactagaacttacaccatcaactttcctcgggctccagcttgctgactacaggtcttgggacttctcagcctctatactcatgtgagcaaattccttttaataaatctcttgctgggcatgatagctcatgcctgcaatctcagcactttgggaggctgacatgggcagatygcttgagttcatgagcatcctgagctaaacagtgaaacctcctctctacaaaaagtacaaaaattagcagggcatggtggtttgtgcctgtagtcccagctactagggaggctgagggtggcaggatggcttgagcccagaaggcagaggttgtagtaagctgagattgcaccactgcactccagactgggtgatagagccagatcttgtctcaaaataaataaatctctatgtgtgtgtacacacaaatgtatatatatgtatatatataaacgtatatatgtatatgta

SEQ ID NO: 779077 - DNA, 618 bp, Homo sapiens
aacagtgtaatatgctggagctcactagccccagaaaatataactcagcaaatgagcacagcactatcgggacaaggcagataggataaggatagtttctttccctagggagatgaccatctaaggaacatttttaaagtcacagcgcaaattacattacaccaagaagcagaatcttcaagattgggttaaaagctgcaggttgtaaaayatgagaaaaagcaccattttggggaccttttttctcatgtgaattagtgccatgaaatttcaaagaactaaatttaatcaagtattggatatttctgaggccctgaaaaaaactaacattctgtgcttaagattttatataagtaattaccctatacaggttatcattatatcactgcaacctccatctcctgagttcaagcggttcttctgctccagcttctcaagtagctgggattacaggtgcgtgccaccactcccagctaatttttgtatttttagtagagatggggtttcaccgtgttgggcaggctggtctcaaactcctggcctcaagtgagctgcctgcctcggcctcccagcctctatacagataattttttaaggtaaaaatgatgtttataagaa

SEQ ID NO: 779078 - DNA, 618 bp, Homo sapiens
aacagtgtaatatgctggagctcactagccccagaaaatataactcagcaaatgagcacagcactatcgggacaaggcagataggataaggatagtttctttccctagggagatgaccatctaaggaacatttttaaagtcacagcgcaaattacattacaccaagaagcagaatcttcaagattgggttaaaagctgcaggttgtaaaacatgagaaaaagcaccattttggggaccttttttctcatgtgaattagtgccatgaaatttcaaagaactaaatttaatcaagtattggatatttctgaggccctgaaaaaaactaacattctgtgcttaagattttatataagtaattaccctatacaggttatcattatatcactgcaacctccatctcctgagttcaagcggttcttctgcyccagcttctcaagtagctgggattacaggtgcgtgccaccactcccagctaatttttgtatttttagtagagatggggtttcaccgtgttgggcaggctggtctcaaactcctggcctcaagtgagctgcctgcctcggcctcccagcctctatacagataattttttaaggtaaaaatgatgtttataagaa

SEQ ID NO: 779079 - DNA, 553 bp, Homo sapiens
tggcttcagagggtgcaagctctaagccttggcagcttccacatggtactgagcctgccagtgcatagaagtcaagaactgagtttgggaacctccacctagatttcagaagatgtatagaaacacctggatgcccaggcagaagtttgctgcaggggcagggctttcgtggacagcctctgctaggacagtgcagaagggaaatgtggggttcaagactgcacacagagtccctactggggcaccacctagtggagctgtgagaagagggccactgtcctccacactccagaatggtagagcaaccgacagcttgcaccatgtgcctggaaaatctgcagacactcaakgccagcccatgaaagcagctgggagggaggctatacctccaaagccacagaggtggagcttccaaagaccatgggaatccccctcttgcatcagtataacctggatgtgagacatggagtcaaaggagatcattttggagctggatttcagacttccatggggtctgtagcccctttgttttgaccaatttctctcatttgga

SEQ ID NO: 779080 - DNA, 550 bp, Homo sapiens
tgtaggctgggtgtggtgtctcacgcctgtaatcccagcactttgggaggccgaggtgggcagatcacaaggtcaggagtttgagaccagcctggccaacatagtgaaacaccgtctctactaaaaatgcaaaatattagccgggtgtggtggtgggcgcctgtaatcccagctactcgggaggctgaggcaggagaatcccttgaacctgggaggtggaggttgcagtgagccgagatcgtgccactgcactccagcctgggtgagagtgcgagacaccatctccaaaaaaagaataaataaataaataaaaaataattgtactgtatatatccttttataacaagycgtcgattttcacataattctaagagaatatatatgtatattccatatatccctctttcttcatttgtcaaaatcattatattagagagtatataaatgttttttataaagggatataatccttattcgtttatgaaagatgtacagtgtatctgcatttcatggtgtccttagaactctatacattataaattatacatta

SEQ ID NO: 779081 - DNA, 550 bp, Homo sapiens
tgtaggctgggtgtggtgtctcacgcctgtaatcccagcactttgggaggccgaggtgggcagatcacaaggtcaggagtttgagaccagcctggccaacatagtgaaacaccgtctctactaaaaatgcaaaatattagccgggtgtggtggtgggcgcctgtaatcccagctactcgggaggctgaggcaggagaatcccttgaacctgggaggtggaggttgcagtgagccgagatcgtgccactgcactccagcctgggtgagagtgcgagacaccatctccaaaaaaagaataaataaataaataaaaaataattgtactgtatatatccttttataacaagtygtcgattttcacataattctaagagaatatatatgtatattccatatatccctctttcttcatttgtcaaaatcattatattagagagtatataaatgttttttataaagggatataatccttattcgtttatgaaagatgtacagtgtatctgcatttcatggtgtccttagaactctatacattataaattatacatta

SEQ ID NO: 779082 - DNA, 656 bp, Homo sapiens
tctcatgcagttataagaaatgatgcagagagatcccatttctctttacccaatttcctccagtggtaacatcttgaaaaactacagaataagatcatgatcagaatattgacattgatataggcaagttacagaacagcaccattgccacaaggatctctcctattgcccttttacagctatacccacttctctactgttgacatagacttcctagccccggacaatcactaatctgttttccatttctataatttatcttttcaagattgctatataagcagaataaaattatatgtaatcttttgtggttaggcttttttcactgaacataatactctggagattcatgcaggttatgatgtgtatctatggtttattmttttttttgctaacccattttccatggtatagatgtaccatagtttgtttaaacattcaccggctgaaggacatttgggttgtttctggttttgcactattattaacaaagccactataaacatttatgtaaatttgttgtgtgaatataaatttttatttctctacaataaatgtccaagcatacaattactggatcaaatgccagttacatgtttagttttataagagactgtcaaatagttttccagagtgactatattattttcagtcct

SEQ ID NO: 779083 - DNA, 609 bp, Homo sapiens
catgggaactatggaaacacttttctagttatatttatttattttgtttttaagacagttgttttttagatataagtgagactgagtgggctggacttaatgtaaagcacatgtgttggccagtttgcaggcacttgttagagctctctgagcatatgtgggataatggattctgtttctgttacgtgtttctcatgaagcctagcactgtgtttttaaaggctaggaagcatatcaatgtattggaactttttctcccatacrgtgataaagtgaaaaggataaaaaaattgtaggtaagagagattagatttccccaggataaagcagatttgtatcttttattttttgtatgaaattttctactcatctctctatctttctaccttctatctatctacctacctatctatctatctatctatcattctaccatctatctatctatctatctatctatctatctatctatctatctatctatctatcatctatctgtctttcccatctaacagtaagcatcttaaggtagaagcctatgagtttagttgttgaatttccttaatttgtttgaaataaacacatatgtaactcctgaatatgtcactt

SEQ ID NO: 779084 - DNA, 612 bp, Homo sapiens
cacttttctagttatatttatttattttgtttttaagacagttgttttttagatataagtgagactgagtgggctggacttaatgtaaagcacatgtgttggccagtttgcaggcacttgttagagctctctgagcatatgtgggataatggattctgtttctgttacgtgtttctcatgaagcctagcactgtgtttttaaaggctaggaagcatatcaatgtattggaactttttctcccatacggtgataaagtgaaaaggataaaaaaattgtaggtaagagagattagatttccccaggataaagcagatttgtatcttttattttttgtatgaaattttctactyatctctctatctttctaccttctatctatctacctacctatctatctatctatctatcattctaccatctatctatctatctatctatctatctatctatctatctatctatctatctatcatctatctgtctttcccatctaacagtaagcatcttaaggtagaagcctatgagtttagttgttgaatttccttaatttgtttgaaataaacacatatgtaactcctgaatatgtcacttaaagagatacttttttaact

SEQ ID NO: 779085 - DNA, 623 bp, Homo sapiens
atgacatttgaggacatataaaagtgacatgtatctttcatagtagtggcaggctatacaatgagtgaaccattttcagaagatcatgtgaacctctgaagttcatactgagtcaagattcaatttatatttttcaaaacctcccatggctctttttattgacayggttaaaaagacattgttgtcattgggaggtatttcttttttcaggctcattatattgcctccagtgattgcactgggaactaggtgcttgattcttattgacgtttgctgggattatcataaatatgacctataaaatagagtaactataaatggagtcaaaacaataaggtgtacatattattttggacaaagtcagatggaaattgtaaggcagttactgaaacacaatatttatcatttttactatttagaatttatcccatttatatcattttaagataaacttgcaaataagaatatattttctgattatatatagattatttctagcttgttctgaaaaaactgacgtagttgtttgtttttagccaaaaacagttttagaacattcttgtcaatcaaaaactagtatttttcatatataaactaaaccatattttttggttgtggagcat

SEQ ID NO: 779086 - DNA, 581 bp, Homo sapiens
gaagttattttattattttacttattattttagtcaaatccatagagacacatacttaagaagtttaaaatcagatgtttcatcattatttgcattgactaagaattgtttaggaagggagtttatttttgttttgttttcaagtatttgtaggtttcaattctacttctgttattttttaaatttttttatattagctataaagattttattaatctttcatattatttttaccattggaaacataaaataatttagtactaatcttattcagaatrcctactatctccctaattttaggggtctgtttgatctatcaaaagctgagaaataaaatgtatagtgttatattatatttatgtttttctctactgttctcacatattttgaaatattactatgtgttaactcatttacttatttcttgagttgacaactttttattaaacatagaattatacctaggtttctctttgggaatctggaggaaaaactgagaatggaactaatataaattcctggttcatagaacatttacttaactggaagaagcaagggaagataagttaagaagtaaaata

SEQ ID NO: 779087 - DNA, 509 bp, Homo sapiens
ttattgtggatccagtgtgttctgagcccatgcgtggaagtgagggagctgggctagaactcagccccgttgggacctgagctggtgccctgctctgtcacaggcctttcctcttcctgcaatgctgctgcccagaaatgggcacctcagaggcgcctgataaaatcccagggactgaccgagttaacaagccaaggagatggcaatgcaggcagatggggcctgggtggcagggctggacccgggctcagagcacaggcactggggtctggcctttgggatgcttggaatccagccccgtgctggtcccagccctgtgccaccccctctgcaggctccactcccactaaatcctgcyggaaaacgtaaaaccttaacagtccttcatcttcctgcctcccctgagccctcaattccccccagtcctcgtggcagcagcccaaccccctcagtccctgccttggatacagcacgttgagattctcaagactctgtttttgtcttgtgtt

SEQ ID NO: 779088 - DNA, 625 bp, Homo sapiens
aaccatagaagattcatcaaacaaattatagaaggagcagccaggtaccacagagtgctcttataaaacaagaaactcccaatccaaccccatccacaaaatgcttattagtcttttctaattctcatttatatttttttaaaaagatgtttctcctaaagatgtataaaaacctgcaattttacttatgaggtatttgcaggccttgcttgctttgcagtattatgacatcatagcatcctgaacaaaataacatattagaactcacagaaagacttcgtatctctgcaggaaaagtgtaattataaaagcttctaggcacacagataaaattttaacgctagatggggtctcactatgttgtccagtcaggtctccaactcctggcctcaagcaattcttctacctcagcctcccgaagtgctgagattacaggcatgagccactgtgtccagccactaarccttattataagattttttttatatttaaaaaatccacacagaagcaaagtcaattaaattttatttcaaccaagaatataaaataaatgcaatgtaatttattttagttttaacagtcatttcaagaaggaagtcaggtcaactcaaaagcaggaaaccct

SEQ ID NO: 779089 - DNA, 601 bp, Homo sapiens
ttcttttagtttccttcaatatctggttgtaactcttcaaactaacatttccaattttctcctatctttctgacttggaatcactaagaacaaaaactgcccttttccggaagccctgcaagctgaagctggacaacttaatctagacttaaagagaactcaccaccacagcttacgtatggacaacttttgtgcctgttgctgtgagctgctcagacatcactggaaacattcaaactgcaaaagatgcttcaaagtcaggtatgatggctcatgcctatagtcccaggtactcagaatgctgaggtgggacaatcacttgaggccagaaattcaagaccagcctgggtaacatagtgaaaccccatatccaaaaataataataakaagaagaaataaatagctaggcatggtggcatgtgcctctagccccagctactcagaaagttgaggcaggaggatcccttgaatctagaagttcaagaccagcctgggcaacataacgagatcctgtctctgaaaaaaaaaggttaaaaaatataagatgcttcaaatccaacatctggtaatcttcttgactgattgccctctggactcagag

SEQ ID NO: 779090 - DNA, 601 bp, Homo sapiens
agttttagattcttcttttggatcctttttccacttagtgctatttctgtccctgcagtcgctgagatgttcaaaagcagctgaagctgcagcttttgaagcagcaggagcactctgggcactcaaagtcctcagaaattcagccaaacacaagttagggaattttaggttttcttagccaagargggcactccggtacatacaacctgggcttgaccacttggtgggcactactagtgctgtcactgttggaaggttatacaatctctctcagcctctttttcctcctttggaaatgaagagtactaagattgctttgtagagttgttgtaaggattaaaaataacaacacatcaagagcctagctcaggatctggcactgaaaaggttctcagttaatagtaaaattgtttatttatttatttatttatttatttatttattcatctatttattttatttttttgagatggagtcccactcactctgtcgccaggctggagtgcagtggcacaatcttggctcactgcaacctctgcctcccagtttcaaatgattctcttgcctcagcctcctgaatagctgggattacagaagtgct

SEQ ID NO: 779091 - DNA, 586 bp, Homo sapiens
gcatgacttacaattgatggcacctttgatttaatgcaatatggcataatttatttaaatgttttaattttttatatttatcctctgcactaatgcttatgccttattttaataattaaatttcaggcataatgttctgtttattatagtttctgacatatgtgttcttaatattgttgttttgttccctattttatttctttaacaccgtgtgtttgtccattatcacattggtataaagaactacctgatattaggtaacttataaagaaaataartttaattgactcacagttccataggctgtataggaggcatggctggagaggccatggcagaaggtgaaagggaagccagcacatcttcacatggcaacaggagagagagagtgtgaagggggaagtgccacacactttcagatctcttgagaagtcagtcaatatcacaataacagcaaggggtaaatccgcccccatgattaaatcaccacccaccaggttcccaccaaaacactgggaattacaattcaacatgagacttgggtgggaatacagagtcaaaccatatcacattgcaacctcatttt

SEQ ID NO: 779092 - DNA, 645 bp, Homo sapiens
ttccaggatccaggtgcccaggggtcatgaagctgggactcctctgtgctctgctctctctgctggcaggtgaggctcccaggctggctgccccttcacggctgtactaaggtcaccttgctcttccctcccatcccaggcttctgcctcctgccctctaggcttctcagcatcctctccctgccctcccagcctgctcttcgctgacccctttgtccctcatccccaccccagggcatggctgggcagacacccgtgccatcggggccgaggaatgtcgccccaaactcccagccttgcaggccggcctcttccaccttactcggctcttctgtggggcgaccctcatcagtgaccgctggctgctcacagctgcccactgccgcaagccgtgagtgacccaggctggccatgctggggagggacagaggctgggggtcaggagagggtgaggggtgctttaggccagaagtgcrgagcctccacttctgataccacaagttcaactcttagaagtaggaagggtagcctcccaaatcctaaaattctagagaccagcaatatctcatttgagaagtctaagattcgaaacttaggctcttcgaatccgagactgacccagagaaatccagaatcgtagaatcc

SEQ ID NO: 779093 - DNA, 657 bp, Homo sapiens
cgatctgtaaaaaaaaccatatttattgaaggtatatttagagagattttagaaggcttcagtcaatatttttgtttctgttgctctggtgttttatcatacagggaccagactgtagcatcagtagctatagttacaaggctaccaaagactcagtgctatagaaattattattgtggaaattggcagcctggctgtctgtttgaggagactagaggacttaggagtttccacccaaagtacaagggcctggtttagtgggtggccttcttttgctgaagtagataagatccaggagaagggtggattcactgtagtagccagggctttgagactggtaaagcttatttgtctcctagtgccattgccagatattggtctgtgcataaaggcacttcccggactcgctgactcctgtaaattcaaatgtagaatttagatttaaatccctattccaacttcttaaacttagatctaataggtggktaataaaatatgtattcagaagaaagggagacgtcaggtaggtatataagcaaatcatcctggtcaaataccttcaaaaatattactacaaaaaattactgaagattaaaccttaaaaaagttattttaattggagaaacagaaaaaggttggagtcattttaaaccctga

SEQ ID NO: 779094 - DNA, 655 bp, Homo sapiens
gttctgtaaaaaaaaacgatatttattgaaggtatatttagagagattttagaaggcttcagtcaatatttttgtttctgttgctctggtgttttatcatacagggaccagactgtagcatcagtagctatagttacaaggctaccaaaggctcagtgctatagaaattattattgtggaaattggcagcctggctgtctgtttgaggagactagaggacttaggagtttccacccaaagtacaagggcctggtttagtgggtggccttcttttgctgaagtagataagatccaggagaagggtggattcactgtagtagccagggctttgagactggtaaagcttatttgtctcctagtgccattgccagatattggtctgtgcataaaggcacttcccsgactcgctgactcctgtaaattcaaatgtagaatttagatttaaatccctattccaacttcttaaacttagatctaataggtgggtaataaaatatgtattcagaagaaagggagacgtcaggtaggtatataagcaaatcatcctggtcaaataccttcaaaaatattactacaaaaaattactgaagattaaaccttaaaaaagttattttaattggagaaacagaaaaaggttggagtcattttaaaccct

SEQ ID NO: 779095 - DNA, 589 bp, Homo sapiens
tgatgaaaaaataaaaataataaaaaaaagatttaccccaatgcactatcctatacaacatatgctattgcttttaacaaaaattagaagccaagacatccctttttatctttagtgagatcttcatttgtgttaaaaccaaattaaggtcccagtgcggagtttaggaggctgggacttcagatcacagcgggcgcccgcctcccgcccgcsctggccacgccgcgccgcgtccgggaaggcccagcggaggctccggggaaggcgacaccagcaggcggcctgcgcggcggcattgaaatgggcgtccgctccccacggagcgcgggaggtcgtagctgcagccggacgagcgctggcaccagccgggcaccgcgcatggatcccgcgtgcgcactgtcgcggtcatggcgtcccgggccggcaccgcggcctcggctccctgctctgcggctcttgtctccagggcggcgttgggttctgaatgttccagttccacagcagccagacgcgggatgcccagggacggcctgacggcagcgctggctgcggtgcggccagggcgctggcgtgccgaggccatggtggt

SEQ ID NO: 779096 - DNA, 589 bp, Homo sapiens
tgatgaaaaaataaaaataataaaaaaaagatttaccccaatgcactatcctatacaacatatgctattgcttttaacaaaaattagaagccaagacatccctttttatctttagtgagatcttcatttgtgttaaaaccaaattaaggtcccagtgcggagtttaggaggctgggacttcagatcacagcgggcgcccgcctcccgcccgcgstggccacgccgcgccgcgtccgggaaggcccagcggaggctccggggaaggcgacaccagcaggcggcctgcgcggcggcattgaaatgggcgtccgctccccacggagcgcgggaggtcgtagctgcagccggacgagcgctggcaccagccgggcaccgcgcatggatcccgcgtgcgcactgtcgcggtcatggcgtcccgggccggcaccgcggcctcggctccctgctctgcggctcttgtctccagggcggcgttgggttctgaatgttccagttccacagcagccagacgcgggatgcccagggacggcctgacggcagcgctggctgcggtgcggccagggcgctggcgtgccgaggccatggtggt

SEQ ID NO: 779097 - DNA, 608 bp, Homo sapiens
ccgcctcccgcccgcgctggccacgccgcgccgcgtccgggaaggcccagcggaggctccggggaaggcgacaccagcaggcggcctgsgcggcggcattgaaatgggcgtccgctccccacggagcgcgggaggtcgtagctgcagccggacgagcgctggcaccagccgggcaccgcgcatggatcccgcgtgcgcactgtcgcggtcatggcgtcccgggccggcaccgcggcctcggctccctgctctgcggctcttgtctccagggcggcgttgggttctgaatgttccagttccacagcagccagacgcgggatgcccagggacggcctgacggcagcgctggctgcggtgcggccagggcgctggcgtgccgaggccatggtggtcgtatgttccatggacaccatcaaggtgaagttcatccacggccagaccttcccagacctccagtgcagaggagtctcccaccaggttagagagattgtgcgagaacaaggggactcaccggggcctcatggcaccacgctaaagcagggctggaaccaggccgtctgcttctcctcctgacctccctgcacagctggtaccgaggggacaacccc

SEQ ID NO: 779098 - DNA, 608 bp, Homo sapiens
ccgcctcccgcccgcgctggccacgccgcgccgcgtccgggaaggcccagcggaggctccggggaaggcgacaccagcaggcggcctgcscggcggcattgaaatgggcgtccgctccccacggagcgcgggaggtcgtagctgcagccggacgagcgctggcaccagccgggcaccgcgcatggatcccgcgtgcgcactgtcgcggtcatggcgtcccgggccggcaccgcggcctcggctccctgctctgcggctcttgtctccagggcggcgttgggttctgaatgttccagttccacagcagccagacgcgggatgcccagggacggcctgacggcagcgctggctgcggtgcggccagggcgctggcgtgccgaggccatggtggtcgtatgttccatggacaccatcaaggtgaagttcatccacggccagaccttcccagacctccagtgcagaggagtctcccaccaggttagagagattgtgcgagaacaaggggactcaccggggcctcatggcaccacgctaaagcagggctggaaccaggccgtctgcttctcctcctgacctccctgcacagctggtaccgaggggacaacccc

SEQ ID NO: 779099 - DNA, 616 bp, Homo sapiens
acaacatgtgctttgtatgtattaatattattccagcttatcatcaattaacaatactaatatccatacctgtacagtctttttagttctatgagaaggacctgggtactctggagaatacaaatctgtgaggaataatgagttgattaatgtcractttcccaatccagattcccctaaaagaaataagggaaaatatctgttaaactcacccattttacccaaccttaaatattcaacagatgctataatccaacttgctttatgcaagtacttcttggtgagacaatgaaataacattagaaaatatgctacaaagagtatcttgtcctcagtttcttagctatcaaattagactcatgtttccaaggattcttttcagccttctaattataccacttatattcattaaaagtaatgtatctaataatttacatttttaacagtaatgtattcccaaggaaaaaattcacgtgatttaaaaaaaaatccaagttggattatgtatcactgcttcagtgaaataaagtttttctttattaatagacaataatggatgaccaaaagaaatcatgcagctacaaaaagcaaaaatctgctaatacaaagaataatt

SEQ ID NO: 779100 - DNA, 616 bp, Homo sapiens
acaacatgtgctttgtatgtattaatattattccagcttatcatcaattaacaatactaatatccatacctgtacagtctttttagttctatgagaaggacctgggtactctggagaatacaaatctgtgaggaataatgagttgattaatgtcaactttcccaatccagattcccctaaaagaaataagggaaaatatctgttaaactcacccattttacccaaccttaaatattcaacagatgctataatccaacttgctttatgcaagtacttcttggtgagacaatgaaatracattagaaaatatgctacaaagagtatcttgtcctcagtttcttagctatcaaattagactcatgtttccaaggattcttttcagccttctaattataccacttatattcattaaaagtaatgtatctaataatttacatttttaacagtaatgtattcccaaggaaaaaattcacgtgatttaaaaaaaaatccaagttggattatgtatcactgcttcagtgaaataaagtttttctttattaatagacaataatggatgaccaaaagaaatcatgcagctacaaaaagcaaaaatctgctaatacaaagaataatt

SEQ ID NO: 779101 - DNA, 616 bp, Homo sapiens
acaacatgtgctttgtatgtattaatattattccagcttatcatcaattaacaatactaatatccatacctgtacagtctttttagttctatgagaaggacctgggtactctggagaatacaaatctgtgaggaataatgagttgattaatgtcaactttcccaatccagattcccctaaaagaaataagggaaaatatctgttaaactcacccattttacccaaccttaaatattcaacagatgctataatccaacttgctttatgcaagtacttcttggtgagacaatgaaataacattagaaaatatgctacaaagagtatcttgtcctcagtttcttagctatcaaattagactcatgtttccaaggattcttttcagccttctaattataccacttatattcattaaaagtaatgtatctaataatttacatttttaacagtaatgtrttcccaaggaaaaaattcacgtgatttaaaaaaaaatccaagttggattatgtatcactgcttcagtgaaataaagtttttctttattaatagacaataatggatgaccaaaagaaatcatgcagctacaaaaagcaaaaatctgctaatacaaagaataatt

SEQ ID NO: 779102 - DNA, 556 bp, Homo sapiens
ataaatagcctgaatatcagttataagtggacttttgactgtagagctcttaaattttttaaaattaaattttagccaagtaaatagcaaacattacttgtttttttctttctaaagtttacatcaagatgaaattttggaggtgggacatttctgtttactggaggtctagggtaattactatttaaagctgtttgtcttcggaaatttttagtaaatgttttctatcttccaaaccacgagtatatggttttatttatgtcaggagagaaggttaaatgaaaaaaacaaaacaaaacatttctgtcacactctaamtatgaaccaaaattttaaattaaaggcgtacctgaactagtgactcaaaaccaacacaaataaacatgtgtgagaccaaatccaagaagtcatgcatggctttaactaaagctccaaagagagcacaaaaagcgtagcttttccatgattaaaacacgctattaaaaacagcttcctgcaaatggggtgcaatctacattttcaggccacatattctagtgtctcaacttctcagttt

SEQ ID NO: 779103 - DNA, 563 bp, Homo sapiens
catcattataaatgtttcttgcctaagctagaggtactaaccgagaaataaaattttgagggtgagtctaaaaaccttcaatttttttttcaatttgatttcagctgcaatgctgttttgctaattacctggatgttaacatttcaaatacrtggtaaggtttacatctttgagggactgagaaaggcctgggaaaggttaaagtatgtgttgtaaatcctgcagcaaagtcaagcaggcaatttgagcatgtaaagggttttcttgaggcagtgaaagaagagccctctgaaaatgttatgtagttattatacagttaatagttattcaacttggtctttaacttgtctgtggctggatgttgtttatgggttacactctaattcacagtttcagatgtcatttcacaatgtctaaaaaatatgacctattgaatgtctactttcatgaagttactgacataattttgcatccaaaattttaaaattttaaatatttttctatggaatttgaaaataatatgtatgctctttatactacttaataatgctatccatttgttc

SEQ ID NO: 779104 - DNA, 553 bp, Homo sapiens
tacagctcaatctgaatgggaaatctcatgtccttaatcatactatacttcccagactctgagcagatgaaaggaacatgcttcttgacctctttgtcctggcccacttagtctttttttttttttttttgagaagagtctcactctgttgcccaggttgaagtaagtggcacaatcacagcttactgcaacttctgcctgctggctcaagtgatcctcccacctcagcctcccaagtagctgagactacaggtgcatgccaccatgtccagctaatacatttttaggagatgaggtctcactatgttgtccaggctgrtctcaaactcatggattcaagcaatcctcctgcctcagcctcccaaagtgctgggattacatgtgtgagcaccagggccactgcttttactgcactacccacaatgagtttcaaatggaaaagtaaaggataaagcaattcaaaatttagaagaggaagaagagagaaactaagttcaatagcctttaatcttgtcagactgagtacttctacctacccctagtatcatatgcc

SEQ ID NO: 779105 - DNA, 553 bp, Homo sapiens
tacagctcaatctgaatgggaaatctcatgtccttaatcatactatacttcccagactctgagcagatgaaaggaacatgcttcttgacctctttgtcctggcccacttagtctttttttttttttttttgagaagagtctcactctgttgcccaggttgaagtaagtggcacaatcacagcttactgcaacttctgcctgctggctcaagtgatcctcccacctcagcctcccaagtagctgagactacaggtgcatgccaccatgtccagctaatacatttttaggagatgaggtctcactatgttgtccaggctggtctcaaactcatgrattcaagcaatcctcctgcctcagcctcccaaagtgctgggattacatgtgtgagcaccagggccactgcttttactgcactacccacaatgagtttcaaatggaaaagtaaaggataaagcaattcaaaatttagaagaggaagaagagagaaactaagttcaatagcctttaatcttgtcagactgagtacttctacctacccctagtatcatatgcc

SEQ ID NO: 779106 - DNA, 581 bp, Homo sapiens
cccaaatccagtgtacttctgcattattaagaaaacatttaagaataatagagttcagaataatatatatactggcttaagaaaaaactacttaagataaaaagactatctgtaacatttcatgtttcttcaaactaatattttaataaacacaatattttttaatgttccaaattaatgtctatttyacatttattttgactttgaaatgcactctacatgttttgcaacaatgtcgttatcattccctcattttactgcagcttaagagtaaataactggattaaaaatttctttgttctcgttaaaacaaaatataatatttacaatttaaggtgttactctatgaaaataatgaaacaagagtaactagagtcagtaatacaacactgtacattaacctaataagcaggttaaaataacccatgtctttcttatctttgaggtctcactgatgaaagccatatattccgtcactattcatgaatgttaaatttcaagcctaacaataaaacattcatcaaatatttgttcataaggttttgaagaaagtcacaataatatctgtttataatagctaa

SEQ ID NO: 779107 - DNA, 637 bp, Homo sapiens
ccaaatccactcacaagttacaatttaataggcagatctaatctcaccaagattccaaagtattccagtcaatgcatcccaactctgcttgtctctgcctgtccacagcctcctcttcttcctcctcccaagctgtgccacagcagagacctgtcagagaggaatcagaggttctcccctgtttagctttggcttgtttcattggaattctcaatggaagaatgcaaagtctttttatagtctccaataaaatgtagaggctaacggttgacagcatggcctttggagccaggaagcccagattttttgtcagctgtgtgaatttgggcaagttatttaacctctctgtgcctagattccccaactaacaaaatgggagtactaatacatacctacctattagcagtacttccctcacaggcttgattgtgggatttaaatatgttaatgccaatggtaataygataagaacatgcttggcttgtgggaagtgtgaggttaagtgttagctacaatgaggatgattgatgaggaggaggatgagcagacacagacggcaaagaaagatgtaaattggttgaattgccaagctctgtaccatcttccccacattattcttggagctcagagattctac

SEQ ID NO: 779108 - DNA, 693 bp, Homo sapiens
gcctggcaatggtgggggatcctgtccctctagtgaaagagggagtcatgcttgccccatgagctggagatagccccacaggtcccaagccacagcctccccctcctgcgtgtgtgctgtgcccccaatgacaggcttctgacccagcccctggttttccagggcctcctaagtcctgaatactgcagctttcttggctgaggccttgcctcccattccctgagatcccccatgcttctctccaggctggctctgattccctgttttcagccattttctgggtctctcaggcccattaaatacattctcagcctgatataaccaggaatgcccctccctgcgccgggccaacttttttggtgtcaacccatgcccagatcaaatgaagtttgcaagattccttgagcctagtttggctggctggcccatctctcaggcccaagtagagtctctgccctaaatcactgcctgacagagtcctcatctgggctcaaagtggaccgaggtaaatgtgtgggattgatgttatgcgggagagttgggaratgcctttcgcaggagggtaggtaggggctccataaacctatagatctgattctgtagacgagagccagacaatgcccaggagtaaatgctaagctagagcctggactcttccctgcaagaatcactaagcaagagttagggatcaat

SEQ ID NO: 779109 - DNA, 441 bp, Homo sapiens
ggtctttggggggtggtgagggtgcatgcaaaatcaactcttttcctttgtgatctgcctctagctttggccctttgggtaaacctgacacccacgtttagtattcactcctgaatgttcactacttgctcaagaggcatttgagactcttcagtctccattcttggtatgtgacaacacttcatcattccagtttagcccattgccagttattagccttcrcttggccattctcccccaccccccaactctttattcatcaggctgggtgaagtgtacaggttatacaagggcgttagttaagatacacaggttatgctgcaataacaaataacctcccccaagtatcagtggcttaacacagcaaagaattttattacccgtgcaaagtttacagcaagctcagtggctctccagggcaattcccttctaataagcacc

SEQ ID NO: 779110 - DNA, 592 bp, Homo sapiens
gcacccccaccactccattgcacttttgccagcagcccacattgaagtgttgttggcaacaaactaggaacaactcagcttctccagtgcagcaagtgcttgaccttgaggggccagagaacaaagctgcaggcctagttccagccctccagagctagagcacacagtcctggagtgctgaactgagcctcggccatctgaaagcatccagaaacaaarccaataaatgaaacccaacttataccacaatcaaaccctccaggacatcaaagactataaaagcaagaagcctgattcaaaggacagcaacttcaaagattaaaagatcagccacacagatgagaaagaactagtgcaagaattctggcaactctaaaaaccagagtgtcttcttacctccaaatgactgcactagatccccagcaatggttcttaaccggattgaaatgacatagaattcagaatgtaaatggcaaagaagctcaattttccttgacatataggagaaggttgaaatccctttcaaggaaagcagtaatatgatccaagagttaaaaacgacataaacattttcagaaagaatcaaactgaa

SEQ ID NO: 779111 - DNA, 592 bp, Homo sapiens
gcacccccaccactccattgcacttttgccagcagcccacattgaagtgttgttggcaacaaactaggaacaactcagcttctccagtgcagcaagtgcttgaccttgaggggccagagaacaaagctgcaggcctagttccagccctccagagctagagcacacagtcctggagtgctgaactgagcctcggccatctgaaagcatccagaaacaaagccaataaatgaaacccaacttataccacaatcaaaccctccaggrcatcaaagactataaaagcaagaagcctgattcaaaggacagcaacttcaaagattaaaagatcagccacacagatgagaaagaactagtgcaagaattctggcaactctaaaaaccagagtgtcttcttacctccaaatgactgcactagatccccagcaatggttcttaaccggattgaaatgacatagaattcagaatgtaaatggcaaagaagctcaattttccttgacatataggagaaggttgaaatccctttcaaggaaagcagtaatatgatccaagagttaaaaacgacataaacattttcagaaagaatcaaactgaa

SEQ ID NO: 779112 - DNA, 623 bp, Homo sapiens
aaagcttcccctttgccatccctcgcggagacaggtcatatatgacattgcaaatagaaccacctgagggctttcctccactttctaatggttgcttgactcacagaattttatctgtaattaaatctattccagctaacttaggaacagactctgataaagattatggctttagtgtaaaagccagatagagttgtttttttttcccagttatagacatttcagacctgtataatcttttactctcactttgtttaggttttccaactagacttttggcacttgcttgaatttgtttttcaattttttaatttcccaaagggcaggcaatttcaaaatctttgaaaatggatacatgtatattttaaaataaatmttttataacgtatcttttataaagtatttaaaattgactgaattataatgaaatggattggcttaatatcagtgccataacatttagttaacctcaaattcactaaatatgatgtataaaaagttagcataattctacacaaaaaattgtgttttacacctcattagatttcattgatctcaatcatagttatatatgctacagatgagcttaaacaggatttagacctttaggtgtttcaagcttt

SEQ ID NO: 779113 - DNA, 598 bp, Homo sapiens
ctacagatgagcttaaacaggatttagacctttaggtgtttcaagctttatattccttagactcttagaatatctttataattacttgcttccagatagattaaaaatcattatacattgaagagattaaacattactgtgttttgaagagattagtttctgagagagagaaaatggtgtgattgaaaaatgaaatcttatcatcctgcctgaaatgtaatcctgtgcacaaaagagtgaggcagagagggcagagtttaatgaatgtgccccgatggtattttcttgcattctatcatgttggaaaatagaacttacagttaatttttttaacastcacatctagttttagtgagttagagtctgatatggagggaatctcagaatctacctccacatcagatttcgctagctcagaactcacggactgaaagtcaaccagccgttccatgttgcaccccaacctcaaggcagccagagaagtctcttttcacaggacactacagtagcaatgacttagtcaccacttgcctttggtgtcttcacagtccaggatcttaataaaatcatttatattcttgtagtacactggatgtct

SEQ ID NO: 779114 - DNA, 598 bp, Homo sapiens
ctacagatgagcttaaacaggatttagacctttaggtgtttcaagctttatattccttagactcttagaatatctttataattacttgcttccagatagattaaaaatcattatacattgaagagattaaacattactgtgttttgaagagattagtttctgagagagagaaaatggtgtgattgaaaaatgaaatcttatcatcctgcctgaaatgtaatcctgtgcacaaaagagtgaggcagagagggcagagtttaatgaatgtgccccgatggtattttcttgcattctatcatgttggaaaatagaacttacagttaatttttttaacagtcacatctagttttagtgagttagagtctgatatggagggaatctcagaatctacctccacatcagatttcgctagctcagaactcacggactgaaagwcaaccagccgttccatgttgcaccccaacctcaaggcagccagagaagtctcttttcacaggacactacagtagcaatgacttagtcaccacttgcctttggtgtcttcacagtccaggatcttaataaaatcatttatattcttgtagtacactggatgtct

SEQ ID NO: 779115 - DNA, 656 bp, Homo sapiens
gctatggcttcaatcatatactggctctggtggtattcactataaagatatataccccaaaccctctcagggagcttaaaggcagcaatctgattctccatgggactaaggggcttgccttgaagctatatttgtcccacaaatgtgtttcgctttgattgtatgtttatttgggaaaaatgatggggtttagaattacagacccacagatttcccctccccaccatcaccactacaaaatagactcctttcccccaaaatttggccatcagaaaaacctgacatgtatttctccataaggtaattgaactatgaaagtgcaatatatgtttacaaactatatatatatttttttccctttggtcttttgttaagcacatgaatagcaaccagaaaaaaaaaaaaccttaaaaatcagcagggtagcactagctggaatgtaattttacaaaacctggccatctttcaaaaagagtgggtggatttttagcgctacamatgtttgtgtattataaagtatttgccatggtgacaaagctgggagaaacatcccattagccacagacgggctacagactgttctgattatccatgtccaaaactcagtctggctacagctttgtgttattttcagcatttataagtgctccattttt

SEQ ID NO: 779116 - DNA, 519 bp, Homo sapiens
acaaacacagatatgtggtcacaagattacaacaagggtaacagggcagtgtggtagggaaagggtaatcatttcagtaaatggttctatgtaagttgaatatccatacagaaaaaagtgaatcttgattccttctataccatatacaaaaatcaaattatatagaatatagatctaaagagtaatatacttaagcttttaaacacagaagaataactttgtgactttggtgtaracaaaaatatttccttaacaccactggtgctactcaaaagatgctaaacataaacaagaaaattaataaattggcttaaattaacattagtagtttcttaatttatcaagacaccacaaagagagtgaaaaagcaaagaatgggagactatatgtcaccagtctgtgcaacaataaactcagattatgatctttaaaattcttacaattaaacaaacaaaaagcaaatgggaaatggacaaaagatatgagcagacactttagaaaagtaaatatcccaatgtc

SEQ ID NO: 779117 - DNA, 512 bp, Homo sapiens
gtctggcttcactcggcataatgttttcaaggttcatccatgttgtagcatgtatccgaatcacattctttttacaggctgaataatattccattccaatatgtacatagcacatttggtttatctctccatctgtagatgaacatttgagttgtttccacyttttggtacttgtgaataatgctgctacagaacactgaagtacaagtatttgtttgagtccctgctttcatctcttttgggtatatacctagaagtggaactgctagtacctatgctaagtcaatgtttaacttgttgaggagccaccaaattatttctattgccgcaacatcattttacattctgatcagctatgcacaaggtttctaatttctacacatctttactaatacttattttctgtttttttgataagagccattctaatgggtatataaagcagaatctcattaaattagatttgctttgtaaactatttattaaaaataagagacacgaagagaacttat

SEQ ID NO: 779118 - DNA, 512 bp, Homo sapiens
gtctggcttcactcggcataatgttttcaaggttcatccatgttgtagcatgtatccgaatcacattctttttacaggctgaataatattccattccaatatgtacatagcacatttggtttatctctccatctgtagatgaacatttgagttgtttccactttttggtacttgtgaataatgctgctayagaacactgaagtacaagtatttgtttgagtccctgctttcatctcttttgggtatatacctagaagtggaactgctagtacctatgctaagtcaatgtttaacttgttgaggagccaccaaattatttctattgccgcaacatcattttacattctgatcagctatgcacaaggtttctaatttctacacatctttactaatacttattttctgtttttttgataagagccattctaatgggtatataaagcagaatctcattaaattagatttgctttgtaaactatttattaaaaataagagacacgaagagaacttat

SEQ ID NO: 779119 - DNA, 658 bp, Homo sapiens
agttaaaatacctaagaataagctcagtaagaaatccacaaacctatcgtaggacacactacaaatttttattcatagaaataaaagatatgaatatatgaatagatataagatgttcctagataagtttgaagttcacaacatgccgattctttacacattattaattaaatataattttttccctaagcctcaaagatctcttttactcttttggttttttggggtttgtttgtttgtttgttttgagacaaagtctcgctctgtcgcccaggctggagtgcagtggggtgatctcggctcgctgccacctccgcctcctgggttcaagcaattctctgcctcagcctcctgagtagctggrattacaagcttctgccaccgtgcccggctaatttttttgtatttttagtagagacagggcttcaccatcttggccaggctggtcttgaactcctgacctcatgatccatccgccttggcctcccaaagtgctggcattacaggcgtgcagccacgcccaacctcttttggtttttaatgatattttatatgcttatgagcccaaaaatacactcatagccttgccctctcttattctatagccagcttctcactagacatttttatttggatgtgtcacaagcatctcaaacat

SEQ ID NO: 779120 - DNA, 610 bp, Homo sapiens
agatgccactactatgaatctgggtattttcttttttcttatcatgcctagcattgcttatttttataatttgttgctttctgaacctaggggaaaaagatctatttatatattttcccctcagaaacaataccaatttggtagatatctcaataacttacctagtttttcaagatgaaagtgatatactagtagaatgattgattatataattcatgtagaagaccatggggctagaattccctaatccctttggagtcaaaatgggagatgaatgggagtagagggctaccratgactctgaaaagatggtgcactgacttttgataaaggattaagaaaagatcctgtctcattaaatatatctgtgttcacctagtattacagtgggtcattttacatatgtgtcaattatagcttttttccgtttgtaaatgtcatgaaactagtgatttgacttttaaaaaattattatattcaacaactgatatccaagtagaaaaaaagtgaccagctgctgttatagtgcactattccaaagctgccttatctacacacaagaaagattaccgactcaattttcgaaatagtgtaaaaaaagaggaaggtg

SEQ ID NO: 779121 - DNA, 542 bp, Homo sapiens; identical to SEQ ID NO: 739544

SEQ ID NO: 779122 - DNA, 542 bp, Homo sapiens; identical to SEQ ID NO: 739545

SEQ ID NO: 779123 - DNA, 620 bp, Homo sapiens
agatgtatggaaatgcctggatgcccaggcaaaagtttgctgcaggggtggggccttcatggagaacatctgctccgtcagtggagaagggaaatatgatgtcggagcccccacacagagtccctactggggcactgcttagtggaggtgtgagaagagggccactgtcctccagaccccagaatagtagatccaccgacagcttgcaccttttgcctggaaaagccgcagacactcaatgccagcccattaaagcagccaggagggagccacaggcgtggagctgcccaagaccatggaacccacctcttgcatcagcrtgacctggatatgagacctggagtcaaaggagatcattttggagctttaaaatttgactgccccgctggatttcgaacttgcatgggccctgtaacccctttgtttttgccaatttctcccatttggaatggttgtatttacccaatccctgtacctccattatatctaggaagtaactagcttgcttttgtttttacaggctcataggcagaagggacttaccttttctcagatgagactttggactgtggacttttgggttaaccctgaaatgagttaggactttgggggactgttga

SEQ ID NO: 779124 - DNA, 635 bp, Homo sapiens
ggctgctcactgcaggaagctgcccagctacatggcgattagggtctgaaatccagcctgagctccccttgccatggcatgatccacagggcctgcatctgcttagacaggagacattttctgatttgcctgtggtctgcattatcagaagaatgaatgaatgctgggtagacctaaacaaaaatgtctacttcaggtggcaatcaaaaaatattcttattaactttgattttatttttctttatttctttcttttaaaaataggagacagggttgtgtcwtacaaaatgtgtgggatttagagttagaacgcctaggttaatgccacaatgccacttgctggctgtgtgagtttgggaagttttaatatttcttgttcagtttacttatatgtaataatcacatttcagagaggttggaggattaaaagacatacataaaagttgatcacacagcctgggacacagtagcagctcaattaatgttaattaattgtggcaatttaaaaacatgggccccaaattctttggtactcctcccagagaaaggtagatctgtttccccttcttttgagttagggaatacttgtaactgcttcaaccaacatagcatggagaattgacatcatgtgactt

SEQ ID NO: 779125 - DNA, 502 bp, Homo sapiens
ctcttctaggaaattctcatttcagtaacaaaaatttctcttcagaaagggagctagaaataaatatttttaaagaagcaccatacacgattttatgattaggcaagttggggaatgttgactgaaagcaagcctgaaaataataccrtaactataattttaagaatacttaaattaattaagcaatagttaattgaactttaacccaggagttttatcaagactttctttgttttcccagggaaaatgtctaaattcataaccacttattgtttccccaatttgtttaactattttaccagagaatacatattaattgcatctgaagcactacccttttaactttgaaaggcacttactctataaatttccctcacctcatgtatagagtgatagcattctttgaactcccaaaattatttttgaaaaatttacaaatgtaacaaagtaatcaagaagcaataaactgaggtcagccaccaagaatagcagagataagtga

SEQ ID NO: 779126 - DNA, 502 bp, Homo sapiens
ctcttctaggaaattctcatttcagtaacaaaaatttctcttcagaaagggagctagaaataaatatttttaaagaagcaccatacacgattttatgattaggcaagttggggaatgttgactgaaagcaagcctgaaaataataccataactataattttaagaatacttaaattaattaagcaatagttaattgaactttaacccaggagttttatcaagactttctttgttttcccagggaaaatgtctaaattcataaccacttattgtttccccaatttgtttaactattttaccagagaatacatattaattgcatctgaagcactaccyttttaactttgaaaggcacttactctataaatttccctcacctcatgtatagagtgatagcattctttgaactcccaaaattatttttgaaaaatttacaaatgtaacaaagtaatcaagaagcaataaactgaggtcagccaccaagaatagcagagataagtga

SEQ ID NO: 779127 - DNA, 502 bp, Homo sapiens
ctcttctaggaaattctcatttcagtaacaaaaatttctcttcagaaagggagctagaaataaatatttttaaagaagcaccatacacgattttatgattaggcaagttggggaatgttgactgaaagcaagcctgaaaataataccataactataattttaagaatacttaaattaattaagcaatagttaattgaactttaacccaggagttttatcaagactttctttgttttcccagggaaaatgtctaaattcataaccacttattgtttccccaatttgtttaactattttaccagagaatacatattaattgcatctgaagcactacccttttaactttgaaaggcacttaytctataaatttccctcacctcatgtatagagtgatagcattctttgaactcccaaaattatttttgaaaaatttacaaatgtaacaaagtaatcaagaagcaataaactgaggtcagccaccaagaatagcagagataagtga

SEQ ID NO: 779128 - DNA, 651 bp, Homo sapiens
gtactatattggtgatctcagataagatctagaaaaattttctggattaccagtctctgcctgttctcttcctttactttctcccaaacaaatgaagtctctccttctgtgctgagccacctggagcttggggtaagacgacacaagaacccctgtggccaccatcactggaattgcactgggtcaggtttaagccagcacagcactgggtcttgctcaaggtatgttcaaattactacctggctaccacctatgtttactcaagaccttggggctctacaagatcttaagcaggtggtaaagccagccatgtttgcttccttccatttagggtggtgagttcccccaggccccaggtggattaggagatgccacctgggagccaggtactagagtcaaaaaccttagaaatataccttagaaaccttagaatctagattggcagaggctgagttggcactcaaatcatgagacacagtccttcccactcttccctcmcctttacacaggcagaggggcctatccccatggccaccaccacaggcctaggaagagtactgtcagactgtcgctgctgttcacttaaggctcaaagtctcttcagtcagcttgtgaatgctgccaggcctggatttttattattcaagaaag

SEQ ID NO: 779129 - DNA, 620 bp, Homo sapiens
agtgttcaatatttttaattcaatatttattacatttaattaatcaacatgtataaaaaagtttctttatattatttatttatttttcatagagaccggatctcactatattgtccagctggtctcgaactcctgggctcaagcgatcctcccacatcagcctcccaaagtgttggaattacaggagtgagccaccatccctggccgaaaaaagtttctaggagtggtagctgtgcatgtgattcaaaacaatcttatttcagtgaaygaaagttttcagccctcttaacttcacttaatgcactctgagaagatacctacaaaagatgttttttaggatggaagttgaacatgtgattcagaacatcattatttcagtgaacagagtttagcccttcaatggccaacactctgttaatgcacatatataaaaggtgtttctaggagtgctggttctttccatgattcagacaggtttttgttttcttactatttcatcatttttaactccatttgtatactttgttcaaacataagtataaatgatattctcagaatgcaagttgcacagttgattcagaatagtgtaatttcagtgaatggagcagttcaccactcat

SEQ ID NO: 779130 - DNA, 504 bp, Homo sapiens
aggcatatccacaaaccatatttctaagaatgcgagttgcacaagtgattcagcacactttgatttcaatgtattcaccactcttaaatcttaaaatttattatatatgttaaatcacatatatgaaaagtactctcgtgagttctagttgcacatgtgattctgaaagtgttatttcaatgaatgtgttaatcactcttaactccacataaaacacttagtaayactcatatgtaaaggactttactaggagtgttgcatgtatgattgagaacagcgttgcttcagtgaatgggaatatttaccatttttatatcgtaatatgctcttatgacaaatgtataaaatatatctctaagagtgttagttgtattcaattgagaatatttttattttatggaagtgttcacttttatgtctatctaatactcttttaagataagtatacaaaagatgtttctaagtttctagctgtgtagtgattcagaacaacagggtcactga

SEQ ID NO: 779131 - DNA, 622 bp, Homo sapiens
tggatccctgctgccgggtccttcatgaagtgatggaatgcccgcattcacaaacctgaaatctcaggactgggaaccaagaccaccctgtatgacatcatgacataactatttgtagcaggaaattattttccaagaacatcagtctatacaccaaccaataattcaatgtttgccttaggaacttcctgtaaaccaatttctacgggaaaagaatttgctcatctggacaatagctattctctcaagtctagtcagcaaactactcctttgcttatcaaggagtagtttacttataaagaagggcttaaaatgctcaccttgctgtgttccccaatcctaaatcatgaacagcactcatttacaatctgtcctccaccttgaaagaccccttgrggccagtctcccagaccctgtcaaaatccctcttctccttccaacacctttaagactcaggcaagctggtattcttccccactgctgtaggtctaataaacttcccctgacttcatgcacaactcatgctgatggtctttctgcggagtgagcagtggatgtggctttgacaaagccagcattatagagaaggaaagattttattcaggacactggagtctgaagc

SEQ ID NO: 779132 - DNA, 633 bp, Homo sapiens
caattatttagatcaagagcacgtaagaaatgatgcttaacatccttagtcactgtggaaatgtaaattaaagccactatgccagaatggctaaactgaatactcttcagaaatgagaataaacaatgtacagttacaagtaaaaatatggattaatttcatgaacataactgagcaaaagaagttacattaaaaagtatacatattctatgattaaattgcataaagtataaaattaagtgaacctaatctatggtattggaggtcaagatagagattaattctccttcccattgggtgtggcatgttgacaagagaaagtattgagccacacacaataaatcatactttttgtttgtttaattttgagayagggtcttgctgtctttcccaggctggagtgcaatggcataatcatggctcactgaaggaccaacctcctaggctccagtgatcctccactttagcctcctctctgcgactacaggtatacaccaccataactgatgaatttcttgtttttcatagagacaaggtctccctatgttgcccagggtggccttgaactctgggctcaagtgatcctttcaccttagcctctcaaagtgttgggattagtcataagccacagta

SEQ ID NO: 779133 - DNA, 586 bp, Homo sapiens; identical to SEQ ID NO: 766115

SEQ ID NO: 779134 - DNA, 400 bp, Homo sapiens
tctgatttttttctcatgattaaactgggatatgtgttttgggatggacaaccatagaggtaaagcaccaatctcttcacattatatcaaatgtgtatagggactcaaaaatgtatcccaaagtatggtgccttgggatgctgagtattttgaagtaaaggagattggaattcctcagaagcaaagtctctggcccctytttctcctgtgaaataaaccatagaaactaaactccctcttccccaagattataaaaactagacccttcttttccaaaacaagccataaaccctaaaactattactatcatcttctcccacctttctgtatagcagctggccataaagaaatactctgacctacgttgtttgatagtaggccataaaacattcattgctaa

SEQ ID NO: 779135 - DNA, 603 bp, Homo sapiens
gaagagaagaaagagaagtcaaaagctagaatgaatttgtagatgactttggaatagtgtattagtcatgtgtttattattattaataataatcctctagatccctactagtctctataattttcagaacttttctgagtttcacataatattcacaaatattagacagggcaggtatggtgactcccrttttgctcatgtgggacctgacactcaaagagtaagtgattatctcaaaggtgcaaggctgctacattgcagaccttgtcttgcaatgctactcataacacagtgtggggctaaatgttattatatgcagaagaggcatgatctgtctgcatgaaagaaagaagatttgaaacaactagagtgaggctttaaaaagtgaccattaagacaagttttagttggaggcctcaaagggatgtgaaagataaagtgtgtaattttaagagaacagtaagccacataggcttctgcacgtcccaaagtttgcatgtgtcctgggatcagggctaaccatgcaacacatattcaaaattgtcaggtttccaaattataaatattattttatgttcttattatattatataaaagtaagtg

SEQ ID NO: 779136 - DNA, 535 bp, Homo sapiens
ttggcatttgtagaatgttctatctaacaataatggaatacaaattctttttaagtgcatatggaacattcaccaagattgaacatattctgggcaataaaacaggtgtcaatacattttaagggattagaatcacaaggagttcatttttagatcaaatcccaattgaactagaaattaagaacaaaaagatatctggaaaatttctgcrtttttggaaattaaacaacatttttaaataacccatgggtcaaagaaaaaacataaaaaataaaacatatttgaacgagatgaaaatgaaaacaaatcaaaatgtataagatttagcaaaagtggtgtttagaggaaaatgtacagcattaaacacttttattaagaaaaacagtctgaaatcaatgacctatgtttccattttaagaaactagtaaaaattaagaaaagctaattaaacccaaaatgagcaaaagaaataaaaatatatgaaaataaatgatgctatacttaataaaatttaaattactactgaaacataatg

SEQ ID NO: 779137 - DNA, 576 bp, Homo sapiens
ttcctgtgtccatttgttcctgcagggttcacatgaagctgaaatggtggtgtctttctccaggcactctctacccatgggaacaagtctgaaaatcttcctctatgaatgtctgttacatctgcagaggttggaagatatttttatagacctctttggctttaagcagggaagatacattctggaattaagtgggagaccctccctgacctatgatttcttcctgtgttcccttatcaaattgtcycgtctttgggacagttagggttaggaaccgtccccattccttttctgcctcactagggttttgtagtgctgccgtttcctatcgcgatcaactgggatatcctctctgcaccagcccatgtggtcccagcaagaaactgaagacccttggtcaaatctcccctgtgggagagactcctccacacacccagaccccacagtgaacatttggaggttcatcaggtgagctgtttctatcaatgaaatggttcctgaaaagttgtatgtaagtaacatttttataaattgaaaatctgacaggaaccctgcagatagtctatttagatttaa

SEQ ID NO: 779138 - DNA, 576 bp, Homo sapiens
ttcctgtgtccatttgttcctgcagggttcacatgaagctgaaatggtggtgtctttctccaggcactctctacccatgggaacaagtctgaaaatcttcctctatgaatgtctgttacatctgcagaggttggaagatatttttatagacctctttggctttaagcagggaagatacattctggaattaagtgggagaccctccctgacctatgatttcttcctgtgttcccttatcaaattgtctcgtctttgggacagttagggttaggaaccgtccccattccttttctgcctcactagggttttgtagtgctgccgtttcctatcgygatcaactgggatatcctctctgcaccagcccatgtggtcccagcaagaaactgaagacccttggtcaaatctcccctgtgggagagactcctccacacacccagaccccacagtgaacatttggaggttcatcaggtgagctgtttctatcaatgaaatggttcctgaaaagttgtatgtaagtaacatttttataaattgaaaatctgacaggaaccctgcagatagtctatttagatttaa

SEQ ID NO: 779139 - DNA, 591 bp, Homo sapiens
ggcacaattcatggaaattatcaccttcatttctgataagcatctggtagttaatacccaatcttttctttgcaggagccatgacatcgtttaaaagaattcaggccgggcatggtggctcacgcctgaagccgaggcaggcggatcacctgaggtcaggcattcaagaccagcctggccaacatggtgaaaccccatctctactaaaaaaaaaaaatacaaacaattagccaggcatgatggtgggtgcctttaatctctgctcaggaggctgtggtgggagaattgcttgaacctgggaggcagaggttgcagggagccgagatygcaccactgtactctagcctgggtgagagagcaagacttcatctcaaaaaaaaaaaagaaaaagaaaaagaaagaaagcaaagaataggagatctatttggtacagcaatatttgctcttacttcaaagatgtttggcttaggggatctcctcctatctggttgtgacctctccccatcatatgcctttatgctcaactccttggtattaggttctcccatgcactcattatttatcgcataaaagtagctacaattcccggaa

SEQ ID NO: 779140 - DNA, 651 bp, Homo sapiens
acatggtgcgggactggcaggcagctccaccagcagccctggtgcaggatccactaggtgaagccagctgggctcctgagtcaggtggggacttggagaacctttatgtctagctaaaggactgtaaacacaccaatcagcactctgtgtctacctcaagatttgtaaacacaccaatcagcactctgtgtctacctcaaggtttgtaaacacaccaatcagcactctgtgtctagctcaaggtttctaaatgcaccaatcagcactctgtgtctacctaaaggtttctaaatgcactatcagtgctctgtgtctagctaatatagtggggacttggagaactttcatgtctagctagaggattgtaaatgcaccaatcagcactctgtgtctagctcagggattgtaaatgcaccaatcagtgctctgtgtctagttaatctagtgggaacttggagaacttttgygtctacctaaaggattgtaaatgcaccaatcagcactctgtgtctagctcaaggtttgtaaacgcaccaatcagcaccctgtcaaaaaggaccaatcagctctctgtaaaacagaccaatcagctctctgtaaaatggaccaatcagctctctgtaaagtgggccaatcagcaggatgtgggtg

SEQ ID NO: 779141 - DNA, 594 bp, Homo sapiens
gtttagaagaaaaccttttcttctaaacttcaaatggttcaaaaatatataaacataacgaatcataggtattcaaaatattaaatttgatttaaaatttgagataagacaaatgattttgcaaagtaacagagcacctaaaaagcattttacagaagactaagcaaatctgaatttgcccttaggattattagaaaatagaataactctagagcccaactcatgttttttcctcagatcaaaattattatacatctatagatttggagcacaaakgtcaaaaataaaaagctttgaaaggccatggggaagaatggaaaagtagattaaaatatcagcactggctaatatcttcttggttccatttctccattattccatctatttccctcccttaaccgagtgattcagagtgcaaatcctagttcaaagctagttggcgaggctttctcaatctgaatttcctcacctataaattgggggcaataaaccttcctcaaagttttattgagaggatggaatgagataacataagtaaaaaaaatctggcctggagtccttaataaatgctctctcctttaaccctctttctgt

SEQ ID NO: 779142 - DNA, 642 bp, Homo sapiens
actcatttctgtaccctgtaggtggcacagtgcctgtcagtaagggatcctctctattcatctttattttgagatctggtctagagttcttttctggcaggcggtctttattttcctatagcccggaagagacaactctcccttgaacacttaaactcagtgccttctatctacagctcttctgtcagatagcgtgargcctgatctcatcactctgaccatctaacaattatcagtcttcctgtttgataaatcaattgagcggggaccacatcaggcattaaggtgtcccacaaccatcatcccaggtgggcaggcacaaccgaagtgccctgatcctgcagtcctttaattgggcaaatttatagttgtgccttttaccccttcctattttgtatcagtttctgaagcttcattctccattaagatcaagtttacacaagaggctcgaagcaaagcaaactcaagtcagatgtttttggatggtacccaaaggccctgaaaattcacaggtgaagaggattaatttcattgccatgcttctgacacacccctttcaaagtggtttagcactgctgtttagtaaatgctattcgcctcctgcttctggtaccagccacatttgcatattcatcagaagtg

SEQ ID NO: 779143 - DNA, 640 bp, Homo sapiens
ctacttatgtatttagtcagtgaaaacagtgaagccctgggttgcaggggggtcttatcgtagctgtccataaatgagaataacagggtcttcaccggattgttgcaagggttaaatgagttaatgtgaaatgcttagaatagtgcatatagtacctttatgcacaggaagctctcaaaatgtgtcccatgtcatcttaatatctctggaaacctgcactacatctggcagacaggaggcattaaaagaaatatttgcttactgtgagacatcaaattgtctatactgttaatgttgtttaaaactccataatgaattcttagcagcttcattctgtgtccttaaagtaaagggaaaagtgacattaaaatttttccatttcaataaagggaaccaggattctttggagaaatagctaattytaggtctgggacaggcaatacacaagataagcctggggcatcctaaagtgccagaaagtaaggaagtgctaaaacaaagcaaagtaaaacacacacatgcacacacacacccaatgatgcggtatgtcaaagggacacagaagcccatttaaagagcttccagtggtaaatattgcaacaatttgagaataaaagaaaacagtattagattataacac

SEQ ID NO: 779144 - DNA, 608 bp, Homo sapiens
tatgtacattatgaatgctgtaaccaaatgtgtacatttggttaaaattataaatggttaaaatttgtatattttacaacggttaaaattataaatattatgttatgtacattttaccactgtttaaaaaaggattgataaattaatactgtactaaagcaaacacatcaaaatgttaattgtagaataaaaaattatggaaggaagagcatggaagattaatttggctaaagaaaagaatgtaaatgttacaactttgacaacataaacatgtagttgacaaaagatagaattgagagggcaaagacagaagtgttaatatctgtcttcttayaaagtaggtagtcaacagattgttgaaagtaggtggagcaagaaatagaggtttaagtctgttactgaaaattacatatgtaatcaataaaataactaataataacatgaatatcaaacactgggaaaagaagggaggaaaggtagtcaacattaaattttcatctttcatagtagagattgttcttggcttgttgaagtcaagataaaaggtattatatctacataatatcaaaaggagttgtggaggaatccaccagaatacctaggcagac

SEQ ID NO: 779145 - DNA, 587 bp, Homo sapiens
tttggaaccactgaccttgaacataaataatcaaaagcctcatcagctttagacctggatgttatatagtcatgcttatccccctaaatagattaatattagatatgtctcagatattctagttctgaatcctacacctaggaaaagttcttcacaaattatgacaatttccaattatgcrtggtgagtagattactgcattttaaaaatcccatgcactcttcattactaaacatttctagtagagctgctaacaaattacaagttgactaatttcctttcctattcaatgtagcaaaggtgggttaataagtaggtgaactaaccaacagggacagagtaagagcagagaaagcaaatgtttggagctattcacaaacatattaaaaatgtttaaataatggaaaactagcttcctccaatatagcaatggatcaatcactgaaaatcaaataccacctcttaaaatccaacattaaactcaatacctaaggaaaatcaaacaatagtagggaaaagttctatagactatttatgagaaaatactaacatttgaatgtaagtcctagttcagacactaacactcc

SEQ ID NO: 779146 - DNA, 599 bp, Homo sapiens
tttaatcctcaaagaattcctatgcaattttgtagctgaagaaaccaaggctcagagtggccaaatggtttgttatttgtggcagagaatttagatgcccatctaggtgagcctcggactctaaaaccttcctacaatgctgatgtgaggctttaaagaagaatacatctcatcgagtgagaatactattgaaggctttctaaagacggttgggtttgagctaggcaggaagaataaatggggttttgttaaaaaagaagagaagatagggtccaagcagagggacagtatcagtcaatgagtaagaaatgctgggagcatgttcaacacattatcatggtatttaaccaaaatttgaggagggacatgtctctcctttgtaatgggcttggctgggtccwagaagaggcgactggtgcctgactagagggaatctgtatttgtaggaaaatagagagagcctggtctgcagaagagtatcactgaaaccactagtctgggagaaagattatggtgccccataggaactggagagctgcagagccaaagaaggaggggcaggaggggcaggagcggcagaacgggatggggctccctat

SEQ ID NO: 779147 - DNA, 647 bp, Homo sapiens
ttttggttttccataggctggagatttgtagtttacataaggttaaggggcccttttttagatctttgcttcataatcgaaggttccctaacttggatttctggactaaagttctcccactttgtggataggtacttgaatttaggaagcttgctctttcacatctccctgcctttgcactcactgttctttccactaggatgccttctgcccagggctgcctaatggattcctactgcytgctcatctgtgcacccccagccctaggcaaggggactggccattgcaggatctgagtgcaggacagattgtgcaaagaggagggggatgagcagcagggaagctacttggggggctgatgctctagtggagtctgagagaggcaaaatgggaggaaaaggagaggagaagacaggtatgcagtgacatgtcaaaagaagcattccttatctgtgcatatgaactggttttgctaccatttcctcaatcagtgaggtttgtgctctatctactggtcatatgtgttattgcacccaacacatccaagaaaagtttttcatcaacaacttcacacatctgcaaaatcatacatgcagaatgctttggggacttaggtctgagccacagtttgttgagaaggagtcagg

SEQ ID NO: 779148 - DNA, 669 bp, Homo sapiens
tctgtcgtgagtaaaagctccctgaggcttccgcagaagccaagcacatgctggtgccataattgtacagccagcagaacagtgaaccaattaaacctcttttctcttttcagacagtctcactgtcacccaggctgaagtgcagtggcatgatctcggttcactgcaacctccatttcccaggttcaagcgattcttgtgcctcagcctccagagtagctgcgattacaggatgtaccaccatgcctggctaatttttgtgtttttagtagagrtggagtttcaccatgttggccagacaggtctcaaactcctggcctcaagtgatccacctgccttggcctcccaaattgctgggattacaggtgtgagccatggcacccagcctaaacttcttttctttgtaaattacccagcctcagatatttatgtatagtaacagaagaacgacctaatacagaaggagtctctccccatagccaccacagctgtgaacatggtgggtcatgcttgaagcctgcatggcactgggtcttacccaaggcctgcagcaagttctacttggctactagcaagtaccggcaagtattacctgctggtgtttgttcaagacccaagggctctttagtcagcaggtaatggatcctgccagaactgtgtccttccctt

SEQ ID NO: 779149 - DNA, 601 bp, Homo sapiens
aatatatcatcttactctttcttgcttttattttcttttgctgagaaagcttcaccttattctcttaccctcttattctcctctacacactcaggggcttctcaaatggtctgccatggaccactagtacatgagatataaaagtactcagtctctggagaagtcagagaagagctgagggtggcccaatatggtaagaaatgggcaaattttctaacagtttgggtgtgagacaaaagaggagtcaagatgactccaaggctttttggcctgaacagtgggaagagtggagttgccatcaaccttgaaggaggaagactgggtggtgtaastttggaagagcagataaagtgtcagtttgggatatggtagatttgagatgctgactagatggttatatataagcttagagttcaggggacagatctggaccaaaggcagaatctaggaatcataaacatacatgcggcattcaatgccatgtggctggatcagatcaccaagggaatgaatggagatagaaaagaaaagtccaaggtctgtgctcttggatgttcagaaggaatagccagtgagataaaaggaaaatcagaagaagact

SEQ ID NO: 779150 - DNA, 542 bp, Homo sapiens
gatttcagactggatgtgtaaattttgatgtagattaatttttttttttttgagatggagtcttgctctgttgcccaggctggagtgcagtggcatgatcttggctcactgcagcctccacttccagggttcaaatgattctcgtgcctcagcttcctgagtagctgggattgcaggcatgcaccaccagctatttttgttttgttttgttttgttttgttttgttttgttttgtatgtttagtagagatggggtttcaccatgttggccaggctggtctcgaackgctgacctcaagtgatccacctgcctcagcctcccagggtgctgggattacaggtgtgaatcaccacacctggcccgatgtagaggaattaaagcaaatttcagagatgggtccctggctgggcagtctgactagctgagggtggtaggtgggggtgcggggagtaggggtattgccagatgaaggaggcactggcccagggatagagtactgaaagttcaatgaattttttaaagtgtatattttctgagaaaca

SEQ ID NO: 779151 - DNA, 599 bp, Homo sapiens
ctatggatcccaggtctttagacaaactcaaccaattgtcaaccagaaaatgtttaagtttacctatagcctggaagttcccggctttgagttgtcctgcctttctgaaccaaaccaatgtatttcttaaatgtgtttgattgaggtctcatgcctctctaaaataaataaaaccaagctgtgccccaaccaccttgggcacgtggtctcaggacctcctgagggctgtgtcacgggccatgttcactcatatttggcttagaataaatctctttaaatattttacagagtttgactctttgggttgacagattgcagttgtttttgttggaaagaaaatgaacacaaagtgtttttccacctatttacagatgtttattttgaaaaaaaactttatttaaaattggaatagggcatgtttatgtamactttgataatatcgaagcatcatttctatggacaaagacaatatcttaatttagtaaaaagaaattttcttctctcataattatttcagtagatgagcagatttttcccccaaaggtagctctagcctggttcgaagtgctggttgtatatatcctttaaagtccttgttt

SEQ ID NO: 779152 - DNA, 599 bp, Homo sapiens
ctatggatcccaggtctttagacaaactcaaccaattgtcaaccagaaaatgtttaagtttacctatagcctggaagttcccggctttgagttgtcctgcctttctgaaccaaaccaatgtatttcttaaatgtgtttgattgaggtctcatgcctctctaaaataaataaaaccaagctgtgccccaaccaccttgggcacgtggtctcaggacctcctgagggctgtgtcacgggccatgttcactcatatttggcttagaataaatctctttaaatattttacagagtttgactctttgggttgacagattgcagttgtttttgttggaaagaaaatgaacacaaagtgtttttccacctatttacagatgtttattttgaaaaaaaactttatttaaaattggaatagggcatgtttatgtaaactttgmtaatatcgaagcatcatttctatggacaaagacaatatcttaatttagtaaaaagaaattttcttctctcataattatttcagtagatgagcagatttttcccccaaaggtagctctagcctggttcgaagtgctggttgtatatatcctttaaagtccttgttt

SEQ ID NO: 779153 - DNA, 682 bp, Homo sapiens
gtgaatgtacaaaatgagcttacaaacttacaaaacgaagaagactatttaaatttatctgtacttagttttgagatatttgaaaaattaatttttaaaacattttagtccctctaaagatggcagacactgacacaactaaagattaagttaaaaatgtgttatttggctaagtgtatgaaataatcattagagaaatgcaaagaaaaaagacacaatgagatatcaccgcacacccatttggatggctactatcaaaaaaaggaaagaaaagaaaagaacaagtgctggcaytgatatggagaaagtggaactcttgtgcaccattggtgggaatgtaaaatagtgccactgctatagaaaacatagtggttctcaaaaaactaataatagaactaccatatgatccagcaattccacttctacacatatatctgacagaattgaaaataggtctcaaagagctatttgtacacccgtgttcatagcaggattattcacaatagccaagggatggaagaaaccctagtgtccatcaacagatgagtgcatcaacaaatgtagcatatacatacaagggcatatgactcagctttcagaaggaaaaatattctgacacatgcaacaacgtgaatgaacattgaggacattatgcaaagtgaaataagccagtcacaaagac

SEQ ID NO: 779154 - DNA, 620 bp, Homo sapiens
gatgaaaagtgaggataattaagagttttatggggttgatgtgctactggtagcaacagcagccacaccccacctgcaccaggctgatgagcccacattgcttggggatgagcccacattgcttgggagtgagcctactgctgggggcagaacacagcttgggtggagagggagcttctggtgcccagcccggccacccccagctccacttctgatccagcatcaacagggcttcttcctgtcccacagaaagagactggrcatgcgggagcttctggctcttgttccgcaaagggccactagtagcagggtgtgagccttgggatgcagctgcggagggaccgttgccacatggagccattgccagttataaagttactgggcagagtgaaggaggagaagaactgagtgcaaatgagacctcatttcagcctcagccagggccaggcggaattggctaaatggtttctctttccttccattttcatcttttcctctcttcattcctttcctccctttcctcttctccttccttccttctaccacaacttccaatctccaccccgtcgtctcctctctgccctcccctctcctgcctgttctctctcctgcctgtcccc

SEQ ID NO: 779155 - DNA, 620 bp, Homo sapiens
gatgaaaagtgaggataattaagagttttatggggttgatgtgctactggtagcaacagcagccacaccccacctgcaccaggctgatgagcccacattgcttggggatgagcccacattgcttgggagtgagcctactgctgggggcagaacacagcttgggtggagagggagcttctggtgcccagcccggccacccccagctccacttctgatccagcatcaacagggcttcttcctgtcccacagaaagagactggacatgcgggagcttctggctcttgttccgcaaagggccactagtagcagggtgtgagccttgggatgcagctgcggagggaccgttgccacatggagccattgccagttataaagttactgggcagagtgaaggaggagaagaactgagtgcaaatgagacctcatttcagcctcagccagggccaggcggaattggctaaatggtttctctttccttccrttttcatcttttcctctcttcattcctttcctccctttcctcttctccttccttccttctaccacaacttccaatctccaccccgtcgtctcctctctgccctcccctctcctgcctgttctctctcctgcctgtcccc

SEQ ID NO: 779156 - DNA, 587 bp, Homo sapiens
gaaaaaaagccagtccctatagattacgtattccatgattccatttatataacattcttgaaatgacaatttatagaaacggacaacaaattagtggttgccaacactaatttggagtgcaagtgctgaaggacaacgtggcgataaaatattctgcatctttttttctaacttcctttacttaattttcttagtttttaaaaattgacatgtaataattgtacagatgaagtataacagtgttttgacatgtatcacatatagcaatcagaccagggttctagttgtaatattaaaccattattttgcaagatgtaccattagggaaccggataaggaaaatatggsatgtgtctgtatcacttcttataattgcatgtgaaacaaaaattaaactttttattatacctcagaaaaggcaaaaggcagggtgtagaaacaaattattccaaacagaggaaatggcttatgaaaaggttctggcaggagcaaatattgcatacctgatgaactacagaaggccagtttggctacaatgctgagagcaaggagtgtgtatgtagatcaagggggcagaaattgagaca

SEQ ID NO: 779157 - DNA, 598 bp, Homo sapiens
tttttaaaaaaaaaaatccgtccatctattctatatcttttaagttgagaatttaagccatttatattcaagatgattattgacatttgaggctttatttttgtcatattgttaattgtttactggttatttcatatattctttgttaatttctttttytcttttgtttgacattgtggtctggtagatttctgcagtggctccatttgggtactttctcttcctactttgtgtgattgcttcaccaatgcattttatactttcatgtattttcatgataataaatgttgtccttttgctgccatgtttagaactccctttagcatttctcataggaacagtacagtggtgatgaattccctcaacatttgtttgtctgggaaagactttatttctccttcatgtatgaaggataattttgctggttatagtattcttgtcaggttttttccttttagtactttgaaattatcccattttcctctggcctataacatttttattgagaaattcactgttagtctgatgaggtttcttttgttggtgactagaagcttttcacctgtttttaggatttgctctttatcttttattttat

SEQ ID NO: 779158 - DNA, 559 bp, Homo sapiens
gatttctgatgatttctataagcacagaaaaacaagaacatgctcctcagtctctctgaggtactgtgccattccttgaccacttaccctgtggtagacactcttctagtctcttgtactggtagccagagttagggttgatttggcctcctggggtacaggctgtagcctggatagttagttgatggcaggcacacttggacctatatgacagagggaaataaaggaaaggagcggggggatcagagaacaaaaataacacaatacacwtgtacccaaggttgctcagtgtggccatgtcagactccagcctccctacctcatagctttcatggaggccttatagcaggagttccaggtgagggaggaggtaaaggaagatggggaaagcagtacagatacaaggcaaaggaagaggtgaaacagacaccataacaaagttggaagcaggggcagcaattccccccaccaactcacttgtcccgacacccatccttgcagtcacagccaaccagaaattcagggcctgtgttaatgaaaacacccttgcccgggatac

SEQ ID NO: 779159 - DNA, 631 bp, Homo sapiens
tccccaagggtaaagaccaatctactttctctgtacacaagtggtgggctttgtacacaaagccattcaaggctgctgattaactttccctcactatttaattaataccttgccattcccttatattagcccacaggtaagccttaacaatccatttctctctagcctacctctccttcagaacaaaaccyaggtgctaaaagaactttcctagccaggtgcagtggcttacgcctataatcccagcactttgggaggccgaggcaggcagatcaggaggtgaggagttcaagaccagcccaaccaacatggtgaaatcctgtctctattaaaaatacaaaattagccaggcgaggtggcgcatgcctgtaatcccagttatttgggaggctgaggcaggaaaattgcttgaacctgggaggtggaggttgcagtgagccgagatctcgccattgcactccagcctgggcaacaagagcgaaactccatctcaaaaaaagtaataataaataaataaataaataactttcctatgctgtaacagggatctcttttctctgatcccagtgctcgagtatactgatgataatgagagcaaatggattggaaatccatttggatttaaagtaaa

SEQ ID NO: 779160 - DNA, 589 bp, Homo sapiens
taattctttcatccaggctggagtgcagtggtgtgatcctagctcactgcagcctcaaactcttggtttcaagtgaccctcccacctcagcctcctgagtagctgggactacaggcacgcaccgccatacctggctaattcttgaaaaaaaaaatggttttttttagagacaggggtattattatgttgcccaggctggcctcgaactcctggcctcaagtgatcctcccrctttggcatctcaaagtgctgggattacaggtgtgagcacccggccaatgaacatattttctaggacaaagataaactctcctctgactcctgcagaatgaaatcatggttcaaggaaacctctgaagaagcaacaaaagcttatcttagtattacaagatgtccccttacaaacctgcaaacccctatgcctgcagaccttttgcctcacctgctgaaaattaagctgaagtccctctgacttctcctggggcttgatggacaggaggcagtttcctacaagacagggccccttatcagcttaccccaccaatcatcccaaaagctaagtttcctcttctcctggagaatgcgggta

SEQ ID NO: 779161 - DNA, 618 bp, Homo sapiens
tttgtaacttcttggttccttcttactgtcttcttttgtggttaagtgatttttctctggtagtatgttttaatttcttgctttttagtttaactattacaggtttttggattgtcattaccatgaggcttacaaaagataccttaaatttataacaagttattttgaactgatgacaaattaactttgattgcaaagaaagaaacaaagaaaattgtaaagaactttaaactttaatcctcccacattttgacttttattttcagtttacattgttgatattgttcagggtccacttctaattctacttctcttgccatttctaccacatctgtggtgacttccttcactgaagtcttgaaccccttaaagtcatctatgaagattggaatcaactgccaatcttctgtgaatgttgatatttgacctcatcccatgaatcatgaatattcataatggcatstagaataatgagtcatttctagaaggttatcagtttactttgttcagatccatcagaggaatcactatctagagcaaatatccatagccttacaaaaaatgcatttcctaaatagtaagacttgagaggtgaaattactccttgattcttgggct

SEQ ID NO: 779162 - DNA, 655 bp, Homo sapiens
gaaccagaatcatgtcagaataatctttcatagaagccaggcatgaccattaagaaatggctccctccctggcagatctaagactataaggctattttaaaagctaatacaggttctctctctagcaccatgttttaagaccatgatgttctaaggtcttacaatatgagaacatcatggtcaakaatctaggctttgactttcaccacacttattcaacatagtactagaagtcctagacagaccaatcaggcaagagaaagaaataaaggccatctaaatcggaaaagaggaagtcaaactatctgtcaatgatataatcttatacctcaaaaaccctaaagattcctccaaaagactcttaggtttgataaatgaattcagaaaggtctcaggttacaaaatcaacatacataaatcagtagcactgctatacaccaataacaactaagctgaaaatcaaatcaagaactcaattccatttacaatagctgcaaaacaaaacaaaacaaagaatccctaggaatatacttaagcaaggaggtgaaagatctctacaaagagaactacaaaacactgatgaaagaaatcacagatgacacaaaaaatggaaaaacattctatgctcatggattggaataattaatattgtaaa

SEQ ID NO: 779163 - DNA, 668 bp, Homo sapiens
aagctcctcagatatgttagctactatgactattttattgcttcctgtgaaatcacattctgtatttttctttttgtcttcacaacacaagaagtcaaaaaaataaaagaatttaagtctgcctatttcaaaagtatttggaactggctagaattgctacttttgctggtgagtatatattcatgtgtatggttgaaggggatcacatctgaacctaccaatgaaggaggtgtaaaaagacagaatcttctattcatccaggacttattttgaaagctacaagtatcaaacataaaatgtactgggaatagtactactaatgggtgcctccaaaagggagagatctatttttttctgatttggtccttgggagggtcagcgtaaacctacagggaaaggtgattccagaaatattacgctttaatgtgcacagtaggcctccctaccccyacttaaaaaatgtattacttacagggccttgagtttcaccagtcacgggtctttgggggcaaggttgtttaaaataatctatgttgcctaaatctgttttccttctcataataaattttgaaaaaatagacaaaagacaaggctaagcagaatactgacaggggtgagcagccagaggagaccttatgagtccagagggcaccaggtttggggaaata

SEQ ID NO: 779164 - DNA, 517 bp, Homo sapiens
agtacatcaattcacttgccactataaagcctactgccagccacggcttaattgtcacttgccactcactgatagggttttgatatgagtctgcgayttattatggtctctgtgcagtcagacctccctgctaatgttaatctgtatttgcagccactcccccacattagcattaccacctcagctccacctcagatcatcaggcattagattctcataagaagtgcacaacctagatacctcacatgttcagttcacaatagggttcatgccctatgagaatctaatcccgctgctgctgtgacagtagacggagctcaggtggtaatgtgagccatggggagcagctgtaaatacaaatgaagcttcactcgctcacccaccgctcacctcctgctgtgcagcccagttcctaacaggccatagactgataccagtccatggcccaggaggtgggaacccctgatctatgccacctaaatggggatccattagggttttcatttctattggctaa

SEQ ID NO: 779165 - DNA, 629 bp, Homo sapiens
tgtatggaatgtggcatgaaaacatttttaaataaacattagaacaaactagaattctattggtcttctggaaaaacaaaaatacttctatctgtttaactatattgagtagccatatttgtagaaaactatagtacaaataaattaatatattttaaratgaatataaattagacttaggaattagaaaataaagtattttctcctgctgtgttagccagtgattatttattgagaacaagggtattccatggtattgaagttggcccaattttgcctgtatagagtttgttataaacaaatacatttgtttcttcttcatcgaaaaaataaaaataaaaatctttcagggagcaaacatgttgtctctgattaaatccattttcttctcatggttttagaactaagcacttttctgatatttgtggcaagacacaattagcagcatcaatgtgcggttcgtatgtagctttggcctgtattttggattcactaagttaaaagtagagagcttaagaaagtactgccagatatgcatatctgatagttgttctttgataagtgtgggcagaatgagtgttgtaaaaaggaaagaaaactaataggtggtgacaaagtctttgattcta

SEQ ID NO: 779166 - DNA, 629 bp, Homo sapiens
tgtatggaatgtggcatgaaaacatttttaaataaacattagaacaaactagaattctattggtcttctggaaaaacaaaaatacttctatctgtttaactatattgagtagccatatttgtagaaaactatagtacaaataaattaatatattttaagatgaatataaattagacttaggaattagaaaataaagtattttctcctgctgtgttasccagtgattatttattgagaacaagggtattccatggtattgaagttggcccaattttgcctgtatagagtttgttataaacaaatacatttgtttcttcttcatcgaaaaaataaaaataaaaatctttcagggagcaaacatgttgtctctgattaaatccattttcttctcatggttttagaactaagcacttttctgatatttgtggcaagacacaattagcagcatcaatgtgcggttcgtatgtagctttggcctgtattttggattcactaagttaaaagtagagagcttaagaaagtactgccagatatgcatatctgatagttgttctttgataagtgtgggcagaatgagtgttgtaaaaaggaaagaaaactaataggtggtgacaaagtctttgattcta

SEQ ID NO: 779167 - DNA, 586 bp, Homo sapiens
aatattacattattttcagatgattgttcacataagaaatgtgtaaatgaatgcagaaaggtaggactgatgttctaaatttaggaccagcaattgtagacactggagttccgagcttctttattctcctctgtaatttctcatacaaaaaataccaactaggtatagtataaaaataatttgttaatgagtaaagattgttttgacaatgtctaacacttcaraaatatattgtgttattctgactgtattgagagttttttttttctttcttacatttcagtgacaatttcaacaagcaccttttttgacggcttgctggtgacaggactatacacatctacaagtgttcaggcatcacagagcattggaggttccagtgctttcggatttggtaagctattctcacaaaccagaaatttgggggtattttatacagtcataggtcttatgttttaaagtatctgttttaacagtgttagacctttattacttccaagaaaataatctgaagtgttttgtttttgtgtgtgtttgcttgatgttgggtgaattgaaataagtcatgtaaatgtgcagctaacct

SEQ ID NO: 779168 - DNA, 634 bp, Homo sapiens
aatcacaagcattcctgtataccaataataggcaaacagccaaatcggagtaaactctcattcacaattgccacaaagagaataaaatgcctaggaatacaacttacaagggacgtgaaggacctcttcaaggagaactactcaagaaacgactgctcaagaaaataagagaggacacaaacaaatggaaaaacattccacgctcatggatagaaagaatcaatatcgtgaaaatagccacactgcccaaacattccatgctcatggataggaaagattcaatattgtggaaatggccatactgctcaaagtaatttatagattcaaatctattcccattgagctgccattgactttctccacagaattagaaagaaactattttaaatttcatatggaacaaaaaaagagcccatakagccaagacaatcctaagcaaaaagaatgaagctggaggcatcatgctacctgacttcaaactatactacaaggctacggtaacaaaaacagcatggtactggtatgaaaacagatatacagaccaatggaacacagcagaggcctcagaaataatgccacacatctacaaccacctgatctttgacaaacctgacagaaacaatggggaaatgat

SEQ ID NO: 779169 - DNA, 636 bp, Homo sapiens
agagaataaaacagaatcaacaaatgatcctctcaatagatatagaaagaaaatttgcaaagaaaaattaacacctattcaaattaaacctcttcagtctcatgaaggacatcaatgttgagaagtgtttgttctgcttttttggaaaacgttgtataattgggattatttctttcttaaacatttgattgactttttaatgaagccgtctgtgcctagatttgaattgtttatggtctgaattttcaaacatgaatacaatatatttctttactgtaaggctactcagatgacctacttcttcttgaatgatcttttgtagtacataattttctataaatttttccactttacctgtttcatatttattggcatgcattcttcattatattctctttaatcctttttctatggatattgccaaaaaagytggagaccactgcgctatacaattattaattcaaaatatataacaaatgttttagagatttggaatagccaaagatgattaaaatagtacacaataagtataaattattagaaatgaaatatttacctctatcaaaattaaattatctgttgtattaaagacatttctaaaaagaacaaaaattgtagctacaacctagaataaac

SEQ ID NO: 779170 - DNA, 636 bp, Homo sapiens
agagaataaaacagaatcaacaaatgatcctctcaatagatatagaaagaaaatttgcaaagaaaaattaacacctattcaaattaaacctcttcagtctcatgaaggacatcaatgttgagaagtgtttgttctgcttttttggaaaacgttgtataattgggattatttctttcttaaacatttgattgactttttaatgaagccgtctgtgcctagatttgaattgtttatggtctgaattttcaaacatgaatacaatatatttctttactgtaaggctactcagatgacctacttcttcttgaatgatcttttgtagtacataattttctataaatttttccactttacctgtttcatatttattggcatgcattcttcattatattctctttaatcctttttctatggatattgccaaaaaagttggagaccactgcsctatacaattattaattcaaaatatataacaaatgttttagagatttggaatagccaaagatgattaaaatagtacacaataagtataaattattagaaatgaaatatttacctctatcaaaattaaattatctgttgtattaaagacatttctaaaaagaacaaaaattgtagctacaacctagaataaac

SEQ ID NO: 779171 - DNA, 609 bp, Homo sapiens
aagacccagatagcagaaacaaatagactgaaaaaattattaccagagtctaagggatttgagggattgtatctaacaatttggcatgtatattatcggattccccaaagacaaggagagagtagggatgaaagcatattcaaagaaataatagttgaaaaattcccaaattcgaccaaagacgcaaacctacaaattcaagaagcagaatktcaaatgacataaattctaagaaaaccatgccaaaccacataaacctgtgaaaaccaaatacaaattaaaaatcttgacagtatccagggagaaacaatgcattacctagagaggactgctaaatcaaatgacagtggtttgcctatccaaaatcagggagttcagaacaagaggcactacatttttcaagagctaaaaacccctatcaattatgaattctacatcttcaaaaactctcctttatgaataaaagtaaaatagacattcacatatgaagaaaaaaatatgtatagctagcaaacctacttttaaggattagctcaaggaagttcctcataaagacaggacacggcaagagaaaaactcttagaacatcagaaaagaaaaacaatggta

SEQ ID NO: 779172 - DNA, 597 bp, Homo sapiens
cactccagcttgggctacagattgagactccgtctcaaaaaaaataaaaaagaaaaaaaaaaaaaacaaaggaaaagaaaagacaaaagaaaaaagaaaaaaatctgagcccagaccttaagatgattgtcatctttcattgccattcctcttggatcaatcacaactctgatgtccttccctagaacctagcgacaatattgcaataagctccagccatgtggataagccatttgtagaaaactacagtgttccacttaaaagccccagctgtgttcccaggtgacactgaaaatcaactgtcagccatgtgagtgtgaaccatcatagatattccaggccagacaagccctcacatgactggccccaaagctccagttgataccacaaagaacagaagaaccacctactatacctagtccacaggccttgaaaattacaaggaaaaatayaaaggttcttgctttaaaatattgttttgtaggagaattacctgtactgcagtagataattgaaacagcaagaaagtagaggaacaattagagaagcataatgataaatagaaaataacaacattgtagatttgaatgcaaacgt

SEQ ID NO: 779173 - DNA, 588 bp, Homo sapiens
tgatatgtataagacagaacagtgacaaaacttctggctctttggatctgggaagaaagcttctcaactatactgccagaagggaaggcattggcaagtccttctgactgaatagtcatgatatatgggtataatcttctatactgcagatctatatggtctytatggtaacagcatatgtagatattagcagtcatgaaaggagagttatttctgatgtgagatttataatactcagctgctctaatcagccttacagcactaatttcttacagagaataataagacgatctcccacagacagtctgtgcgttctctagtcaaatgtgacatctatcatctgcatgcctaatttctaatgtgcatttaatttagggttgtcagaaaaataaggattttaagtgatcatctaatctgagccctttagatcacatataaaggaatcagaaacaaagtcataaagtgatttacacacattttaaatctatttagaatagatgtcaggtagggatattaggtttctttctttccttccaacatcatcccaaagcagtgttttgtttttcagcaattccctgtaccccaatt

SEQ ID NO: 779174 - DNA, 527 bp, Homo sapiens
atatctcaggcataaatagttattatttttttgcctggttcctccttttctatgtaacttgtttaattctgcagtttcatttattcttgagtactttttttccccatcatcaaatcttcttttgtcttttttacttgcttttacctctgactccagtctttcaatatctggcttattctcttgttcaattattgcctctgcttgtattcggcttttgatacatcaagtaagtacctcctttgtctcttcgaagaaaacctattgcatatgtttgttatagtaactatcataatagtttataaccactggttttatttttctgtttcctatyagaatatgagtcttctaggcatgacagtgtacaatgtgtcagaatcctgacaagcagatgcttctaggatttcaatatgtggtctaggtagtgctactcaatgtgtacttctcagactgaccatctgtcccccaaagtgtttgttactggttgatgcagatgtaaggtaattagacaaagtgtaaatcaactgtta

SEQ ID NO: 779175 - DNA, 612 bp, Homo sapiens
gtctgtggtgattcagataaaggatttgttattaatcaaaaggtgagaatgaaaatccagtgtataaactaaatagtatgtatcatcctttttacttttaaggtgaaagatgttgaaactaatttttatttttgttatagggaattgaccccttttccttagatgctctttcaaagaaggcatagtcgctcttcacagagctaaaaggaggaatatggagaggtatgagtagcagatttatcyaagtaatttgacttttacttattttgcaaatgaattgggattatttgtttttccttatactttatttttgggttttcaactgtacaattaattggcattaactatattcgcgttattttgcacccatcagcactgtccatctctaggattttttttatcatcacaaactgaaactgtatacccattaaatagttactccccatttctcattccctctatgcccttgtaaacattattttactttttgtctctgaattcagtatactttctcccaaagagctcaccacaataaaagtttttttaaaaatattattttattatttttttgagacagtcttgctctgttgtacagtggcatgatcgtggttc

SEQ ID NO: 779176 - DNA, 612 bp, Homo sapiens
gtctgtggtgattcagataaaggatttgttattaatcaaaaggtgagaatgaaaatccagtgtataaactaaatagtatgtatcatcctttttacttttaaggtgaaagatgttgaaactaatttttatttttgttatagggaattgaccccttttccttagatgctctttcaaagaaggcatagtcgctcttcacagagctaaaaggaggaatatggagaggtatgagtagcagatttatccragtaatttgacttttacttattttgcaaatgaattgggattatttgtttttccttatactttatttttgggttttcaactgtacaattaattggcattaactatattcgcgttattttgcacccatcagcactgtccatctctaggattttttttatcatcacaaactgaaactgtatacccattaaatagttactccccatttctcattccctctatgcccttgtaaacattattttactttttgtctctgaattcagtatactttctcccaaagagctcaccacaataaaagtttttttaaaaatattattttattatttttttgagacagtcttgctctgttgtacagtggcatgatcgtggttc

SEQ ID NO: 779177 - DNA, 612 bp, Homo sapiens
gtctgtggtgattcagataaaggatttgttattaatcaaaaggtgagaatgaaaatccagtgtataaactaaatagtatgtatcatcctttttacttttaaggtgaaagatgttgaaactaatttttatttttgttatagggaattgaccccttttccttagatgctctttcaaagaaggcatagtcgctcttcacagagctaaaaggaggaatatggagaggtatgagtagcagatttatccaagtaatttgacttttacttattttgcaaatgaattgggattatttgtttttccttatactttatttttgggttttcaactgtacaattaattggcattaactatattcgcrttattttgcacccatcagcactgtccatctctaggattttttttatcatcacaaactgaaactgtatacccattaaatagttactccccatttctcattccctctatgcccttgtaaacattattttactttttgtctctgaattcagtatactttctcccaaagagctcaccacaataaaagtttttttaaaaatattattttattatttttttgagacagtcttgctctgttgtacagtggcatgatcgtggttc

SEQ ID NO: 779178 - DNA, 612 bp, Homo sapiens
gtctgtggtgattcagataaaggatttgttattaatcaaaaggtgagaatgaaaatccagtgtataaactaaatagtatgtatcatcctttttacttttaaggtgaaagatgttgaaactaatttttatttttgttatagggaattgaccccttttccttagatgctctttcaaagaaggcatagtcgctcttcacagagctaaaaggaggaatatggagaggtatgagtagcagatttatccaagtaatttgacttttacttattttgcaaatgaattgggattatttgtttttccttatactttatttttgggttttcaactgtacaattaattggcattaactatattcgcgttattttgcacccrtcagcactgtccatctctaggattttttttatcatcacaaactgaaactgtatacccattaaatagttactccccatttctcattccctctatgcccttgtaaacattattttactttttgtctctgaattcagtatactttctcccaaagagctcaccacaataaaagtttttttaaaaatattattttattatttttttgagacagtcttgctctgttgtacagtggcatgatcgtggttc

SEQ ID NO: 779179 - DNA, 570 bp, Homo sapiens
acaatttatgataaagagaaaacatgcatttctactgtcttttataatgttaatattacctataccagtgcttttttaaaaatgtggattcaaatgactgtcttgtgtaacttgcttttagccttaggaatttattttggtgtttttgkttttttttttttttttggtatgataggtctggcagcaacaacttcagttaatatttctgtttatctggcaaagtctttgtgttatcttcatttttgaaaaataattgctggataaggaattggtggctgacagttttttttcctttgcatcttttgaatatattattctactgcctcttgccttccattgtttctgttaagtcagctgttaatcttacaaaacataggtgctcaaataacaaacatgtgcatgaatatttacagcagtaataatcatacagtcaaaaagtggaaacaatccatatgcttgttgactcataaatggacacccaatttttagctataacaaagaaagaagtacttatacatggtataatgtgggtgaaatttgaaagcattaagtgcacaaaaagacaaatat

SEQ ID NO: 779180 - DNA, 578 bp, Homo sapiens
atggaggaggtcctggttccccagtaacagtcctcttgggttggggctgccaaaagaaggttgtctatgtactgcaacaaggcgcagttgtcatttggtggggtgtatgccttgaggtctgaggccagtgcttccccaaagattgtgggagaattcttgaacccttgtgggagactagtccaggcgagctgtccccctgtgcctgtgactgaattgtcccattaaaatgcaaagatgggctgactaactggtgccaggtagagacagaagaaagcatcctttaagtccaggactgtaaaccaggtggcacttgctagaataagtcccattaaagtatacaggtttggtactactggatgtatggtcaccgtggcttggtttacagcatgcaagccctgcaccrgtatatactcatcagatcctggtccaggcaatggtttttgtaccagcaaaagtggagtgttccagggtgactggcattggattatgatcccatggtcacagagccactttaaatgcttataaatgccccaaatatcctcttgggaaagtgggtactgacaaacctgaactggagt

SEQ ID NO: 779181 - DNA, 546 bp, Homo sapiens
gtgcctgtagtcccagctactcaggaggctgaggccggagaatcgcttgaaactgagaggtggaggttgccgtgagccgagatcatgccactgcactccagcctgggcgacaagagactgcatctcaaaaaaaaaaaaaaaaaaaaagagcaaaagaaaatctcggccagatgcagtgtcacgcctgtaatcccagcactttgggaggccaagccaggtggatcgcctgaggccaggagtatgagaccagtctggccawcatggtgaaaccccacctctactacaaatacaaaagaaacctagccgggtgtggtggcaggcgcctgtaatcccagctactggggaggctgaggttgcagtgggccgagatcacaccattgcactccagcctggacaacaagagcaaaactctcaaaattcttaaaagcaaaacaaaacaaaaaaagaatctcattgcatgaagacagaacatttatgttcccttcagagaataaccagacacaagttactgatcaactgtctcatctaccccaaacccagcagcaa

SEQ ID NO: 779182 - DNA, 536 bp, Homo sapiens
ttattatttccattcttttgcatttgctgaggagtgttttacttctaattatgtggtcagttgtagaataaatgtgatgtggtactgagaagaacatatattctgtggatttgggggtggagaattctgtagatgtctattaagtccgcttggtccagaactgacttcaagtccttaatatccttgttaattttctgtctcattgatctgtctaataatgggtcatttatacttgcctttgctttaagcctgcttcaatagttagtaaatatgtttctagastttttccaatttaaaaaaattgacctgcaccttgctttggattgtactaaaatctgatttcaacacaagcatagtctcctgaattgctttggttttgttcagctgaggccttggggagcgctgaggccttggggagcactgaagccaaggctctactgtaccaaaaatttgaaggccatgcgaatgatctgtatgtggaaggactaccagaaaacattcctttcagaagtccctcgtggtatggaatcgcaagg

SEQ ID NO: 779183 - DNA, 567 bp, Homo sapiens
ctatgcctgttactaaatagcaatgtgagcttctggaggactctgaactctctcagcctctgtgaaatggagataacatttcctgtggagctgcgtcagagatgttggggaaatcatatggaaatcaagtatagctgtcaacaagttttgtgaattgtaaatgaccttaagcatacgaagtattagtcatctattcactcatcacacatggagcatgcctagtgttaggaggcacgtggtggggttggcgggggkgtggtcattaacatggtgaatgagatcttcagaagcagtgtgttcccctgggtaagggcatgggctttggagttaaacccacctagagtaattcagggctcatcactccgtgacctcctgtcctgagaccttaatttgtccaatgttacatcattgtaaatcccagtttctttaacgcggatatgaaaaaacaccatatatttcacaggggagttatgaggatgtgagaactatgatcaagcacttaacttcacatgttcaaagtgctcaatgacagttggcaactatcaatcaactcttcacacattatat

SEQ ID NO: 779184 - DNA, 644 bp, Homo sapiens
aaataatcctaatgacctaatgcaaaattgatgaaaaacagaaacattccttgttcatatatgaacatctatacatcatacagatgtgaggtctcccccaaatcaattttaaaacttaacataatttcaatgaaaatgccaacaagtatttttttttttttttttttgagacggagtctcgctctgtcacccaggctggagtgcagtggcgcaatcttggctcactgcaagctccgcctcccgggttcacgccattctcctgcctcagcctcccgagtggctgggactacaggcrcctgccaccacgcccggataatttttgtatttttagtagaggtggggtttcaccatgttagccaggatggtctctatctcctgacctcgtgatccacctgcctcagcctcccaaagtgctgagattacaggcgtgagccaccgcgcccagcacaagtattccttttaaatgaaactaaacaaaataatacagaaaatccagtataaatagctaagataacactgaaaacggagaactacagggaactactagtccaatccaatgttaaattacattataaagcttcagaaattaatgcaaaagtatttatggctagtattgttatataaatagacaaatcagtgtgatt

SEQ ID NO: 779185 - DNA, 644 bp, Homo sapiens
aaataatcctaatgacctaatgcaaaattgatgaaaaacagaaacattccttgttcatatatgaacatctatacatcatacagatgtgaggtctcccccaaatcaattttaaaacttaacataatttcaatgaaaatgccaacaagtatttttttttttttttttttgagacggagtctcgctctgtcacccaggctggagtgcagtggcgcaatcttggctcactgcaagctccgcctcccgggttcacgccattctcctgcctcagcctcccgagtggctgggactacaggcacctgccaccacgcccggataatttttgtatttttagtagaggtggggtttcaccatgttagccaggatggtctckatctcctgacctcgtgatccacctgcctcagcctcccaaagtgctgagattacaggcgtgagccaccgcgcccagcacaagtattccttttaaatgaaactaaacaaaataatacagaaaatccagtataaatagctaagataacactgaaaacggagaactacagggaactactagtccaatccaatgttaaattacattataaagcttcagaaattaatgcaaaagtatttatggctagtattgttatataaatagacaaatcagtgtgatt

SEQ ID NO: 779186 - DNA, 644 bp, Homo sapiens
aaataatcctaatgacctaatgcaaaattgatgaaaaacagaaacattccttgttcatatatgaacatctatacatcatacagatgtgaggtctcccccaaatcaattttaaaacttaacataatttcaatgaaaatgccaacaagtatttttttttttttttttttgagacggagtctcgctctgtcacccaggctggagtgcagtggcgcaatcttggctcactgcaagctccgcctcccgggttcacgccattctcctgcctcagcctcccgagtggctgggactacaggcacctgccaccacgcccggataatttttgtatttttagtagaggtggggtttcaccatgttagccaggatggtctctatctcctgacctcgtgatccacctgcctcagcctcccaaagtgctgagattacaggcgtgagccaccgygcccagcacaagtattccttttaaatgaaactaaacaaaataatacagaaaatccagtataaatagctaagataacactgaaaacggagaactacagggaactactagtccaatccaatgttaaattacattataaagcttcagaaattaatgcaaaagtatttatggctagtattgttatataaatagacaaatcagtgtgatt

SEQ ID NO: 779187 - DNA, 599 bp, Homo sapiens
aaatgctggatccgcaggtatggaaacccacaccacatagcatccagccagggacccaaatcataataaaaatgtgggcatgggtggattgtcgactattataatatgatgcgctacatcatccagaaggaaatagcctcacagagtgcagaaacagacttctaaaggcaccggggaagtaccattgtgtagccaatagtcttcaaggatatggcggcattttttaggatgcagtatacacatcaaattagagtgctttatatggtactgtgccccatatargaagaaaatatggacctggaaacaaaggggtaggggtaggcttttccccacttctcatcactcccattgacccactggggactttgtattttcttttcctggaatcctggactctagcggctggtccctaaagggaacatacttaacagaggacacagtaagggtcctgctgaaccgcattctacaagtgtgacgaaggtactttggactccttgtgtccagcaatcagcagatgcaaagaagtcaccaacttggcaagtgtgattaagtgtcattggcaggaggttgtaggccactttatccaatgaggacaagga

SEQ ID NO: 779188 - DNA, 579 bp, Homo sapiens
agtgcttgtgacttaaactcttcaacttatatactcttcaatttacacacaagatggtctccatcccaagagctgttaggatgccttgtttctactgagttctcaatggctcaaaaaggctaaaagcactcttcatatgtccatgattatctgattatcataattcatcaagaattagccaagtgtttaagtactgtcaatttcaagagtccagatcaaaagggagaacctacaggcctctgactctgaaaatctaggttttattaaataagaggaagccttcacattaattgttttactatactagacacatcttggtacatggtcaaagtaggataccatcatgtccartctgccaaagcaaaggctatcatatcaccatattcattttttaaacatctaacatttatttggtgtttaccatgtgcctgatacttttctaaatactttatatgtattaatctcatgtaatcctcataagaactacatgggagaagtattactattgtgtccaatttattgatctggaaatggagattcaaagaggttaaataactctcccagaaacattacatgaat

SEQ ID NO: 779189 - DNA, 825 bp, Homo sapiens; identical to SEQ ID NO: 739217

SEQ ID NO: 779190 - DNA, 525 bp, Homo sapiens
tatcagttcctggtgtataacttagagctaattagaaggtatcttgggtcctgggaagattctgtccattctattctgtcgttatagtgaaatgcacatttcccctaatcttaaaagattgaatagcatttcttttaaaaatgaaataaaatgccagctggttaagaggaaaaaacctagttagtataatattctctgtatcaacagcaccatccctgcagggtattgatttttccccatctcgctgggctctcagtcttgactaatgaaggcagcaggcagtgtggwtgatccccaggcaataaatgattcagaaatcacgccttttcattttgtagtgaaatacagcagcctcctttgaccctttctgagcctagtcctgctccatccacatgggctgcaaggccttggacaagtccctgagcctgaggaattcagtcacacctaacacacctaacagtcttttatgaccctcctgctcaatctgtattcaaccacttccctgttgtgacttcaggtcttggc

SEQ ID NO: 779191 - DNA, 581 bp, Homo sapiens
gttatatcagttcctggtgtataacttagagctaattagaaggtatcttgggtcctgggaagattctgtccattctattctgtcgttatagtgaaatgcacatttcccctaatcttaaaagattgaatagcatttcttttaaaaatgaaataaaatgccagctggttaagaggaaaaaacctagttagtataatattctctgtatcaacagcaccatccctgcagggtattgatttttccccatctcgctgggctctcagtcttgactaatgaaggcagcaggcagtgtggatgatccccaggcaataaatgattcagaaatcacgccttttcattttgtagtgaaatamagcagcctcctttgaccctttctgagcctagtcctgctccatccacatgggctgcaaggccttggacaagtccctgagcctgaggaattcagtcacacctaacacacctaacagtcttttatgaccctcctgctcaatctgtattcaaccacttccctgttgtgacttcaggtcttggccattctagaccagcaagataccaaatatatatatatatatatatatatatat

SEQ ID NO: 779192 - DNA, 550 bp, Homo sapiens
atacatcaggagtagagaaatgggttgtaggtataagacttatctttttttttctttaattttagcattttatttatttattttatttttattttattattattatactttaagttttagggtacaggtgcacaatctgcaggtttgttacagatgtacacatgtgccatgttggtgtcctgcacccattaactcatcatttagcattaggtatatctcctaatgctatccctccccactgcccccaccccacaacagtccccggagtgtgatgttccccttcctrtgtccatgtgttctcattgttcaattcccacctatgagtgagaacatggggtgtttggttttttgtccttgtgatagtttgctgagaatgatgatttccagtttcatccatgtccctacaaaggacatgaactcatcattttttatggctgcatagtattccatggtgtatatgtgccacattttcttaatccagtctatcattgttggacatttggcttggttcaaagtctttgctattgtgaatagtgctgctataaatata

SEQ ID NO: 779193 - DNA, 433 bp, Homo sapiens
attgcacacatccccgcccccaagccggccgcaccacctccaccaaaacagatagctagtatcaacggctaagagacccatagactgttcaaatcacaggactctgtgcagacaacccccagtaccagactgaagccaggtagactcactgagtgggtagatctggaagagagacaataatcactgcagtttggctcacaggaagccacatccataggaaaagggggagaatactacatcragggaacacctgtgggacaaaagaatctgaacaacagccttcagccctagaccttccctgtgacagagcctgcccaaatgagaaggaaccataaaaccaaccctggtaatataacaaaatgaggctcttcaacaccgccaaaacatcacactagttcaccagcaatggatccaaaccaagaagaaatccctg

SEQ ID NO: 779194 - DNA, 460 bp, Homo sapiens
agtaaagaaaacaacatcggaaataaaaatgatatactagaatatgtctatttaaaacaaaagaaagaagtaatggaagaaaacagaaaaaaagaaataaaatatacacgtaccaatttggcataaataaatcctacctaaccagtaatgagacttaaaatgaatgaactaaacatttcaatcaaaaggcagagattggaagattagtttaaaaaacatatgatccaactagatgttggataaatgaaacaaaattyactttcaaagacacaaataagtaaggattaaaaaagatgtaccattcataaaatgcccaaaagagagttggaatggttatactatatgatgtgttttgtttttgttttcaatgaaattataaatgaaaatgaaaacaaattatacaaaaatttatagaatgcagctgaagcagtgctcagaaggagattttacaggcctattt

SEQ ID NO: 779195 - DNA, 539 bp, Homo sapiens
aagcatatgaaaagctcaacatcaccaatcgttagagaaatgcaaatcaaaaccacaaggagataccatctcacactagtcacaatggctattactaaaatgtaaaaaattaacagatgctggagaggttgtgcaaaaaagggaatgcttatacactgctgattgaaatgtaaattagttcagtcactttggaaagcagtttaaggatttctcaaaaaactaaaacagaattaccatatgacccagcaatcccattatagagaaatataaattattctaccgtaaagtcacatatatgtgtacattcatcacagcactgttcacaataacaaaatcayggaattaacctaaatgcctatcaatagtacaatggacaaataaaataatgtggtacatatataccatggaatactatgcagccataaaaaatgagatcatgtcctttgtgggaacatggatgaagctggaggctgttattgtacaccaactaatacagggacagaaacacaaatactgtatgttcttacttgtaagtggga

SEQ ID NO: 779196 - DNA, 561 bp, Homo sapiens
agacagacaggccttgctggatatccccagtctattagcattagatcataccctttctgtccaatcacatttctacagggctgtccatacttttttgaacctaagcatgaaaatggacartttcccctgtatctttgggtcttccttctgaaggctcctgtatatacacattacataaatttgtatgccttttctccagttaatctgccttttccaagttggtttttcagcaaaccctcaaagcgccaagtgaaaccccctggcctctgcacgagctcttagacagaaaggttggaggaagtttggagtaacagcttgctttggataaagggagttctagcttctaagagccccccttaacccctggggaagagcagttcttgttcctgacttacttcaagagaggaggggtgggagacaggagagcaggaggtcagagagaccttggttctgaggctgcttctgagaccttccagtctcctttagttcaaagtactcagcatgccaaattgccctcagagagggttcttctatctcacacaagaaagggtttggagcaag

SEQ ID NO: 779197 - DNA, 611 bp, Homo sapiens
cttagccttcgtggaattgaagagagttagagccttgctctggattaggctttggcttaagggaatgttgtatcagttttgatcttctgtctatgccagtcaaacattctgtatatcagccataagactgttttgcattcttatcatttgtgtgtttactagagttgcacttaattgtgcttcaagaactttttcttgggtaactggtgcaagaggcctagctttcagcctgtcttggctttcagtgtgccttcgtcactaatcttaatcatttctagcttttgacttaaagtgagaaatatgcaactcttcctttcacttgaactcttagaggctactgcagggttattaagtggcctaatttcaataagttatgtctcaggtacacaayagggaggtctgaggagagggagagagatgggagaacagctggttggcggaacaatcagaacatacaccacatttatcatttaagttcaccatcttctatgggtgtggtttgtggtgcctcaaaacaagtacaacagtaacatcaaacattactgatcacagatcatcataacagataaaataatgaaaaagtttaaaatattgcaagaattatcaaaatg

SEQ ID NO: 779198 - DNA, 624 bp, Homo sapiens
tagagtcataatctagcatgagccagaaggtatttaaactaaaacaaatttgtacaaattagacagcaaaattacagagagagaatgccctgtcaaaattaacactaagtattaatccattaggggatgggacccacccttcccataaaataggaaggataatttaataaagggtaaaaactggactactttctattcttctatttgcagtccttgtgccactggtttttatttattttttttttgagtcttgctgtgttgcccaggctggagtgcagtggtgcgatctctgctcactgcaacctccgcckcctaggttcaagtgatactcctgcctcggcctcccgagtagctgagactacaggcgcacaccaccactcctgactaatttttgtatttttagtagagacaaggtttcaccacgttggccaggctgatctcaaacttctgacctcaagtgatccgcccgcctcgacctcccaaagtctgggattacaggcttcagccactgcgcccagcctgtgccactgttttactcaaatgatgtgcaaaatctgtaatgtatttgatggtactgtagtaaataagaaatagctaaaactgatgtgatttacttgaatgggg

SEQ ID NO: 779199 - DNA, 624 bp, Homo sapiens
tagagtcataatctagcatgagccagaaggtatttaaactaaaacaaatttgtacaaattagacagcaaaattacagagagagaatgccctgtcaaaattaacactaagtattaatccattaggggatgggacccacccttcccataaaataggaaggataatttaataaagggtaaaaactggactactttctattcttctatttgcagtccttgtgccactggtttttatttattttttttttgagtcttgctgtgttgcccaggctggagtgcagtggtgcgatctctgctcactgcaacctccgcctcctaggttcaagtgatactcctgcctcrgcctcccgagtagctgagactacaggcgcacaccaccactcctgactaatttttgtatttttagtagagacaaggtttcaccacgttggccaggctgatctcaaacttctgacctcaagtgatccgcccgcctcgacctcccaaagtctgggattacaggcttcagccactgcgcccagcctgtgccactgttttactcaaatgatgtgcaaaatctgtaatgtatttgatggtactgtagtaaataagaaatagctaaaactgatgtgatttacttgaatgggg

SEQ ID NO: 779200 - DNA, 604 bp, Homo sapiens
cttcattcaagggagtataggtctgtaaactggctctgatctaagatttgactgacagccacatatataagtaaaaaaacttatgcctggtttacagatggttctgcacaatatggaaaaaccaccaaaagtgaacatctgcagcactgtcgagcttttctaagatatatctctgacaaactctgtggaagggaaatctactcagtgggcagaacgttagacaaggcacttggctgtgcacttttcttggagggagaaaaggccagctgtgaaattatatgcaattcctgggttgtgaccaatagttcagctggaggaccagggacttggaaggaatatgatggaagactggtgacaaagacatttgggaatgacatgtggggacagatctctctgagtgggaaaaaaataatgtgaagatatgtgtatcttatgtgaatgctcaycaaaggataaacaattgaggagaattttaataatcaagaggacaggatgacccattctgtggataccactcagctcctttccccagccacccctgtcattgtccactggcttcatttaaaaagtggccatggtggcagggatggaggttatgcatggg

SEQ ID NO: 779201 - DNA, 643 bp, Homo sapiens
cacttggagtgacagactactccagaagctagcctcttactatctgttaccacaatcagtaagacatggtggcattaccagtgttatgcaaatgtcttttttttttttttttttttttttgagacagggtccgattctgtcacccaggctggagtgcagtggctcaatctcagctcactgcaacctctgcctcccaggttcaagcgattcttctgcctcagcctctcgagtggctgggattacaggcactcaccaccatgsctgtctaatttttatattttttgtagagacagggatttaccatgttggccaggctggtgtcaaactcctgacctcaagtgatccacccacctcagtctcccaaagtgctgggattacaggcatgagccaccactcctggcccgaatgtcttcttattaaagcaggaggttcacattcctgcagaatctgcagccttattgttgtgtgaccacaggtaatgggagacagcttgcatcctctggccctaagagtcctctttgattctttcaagagggccagttgaataaataagttcagcatagacagatcagtcactctgaactttacattacctgctttagggtttaggttcttcagatcacccactagggttcgaaactga

SEQ ID NO: 779202 - DNA, 608 bp, Homo sapiens
ggctgcacgcctgtaatcccagcactttgggaggccgaggtgggtggatcacgaggtcacgagttcgagaccagcctggccaagatggtgaaaccctgtctctactaaaactacaacaagtagccaggcacggtgacgggcgcctgtaatcccagctactcaggaggcctgaggcaggagaatctctagaacccaggaggcggaggtgcagtgagctgagactgccccgctgcactctagcctgggcaacacagcaagactctgtctcaaataaataaataaataaataaataaatagggagagttggaagtagatcaaagagaagaaaagaaatcctagatttcctrtctgaaggcaccatgaagatgaaggccacctcttctgggccaggtcctcccgttgcaggtgaaccgagttctggcctccattggagaccaaaggagatgactttggcctggctcctagtgaggaagccatgcctagtcctgttctgtttgggcttgatcctgtagcacttgattgtctctcctggactttccatggattccagggatgcaactgagaagtttatttttaatgcacttacttgaagtaagagttattttaa

SEQ ID NO: 779203 - DNA, 548 bp, Homo sapiens
ctcctactgtcattgctgttggttttcattgcagtagatgtttaggtttccatttcttcctccccttatcatttactaacgtaccataggttgaccatacttcaaaagctgtactctcatggccactgcatcgaattttgagcatattttatggaaaactattgagctcactcttttcatgatcacagtttgctgtgtgtcatgagggcactaactcagagtgtccttttactcccttaccagtatgtcacctggccaattcactaggtcactttctctctgtctctgtctctgtctctctctctgtctctgtctctctctctctctctctctgtctttctctttcattgttttctacctggccctgttctatcccaacataaaggcartaatttgttacctcattaatggatctgtcctttttcttttcaaactcttccttaacgttagccatgaaatctagctggggctgtgcggtttctgattccccctggcttattctttactttttcccacttttccaggctcagcagggagctgctggatga

SEQ ID NO: 779204 - DNA, 615 bp, Homo sapiens
cttagctaaaagtgttcattctaacctcacaggaaaattgaaatatgaaaatatacagaaaaatcttaggcagtatatgtcaattttaagaaacaactatttacaggtttttcaacaggcattacattaaaaatgaaatatrtagttaataaatatgaaaactgtggatataatcaacacatttattttacttcttgaagtgttaacatgtgctgtctcaaatatcaacagtgtacacgtgagaaaaaacattttacatagattttctgcgacagaaaacagcatctcattagacatcccaagttttttcatttggaacacacacccattccccagtatactaggggtaataataatttaaagagtttaattactttttactactagaaaactaattttatgtttggcacaaatttctgaaatgatattccactgcaaagaataatacctatatatggccagaattactttttttctataacattaagataatacttgtcagcctgagcaacaaagtgagacctcatctttacaaaaaataaataaattagatgggtgttttggtgatgagggtctgtagtcccagatactcaagaggctgaggtgggaggatcc

SEQ ID NO: 779205 - DNA, 549 bp, Homo sapiens
ctcctactgtcattgctgttggttttcattgcagtagatgtttaggtttccatttcttcctccccttatcatttcctaacgtaccataggttgaccatacttcaaaagctgtactctcatggccactgcatcgaattttgagcatattttatggaaaactattgagctcactcttttcatgatcacagtttgctgtgtgtcatgagggcactaactcagagtgtccttttactcccttaccagtatgtcacctggccaattcactaggtcactttctctctgtctctgtctctgtctctctctctgtctctgtctctctctctctctctctctttctctttcattgttttctacctggccctgttctatcccaacataaaggcaataatttgttacctcattaatggatctgwcctttttcttttcaaactcttccttaacgttagccatgaaatctagctggggctgtgtggtttctgattccccctggcttattctttactttttcccacttttccaggctcagcagggagctgctggatgagaaag

SEQ ID NO: 779206 - DNA, 589 bp, Homo sapiens
gggcttgactttgagaagctagaggacaaagctgtggacttagaccagcctcctatggttagaacatacagcccaggagtgtggggctgatccttgccctctaaaggcactcgggaatgaagccactcaactgtaccaaacttatgccacagtcaaaccctcataggcaataaaaatgatagaaacaaaaagccccgttcaaaggacaacaacttcaaagggtaaaggaacattcactctcccagatgagaaataattaacagaagaactctggcaactcaaaaacccagagtgtcttcttacctagaactgatcatgctagctctgctgcaattaattctaaycatatttaaatggccaaaatgtcagacatagaattaagaatctggatggtaagaaactcaccacaatacaagagaaggttgaaacccaatacaagaaaaatagtaaaacaatccaagggttaaaagatgacatacccatttaaagaaagaaccaaactgaactgaaaataaaaaattcactactgaaattttgaaataatcttaaggtatctattgttgtataaagacactttctactatgattg

SEQ ID NO: 779207 - DNA, 589 bp, Homo sapiens
gggcttgactttgagaagctagaggacaaagctgtggacttagaccagcctcctatggttagaacatacagcccaggagtgtggggctgatccttgccctctaaaggcactcgggaatgaagccactcaactgtaccaaacttatgccacagtcaaaccctcataggcaataaaaatgatagaaacaaaaagccccgttcaaaggacaacaacttcaaagggtaaaggaacattcactctcccagatgagaaataattaacagaagaactctggcaactcaaaaacccagagtgtcttcttacctagaactgatcatgctagctctgctgcaattaattctaatcatatttaaatggccaaaatgtcagacatagaattaagaatctggatggtaagaaactcaccacaatacaagagaaggttgaaacccaatmcaagaaaaatagtaaaacaatccaagggttaaaagatgacatacccatttaaagaaagaaccaaactgaactgaaaataaaaaattcactactgaaattttgaaataatcttaaggtatctattgttgtataaagacactttctactatgattg

SEQ ID NO: 779208 - DNA, 600 bp, Homo sapiens
taacaccttcagccatctaaaagggtaggatattttataatcatctcattatccataaagatactaagacttagcaggtttggagaagtagcttatgaatacaaggctaaactaggaaagaaatgggatacaaattcagatttttctaactctacactcaaactatgaagttctacaacctactcactcaaaagttataaatataatattaaaaaatatccatttagagtattaaaaatgatgaagtcatcaaatgtgctattttctacagatgaaaaaggataatccaatattcagaaatgtattcatgtaattcttcacgtcaatagttcaaaaaggagaaaaacatgaactcctctcaaaatatgytaagaaggtaattggatatatttgaaatttatttctaatttatttaaaaatgctaccattctttaaagttatgaatagtcgagcttacattctggtgaacaggcatgtttttaaccatgagttttctagcacttggcacaatagctggttattatttgcttatatcagtcaatattacctacagtgataaaaaataagtataattcctattaaaattcataatctttgtat

SEQ ID NO: 779209 - DNA, 601 bp, Homo sapiens
agaatttcaagaagttgagtgttccataagcaacgtgtaaaaatattcacattctatagaagtattatagtttggaagggcacattccactcaaagctcagatatacacaaattgggctgagatgagtaagtcagaaactcagtatagaagatcaaaaaatataatttgctaagtttaaataaaggagaaattttaaaatgtgtagttttatttgatttagtcatttaattagtaggctattttctaagtcccatttgaacataacagctgcaaaccatcattatcctccatgaagcatacactgaaagaccgatgttatctacatctgccatcrctccagctgaatgtcaaatgtgactgatactgggatataaatgagtatcatgactatcccagtgaatgaccagtcatcccttgacccatatccttcagtaatgaagctttgtttcaggtgacaacatggaggatcagaatatttgataagcttgcctaatgtcataggaaagatacaagtcaggtattttcgccgttgtcatccactatgcacaatggctcatgattactacctgctagtgactaaactcagctagctaaataatt

SEQ ID NO: 779210 - DNA, 627 bp, Homo sapiens
ttgtctttatttacttctatgtggtagcattaaagaagatttggggtataatattttcttcaactgttgaagaaaaaaaagacgagtcacgatttgacagcaaaaggcattattaatatacatttcatcataactcgaatttattgacaaatgagcagaactatctaattttcttccagctcaggactttcaactccttagccctatccaagtatctaaaataatgtmattattacaaaggcattgcagttcttttatattgttccaaatgtgttttctccccttttcagggggtggggaattttctgctttctggacaaataaaatccacttttctctcacaatcaagtttcctgttgtataggtgagttattacactgccaaaacaccaaggatattaaatacaatagactcctgggacccttctctgtaatggccctttgttgttcttctaggtagaggaaaaaacaacgtatatacattgaacattttttgttagaagttatatttatgcttcattaattataacgcgtaatattatagggattaatcaaaattatttatccaaaccctcattactaggattctcggttatgtaaatctgttataaacagcataacaatgaat

SEQ ID NO: 779211 - DNA, 458 bp, Homo sapiens
gcactttttatatccaaggtataatacaagcctctttatgtgattatcatcaaatgaagacagagaagctcagatgggttagttgatttgctcaaacctgctttgctagaaagtggggaacctgcaattttaccctgctttcttgggttccagatcacttgtcactctgccatttcacagaaaaagtacaaaacagattaaacaaataagcaatacaaaaggcaaagtgcaagacrtaatacctatttgttctaacccttaaatgtagctcttctcattgtccagatgggctatgatgtaaggacacttgcctcaaatggtcaaagcacattggcagacatttccatgcatccctccggctgccacagcctgccatgtgggtgcagactctctgccagtggagccttctgctgttgacgttgcctatgggcctcctcatctccctgagcctggaaacc

SEQ ID NO: 779212 - DNA, 488 bp, Homo sapiens
cagtactgtaatgtggaaaaaaaaaaaaacccttgaagaatgcaattctcatttgtttctttgaaactttgtttttgagaatttcattccacttaactcaggactctcagcctgccctgataatttatatctacatttcaaagactatgaatcataaatgcatatttccatctattgtacaatctctcaamattgcttaaaggagagtgagtggattctttttaaatctaatcttcccagtactcatccaggaaatttcaaatccaacaacttttcattcagatgggtgtatgttgtttcttgttctttttttcagtacaaacttctgaaaccagcaatagcaaatatgtgtgcacattgatttaccctaacatgaataactgttttccccagggtgaaattgaaaaataaaatgagtgaatgatggagaaaattgagtagctagggattctaaatggcctttggtttgaattaagtattgtactcca

SEQ ID NO: 779213 - DNA, 488 bp, Homo sapiens
cagtactgtaatgtggaaaaaaaaaaaaacccttgaagaatgcaattctcatttgtttctttgaaactttgtttttgagaatttcattccacttaactcaggactctcagcctgccctgataatttatatctacatttcaaagactatgaatcataaatgcatatttccatctattgtacaatctctcaacattgcttaaaggagagtgrgtggattctttttaaatctaatcttcccagtactcatccaggaaatttcaaatccaacaacttttcattcagatgggtgtatgttgtttcttgttctttttttcagtacaaacttctgaaaccagcaatagcaaatatgtgtgcacattgatttaccctaacatgaataactgttttccccagggtgaaattgaaaaataaaatgagtgaatgatggagaaaattgagtagctagggattctaaatggcctttggtttgaattaagtattgtactcca

SEQ ID NO: 779214 - DNA, 488 bp, Homo sapiens
cagtactgtaatgtggaaaaaaaaaaaaacccttgaagaatgcaattctcatttgtttctttgaaactttgtttttgagaatttcattccacttaactcaggactctcagcctgccctgataatttatatctacatttcaaagactatgaatcataaatgcatatttccatctattgtacaatctctcaacattgcttaaaggagagtgagtggattctttttaaatctaatcttcccagtactcatccaggaaatttcaaatccaacaacttttcattcagatgggtgtatgytgtttcttgttctttttttcagtacaaacttctgaaaccagcaatagcaaatatgtgtgcacattgatttaccctaacatgaataactgttttccccagggtgaaattgaaaaataaaatgagtgaatgatggagaaaattgagtagctagggattctaaatggcctttggtttgaattaagtattgtactcca

SEQ ID NO: 779215 - DNA, 671 bp, Homo sapiens
gaatccaacggcatctcaaaaagataatccaccatgatcaagtgggtttcatgccaggcatgcagggatggtttaacatatgcaagtcaataaatgtgatacaccacataaacagatttgaaaacaaaaatcacacaatcatctcaatagatgcagaaaaagaattggcaaaatccaaatctctttatgagtaaaaccctcagtaaaatcaacatagaagggacacaccttaagataataaaagccatctatgacaaactcacattatactgaatggggaaaagttgaaagcattccccctgagaactggaacaatataaggaggcccacttttaccacttctgttcaayatagtactggaagtcctagccagagcaatcacacaagagaaagagggcatccaaatcggtaaagaggaagtcaaactgtcactctttgctgatcacattatcttatacctagagaaccctaaagacttatccaaaaagctcctagaactgataaatgaatacagcaataagtttcaggatataaaatcaatgtacacaaatcagtagcactgccatacgccaacccattttacaatagttgcaaaaaaaataataaaatacttaggattatacctaaccaaagaggtgaaagacccctagaaggaaaactacagaacactg

SEQ ID NO: 779216 - DNA, 624 bp, Homo sapiens
actaatatggtatgtatatgagaaaagaatagggatttcaggatcagaggagagaaggataaaaaactggaatggagaaatggagaaaccacccaagcaggaactatgcattttaaaacagtgaattcacatcccctgcagcaaagtggctgatgaaattttatgaacacaaatatctaatgtttaacttttggttgcttatgttgctgagatgtaaatccttcctctgtcatcagcaccagtccaaatttttagcataatcagctttacataaagcccttgagagaagatcttttttaaagttgaatgtgaagaaaggtstgaagttgatgtttttggctaataaggtataaaacaaagccaggagaagcatgatattaagataaacccatgaacacccctaagtccctggacgctgaggttcagagctatgagtgaccataaggctgtgagtacctcaagacttttcagatttttatagtagtaagcatggaattatattctcaaatggtggtttatggaaaaattatccaaatcttacagatcaggagacacagctaacagtctgtttcccgccactcctattcacatgcagaaggagcccctaatttacacatgaaaggc

SEQ ID NO: 779217 - DNA, 558 bp, Homo sapiens
aaaaggttgtcaaaagtagctatctccacctccttgcctctcattctaaaaggtattgcatacccatcagcttcaccaagattgctcttttcaagctaggtagtgctctctattttgtttgtatattgcttcaactatccacaggatttagcacaattgactaccccttccctgaactacttccttctgtctgcttcaatacctgtctggtttttctccagccaccccagctatctttttcctgtttcccctgctgccttgctccttttctgtgtgtcctccaaatgccagcatgcgggcacatttttaggactcctttgcctccctaacatgctcatttgtgccttggctttaaatataatcatcgattattgcccaacatggatatctcaagcccaacttgccaggacaccagatttctrtaggttactgcctgcttgttacttcctcaaatctctgatagacatctaaaacttactatatttgaaacttttgattccccacacccacccccatcctggtctttctctagtcttcttagtatcatgcacccagttc

SEQ ID NO: 779218 - DNA, 629 bp, Homo sapiens
tcatccctactcatttgatgatgccaaactaatagtgcttttactaagcaagaaataaaagacaagtccaaaaaagttacagctggatttgcattttaacaaatttcatattccttttgaggaaactgaaattaaatatttattttttatatcttgagaaataaaattttctttgctgggaaaacaatctggatatatattggatcttgaaaatgcaagcagacttacagggtttttatattagtatcagtgatactggaagtttgcccccaaagaaagcagtgcccagagaaataagagctacattcttaagtgagagaactgtgtacttacttgatggtttgcaatgtatgcaattactgggtagctcagcgatcaaggcccttagcagtgcaaaaggctattagattayctaccactaccccaatcagggtagaattcttctttctagtatgttcataaggactctgttcagtctagttttaaaggtcttaagcttggaggctttaatcacctccattagaagactcttccctactatcataggaagtatgtccttaggggaaattcactgacacttaacccatattttacctgttataatgtcctattaccctaattaatacctt

SEQ ID NO: 779219 - DNA, 481 bp, Homo sapiens
tagggatccagaagttcccttgctctatgatttcaaaattaactcagcaaaggggagccccagcaggggattggaaggaggaagaacagtaaaatttcggctttattcccttgaccatatcctgcagggtggctgtggtcactgccgcattgaggcaccttctctagagactctctccttccctgtccctttgctcacttcctctcttccatccctttggttttagggatggtaacagctgttccaccacyctccctctccctgttaccacacaaccctggtggtttccctacacctttgtacctggtgcctttattaagcctttcttgggtttccctaatttgagtgtgcttttcctgcctgctgggacactgattctggtgccctgtcattatgataagatccagctatgtctgcttctattcttgggccctgatacaggcttatttcatgccatctttttaaagaaccacttatatcc

SEQ ID NO: 779220 - DNA, 623 bp, Homo sapiens
ctgtgtcagcagtttctcaagataatccttatgcccaaaaggcatattttggtgggggcaggttgtggtctcctacactggtcatgccaaagcactggcaaacattatagtgtagcagttatgagcatggattttaggatctgacaagcttcaattttgatttctggctctgttacttcctagcatggtgatctttgacaagttatggcaagtcatacaacttttgtaatgcctcagttttctcacctgtaaaatgaatatgataatrtctacttcataattattagagattgttagcagcagtgaatccttatgggtctgcagcaaactcaattcttgcttcctcagaagaaagaatttgacggaaggacataaggcagagggagagaccgaggcaagtcttagagtaggagtgaaagcttatgaaaaatttttaggggaagaatgaaaggaagtgaagtgtccttggaagagggccaagtgggagagacaagagcactgtttgacttttgacttggggtttcacatgctggcttgcttctggtgtcttgcttctcttctttccttattcttcccttggggtgggctgtccacctgtgctgtgacctgccagcacttgggag

SEQ ID NO: 779221 - DNA, 553 bp, Homo sapiens
aaatctgtctctctcattcttttcatagcctattgtttctgtttctctggaggacgttggataatacaactagtttgccaaatagaaaactctgggggttttaactgctggaatggggaagttcacagtgattatgctaattaagcattgacttttrtcttctagacaggatgaaattattccttggatctttatgcagtctgtcaaaataattcccactgctcattgttcaggaaattgtcttctgtgaagtccaatgggttctgacatcccaggtctcagatactcgtactgcagctagttggagccagccgagacaaagcacaacatccattttgataatgagttggcaagtgctgccgtcagtgggaagattttctttcctctaatttcccatcaagattttcttctgactaatgtatactcagcatacatgagttctcaataaaaattgtgttttcttttttcttttaagattcaatagccataaattgccacaccaaggaaataaggctagagcaaaaggaaggcaagaagtaaatattaaagaaat

SEQ ID NO: 779222 - DNA, 553 bp, Homo sapiens
aaatctgtctctctcattcttttcatagcctattgtttctgtttctctggaggacgttggataatacaactagtttgccaaatagaaaactctgggggttttaactgctggaatggggaagttcacagtgattatgctaattaagcattgacttttatcttctagacaggatgaaattattccttggatctttatgcagtctgtcaaaataattcccactgctcattgttcaggaaattgtcttctgtgaagtccaatgggttctgacatcccaggtcycagatactcgtactgcagctagttggagccagccgagacaaagcacaacatccattttgataatgagttggcaagtgctgccgtcagtgggaagattttctttcctctaatttcccatcaagattttcttctgactaatgtatactcagcatacatgagttctcaataaaaattgtgttttcttttttcttttaagattcaatagccataaattgccacaccaaggaaataaggctagagcaaaaggaaggcaagaagtaaatattaaagaaat

SEQ ID NO: 779223 - DNA, 478 bp, Homo sapiens
gagaccacctggggaagcaccagggttggtcagctggtagagggagggggtatctgtgggaagaaaggcatgagacagggcaggaggggagtctgagagcccaggaaaggaggcggttgtgttatgaattggttagtttacatttgaaaagctcactctcaggcaagctgtttgctactgctactgaaacaccaggggtttggtctaggtcctgctgctcatcacacagaaaatgatgaccaagatgatgattgtttccaagraaaaaggctttaatagggtgctgcagcccaggagatgggagctcagtctcaaacccatctccctgactgactaaaaccaggggtttgtgtggcagggaagaaatgtaataatgtgtaagaaaacgggaactagggaggggcaaggaagtaatcatgatgaatgagaggtccggtttctggaacggtgatctggtaagtttcagttctttgatact

SEQ ID NO: 779224 - DNA, 597 bp, Homo sapiens
aacccaggaggcagaggttgcagtgaaccgagatcgcgtcactgcactccagcctgcgcgatggagactgcttaaaaaaaaaaaaaaaaaaaaaaaaaaaaggctgggcgcggtggcagcggctgttaattccagcactttgggaggccraggcaggtggatcacgaggtcaggagttcgagacaagcccgaccaacatagtgaaaccctgtttctactaaaaatacaaaattagctgggcatggtggtgcatgcctgtaatcccagttactcgggaggctgaggcaggagaatcacttgaacctgggagacggaagttgcagtaagccgagatcatgccatcgcactccagcctgggcaacaagagcaaaactctatctcaaaaaaaaaaaaaaagccattgtagggtttttaagaaaagtatgatgatttgatttgcatatttaaggatcactgtcactgagtggctgatgggcagaaggggagtagcagtggttcataaaaatttattgtgagcttcttgtgtgtcccatacattacaaagagatttacattaattacctatgtaactcatcttaaaatcctttgaggtagata

SEQ ID NO: 779225 - DNA, 597 bp, Homo sapiens
aacccaggaggcagaggttgcagtgaaccgagatcgcgtcactgcactccagcctgcgcgatggagactgcttaaaaaaaaaaaaaaaaaaaaaaaaaaaaggctgggcgcggtggcagcggctgttaattccagcactttgggaggccgaggcaggtggatcacgaggtcaggagttcgagamaagcccgaccaacatagtgaaaccctgtttctactaaaaatacaaaattagctgggcatggtggtgcatgcctgtaatcccagttactcgggaggctgaggcaggagaatcacttgaacctgggagacggaagttgcagtaagccgagatcatgccatcgcactccagcctgggcaacaagagcaaaactctatctcaaaaaaaaaaaaaaagccattgtagggtttttaagaaaagtatgatgatttgatttgcatatttaaggatcactgtcactgagtggctgatgggcagaaggggagtagcagtggttcataaaaatttattgtgagcttcttgtgtgtcccatacattacaaagagatttacattaattacctatgtaactcatcttaaaatcctttgaggtagata

SEQ ID NO: 779226 - DNA, 597 bp, Homo sapiens
aacccaggaggcagaggttgcagtgaaccgagatcgcgtcactgcactccagcctgcgcgatggagactgcttaaaaaaaaaaaaaaaaaaaaaaaaaaaaggctgggcgcggtggcagcggctgttaattccagcactttgggaggccgaggcaggtggatcacgaggtcaggagttcgagacmagcccgaccaacatagtgaaaccctgtttctactaaaaatacaaaattagctgggcatggtggtgcatgcctgtaatcccagttactcgggaggctgaggcaggagaatcacttgaacctgggagacggaagttgcagtaagccgagatcatgccatcgcactccagcctgggcaacaagagcaaaactctatctcaaaaaaaaaaaaaaagccattgtagggtttttaagaaaagtatgatgatttgatttgcatatttaaggatcactgtcactgagtggctgatgggcagaaggggagtagcagtggttcataaaaatttattgtgagcttcttgtgtgtcccatacattacaaagagatttacattaattacctatgtaactcatcttaaaatcctttgaggtagata

SEQ ID NO: 779227 - DNA, 597 bp, Homo sapiens
aacccaggaggcagaggttgcagtgaaccgagatcgcgtcactgcactccagcctgcgcgatggagactgcttaaaaaaaaaaaaaaaaaaaaaaaaaaaaggctgggcgcggtggcagcggctgttaattccagcactttgggaggccgaggcaggtggatcacgaggtcaggagttcgagacaagcccgaccaacatagtgaaaccctgtttytactaaaaatacaaaattagctgggcatggtggtgcatgcctgtaatcccagttactcgggaggctgaggcaggagaatcacttgaacctgggagacggaagttgcagtaagccgagatcatgccatcgcactccagcctgggcaacaagagcaaaactctatctcaaaaaaaaaaaaaaagccattgtagggtttttaagaaaagtatgatgatttgatttgcatatttaaggatcactgtcactgagtggctgatgggcagaaggggagtagcagtggttcataaaaatttattgtgagcttcttgtgtgtcccatacattacaaagagatttacattaattacctatgtaactcatcttaaaatcctttgaggtagata

SEQ ID NO: 779228 - DNA, 607 bp, Homo sapiens
ggagtttgtgaattgcaagagcttttgtgtattaaaggattatatctggtccattgagaatactgtacaggtagaggacatagtgcttgatttttatattactaaataaagaaaactggaaattacttatgtcttttggttataaccaagccattcaatctttctgaaccctaatttatcagcacaaaaaataacaatgattataaacatccattcctaaggagtgttgaaatgaataacatgaaagaattaatactttgagaaaacagatcttctatcatttgtttcatgattgcttttcaggatacaaaatcatttctttagtgaataaacccatatttgacaatagtaagtatatgagttccatcagtgaaaggaaatgtatgaaaagaagaatgttttaaaagtaatgtttttttagatagtgtatactgtccattattttacttataaattmccccattattatgtagagcttgtaaaattttagaaaacccaaactcaaaggatatgaaaagaattcacgtgctggtaaaatattttatactctaatattaggttaatattttaggttataattgtatttattaatattaggttaatatta

SEQ ID NO: 779229 - DNA, 603 bp, Homo sapiens
actaaaaattaccattttgttgtcaatttaggattcaaccggctaacaattcatggtaactcattaatcgagtgcatcaaatatagtactatgaaatatgaaatatgtaagacaatgcatgtcttcatagttttttaatagtttggtaagtaataccttaaagatcaactaaattccatagaattgagtgcatttaaagaattcagtcatttcattaatttattgattaaaagtagcaagttaacttatttttaaaaagttaacatgcgcctttaaatttagatttaacttgmtttttgtatctactaacttgtatcaagatggaaaggagaccagctggaagaccaacttcagccttcacatcttatactttatgttctgaagtgtctaacttgcctctctctatttaattattacattaaaataagcaattacacacttacaaagatttgaaaacaagacagaaaaacccttttgtaccatatagagtcttagctcccttgacatcaggaatgaggaagttaaacaggcacaaccatgtaaagggagtgtttaatgctgctgtatcagaaacatcactgcattggccaagtaagcacctgc

SEQ ID NO: 779230 - DNA, 612 bp, Homo sapiens
gtatgaatacactgaagaaagggatgattcatattctagacaggacaaagctgaataacgtgagatttcatcatactactcagaacaacatgcaatttaaaacttatgaattgcttgtttctggaattttccacttaatcttttaggactacatttgctttttaaacatacttatttttcaacatttgttttggacttagggttacaaaattttatggactaaggggtacaagtgttgttgtgttacatgagtcattgtgtagtggtgagtctggactttgtttttgtgtgtgcattgttatttttttgagacaaggtcattctgttacccagactggagtatagyggcgtgattgtaccaaattaataatacttcatccctcacccccctctcacctgcccaccttttggagtctccaatgtctcttattccagtctgtgtattggaccacatttgacttcaggtaactgaaactgtgggtaagaggaaagtactgtattatgataaatataatatatatacatctatgttttataacatactgaatatagtatatagaatcatgctttttgcacatccacttttatagttaaatagttacacatttgcct

SEQ ID NO: 779231 - DNA, 641 bp, Homo sapiens
gcatctttaccagaagtagtttccatttcaagcaactatgttctgtgttcattcataaaaacaaactccacatctgttgaagttttatcatgaaattatagatgttcagttccatcctcaagttccgcatctaattgttctcttgcaatttctattacatctgcaattactttccccactgaagtcttcaatcsctcaaaggcatccctgagagttggaattcacttcacttacacttccattaatgttgatattttgaccttctcctttgaatcataaacattcttaatgccatctaaaataatgaagtatttccagagggtattcaatttactctgcccaggtccatcggaggaattatatcaaaaattatttcttggataatgaatttgaaagcttaaattactccttgatccttgtgttgcagatttaatgttttattagcagggatgaaaacgtaccttgtgtatatccctatcagagcttttggatgagcacatgattatcaataagcagtaatcttttgaaaggaattttttctagtttctggggaacaggcctcagcagtgggtttaaaatgttcagtaaatcattttgtaagcatacaagttaccatctaggttttgctgttccattgagaa

SEQ ID NO: 779232 - DNA, 641 bp, Homo sapiens
gcatctttaccagaagtagtttccatttcaagcaactatgttctgtgttcattcataaaaacaaactccacatctgttgaagttttatcatgaaattatagatgttcagttccatcctcaagttccgcatctaattgttctcttgcaatttctattacatctgcaattactttccccactgaagtcttcaatcgctcaaaggcatccctgagagttggaattcacttcacttacacttccattaatgttgatattttgaccttctcctttgaatcataaacattcttaatgccatctaraataatgaagtatttccagagggtattcaatttactctgcccaggtccatcggaggaattatatcaaaaattatttcttggataatgaatttgaaagcttaaattactccttgatccttgtgttgcagatttaatgttttattagcagggatgaaaacgtaccttgtgtatatccctatcagagcttttggatgagcacatgattatcaataagcagtaatcttttgaaaggaattttttctagtttctggggaacaggcctcagcagtgggtttaaaatgttcagtaaatcattttgtaagcatacaagttaccatctaggttttgctgttccattgagaa

SEQ ID NO: 779233 - DNA, 577 bp, Homo sapiens
caagtgttgtaaatggaattacatttagatgggaaaggcagagaagagtggcagagtgtgtccctgcattttagcctttctttttagctaaacaatctccagtattttagagagtaatattttggtttcctttgataatagttattttaacatcattttgattctagcaatgaaatatgcagataggtgggaaagagatttttttccaccatggtatagaccaaaatagtaaaaaaaaaaaacacttttaatttatgaacattattttttaatccggttttcctctattgagtcttttagaacaattttaagccattactgtggtacataactttgcaaaatattagagctagggatatcagactcttagctcaaaggtggagatatttttcaacacacacatgaaaaakgaaaatagaatatatttctttgcttacaatacttgggtaataaaattttcttaggctttggggcaaaagtatctcgatatgtatatataataagaaaaagtgattcacaaatttaattatatatcagaatctctcagagagcttaataaacagtatcatagtctaaa

SEQ ID NO: 779234 - DNA, 628 bp, Homo sapiens
aactcaaatttccatcaactgatgaatgaatttttaaaatgtgacaaagacacatcagacaaagaaaactacaggctaatatccctgattaacatggacacaaaaatcctcaacaaaatactagcaagccaaattaagcaacacattacaaagawcatttgtatgaccaagtgggatttattcctggtatccatggatggttcaatatatgcaaatcaaacaatgtgacacatcatatgaacagaatgaaggacaaaaatcatatcatttcatctgatgctgaaaaagcatttgaaaacatttcaacatccttgcatgataaaagcccttaaaacactgggtataggaagaacataacgcaataaaagccatgtgtgacagagccacagctagtatcatacggaatgaggaaaacctgaaagcctttcttctgaaatctggaacatgacaaggatgtccacttccaacactgttattcaacatagtactggaagtccttgctagagcaatcagacgaaagaaataaagggcatcaacttggaagagaagaagtcaaattatctttgtttgcagatggtatgatgttatatttggaaaagcctcttgtctaaaaggcaataagaaattc

SEQ ID NO: 779235 - DNA, 608 bp, Homo sapiens
cagggatggtggggactatactatatctatttaactttccaggctggctcttgtagaagctagatagatctatgagatggtagaagaaaaacccttcaaagattcatgaactggctgcttcaaattacagagggtctagaagtcaaggtaccctctccaaagtaaaaaaacaaattgctgtatcttgcatgccccacaaaaakgaagaagcatagtgcctggcaggtctctttgagtcatggaggcaatatattcctagaaatattattgacacagaatgttttcagctttgagtgggacctggagagtgaaagggcactgtcataggcagaacgacagtacagtcagtcttccttcttgggacatgtgatctgtgaaattaaatgtttgttagaggggccaaagatagagatgcagtatggagcttgtaaaaaatttctgaaggggagtcacaatacacatcttggaagtttaaataaggccatgccttctgcagcaaggtgctcccagaaacaggtctgtgctctcagggcacagtagagttagatcacttgacgaaggtgcacaaagtgaccatgcattcagaactatcctttactagctttgct

SEQ ID NO: 779236 - DNA, 637 bp, Homo sapiens
tattcaagagacatgtctataaattgtctactaattgtcaagggcagtgagccaataaaataagttggaagacagtttgtcatagcatcttcactttctttgaaattcaagatttattttgtaaatagaaaagagaacataggtcagaaacacagtcatacactgtatagcaaagttccggtcaaagccatacttaccatgggtccaaaattacaacgccgtattttttctgtaccttctctatgtttgcatatgtttagatacacaaatacttaccattgtgttacaaatgcctacagtattcaggaaagtaacatactgtgcagattgtagcccaagagcaacgggctataccatacagcctaggtgtttagtaggccataccaactaggtttatgtaagtgcactctatgatgtgtgcatgactaaatcacctaaggccacatttcttagaatgtattccagtcattatgcaacaaccatgactatatatagaactktttccaagaaaggggttcagagtttattctaagacaattttatattttaactgaggaaaatggggcttagatgctctcttgatttgccgttattttatatttctgtatctttttttttttttttttttttttttttt

SEQ ID NO: 779237 - DNA, 452 bp, Homo sapiens
gaaaaagcccaagctaaggcaaggaagacaggggagatacccaataaataaatatttagggagagaaaggacttggtgaatactggagcaggaagtgcaagggagaggaagaggtccaagatgacatgcatggtcctaggaagggtgacttagtagacgggaaagtcacaaggggcatgcaagtgggctgtccagmagagtgtgggatctataagcctgggagtggcctaagtgattgtccaaaacagcgtgtttaagtttgaatctgttttcatagtatcttgttaatatataaaaatatagaagcaccttatttcactgccccattgtaaggaaatgaatccttcttgccatcattttaaatcattttcaactattcaagtttcctgtctccccagttttctgtccacatactgcaggaagccgtccatgcatactgtaaactgtttact

SEQ ID NO: 779238 - DNA, 510 bp, Homo sapiens
gggatacgttacagcaacgtatgaagattgcatgagcttcccttttttttgttgtttttgtttttggagaaagagtctccatgtgtcacccaggctggagtgcagtggcatgatcatggctcactgcaacctctacctcccaggttcaagtgattcaccttcctcagcctcccaagtagctaggattacaagtgtgtgctgccacgcccagctaatttttgtatttttagtagagrtggggtttcgcatgttggccaggctggtcttgaactcctgacctcaagtgatccaccagcctcagcttcccaaaatgctgagattactggtgtgagccactgtgcccagccatccttttcctctttcttctttggttagatgtgatgaaatgatttgggatacaattacagggctttccatcaatgctttccgtagtaggactttttttatttttaaattttagtagttgtccttctgttagagctattttctggtctttatccatcagccttg

SEQ ID NO: 779239 - DNA, 620 bp, Homo sapiens
gagatacaaaataatgtgtaaatattaaatctctcaggctttctctgtaaattgtttccaattatgaaaaatcaacacagcattatttataatattgattatattatttataatattgatagtgcaaagactggctaccatagaatcaagtagttaaactggccttatcaaggaggaaatgtaatctgtgctattaaaagtgtcatacaaaataaattgttccaaaaacacagataaaagagattttattttcttacacccacaacctgctcaaaatcttgctatgttttagtttgctttaacctaggctctaacttccttagaaagctgttattttttttctaggatttttggtacaaaagaagatatgacatcaccattccatagatsaccgctttcctaaccaaactctttgcttcactcttttaccttttccctccaaatcccttgtcttcctgctctaatctggactaggcatcttctaggtccacttcactcccctgttcctgggacctctctccctctgcagacctcagttagatttactgttgtatcacttggcattttgcatgagcacactcttggtcggttggtttgtttcccagaggacaaagtgagaa

SEQ ID NO: 779240 - DNA, 585 bp, Homo sapiens
tagcttctggcccatctcagctttcaacaagccttcttcattaaacttaatcatttctagctttttatttaaagtgagagatgtgtgactctactttcacttgaacagttagaggtcatcgtagggttattaattggcctaattttaatattgttatgtctcagagaatagcaaggcccaaagagatagagagagagagggacagaaaaatggttggtcagtagagcagtcagaatacacaccacacttatcaattaagtttgccatcttatatggtcagagctcatgacacccaaaacaactacaatagtaacatcaaagatcaatgatcacagatcactataacagrtataataataatgaaaaagtttgaaatagtgtaagaattactaaatattacactgagacacaacacaagcacccactattgaaagaatggtgccaacggtctcactcaatgcaggattgccacaaaccttcaatttgtaaagaactcagtatctgcaaagtgccatccagcaaggtatacctgtatgttctcagagcacaatgaaattaaactaaatatccgtaacagataccagg

SEQ ID NO: 779241 - DNA, 644 bp, Homo sapiens
aagacagaaaactgaagtggccaatctcctctcagagagtgcaagggttgagaccaggagaaacagaggcactattaaaggccaggattgaggacgcacagcagagcctgagtgcatggcacattctgctgccaaaatccacmccctctacaagaaatatttgttcagtgcccattatgggccagaccaggaatgtggacatgaactgggggttctctgccctcactaaacttatttttagaggggagcttcaaaataaataagataaacaaactagataatttaagacacggtgagtgctctgaagaaattgcaagatggagatgcaatgtggaggggaatcaggttcgttacttaggagagctcagaaaggacttcctgagggtgtgacttttgaaccaagacctcagtgatgattgaaactcactgatgggaagacttggcgaagggcttctccagggaagctcgggggcaggttctagaagggaggcagggctggctggcttggggacatgctgtgtgtgaggaagcagtggttttcttcctaacctttatagggtcctacctgtcttgactcttgccagcttcttacctacaaacaactagatgcaaggggtcctatttatcctccagggagaaaagat

SEQ ID NO: 779242 - DNA, 582 bp, Homo sapiens
ttagactactcccacgctgccacagagccctgcacagtgttggggaggccacttctcaggggactcactgaggagggaaaggaatgaagcgcaaatccaaatagcctcaggcatcccagttgagtgttcacggatccctctgattgagggattgccccctccctcagcccacgcgttctccgttgagggttcctgccatagtgagctgtgcctgttgagtgtgaccagccagataaaaaggctgggaatcattagcgtagatggaaaaatgaaagatgagctaatttaaatggaagaagtcctacttaagcttcattcacgtattggaaattggtactgccatttatcctcaaataataccctgggcattatctgctcacaataactttggsaaagtgttgactcaatgcccttaggtgaaataagcttctagccactgcctgagagcttatcgtcaatgaattctgcttggtgtatactgacagtctgcacgaagcagaccaaataagtctattaatattcagccaaataccaataaagtcaatgtgatttatttatcatattgatctacccttccaaagc

SEQ ID NO: 779243 - DNA, 588 bp, Homo sapiens
ggccaattgtgtatcttcctttgttgactgtctcttcatatcttcttcttattattattattttttgagacagggtcttgcactgtcacccaggctggagtgcagtggtggatcttggctcactgtagcctcgaccttcagggctcaggtgatcctcccacttcaaccttccaagtagctggggactacaggcacgtgccaccacacctggctaaatctttttatttttgtaggggtcttgttttttgcccaggctggtttcgaactcgtggactcaagcaatcttcctgtcttggtctcccaaagtgctggaattataggtgtgagccactgtgcccagcctgtctcttcgtgtgttttacctacattgttttattttattttatttttgtctttttgctatttttgaaagaattctttatrtgttctggttaaagtccctctgtcagatatatatcgtacaaataatttctccctgtctgtagtttgcctaatcatattctttatggtatcttttgactaatagagttttaaattttgataaaatctatttttcaatgttttctttttatgataattactgtctgt

SEQ ID NO: 779244 - DNA, 621 bp, Homo sapiens
ttgtaattactgtttgcatgacacatctttttgctttcaacctgtatgggacttgtgttatagctagtctaataatctcagtgttttaattggaattagttcatatatatttaatgtaattattgatgtggttggattcagctctgccattttaaattttttaaaattacattttgtgtgtttcctccctctactttttctttcctgccttttttttttttagggaggtagagagattagttggaaattttttaggattctcttttttctgttgactctttttttttttttttttgagatggagtgtcgctttgtcacccaggctggagtgcagtggtgcaatctcagctcactgcaacctccgcctcctgggttcaagcarttctcctgcctcagcctcctgagtagctgggactacaggcacgtgccaccatgcccagctggctaatttttgtatttttagtagagacagggtttcaccgtgttggccaggctggtctcaaactcctgacctcaggtaatccgccagcctcggcctccctaagtgctgggattacaggtgtgagcgccaccgtgcctgggcctgtgttaactctttaactgtatctatttgcgtatttt

SEQ ID NO: 779245 - DNA, 626 bp, Homo sapiens
accttagctgttatttttgttatatgggtactagcagaagaaaaagagaaagaaagaaagaagaaagaaagaaagaaagaaagaaaagaaagaaagaaagaaagaaagaaagaaagaaagaaagaaagagaaagaaagagaaagaaaggaaggagagagagagagaaagaaaagaaggaaggaagaaggaaggaagraagaaagaaagaaagaaagaaagaaaagaaagagaaagaaaaaaggaaagaaggaaagcgaaagagaaaggaagaaagaagagaaagaaagagagagaaagaaagaaagaaaaggaaatgcctcattttcagaagcccagataaatggatagcttatagatgctatccagtctaacagctaattttgtaagtgagaaatcccaagaaatggaatagccattgtccatttaaaaactggaatggaaacaggatgaatttatgaaacctagagcagtgtttctcaatttcgtcccaggaccactttacactcctaaatgtaattcataacctcataaagcttctctctgtgtaggttatatttattgatatttgccatttaaaaaaatgaaaactaaaaaattttcaaacacaaaaatattcaagcacatt

SEQ ID NO: 779246 - DNA, 347 bp, Homo sapiens
taaatggaacaaaattaagagtccagaagcaaaactttaaatttatgctttattgatttttgacagaggtgccaaggcaattcaatagggaaaggacagtcttcaacaaatggttctaggacaactggatatccatatgcagaaagaggaatagaggaatttaratccttaccttacaccgtgcataaaaattaactgaaatggatcaaaggcctaaatataagagctgaaactataaagttgctagtaaataaagtaggacaaaatctttgtgaccttgggttaagcacagagttcatatacacagcaccaagagaacgatccataaaagaaaaaaaaattagtaa

SEQ ID NO: 779247 - DNA, 618 bp, Homo sapiens
tcaacagaataaacaacctacagaataggagaaaatattagcaaactgtgcatccaaaaaaggactaatatccaaaatctataaggaacttaaatcaacaagaaaaaaaacttcattaaaaagcaggcaaagacagacacgtctcaaaagaagacatacaagcaagtcaacaaacatgaaaaaatgctcaacatcactaatcatcagaaatacaaatcaaaataacaatgagataccatctcacactaggcagactattattaaaaagtaaaaaaaaaaaaaacaaacccacaaatgttgacaaagctgaaaaaaaaaaaaccaygtacacactgttggtaggaatgcaaattagttcagtccctgtggaaagcagtttggcaatttctcaaagaactaaaaacagaattaccattcaacctagcaatcccattactggatatatacccaaagaaaaataaatcgttctacccaaaagacacctgcatttgcatgtttatcacagcactattcacaacagcagagacatggaatcaacccaagtgcccaaaacagtggattagataaagaaaatatggtacatatgcaccgtggaatactatgcagccataaacagaa

SEQ ID NO: 779248 - DNA, 628 bp, Homo sapiens
ggacgtggcaccccactgctcatgtctaagctctacccacttcccctcaaactgctccttggccatcctgagatgcacacacggtgacgccatctgccccaagaggacagacctggtgaagaggtccatacaggaagggcccaagacccctggataacccacatatggtcrgggtatggtccctggggggtttgacctcttggctttgtagacactatacctgtgggtatacctgtgggtaggggagcagctggatgacaccacagtagggtagggtcctctttgttttttccccttcattctgatttccttccttccttccttccttccttccttcctctgtctttatttattttatattgacaaattatagttctacatatttatggggtacaaagtattgttatgatttttgaatataatatgaaatgattaaattaagctaattaacatatttatcacttcaaatctttaacttttttgtgatgagaacattagcaacttactcttagagatattaaaatgtatagtactcacatattaactatattcagcatgttgtgctgttgatctaaaaataaattactcttcctatctaattgaggctttgtaccctgtgactatcatc

SEQ ID NO: 779249 - DNA, 647 bp, Homo sapiens
aacttggatatttgccactggtaacactactactacttctatcatactccaaggcctatccagcaaaacaagacaaaaaagaaaacatctgagttggaaaaaacaaaataaaaccctttgcaggtgatttgtgtgtacagaatgttctaaggaatctaataatttattattagaataagagagtttaatgaggatgcagcacacaaaatctactttaaaactgcctttgtggccrggcagggtggctcacgcctgtaatcctagcaggcgtgagccagggcgggcagatcccttgagcccaggagtagagaccagcctgggcaacatggtgaaaccccgcctctacaagaaaaaaaaaaaaaaaaaagaaaaagaaaaattagctaggcgtggtgggacgtgcctatagtcccagctacttagtaacagtatagtcccagtactaagtaacatacttaggaggctgaggtgggaggatcacctgatctgagggaagtcgaggctgcagtgagccatgatcctgccactgcactccagtgtgggcaacaaagtgagaccctgtctcaaaaaataataataataataaaattgtctttgtatattccaaatgaaaacaatttttaaagattttatttataaacacttaa

SEQ ID NO: 779250 - DNA, 680 bp, Homo sapiens
gactaggtgcattgtcaatgagtagcaatgttttgaaaggaatctttttctgagcagtagatctcaatagtgggcttaaaatgttcagtaaatcatgctgtaaacagatgtggcatcatcaggctttgttgttccatttatataacataggcagagtcaatttagcataactcttaatggccctaggattttcagaatggcaaatgaccatcagcatcaacttaaagacactggctgcattagcccctcacaagagaatcagcctgtcctttaaagctttgaagccaggctttggcttctcttctctagctatgaaagtcctatatggcatctttttccaacgtaagaccgttttgtctacattgacaatctgttatttagtgtagccaccttcatcaatgattttaactagatcttctggataacttgctgctttccctttaacttttatgctatggagatagctcctttccttaaaccttatgagcyagcttctgctagcttcaaacttttcttctgcagtttcctcacccctctcaatcttcacagaattgaagagagttagggcccccctctgggttaggccttggctcaagggaatagtgtggctgttttcatcttctatccagatggctaaaacttcctgcctttcagtaataagcctgtttcactttcttgcc

SEQ ID NO: 779251 - DNA, 616 bp, Homo sapiens
tctgttacatgggcctggcactgttcacgttccagaatcatatctttaatgctctttttatacttggagcctttgtatcctttgaaatacagaacatggggtgattagagaagataacgaatgacttacttttacggattattctgttaaatcattaaagcactttcctaaagtccactgcaaggctcagacacaaggcagatacgtgatttctagttaggggaggaaaacatcctaagaaattaggacctccattaaataattatggttcaagataagaactttggaaagaactgtggaaataaagagggaaattaaaggaaaatctatttttcaagcattcaaaatatgtttaactataattatgaatcatttacataaaaattatgtctgtgtattctttatagagaaacagacttaatctgcattagagtatatcaggaagcatccaggattattcagctttggaaatgttttcattgcaagatgataaaatctcttttccaatamggacttcaaaaataggatagatgatcaaatgaaattagcatgatgcatgtgctttcaacatcataagcattgttcaaatacaggttcatctgaataagatagcacc

SEQ ID NO: 779252 - DNA, 650 bp, Homo sapiens
atttacaaacatcccaaagaattaagacattattataataaacccacatgtaactgtcttatacattttacaattattacgaattttgccatatttactacttctatttagttttaatttatcattgaaaacatttttcgatgatatagcaagcaaagaagacagaaatgtgagagtcctgggcaactaggatggatggccaggtttatcatgtcaaaggcttaggtaacctgaatatgaatgaataatgtgaagatcagaagaacacgwaggtttctgatttcacgtttagagctgagtagagaaaggatgtgtgtatggttttggtgggatggaaataaactttggagattggcgataatttctatgaattcataatttcaatatggcagagtcttttagtctggtatatgaaaagaccttgcctagggcttgatgatgcccagtaaatgggagcaattcattaaaacccacgggaaacatcaataaaattaatatagtcctcacttgagatctcatataaattttctgtatagaagactgatttacaagacttttataaacagactttgcatattgtatggtaaaatcctctgatttattgcacctacatttattgtgcttctctagaaagatgattcaattattga

SEQ ID NO: 779253 - DNA, 578 bp, Homo sapiens
tagcctatctaagcctcagcatattcactggtaaaatctgcatgatgatcacagcaacccataggagtgttgtaatggactaccaattgagcagtgtaagtaaaggtttagaacagtgccagtcacttaggatggcttctctattggcagctgtaatttttaactcattgttatatggtaatgatgaatgygaagacagtgacacagacactgccctcatggagcttattctctagtgaaggagtcagaaaacatttcaatacgtagataaatgaatagtatcagcagtcatagggctctgatgatacacagagaaggaggaggggagacagcatgctggtgtggtgaggggagctctctcagagcagaggccatctggacagagacctgagtgtgatgagacagaagcaatgcaaatatctagagggagtgttccccagcccaaaggaccggcatgtgcaaaggccctgaggtgggaatgtacttggttccttctttgaggaagatcaaggaagcagcatggttgccatataacaatcaagaagtagaggggtcataataaagattagaaaggtagt

SEQ ID NO: 779254 - DNA, 614 bp, Homo sapiens
ttcccaccactacactgtcatctgttaataatcataacctgtttgaaaatataataaaaaattatttattcacaatagccacaaaaccataaaatacctaggattaaatctcacaagacctctgtgaagatgactacaaaactttaccgaagaacgtaaaagaagacttgaatacctcatgcctggatggaataaagaatatcataaagaagagaatcatccccaaagtaatctatatatccaatgcaattccaaccctgattaaacaggattgtttaatgacatttgtcaagctggttgtaagattcatcttgaagaaaacaaygtttaagaatgggatagctatttttgagaatgaataatatacagagacttagttcaccagtcattgagacatatcagaaagctaccatctttagaacagtttagaactggtgccagaacagacagaaccaccaattagaaagaataaagacaaacatacacaaacagttagtatataataaaagaaacatctcaccaaaatgtggacaattcaggtggagctcatgggatgttatttttaataagataaaaaagaatactgatatcacatcctatgcaaaataaagttc

SEQ ID NO: 779255 - DNA, 635 bp, Homo sapiens
ttgaaaaacaaacaaacaaacaaaccatgtgaggacatagcaagaaggtggcatctgcaaaccaaggacggaggcttcaccagaaaacagccctgctgataccttgatcttggacgcccagcctccagaactgtaagaaaatgaattatgtttaagctacccagactggtwttttttttaatggcagcctaagcagactatacaacagccctatgggtatatacttttatcagctccattttgctaaagaggaccttgaatctcagagttgtgactagcatgaacaaggtcaaatagaaatcatggagcttggccttgtttaattctcagttggcatccattaagaagcaggccttatgttgagatgggaggaaggcccaagtccttgatctcctgtctgagccagtagctctgtccttctgagccactgtacaagactctgttgtggaataactgccaggccagaggggctgttattacaaaaaggaaagactagaaagtcctgaactcagggctgggcacaaaggagggagctcaagaaatgtgaatggaatctgctgaacaaattaatgagcagtattgtcattggcattcctttgtcttcaacttcatgtgtgcagtcacagtcctaagca

SEQ ID NO: 779256 - DNA, 443 bp, Homo sapiens
attcccatacctccaaactcatgggggaaaaactaaagaaaagaggtgatctttgatgagtccaagctgtccaagtctatcaatctagatagagacaagagatcctgcagagagccaccatgtatctcaacacatgagaatctccagctgggtctcccaggaagcagaatctgagmcagcattgaaaataccggaccttggtacggtgcggtgtgtacgcctgtaatcccagcactttgggaggccagggcgggcagatcacgaggtcaggagatcgagaccatctggctgacatggtgaaaccctgtctctagtaaaaatacaaaaaaaattagctgggcctggtgcgggcgcctctagtcccagctactcgggaggctgaggcaggagaatggcgtgaagccgggagacagagcttgcggtgagcggagaaagcgccactg

SEQ ID NO: 779257 - DNA, 601 bp, Homo sapiens
aaatgtattataataaactatggagaacagtttggagtttcctcaaaaaactaaaagtagagctaccacatcatctagcaatcctactgctgggtatatacccaaaagaaaaaggaaatcagtatatctaagagatatctacactcccatgtttgttgcagcactgtttgcagtagctaagacttggaagcaacctaagtgtccatcagcagatgaaaggatgaaggaaatgtggtacatatacacaatggcatactattcagccataaaaaagaatgagatccagtcatttttaataacatagatgtaaccggagatcattaygttaagtaaaattagccaagcatagaaagacaaacatcacatgctctcatttacttttggaacctaaaaatcaaaacaattgaactcatggaaatagagagtatataaagtttactggaggctgggaagggtagtggggaaatcagggggaggtggagatggttaatgtgtaccaaaaaaaaaaaacaatgaatttttacagcacaatagggtgactgtagtcaataacttaattctatattttaaaataaattatgtaattggattgtttgtaact

SEQ ID NO: 779258 - DNA, 554 bp, Homo sapiens
ttcactgacacatacacacccgcccatttcattttttaatgaggacatcatacccacagagatttgccaggaggctagctgtgtaatatacacattacccacactgtaaacagagctcacttctgccatgccaagtaggtacgacttacccagctaagggaactgagaccctatgagactgtgcaacttgcccaagaaagactagctaagagtggaagtstttctaacccaaagccatctctatgtgttacagcttactgttttcctcttttctttgctagtggtaacctgggggaccaagactgatgaggatagataagaaatatgatatttaacgtgattgcttcatatgatctgttctcatgagatccctaggggaactgactaatgacaaccacacatgaccccctgtgccaagatggcaaaaagcagtctctgttctccacgagaatgaaataaaatgcactgcaaaaggcatggcactggctaaacagggcataaaaccttacacaagtcagctacctgcatgtgttaaatctccctctaaagagtct

SEQ ID NO: 779259 - DNA, 643 bp, Homo sapiens
ttctgtgaacagtgtataggagttccagttgttccatatcctcacctaatcttggtattgtcagtctttttagccagaaacccattagccattctaataggtttgtaatgatatctcattgttatattaatttatacttctctgatctctaatgcaatgaattttcttttcttgtgattatttgccttccgtatatctttggtgatgtgtctgtccaaatatgttgcccatttttwtttgggttgttttgggggtttaagaattatatgttctagatccttttcattttcatataaattttaggatcattttgttaattttcatataaaaatacctgctggaattttgattcagattgtgttgaatttataggtgctgttaggcagaattgacatcttaacaacttttagtctacgtagaaaattagagggtatctacaaaaaagagacaataaataataagtaagtttattaaggttttagatgcaaggtatcttttacaattacctgtttatgtaataggtaatcaattacatatttatgttcaagcaaacaaccatcagaagttaaaatagtaaaagtaccatttataatggtattaaaatatgaaatacttaggaattaaattttaaaaagatatgtaa

SEQ ID NO: 779260 - DNA, 585 bp, Homo sapiens
aattgttaagaaaatgaaaaggcaaaccaaagatagactatatatctgaaaaaggactcctgcctattatatataaacaatacttttcttaaaacactatgataagaagagaaaaaacaattcaataaataaacaacataattgaataaaaacttttcataagaagatgtataggtggcaaagtaagggaatgaatagctgctcaatatcattagggaaatatagctaaacccactacccatttattagaatgtctgaagttaaaaagactgactttaataagcattggtgaagatttgaagcaattagaacttttatatactgacagtgggaatgcaaaatggtccaaccaytttggaaaaaagtttggcaagtgaggtttatttctagtagccccaaattgaaaataggtggattgatacgttattggataaaaaatttgcatacatacatataatataatactattcttaaataaaaacatgaattaatgatgcacgcagtaacacaaatgaatcctgaattatgctgagtgaacaaagccagaggaaaatgagatgaaataagcagaaatttattttctga

SEQ ID NO: 779261 - DNA, 609 bp, Homo sapiens
gagaaagctgcctctcaagtcatttaacagccagtggaacttacatatttctccttagaatgcagttatgtgtaatcacacagttgcactttgtgaggttctaatattacaacaagaatgttttaaatccctctctcctctttttcttaattatcagtatcaaaacctaccaaatgcattggacttctgtgttagagcctcataaccaagaacttctgtgttacagccacatagctaatgagttagatttttctcccataggaacaattgcattgtagaacttacttttatttgcagggaaaaatactagacagatctaggaaaatacacaaatcaacaacaaactacagggaggtaaatgcaaaataaggaaaaggctaattaaaatacaaatatgttggaaaaaacaaaacaaaatccattaatacaattttaggaraagcatctaaaattgacaatttttatgaaatgtatgcaaaagaacatttttttaatgttctttttaatgcatgcaaaagaacttttaaaagaacaattcagagaccagcacctgaaaatgttaacaaataaacataggctttcaggggtactgtagagatcaatgtggaa

SEQ ID NO: 779262 - DNA, 569 bp, Homo sapiens
atatggtgagtgaccaatcaattattaactaagatgatatttgatttggaacttggaagataaatatgatgcagacaggaagggaagggggcaggaagagtatttaagtagagggagcaatggcaatataagccagagtgtaaaaatgcaagtagctggagtgttgagtttatgaacaatatagatgaatttaaagtgaaatgtgccaatagatgtcttcagcaygacaagcatcagttttatttgaaaccttttaagaaagcaaacatttttcttaatggaattacttaatggaaatattataagactatagacaaaaagcattgtacacaaatacgtcacactagttagtaaatctatttttcatagggtatgatttgggaattctaaaactaatttatgtgttactaagaatgaacaaataagatattgtaaataacgagaggctgatttctcactgtctgagaaaaaagttacaaataaggaaaggaagaaggctggaatctggaatgaaccctatgctactggattgaaatcacatgtatcagtatgaactgataaacacacac

SEQ ID NO: 779263 - DNA, 569 bp, Homo sapiens
atatggtgagtgaccaatcaattattaactaagatgatatttgatttggaacttggaagataaatatgatgcagacaggaagggaagggggcaggaagagtatttaagtagagggagcaatggcaatataagccagagtgtaaaaatgcaagtagctggagtgttgagtttatgaacaatatagatgaatttaaagtgaaatgtgccaatagatgtcttcagcatgacargcatcagttttatttgaaaccttttaagaaagcaaacatttttcttaatggaattacttaatggaaatattataagactatagacaaaaagcattgtacacaaatacgtcacactagttagtaaatctatttttcatagggtatgatttgggaattctaaaactaatttatgtgttactaagaatgaacaaataagatattgtaaataacgagaggctgatttctcactgtctgagaaaaaagttacaaataaggaaaggaagaaggctggaatctggaatgaaccctatgctactggattgaaatcacatgtatcagtatgaactgataaacacacac

SEQ ID NO: 779264 - DNA, 515 bp, Homo sapiens
aagcttggtgcaggacgcttgctcatagttctagctgctcacggctgaggaggaaggataacttgagcctcggagtttgagtgcaccctgagtaacacagtgagaccccatctcaaaaaaaaaaactaatctgaaaaggctatatgctatttgataccaactatggtatgacatcctaggaaaggtaaaagtgtgaagacattgaaaagatcartggttgtcagcgaggagagagggagggatgaataaacgcagcacagaggacttttagggcaatgaaacttattctccatgatgctatcgatgctggtggatgaatgtcttatacatttgtcaaaacctatagaatgtgcaacacaaagaatgcaccctaggctgagtgcagtggctcatgcctggaatcccagcactttgggaggtggaggcaggaagatcactcaagctcaggggtttgagaccagcctgggcaatatagttagatcctgtgtctaccaaaaaacttttaaaacgccaag

SEQ ID NO: 779265 - DNA, 516 bp, Homo sapiens
aggatggtctcgatctcctgaccttgtgatccgcccgcctcagcctcccaaagtgctgggattacaggctgagccaccgcgcccggtcgcaccccaactttaaagatgagggtcggtgcaggtgaggaacctgctcagggtcccccagccccagcgccgggtctrcccacgactgggagcggaggatggcggtgagtaaaaaaagaaaccttcctcattcactgacattccaggggaggacgatggggacttcagcacaccctgggattgctgcaggctggggtgtctctcaagagtttcgagtttagattctctgggagaccagccggcgcggagaaggcttaaaagcccagccgatcgcagaccgtgcgcggggcagggaagcgagggccgggagtgcctccggtggcgaaagccaggaattaccgcgcacctattctggaccagagtaaaaatcgcctggaaaacgtcgaaaatcgtagactctcaagggtgaaaggggatttaaagagcact

SEQ ID NO: 779266 - DNA, 547 bp, Homo sapiens
cccaggggccctcctggggttaccctatgggtgtccccagctgtgcctatctagatgagcctcggagactccctaaggtcacaggactgtagtccctctccctacatccctgcctgcaaggttctctgagtttctagttttctctggttgkgtgggtcctccccagctgtcaaatcacctgctcctccttcctgcccaaccagctgcgggctgggaaacagtcactcccaatgctctagctgcatgcagactgagggtgggcaggctctgaaaaagggccaggggactcagagatacaaaagctttgacccaaagttttcatcatccaatcaaaccactcatagccacttttgtccgataaactcccagctctccttgtgccccaaacactcggcttattcactcactgcagtgagtgtgatactagctcactgcagcctccaactcccaggttcaagcaatcctcacgcctcagcctcctgcctagctgggaccacaggtacgtacctcctatgcccaactagtttttcatattttttgtaaagac

SEQ ID NO: 779267 - DNA, 579 bp, Homo sapiens
aaaaagacctcatgaagataaagtttgctctttgaaagacaggtttaaaaaaagtagaaaggtaaaccacagtctggggtaaaaaactgcaaaaatcctatctataaagagcctatatccagaatttttgaagaactcttatagagcaacagttagagaagaaacaacccataaataaaggagaaaagatatgactagaaacatcataaaacaagctatatgaatggccaatgagcaaaggagaagaggatcaaaatccctagtcttaagagaaatgaaaattgaaacmacagtaagttgccacaacaaagccacaaaaatagctgaagttagaaagactgataacacctaatgctgacaaggatatgggacacctggaactctctcttacactactggtaaaaatgtaaaaggggaaaaattgtatggaagttacaaagttacacacacatttaccatattatccaggggtttgggtgcaaaagggcacaaggatacaacttgactgttgtgagttacatgacggtatgcaatttaaaactggttaattttattgaatgtaagtaatacattaaaagt

SEQ ID NO: 779268 - DNA, 606 bp, Homo sapiens
agtcctcttagggatgtggcagttttttaaatactgagatcttagacacatcttcaatctgtggggctatgctccctcctctagaatctttgaggatggtaactgcttccaccaataacatatgataggagtgatactgtttgaattctaaggctaggtcataaaataccttgcagcttcttgctggttctcaagtgaaagtgttctctaaggaaagccagctgccatgtaagaaatctgagatcactatattggaaaagtggcaaagagaaagataaagatataagtacaaaggcaattaaaacacaaacagttggccgggcgcagtggctcacgcctgttccagcactttgggaggccaacgcaggcggcttacgaggtcaggagatcaagaccatcctggctaacacggtgaaaccccrtctctactaaaaataccaaaaaattagccaggcgtggtggctgcgcctgtggtcccagctacttgggaggctaagccaggagaacagcgtgaacctgcgaggtggagcttgcagtgagccggagcttgcagtgagcccagattgcaccactgcactccagcctgagcgacagagagagactccg

SEQ ID NO: 779269 - DNA, 622 bp, Homo sapiens
aaacagttcttgtctgttgagtaggctaatcttcagggaactgagtatacagtggatataattggatccagtggatataattggatataatttctaaagccgtatttatttctctttttatctatactttctttaactgtaaaaaaatttaggagtgttaygttctcattttgaatgaggaactctgaaattgtatctgattttctcttttgtatttgtacttcagactagtcaaatatgtatgccttttgcatacatatttacttggagatggggagatatttatactagcttcctctggctgccataacaaactactgcagacatcgtgacttaaaatgacaggcatttatttctcagcgttctggaggccagaattctgaaatcattatcagtcagccaagatcacggtgtcagagggccacaccacctctggaagatctaggggagaatctgctccttgcctcttctagcttctggtggctgatggcattccttgttttatggctacatcattaatctctccctctatggtcacgttatggccttccttctccacttctgtctgcagttagatctttgtcttaggctgggtgtggtggctcacgcctgtaatcccagg

SEQ ID NO: 779270 - DNA, 622 bp, Homo sapiens
aaacagttcttgtctgttgagtaggctaatcttcagggaactgagtatacagtggatataattggatccagtggatataattggatataatttctaaagccgtatttatttctctttttatctatactttctttaactgtaaaaaaatttaggagtgttacgttctcattttgaatgaggaactctgaaattgtatctgattttctcttttgtatttgtacttcagactagtcaaatatgtatgccttttgcatacatatttacttggagatggggagatatttatactagyttcctctggctgccataacaaactactgcagacatcgtgacttaaaatgacaggcatttatttctcagcgttctggaggccagaattctgaaatcattatcagtcagccaagatcacggtgtcagagggccacaccacctctggaagatctaggggagaatctgctccttgcctcttctagcttctggtggctgatggcattccttgttttatggctacatcattaatctctccctctatggtcacgttatggccttccttctccacttctgtctgcagttagatctttgtcttaggctgggtgtggtggctcacgcctgtaatcccagg

SEQ ID NO: 779271 - DNA, 602 bp, Homo sapiens
tttaaaagtaactattcagagaatcaacaatgagaaatctagtcactaaacttaagcaaaagcattaagtccaaaagtgaatgagaaaaaaatctgtcagaggctgctacaaatgagtaaattacaatttatttaaaacaaaaattatttacaaaagagtaaaatgtttttcagatatttaacaaaatggcacaaaaatagttattaatgcaaagtctaacatttttaataaaaactcagtttttctctaaaagatttttatccttgattatacctagaatcctgataaaaaagcaattcagtgtaaaggctaagaaatatttataaagttaagctackaaaattccacataattaataattacaaaagcaacattctagaagttattggggatggcacttctccaagaaattaaatgagttagtgggatgaaagtaaaaaggaacttgagctggtattagggttgccttgtattgtgtttactccaagcacttcggtttatatcagaaaatgctgagtctagagggtatacacagggcatcttccctaagtatcagttttactatattttgcaaagaatacttttaccttcatacacaagc

SEQ ID NO: 779272 - DNA, 563 bp, Homo sapiens
gcaacccaagtatatcccaggaggcttgattccccttttacaatgtaacacaagtcagcaagtccatctgaatcttaacctaaagatcttaaaaaatcttggacaatacaaaaccaagtcttaagttacaaatactatgccaaagattactgtagtttctggttatgaaagttacttcatttgtttatgtgtgtctatgtttggttttttaaatttatgtatctacctacctacctacctacctacctayctatctatttatttatttattgacaggttctcattctgtcatccagactggagtgcagtggcacaatcatggcttactgctcctgggctcaagtgatcctcccgtctcagcctcctaagtactaggactataggcacacaccactacactcagctaagaagtaacttatttttacacatataactattctatagagatttacctcatctacagtcaaataaaattttgtttcccagattagaaatgtaccaaattgggaattctaccagaatatgaacagagaaaacagtcccaacttatgagcaggtagcat

SEQ ID NO: 779273 - DNA, 526 bp, Homo sapiens
agattctagaattaattggacaaaagaagcccaggtactgtaatgagagtttttacactttcattctttcaatggaagaaagaggaaagctgctcactttcttgttgaagtcaaattcccattgggcaccaccactgctatccctgttttttgtgcctatgggctctgattttcatctattattttctttccttccaacattactagttgttttgctaacttgatttaagttctgtaagatgtttgaattgatttgttactgtgctcagttctttcctttgatctcattgatacctttcaatattgcaagggggcaaaactagtattcacatctctatttgcttaatggaagcaaactgtatactgaatcactggagaaattttggtaggkcaatactgctgtaaaaactgaggcctcttcaacaagtctgcatagaaagatgccctaggaagatgctgccctcaaatctgaatatacctctcagtaaataagttgaatcagaaccttctttaccttctagggagg

SEQ ID NO: 779274 - DNA, 613 bp, Homo sapiens
acacctggctaatttttgtatttttagtagagatgggattccaccatgccatgttgaccaggctggtctcaaactcctgacctcaagtaatccacccgtctcagcctcccaaaatgctggaattacaggcttgagccacygtggctggctgagtttgtaaaaatattatgaactcaatattttgtttgcttcgagccattttagtctttttttttttttttttttttgaggcagggtctcactttgctgcccaggctggagtgcagtggcgcacttctagctccctgataccttgacctcccgggctcaaacaatcctcccacctcagccttctgagtagctgggactacaggcaagtgccaccacacccagctaattttgtttactttttgtagagatgaggtctccctatgttccccaggctggtctggagttcctggactcaagtaatcctcctgtctcagcctcccaaagttctgggattacaggcatgagtcactgctcattgtagtcattttttaatggtaaaattgtcccatcattggccagtatgaggcattttgagttggctccttctaacttccttgcttttgtgtgtaacaagaaacctcat

SEQ ID NO: 779275 - DNA, 422 bp, Homo sapiens
acagaccctggagggctcgatgcgcctgcgggggcgtggctggggacctgggcctgggccaggaggggcctttccctctcgccagccctcttttcttcctttgtgatttcaattgaatggggagaagctcaaaggcaggggcatgaaaggtcaaagccaatttgcagggccaagtgtgggggaggagagaagggcccagaccaagcattctttttggaggcctgaccttgacctggaagcaactcctccctctctcggctcttctgargacactgccctggcagagctggctttgccttctggccaccccccttactagctgtgtgacagaggccagaaaatgctcctttctgagcctcagtttcctcatctggaaagcagagatacagggacctgtcgggtaggactgctgtaaaatattg

SEQ ID NO: 779276 - DNA, 515 bp, Homo sapiens
ttccttggatctcctgggcctgctcctctcatcttagccctcaggaagtccttgatccccagcccctatttggggtagagaaggtgagaaatgcttagggtaagttatactgccactggcttcttcagcatcagacccctgattcaaacatgtggtgagttcctgggccccttggctttcccyaagggccagcaaagggccttttaaagagaaagaagaaaaggtaagtagggagcataatatttgatgagcacgttaaagcgttcattcatgggtatcagatagaaacgtttggcttcacttaaggggaatctcaactcactgtggcttaaacaaaattaggtttatttttctgacatcataattctgaaaacgagtggttgatggccttggtcagctgctggtgatgccaagtactgggctcttcccagctttctgttcatcgtccttagcacgtgggcctcctcgttgccttgtggtggcaagatggcagcctcgactccctgggaaagtag

SEQ ID NO: 779277 - DNA, 515 bp, Homo sapiens
ttccttggatctcctgggcctgctcctctcatcttagccctcaggaagtccttgatccccagcccctatttggggtagagaaggtgagaaatgcttagggtaagttatactgccactggcttcttcagcatcagacccctgattcaaacatgtggtgagttcctgggccccttggctttccctaagggccagcaaagggccttttaaagagaaagaagaaaaggtaagtagggagcrtaatatttgatgagcacgttaaagcgttcattcatgggtatcagatagaaacgtttggcttcacttaaggggaatctcaactcactgtggcttaaacaaaattaggtttatttttctgacatcataattctgaaaacgagtggttgatggccttggtcagctgctggtgatgccaagtactgggctcttcccagctttctgttcatcgtccttagcacgtgggcctcctcgttgccttgtggtggcaagatggcagcctcgactccctgggaaagtag

SEQ ID NO: 779278 - DNA, 515 bp, Homo sapiens
ttccttggatctcctgggcctgctcctctcatcttagccctcaggaagtccttgatccccagcccctatttggggtagagaaggtgagaaatgcttagggtaagttatactgccactggcttcttcagcatcagacccctgattcaaacatgtggtgagttcctgggccccttggctttccctaagggccagcaaagggccttttaaagagaaagaagaaaaggtaagtagggagcataatatttgatgagcacgttaaagcgttcattcatgggtatcagatagaaacgtttggyttcacttaaggggaatctcaactcactgtggcttaaacaaaattaggtttatttttctgacatcataattctgaaaacgagtggttgatggccttggtcagctgctggtgatgccaagtactgggctcttcccagctttctgttcatcgtccttagcacgtgggcctcctcgttgccttgtggtggcaagatggcagcctcgactccctgggaaagtag

SEQ ID NO: 779279 - DNA, 588 bp, Homo sapiens
gagttacacttttttagcatgggattcaagtagctgattccttaagctaccagcaatttcatcttgaaaaatgacctaattctctagtttcccattaatttagactggctttctctttgatagaacaaaagagagccgcacctcgtcagaagagtgactgcagatgcaygaaatgagtgggcctttctgcctatgggtgacatcatcttaaagctttagaaaagtcacagacgtggccgggtgcggtggctcacacctgtcatcccagcactttgggaggccgaggcagatggatcacgaggtcaggagttcgagaccaacctggccaacatagtgaaaccccatctctactaaaaatacaaaaattaactgggcgtggtggcgcatgcctggagtcccagctactcagaaggctgaggcaggagaatcacttgaacccaggaagcagaggttgcagtaagccaagatcctgccactgcacttcagcccggttaccgagcaagactccatctcaaaaaaaaaaaaaaaaaaaaagaaaagtcacagacgttatgctccttcggtagtggtagtgtaagcgatgagatc

SEQ ID NO: 779280 - DNA, 620 bp, Homo sapiens
  misc_feature 581, 582, 583, 584, 585, 586, 587, 588, 589, 590, 591, 592,593, 594, 595, 596, 597, 598, 599, 600, 601, 602, 603, 604,605, 606, 607, 608, 609, 610, 611, 612, 613, 614, 615, 616,617, 618, 619, 620: n = A,T,C or G
tatgagtaaggactctgcaacactattggcacaagccttatttacccttaattttttaaaatttagatgataaatttcaatcagtttttgaaaggcactttgctaaaacctctaagacataaaactcgcagttttttggaaagatgtaaacagtaatatatggtgtgggccaaatgaattgaagaggatatgcttatgttcacaccccctcaggttctctttgaattccagcatgatgcatcgaaccataccatgacatggctaggacccaacctggtaccagaaatgaagaaaatgrccctacaggacccacagccctggacgctgtggcttccttggacaacacaggccccagacattatgctgaagaagcagaaggcttagcaaatcctgctccaagccgaaatacctgtcactccaaataatttgttccatttttattctctcactctgcctacaactggtacctgctacactctattgggctcatctcttaaatccatctttcttctgccctgttacttagacaaacacccacttcccagcttctaacaacgtgacggcttggctaaaagggattnnnnnnnnnnnnnnnnnnnnnnnnnnnnnnnnnnnnnnnn

SEQ ID NO: 779281 - DNA, 591 bp, Homo sapiens
ttcagactcagtgggcttaaaattggctgatccgaattcaaactgtagtgtcagttgaggcatcacttcattaagctgcaatgccatcttctaataatactcattaatgttggaatagaccttttaaactacaaagtattttgtaaaaataaacccatcttcctatcaccatgaaaccaaaattgagttagaacttgtattcccattttacagagagagagagagggggaaacagagtgtgtattcatgtccagatagagtagttaaataattttgaagagagttaaaggtcattaataactttgaaaagactaacaaacaaggttaagcagtacttggattcacaatagctccatttagtggtggtccatttaaattcccattatattaagacacttgggaagctttgtacatcaggtttctgggarcatttattttttccagggatatcataggggacagagatataggaacagagcttaagccaaggcacaggtaggttcatttggactccattgcatccacctggatgaatgccacatggtaataatgctatctcacacttgcattgtttggagcacatacatatta

SEQ ID NO: 779282 - DNA, 601 bp, Homo sapiens
gccttgttttttttagatggagtctcgctctgtcgccaggctggagtgcagaggcgcgatctcggctcactgtaacctctgcctccctggttcaagcgattctcctgcctcagcctcccaagtagctgggactataggcacgtgccaccacacccagctaatttttgtwtttttagtagagacggggttgggttttcaccatgttggccaggatggtctcaatctcttgacctcgtgatccacccgccttggcctcctgaagtgctgggattacaggtatgagccaccgtgcccggctggacttgttttaacttaatcgcctctttaaaggccctgtctgcaaatatagtcacattccgaggtactgggggttagggcttcaacatataaattttgggaagacacaattaagtctgttacaacctgtcctaaaaaggcagatcaaaaacatatgttacggaatttattagagataagagattgaaggtgagtgctaagagagccaaaagcctgatcatagatgattgattaagagcacttggagcagatgaggagagaaacgataatcctaacagataaaagacaaaagttccccagagct

SEQ ID NO: 779283 - DNA, 624 bp, Homo sapiens
agtctcactacgtccttgcccacacagatcttgaactcctggccccaagcaatcctcccgccctcagcctcccgaagtgctgggattacaaatgtgagccaccatacctggccatggacatggttttataaaactcatcagtaaaatattttctacttaaggccagattcctttcttttaggaagtattattttacgctgtctgctagtttccagatcatgttctatgtttaatttaaatgcaccaaacctatttagcttatataatattaaaaaaaraaatcagtattacttagagccctggctaaatcagatgtggtgtcatttttagtagtggtaaagcttccagtattagcgaacacactatagtaaagttcagaagaaaacgaaatctgcttccatagtgaggaaaattatttgtctcgctgacatactacagggaagtatatgacaccagcctcaaattcactgtgtgttaaaccagcagatgagggaatcactaaggtggagtggcaggtgatgcaaagggagacaatgggtgctttttccaggcagaatagtctaggactctttaggacacaggcaaacaatccaagacagttgaaagagaacaactataacaaat

SEQ ID NO: 779284 - DNA, 624 bp, Homo sapiens
agtctcactacgtccttgcccacacagatcttgaactcctggccccaagcaatcctcccgccctcagcctcccgaagtgctgggattacaaatgtgagccaccatacctggccatggacatggttttataaaactcatcagtaaaatattttctacttaaggccagattcctttcttttaggaagtattattttacgctgtctgctagtttccagatcatgttctatgtttaatttaaatgcaccaaacctatttagcttatataatattaaaaaaaaaaatcagtattacttagagccctggctaaatcagatgtggtgtcatttttagtagtggtaaagcttccagtattagcgaacacactatagtaaagttcagaagaaaacgaaatctgcttccatagtgaggaaaattatttgtctcgctgacatactayagggaagtatatgacaccagcctcaaattcactgtgtgttaaaccagcagatgagggaatcactaaggtggagtggcaggtgatgcaaagggagacaatgggtgctttttccaggcagaatagtctaggactctttaggacacaggcaaacaatccaagacagttgaaagagaacaactataacaaat

SEQ ID NO: 779285 - DNA, 632 bp, Homo sapiens
atgtttttacgaaaaatgactattttccataacaaattttagtgagaagtatggcattgttttatatttttgcaaatcttatttaatgtctggcttaatagacacctggattcttatatccgtttctgtattcagtctgttgtgatattacacatcatggagcctctggaaaacacccattgtgccctcttgagagagtaagagtgagaagaacaattataatggtttgaccttacagatcctccctcagatagggggattctggaccacgttttgagaatagctcttctagaccaaaccaactcccacgtgggcatattttttgttttgagtgaatatggaataccaaagtgtcactttctgagaaacatgactaagaggaagatttataagtgagggagttttgtataaaatccctttaacaagatagcatttaaaaaaaatctatytgttttttaagaaacttggaaaatacctagttgtttttaggtacttctttagacaggagactaaaactttttatttatttattttttcgagacagggttgtccaggctggactgcagtggtaccctcacagctctctgcaaccttgaactcctagtctcaagggatccttccacttcagcgtc

SEQ ID NO: 779286 - DNA, 644 bp, Homo sapiens
acacacacacacacacacacacacatacattcaaatgtctgggtagtcatctaaacactaacaatgactaataattcacagagctccaactgctacaatatttgtaacgtgataaagaaattataactttaatatgcaaagatgacttcatgatttaaaaaatgacaagtygtatatagtagtgggcaaaagtcataaaactcgcaaaagaaggaagacagtgagagaattgtgttaaaatgggccaaggattgattttaatcggatatggtaagacatgcagacctggataattgtcaggaaagaactttatactcagatcctagaaacaggagggcaggtcatgctcgggggctactcaggggagcaccgggccagtcaggaggcagaagaggaagagtggggagcatggcccagagtctttagtggggttttgcagggaagaatgggtgatgcagcgtagctacactggggaagtttaggattgaacagtttgaatattttagcaggctctgagctatggggtggttcctcgtgcacggccctctattaaggccagggaaatattggtttggtgtgtgagtttgataaaggagatggcgagggggtgtgagctctggatttgctggttcatatatcagagg

SEQ ID NO: 779287 - DNA, 489 bp, Homo sapiens
ccgtctcaaaaaaaaaaaaaaaaaaaaaaaaaaaaaaacccggccgggcacagtggctcatgcctgtaatcccagcactttgggaggctgaggcaggcagatcacctgaggtcaggcgtttgagaccagcctggccaacatggtgaaacctcgtctctacwaaaaacgcaaaaattagccaggagtggtggcaggcacctgtaatcccagctactcaggaggctgaggtgggagaattgcttgaacccagcaggcagactatagtgagccaagatcgcaccactgtgctccagcctgggagacagagcaagaccctgtctcaaaaaaaaaaatgaattgaaaaaaccttaagggcattacttgaacatcagttgttttactcttttatgtgatcatcttttgtgcccccaatgacttttttgtttttatatcttccagagagaggcaggagtctgttgttacactcacactgaattccctggtggctgc

SEQ ID NO: 779288 - DNA, 573 bp, Homo sapiens
tgagcgctccagcagccattgtctggtcggtggactggctctccgcgggtcattcactcacctttcccactctggattcccaagaaagggaattgaaaccattggctcctaaccagtctgtgtctgggtggggctttgcagcctcaggtcctctctcaggttactggccaccctgtcccctacactgctagttaggtggtctaaccagggctgaggggcactacaggaacccaggaacaaaatgtgcccaggggagggctgtggagcaggcagtttcccctacactgacttgcccagtcagccggcacctcagggaactttgggttttccactggaaaaccgcacactgtttttaaaacgacactgagctcagaagacctctcatgtgaacctagcactttccacaagcaacacttaatcaaaaagytaggaggtggctacatccgatgcaatgctatactctagccactgggattaaacacgttcttctcgttttctaatccgtcaattaaaaaaacctgtgattcctctcccaactttccttttaatttggggggaagaacaactgggtgg

SEQ ID NO: 779289 - DNA, 550 bp, Homo sapiens
tgtatttttttaaatcatgaagagcaaacattgctgagaaaatgacacctattcttatggatgatggtttttttttcattttttcacattttcaactttcatttagtgaacatatgtcactttttatcctaaaaaattttttaaaatcaattttacaagcatgggataggaaaactctgtcttgttaataaatgaagtgaaaaatctctgtacctttagttgttcataagttgaaaatgagtaacgtgatrtatctttaaacacaaacttccatgttagctacattagtaatgcttctttcccaggaactaataatccccaagcatattcccttttcatatcatctctgaaataatccatgctattctgggcaccatttcaacaagcatgttgaccagttcaagctcacccagaggaaaagacccaaggcgaatattcaggaaagaatgtgatatcagaaactctaaggcatcaaagtctgaggaaaaatatgaagatattctctaaatactttcgaggctggcatttaaaagaaagagaatgtcttctc

SEQ ID NO: 779290 - DNA, 632 bp, Homo sapiens
tatattgtttttgtcacaatagctttttgcagcaatagtttactaatattggggtcctagtcctctaattctttcacaaaagttatttcatgaaaatatgaaatcatatcatgaaggaatccattactttggcagaaaaagaaaacacctaaatttgttttttttctgttgttgtttctcagccttgaaactacaaaacataagaaattgtttcaaaatcaaataaactactgagtttctgcatcaattgtrgttctttggttgtacacaattacggctaacttaaacaaaagagacattcattgaaacattatcagaagttaatggaattgactggaagcctgaagaaccaaactagaaatcaataggaaccaagacagtttctggaacctagaaggcaagaaaaccaggaatggcctaatagaggaaggaatctggttagaatgctgtggatgggagatggataaattccaaatattttcagacctgtttttacttcttctgaggattcaaatctcaagaagaaagaatcaaactgattctttggcataagagagaaaaggacctgaataggagagagcaggacccctggttacagtttcatccagctaaaaaaaaaaaaaaaaaaagag

SEQ ID NO: 779291 - DNA, 584 bp, Homo sapiens
tccatgtacaatggaaagaaaatattcaaaatcacaaattcaatagttatcattaatgctttctaatacatagaaaagtgaacaaattgggtggatagacaagaaaaaaagctttcaagtgtaaactccccatgtgagttccatctgtggtttggtggaagtgggcctagcttaytaggtcccctaagactggagaaaccaggcctaatcaaaaatcaaaaatctgaaattctccaaaattcaaaactttttgagcaccaccaacataatgccagaagtggaaaatcccactttggggacacctttgctttctgatggttcaatgtacacaaacttttttcatgcacaaacttatttaaaatattgtataaattacctttaggctctgtgtaaaggtgtataggaaacataaatgaattttgtgtttagagttgggtcccaacaccaaggtatctccttatgtgtatgcaaatattccataacctgaaaaaaatcaaaatctgaaacactattggttggtcccaagcattttccataagggctgctcaacctgtattatctccttcaattctaacaataatctt

SEQ ID NO: 779292 - DNA, 541 bp, Homo sapiens
caataacattacattttccattatctgtgtttgggaatttttattacaggtattcttatggtgaagttttactgatccattattttttaattttagttttgaaaaatgtcaccaccaacctgtggtgatgggaccagatatattcaggggttccaacaagtaagagtgaaaatgtctttgtatgtacaacatactctgcagacattccagtagcccacggctttaggtgaggaggatcatgaagatgaaaatgtatacatgtttcttctcaacatttccaagctaaatgcaagctttactgcttctatcatarcatctatttaaagttttgccaactcagtctccttgaataaccaaatattgaaagcatctgtaccaaaatatgtagtgacacatcaagattattttaaaaaggaaaagcaactaacctcattcattcaacaaatatttcctttgtgccactatgtgggggatgcaggggttgaagaagatccttgtccattgagagaacaacgtgtgtctccctataaaacaaagagaa

SEQ ID NO: 779293 - DNA, 541 bp, Homo sapiens
tgggaactcccactcctgccgctgctggttgcggcccagctcatggacggggccccacagccccttggttctgatgagcttctcgttgatgagctcctgcactgactccagatggcacatgatggggtaccctgcatgcatccagcctggaaaatgcagaaggagggaagasagagttagggtcctccccatttaagtcgtaatattcttctatgttttgtgtgtgttccaaaacactcagtaaccccagccaaattccagcacaccataatactcagaaaagcaacccaaaccaagaccctgctaggtgttccttctcctcttttcattctggaagaattccttcatctctactctgacccagaatagtgtggctatggaaggagatgcagcttatatataaggagctgttcatgttaccattcaatttttctattttgatgaggatgccttatccatgtgaatctgtgtcactataaccttttctcaaaattcagagctctttaagggtagctcctctctcattgttcagatatggagt

SEQ ID NO: 779294 - DNA, 554 bp, Homo sapiens
ctagagcaatggaaactcatatactctaagtgatatgattttgacttgtctttatctacagcttggttttatctaagaaggttgaagctatgcatattctacgatacagcaattcctttcctagggtatgccagagaaactctcgcccagatatacatgtaaaggatgtttgtagtatcagataggccccaaataaaaacaatcaaaaaccaatcagcagcaaaatagattaactgattgtattatagttatataaytgagtattaggcagaaagaaaaatgaagtagagctacacaaatcaacacagacgatgtcacagtattgcactaaagaagcaagccataaaagattacataaaatataactttcttgtattcttatacagtttaaaacaagttaaaactaaactatgtagtttaagtttgtgcacataggtagtaaaactaaaggagcaaaaggaatgatcacagaagtcagattagtgttccatctggtggtaggagagggacaatgaacttggaggaacatatggaggacttcaattattggcaac

SEQ ID NO: 779295 - DNA, 554 bp, Homo sapiens
ctagagcaatggaaactcatatactctaagtgatatgattttgacttgtctttatctacagcttggttttatctaagaaggttgaagctatgcatattctacgatacagcaattcctttcctagggtatgccagagaaactctcgcccagatatacatgtaaaggatgtttgtagtatcagataggccccaaataaaaacaatcaaaaaccaatcagcagcaaaatagattaactgattgtattatagttatataattgagtattaggcagaaagaaaaatgaagtagagctacacaaatcaacacagacgatgtcacagtattgcactaaagaagcaagycataaaagattacataaaatataactttcttgtattcttatacagtttaaaacaagttaaaactaaactatgtagtttaagtttgtgcacataggtagtaaaactaaaggagcaaaaggaatgatcacagaagtcagattagtgttccatctggtggtaggagagggacaatgaacttggaggaacatatggaggacttcaattattggcaac

SEQ ID NO: 779296 - DNA, 554 bp, Homo sapiens
ctagagcaatggaaactcatatactctaagtgatatgattttgacttgtctttatctacagcttggttttatctaagaaggttgaagctatgcatattctacgatacagcaattcctttcctagggtatgccagagaaactctcgcccagatatacatgtaaaggatgtttgtagtatcagataggccccaaataaaaacaatcaaaaaccaatcagcagcaaaatagattaactgattgtattatagttatataattgagtattaggcagaaagaaaaatgaagtagagctacacaaatcaacacagacgatgtcacagtattgcactaaagaagcaagccataaaagattacatawaatataactttcttgtattcttatacagtttaaaacaagttaaaactaaactatgtagtttaagtttgtgcacataggtagtaaaactaaaggagcaaaaggaatgatcacagaagtcagattagtgttccatctggtggtaggagagggacaatgaacttggaggaacatatggaggacttcaattattggcaac

SEQ ID NO: 779297 - DNA, 627 bp, Homo sapiens
ttatagaaacaataatgggagttttatatatgtaatcttgcaggtggggaggctttaaattctaaaggttgtggtgtcttcatgccaagaactgtattcactgtggttgtagataaatgtgaaagtaactttatgcttaatttaataaactttagttgattttttttttaaaaagaaaactgccagaactgaaagtaggtatagatgaatccacaattatagttggaaattttctcttgcgtttttcaataatggatagaactagacagaaaatcagcaaggagtgttggctttggcagcactttctaaaattagaatgacacagacaagattaacacgtctcctgcatatagattacacaaaattttgtgaagcgtttcataytttaaaagggggaaaaaaaaaagaaaatcaacaagaatataaaacaactcaaaatgccattaaccaaaagaatctatttggcatttacagaatattccacacaacaacagcagaatacacattttttttgagtgctgacgaaacacatggcaagatagagctatcctaggccctaaaactcaccagaacaaatttaaaagagatcgtaatcatccagagcaggtgaaaaccagaaaccattgt

SEQ ID NO: 779298 - DNA, 627 bp, Homo sapiens
ttatagaaacaataatgggagttttatatatgtaatcttgcaggtggggaggctttaaattctaaaggttgtggtgtcttcatgccaagaactgtattcactgtggttgtagataaatgtgaaagtaactttatgcttaatttaataaactttagttgattttttttttaaaaagaaaactgccagaactgaaagtaggtatagatgaatccacaattatagttggaaattttctcttgcgtttttcaataatggatagaactagacagaaaatcagcaaggagtgttggctttggcagcactttctaaaattagaatgacacagacaagattaacacgtctcctgcatatagattacacaaaattttgtgaagcgtttcatactttaaaagggggraaaaaaaaagaaaatcaacaagaatataaaacaactcaaaatgccattaaccaaaagaatctatttggcatttacagaatattccacacaacaacagcagaatacacattttttttgagtgctgacgaaacacatggcaagatagagctatcctaggccctaaaactcaccagaacaaatttaaaagagatcgtaatcatccagagcaggtgaaaaccagaaaccattgt

SEQ ID NO: 779299 - DNA, 665 bp, Homo sapiens
ttcaactaatgtctgtggaatgaacaagctggttgttaattgtgaatgtggggtgtagagggtagaagcaggataagacagtccctagtgtactgtgccctggggtatttgacagaaaaggaaagctgtcagcacaagaatgaggaagtgcctgctgaacaaggtgtgctaggaggggtgggtttccacacagactccaggcaggaaggcaccacgcaccctgtatgctctgataggtcagagaactgggcagaggtacctggaatgggaaagacgcctgctaagatcagcaaaccactcttttactagcccaggggaagctgatggctgttctcaacaggtttgagatcgtgttagtgtgcgtattacagagaaaggatactggagacacttargtgcattttcagcttgtccctgtttgttgctggtctagtatccgggcccaatccagtgaccttcttaaagctcccttcgcctaatctggaattggtttcagatttgcaaatgagaactttccgagggatagctgaggacaatgcacccacgctcacttttcgcaattgatcatgtcaggcctggacatttgttcctcatttaaggactgatgtacagcagtgagagcattctatctgcagggtgtgtgaaggattttgctatggaaaaaa

SEQ ID NO: 779300 - DNA, 616 bp, Homo sapiens
cccaattttactatctgtaaacagtttttatttacattgtcattcctttgtactttaaatttcttacatctgaattgttaattataattaatctcataaaatttttaaaaatttaaacatttcttaaaaatttttatagtaggggttgggtattactcaagagacatatttttctaggcctttgcagatctgaaaatattattccattaactttatgaataaaattaaaataggactgaatatagagtttggggtcacaacatttaaatttcagtcktataattcaacattttttgtagtaaaaatgcttcatatcagttcatctcttgcaggttcataatgtacattagtttaattaaggccttcatttgagaaggttgtttaattttgtttagcgtatcgtgtctcaagtgataaaatgatgatgatggaatttttgtgtggtgtgcttttcctgttaatatttatatcctcaggctgggcacagtggctcacgcctgtaatcccagcactttgggaggcgaaggcaggtggattacttgagcccaggagttcgagaccagcctgcccaacatggtgaaacaccatctctactaaaaatacaaaaattagctgg

SEQ ID NO: 779301 - DNA, 486 bp, Homo sapiens
catcttgccacagctcttctaggtctctttagggttaaggcatactcccttctgagaatttctggtctaaccggttgtctggcttcacgtcctgtttctatggattgtttgtaaccagcttttgctgcaactgttactgctgattaatatcttgctaatcataggttatggagactgcgtttctgttttaaggctctgttagaaattactgatgcacactattgtaaattcttatctctgtatactgtacttctgcatacagatgttatgttaaagaattacttcatcccatgtgaccatctcacctcataatcaaatgaccctaaatccctcactaacctaccccygccctcattaaacttaataataaatgctggtatatccagtgcattgttggcaccgcgggaccagaaggtggtgacccccctggacccagctttcactatcttgtgtgtgtctattatttctcaacctgccgatccgcct

SEQ ID NO: 779302 - DNA, 625 bp, Homo sapiens
ttcttgaaatttattattttgatgccttttctcccctctgaacttataaaaatatatgtgaatgtgagtgagttatttatttcataagtatcagtagattcctcatcttccctgagaagttatggattctaactttcatgattcatctttatatctgatcagaagcaacctacatttgacagccgtccactcaggcctagagaaagaaaaactgaagaggtgtgtaatcattaccgtgtaaagaaatattatggaggtaacttatgccatctcagtttataaacagtgactacatttaaggattgattaaaatttcatgattgctcactcatcagaaaacttgcttggaggaagtttctttctaattgacagctattatgagctaggataaaacaacaataaaaccacaacaaatyttgtctctgagaggtttggagattgacataaagattatacaaatgaaatggttacacagacattttcatccattgcatttgagcaaattaaaaaatgactggagtgtaactcaaagattccatttggaaactcaaaacttcatatacatgttgaagaattttagaaaatcatgacatattggtgatagaaataaagtatacaaatttaa

SEQ ID NO: 779303 - DNA, 626 bp, Homo sapiens
ggttacagcatgctgtgggcaggaccccagttatcagctggcttcaggtctgactcagcacagtaacagtgatggtggcctcaggggtgcctgtgtaactacacccccagctttaggtggttcagaacagacagagagacagactccatttttgggggagatagtaagggaagaaaacaagagtctctgtctggtattcagaaaattctgaatcttttccgagaccttcaaggcagtamctctatgagtctgcaaaaaccacagctttatttggcttagggtgtcccctaaagtagacataccttagatcacaacacccaaagtcttttgaaatatctggaaatcattctgcagaaggatgggtacaaagaaactcaaacattgaagactaccataaatacctaaccctccaatgcccagacatcaacaaacatccattagcatcaacaccacctaggaaaaagtgacctcaccagatgagccaaataaagcaccagggatcagtcctggtgaagcagagatatgtgacctttcagatagaaatttcgaaatagctggatagagcaacctgaaagtaatacgagataacacacagaagcaattctcaattctgtcagataaattta

SEQ ID NO: 779304 - DNA, 644 bp, Homo sapiens
ggatacaattacattgaaacttaatcaattttctctccatttttttttaattactggaagatgtgcttaaaattccaataatggttgtgggcttttctaattatctctttaattctgttaattgttgcgtcatatgttttrcagttgtggtatatgatgcataggaaattctgaatgctatgtcttcctgatgaatagacaattttatcactataacatgtccctctttatctctcaagtcttttatctgatatttatggccataccagcttcctgttactttttattcacactttgactctcaatgtatgtgcctttacatttcaacatgtaattattacataatttgtggtgtgagtaattggttttcatccattattaaaatgtctgcttttaaattagacaacttacactttttatatttagttaattgttaatatgattacacttatgtctgccattataaaatttattttttatttctctaatctcttttgttgatgtttttgtagttttctttgtctcatagttcctgcatcctttacggaggacattttagggatttttggtttacataacaattatatttctccattgcctttattgctatacttcaccatttttagtgactgctctaggatgaa

SEQ ID NO: 779305 - DNA, 644 bp, Homo sapiens
ggatacaattacattgaaacttaatcaattttctctccatttttttttaattactggaagatgtgcttaaaattccaataatggttgtgggcttttctaattatctctttaattctgttaattgttgcgtcatatgttttgcagttgtggtatwtgatgcataggaaattctgaatgctatgtcttcctgatgaatagacaattttatcactataacatgtccctctttatctctcaagtcttttatctgatatttatggccataccagcttcctgttactttttattcacactttgactctcaatgtatgtgcctttacatttcaacatgtaattattacataatttgtggtgtgagtaattggttttcatccattattaaaatgtctgcttttaaattagacaacttacactttttatatttagttaattgttaatatgattacacttatgtctgccattataaaatttattttttatttctctaatctcttttgttgatgtttttgtagttttctttgtctcatagttcctgcatcctttacggaggacattttagggatttttggtttacataacaattatatttctccattgcctttattgctatacttcaccatttttagtgactgctctaggatgaa

SEQ ID NO: 779306 - DNA, 601 bp, Homo sapiens
agtgtcaatatttttgtttttgcttttaaaatttactcttgtattataaccttaaagctgtatagttatccactgacttaaaagcaacaacaactcttcttttagtgtgtttttcagcacactagctacttagtaacctgtttacaggataaccaaactttaacgtacaagctcaaattattgggatgtgatttatyggttaatttacacagatattttactaaaagataaatcatcttaaatgacagttttaatattttattaaatgttttcttttagtcttagaaaaggaacttcattctattgcctagaagtgggtaatacacttgtatgcttttactccctgagttttggaataaatcatccctaatacgctttggtagctaaggaaacaaggacatctttagttcccatcttctcactgagcctaaatgagaccaccaggcagtcctctgacatgtccccagctcagtgttgctgaaaccactgtttgtgttaccaggacccgtgcgagctcttagtaaaacatggtaggtatagaaagtgagaataagggtgtagtgacatcacagttttggagaataatttgtgtttattgaat

SEQ ID NO: 779307 - DNA, 601 bp, Homo sapiens
agtgtcaatatttttgtttttgcttttaaaatttactcttgtattataaccttaaagctgtatagttatccactgacttaaaagcaacaacaactcttcttttagtgtgtttttcagcacactagctacttagtaacctgtttacaggataaccaaactttaacgtacaagctcaaattattgggatgtgatttatcggttaatttacacagatattttactaaaagataaatcatcttaaatgacagttttaatattttattaaatgttttcttttagtcttagaaaaggaacttcattctattgcctagaagtgggtaatacacttgtatgcttttactccctgagttttggaataaatcatccctaatacgctttggtagctaaggaaacaaggacatctttagttcccatcttctcaytgagcctaaatgagaccaccaggcagtcctctgacatgtccccagctcagtgttgctgaaaccactgtttgtgttaccaggacccgtgcgagctcttagtaaaacatggtaggtatagaaagtgagaataagggtgtagtgacatcacagttttggagaataatttgtgtttattgaat

SEQ ID NO: 779308 - DNA, 601 bp, Homo sapiens
agtgtcaatatttttgtttttgcttttaaaatttactcttgtattataaccttaaagctgtatagttatccactgacttaaaagcaacaacaactcttcttttagtgtgtttttcagcacactagctacttagtaacctgtttacaggataaccaaactttaacgtacaagctcaaattattgggatgtgatttatcggttaatttacacagatattttactaaaagataaatcatcttaaatgacagttttaatattttattaaatgttttcttttagtcttagaaaaggaacttcattctattgcctagaagtgggtaatacacttgtatgcttttactccctgagttttggaataaatcatccctaatacgctttggtagctaaggaaacaaggacatctttagttcccatcttctcactgagcctaaatgagaccaccaggcagtcctctgayatgtccccagctcagtgttgctgaaaccactgtttgtgttaccaggacccgtgcgagctcttagtaaaacatggtaggtatagaaagtgagaataagggtgtagtgacatcacagttttggagaataatttgtgtttattgaat

SEQ ID NO: 779309 - DNA, 615 bp, Homo sapiens
cacccttttcaacaattgctgctggggtaattggctaaccacatgtaggagaatgacactggatcctcatctctcaccttatacaaaaatcaactccaaatggattaaggacctaaacctaagacctgaaactaaaaattctagaaaataacattggaaaaaccctactagacattggcrtaggcaaggatttcatgacaaagaacccaaaagcaaatgcaataaaaacaaagataaatagctgggacctaattaaactaaacagcttttgcacggcaaaaggaatagtcagaggagtaaacagacaacccatagagtgggaaaaaatcttcacaatctatatatctgacaaagaactaatatccagaatctacaacaaactcaaacaaatcagtaagaaaaaaacaaacaatcccatcgcaaagtgggctaaggacatgaatagataattctcaaaagaaaatatactaatggccaacaaacatgaaaaaatactcaacattactaatgatcatggaaatgcaaatcaaaaccagatgttggcatggatgcagtgaacagggaacacttctacactgctagtgggaatgcaaactagtacgacctctatggaaa

SEQ ID NO: 779310 - DNA, 642 bp, Homo sapiens
aagcaaattatcaatatcagaaatgaaacaagtttatcactatagaacctacaggtattaacctgactcgaagaggatattataacacctttttgccaattacacaccatagataaaatggaaaacacattccttgaaaacacattkcacgaagccaccacaagaaacagaaagtttgcatagtactgtatctacaaacaagttgattcggaagacacttttctacccaaatgtcttcactgttgaattttctttaacatttaagggagaaataataccaattttacacaatcttccaaataatttaagtgggaaaatttctctctcattttatgaggctaacgtaatcttgataccaaaggctgacaaggaaagaaaagtcataggccatcctctcagatacatagggacaagaattctactcaaatcttagcaaaatgaatccagtgatatgtgaagagatcagtatcttacagtaaagttgggcttattaatggagaatgtttggtttaaaaattgaatattaatttttaataaaggagacaaaccatatggtcatctcagtagatagatgtagagtctaagaatagatagaaagtgatccgatctgatcctgtaaggctttctaccaaagacctacac

SEQ ID NO: 779311 - DNA, 815 bp, Homo sapiens
acatcttgcatcagcatgacctggatgtgagacatggagtgaaaggaaataattagtaacgtttaaaatttaatgattgccctattggattttggacttgaatggggcctgtagccccttcgttttgaccaatttctcccatttagagtgggtgtattttttcaatgcctgtaccccaattgtatctaggaagtcactaacttgcttttgattttacaggctcataggcagaagggactagccttgtcttagataagactttggacctggacttttggattagtgctggaatgagttaagactttgggggactgttggaagggcataattatgttttgaaatgtgaggacatgagatttgggargagccacgagtggaataatatgatttggctctgtgtccctacccaaatctgggatttgaattgtaagaacccccacatgtcaagggcagacctaggtagagataattgaatcataggagtggtttcccccaaactgttcttgtgatagtgagttctcacaagatctgatggttttataaggggtttccccccttcacacagctcttattctctctcttgccaacctgtggggtggtgccttttgtcatgattgtaagtttcctgaggcctccccagccatgtagaactgtgagtcaattaaacctcctttctttataaattacacaatctcaggtatttatttatggcagcatgagaacaaacaatacaataacacagatcactgaagcttaaaacttattaaaacatgtccttataaatgttttatttctgaaacagggttaaccagact

SEQ ID NO: 779312 - DNA, 519 bp, Homo sapiens
ctaacccagctgtgagactcacaccctagagctaacttctatgcactaacccaactgtgggactagctcaccagcactaccttctgtgcactaaccctcctagatgtaaatcaaagcattggggtccacatccctagcacaggcatccctgagtgtgattcagatgagtgtgaggtgctgctttctgaatcattyggtactttagtagggaaaagagggaaagttttctttgggtacatcttcccagtaagtaacatctcctcttccactgggaaaattttcaagatatcaggcaacattaatctcacatatttagtatttgcccagatctgactaggcaggcatggagtaaatgccctaaaacaggtgtaatctgatttccccaatgtacttttagaaaggctaaagattttatgagcaatttggactaccaaggtgtagcttcttaaaatattcagaaaaccaaaataaacaagggagtcaaatcttccagatgaggaatatggtaatagctatgtg

SEQ ID NO: 779313 - DNA, 635 bp, Homo sapiens
aactctgttgagaaaaaatctaggtttaatatggtcgaagttagaacaccaaaacgttaaagttcctagacaataatatagaggtaaatactcttgattttggtatagggaagtattgcttaaatggggttaaaaataccacccataaaggaaaaaatggacaaattgaactccattaaaattaagttctgttcaccaaaagatactattaattaagaatgacagatgtagagtagaatgggaaagctcatattcagaatatattaaaaatttccayagatcaataagaaaagacatactattttttaaaatcagcaaaacactttacactcacttcacaaaaaagaatatctaaaaactgaataaatacatgaagacatttcatctctttagcagcaactcaaatgtaaatgaaagcacagtgagatagtatgctcccattagaatctccaaatttagaagattgttattttcaagtattatttcaagtattgatctgtgaaggaatatgtgaagcaatataggaaggctcatgcaatgtggtgggaaaccaccaaattagtactagcactgtggaacacattttaacacgtctgctaagtgtaagatgtacttacactatgaactctaattcc

SEQ ID NO: 779314 - DNA, 591 bp, Homo sapiens
ggagggcatgtggatcccacccagcgcagaacgcactggccagcgggccgcttggcaagcgccatgggccgctggcgaccctcctcagctctgcattagtgagaggttatgtagaagaggaaagaaattttccttgcttagccgatttgtcctccctctctgcttactggttaggagatagaacccagatccgggtggcaattcacattccattacaaaactctacacagcttccgggctagcaccagcacacatttggggaacatcggarggattttcttcttcttttgtgggtggtcatgatcgtggtagcggagagacatagaagggtgaataaaaaatataacgatttggtaagtcagagcacctgtctgggatttttattaacggaaaattaaaccttcgttcttaagagtttaagcttagccctttctaagtcaatggaaacaaagtgcctgttggataagaatgctgaaatagtaagacatttctgtctttaaaaaccttaaaatgatttctgccaagacagagtttccagtatacccacatatatttgagagggtttgttttgttttgttgtttgtttgtttc

SEQ ID NO: 779315 - DNA, 602 bp, Homo sapiens
gtttgagaccagcctgggtgatatagtgagactccttctcaaagaagagacctttataataattttgtttttcaaggagagggttttaaaacctgctagaactaaagattgattgaagtcattttgaaaaggcaggtcctcatataggtggcaaacttgaaaacccttgctctttggctacaggtcaagaaatggttcaactattttgacttgacttaaaattctgtagtgactccataaccatctccagctccttccagccatagcctaggagtggttctgcatatccagagacccagagaaagatgcctgtttgtggttacagcagtaggtctgcagaccttggcctttactgtgctctctgaaacagttcagtgactcagtttcagcactgatagtcacagtttgtggcaagttctgccaacytaagtactcaaagagttacttggggaaatcttgccacatactcagtaagaaacacacatcaggcacaccatataccagccgtactgcagaacactgccctagtgctggccctacagatccaagtcctaaaggcaattccgtctgccaagaaataagacaggattaacaactaccca

SEQ ID NO: 779316 - DNA, 547 bp, Homo sapiens
atttctcagccggccgacacttatggaaaatagaaagactgggggcaggttccccgacagtagagaagtaaacatttgcaagttctacacacatgatatttcagaagaaaaagttggacagtctctgacctgagacacattcacctcagaataagccatttctttctttttctccttctctgtgatcccttcccaggtgtgattatctgcacaaattacacctgtttcttgagaatatgcctttgaagcatgagcaaaactccctcccctgaaaccaccacacccacaggcagamggacctagaattgcagataaagactgcctttgttctttatcacaagagaggttcagaaccagtaaaatcctacataaaaaccaaaatgtgagtttcccctttccatcactcagttgcctttctctgccacagatgccagaaatttctactgcagcaatgggaatatgggccacactgacctgcctctaccaaatccaagcagagcagtctctatgatcttcatttggaactaaagctaaactcacctctcgt

SEQ ID NO: 779317 - DNA, 594 bp, Homo sapiens
tctaaattatggaaaactgatcatcaaaaccattcttttccttctaggtaacatgccttagaaacataagctgaacttatgtataatacctatggagcttcatcttgcaaatgcctgggtaaatgtaccgacatgacttcagatgaccccaaaatgcaatgacaaaaatgaaggtcttatgacatttctaaattaatatatttccatgcacaattggaaacggcaggttttagaatgaaatttaatgaaaggccttctttctgttttgcctggctacattctaataagagatttcaaagtacattttaagagggctctttcacttcctcaaaaaaaaaccttttaaatgttcaaamtgcctgtttgattgctgcaggatttacaatacatactttaactttttccagtcttttctcagtctctcggagatgtaaatcttaccatgtatttgaaatgttaacatccagagaattagcaaaacagcattctagctgagatcaaattggagaaaaaaaaattgaagtttttttagaccaaacctcaaaattttatttctcaatgaattatctctagcttaggcaaaaaaacattaca

SEQ ID NO: 779318 - DNA, 658 bp, Homo sapiens
ttttcttggccagtacctgtgccactaaattgaagggtaatgtcttttaaaatatctggtcactgctctctctacatagctctgaaaaaacccagtactggacaaattctctctaacttttccacaggcatggccaccaatctgttttagattaagattctatttgaaaaaaatctgctaattatctgcctggctttcaaaaaacagcttcattcattttattggaaaaaaatgtttttgccttggtgaggtgtcacctcccatgaacacatgattaaaaatatttttataagcttagaaaaaattactgataaaactgttacatccattgcagctcaaaaaaaagctactgattcactggctacgattatactagacaatcatattgctttaggttacatatattacctgagcaaagatatgtatgtatggtgggaaatatctttttattgtgtacacataaatacttcctacraagtagaaattttttaaaaaaatgagttggccactgtcacaaattctccaccctgcacaagagagaaactgatgttttcatgaatgttttgtaatttacgtgttaatctaccacactttcttgtagaaatgtatttatttttctgcaggcatcatgagagagacatttcctctgtcttttccc

SEQ ID NO: 779319 - DNA, 639 bp, Homo sapiens
taattttcttttcataaaacattctttgtataatcacctcagagattatgaaagtgactttgataaaatttaatggtgttcacaaaataattttcacgtgagtaatttcacagtgcgtgtattgtatgttatttagtgtattttatattttgtttcaattagagaatgctattgaatccagtttttgtttagttactgttcattttactttataaaattgacataattgagtttattaaatttattgggccaatttaagtaaacagttgaacgtttcataagtcatgaggtctttttggcatatacatgaagtaaacaaagacaatactagctatgtaatagaagctacataattagaagtaaatattctttttgaaattggcytgtggtctcaggtgaaaaatggaaaatatctatagtaaaaaaaatgacattaattctgcatatgaagagagcataattgtacccatgccacacaattgactcacaattgaaacaagatgaagagatggacattttagcaaaactaagtgaaaaccttgtaaaattttcagattatgtttctacatttaaacatctactgggggaggcagaggccaattctatgcagtcaaacctggaattgctgacacaggttaa

SEQ ID NO: 779320 - DNA, 596 bp, Homo sapiens
atccttgtatccccaagtcccagtgattgtgacagggtgccacccattggtgtccaagcagcttccaccctggttaacagggaggcctaggggggtggaaatatttgctcttatcctatttccccttctgtcagtggttctggagttcactagacctcacttattccacagatcctagcatgatatttatctatgaaatgggaggcttggtttaatcggctggaattagtcatgctcacctgcactgtgccttttaacctccattatctgcctgtagatttctcaratccagtattctttcctaaggcttcaacttgaagcttggaattgaggttgggacaaaaatatgtctcaggggattgcatagactccttaccatgagctgaatgctaagatgaagctgtggaattaagtcctctttccacaagggagagaaaagaatgtcttttgacacacccagataactagtggctatagttatgcttgctgagattgcgatgggcaccctatttattcccattcctctgcaggatttgcagaataattgcccagaagtagaatattaatccagatttttacattacccatcccttttt

SEQ ID NO: 779321 - DNA, 736 bp, Homo sapiens
ttcccaagcgtaacaatgagagtgaacgtctcttctgttagcttggttcaagtgtaagagacaacactgtgcctgtgagttagtcaagaaatgacttccctttgacctgtggccaaatccacatacgacagtcacgattccaactgtggtctgcatccatatgtgagatttataacctcaccagtgggctgtgtctaggtttaagggtgacaatcccattgttggctgggtgcrcctatgggagtcacaatctcacctgcgtgttggaccgtgttatgacatagcttataccacccaagggctttgtaaaatatttgtgtcataatctcccatgaccttttataagaaaacccagaaccttacctgtgtccctaagtctagccagaagagtaaaaaaatctgttgttttggttgagtctatgtatgagggtcattatcatgtccactaactgggcctgggtatatgtaaaaatttcacctctgggtgtggatcaggcaagagtcacatcacctgaattctgggccaggaatatgtcaacattcttcttgtgtgcagtgccatagcaggaaagccacatcgcctgagtgctgggcttagtgagatgttacaacgccttctgtggacataaaatgatagtcacgtcacttatatattgggtccagaaatatgtcacaattcccactgttggcatggcccaggcagaagagtcacatcatttgggtgcaggatccagcg

SEQ ID NO: 779322 - DNA, 647 bp, Homo sapiens
gtggccaaatccacatacgacagtcacgattccaactgtggtctgcatccatatgtgagatttataacctcaccagtgggctgtgtctaggtttaagggtgacaatcccattgttggctgggtgcacctatgggagtcacaatctcacctgcgtgttggaccgtgttatgacatagcttataccacccaagggctttgtaaaatatttgtgtcataatctcccatgaccttttataagaaaacccagaaccttacctgtgtccctaagtctagccagaagagtaaaaaaatctgttgttttggttgagtctatgtatgagrgtcattatcatgtccactaactgggcctgggtatatgtaaaaatttcacctctgggtgtggatcaggcaagagtcacatcacctgaattctgggccaggaatatgtcaacattcttcttgtgtgcagtgccatagcaggaaagccacatcgcctgagtgctgggcttagtgagatgttacaacgccttctgtggacataaaatgatagtcacgtcacttatatattgggtccagaaatatgtcacaattcccactgttggcatggcccaggcagaagagtcacatcatttgggtgcaggatccagcgatatgttacaatccttact

SEQ ID NO: 779323 - DNA, 422 bp, Homo sapiens
ctgctgcaggtccatgtgcagtggctcacatctgtgtaatcctagcactttgggaggccaaggtaggaggattgcttgaggcaggagttcaggagttcaagactagcctgggtaatatagcaaggctctgtctctacaaaaatattaaaaatgggccgagtgtggtacacatacctayagtcttagccacttgggagcctgaggtgacaggattgcttgagcccaggagttcgatgatacagtgagctataatcataccactgcactccagcctgggtgacagagcaagaccctgtgtctacttaaaaaaagaaaacctcctctgctgaaaacccatgcaaaaggccagtgctcttttctttatttgctaggtggaaagatctgttggtcacacatggattttcccatccacatctgcacct

SEQ ID NO: 779324 - DNA, 623 bp, Homo sapiens
aacaataaaaccagaggaatcacattatctgactgcaaattatactatagagctataataaccaaaacagcatggtactggcataaaaacagacacatagaacaatggaacagaatagagaccagaaacaaagccatacatctacagtgaactcatttttgacaaaggtgccaagaacatacactgggaataagacagtctcttcaataaatggtgctgggaaaactggatatccacatgcaaaagaataaaaccagacccctatctcttgtcatctacaaaaattaaatcaaaatggattaaacacttgaatctaagacctcaaaatataaaattactgaaagaaaacattggtgaaactctccaggacattgaactgggcaaggatttcttgagtaatactccacaggcacatgcaaccaaagcacaaatggacaaatgggatcacatcaaattaaaaagcttttgtacagcaaargaaacaatgaacaaagtgaagatacaaaccacagaatggaaaaaatatctggaaattatccatctaataagggattaataaccagaacatgtaaggcgctcaaaaaactctataggaaaaaatctaataatccgatttaaaaaat

SEQ ID NO: 779325 - DNA, 615 bp, Homo sapiens
taaataggtaacttctattttagatatattagactttctaagtaactaatgagatatacattaagatatgtatttgtgtatcaaaatatatttaatttctttttttatcttagtgacatgggaggtagtgaacctcaagatgatttgttcaagtattttccaaagrgcttactagagtaagacagccaggagaatcatttatggacagagtgctccatcacccaagatttcaaagctccttacctaaaaacaaccaaaggacaagatattctgccctaggaggaaaatataatgcatagcttccttttctcttccttccttcctttctctgtccctttctttctcttccttcctttcttccttccttccttcttccttccttccttttctttctttctctttcttttttttttgttaagggattcatctcattttcagaggggtaagtatttcctttattaaggttttatctagcagtaaccagtaataaaaggggaaagggggatagtctttaccttgtataactgtgtctttctttaggtagtacatttttcacatcattctttggctgtattaaagaatattgtccttacagcacagtagacttccaaactt

SEQ ID NO: 779326 - DNA, 628 bp, Homo sapiens; identical to SEQ ID NO: 765173

SEQ ID NO: 779327 - DNA, 628 bp, Homo sapiens; identical to SEQ ID NO: 765174

SEQ ID NO: 779328 - DNA, 455 bp, Homo sapiens
ttgcagatggaaaagtaaaatatggatataaactagactcacaattatctgcattaagatgatagggacaatcccaactagtaggaaatcaaacacagttttatttagctttggaatgcttctatatatgactatatattttggtattctgttaatttgatattaacttcaaatcaayagcaaagccagattgtgaggctctatctcaggagttgctttgaaattggcgagccaagaaatgctttgtgtagcgtgggctcttgcctttgtcaccttaacatttttctgccttttttttggctttgatgcttaggagtgtgcttggcctaaaataggagcctgtgactgccattcttcctcctgcttcttcttttctttgttgttatggtgtttgttattgtttgtattattattattcctcttgatataatctttagaagcttttcaattttctg

SEQ ID NO: 779329 - DNA, 537 bp, Homo sapiens
gaaaaacagactgctgattcttgacttagagtaagggagcgagaaagaaaagtcagaaacgattttgagaaatgatttactatagaattcatcgtacatgctggtggatgtgtgtagtaggagaggaagagggaagtctcatgaacaaaccttagtttctatttggtgacygtgttcatggtcatgtcagtaacttgcaccaaaaacaaatgagacacgtttagcttgggggagacagagaatgagtttggttctggacatggtcagtttgaaaggcctatgccatcttcatgagaagatatccaatacgatgctggaaataaagagtcacaaaagaagaaggaataaactaaatccaaaatagcaagtgctttttcaagttctaacatggttataaaatatcctttactttgtgtctataaaataacctggttataaagtatttaacgtggttagaaagtattcaaagtctcccatacttttttccgttgtatagaccatagtccaaaagtccttaaactcagcaagttactactt

SEQ ID NO: 779330 - DNA, 600 bp, Homo sapiens
gaatcaaatggaatcattgaacggaattgaatggaatcgtcatcgaatgaattgaatgcaatcatcgaatggtctcgaatggaatcatcttcaaatggaatggaatggtatcatcgcatagaatcgaatggaattatcatcgaatggaatcgaatggaatcaayatcaaacggaaaaaaacggaattatcgaatggaatcgaagagaatcatcgaatggacccgaatggaatcatctaatggaatggattggaataatccatggactcgaatgccatcatagaatggaatcgaatggaatcatcgaatggactcgaatggaataatcattgaacggaatcgattggaatcatcatgggatggaaatgaaaggagtcatcatctaatggaattgcatggaatcatcataaaatggaatcgaatggaatcaacgtgaaatggaatcaaatggaatcattgaacggaattgaatggaatcgtcatcgaatgaattgaatgcaatcatcgaatggtctcgaatggaatcatcttcaaatggaatggaatggtatcatcgcatagaatcgaatggaattatcatcgaatggaatcgaatggaatc

SEQ ID NO: 779331 - DNA, 634 bp, Homo sapiens
tacatggttggaggggcagtttgtttgcaagaagtctttgtgcccggggctgtttaaaatgttctgtggagcaaatctgcctttgctgcttcatgccactgggcaattttcatatccttggatgagattatttgttaattctttggcttaatggttattttccaggggagtttgtgtaaatttgaattcctgtccaggtggtggcatagaccttgaatttctgcttctaatgtctgattccttattttttttacttcccaagactgtaaagaagttcagacttcttgtactttctttgttctgtgagagtaattctgttccgcttttcactgagggaaagcaggttaagcctgactcaggtatgtttttcccacrtctgtagctcttggcaatgttctcttccctgaaaggagtagaccacatgcaggcctgtctcagggaagaccctctctgtgaactcctgcatgaatgatgaatgcatgctcacctcctgattctcatccctctttctttctgtctcttatacctgagattttattttgacttattttaggctcagttataaattgatgtctggctctaatttgggaagcatttctgtgtgccctactgagagaagccattccccattagc

SEQ ID NO: 779332 - DNA, 502 bp, Homo sapiens
gtgcctgtttctgtatattcctcctgtacatcctcctgtgcttcaacaatcaccattttaagtacctgccattaattcatccaacccttaggtatcaagccccagtgctgtagaaggctcaaactaggtggttgggggattattgtcacagatgctgtactcgaggaggatataacttcatggggratatataaataataatagcaccataagttatatcttatcaggcattgagctgtaagattggagaggatggtaataattgtgtatattcaaagtaacacctgaagatcttttaattaatccacaaagcacagaatatacagttctactcacaggttaatgatgatctaatgaatccattaaggctagattttcctctgtcgctggaacaaagaacagattcttcagtcaagcaccaaatagagtgggtggctatgtttatgggctatggcatatgaaaaaaaatacatgcatgttaatgcaaaagtcagtcttagta

SEQ ID NO: 779333 - DNA, 502 bp, Homo sapiens
gtgcctgtttctgtatattcctcctgtacatcctcctgtgcttcaacaatcaccattttaagtacctgccattaattcatccaacccttaggtatcaagccccagtgctgtagaaggctcaaactaggtggttgggggattattgtcacagatgctgtactcgaggaggatataacttcatgggggatatataaataataatagcaccataagttatatcttatcaggcattgagctgtaagattggagaggatggtaataattgtgtatattcaaagtaacacctgaagatcttttaattaatccacaaagcacagaatatacagttctactcacagrttaatgatgatctaatgaatccattaaggctagattttcctctgtcgctggaacaaagaacagattcttcagtcaagcaccaaatagagtgggtggctatgtttatgggctatggcatatgaaaaaaaatacatgcatgttaatgcaaaagtcagtcttagta

SEQ ID NO: 779334 - DNA, 589 bp, Homo sapiens
ttttttatttttttttttaggtggagtcttgctctgttgcccaaactggagtgcagtggtgcaatcttgggtcactgcaacttctgcctcctgggttcaggtgattctcctgccttagcctcctgagtagctgggattacaggcatgtgccacygtgcacagctaatttttgtatttttagtacagacagggtttcgccatgatggccaggctggtcttgaactcctgacctcaactggtccatctgccttggcctcccaaagtgctggaattacaggtgtgagcactgcgcccgggcaaaacaaaacttttatatatactaggaaaccaaaaaatacctgtgactgttttgtagtattcactttattctggcagtcttgaaccaagtgtacgatatctccaagatatgcctgtacctgtcagagttctactttgcattcaattacagctattaatctcctgcaagtcattttgtctctctgaagttttttttttttttttcttaaataggagaatactatttatcaactcatttcatgggattattgtgatagtgaaataagaaactgtaagagaaaaccttatactt

SEQ ID NO: 779335 - DNA, 589 bp, Homo sapiens
ttttttatttttttttttaggtggagtcttgctctgttgcccaaactggagtgcagtggtgcaatcttgggtcactgcaacttctgcctcctgggttcaggtgattctcctgccttagcctcctgagtagctgggattacaggcatgtgccaccgtgcacagctaatttttgtatttttagtacagacagggtttcrccatgatggccaggctggtcttgaactcctgacctcaactggtccatctgccttggcctcccaaagtgctggaattacaggtgtgagcactgcgcccgggcaaaacaaaacttttatatatactaggaaaccaaaaaatacctgtgactgttttgtagtattcactttattctggcagtcttgaaccaagtgtacgatatctccaagatatgcctgtacctgtcagagttctactttgcattcaattacagctattaatctcctgcaagtcattttgtctctctgaagttttttttttttttttcttaaataggagaatactatttatcaactcatttcatgggattattgtgatagtgaaataagaaactgtaagagaaaaccttatactt

SEQ ID NO: 779336 - DNA, 589 bp, Homo sapiens
ttttttatttttttttttaggtggagtcttgctctgttgcccaaactggagtgcagtggtgcaatcttgggtcactgcaacttctgcctcctgggttcaggtgattctcctgccttagcctcctgagtagctgggattacaggcatgtgccaccgtgcacagctaatttttgtatttttagtacagacagggtttcgccatgatggccaggctggtcttgaactcctgacctcaactggtccatctgccttggcctcccaaagtgctggaattacaggtgtgagcactgcgcccgggcaaaacaaaacttttatatatactaggaaaccaaaaaatacctgtgactgttttgtartattcactttattctggcagtcttgaaccaagtgtacgatatctccaagatatgcctgtacctgtcagagttctactttgcattcaattacagctattaatctcctgcaagtcattttgtctctctgaagttttttttttttttttcttaaataggagaatactatttatcaactcatttcatgggattattgtgatagtgaaataagaaactgtaagagaaaaccttatactt

SEQ ID NO: 779337 - DNA, 645 bp, Homo sapiens
tgcgagaaattacctcattaaataatcttataaaaaaattgtcagatgtaacaaagactggactctctgagcttttctctataaagaatgcattgttaagttgatcgggttaaggttcagttagtccaaggtagggtttatgaataggaagaaacttgtcattcactttgtagatgagtaaagcatgtgaatttaggggaaaatatcatcagtcacttcctcaaattgtttttggaagtagcaaaatgtcaaccatattattaaataaggaaaccatacttcttaaataaacttycctagaagcagatctagagatgaggatttgatttgtgtgcaaggaatttatgaaagggagtgtgctaaggaaacaatggaagcaggacagggaaggagtcgaaggggagcaagagggagggcccaggcagaagtcctcaagctcagggcgtagatctcagccagtccctcaggtgtcctcaggagtgtcagagttttcccaactggaggagaaaaagctagactgccattttcccacccccaatggtcattggttaccagcatgtgtggaagatggcagtcctcaggcacttctggctcctggaggctctggaaggcaaagagaagtctgccaaagaatatcacagatga

SEQ ID NO: 779338 - DNA, 610 bp, Homo sapiens
ccttatgctagaggagtaaacaactaaacaacgtagaaatctcatttaagaacaaggccctagggagtgacaagaaataagtctaccccttaaatcagcacattcaactgggtcggtcattaacaacattggcactaatagcttttagcagcagggcagctgctgattacaattgggtttcctgcaactgtggctgcagaagaactgaagcctccattacaaaggcagaaaactgggggaatgcacatgaattcaaggtagaagggaaaagcaagtggagtgtgtagacttggawgaaaaggattcacaattttccatatagttaaacacaactttgcatatcagtcagtaaagggagtcaaatatatggtttggaaaactctggattattgcgaagcaagctttattatccagaatcagctcaagaaggtagtacctactgtagaagacaaggtttccttctgataaaatgatattttctgtaccaacccttgtctcttgcagagttgacaaatagcaaataagagtagagtaatacaaattataataagaaatttacatatcattgtttttctaggtaaaaaggcaaaaagctcacaccttaaacggc

SEQ ID NO: 779339 - DNA, 602 bp, Homo sapiens
gcacccgttctagtccaaacatgctatgatggactttgtttccatggggcattcaatacatatgtgaatctgagattgtgagtggcttggagtacgtactgtctcagtccattcgggttgctattaaaaaaaaaaaaaacataaactaggtggcttataaacaacaggaattcatttctcacggctctggaggctgggaagtccaagacctgccaaggtattggtggatctggtgtctggtgagggggagttttctgttcatagatggctctttctagctgtgacttttcatggcagaggggaaaatgcactctctggggcctcttgtataaggtcactaataccatatgtaaaggctctgcatctcatgacctacttcccccccaaaaggccccacttcctaacatcactttgggtgttaagatttcagcataktaatttggtgggggtcacataaacatccaatccactacatctactttcttcaaaactgtaggcaagctgtaaagaagggaaaatcatttcagcccaagtattcgccctgctttaactttggagcaaaagcaggaaatagaaggaacttatcattcattgactgccta

SEQ ID NO: 779340 - DNA, 591 bp, Homo sapiens
agatgtatcctcagtaatgcagaactgtgagtaacagcacatatcctattactgatatgtctcccctaaaccactgagtcatctctgtcctcctaacggtggcaccaagagggcttctgctttccctgtcctgcctgcccaggcctccataaccgtggttcatttggtggccacagttctaasaaatcttcttgttccaagaaatcttcagattctgtaatctgctggcccagaaaatctctgttcctgactttgagcccactttccactttgagcgggtcaacgttgatgctatctacttaggagtctcctgtccttctgtcttcattcttctaaatgattctgcaactatgagacccatgatgctgtccagaacacgctcttctgttgtagctcccacatttagctcctggtacttttccccaccgacatccactggcccagctcccaccaaaacctatcctacctctgtatctccaaggctcactcacagtggctgccaccaagactgcaggacacctttctaaggagataaccaacacttgatctctctcggccactggaagggcaagggctgaaggtaggggtccc

SEQ ID NO: 779341 - DNA, 617 bp, Homo sapiens
gattctgatgcacagagagattgatattcactttgggatgctggagtccttttctcatctcctcaagctggacaaaaatttatacacagaggaggaggagcaagtgagccttctcagaggaagcaacatttgagctggactttggaggctaagcagcagatcatagaggctaagatggaaggaaatgagagcctgctagtccaagggcaaaacaatttctctccttacactcatgtatcatcaactcagtgcaggagaaatggggaattggccaatttgggcccatgcaaaaggcttggcaggcatttgggttttctcaggtgccatatgtagttgtggctgtggacacctgggaacactragcagttgcacatactacagaaagggccaggggacaccctcagggacttgtgagtttactctgggccctgtggatttcttggtctttctttatcatcatcatcccgtagtcagaacttaatgctgttcagtgttcaagggtgccattgtctcacaattttgtgaagtgaacagaatggggatcactgtcaccatctgactgatacagaaactgaggcattttgattggtgttacttttaagttctccaggtgatac

SEQ ID NO: 779342 - DNA, 617 bp, Homo sapiens
gattctgatgcacagagagattgatattcactttgggatgctggagtccttttctcatctcctcaagctggacaaaaatttatacacagaggaggaggagcaagtgagccttctcagaggaagcaacatttgagctggactttggaggctaagcagcagatcatagaggctaagatggaaggaaatgagagcctgctagtccaagggcaaaacaatttctctccttacactcatgtatcatcaactcagtgcaggagaaatggggaattggccaatttgggcccatgcaaaaggcttggcaggcatttgggttttctcaggtgccatatgtagttgtggctgtggacacctgggaacactgagcagttgcacatactacagaaagggccaggggacaccctcagggasttgtgagtttactctgggccctgtggatttcttggtctttctttatcatcatcatcccgtagtcagaacttaatgctgttcagtgttcaagggtgccattgtctcacaattttgtgaagtgaacagaatggggatcactgtcaccatctgactgatacagaaactgaggcattttgattggtgttacttttaagttctccaggtgatac

SEQ ID NO: 779343 - DNA, 612 bp, Homo sapiens
gactaacccaaataagccagtattcacaaaaactaaagactggcttcaaatctgctcaatcccagactggattataacaatctgcccctatcttgacttccaaaagcagaaagaagtaaatgctctaaggggaaaatagcatcatccagaggctcaaattctctcttcagtttttcatacacaatgcctgacattcaataaaaagttacaaaaacaagaccaggtgtggtggcgctcaygtctgtaataccagcagtttgggaggcgaggcgggcagatcacgaggccaggagatcaagaccatcctggataacgtggtgaaaccccgtctctactaaaaatacaaaaaaaaaaaaaattagccaggagtggtggcatgtgcctgtaggcccagatacttgggaggctgaggcaggaaaatcgcttgaatgcaggaggtggaggttgcagtgagccaagagatcacgccactgcactccagcctgggcaacagagtgagactccatctcaaaaaaaaaaaacaaactttttttaaataaatgaattatgaagcatattgggagatgtgcaaggccagaaaccaagagaaaaaatagacatagaaagaaaaag

SEQ ID NO: 779344 - DNA, 602 bp, Homo sapiens
tgggtttagaacaggtgtcttcagagatcagagtcatcgcttcctttattagaaagcagaggagtcaggagacatgccatttaatgctgtgcagcaccagagtacttttctttctctggagtggactgcgtgcatcttcctaatgtttgtggcmgtcgtctgataatagactgctttagaaaatgttacacttttatttcagagccaatgttttgaagggctttacaggaaagaagtgggttcttatctctgccacatgaccttgaggaaaggtgaaaatctctttcctgctaagagttgatgcatgatttagaattctaggagcaaaaagtcattctgcccataggagtctagctcacatcccactgtggaaactaatctaacatgcagtttcctcatctgtaagtggggacgacaatattctcttttaataaggtggagattaaatagaaggattcaggtgagaacatagagcatgtggcaagctcagtgaacgtgagctgttgtcatttacatgcacgttgacatgggagcacattcacaaacccctccagatgcatagtcacaatgaaacacatgtgcatacatgcgcgcgtgcacac

SEQ ID NO: 779345 - DNA, 602 bp, Homo sapiens
tgggtttagaacaggtgtcttcagagatcagagtcatcgcttcctttattagaaagcagaggagtcaggagacatgccatttaatgctgtgcagcaccagagtacttttctttctctggagtggactgcgtgcatcttcctaatgtttgtggccgtcgtctgataatagactgcwttagaaaatgttacacttttatttcagagccaatgttttgaagggctttacaggaaagaagtgggttcttatctctgccacatgaccttgaggaaaggtgaaaatctctttcctgctaagagttgatgcatgatttagaattctaggagcaaaaagtcattctgcccataggagtctagctcacatcccactgtggaaactaatctaacatgcagtttcctcatctgtaagtggggacgacaatattctcttttaataaggtggagattaaatagaaggattcaggtgagaacatagagcatgtggcaagctcagtgaacgtgagctgttgtcatttacatgcacgttgacatgggagcacattcacaaacccctccagatgcatagtcacaatgaaacacatgtgcatacatgcgcgcgtgcacac

SEQ ID NO: 779346 - DNA, 640 bp, Homo sapiens
aaggtcctttctgtgctgaccttaccagatttcaacacaaagaaggagataggtgaatgtggtaggccattttaagactagaatggaagttaataatcatctaatctaattcatttacattcctataaactagtgtcccagagaagttaagtgactaacccaaggtctgacaggtagaacttttagaaataaaatataggatactagccagatcttcaaaatagccgccttatattaccgataacgtcaggtcaatcccatattagccaccacagcatacaactagaagaatttatttaacatgttgttaagcctagaaccccaatgtcctaattccattccagtacttttcattggaaatattttgttgctttaataatatatacctattctctactactgagcaaatatataaatgtataatcttctactttacgaaagactttattttacttgttctcatagcaacatcctgaggtaacatataatgattctytttctaaggtcacacagttcctaagagctgaactggaacccaggttttctgaccttttccagcacctttgaacacattcttatttagtcctgaagttatataatcaattggtatgtcaggataagaactcaggcttgagcagcg

SEQ ID NO: 779347 - DNA, 671 bp, Homo sapiens
tttggatgtacaaagatcttgtttgccttgagcaattttatggggctgtggaaattgaaaagaaatggataactggaaaataaaacacacagcaactacttacatgttttgcaacaaaggaaggtggcagggaaagttttaaatccccagaagactcatttagctttaaataaaacaccgatttctatttctttctcaaatttaaattaaagcaggtatttaaaattatctgtattatctgtatcttgttacaaaaataattctgcatttagaaaactacccttaggtggttgttatatttctccatttcagattgtatacttttataaggtgcagtaataacatttacaatttttttaattcctaagaattcaaaatccttacttagaatagaattataatactttatttgactgtgatatgtgctacttgtgatggtctgagcgttagaaaagcacacagacactcayacacaaacaagaataaaaatttagcacagcagggccaagatgaccaactagaagcagccaagatcggaggctcccattgaaaagaaccataatagtgtattcctgtatcagcatccaaggcatccaggtcctcttatcagaactgactaggcagctggcgtgatctaaggacaggaaggaagagctgtgtggtacagcgat

SEQ ID NO: 779348 - DNA, 573 bp, Homo sapiens
tcctaaagcttatgaaaaggaaagcacaaaggcaacagtcagtggacataaatatgctaatatcatttcttttccaagccttatgttttatttaatattgattaagtatacagagggtactagtatctggtcagaacatgtaaaattgcacaatcttcaccagtaaggaccacaaggtgcgtaagtcacagatagctatcgattttaagcttttatttctaaaagttaatgcaggccgggagcggtggctcacacctgtaatcccagaactttgggaggccgaggcgggcagatcacctgaggtcgggagttcgaaaccagcctggccaacatggcgaaaccccckctctactaaaaacacaaaaattagccaggcatggtggcaggcacctgtaatcctagctacttgggaggctgaggcatgagaatcgcttgagcccaggaggtggagtttgcagtgagctaagatcatgccattgcactccaacctgggtgatagagcaagactgtctcaaaaaaaaaaaagtaaattcagttaaaaatgtctattgggtgtggttagcaaaacagcat

SEQ ID NO: 779349 - DNA, 610 bp, Homo sapiens
tccattcaatatttattaacagagaaaagatacctatgttgcctacataaacaattccttgtggtcacagaattgttttgtaaaattcagccaatgtctttgatgtggagaggagcagaaaggtattacctggggcatgttttccttatttaaaactagtgttctttcctgaatttgataaataaaagaccaggagtgggcaagcatcatatggactcagctgaatcagtttccaagaaccccgcatttcagcccgagcacatgcaaagctggtcaccacagtggcagctggaaaagagataggtgkggccattggtcatgaatgaatgcatgtgttgggcgtactggctaaaagcaaaattctattgtgtgcctgtctacccaatgacctcatgagttgcaatgaccagctgctagcctaagctccaaattcagcaagactattaatctcttggtgctagaattcctttattggatattaagttttctatacaacggggacatgaagcaaaaattgtagaaggaggttgttgagtatctggagatgttccatcttctattctattacttagttccctgactcatttattctagctaaaagaagaactgc

SEQ ID NO: 779350 - DNA, 645 bp, Homo sapiens
acatatttaggagtaaagatggtaaattatagggatatgtattcagctttagtagatgccaccaaacagttttcaaagtgtttttaacattttatgatttcctctacagcatttatgagagtctcaattgcttcacattctagacaacacatggtgtcatgagttcatttaactgtatcccttcaggtactgtgtcaaagtaatattagttgtggtgttaactgtcattttctgaaatatggtatgtgttrtgggatgaatagtgtctcccattccccaacaaatgctcaagttgaagtaactcctaacccttagtacctcagaatgtgaccttatttggagatagggtctttaacgaggtaaaatgaggtcattagagtacgccctaatccaaggtgaatggtgtccttcattaaggtaatggagattaggacatagagaaaagaccatgtgaaatccgggagagaagacggccatctacaagccaaaaagagagtcctcaggagaatccaaccctcacccccggccaacactttgatcttgaacttctagcctctagggatatgagaaaataaatttctattatttaagccacctagtctgtggcactttgttatgacagcccaaaccaaccaatacaatatg

SEQ ID NO: 779351 - DNA, 548 bp, Homo sapiens
ttgcttatgcaaatttatgcaaccagctttaatttctccttagaaaatgggattttctttagtatcacattgtcaggctgcaaactttccaaacttttatgctctgcttcccttataaaattgaatgcctttaacagcacccaagtcacctcttgaatgctttgcttcttagaaatttttccgccaggttacctaagtcatccttctccagttcaaagttccacaaatctcaaggacaggggcaaaatgcccagtctctttgctaaaatgtaacaagagtcacctttgctatagttcccaamaagttcctcatctccatctgagaccacctccgcatggaacatattgttcatatccctatcagcatttttgtaaaagccattcaacaaatttcttaggaagttccaaactttcccacattttcctgtcttcttctgagccctccaaactgttccaatatctgcctgttacctagttccaaagtcacttccacattttcatgtatcttttcagcaatgccccactctacttgtaccaatttactatgt

SEQ ID NO: 779352 - DNA, 639 bp, Homo sapiens
tctagaaataattaagacagagacaccagacaaaatatattaattacacaaagtttataaaatagatcatgcacagataataaaataatctctccaatttaagttcatgctagatattcatatgatttaattaagtcaggaatgtggaagcaaatccattgttttctactggttatagtggagaaatatgtagagctatcagaaaatggtgctattagacactatcaatttctttgaaatgasagtatcatttattatgctggaagaagtgttccattctatacatcaattacattatgaatatacatgggaatattcctcttctcatttaatgttagaggtaggaaatggactctgaatctaacatatcctaaataatttcaaagtcaaaaagcacaagccaaaatgatactttttgcacatgtctcccttgctggggtttgagtttgtcaagctcagccacaggagttagtccttcctttcttcagtcggagctattgtgtctggctctgtttatttttgaataagttactggactgtgctacgtttaaacaatacaaattcagcaaataattagttcataatttgatatgattgcacattttgccaacaaagatgaaaccttgataaatatttaac

SEQ ID NO: 779353 - DNA, 639 bp, Homo sapiens
tctagaaataattaagacagagacaccagacaaaatatattaattacacaaagtttataaaatagatcatgcacagataataaaataatctctccaatttaagttcatgctagatattcatatgatttaattaagtcaggaatgtggaagcaaatccattgttttctactggttatagtggagaaatatgtagagctatcagaaaatggtgctattagacactatcaatttctttgaaatgacagtatcatttattatgctggaagaagtgttccattctatacatcaattacattatgaatatacatgggaatattcctcttctcatttaatgttagaggtaggaaatggactctgaatctaacatatcctaaataatttcaaagtcaaaaagcacaagccaaaatgatactttttgcrcatgtctcccttgctggggtttgagtttgtcaagctcagccacaggagttagtccttcctttcttcagtcggagctattgtgtctggctctgtttatttttgaataagttactggactgtgctacgtttaaacaatacaaattcagcaaataattagttcataatttgatatgattgcacattttgccaacaaagatgaaaccttgataaatatttaac

SEQ ID NO: 779354 - DNA, 589 bp, Homo sapiens
tctagggaagcaaactgttcatgatgcttaggaagtcttttcagagaatttaaaacagattgcatattaccatcattgctttaacattccaccaattttactactagtaacctgatatacactgctttattttttcctctttttttccctctattttccttttgcctccccctccctttgctttgtaactcaatagaggtgccccaactcactgacytaagctttgttgatataaccgattcaagcatcggcctgaggtggaccccgctaaactcttccaccattattgggtaccgcatcacagtagttgcggcaggagaaggtatccctatttttgaagattttgtggactcctcagtaggatactacacagtcacagggctggagccgggcattgactatgatatcagcgttatcactctcattaatggcggcgagagtgcccctactacactgacacaacaaacgggtgaattttgaaaacttctgcgtttgagacatagatggtgttgcatgctgccaccagttactccggttaaatatggatgtttcatgggggaagtcagcaattggccaaagattcagatag

SEQ ID NO: 779355 - DNA, 631 bp, Homo sapiens
agattatttcatatctaaaatgaatttaaaggcaaaacttrcatttttacatgtgtgaaaaatatataaaaacctttagcttttacatatattgcatttgtagatttaagaagcactttaaaagatgaatctctttctgatgtgccccgatctcaacttctttgcgtgaaccaaattacctggacaaaatcaaattatttccaagacagttaagacgtcgacatgaccatgcgtggtggctcacacctgtaatcccagcactttgggaggccaaggcaggaggatcactcaagcccggaaatttgagaccatcctgtgcaacatggcaaaaccccatctctacaaaaaataccaaaactttgccgggcatggtggtgtacacctcctataatcccacctactcaggaggctgaggtaggaggattgcctgagcctgagaggtggagtttgcagtgagccaagatcttgccactgcactacaatctgggcgacaaagtgagaccctgtctaaaatatcataaatttaaatataaaattctggtttcttttctccgtcattgtatgatgactatgtcatttgcttctatcatctgagcgttttactttgggaaagatagagtgttaaaagcgc

SEQ ID NO: 779356 - DNA, 664 bp, Homo sapiens
gtgttcactacactactcctttgctttcctttttttagggttttattgcataaacatgtattaattaaaagtagatcttataacttttaactttaccaaatgtaacaggccatttttagcctatgatcattttaaaattcaatataaatttaatatattgttaaaattaacctgtatttagcatattcctgtagcttattttgatcacagtgggtttaaaagcttgtgaaataattgccaacctttaaaaaytgggaaaggagggttcacataaaaatccaaagttctggcttttattaaatttaaaatcttaaaattgtaacatttggagatttttggtctccattcttacatacgatcaattcagataagaattaactactagttactggggactggtctttctgggccacaccagtttctacagtcccattctttgcctgcttcactagcttatgtagccatactgtggagtatgaattggtacttcctctcttagactggcagattagtagttagcaaaatgtaaaatctaatagttatgaaaactacaacattttaactctttaagataccttttttggattaaaataattacttaaatacagtgtattctggccaatccatgagaaattactgttgcttaatgctggatggtgcccaa

SEQ ID NO: 779357 - DNA, 625 bp, Homo sapiens
atttttagaattttcagtttttctgctctgtttttttccccatctttgtggttttatctacctttggtcttcgatgatggtgatgtacagatggggttttggtgtggatgtcctttctgtttgttagttttccttctaacagtyagcaccctcagctgcagatctgttggagtttgccagaggtccactccagaccctgtttgcctgggtatcagcagcggaggctgcagaacagcggatattggtgaacagcaaatgttgctgcctgatcattcctctggaagtttgtctcagaggagtacccagccatgtgaggtgtcagtcctccccccactggggggtgcctcccagttaggctactcaagggtcagggacccacttgagaaggcagtctgtccattctcagatctcaagctgcatgctgggagaaccactactctcttcaaagctgtcagacagggacaaataagtctgcagaggtttctgctgccttttgtttggttatgccctgccccctgaggtggagtctacagatgcaggcaggcctccttgagctgcagtgggctccacccagtttgagcttcctggctgctttgtttacctactcaagcctcggcaatggtgg

SEQ ID NO: 779358 - DNA, 625 bp, Homo sapiens
atttttagaattttcagtttttctgctctgtttttttccccatctttgtggttttatctacctttggtcttcgatgatggtgatgtacagatggggttttggtgtggatgtcctttctgtttgttagttttccttctaacagttagcaccctcagctgcagatctgttggagtttgccagaggtccactccagaccctgtttgcctgggtatcagcagcggaggctgcagaacagcggatattggtgaacagcaaatgttgctgcctgatcrttcctctggaagtttgtctcagaggagtacccagccatgtgaggtgtcagtcctccccccactggggggtgcctcccagttaggctactcaagggtcagggacccacttgagaaggcagtctgtccattctcagatctcaagctgcatgctgggagaaccactactctcttcaaagctgtcagacagggacaaataagtctgcagaggtttctgctgccttttgtttggttatgccctgccccctgaggtggagtctacagatgcaggcaggcctccttgagctgcagtgggctccacccagtttgagcttcctggctgctttgtttacctactcaagcctcggcaatggtgg

SEQ ID NO: 779359 - DNA, 625 bp, Homo sapiens
atttttagaattttcagtttttctgctctgtttttttccccatctttgtggttttatctacctttggtcttcgatgatggtgatgtacagatggggttttggtgtggatgtcctttctgtttgttagttttccttctaacagttagcaccctcagctgcagatctgttggagtttgccagaggtccactccagaccctgtttgcctgggtatcagcagcggaggctgcagaacagcggatattggtgaacagcaaatgttgctgcctgatcattcctctggaagtttgtctcagaggagtacccagccatgtgaggtgtcagtcctccccccactggggggtgcctcccagttaggctactcragggtcagggacccacttgagaaggcagtctgtccattctcagatctcaagctgcatgctgggagaaccactactctcttcaaagctgtcagacagggacaaataagtctgcagaggtttctgctgccttttgtttggttatgccctgccccctgaggtggagtctacagatgcaggcaggcctccttgagctgcagtgggctccacccagtttgagcttcctggctgctttgtttacctactcaagcctcggcaatggtgg

SEQ ID NO: 779360 - DNA, 750 bp, Homo sapiens
cggggtagacttcaggatgtctataacctcttaaaattacatgtaaaattttgtgggtttcccattttcctgaagattctcaagggtgtcagtggccccaaaaaagagaaaagaaatactttctagaatccaacttacccaaataatggcgaataatctcaggaaaaaggtaaattcaaacccaagttattactgatttattcttagactcacatttaatgaataccagcaggaaaaagtaaacttgagaaagaacattaatgatacagttagcatttcaaggctgcgttaaagaaaggctcrtaagtaagcttaaggatttttaaaacttcaatataatcactaaccctgccccctttccttccatatgtcaccaaagaatactcaaaaatattaatagtaacctacataaatatgttggaaatagtcagccttctgtttttccttaagattggattttcccctttactacaaacccattcctaagcttatatgaactaattaaagattctaataccaaagagctaccggtaataacctgctttcacaatgtccaaagcaagtcccatgaataaacatggaataacaattctaaaggacaatttagaaagatgcatccaggtatttttctttctttttttgactgttccttgtggagcagggctaatcgataggcagtgtgcttagatagctgcatccaggtatttttttaaatgcgtatcttttaacccagtaattctaattctggat

SEQ ID NO: 779361 - DNA, 569 bp, Homo sapiens
tctataaatcaattatttccaagcctactgaagatgagttacaggtaaaaaaaaaaaaattaattgttgttttggagctgcaagtttttagggagaacaatagttctataaggaggaaaactgatcagccattgcaatactgttctttaacccatttatagcaaatgctggttatttaatgcatttatttattcattgatgtagtatttattgtaggctaattatgtgactaaattttacttaggtaccctctgagatacctcaatatttccatcaaagatcttagaatatagaaaaataggggtcacaggaacacagagtcatattaagacaaatgtgtaattacaggacatatgacatacgtgttctacatatcttaaataatttaaacatgtaamattcattaaaataaatatttatactattaaaatgccatatacattttaattgtgaagttatatagcaactcactttcctcttctgtaaaaagaaatgataacagttgcagaacatgcatttttctcccccgcacagggaacattttcaaggatagactatatgttaggcca

SEQ ID NO: 779362 - DNA, 604 bp, Homo sapiens
tgcatcacgacgatcatcagtgaaagtgatggaagaagccaggtgtgatagctcacgcctgtaatcctagcactttgggaggtccaggggggtggatcacctgaggtcaaaagttcaagaccagcctggccaacatggcgaaaccctgtctctacaaaaaaatacaaaaattagctgggcctggtggtgtgagcctgyaatcccagctattcacaaggctgagacaggagaatcacttgaacccaggtggccgaggtttcaatgagctatcatgccactgcactccagcctgggcaacaaagtgagactcatctcaaaagaaaaagaagaaaatgatggaagataatagttcattggaaaaaatctaagtgatattaaagttatatcttctggatctcaagaataaagttataacctcatggcttttcagtgacactttattgtaaatgtaggaattaataagccctgtcaaataggtgtctttatgtgttgggggtgatcagacccaacaccaggctgtgtgggctacaaagtctggcggagtcaaaggaatgagaaaagacaagttaagagtgcataaagtgggtccagggggccaacacta

SEQ ID NO: 779363 - DNA, 601 bp, Homo sapiens
ttatttccttaagaaaataagttgcttttgaaaatttttttgtaagttaagcttagtttattcatcgttttagtggatttgggttggaaacatgcagtaagcatttgacagaaaacaaacatttgtattttccaggtttcagtttacattttgatctaaattctgcgaacagttataactaaatttacaaagctctttggggtatgattatatgkctaggtaaaactcttttaagaagatgaagcagagaggattgaattgacaaagacagctctttaaaaattaaggttatttcaagactaagaacataactgcttaattgcaggtaataacagaaaaaacttggaaataaacatcccattatttgacctccaaggcagaagactggcaccaaggaaatggcagcttcgtccctttcctgtcttgggcattggtaaaaggagttgtctagacatgtttgatttctgtttcagcccttattagtagttatgccatggcaaattattcaatttctctgactcagtttccttattcagaaaatggaagcataattcttgcctcatagggccatgaagattaaatgaggggtgtcttgaagtgt

SEQ ID NO: 779364 - DNA, 601 bp, Homo sapiens
agttgaacctttcttttgattgagcagttttgaaacacactttttttaggatctgcaagtggatatttgtagcgctttgtggcctattgtggaaaaggatatatcttcacataaaaacaatggagaagcattctgagaaactttttgtgatgagtgcattcaactcacagagttcaacctttcttttgattgagccrttttgaaacgctctttttgtagagtgtgcaagtggatatttggagcactttgtggcctataggggaaaaggaaatatattcacataaaaattagacagaacattctcagaaacatctttgtgatatgtgcattcatttaacagagttgaaattttctttttattgaccagttttgaaacactctttctgtacagtgtgccagtggatatttgtagcactttgaggcctatggtggaaaacgaaatatgtattcacagaagcattctgtgatacttctttgtgatgtgtgcattcatctcacagagttgaaccattcttttgattgagcagttttgaaatactgttttgtagaatctgcaggtggatatttggagtgctttgtggcctatagtggtgaagcaaat

SEQ ID NO: 779365 - DNA, 601 bp, Homo sapiens
agttgaacctttcttttgattgagcagttttgaaacacactttttttaggatctgcaagtggatatttgtagcgctttgtggcctattgtggaaaaggatatatcttcacataaaaacaatggagaagcattctgagaaactttttgtgatgagtgcattcaactcacagagttcaacctttcttttgattgagccattttgaaacgctctttttgtagagtgtgmaagtggatatttggagcactttgtggcctataggggaaaaggaaatatattcacataaaaattagacagaacattctcagaaacatctttgtgatatgtgcattcatttaacagagttgaaattttctttttattgaccagttttgaaacactctttctgtacagtgtgccagtggatatttgtagcactttgaggcctatggtggaaaacgaaatatgtattcacagaagcattctgtgatacttctttgtgatgtgtgcattcatctcacagagttgaaccattcttttgattgagcagttttgaaatactgttttgtagaatctgcaggtggatatttggagtgctttgtggcctatagtggtgaagcaaat

SEQ ID NO: 779366 - DNA, 601 bp, Homo sapiens
agttgaacctttcttttgattgagcagttttgaaacacactttttttaggatctgcaagtggatatttgtagcgctttgtggcctattgtggaaaaggatatatcttcacataaaaacaatggagaagcattctgagaaactttttgtgatgagtgcattcaactcacagagttcaacctttcttttgattgagccattttgaaacgctctttttgtagagtgtgcaagtggatatttggagcactttgtggcctataggggaaaaggaaatatattcacataaaaattagacagaacattctcagaaacatctttgtgatatgtgcattcatttmacagagttgaaattttctttttattgaccagttttgaaacactctttctgtacagtgtgccagtggatatttgtagcactttgaggcctatggtggaaaacgaaatatgtattcacagaagcattctgtgatacttctttgtgatgtgtgcattcatctcacagagttgaaccattcttttgattgagcagttttgaaatactgttttgtagaatctgcaggtggatatttggagtgctttgtggcctatagtggtgaagcaaat

SEQ ID NO: 779367 - DNA, 573 bp, Homo sapiens
aggcaaaggaaatatcttcaaataaaagctacatagaagcattctaagaaacttcttggtgatgtgtgcattcaattcacacaggtgaacctatcatgattgagcagttttgaagaactctttttgtagattctgcaagtcgatatttggagccttttgtgatctgtactggaaagggaaatatcttcaaataaaaaagcacagaagcattgtgagaaactactttgtcatgtgtgcattcacctcacatatttgaatatatcttatgattgaacagcrctgaaacacactttttgtagaatgtgcaagtggatatttggagcactttgagccctattgtggaagaagaaatatcttcacataaatactacacagaagtattctgagaaacttctttgtgatgggtgcattcatctcaagagtttaacttttcttttgattgagcagttttgaaacactctttttgtagaatctgcaagtagatatttggggggaatttaggcctattttggaatagaaagtatcgtcacataaaaactacacaaaagcattctgagaaacttctttgtgatg

SEQ ID NO: 779368 - DNA, 576 bp, Homo sapiens
aatcaattggaatagaatggaatcaaatggactggaatcgaatggaatggactggaatggaatgcactcaaacggaatataatggaacaaaatggaatcgaacggattgcaatcaaatggaacgagatggaatggaatggtctcaaacggaatggagtcgaatggaatagaataacatggaatggrattgaacggaataaaaagaatagaatggaatggattgtaatggaaacatatcgaatggaatggcatggcatggaatggaatggaatggactggaatggaatggattcgaatggaatggactggagtggaatggagtcgaatggaatggactggattagaatggactcaaatggaatggacaagaatggaatggagtggaatggaatggactcagatggaatggactcgaatggaatagaatcgaatggaagggcatcgaatggaatggaatggaaaggaatggaatggtatggacccaaattgaatgaaatcaaatgcaatggacacaaacagaatggaatcgaaaggaatggtctcgaatggaatttattcgaatagaatggaatcgaa

SEQ ID NO: 779369 - DNA, 576 bp, Homo sapiens
aatcaattggaatagaatggaatcaaatggactggaatcgaatggaatggactggaatggaatgcactcaaacggaatataatggaacaaaatggaatcgaacggattgcaatcaaatggaacgagatggaatggaatggtctcaaacggaatggagtcgaatggaatagaataacatggaatgggattgaacggaataaaaagaatagaatggaatggattgtaatggaaacatatcgaatggaatggcatggcatggaatggaatggaatggactggaatggaatggattcgaatggaatggactggagtggaatggagtcgaatggaatggactggattrgaatggactcaaatggaatggacaagaatggaatggagtggaatggaatggactcagatggaatggactcgaatggaatagaatcgaatggaagggcatcgaatggaatggaatggaaaggaatggaatggtatggacccaaattgaatgaaatcaaatgcaatggacacaaacagaatggaatcgaaaggaatggtctcgaatggaatttattcgaatagaatggaatcgaa

SEQ ID NO: 779370 - DNA, 576 bp, Homo sapiens
aatcaattggaatagaatggaatcaaatggactggaatcgaatggaatggactggaatggaatgcactcaaacggaatataatggaacaaaatggaatcgaacggattgcaatcaaatggaacgagatggaatggaatggtctcaaacggaatggagtcgaatggaatagaataacatggaatgggattgaacggaataaaaagaatagaatggaatggattgtaatggaaacatatcgaatggaatggcatggcatggaatggaatggaatggactggaatggaatggattcgaatggaatggactggagtggaatggagtcgaatggaatggactggattagaayggactcaaatggaatggacaagaatggaatggagtggaatggaatggactcagatggaatggactcgaatggaatagaatcgaatggaagggcatcgaatggaatggaatggaaaggaatggaatggtatggacccaaattgaatgaaatcaaatgcaatggacacaaacagaatggaatcgaaaggaatggtctcgaatggaatttattcgaatagaatggaatcgaa

SEQ ID NO: 779371 - DNA, 491 bp, Homo sapiens
aacattctggccacacggaacagggaagaggggcccaccgatgtcattgagcccttggtgcccactgtggctcagtgaaggtgacatcacacgatgtaggtgaactctgagggagatggcagctgtggcgggccttcatgggcttggcgggcctcagaaactttagcacagacactccactgggaactggactggargaaactgccaggtaccacatggcagctgaatgggctaaaacagaagaatattgaaatagtgagagagtgggcttttatgagagactggaggttctcccaacatgcacagtggagatgaaggctgagacgggcagacaagatgacgttagaacaggaccagatcatattgggccttgtcagctccaggctacaaatgcacatgtactgtggacgtgggggagcagcctcaacgctgcctcagggggtaagaggctcctggacaaggtagaaaggggccagggaaagccggcctgg

SEQ ID NO: 779372 - DNA, 491 bp, Homo sapiens
aacattctggccacacggaacagggaagaggggcccaccgatgtcattgagcccttggtgcccactgtggctcagtgaaggtgacatcacacgatgtaggtgaactctgagggagatggcagctgtggcgggccttcatgggcttggcgggcctcagaaactttagcacagacactccactgggaactggactggaggaaactgccasgtaccacatggcagctgaatgggctaaaacagaagaatattgaaatagtgagagagtgggcttttatgagagactggaggttctcccaacatgcacagtggagatgaaggctgagacgggcagacaagatgacgttagaacaggaccagatcatattgggccttgtcagctccaggctacaaatgcacatgtactgtggacgtgggggagcagcctcaacgctgcctcagggggtaagaggctcctggacaaggtagaaaggggccagggaaagccggcctgg

SEQ ID NO: 779373 - DNA, 587 bp, Homo sapiens
tagcctcaattcttacttccctcgcagccgtaataggtatacttattattgtcaggtgctgtgtcataccatgcatctgtaagttgatgcagaggctcataaaatcagcacttactaaaacctcccttaactatcctccaccttatccatggaagcwtcttcttttggaaatcaagcaaaacaactaagtcaagacatgttaaaaaaaaaaaagtttgaaaagaaagctgtaaggaaatacaaggggagaggttgctaacaacctgagttctaagtgtcttttaaaaaaattaatatgtcagtatgttcaattctttgccttctacttttcaacttcctcgtaaagcaagctttttcgattacctactctaccctgactcattccgattgcctgctacctgctctgccctgactcctgccaaagcactcaccccgtcattctctttaaattagccaaccagaattagcttagcctgtgcggtctaaccctagccaataggggaatgacgcagcaggggccacgtgtgtcagcgataagaaccccttcccctcccttgtccaagtgtgcccttaccattgctccatct

SEQ ID NO: 779374 - DNA, 474 bp, Homo sapiens
tctccttaggctaaagggggaaagagaaaaagaaaacatgcagccaaaactcagctcaagctggtcacagtggctcatgcctgtaatcgcagcactttgagaggccacggcaggcagatggcttgagctcatgagtttaagaccagcctgggaaacatggtgaaaccctgtctctactaaaaatacaaaaattagccagcagtgatggcatatgcctgtaatcccagctactcaggaggctgaggcagragaattgcttgaacccccgagggggaggttgcagtgacttgagatggcgccactgcactctagccggggcaacagaatgagactctgtctcagaaaaagaaaaaacaaaaacaaaaaacctcagcttgatcctaccttctcaaaactacctttcattatagtttcagtaatattcagtagagtggacagcatcctctaacaacattgtgcctatgaagcacctca

SEQ ID NO: 779375 - DNA, 623 bp, Homo sapiens
cacctcaaagaacagtgagagacaaaagtcaaaggcagctattttaatggacatgagaacaaaacaaacaacaacaaaaaaaagagtgtgccaccttttgaggaaaaccagtaaggacacycacaaaagcacagtagggtccatggaatttactctcactcacagtttacttttgtgttattgaatatcacaaacaatacagtgtgaagaacacatagctacagatgcctcctcccatcactttgctttcttatttgacatgaacattattgcacaaagaacactgaacactgacagtgtttccatgacaaaatcaaattacaaagataaacataattcggctgggacaggagaagctggcttctccttgggccagtgccttcccatctccttgcctgcgtgagtaagtgaattggaactactctgcatgtgatcttgccctcctgtttccaactggattttacggtttgataatttcatactatttgtctccccaccatcctatccctatccagagttcataatttgccaggaaacttagcatttattttccatttcttcctcactgcattgctcagcaaccacagagacgccttggactgattttgcaacaccccccacca

SEQ ID NO: 779376 - DNA, 623 bp, Homo sapiens
cacctcaaagaacagtgagagacaaaagtcaaaggcagctattttaatggacatgagaacaaaacaaacaacaacaaaaaaaagagtgtgccaccttttgaggaaaaccagtaaggacactcacaaaagcacagtagggtccatggaatttactctcactcacagtttacttttgtgttattgaatatcacaaacaatacagtgtgaagaacacatagctacagatgcctcctcccatcactttgctttcttatttgacatgaacattattgcacaaagaacactgaacactgacagtgtttccatgacaaaatcaaattacaaagataaacataattcggctgggacaggagaagctggcttctccttgggccagtgccttcccatctccttgcctgcrtgagtaagtgaattggaactactctgcatgtgatcttgccctcctgtttccaactggattttacggtttgataatttcatactatttgtctccccaccatcctatccctatccagagttcataatttgccaggaaacttagcatttattttccatttcttcctcactgcattgctcagcaaccacagagacgccttggactgattttgcaacaccccccacca

SEQ ID NO: 779377 - DNA, 557 bp, Homo sapiens
catacaggttttgataaagggatgacatgtagtcgccactgtactataatgtggaattgtttcactgccccaaaaatcttctgtgctctgcctatttatccctctttccccacaacccctggcagctactgatcttcttactgtatccmcaggtttgccttttccaaaatgtcatagttggaatcatacattatgtagcagtttcagattgacttctttcacttagcaatacgcattttaagtttcctttgggtctttccatggaagaactgctttttgtttggttggttgctagaataggaagcttgtaagcacagggctggaagtagcagcttttaaaattatgaaatttctctctcaactttctcctctcttaactgcaagctctaaagcagaatggagacaccatgagaaaacagatgaaagctggtggcttcctggtacttgtaagggcaaaaccacagagatggatgttatattatgcggtatgtatttataaatgggtcatgtgagtcacccaaaattatcccatctcagggaacattattacaattact

SEQ ID NO: 779378 - DNA, 561 bp, Homo sapiens
attaaagaggaaattacatttcaccttgctttcttcacttcccgcactcagcccattttgagctagggttttagaaatactctaatcccaaagcaaagggccagaaaatgtcctgaatgatgtacctgagaaggatcacccaatgaatgtccatgcacccagcattctgtccagagaaggtggacaagagakaattgagaatattctcttagcagagccaaattatctaggaacccctcagggcaccctacactcttcaaccagagctgtgtcatcggatcccagccacactcactatagctccagggtattcattttggtgtctgtgggggtaacaaaattacacagaataagtcggtggtcttaatggaatctcatcacctttgggtttagaatcaaacagaccttgctttttcatttggtcattcagttacgtggtcaatcattccctcacattcatttattgaggctctaactatgggctagattctacagtaaacagggaacacacagatgagaaagacacagtcaaaccccacctccatcatctattaactcctt

SEQ ID NO: 779379 - DNA, 462 bp, Homo sapiens
gcataacttcacatccttgttgttgaagcattccattctctggccacagacggctctgacttcctcattgtcaacgactcagcttccattcacttcaccaatccagtcctgttgtcacctcctataccttgttcctccccatcacttgggatgacccaacctgcaaaatcyatatgctcagaagtctagctctgcaacccttttgggtcacacattcatgggcctgagtcttagagtcagagaagtccacagtaatctgacttttctgaattgcagttactcttctgcaaagtgagagagtactaaatgagaccctacatgtaaagctgttagcatgatgcctggtgcataaataccaagggttacaatgagagctactgttatcaagtctgtgatggttgatttcatgtgttaacctgacaggactacgggatgcccacatatctggctaaacattatctc

SEQ ID NO: 779380 - DNA, 350 bp, Homo sapiens
aacaccatagccagagggatccttttaaaatggaaatcagatcatgcctcccctcagctttcatccttcagaggctcccatcatgtcactgcccaaaggtccaatgcctggtctttgatttcctttccagtcctctctgtgccctccsatcatctcacttctctccagccactctgagtcttcatgctattccttggaaggccaaacacaccctcactcaggacctccaaacttgctctccttcctgctgaaaagctcttcccttgagtacttagaaggcttgctctctcacttcctcttgatctttcttaaatgacacctcctcagactggcctttctctttcctccat

SEQ ID NO: 779381 - DNA, 350 bp, Homo sapiens
aacaccatagccagagggatccttttaaaatggaaatcagatcatgcctcccctcagctttcatccttcagaggctcccatcatgtcactgcccaaaggtccaatgcctggtctttgatttcctttccagtcctctctgtgccctccgatcatctcacttctctccagccactctgagtcttcatgctattccttggaaggccaaacacaccctcactcaggacctccaaacttgctctccttcctgctgaaaagctcttcccttgagtacttagaaggcttgctctctcwcttcctcttgatctttcttaaatgacacctcctcagactggcctttctctttcctccat

SEQ ID NO: 779382 - DNA, 573 bp, Homo sapiens
catagccagagggatccttttaaaatggaaatcagatcatgcctcccctcagctttcatccttcagaggctcccatcatgtcactgcccaaaggtccaatgcctggtctttgatttcctttccagtcctctctgtgccctccgatcatctcacttctctccagccactctgagtcttcatgctattccttggaaggccaaacacaccctcactcaggacctccaaacttgctctccttcctgctgaaaagctcttcccttgagtacttagaaggcttgctctctcacttcctcytgatctttcttaaatgacacctcctcagactggcctttctctttcctccatttaaactaatcattttttgccttttatctgccttatttttcttaaaagcagttttcagctccagatacatattaggtgacacatctacttgtttattgtctgttcatccctgcctcctcaccagaatgtaagcctcaggaaggcaggttcttgatttttttcccctgctgaattcctaatgtccacaagagtcctgacaggtgttttataaatactttgtgaatgaat

SEQ ID NO: 779383 - DNA, 557 bp, Homo sapiens
cattaattttcattttactcactgcatttcttaataattattttcaaaatttccattgactctctcctttcctttttcctttgagtttcactccatcagtgttttggacattgaagttagcaaatgggaaattgagacagcaaatttaggtaaggcttcctggactgtcttttggttttgcggctgtaatgaggtccgaagcaaaaggggtccccttaaccacagcatttaccatgacctggagaatgggcacattcagtgggtgaatatccctgtcattataaattagccagtcctacatggcttggatacaaaactcaccagctgccttacctggggtrtccacttggcatttgtgggtggagttgagcagtctgccttctcagggtaaacagaccttacaggacttttatccagcccatcaggctggctgttccctcgggaatacccacctgtgtgtctaaatcacatatctgcgattattcaatagtgagctgtggggcctgaatcaacccaaacgtttttttagtctgcagcatttaaaagcaaagacacac

SEQ ID NO: 779384 - DNA, 280 bp, Homo sapiens
aatccagcttagggtggttgtgtgaaagggaaacaagggatttttaagaaaaaagagtttgaaagcccagagatttatgaatcatttccaacctgtaggatkatatttctaaggcacaaaatagttcactctcaggaattattaacagtgtcaagagagaacaaatcatttataagaaagaccataatttttccacaactttttttgtacttccccgaaaaaagctatttgtgaaaattaaaaattaaggtatctaaacattgctaaataaataatgaaa

SEQ ID NO: 779385 - DNA, 552 bp, Homo sapiens
ataactccaggctgggtctcaaaacaggagcctgaaagcagacctgtcaaacagaggcaacagtggcccaagagagattaccagaggcccgtctcagacagtttcccaggaaagaggctgccagttcatcaaaacaggaggcctctgggattcagtgttcatcctgcctttgatggaacttacacagtgttttacgcaaggccctttggaggcctctttccaggagtcagcactaaattttactggtaatcctttggaaattctttgtgagttagaaggacttcagggatttgaccatctggttatgttaggaggcatctgcgcttgcaaaataaccatcgcctcgccagctatytgaaaataacttattttagaggtgcaagtagaggttttcagctgcattattaaagccactctgaaaagggaaatgtattaattgtttatagttagaagcaaatcacttaatatttaattttatttaaatgaaagtgtttaaacatagtttcccacaactcttcttgatttttaatctagtgctgaggcaattccaaa

SEQ ID NO: 779386 - DNA, 534 bp, Homo sapiens
ttcctatcatgccacaagacccctttttaaaatccaaggaaacattctgtactaagaaaaataatgtgatgaagtgaaccacttaatttcaggtaatgtttccaacccttcataacgtaaagatatcaaaatgagagttttccaacaaaaaagttcagaaaagcaatatataaatgtgaaatgataaaaacatagaattccatttctcttattagcatgactgatttctttgttaacaggatttgacccttaacacagtaaaaggttaagtctacttcatttggcattgtaaaaataattctctgatgaagtatattaccaaagaaataatgtacatcacagcattcaycagttcttggagaaaaaaagtagctttacaaattactcagtgactcaacacacaaagtggattttgcttcttcaatcatgcattatcagaatatgcaggatttctttctgtccttttgtatctgatggggatgtacaatcacaaacttaaagttagaagggaccaaatattactattatctctgg

SEQ ID NO: 779387 - DNA, 641 bp, Homo sapiens
tttctaattgactaggttcacaaagatttatcctttcatgattcaaaaaacctctagccagaatgttcccaaagttttcattcgaaaataaagtaggattttatacaactaaattcaaatttcaaacctgaatccaacgtccctgtcttcagtggtgaaaatgacaattgtatttccctaatgctctrgtgaggacctttcataataaatattgtgtttagttacatggcagaactattcatctttatggagacaagcaatgtattctgtaccgcatcaatatatgattcactgtgtgaagcaatcacagtaattcatttctcaaatttcagttctcaacttaatcctcctcctctcatttcattcaacatttgaagataatgtaaaacttgaaaaaattgctttaaaataattaacaaactaattatctactccaggttactctggaaagagtcacatagagagaagttaggtaacttttccccttatttgacttcaaagaccatagagtgtacggttcttattttcaggagagagggagaaacagaaagagaggcagagagagagagagagacagagagagggatgttttagcttctccaagcaaagtgaggaggaaagttacccagataattactgcc

SEQ ID NO: 779388 - DNA, 568 bp, Homo sapiens
atctctaaagatttggattgtagtctcatcagaaatatttatttataagccatctcttcattcactcgttgattcatccagaaatgctattcagtatttattaagtgccaggcgttgtgctaagatttgagacacagagataagataaaggtcccattctccaagactcttgtttttttagtggattaaaagctgctaatgtattccttctgtagatatacataatttcaccartttcttgtgacttcatgaaccttatttttgcaagacaacatgtcctaattcttgtcaaatttagggatggtggtattggggagctacaaaccagtcaaatcaattcaatgaaaaatcctattatttgaacaattttaatcacatctgattttgactattttatctaagtgttaacatttcactagttgagtgttacaatgagcctagcatttaaacagtcttagttatgttaacattcttaaaaacagagaagtggcagccaggcacggtggctcatgcctgtaatcccagcactttgggaggccgaggcgggcggacgcctgaggtcaggagt

SEQ ID NO: 779389 - DNA, 603 bp, Homo sapiens
taacccaaataataataataatcccagagcagacctttttttcttttttctctcttctccttcccctcttctctctccctctctctctccctctctctcctttctctttcgttctctctctctcatttcctctgtctctgtccccgccacctccccgtcttttgcaagcgtgctcgtggcgcgtgcgggacagggaagtaaggggcgtgtgcgcggaggctcttcatcccttccggagatgccgcggccgaccagcgcgctttggttcagcaagcacagaaggtgcaagccgaacaaggccattcagaaatgaggtggaggctatgaggctgatgagctstacgattaaaaatccatttttgtttaattccaagataagttttaacgatgggatttgagtgagtcagatcgcccatttggccattatatccggattaaaagaaataaattactgccttgacaaaagatgccaaccacagtggaatgaaaagcaaccaaattgaggaaacagttggggcaggatagataacttgtaatattacttaaaaataaaaatgatgaggacaaccaactcttcctcccctcccccgcgcaccttttcac

SEQ ID NO: 779390 - DNA, 597 bp, Homo sapiens
tactataatcaattatggatcatttttatcactccaaaaccctatacccattggcagtcactccctatttctccccacttccctcttccttgagtctctaggcaactactaatctactttctgtctgtatggctttgcccattctagacrtttcatataaatggaatcttacaatatgtggtcctctgtgactgagttcttttacttaacataatactttcaattttaattcatgtagtatgtatcagtacttcatttttctttattgctaaataatattccattgtataatataccacagtttatttagcacttatcacctgacaaattggttaacctttgaacataaaccaaacttgtatttctgggataaactcaatttggtcaggatatactatactatttataaattgtgggattcaatgtgttaaaatttgtttagaacttttgcatatatatcatgagggatactagttataaaggataaaattttgttttcttgtaatgtttttgtatagtttgggtgtcaggataatgctggctccatacaatgagttgggaagtggtccttcctcttcgattttctggaagagtgtg

SEQ ID NO: 779391 - DNA, 593 bp, Homo sapiens
cttcttagcaccagggactggtttcatggaaggcagtttttcatggggttggggtgtgggtggatgggggatggtttctggatgattgaagtgcattacatttattgtgcactttctttctactattattgcattgtaatatataatgaaataattttacaactcaccataatggagaatcagtgggagacctgagttcatttacctgcagctagatggtcccatctgtgggtaatgagatacaatgacagatcatctgacattagattcttataaggggcccacaacctagattgcttgcatgagcaattcacagcagggtttgcactcctgtgagaatctaatgccactgctgatccaacaggaggtggaactcakgtggtaatgccagtgatggggaaccaatgaagctttgctcactcgcccactgctcacttcctgctatgtggcttggttcctaactggccaggaacgtggtggtggtctgtggcctggaggttaggcacccctgcattaagtgattttaccttgatttctttggttgaatttgcaaatggagtttataattctacttatgtgaaggacctcaaagt

SEQ ID NO: 779392 - DNA, 593 bp, Homo sapiens
cttcttagcaccagggactggtttcatggaaggcagtttttcatggggttggggtgtgggtggatgggggatggtttctggatgattgaagtgcattacatttattgtgcactttctttctactattattgcattgtaatatataatgaaataattttacaactcaccataatggagaatcagtgggagacctgagttcatttacctgcagctagatggtcccatctgtgggtaatgagatacaatgacagatcatctgacattagattcttataaggggcccacaacctagattgcttgcatgagcaattcacagcagggtttgcactcctgtgagaatctaatgccactgctgatccaacaggaggtggaactcaggtggtaatgccartgatggggaaccaatgaagctttgctcactcgcccactgctcacttcctgctatgtggcttggttcctaactggccaggaacgtggtggtggtctgtggcctggaggttaggcacccctgcattaagtgattttaccttgatttctttggttgaatttgcaaatggagtttataattctacttatgtgaaggacctcaaagt

SEQ ID NO: 779393 - DNA, 617 bp, Homo sapiens
ctctgtatcgagtatatatatttacaattgttacatcctccagctaaattgattcctttttgttgtataataattctgtctctttttgtttttattaaagtctgctttagcaaagtgtagctactcctgcatgcttttgatttccattgcatggactatcctttttcattccttcactttcagtctctacatgtctttacaggtgaagtgwgtttcttgtaggcagcatatagttgggtcttttttgattcattcattcagcctatagcttttaattgaggaatttgaactatttacattcaaggttgttatagactggtgaggactggctcctatcactttgttagatagcttctgattgttttgcatatccttattttctttcatcttctcctattgtttatttttggatttggtggttttctgtagtgataaggtttaattccttttgcttccatattgtatatttgctctaccagtgaattttatttatacttccatgtgttttcatgatggtagatatcatcctttcgctttcagttgtaggacttgcttaagcatttcttgtaggaatagtctagtagtgatgaaatctctcagtttttgtttgtctggta

SEQ ID NO: 779394 - DNA, 603 bp, Homo sapiens
taacatgggattagctgactttcttaagctgataacaagtctttgagaatgacagttgaaagtggaaggctgccaacactctcaggagctgggacaatgggtacttcattggggcagatagggagtaagtgaaccaggatatccactatactagttttctgaagcattcaagcagttttaaaaaatatcttgtcagccaggcacggtggctcacscctgtagtcccagcactttgggaggccgaggcgggtggatcctgaggtcaggagatcgagaccatcctggctaagacggatgaaaccctgtctctactaaaaatacaaaaaaatagccgggcgtggtggtgggcgcctgtagtcccagctacaggggaggctgaggcaggagaatggcatgaacctgggaggtggagcttgtagtgagccgagattgtgccactgcactccagtctaggggagacagcgagacaacatctcaaaaaaaaaaaaaaaaaaatgcagagcaaattcacaggcaatattttggttgctctctaaaggcacagctctttctctcaaatctctgtgtgagagaaaggtcttctccttttacttacgtttgcaa

SEQ ID NO: 779395 - DNA, 603 bp, Homo sapiens
taacatgggattagctgactttcttaagctgataacaagtctttgagaatgacagttgaaagtggaaggctgccaacactctcaggagctgggacaatgggtacttcattggggcagatagggagtaagtgaaccaggatatccactatactagttttctgaagcattcaagcagttttaaaaaatatcttgtcagccaggcacggtggctcacgcctgtagtcccagcactttgggaggccgaggcgggtggatcctgaggtcaggagatcgagaccatcctggctaagacggatgaaaccctgtctctactaaaaatacaaaaaawtagccgggcgtggtggtgggcgcctgtagtcccagctacaggggaggctgaggcaggagaatggcatgaacctgggaggtggagcttgtagtgagccgagattgtgccactgcactccagtctaggggagacagcgagacaacatctcaaaaaaaaaaaaaaaaaaatgcagagcaaattcacaggcaatattttggttgctctctaaaggcacagctctttctctcaaatctctgtgtgagagaaaggtcttctccttttacttacgtttgcaa

SEQ ID NO: 779396 - DNA, 634 bp, Homo sapiens
gtccattttatataattaagtttgtttctcaaaccagatatttataagtaaattctgggcttgttttatgttttccctctatcatataaattatatttatggctaatccattcacagaactaccaagcgagaggggatcttaaaaataatttagctaacttcccattttatatacggggaaactgagggaacagtcaagagacttagtgtctttagctacttttctactctccttaatagcctttgcctaattcaaataataccatattccctgatgtcacttcctgtatgctcctctgcttttaagcaggtgkttatcccatataaagaaaatggaggttgagggagaaataacctaccagataatcggtacacttttctatgaagattttgtgaatctggtaacacaatcctttgaagcaggatgaggacgacctgttccactatcacctggctccttccttcttgaataagagtgtgaacactggagggggtcagctgatgcttattccagtctttccacctggatgctacctcctttgcaacacatatttgagtttatgctttccatttattgttccagtaaagacttggcagaagtgtgatataagacaactactatggtgtcaaataa

SEQ ID NO: 779397 - DNA, 647 bp, Homo sapiens
caggctcatatgccaatactcgtcaaagcagacacagaaatgtatcctcacaaaggaagcaacaggactagcaaacattttcatttttctcttggtatagaaaatcaaagttactaaagacacatgaccagatatgtgaagtgattgatggaaataaaatgatgttgacttttcctttttttttttttttgaaatggagttttgctcttgttgcacagactggagtgcaatgatgcgatctcggctcactgcaaaccccacctcccaggttcaagcaattttcctgcctcagccttccaagtagctgggattacaggtgcctgccaccacacccagctattttttaattaattaattaattwatttatttatttgtattttcagtagagatgaggtttcaccacgttggccaggctggtctgggactcctaacctcaggcaatccacccgctttggcctcccaaagtgctgggattacaggcatgagccaccgcgcccggcctaatgttgacatttctaaactgtttggcctatataatgctgaaaggagagggaccatattgttaattaaattcaacttattttcactgtattcaattaactaccctttattggcatcgtctacatacacaggactgcagttagca

SEQ ID NO: 779398 - DNA, 561 bp, Homo sapiens
gtctgtaattccagcatgttgggaggccaaggagactgatcacttgaggtcaggagttcaagaccagtctggccaacatggtgaaaccccatatatattaaaaatacaagaattagctggactacatgcctgtagtcccagctactcaagaggctaaggcaggagaattgcttgaacccaggaggcaaatgctgcagtaagctgagatcrtgccactgaactgcagcctgggtgacagagtaagactctgtctcaaaaaaacaaaacaaaacagcaaaataataataataataataattggccttaaaaaagaggtagagaaagaggaagtttattcaaagggataataacaaagaacttcccaaacctagagaaagatactgatattcaattacaagaaggttatagaacaccaagcagatttaacccaaagaagattacctcaacacatataataatcacattcccaaagatcaaagataaagaaaagatcctaaaggcagcaagagaaaataaacaaataacatacaatggagctccaatgtctggcagcagacttct

SEQ ID NO: 779399 - DNA, 485 bp, Homo sapiens
ccccttcacttggttctgaccctctcctgtctgctgccatgtagactctctctcttgacttctgccatgattgtgaggcctccccagccatgtggaactgtgagtccgttaaacctctttttctttataaattacccagtctcaggtatgcctttatcagccgcctgaaaatggactaatatagtaaattgggaccagtagagtggggtgctgctgtaaatatacccaaaaatgtgggagcaactttagaactgggtaacacacaagggttggaacagtttgtaaggctcagaagaagayagaaaaatgtgggaaagtttagaacttcatagacacttgatgaatggctttgatcaaaatgctgatagcgatatggacaataaagtccaggttgacatggtctcagatggagatgaggaacttgttgacactggagtaaatgtgactcttgttatgttttagcaaagagactggtggcattttgc

SEQ ID NO: 779400 - DNA, 631 bp, Homo sapiens
ggaacaagaaacatagtgggtattgaaaatgtttatctctgataacaacagattattttgatctcattataagatgcttggggttttaaagttatcagtttgcataatttgactatctcatgatccacaatagtgaagggggcatgagtttatctgtttatttatatgtttcttttaaacatataaggaggaacatttaaaatcttttaaaaactcaagtgttgtctacaatggaatccacctaacataccacttgcaatagagtagaaattttttatttttattttttactctttgaacacatatatttggtagacattaaacaaagaaaaaaaattcagcggttgccattaaaaactgtccawtaaaacatttttattgagttaggtttatttgtacgtttaatgtgaattattaaagaatgagaattgaagtgatttattccttttcttgagctctaacacagcagttggcactatctatgtgattcttcctttcaaggatctaacagtcctgtgtatggtaatttccttgcagattacgtccacccagtgcccctggatgttcagttcaagttttgtctttggttttatagatttcaacttttaaaaagcaaatagcatgaagttct

SEQ ID NO: 779401 - DNA, 623 bp, Homo sapiens
gggtctatgtggtgagagatgggaaacttctggttatgacggaagtaagttttgatacctaaggaaaaataaagcattttctctaactcaatggcaaagcagaaccagatgcaaattgatctttttcagaacttacacatgtcagagtctgcaactgttttgaggcattttaggtagagctcactagaggctttcttcgaagatctggtttgaagcagttgcttcaacttttggaggctcccatcgtatcaaagtcctaaattatgttgcagatcattgcaatactagtcactgcaacatttcagagtcaaaagtttttcatatatatttacttcttgtgaaaaagacctgcttctggaacccacagaagtggatattttcctggtagcccctcttgtctgagaagcgaatataaaargttaagatttaaaggcattctttatctggtccctcacaaactacttctgactcaatttaaaaacaaagggcaatcattatctttctagcacagaaactccaccccattaggaagtccaaacttagtgaacgagcatctccagagataggtgaaggcaggacacaggagctgtcttctgctcacttgtaatgacagggatttcccc

SEQ ID NO: 779402 - DNA, 538 bp, Homo sapiens
tggacacaaagatgggaaccacagacactggggactattagaaggggaggtagtgaggagtgcaagggctagaaaaactacctattgggtactatgctcagtacctgggtgacgagatcagagatcagtcataccccaaacctcatcattttatttctttctttctttccctttttttktttgtgtgtgtgtgtacttaaaagcaaccaaccaatctcataattcctatactctttatttccactaaaactctggccttccataggcacttgactccagatagcaaaaagtgatcttatggctcatccctagagctgggaatggggttccatccaacacaaattacgtgaccaagaatgagtgggaagcaaactctttcatgggaaaccagggtactgttggtggaagaggtgggaatgagatcccaaacacatatccagttaccctgtccatagtcagtcttttctctctaaagttgaatataacatatgttgtactgttaccattatctataagctccttttttgaggactagact

SEQ ID NO: 779403 - DNA, 538 bp, Homo sapiens
tggacacaaagatgggaaccacagacactggggactattagaaggggaggtagtgaggagtgcaagggctagaaaaactacctattgggtactatgctcagtacctgggtgacgagatcagagatcagtcataccccaaacctcatcattttatttctttctttctttccctttttttttktgtgtgtgtgtgtacttaaaagcaaccaaccaatctcataattcctatactctttatttccactaaaactctggccttccataggcacttgactccagatagcaaaaagtgatcttatggctcatccctagagctgggaatggggttccatccaacacaaattacgtgaccaagaatgagtgggaagcaaactctttcatgggaaaccagggtactgttggtggaagaggtgggaatgagatcccaaacacatatccagttaccctgtccatagtcagtcttttctctctaaagttgaatataacatatgttgtactgttaccattatctataagctccttttttgaggactagact

SEQ ID NO: 779404 - DNA, 634 bp, Homo sapiens
acaaattttagaaaatgcttatcttattttaaaaagttgagcacattcttaaagaaaaatcattacatttattgatttgagaattcacatatctatgagtcattttgtccaagattttaaaatgctcttgccttcatttaagtcttcttttgtgttcttcagtagcattttaaagattactcatagttatataaaacttatgcgtactttctcccttttattttgattcagttacttcatgatgtttgtattctatttttgaagtaaatagctctttatttttgtcaattgaaaacattttattaaattcattattttcactctatttttatctttcccttataatttccttagtagttaatctcttcaagttaatgagttggatacttaattatatactgattttttcttattaatktaagtgtttatatttatggttatgtttgtgcactttaggcatatcctaatttttgatgtttagtactttattgttactattttctctattgtagaatttcagtttgcttttccttttgtacaaaaattattgaaaagattagtaaaatttcacaatctcatagggctctttatgcttttaatattaatttctagcattaccatactagaaaagaga

SEQ ID NO: 779405 - DNA, 594 bp, Homo sapiens
tttatatttatggttatgtttgtgcactttaggcatatcctaatttttgatgtttagtactttattgttactattttctctattgtagaatttcagtttgcttttccttttgtacaaaaattattgaaaagattagtaaaatttcacaatctcatagggctctttatgcttttaatattaatttctagcattaccatactagaaaagagaatcccgtttgtgctatktctttttgaaatttgcggaagcttttttagctgcttaatatgtgatcactttttgtgaatgatccatggaaacttgaaaagaaggttttgtttctgttttcttggtgtagacttagacataaagccatcagatctgttttatgttattaatttttactaagtttttcatctatttaatttattgttaaattggaaaagcaaattacagaattttactacaaacatactttacccttcttttcactttaactttatgagtcacttaattttaagtgtttctcttgattttagcatataattatgttttgctttatagtcaaatctgataaactttttcttttagtagatgattatttaaatttattga

SEQ ID NO: 779406 - DNA, 626 bp, Homo sapiens
tgttccatgatcagacatcagcgcgttcttactatttcacatgcacgtgtgcaaggggatagtagtacaaagtcataccttgacaactgatctcactgtagtgacagaacctgtgtggtggtgacagtggacagaaagacaagtgtccgggcagggatccccaataccctgtgtttcctttgagggatgtcctgtgggcccttgctgtgtctgcagatccccttcttcctgcctctctyaggtgaagacagcagaagataaaccttagctcacacctactaggtgatgcgaagcatagttacttgacaaatgcttgttttcaaatttagactttcagcattttatcctgcagtaatgttactggtattccaataactttaaaattcttatgctttactgagatatgaccaattctttttctgtctctacaatgacattatttatgttaactagtgcttttttcccagttgcacttgtctgtttttcctagcactccactgataaataagttctatttcaaattactaaatgtcagaatgccttgataatcctagactcagacacatactatccaatggttatatatgacatatgggtttccttgaatatggttgtctttttgggag

SEQ ID NO: 779407 - DNA, 602 bp, Homo sapiens
taggggaggctattgaagtctttgtttctgcagctactcttagagccatatttggtattaataacttccttcctttactacccattctctggcccaatttgtcagggctttatacctggggaggtgaggtacctcatccttcctcacaagctgagccctgggtagtcctgcctataatgggctgctgaatacatctgtkagcttttgtagctgtatacggggttcgtggaggaatttcagagaatctcctggatttcagagcgtcctttcctgctggcgttctgttgcagcaaagctattactccttagaaatcagtatcaatgacctggtcaacacagtgaccctcttttttggcctgctggtcccatgtcacctggtggtccagttcagtggtacaacctttgtggaagtattcacatattgggtgatgagagctctaactagcagagctcaaagtcatgggaagaacagtgaaacctttaggagagagtgaatcattagttgagttagtgaaaatacgattcctcctgtaacccctgagtttccagacccatttattctggctgtgggaactcattatcatatgttaatccctaattca

SEQ ID NO: 779408 - DNA, 562 bp, Homo sapiens
ttttgctgacctccttaaaagttctcaagacatattttgttcaaaattgcagtgttcaagtgccccttagagatctctgtgacattgatttgatggcactgagtttcaataaaaagaaaagagcagaggtagacttcatttcacagccgaatccattagaagatgtttttggaggatttccaaacagaaaagagaacagctgctttctattttctcaaaaaatataatggtggatcccctttctcacaattctgatgcttaactcaccaaattgactgaaataatggcaaaaatggagtagtttattaataattactctctttttctcaactttaccttggttgtgatgtgggataaaaggctttgaagttatcacactagttcagtaaaaaacacacaaaaatgtaaaygttctgttcagaaaaaaatgggttttaatttttagcacagtgagaatcaagtaaattacagaatgctgaagcttaaaaaatataattttaaataaaattggattatattaaagaattgaatagctgaatcgcatgttaaatgattatatcac

SEQ ID NO: 779409 - DNA, 626 bp, Homo sapiens
catccctgttgttgcaaatgatacaattttcttctttttaagactgaataatattcctttgtacctatttatatatcacactttgtttatttactcatctgtcaatgggcatttaggctgtttccgtatcttgattattgtgattaatgctgcaatgaacataaaaccacagaaaattctacaagattctaacttaaattcttctgagatttatacatctagaagtgggattgctggattatatggtagctctatttttaattttttgaaaaactctataccgttaacaatagtggctgtatagttttacattactaacaacaatgtagaagggttccctttctccatacccttgccaatggtggttatcttttattttttttcatagtaaccatcctaacaggtgtaaggtgatayctaattgtgatattgatttgcttttctcagatgattaatggtgttgatcacctttcatatacatcttagccatttgtatgttttctttggataaatgtctattcaggttgtttgttcatatttttattaagttatttgtttctttgctattgaaacgtaggagattttgacaaaagtcaacaccctatcatgaaacaagggctcaacaa

SEQ ID NO: 779410 - DNA, 562 bp, Homo sapiens
cagtttccactccaacatgtaaacaaactgaaagtcatctttttcatacttacaaagagaaaaaaaatctgaacagactaaaaaaatcaatggcatttattgggtccttctaagaattgaggtttcagggaaaactgcctccatgaaatctgaaaaacaggtgaatacagagaatcactgctgggatcagcttactatatgcagaaactgctggagccataaactagtaggaacacttaagtaataactatgataaactgctggaggataaatgtggatgatgaagagagcatgaaagtttacagggaatcagtcacatacagacccctaatctttgagggacttttccttgggaaactcatcagattctcacagtaaaragccaatgaaaatcctcatgtcattcttgcaggggtaggggaaaagtaatcattttgaaatatacccagtgttctctgtaacaaagacctactcatcatgggaaaacacattactagagccatattcaacatgggagaagggaagttacccactccaactcctagccttcctgtttcaccta

SEQ ID NO: 779411 - DNA, 594 bp, Homo sapiens
aagtgcttgtaaggatatgaagaaaggggaatgagtggacaccgttggtggtaaagtagtgcagccattatggaaaacagtgtggaggttccttacaaaactaaaaaccagaactaccacataatccagaaatgtcacacatatcccccgcaaaaaggaaatcagtatatcaaagtgatatctgcactgtcatgtttattgtagtactattcacagtagcaaagatatggaatcaacctaattgttcaccaatgaatgaatgaataaagaaaatgtggtatatatacacagtggaatattattcacccataaaaagggatgaaatattgtctttgcagcaacrtggatgaaactggaggtcactaagtgaaataaaccaggaacagacagacaaatgtcacatgttctcactcacatgtaggagctaaaaaagtggatcttaggaagatagagagtggaatggtggttatcagagtctgagaagggaagagtggagaggggataaagagaagttggttaggagggacagaaatatagttagatgaaaggaatgagttctggtatttgatagtacagtgggatagttatagttaa

SEQ ID NO: 779412 - DNA, 659 bp, Homo sapiens
ttatatctgcatctatgccaaattctagtttgacttaataattttgcttagacaaaagtagtgaaatagtccatttatatagtgctttgaaagttcttcactaggaatgaatgttgttgctttctggttgtgtgtctatgggattatgtgagtgtatacgtgtaaaaatcattttggtaatcataaaatctatgtaatttgggaagcatacattattaatttctgggggttttaaattgggcgtagaaaacagaatctggaaattaggttttaaaagtttttgattgaatactttcartcatggcttattttcctatttttctactgttatttgttactaagatattttacctatagataaatcaacacacacatgtcttttccctctaaaaatgttgtgttttaacctgggcgtcaagggaaagcctgtcctttttgtaatgagttataagtactaataagttgaactgagatggctcagaatgatattaaatctgatatttttctatgcttctcacaataccaatcaaagtttctgttggaagctaatattgctcttattattttcctcacaagaaatcttttcttacatccagtcctaaggctgtttgcatctttcctcaaaccaaatgcattttaaattttctcttacatataaa

SEQ ID NO: 779413 - DNA, 712 bp, Homo sapiens
ctgcgggtgggcagtggatgagggatccggctcctcttaccatcagctcctctcaagcaaagagtttcagctcccctggcaggagtccaaggacagccccacatattccagccacttgtcagtaagaagctgggctggagtgagcagcgcacagtcgccacctcccaccacatagtgtgaagaccttacacagggtttcctggccccatcagaactgtaagaaaaccatgcaccttgttgtccatgagtaaaagactaatattttcttaataaagtagtttagcagaggtccctttcatgccacacaaagcccataataatgcacgtggaggatgggtaggatttcagtggataaggagctggtgaccagttgaaaggaagcttctggagtaaactcttggcgtctgggatcacgtgacagggattgatctgagaaaggagaggtgagggaaggaacagtggccttaggtggaggtggactcaagcccagaaccacgctggcccacccaggtgctgtaggaccacctactccttgagagcaagactcccacccgcattggggttttsgcctagaaacagttcagcttgtccagaatctcccagccttgaagaccccttagagtcctaccttctttgggtcctgcttccttccaaatagatagtatcttaagcactgtcctagacaagtttgtttctccctctgctcaaactc

SEQ ID NO: 779414 - DNA, 574 bp, Homo sapiens
tactcattgaaaaattttaatggactggtgaaactgcagaactagatacagctgaaaagaatcagttaaatcaaagatagacaagaaaagtacccagaatgaagggcacagagagaaaatcatagacagaaacatgacatgttaaaagcataggctaggaatatttaccatgcctctatctaatcagatgctctcatctagaaagcaatgattaggaaatctggagaaaagaaactttwaaaaaaaaaatggctaacaattttcaaaatttgatgaaagatataaatcctcaaatttaagaggcacaagtcctgaataaggtaaatagaatgtaaaccaaaaataaaattctaagctccccaactaactgatggacccttccctcggccaagggcattccaaagctaacctgaaaaactagttcaggccatgatgggaagtggaggttggacatgcctcattataccctccttcttttggaatccaggcacagctgactagcattaacattaaaatggagatcctaagactgccagaaaagactttttgtagcaataagacacaaattctagcc

SEQ ID NO: 779415 - DNA, 574 bp, Homo sapiens
tactcattgaaaaattttaatggactggtgaaactgcagaactagatacagctgaaaagaatcagttaaatcaaagatagacaagaaaagtacccagaatgaagggcacagagagaaaatcatagacagaaacatgacatgttaaaagcataggctaggaatatttaccatgcctctatctaatcagatgctctcatctagaaagcaatgattaggaaatctggagaaaagaaactttaaaaaaaaaaatggctaacaattttcaaaatttgatgaaagatataaatcctcaaatttaagaggcacaagtcctgaataaggtaaatagaatgtaaaccaaaaataaaattctaagctccccaactractgatggacccttccctcggccaagggcattccaaagctaacctgaaaaactagttcaggccatgatgggaagtggaggttggacatgcctcattataccctccttcttttggaatccaggcacagctgactagcattaacattaaaatggagatcctaagactgccagaaaagactttttgtagcaataagacacaaattctagcc

SEQ ID NO: 779416 - DNA, 462 bp, Homo sapiens
cacgggaaacagaaagagtggccagaaaggtagcaggagaattaggatactgccttgttgggtatttctagagaaggatgcttccagaaggagagagtatgcccaaccgtgtcgtattctgctgtgtggtttaggaacaggaagactaaaaagggtccattggattgcaagctaaaagtcatcagtgaccttaggaagacaaacgttggtaccttagtggaggtggcagcctgatagtcagtgggtgaggagcaggtgggaggcgaggaagtagagatggcaggtgctgacagtcatttcaagaagtgtagctgtrggggagtggaaatatgggacagttggggggattcttgtttgcctaagatggggattgctaaagcttgtttgaaatgttgatgggaatgatccagttgataggaggattaaggatgtagaagtgggaaatgtaactatagtgaggtc

SEQ ID NO: 779417 - DNA, 579 bp, Homo sapiens
tcaaggatacagcatgatgaatctttacagagtgaattcctccagagaagggtatagaatctagcatcccagaaatttcctctcagtggcagccccagcaaagaaaaaacactattgtgatatctaccaccattgattgtatggtttttttgttttgttttgagacagtcttgctctgtcttgcccaggctgcagtgcagtggtgcaatcacagctcactgcagmtttgaactcctgggctcaagtgaccctccggcctcagcctcccaggtagctgggtctacaggcgtgtgccgtgacacctagctaatctcttttatttttttgcagagatggggtctcactattgtgaaacccaaaagtctgagacaggtctcagtccatttaggaagtttgttttgccaaagttaaggatgcgagcccatgacacggcctcaggaggtcctggtaacatgtgcccaaggtggtcagaccacagcttggttttatacattttagggagatgtgagacatcaatcaacaaatgtaggatgaacattggttcagtccagaaaaggccagatgactcaaagtagggag

SEQ ID NO: 779418 - DNA, 636 bp, Homo sapiens
tgattttgggcttctggcctccagaactatgacagaagaagtttctgttaagccacagcccctggtaaattgtttcagcagccccagaaactgatacaaccttcctctgaggaattccggcccccaagcattgggggcaaatagactcagagaatatttggaaggtgatctgggggtacctgtccagatgtcatgttctcctaccttctgaccctgtggttcctctaccaggaatttatcctacagatggattcacagagatactcagaagcatttcacagcatcatctttccagcagtgtagaaattagcaaaacgaccccaagtccataggaatgtgcctaaataacgataatatgttcactctgtggaatattatgcagtcatgaaaaagaataagaaagttatttytgtgccaatatggaacaatatccaagacatattgttaagtaataaaaaaaaaaccccacataaaacaaaaaacaaggtaccagagaacagtatgttaaccattattttgaaactaaaataattatacacaatagatttgtgttgtttctagtagctatgttctataaagtcactaggaacactgaattagcaaatcctgaaccattgctctttggggaaatacagg

SEQ ID NO: 779419 - DNA, 629 bp, Homo sapiens
tcctgtatctttttacttttagaaacgttcttattagcaatttaaagttacattcgtggttcacatattttcattgtatagtactgggctaaagaggaaagaaatacatatatttaagaactatcactaacagatatttaatgatattggccctgaatctattttattttccaacatttatttcaccttcactgtaaattccttagctgtattttcattttgaaaggttttgaaacagaaacaagtaactagctgtcctgtggcgtgccaggcagggcctcggcctcatctgattcaatgtttgtttttgaatgtttattagcacatcaattaaatacttgtcagggtaatttcttctctaacacccatgacccttagccaatcgctcacatgtcatctgacaattcagattgtaataagtgcattatcatatcctaataataatattaataataaaartaataacttttggataccttttatataaaactacctttgagattccccatagggttcctgaaaaatcacaaagttttattctttcacaacataaaataaagataacagaaatactaagtgttgttttttgacatgttactactgtaagagatatataaaaattatctatt

SEQ ID NO: 779420 - DNA, 629 bp, Homo sapiens
tcctgtatctttttacttttagaaacgttcttattagcaatttaaagttacattcgtggttcacatattttcattgtatagtactgggctaaagaggaaagaaatacatatatttaagaactatcactaacagatatttaatgatattggccctgaatctattttattttccaacatttatttcaccttcactgtaaattccttagctgtattttcattttgaaaggttttgaaacagaaacaagtaactagctgtcctgtggcgtgccaggcagggcctcggcctcatctgattcaatgtttgtttttgaatgtttattagcacatcaattaaatacttgtcagggtaatttcttctctaacacccatgacccttagccaatcgctcacatgtcatctgacaattcagattgtaataagtgcattatcatatcctaataataatattaataataaaagtaataacttttggataccttttwtataaaactacctttgagattccccatagggttcctgaaaaatcacaaagttttattctttcacaacataaaataaagataacagaaatactaagtgttgttttttgacatgttactactgtaagagatatataaaaattatctatt

SEQ ID NO: 779421 - DNA, 474 bp, Homo sapiens
agtgattttcttgtatgtcaggaactacgcaaacacaaaaacactacaaaaacaaaaagaaaaacgagtaatcattatccaggaaaatatggctctaggccatgcagactggctttgtgctgagttctttgaagctggcrcaaagtgtgtgttcactcttgcactgagtgaagttcaagttcactcttgcacagagcttgcactgaggggaaggatcagccaaggtaaaagtgtagggtcttcttatgacatttgtcagcatgtggcttaacctatgcatacgtgtgactttctagactctcccatgtacgtgaatgattttgaatgtcttagttttccaaatactcttctccaacttttcttcctgtgctgaaggtgatctactatatgtgtaaactctaatttttgccctaagcatctgttgtttgttaggtctccttgcagagtttctcaataatgtccattccttatctg

SEQ ID NO: 779422 - DNA, 624 bp, Homo sapiens
tctttgaagctggcgcaaagtgtgtgttcactcttgcactgagtgaagttcaagttcactcttgcacagagcttgcactgaggggaaggatcagccaaggtaaaagtgtagggtcttcttatgacatttgtcagcatgtggcttaacctatgcatacgtgtgactttctagactctcccatgtacgtgaatgattttgaatgtcttagttttccaaatactcttctccaacttttcttcctgtgctgaaggtgatctactatatgtgtaaactctaatttttgccctaagcatctgttgtttgttaggtctccttgcagagtttctcaataatgtccattccttatctgttctgtattctagcaacacagaaaaaaaagcctttcattagtccttyaggtatcccccagaccagtcagaacagacatacataataatttgcgggtaagagcttctcttgttcctttggagccatggaccagggttccacactgggaacatgggcttctaacacttcaaaactgcctttgctggggcaaaggcaagttaaaaatgtcataaagttttctagttgtctttttgttgagtctgctttcacttggttgttgtaatcttttgaccattt

SEQ ID NO: 779423 - DNA, 624 bp, Homo sapiens
tctttgaagctggcgcaaagtgtgtgttcactcttgcactgagtgaagttcaagttcactcttgcacagagcttgcactgaggggaaggatcagccaaggtaaaagtgtagggtcttcttatgacatttgtcagcatgtggcttaacctatgcatacgtgtgactttctagactctcccatgtacgtgaatgattttgaatgtcttagttttccaaatactcttctccaacttttcttcctgtgctgaaggtgatctactatatgtgtaaactctaatttttgccctaagcatctgttgtttgttaggtctccttgcagagtttctcaataatgtccattccttatctgttctgtattctagcaacacagaaaaaaaagcctttcattagtccttcaggtatcccccagaccagtcagaacagacatacataataatttgcgggtaagagcttctcttgttcctttggagccatggrccagggttccacactgggaacatgggcttctaacacttcaaaactgcctttgctggggcaaaggcaagttaaaaatgtcataaagttttctagttgtctttttgttgagtctgctttcacttggttgttgtaatcttttgaccattt

SEQ ID NO: 779424 - DNA, 621 bp, Homo sapiens
aattttttttttttttttgtattttttgtagtgacagcctttcaccatgttgccccagctggttgcaaactcctgggctcaagtgatccacttgcctgagccccacaaagtgctgggattacagtccccaacggtgatttttataattttacgtaaagtatgggcccaagagtacaaaatttgwcctctattataattagatgcaagtttggcagaacattatgtcctctagatgtatccttttaattttagactataccaccttattttgtgataataaaatcaatgacagcaataatagtgaacatttaatgagtacttactctgtatcaagattgctcacgttatgttcattgtcccatacaatccactcaacagctccccgaggtcagcattattattagctccattttatagattggaaattgagactcagacaggtgaagtcttttctcaaagttacatagctagtaagtgataccacttgtcaagaactgtgaaagcactgagattttattatgtttgtaaactaaaacattagcctgctacacgttcatggatgctggcaggagacatgaaacttcagagacaaagtacagtttattactaagatcaataaca

SEQ ID NO: 779425 - DNA, 599 bp, Homo sapiens
tgctgacaccaccagtttcctaattggccggcagaagatagatggcacagagagagaaaccatcctgaaagatggtaagtgacactgtgacattaacatcaaactacccagagatgaagcactttaaaaggataaatccagtgtgtgtcagactagctttaaccagaactcaagttcttctggttggttcaaaaatattttttaatgttatttcttcaktaacattgtttctctgttttcatataccagtgtattaaagccttcattataaaatgggacttggtgttgtctactatattctaaatattatcggaattaaaactgaactattatccatcttctgggaaatgtcaatttatactgatatgtttacagtgctgtatggtagaagatgaaatttaataggatttcagagacttgtaatagttggttttcattagactattgatcatgtcactcaaaatgcatgaaaaatatcaatgtccacattgtcatcacaattcttgcattttattttttactttacacatcactgaaatgaagttttctagagttgcccttggaatatcagtatctccagagaaacttaaaacatttat

SEQ ID NO: 779426 - DNA, 601 bp, Homo sapiens
aaaataacaatacttttatacggttggtgtgaggattaaacaagtaaatagataagcagttcttagtagagtacctggcatttgaataaaaatcttagcattgaaaaaatgtttttattattattaaaagctggaaaattaaatagatctgttcatggatacctgattcataaatatcacaagaaaaattggtgtctaactttaaaaacatgtttttatggaaaatgattgtaccttttgatacagaatyggttagagggtacagaagtttcacccagtgtgcgcattcccattatcttatgaggagtctagatatgccaaatgaatttcagaacaagcaaaaatgttaaggaacattatttaaaagcatttttattgcactgacaatgtatgttaaattgaaagtgtaagtaataaaccatagagaaatggcaaacttctaccaattatattttgttgttgcatgttatagtacaatttatactttgttgtggtctcagattcagaaggagagtaaataaaaagattccttttgtgggggtaaaatgtacctatctttatttcatcgtttatcattttgtgtgagtcttgtccatagata

SEQ ID NO: 779427 - DNA, 627 bp, Homo sapiens
cttcaagtatgcattatacaatttgaatctcttcagaaattcgactttttttttttttgagatggagtctcgctctgttgcccaggctggagtgcaacggtgcgatctcggctcactgcaacctccacctcccaggttcaagcaattctcctgcctcggcctccccagtagctgggattacaggcgcgtaccaccaggcgtgggcccggctaattttttgtatctttaggacagacggggtttcaccatgttggtcaggctggtctgtaactcctgactttgtgattggcccacctcagcctcccaaagtgctgggattacaggcgtgagccacagcgcctggcagaaattcgactcttaacagcagaaaaaacaattttgatatttctacctggagggacctttsatacccactccttccaaaaaaaaaagaaccaattagaaaattcgaatcaaagatcttcgggagatttcatgaaaaaaaaatcagggagaaaaaaactcagcaaagcaattctctcattttcagtggaaggcatttcaacagtgcctggggaattgctgaaagacaagcatttatttatttatttagagacggagtctcactctgtcactcaggctggagtg

SEQ ID NO: 779428 - DNA, 617 bp, Homo sapiens
cagtgaattagacaaaggtccctctcttcctgcacttacatcctgaattaaataaagtatatgagtaaaacacagtatatgagatggtagtaagtcctcgggaggaaaaacaaaagaaaaaggaagaggatgtactggggtagagttggtaccgcartttaaggtgggcacagtggcttatgcctattattccagatactcaggatggtgagatgggaggatcgcttgagctcaggaatccaaggccagcctgggcaaaatagtgagaacctgtctctaaaaaataaataaatggccgggcgcggtggctcacgcctgtaatcctagcactttgggaggccaaggtgggtggatcacgaggtcagaagttcaataccagcctggccaacatggtgaaaccccacctctactaaaaactacaaaaattagccaggtgtggtggcacgcgcctatagtcccagctacttgggaggctgaggcagaagaatcgcttgaacccgggaggcggaggttgcagtgagccgcaatcatgtcactgcactccagcctgggtgacagggcgagactctgtctcaaaaaataataataaataaataaataaataaataaataggctg

SEQ ID NO: 779429 - DNA, 617 bp, Homo sapiens
cagtgaattagacaaaggtccctctcttcctgcacttacatcctgaattaaataaagtatatgagtaaaacacagtatatgagatggtagtaagtcctcgggaggaaaaacaaaagaaaaaggaagaggatgtactggggtagagttggtaccgcaatttaaggtgggcacagtggcttatgcctattattccagatactcaggatggtgagatgggaggatcgcttgagctcaggaatccaaggccagcctgggcaaaatagtgagaacctgtctctaaaaaataaataaatggccgggcgcggtggctcacgcctgtaatcctagcactttgggaggccaaggtgggtggatcacgaggtcagaagttcaataccagcctggccaacatggtgaaaccccacctctactaaaaactacaaaaattagccaggygtggtggcacgcgcctatagtcccagctacttgggaggctgaggcagaagaatcgcttgaacccgggaggcggaggttgcagtgagccgcaatcatgtcactgcactccagcctgggtgacagggcgagactctgtctcaaaaaataataataaataaataaataaataaataaataggctg

SEQ ID NO: 779430 - DNA, 613 bp, Homo sapiens
tttaaaaaaaaacttattattaaaagtattcattagttataaatatcgaacagcctaaatgattaatcaatttaactggttacttctttccaaatgtaaaggccacaattacctctaccacaaaagacaggtcttctgttggamctagaagcctcaaggaaagccaaggaagtttgatccagttagctctcccatatcccccaaaaggcaggtacaactttttactactcccagagcccaagttgctcagaccaaagcaatccattcacaccagcccacaatattacttgttggttatataagcatctcctaccacagggcctcccaaagtgctgggattacaggtgttagtcaccatgcctggccctcattaccacattgttttaattattatagctttgaactatctttcaatatttagaacaaattcccttttgtattactttttcccaaaaacttctagttatttttctccatttacttttgcaatgaattttagaatgagtttgttaagtctataaaaagtcccatggacagacagcatcttatccaggtgatcaaaattaacatcaccagtaatgggacaaatcaatcaacatcatgtgcaatgaga

SEQ ID NO: 779431 - DNA, 613 bp, Homo sapiens
tttaaaaaaaaacttattattaaaagtattcattagttataaatatcgaacagcctaaatgattaatcaatttaactggttacttctttccaaatgtaaaggccacaattacctctaccacaaaagacaggtcttctgttggacctagaagcctcaaggaaagccaaggaagtttgatccagttagctctcccatatcccccaaamggcaggtacaactttttactactcccagagcccaagttgctcagaccaaagcaatccattcacaccagcccacaatattacttgttggttatataagcatctcctaccacagggcctcccaaagtgctgggattacaggtgttagtcaccatgcctggccctcattaccacattgttttaattattatagctttgaactatctttcaatatttagaacaaattcccttttgtattactttttcccaaaaacttctagttatttttctccatttacttttgcaatgaattttagaatgagtttgttaagtctataaaaagtcccatggacagacagcatcttatccaggtgatcaaaattaacatcaccagtaatgggacaaatcaatcaacatcatgtgcaatgaga

SEQ ID NO: 779432 - DNA, 642 bp, Homo sapiens
tgtaataaaccactacaaaatatagtgacttaacaacatttattttgctcataattctgcaattttgcagactcagcaacttgtctctgttctattaaactagctgtagtggcttaaagagtggaggcttgaatcagttgtgaaatctacagtggcaacatactccccatcttcccttttctctagtggaaccctagtgcttctcttgtagccttaaaaacttttaaaaaaaaatagaatggaggctgaaatcatctgaaatctctcgtattactagcagatgctagctattagcaggaacctaagctagggatgtctgttacaacacttccttgtgaccttgccacatcacctgggccttcttaaacatggtagctgggtttcaaaggagaaataccccaawaaagagagagccaagtggaagtcatgttgccttttttgatgaactttaaaatcaccctacgtcactttcattatagtctattcattgagggagtcacaaagtcttgcctgggttcaaggggaagaaaaatagactcaaactctaaatgggagtgtggtaaggttgaggttgcgcatatgagactgaaaatactgtgatggctagttttggaaaatattgtcgctgcagctgtaactcat

SEQ ID NO: 779433 - DNA, 625 bp, Homo sapiens
ttggaatccaaaatgatgttttatgatgctcattatgtaatgacatattattatccccataggcagctcttggatccagtaaagcaatatggtgtatcacatctaatagggcaccatggtacattcctggaatatcatttggagttgycagggactataacttagaaaattgatgagaatgagataatcttataacaaaaaaatatgaaaatggtgttttcaaccagctattggttgacgttgtagctttcaatctatggaaagtagaaattgtagcctgttcatttaggaagacacacttaaaaactatttggactctctaaataattgctttgtgagtctcaaattctgatttggtggaaatattactgtgttcccaggagaaattcctcccttggacattaagacctccaagttcattaagtccaaaactgagggatgggaaatgataattctttatgtaggttatatggtataacagtgaaagaggtcactctctgctttatccttttgtctccagttccatgcattctgaaaataggagagacagcagtatttattagccagctctacccatgatttcccaacctgtgaattctggctgcgaaggagacagcaccgcaca

SEQ ID NO: 779434 - DNA, 607 bp, Homo sapiens
tatgatcatatcaatgtctttcataaactatatttctgtttatttttaaactttaatactattttatgactttttataatacgtgcttaacatttatttttatgtaaaatacgattctgccgcattcttttcaacaacttcacagtaacttctttgcaaggctaagccacatggtagtcaactgttgttcattgatggacatttaagctgtctctagtgttttttttttgttttaataggataatttattttttaagaatcagtttttaaagttatgttaaagatcgaacttttaaatgcatgcaattatatataaacaataatctatattaatttttaaattttctgctggatgcagtggctcatgcctgtaatcccagcgctttgggagtytaaagtgggcggatcttgaggtcaggagttgggaggccagcctggccaacatagtgaaaccctgtctctacttaaaaaaaaaaaaaaaaaaaaaaaaaaacaggctaggtgcggtggctcatgcctgtaatcccagcactttgggaggctgagcagacggatcacaaggtcaggagatcaagaccatcctggccaacatgataaaaccctgtgt

SEQ ID NO: 779435 - DNA, 637 bp, Homo sapiens
taaatgtttctatgtgtgttgatctgaatctaaattaagctatccatgagttcctaactctactccaactccacataaaccattctagcccctttctcttacttacctttaacctccctttccaatcagcagtaacaaacttggctaccgacacccactctctatttcttactttttcaattccagtgtatatttatagtggtttcaaaattattaacacatactcccggggaagaactttattaactacagtccaatgcttaatgtgccatttcttttgctatttgtcttgcagactccactaatttccaaaattacttatgtcagtaactttcccccaccattcccgtcagtgaggttgtttcctgcacttttaattcagttagattattttgttttaatctgaatatcttcccagaatcccctaacctcctaaatgttttctgaaatttgcattcattgatactgactgtwgttcagactgtaaagctctatgggttttgacaaatccatagtgtcatgtattcaccatagcaaaatcatacaaaatagatttctcatcctaaaaatatcctatgcttcacccattcaactcccttgtctctgaatttctggcaaccatgatctctatagtttt

SEQ ID NO: 779436 - DNA, 598 bp, Homo sapiens
tagctgttaaccagaataactagtttagagaggaacataaatgaccttatggagctgaaaaacacaacacgagaacttcacaatgcaaccactagtatcaatagccaaatagaccaagcagagaaaataattttagagcttaaagactatcttgctgaaataagacacgcagacaagattagagaaaaaaagaatgaaagggartgaacaaaacctccaagaactatgggactatgtaaaaaaaactgaacctatgactgattggggtttctgaaaggggtggggagactggaaccaagttagaaaacacacttcaggacatcatccaaaagaacttccccaacctagcaagacagaccaacattcaaattctggaaatccagagaacagagaaccccagtaatatactccatgagaataccaatcccaagacacataatcatcagattctccgaggcggaaatggaagaaaaagtgttaagggcagccagagagaaaggcctgatcacctacaaaggggagcccatcagactaacagcggatctctcagcagaaaccctataagccagaagagattatgggccaatattcaacattc

SEQ ID NO: 779437 - DNA, 471 bp, Homo sapiens
catgatcaagtcagcttcatccctgggatgaaggctggttcaacatacacaaatcaataaatgtaattcatcacataaacagaactaaagacaaaaaccacatgattatctcaatagatgcagaacaggcctccgataaaattcaacactgcttcatgttaaaaactctcaataaactaggtactgatggaacataccctcaaaataataagaactatttatgacaaaccaacagamaagatcatactgaatgggcaaaaactggaagcattcctcttgaaaactggaacaagacaaggatgccctatctcatcactcctattcaacatagtattggaagttctgcccagggcaatcaggcaagaaaaagaaataaagggcattcaaataggaagagaggaagttgaattgtctctcttttgcagatgatgtgatcctatacctagaaaaccccatcgtctcagcctaaaa

SEQ ID NO: 779438 - DNA, 608 bp, Homo sapiens
gctggcaaaaggcttagagcctgtagggccaggaccactgccccttcccagtgctgagctgccccagagctgacaccatgctaggaccctgcagcaggcactgccagggtgaggctcaggatgcaactgctacccttgccataatggacaccatacggcacctgcttctcccagtgggcagtcccagggacccgtgtctattacccagctatagagggtctgtgctaggaggatgctgcatcagaaggggakgatcccccagccccatgaaggcactcagtaacactgcgtggcccactctcttcaaagccttcctttcatgtccagaacagcccagcctgagaaaggtggccaaggactgtgtggaggagggtggagtagagactttctcctcccaattccctggcattgcccttaggacctttgccctgattccttcttcttgtgagatctctgtgtctttggacaattggctgcctcccattgggaccaagaaggttctaagtgttcccatagctcaggatcaggatctcacttgtgtcctttcagatttcacagagaaaattggagcccccaaactcacactccattgctatggtcccagaatt

SEQ ID NO: 779439 - DNA, 526 bp, Homo sapiens
ctcttgattgttaaaataaacccttagttgatgccagacagtaatgctctatccgctaccttcttcttcattccaagttgtctcctaggtagacttacccaaatcctctaattatcttattcctcatattcttataacattcagatatttcttcattccagacatctatcatgaaatgtaattccacatttctaaatgcttayttcttcttttaggtttccagtttcagtgactaacactatcattttttattagaaacctgagaattgctttgactttatttttccttctcactttcaatcacatataggaagtccatatttaattagtcaaaacctttgacagattatatatcctttatccataatatttctgacaacccttcactcttttcagagttcaccattcctttctttaccagaaatactgggattaagcagtgactatctgatcacatgcaaagagaacctcatcaggctaacagcaaacttctcagcagaaatcttacaagacaagagagattagg

SEQ ID NO: 779440 - DNA, 579 bp, Homo sapiens
acctcattgtttaaacattgcatggaatgttaatagatattcctcacatacacacaaaaaaagagtccatcatgaaatcagtaataaaaaacaaacaaaattgccataacgagaccaccgtgactgggttgcaaacatcatgaacccagtaaaggttccagcattccttcacctgtttagtcaaaacccaggatttcccgaactcgtgtcagcccagatccttgagtgaagaaataaccattaatacttggggataagcccctacaggttaggagtacataaattggtctacatttattggctacaaagttgttacccagtttccaccccaggctttgcacacacacagtctcattgrctttgccaaaatatttaaagttaaccaacttctgtatagttagagtcatttggggcaagtttcttaattctttaattcatgcaaaacataggaattctaaagaaagaatacaagtcaaaatattttttggatttggtgtcctaataaacaaataagcaagatatggaattgtataaatctagttgaatattgttatcataccaccagaaaataacagattc

SEQ ID NO: 779441 - DNA, 655 bp, Homo sapiens
cttgagaggttcactcctttaataaaaaatagagttcaggctttacaagcaaacttattttgatagaggtggggggcaggggaggaaatctgcctctgtttacagagagattgtgttggaaggacagaagcaggagccacatcaggtgaaccaaagactcytgaaccggaatgagcctatagccaattggataataattgtatcatttattaccttattgtctaaatcatgtcttgagtttcctgactcttaatccaagaaatctcctctcagtgctcaggtggtaaattatttatctgcctttcttcctctttctttaaccttgtctccctatgggaatgcagcagttactagcaacttgccccagacagagcacggtggagcagagccaggagaggttaaccccgagccctcccagggatttcaaggcatggtgatgagtttcagggaggcagtgctgaatgggaggtcagagcccagctttcagaaccagaatgtgtaggttcagatcctaactctgccccttacaaaccatgggtgcttgaataaattatttcatcttgctttggctcagtttcctcatctgtaaaatcaagatgataatatccaccccataaggccgtgaagattgtgtgcattatgcatttataacatt

SEQ ID NO: 779442 - DNA, 629 bp, Homo sapiens
attgtgacctttttccttttggtgggggtggctggagggtgctgcatttaagtcaagtaggtaacaagtacaagaaaaagttattaatcaaagtcatttaaacaattacttatttagcatctacactaatcaggtactgtgcaggaaagttatcatagtaggtctgacactgctaagaaaggcttggttataaggttgatacctggctggtattttaaaatatggattttaggagggttcccagcatttccagaactcatatgacaagagtggctcactgtgcttaaactgtttgcacaaacaatgtggtttatgctaaaacaccttctctccttttgaaaagtctggaattttgatacatcctggcagaaagtgcctatgcaaccagctcccaataaaaacctgggacatggaactcaaaagagcttccaaagcagasaacatttcacatgtgctgccacaactttttgctggaggaattgtgcacattctgtgtgattccactggaggaagactcttgaaactctgtgtcagggttcctgcagactttgcgccctgtaccttttccctttgccgaatgtgctttgtagcctcttgctgaaataaagcacagctaagaatacaactat

SEQ ID NO: 779443 - DNA, 600 bp, Homo sapiens
ttttgtagatttgtatttcaggtaagatcaagatatgtggcgccagagccaagtctgaaaataatccacaggcctcgtaatgataatgggaaaagatgtttcaatcattcttgctgctataggaagtacatggagctgcaacttaattatacactgtttacttgccttgcctgtcctgtttgtttgctgaatgtaacatatttggccaaatgcacttttaattttatgcagcacaggacccttcacaccaaagcaagcaagctgaaataytttaagcctttcagctaatcaagtttatccacttaaaatctggctgggagagtgtgagaataatctttgaggtccctttcagctctgacactggtgattccatatttatagagcatattcaggatgtgtcatacagaaaaccaccataaacacatttttttttggtcccttcgacatttggtttttggttgtgttgcctgtttaacaatcactttcacctctctattcctttcaattttaggtaaaagaaacctttttaccagatagtgacgagtggctaccatgattaataagtgactagacctcatggtcctcctcatactaaaaggt

SEQ ID NO: 779444 - DNA, 586 bp, Homo sapiens
ttggcctccgaaagtgctgggattacaggcctgagccaccatgcccagccaatgtttttaaagcttattcagaattggccaggtgcggtgcttatgcctgtaattccagcactttgggaggctgaggcacgtgaatcacttgaggtcaggagttcgagaccagcctggccaacatggtgaaaccgcgtctctactcataatataaaaaattagccaggtgtggtggcaaacgcgctgtaatcccagctactcaggaggctgaggcacgagaatcgcttgaacccaggaggcagaggttgcagtgagcccagatcgtgccactgcacytcagcctggatgacagcgagactctgtctcaaaaagtaaaaattaaaatttaaaaaaaagcttaccatttgcatctgaaccactgttcagactgtttttggatggggagtagtccatgggccacgcccctatctgggggcactgagggtagagaagcagggcctagaagaggggtctagaagggtcaagaggagttggctggtggagaagaaggaaagattgtttcagagagaggaccctagcagaggcaccaagcagg

SEQ ID NO: 779445 - DNA, 586 bp, Homo sapiens
ttggcctccgaaagtgctgggattacaggcctgagccaccatgcccagccaatgtttttaaagcttattcagaattggccaggtgcggtgcttatgcctgtaattccagcactttgggaggctgaggcacgtgaatcacttgaggtcaggagttcgagaccagcctggccaacatggtgaaaccgcgtctctactcataatataaaaaattagccaggtgtggtggcaaacgcgctgtaatcccagctactcaggaggctgaggcacgagaatcgcttgaacccaggaggcagaggttgcagtgagcccagatcgtgccactgcaccycagcctggatgacagcgagactctgtctcaaaaagtaaaaattaaaatttaaaaaaaagcttaccatttgcatctgaaccactgttcagactgtttttggatggggagtagtccatgggccacgcccctatctgggggcactgagggtagagaagcagggcctagaagaggggtctagaagggtcaagaggagttggctggtggagaagaaggaaagattgtttcagagagaggaccctagcagaggcaccaagcagg

SEQ ID NO: 779446 - DNA, 605 bp, Homo sapiens
tggggagagagaacacactgtctttctgctccgggccacctgctataatagcatgcaagctctttcaagagagagctgccccctgttagtgccttgaagatccctggaaaagtggctttcacataatcagggcacccagggttctcaatttaatggcacaattgaaaactctcaccagaatattttggatccaaacctacttatgcccgaatgatccttcctgctgcttttgagaaactcctggcctctaaaagtcacaggacaagaccagaccttgaatattagaattctatgacaaggtgagaacagctgcctcactgttagggcagtagattccaaagtggggtacacaagatgaygtggaccattagagggacaagaggaatatattagcactcatattctaatgtcatttttggatttctatatatctaaatttttcatgtgtaaaatatattagcatagtagtatgtgcatgtactgaaaaataaataaagtaaatatattggagaaggtatgctttacatttttaaacatcaaaaatgtttggagcccatagcctgtgagcatagtgaatataaatgaaccagtcatgttggctttga

SEQ ID NO: 779447 - DNA, 642 bp, Homo sapiens
tcaaagaaaaagaaagaatttaaaaatctgctcgagttgtctgagcctaaacacaatttgggtacataaagaacaaaatgccagccaggcgcagtggttcacacctataatcccagcactttgggaggccaaggcaggtggatcacctgargtcaggagttcgagatcagcctggccaacgtggtgaaacgccatctctgctaaaaatacaaaaaattaactgggcgtggtagcgggcgactgtaatcccagctactcgggaggctgaagcaggagtatcgcttgaacccaggaggtggaggttgcagtgagtcgagatcgcgccattgcatttcagcctgggcaacaagagcgaaactctgtcccaaaaaaagaaaagaaaagaaaaagaacaaaatgccttttcctctctttgtttccatggagaatataacctggaggggaatgaatatagatggaaaggaccagcaacatgacctttttcccactcattgagaccctagggtggtggtgggatggatacccatatagatcacagtgcacccagagatccaaattagatcagttctcacatgctcccaaagacccatgcctagtttcacgggtgttgctttggggacttttgtctatttcctccgtggg

SEQ ID NO: 779448 - DNA, 642 bp, Homo sapiens
tcaaagaaaaagaaagaatttaaaaatctgctcgagttgtctgagcctaaacacaatttgggtacataaagaacaaaatgccagccaggcgcagtggttcacacctataatcccagcactttgggaggccaaggcaggtggatcacctgaagtcaggagttcgagatcagcctggccaacgtggtgaaacgccatctctgctaaaaatacaaaaaattaactgggcgtggtagcgggcgactgtaatcccagctactcgggaggctgaagcaggagtatcgcttgaacccaggaggtggaggttgcagtgagtcgagatcgcgccattgcatttcagcctgggcaacaagagcgaaactctgtcccaaaaaaagaaaagaaragaaaaagaacaaaatgccttttcctctctttgtttccatggagaatataacctggaggggaatgaatatagatggaaaggaccagcaacatgacctttttcccactcattgagaccctagggtggtggtgggatggatacccatatagatcacagtgcacccagagatccaaattagatcagttctcacatgctcccaaagacccatgcctagtttcacgggtgttgctttggggacttttgtctatttcctccgtggg

SEQ ID NO: 779449 - DNA, 612 bp, Homo sapiens
tctatttattcgagatggggtcttgctctgtggcccaggctggagtgcagtggtgcaatcatgacccactgcagcctcaaactcctggggctcaaatgatcctcccacctcagcctcctgagtaactgagactacaggtacacatcaccgtgcctggctaattttttaaaaaagatttttgtagagatggaatcttgctatgttgcccaggctgggcctgaactcctagcctcaagagatcttcccaccttcacatctcaaactgctgggatttcaggtgtgagccactgcatccagctaattaaaaaaaaaatkgtagagcggggtcttgctatattgcccagattcgtttcaaactcctggcctcaggcaatcctttcacctcagccttctgagtaactcgaaccacaggcacaggccactagacctggctgatttttgagaaacaggttcttgctatgttccccactctggtcttgaattcctgacctcaagtgatcctcccacctcagcccctcaaagtgcagagattacaggtgtgagtcagtgcaccaggtctgggtttgctcttagtaaaggcaaaaggcccccgcacactggggctgactaagg

SEQ ID NO: 779450 - DNA, 674 bp, Homo sapiens
atctctacaaaaataaaaaaattagccgggcatagtggtgtacacttgcagtcccagctactctggaggctgaggtgggaggatggcttgagcccaggagttcgaggctgcagtgagctaggattgcaccaacgcactgtaacctgggcaacagagtgagactctgtctcagtaagtaaataaataaaataaaataaacgcccacctctgtggtcatatccttcagatacaacagatcaagtctttgggttgcagagcaaggatcaactcttgtggctatcacgagagsgctgaggtcatgagccatccaggagctggttaactctgcccatcaggacactcaagcaaaggccaatcctggtggcccacatcccaaaggcaagcatgagcagggaaaccctaatctgcatacaatcgcttttacgacagggctgtgtgcttcagcaaaactctaagtttaaatatggcattcagggccccatgaacaccatagagagaaatccagagacaagccactgagtagaggagatttgtgcattaaaatcttcttgccaccaaggtcctgcctgggtctctgacggtttcccatcgcctaggtttctgaagcaagcactgcagcagtgccatctagtgggcaaaaggcaaagtgtcacaactgagaggatcctccaaga

SEQ ID NO: 779451 - DNA, 569 bp, Homo sapiens
agtcttcattagttttatttttgcttgttttgtttgtttatgcaaacagtgttcagctgttattagcttaaaatcatgggttataagataacatttgcaagcctcatgataacctcaaaccaaaaagcctacaatgaatacacaaaaaataaaaagaaactaaattgtatcaaagtagaacaccactttcactaaaaaaaaaaaaaagataggaagaaaagaaagtgaagaaccacaaaacaacccaaaaaccaatttaaaaaatgacaggaacagctctacttatcaattataacactgattataaatggattaaactctccaatcaaaagacacagagtggstgaatggattaaaagaaaaaaaaaagaaccaacgatctgttccctaccagaaacacacttcatctataaagatacacatatatactgaaaataaaggtatggaaaaatgatattccatgcaaattgaaaccaaaaaggagcaggagtagctaccttatatcatacaaaataaatttcaagacaaaaactataaaaagagataaagcaagtcatactataatgata

SEQ ID NO: 779452 - DNA, 592 bp, Homo sapiens
acttaacactaattgcctttaaaaaaaaactaacaagcaaaaagaaaaccaataaaaactctactatttaacttcatcccttttctttttaactttttgttctttctatttatatcttattatactatgtcttgaagagttgttgtagttattatttttgtaggtttatcttgtggtctttctactcaacatatgaatagtttacactcatatgttgttttttgacacaaatattctgttttcctgtggacttactagcaccagtgagttttgtaacttcagatgatttcttattgctcattaacattcttttctttcagactgaagaactccctttagcatttcttgtaagacagatctagtgttgwtgaaatccctcagcttttgtttgtctgaggaagcatctctcctttatatttgaaagacattttccgtggatacactatcctaggataattttttttttccttcagcactctaaatatgtcataccattctctcctggcctataaagtttgcaccgagaagtctgctgccagacttattgaagctcctttgtatgttatttgtttccttggtcttgttggtttta

SEQ ID NO: 779453 - DNA, 461 bp, Homo sapiens
tgctaggtattacaaatagtgctataggaaatagacttgtacatatgtctttttgtactcttaccagtgtatcttgaggagattcctagaagtgggatttccaggtcaaaggctaaatgtcgatattagatattgccaaaaatcaactctctctcctccataggagtattaccattctgcattgcctcagtaatttatgagagtaactgttttccttatagccttgctatcagaagatttcaacaaacttggaattctggcagtctgaatctgaggcaaaartatttctcagtgcagtttcaatcagtacttcagtaagagcaagacagagcttcttttcagataattaagagctatgttactttctccatgaaccgttcatatttctagtcaatttttctatagtgatgtttatcttttttcttctctatttttagaggcttttttatttgggatattag

SEQ ID NO: 779454 - DNA, 580 bp, Homo sapiens
gtagctggattacaggcgcatgcatcacgcctggccaattttgtatttttagtagagacggggtttcaccatgttggccaggttagtctcaaactcctgacctcaggtgatccgcctgccttggcctcccaaagtgctgggattaccggcgtgaggtggctcctggccagctagtttttttttttttaaattaactttaggagaaacaaaaaatcttgattcaatttaggtcttttagagaaaggctactagrtttttaaactttagttttattgactaggtaagttacactgaagtagcattagcttggtttatttgattttgttttcctctagaattgcatcacctaggtgagacgcccttggatatgatattgcagtgaggtttgcttgcagctgagcttttctgttgtgatccctaggtacttttctcaactgtctttgttaccaggatggaacaatgactagatagtgtcttttgcttggctttgttactacaatcatagcatatgatttaagctaccattatcatagcggattaattttttatagtgtttttttgtgggaaaaagtaaaaaata

SEQ ID NO: 779455 - DNA, 613 bp, Homo sapiens
attggttattattgataaaaaggatccaaagtgcttattgtgcattctaaggatattattgccttccttatgttgtgatgcacagctatttagtttgcatgaaaaaacctattcatcttcctgtctaaaaaggttttagcatgaatggagtgcttaacttcctaagtatcttcaggtttcctttgaatttcttgagtatttgtgtatgttctaatgcataatggagagttttatggcttctaatttcgtaccttgtttaagcctctactaccctccccmctccattactgaagcctggttagattttttttaatagacttcattttttagaacagttttagacttacagaaaaattgaaaagatagtgtagagttcccatatacccacacatctagtttcccctgttatcaacatcttgcattagtatggcacatttgttaacaattaatgaactaatattgatatgttattattaacttaagtccatagtttatttagatttttagttttaacctaatgtcctttttctgtttcagcattcaattcaggatgtgaagttaattatcttttgaggttactatattgtcaagtaatgccattcattagctttga

SEQ ID NO: 779456 - DNA, 600 bp, Homo sapiens
ggttgcctgaccctctgagacctgtgtttgctgttcctgcagatgggtgggtatgaggtgatttaaggaggaagatttaatatatgagttgtagaaagataaatagactgggcgcagtggctaaagcctgtaatcccagcactttgggaggccaaggcagaaggattagtttgacccaggagttcaagaccagtytgagccacatagcgagaccccctctctacaaaaaatttaaaaattagccaggcatggtggcatgcacctgtaatcccagctactcgggaggctgaagtgggaggatagctggagcccaggagttgagaaagctgcagtaagtggtgatctcgccactgcactccagtctgagtgacagagtgagaccctatctcaggaagaaaaaaaaaaaaaaaaaaaagcaagagagataaatagatccaccattagtgggagtgtgcttttgagtgctctttaggagaaaaatttattttaatattttttcttctttatattttttatattctagcaagccatttcttcaacaaggagaaattaatttcatccaaagagccctaagagcaagggcagactcagaaaatcaga

SEQ ID NO: 779457 - DNA, 570 bp, Homo sapiens
gttcatggccacacctggttctgtgtaggaccacatgccttgtatgtcccattacattgaaatcttttcagactgtgatgaaggaaatacagatttttttttttttttttgagacagagtctcgctctgttgcccaggctggagtgcagtggctcaatctcgactcactgaaatcttcacctcccaggttcaagcgattctcctgcctcagcctcctgagtagctgggattacaggcatgcaccgccacgtccagctaatttttgtatttttagtagagacggggtttcaccatgttgaccaggctggtctcaaactcctgaccttaagtgatctgctctcctcagcctcccaaagtgctgagattacaggtgtgagccactgcacctggccaaaatacagattattttwaaaaagacattgaatgtttagaactgaattaaactgataactgcaggtttttgtttgtttgtttgtttgttttgttttgtttgtaagaagggatgcttatattcacagagtttgaaaaacaagtgacctaagccaacccctcattttacagtagaagaaa

SEQ ID NO: 779458 - DNA, 505 bp, Homo sapiens
gtaccaaggctcaccccacgaaacaaaaacaggtcccccaaacagtacgtgctgcaaagctgcattgcgtagagcagaaagtaaatagcacgagaattcagagaagagcatgagactgggctggggacatgtgggaatgctcacrgaacgtgggacttgaacatggtccctagagtcagcatcaggtgggctcacaagaggagaccgtgcaatccagagaagagggcaacgtgaggggtcttaggcaagggcaagtgcagtgcagtgtggctgggtctggaggctgccctggagtcccagcctgcaggacagcccaggtgtgggccctgcacagggaccctcactcgcctgtgctcaccacgccctccctgcagcccaccacaggtccgggccaaaaacttctggccccgccatttggccacaggaagctatgctctatcacaacttttctggacattgcattcacctctgaaagtcagaacattctggaattttgatgcacttc

SEQ ID NO: 779459 - DNA, 505 bp, Homo sapiens
gtaccaaggctcaccccacgaaacaaaaacaggtcccccaaacagtacgtgctgcaaagctgcattgcgtagagcagaaagtaaatagcacgagaattcagagaagagcatgagactgggctggggacatgtgggaatgctcacggaacgtgggacttgaacatggtccctagagtcagcatcaggtgggctcacaagaggagaccgtgcaatccagagaagagggcaacgtgaggggtcttaggcaagggcaagtgcagtgcagtgtggctgggtctggaggctgccctggagtcccagcctgcaggacagcccaggtgtgrgccctgcacagggaccctcactcgcctgtgctcaccacgccctccctgcagcccaccacaggtccgggccaaaaacttctggccccgccatttggccacaggaagctatgctctatcacaacttttctggacattgcattcacctctgaaagtcagaacattctggaattttgatgcacttc

SEQ ID NO: 779460 - DNA, 505 bp, Homo sapiens
gtaccaaggctcaccccacgaaacaaaaacaggtcccccaaacagtacgtgctgcaaagctgcattgcgtagagcagaaagtaaatagcacgagaattcagagaagagcatgagactgggctggggacatgtgggaatgctcacggaacgtgggacttgaacatggtccctagagtcagcatcaggtgggctcacaagaggagaccgtgcaatccagagaagagggcaacgtgaggggtcttaggcaagggcaagtgcagtgcagtgtggctgggtctggaggctgccctggagtcccagcctgcaggacagcccaggtgtgggccctgcacagggaccctcrctcgcctgtgctcaccacgccctccctgcagcccaccacaggtccgggccaaaaacttctggccccgccatttggccacaggaagctatgctctatcacaacttttctggacattgcattcacctctgaaagtcagaacattctggaattttgatgcacttc

SEQ ID NO: 779461 - DNA, 602 bp, Homo sapiens
cagaatccgcattcacggagggagtggctctatggctgctgaagccatgtgtccacagcctgggccccacctggacgagagtatagccaacagggcaccactgcagcacacgggacacgcgaaagggaggcctcagaccgagcgcctgggaaggaaatccctggagaagcattttaaagatcttgwccatctgctgcagccagaccgactgtaaatatcctccgagagattccagaaggcgtcacctttaccacacagagcggtaaagagtgggctgctgtgaaaatgaaggaagctgactgctcaagacttacaatatttacaaaacaaatttttgtaattcagaagaagaactgaataggtaaagtagtcaaataccccagttgcccccaaaagcctggatcacgctgacgtaaatgaatacggcttcttaattatttctagtgcttcttcccttcacttcctgaagtgttcttgtttggtcaaaattatgaacagaacaacaccagaaagtgccctagaaaatacaaccaaaaggcttcccagaggacccaagaactggacaaagatgaacattcaaacacttttgagagctatgaaaa

SEQ ID NO: 779462 - DNA, 587 bp, Homo sapiens
tccatggatccatttctgactgtctttattcttttatcggaattttggttttgtgatttcaaaatttgggctggaaggggggttggacaaaattattatatctgaaccatgggaaaaaaacactggcaaaaatgctacaaatarctcacaaagaagctctcatgagtcaaaagggctccttcttcacagatctgctgagtggagttgaggaaaccaggcattgtgtgtgataaattctgttatccagagagactagaaacgcttcccccaaaatcaaatgagagacagaaccaggataaaatccaggtcccctggtcaacaatcattgcactttgtcactaaaaatacatttaccacatgagaaaccgggtctcagagagactcagaggcttcacctgtgttccgaggaatgtttccctgacaaggtagagatgacatcacaacggtggaggccttcttattataaaaacaatgcttctggccagaattaattatttattacatttatttagagtatctttgtctgccaaacgtgcaaacatttcccccagaaaactgaaggaatatagcgctacccgccgcacagt

SEQ ID NO: 779463 - DNA, 587 bp, Homo sapiens
tccatggatccatttctgactgtctttattcttttatcggaattttggttttgtgatttcaaaatttgggctggaaggggggttggacaaaattattatatctgaaccatgggaaaaaaacactggcaaaaatgctacaaataactcacaaagaagctctcatgagtcaaaagggctccttcttcacagatctgctgagtggagttgaggaaaccaggcattgtgtgtgataaattctgttayccagagagactagaaacgcttcccccaaaatcaaatgagagacagaaccaggataaaatccaggtcccctggtcaacaatcattgcactttgtcactaaaaatacatttaccacatgagaaaccgggtctcagagagactcagaggcttcacctgtgttccgaggaatgtttccctgacaaggtagagatgacatcacaacggtggaggccttcttattataaaaacaatgcttctggccagaattaattatttattacatttatttagagtatctttgtctgccaaacgtgcaaacatttcccccagaaaactgaaggaatatagcgctacccgccgcacagt

SEQ ID NO: 779464 - DNA, 599 bp, Homo sapiens
aattcaacaaataggtattgagatgccaccatgtgcaaggcatggtgctagctgctggggaaacagacagaaatagacaaagcatttactcttagggagctcagagtccagtacggaagacagacttgcatgaaaatacgytttgatgccatgtggccagtacaaccaccagacgcggtccatggttcagaggtctatgcggggactcctgtaagtaaagaaggggtcaggggaccagctattttgtgattccaggtaagcagctttccttatctggatctcaactgcaggatacaggcttgctaaggtctacttttagtaagagcaacagcagcttcagcaaaaacaacagcagccaacatttttttcctactatctgcctggtactgcactcggctcttagagacattctctcaacctcgtcacaactctctgtgatggggataccttcctccagagatgagaattccgtggtcagaatctgcctttgcaatgtcaacatttgccatggtcatgggaaaggatggaagcagatggtgtctgcctgtaccgacaaagaggttctggtctaagtctgagggaaaggaaagaagaaagaa

SEQ ID NO: 779465 - DNA, 615 bp, Homo sapiens
ttaaatttaaaatatgttcatcttttgaacagacattttacctccaggaatttattatgaggaaattataaaactatacaaacacgtatctatgatgttcattgtagaattttttaggtaggaaggaaggaaggtaggtaggtatataggtagrtaggaaggaagagagggagggaaggaaggaaaaaaactggaaatagctgaagtttctaacaacatgtttggtcaaataaattactctatattcataaagtgagagtcaatgagatttttttttgttttagacagagtttcgctcttgttgcctaggctggagtgcaatggcgcaaactcggctcactgcaacctccgtctcccgggttcaagtgattctcctgcctcagcctccggagttgctgggattacaggcatacaccaccacacccagctaactttttttgtatttagtagagacagggtttcaacatgttggtcaggctggtctcgaaatcctgacctcaggtgatccacccgcctcagcctcccaaagtgctgggatcacatagcgtcgccactgcgcccggccaatgagactattaaaacaatgttacagaatatttaacaacatggacaaag

SEQ ID NO: 779466 - DNA, 615 bp, Homo sapiens
ttaaatttaaaatatgttcatcttttgaacagacattttacctccaggaatttattatgaggaaattataaaactatacaaacacgtatctatgatgttcattgtagaattttttaggtaggaaggaaggaaggtaggtaggtatataggtaggyaggaaggaagagagggagggaaggaaggaaaaaaactggaaatagctgaagtttctaacaacatgtttggtcaaataaattactctatattcataaagtgagagtcaatgagatttttttttgttttagacagagtttcgctcttgttgcctaggctggagtgcaatggcgcaaactcggctcactgcaacctccgtctcccgggttcaagtgattctcctgcctcagcctccggagttgctgggattacaggcatacaccaccacacccagctaactttttttgtatttagtagagacagggtttcaacatgttggtcaggctggtctcgaaatcctgacctcaggtgatccacccgcctcagcctcccaaagtgctgggatcacatagcgtcgccactgcgcccggccaatgagactattaaaacaatgttacagaatatttaacaacatggacaaag

SEQ ID NO: 779467 - DNA, 522 bp, Homo sapiens
cccctgctttttgaagcctcacaaaccaggactgtgagggcaggaaggcttggggtctttgtgtgctgagcctcattagggttttaagaacctccctcctttcatctctagcttacgagagggatgattcattatcttccctcctcaggctgcagtagaagcagacagtctctgcctccctgcttgcctttcctccctcccattcactgttgattattgccctcaagaataacaggttgcccagctactcgagaagcttaagtgggaggattgcttgaccccaggagttcgaggctgcagtgagctatgatcgcttcactgcgctatagcctggcagacacagagagaccctatctcaagcaaacagacaarcaaaaaaaaaaaaagaagaagaagaagaagaataggttggatgctaactggtggcactgggtgacaagagcatttggggttgatgttggcatgaggatgagaaggcaggggtgcaggctgctccatacccctgtgttagccatccatcag

SEQ ID NO: 779468 - DNA, 536 bp, Homo sapiens
atggacaaaatgtattataaaaatatcaactctcttcaaactgacctataagattcaatgcaatcctggagaagcacttccaaaacggcagagtggagaccccccaaaattcattcctccataaaagcagtgagaacactggcaaaaaaaataaaaaataaataaaataaaaacctttttagaactctgtaaattaaccaaaaacttgcaacaatctcaggagcatttattcaagaaaaaatgctgactctcartaagaacagtgagttctgcagcatttttaacttcccctgttctcatctccctctccccagctctgaggtagacttgaaaatcttacaaccatggtagctgtgcaaagcagcaatgttgcagccactggaggaggcaggtggttttggggcacccccaaaggtcccatcccagagaactgtcactatttgactgcgctggcaattccctggaaaagccccattcacagatgtttttatttgacctgactcagagcttgccctactactggagtatttgttgaa

SEQ ID NO: 779469 - DNA, 601 bp, Homo sapiens; identical to SEQ ID NO: 770329

SEQ ID NO: 779470 - DNA, 601 bp, Homo sapiens; identical to SEQ ID NO: 770330

SEQ ID NO: 779471 - DNA, 650 bp, Homo sapiens
atgatgtgaaagacctgtaaacataaaacaataatatgttgctgagaaaatttaaaataaataaataaatgtagaaatacagtatgtttatggatcagatgactcaatatttcaaagacaccatttcacacaaactatattatagttttggtgcatttacccaaaattcacaacaatttcactatctctttagataaataaacgagctaatttcaaaatgtgtatgtatattaagggccaaaaaatagttgaaatattgttgaagaagaatgtgttgtgagatgtaaaagtttattataaaatgacggtattatggtaattgcacaacaaatgtagaaagatagcccagaaataaatctayttgcacattacaaaattttcactaaagagcatggaaaaagaaacattttattaataaaatatagtagccaaactgaagataaacatgaaattttttctactaccaaaaaaaaaagtccccattggattgtagacctaagtacaaatgacaaaatgagaaagcttcagaaggcaagatgatagaatgcattcaggaaatttattaagaaaatgaaaaaacaaaagctgtaatatatatttgtagcataaataatgaaaaagggactcacatctagaatgtattgagtaca

SEQ ID NO: 779472 - DNA, 621 bp, Homo sapiens
gaagtagtggcaaagtcacagcacaaaaagatgtatacaaacggattagaggcgtcattgcagctttttttgaaaatgatcttccacatcaatcttttagcctcccttcaagtttctcttctttaagatgaagtttaggaagaacctactcatcccatccataagttttgtgtgacttcctactctcagagaatcttttattgttttcctttctggcattaattatatytatcagcaaatattttagaacttgtgtatgtattaatgcttatccagtataatcaagtcaactcagtgtctactgagctggcaatgctcaatatttttttaaatgaatgaatgattgaattctaccaatgggtgaggcatgtcagtctttagtggaacaaaaactgaacattttttaaagtaatgaaaattaataattaagcataaaatgtgtgtttttgtatgtgtgtgtggatgataagtagatttttacattttcaacattgtgttggttacacaattctattttcatgaagtaaaaccaattcattaacttcagaaaaggctgtattcagaaaagaggattaaataaaattaaaccatttgacgtaggttagggaatgtgtctttgag

SEQ ID NO: 779473 - DNA, 574 bp, Homo sapiens; identical to SEQ ID NO: 770323

SEQ ID NO: 779474 - DNA, 620 bp, Homo sapiens; identical to SEQ ID NO: 770324

SEQ ID NO: 779475 - DNA, 616 bp, Homo sapiens
accaacaactcgattttacatttggcctccagatctgtcagagaataaagttgataaagcaaaagaaaaaaaaaaacagtgaaagctactcctggtattttctatttactcagtagaactattgttaactaactaatgttagtatcaattactacaagtaactacatactatacttacatcattgtaacttgtttattgtcttattacacttgaacatatttgaacatattttcttacctgttaatacagacataccacgttattttggactcatatttcttcataaatatatgtatgagtatataggggatgttttctatattaatatrtatatttagcttgggcacattatttatagaatttctactaataaagtattacaaaatattcttgtgtaaacacttttacactctcacatgagtatataatggaatggaatactagagccgaaattttttgcatctatatgtttttaaatattacttaccagtaataatgttacagtacatattcaggcagacatgaacaaaacaggagacagcctccccaccagaaatgtcaggtaaccatcaggtgatggttaggcagttattaaattgtctctctaaaataaga

SEQ ID NO: 779476 - DNA, 543 bp, Homo sapiens
ggtaccaaaacctagaacactaacaccaccaaatgctggtatccacacctatagaatctataaaaccaagagtaaactctaaattcaactatggacatggggtgattatgatgtgttaatgtaggtatatcaattgtagaagatgtaccatcctagtggggataatagagtaagctatgcatgtgtggggacagggttatatgggaaatctctgtatttccttctgattttttttctgcgagtctaacaccacttggaaaaaaatgtcttaaraaaattttaattgctcattactaaaatttaagaaagcaattgactttgtatactaaccttgcatcctacaaccttgctataatttcttattagttcaagcagttttgttgttgtgcattcttcaggattttttatatagactgtcatgtcatctgcaagcaaagccagctttatttttctttcctaaactgtatataatacttaacttttatttactcttttcttattgcattaggcagaacttcagtacaatgttgaatagatgtatgc

SEQ ID NO: 779477 - DNA, 543 bp, Homo sapiens
ggtaccaaaacctagaacactaacaccaccaaatgctggtatccacacctatagaatctataaaaccaagagtaaactctaaattcaactatggacatggggtgattatgatgtgttaatgtaggtatatcaattgtagaagatgtaccatcctagtggggataatagagtaagctatgcatgtgtggggacagggttatatgggaaatctctgtatttccttctgattttttttctgcgagtctaacaccacttggaaaaaaatgtcttaagaaaattttaattgctcattactaaaatttaaraaagcaattgactttgtatactaaccttgcatcctacaaccttgctataatttcttattagttcaagcagttttgttgttgtgcattcttcaggattttttatatagactgtcatgtcatctgcaagcaaagccagctttatttttctttcctaaactgtatataatacttaacttttatttactcttttcttattgcattaggcagaacttcagtacaatgttgaatagatgtatgc

SEQ ID NO: 779478 - DNA, 644 bp, Homo sapiens
gcagggctatataagtcacttattcattaaaaatgactttttattttgtttaggataccaaagttgcatttagttaagtgaacaggatcatcttttcatcatgccacctttactgtaaatagactagatcaaggttgtgcattgtactgctatgtttacacttaaacttgttaagaaggtagatcaaacctctcatggtaagaacatgagaggaaaaaaaagaaaagaaaagaaaaaaaatgatcgggtttaagagtcattcgcttatctaatttcattggttctgctacaaatgaaaaataaaaatgaatggaaagattcagtataaggagatgaaacagtgctgaaattaagaatcaaataagctgaaactaaatgrtaagctatcaaaactactaagatttaataaatgtagctatactgaaaacatatagaaaaagactaaaatgcctttgcaacaataaggaaatataaaaaattaatatactgttcatgatagcaataaaaattttaatctaaaaatcaattatttctaacaaatatatccattgcatcttaaatgaaaaaaataaataacaaaatgcttatctaaataaacattctaaggtcttgaaataggatgacaaaattctattaaggcactt

SEQ ID NO: 779479 - DNA, 660 bp, Homo sapiens
gacaaaaaaccaaacaccgcatgttctcactcataggtgggaattgaacaatgagaacacatggacacaggaaggggaacatgacacactggggcctgttgtggggtggggggagggggtgagatagcattaggagatatacctaatgctaaatgaccagttaatgggtcagcacaccaacatggcacatgtatacatatgtaacaaacctgcacattgtgcacatgtaccctaaaacttaaagtataataataataaaataaaataaaaaaacaagataaaaaaaaaaaacccgactcatattagggaaagtaatccgcttttctcaaaaagtcccttgatttaagtgttaatctcrtaaaaaaaataccctcacagaaacatccagaatgtttgaccatgtatctaggcactgtggacccgcaaagtagagacatatagttaaccattatataaactaaatatgattataaattatgaatccaatatattaattattctttgtttaactttacaaaatggtcttggaatttatataaggcaaagtagttaccaaataaatgtcagaagaatcccaaagtttccacaatcctttgtccttatcagatggatattctatgtacttattcttttgccctttaaagttcatataaagacttg

SEQ ID NO: 779480 - DNA, 613 bp, Homo sapiens
aggatgatccatccacagacacaataatagccggtgtttgatataagtttgtcctgcccagtaaactccatgtcaacaggattattccctgttgttagtttgtgcatcttcaggcagggcccacccagcatggggacttcacagagcagrcactccataaatacttgtgggatgagtgaatcagtgcacacagtaggctcaacaaacctttgattgattccatccacttctctccagtttataatagtattgtcaccaggtgcagtggttcaagcctgtaatcccagcactttgggtggctgaagcaggtggattgcatgagttcaaggccagcctgggcaacatggcgaaacctcatctctacaaaaaataaaaaattagttttccatggtcctcacaccctggtcagccagttgctcctcgtagtcttcccaaaggagatcattattccctacgatggccttcagctcctcatgactatcccactcactgctgtagatttcctgcagggtttctgatactctttttgaactttcatgcatcacttcagctgcactaaggaagttcttgaggtccttgtatagcttgtggtcttctgcctgttgatggtaga

SEQ ID NO: 779481 - DNA, 603 bp, Homo sapiens
ctagagaagatttaaagtgtacaggaagatgtgcataggttatatgtaaatactacaccattttcataacagacttgaacatctgtggattttggtatcctaagggagttctggaaccaatccaccacagataccaagggrcgactatacttatatatgttttcagtatttctaaaataattgaatatggctgggtgcactagctctcaactttaatcgcagaactttgggaggccgaggcaggaagatagcttggggccaggagttggagaccagcctgggcaacgtagggagactctgtctctacaaaaaataaaaaattagccaggcatagtggcgcatgcctgtggtcccagctacttgagagaccgaggcgggtggattacttgagcctgggaggcaatcataccacttcactccagcctgggcaacagagttagacctagcctcaaaaataaaattaaattaaataactgagtatgatttatttacagaattgtaggttctctgttgaactgttacatcatattttaaacacaggaaagcagagatccccggaaacttcactggctttttgaactgctgctggaatcaccattgagt

SEQ ID NO: 779482 - DNA, 584 bp, Homo sapiens
tgcctattagacacacaagtggaaatgttaaatagggaacttgatagaccagcatggagtgaagggaaagatcaggactggaaatagaaaagtgagtgtcattagcatttaaacaaagttgaaagcagaaggctgaatattatcgtaattactgccagcacctgcttctcaatttacagctctttctctagggatgcaggagtgaatgaaaagctatttttcaatctttctgttccacctttcccttctctaccccctcgagattaccccatccagcttcaagtggtcactgtctgctattcctggaagtgactttgcctctcctgcccttcaccgcatttgggccggtgcagctggactggtgcacgtgggagcacatgctytggtcatctgctaaggcagagtcttcccagtgctggagcttggctgctttgcccatggttccaaactaagtctaggcctgacctctctaaagcctggacccctgacaaaggcaagtcttttcccaggagcttgcctgccactcctctcaccattccacagggccttaatgtcttttttgtttgttttttgttgttgttttc

SEQ ID NO: 779483 - DNA, 574 bp, Homo sapiens
aagagtgtatcaagtgcccgcattgagtatctataaggcatgctcttgactttcactgacagagagaaggatgctcctgggtgactttcatgtatgactgggcttatcagaattgtgacttgaatttgatcagtagtttcttctcaagaagttagggagctacatattagaggccctgcctttttggctttatatgattccagatcaggggttggcaaatatttttaaaaacagccagattaggccgggtgcggtggctcacgcctgtagtcccatagtcccagcactttgggaggccgaggctggtggatcacaaggtcaggagatcgagaccatcctggctaacatggtgaaaccccatckctactaaaaatacaaaaaattagctgggtatggtggcgggcgcctgtagtcccagctacttgggaggctgaggcaggagaatggcgtgaacccgggaggcggagcttacagtgagccgagattgtgccactgcactccagcctgggggacagagcgtgagactccgtctccaaaaaaaaaagagccagattgtattttacacttttcagtc

SEQ ID NO: 779484 - DNA, 545 bp, Homo sapiens
taataaaagacattgttgcacacacaaaaaaatagagtgccaaggtaacactgcattccttggaggacttcagaaacaagattctcccatttgaggagtatagctttcctgaaagtgatcagttgctgtagaaacttgataaatataagcagcaaratatgagatacaattatgactttcttactatttctgagaaagacagggccctaaaacagagcagcctagtcatggactctgagatttgaaggcagagaccagtggagtagggaagtgctcacatccagccaagctgagtggaagcgtgtggtctagaaggaaagcaccaactgcgattcttaaaaccagattctgaaattaggagggtcaaagacatgtacagactgccagtgctggtgggcaagggtttgagagtaaatatcctgtgtttgaaattaggaatagtttaaatcccatgggtttaaatccctgcaagagaacaagaaaagaaaatgtaaaccatgcccactcctcactccatcatcccgctgggcttagtagcttaggtt

SEQ ID NO: 779485 - DNA, 539 bp, Homo sapiens
ttcttaaattacctagtctctggcagttctttatagcaataggagaaccgactaacacgaaacatgagtcaccgctcccagcctcacctatggttttaatagcagcactactgccttcagcccactccaggcacayagaggctccgtgggggcatccatcagcatccttctgtgccaggctccctgccagcccctggtgtgagagctcaggaggagcccaggagggcttcctgcaggaagagacagctgaggaagtcccgagagccgagtgaaggggagctctgcccagtcaatgttcagtccctgcaggtgggtctgtgcagatacggggcaggcccatgtacttgaacggagatgctctcggcctcacagaattccaaatgccccagatgcctgttaacttttcacataccctgtgtccctgccagtgagacacacgaaggctgaagcatagaacaagcttcatgccaatcactgggtgggctggcaccctcctcactgccagcacccaccgtggaggatgggcaggagccaggcag

SEQ ID NO: 779486 - DNA, 601 bp, Homo sapiens
ggcggccctgtccacagaagacctgcctttgtcagctctaagctttttgtttttgttttgagacaagagtctcactctgtcacccaggctggagtgcagtggctcgatcttggctcactgcaacctccacctcgtgggttcaagcaattctcccacctcagcctcccaagtagctgcgattatgggctcaggccaccacgcccggctttyttttttaaaagctcactgcaacctccacctcccaggttcaagcaattcttctgcctcagactccctagtagctgggattacaggcgcacagcaccgcagctggctaatttttgtatttttagtagagatggagtttcgccatgttggccaggctggtctcgaactcctgacctcaggtgatctgcccacctcggcctcccaaagtgctgggattacaggcgtgacccaccgcgcccagcctttttttattttgttttgttttttgagacggaattgagctcgttgcccaggctggagtgcaatggccgaatctcggcccaccgcaacctccacctcccgggttgagcaattctcctgcctcagtctcccgagtaactggagttacaggcgt

SEQ ID NO: 779487 - DNA, 614 bp, Homo sapiens
cagcaactgccactggcaggcacccacagccacaattttctccaggcacattcttgctctagtgcagaccagagccggcagaaaacagggttcaaccagggcggggatctaagccaggtaaggagaaaggcagggcaggggagggtctgragcatggctgaagggcaggtgggggcttcagcagccctcaggaggggtgggtcctgatcagggcagtgccagagcccagatgtcatgtgtggcccaactcatcaaggagcccaagagagggacatacttggctcttgcaagactccagtctagaaacaaactctgtcagcctgggcacaggcagcctctgtcctgccccagcgatctcaaccagctcagccgaccagaaatgaatgcaggggaggcagggagcactgggggaggcggggagcatcaggggagggtagccactcagtacacaggctatggatcacatttcagagactgactttacacacccactcagggccggggggcatcccaggcctgccagccccaacacgacgaccatccgcaggggatgcaggaggcactggcccagccagcccctcaggtagctctcaaaccccagccaggtgcacagg

SEQ ID NO: 779488 - DNA, 645 bp, Homo sapiens
aggttctttgctccatgacgatgttcagacattctttcagactccaggaaatctttctgtcccaagagtaactagttcgtttcttctggtggccagtgaaaatgaagtgcagattaggaagataaaagacaaatgaaggccaggcgcagtggctcatgcctgtaatcccagcactttgggaggcccaggcaggaggactgcttgaggtcaggggctcgagaccagactggccaacatggcgaaaccatctctataaaaaatacaaaaattagccgggtgtggtggtgagcacctgtagtcccagctaktcgggagaccgaggcatgagatttggttgaaccccagaggtgaaggttgcagtgagccaagatcacgccactgcattccagcctgggcaacagagcaagactctgtgtcaaaaaaaaaaagacaaatctgcccctctcctttgacgattgtaggatcacatgaccacagggttccgcagccacctctgcctactgctcagttgcctctcactcctcatttatcctgaagtagctttttaaatgtccatctgaataaacgaattttataaaagccagcaaatcccctggaaaatgaaaaaatctaaaaaaggaactcacctggggtttgttcattttc

SEQ ID NO: 779489 - DNA, 644 bp, Homo sapiens
atagggtttctcttctgtgtgctttccctgatggacatttagggttgacttatagtagaaggactgattttccacattcattaatttttttttttttttttttttttgagacggagcttgctctgtcacccaggctggagtgcagaggcatgatctcggctcactgcaagctctgcctcctgggttcacgccattctcctgcctcagcctcccaagtagctggkactacaggcacccgctaccacactcggctaattttttgtatttttagtacagacagggtttcactgtgttagccaggatggtctcaatctcctgacctcgtgatctgcccgccttggcctcccaaagtgctgggattacaggcatgagccaccgcgcccggccaacaaattcattacatttgcaggatttctctcatgtgtgttttctctaataatcagcaaattgtgactgctggaagaaagttcttccacacgcagtacatttgaaaggtttctcccctatatgtgttttctgatgtttagtgaggtttggtttcacatggaaggatttcctacattccttacattcatatggtttctcccctgtgtgagttctctgatgatgactgaagtttgattttgcttaggatttcccattac

SEQ ID NO: 779490 - DNA, 674 bp, Homo sapiens
agtctaattttaggtctgaaattatctcagtaaacaagtaactctcaaacagtatttaatattggtaactataatcagagatgactgggaaacagttggctttgctgaaataagaaaaccaaccagttatgcggcaatgtgatatcaaaagtcaagggaggatgggcgaggtggctcccgcctgtaatcccagcactttgggaggctgaggcagacagatcacctgaggtcaggagttagagaccatcccagccaacatggcgaaaccccatctctactaaaaatacaaaarttagctgggcatggtagtgcatgcctgtaatcccagctactcgggaggctgaggcaggagaatcacttgaacccagcaggcagaggttgcagtgagccaagatcgtgccattgcactccagcctgggggacaagagcgaaactctgtctcaaaaaaaaaaaaaaaaaaaaaagtcaagggagatgactagtatgtgagaatgagagtgctgcagccactggggcacatgttttttctgaccaaacgaagaaacagacaaaaataaagcaggaaaccccctgggctttaatttactcacatataacagatgcttgttggctcttgtttcttgcagtgcattgaatatttttattataccgtggcgggcattttgctgtccaac

SEQ ID NO: 779491 - DNA, 594 bp, Homo sapiens
atctggattaactcagtcaatctgggatttatatatatatatatataaatgtatataatatatacatatatataatacatatatatgtatataatatatataaactttaaaaggaaaaataaagcaagccagtgcagacatttaggaagtaatgaaaatcttgtcaatacagctgctgataaaaagcaggtgagggaattcagtacaacccacttaagcccaggattccagacacctgcattcaccagagatttgaagtcattgcatcaagctctatacctaatccgatatcrcaccaagttgagccccagtcaaacttctggtttcacagtatgatttccaaatgcactctccacctaacctttgcccattactcaaaaactgaaaatccaaatttgtagacatacctttcatgggatactagattcagaagtatctcaggaccagagtcccggatattatgtgtgtctcaaaccatttgttttatttgcgactatcaactcacatgctgatggttcttaatccaacatacctccattcctaagttatttaagtaattgatagagttccaatatccattgaaataattagaat

SEQ ID NO: 779492 - DNA, 642 bp, Homo sapiens
gttttaaatttctctgtaagatatgaatagcaactttgcattaaaaatatgacagcagacatcttagttataagagacacacctaaaataagacataaaactggtaaaaatcagagaagaagcaaatatttgtcagtaaaactcaaacaaaaaaacccaaagtagaattcaggacaaaaagtactaaatgataaaaattccatttctattgatgggaagatgcaattgacatctaattgaaacattacacatcaaataacaagacttaaaaatacataaagcagaaattcttagaaagtcaatgcgaagttgattaaaaaccagcattgtgagaaatattaactcatcggtcaactttagctagaccaaggagacacaaagtaaataataacttaaagaattaaaaccataatttyagatgtttaatttatatattaggctcccttataaacatagaagatactttgatcttacgtatctgtagatcatttaaaagctgaccataaaacaagccttaataaattctcccaaaaaagaattcaaaaacacagtctcttccataatcggttacaattaaaaattaataatagagaacaaatttgtaaaaaccctccactaaatttaaaacatctccaaaataac

SEQ ID NO: 779493 - DNA, 642 bp, Homo sapiens
gttttaaatttctctgtaagatatgaatagcaactttgcattaaaaatatgacagcagacatcttagttataagagacacacctaaaataagacataaaactggtaaaaatcagagaagaagcaaatatttgtcagtaaaactcaaacaaaaaaacccaaagtagaattcaggacaaaaagtactaaatgataaaaattccatttctattgatgggaagatgcaattgacatctaattgaaacattacacatcaaataacaagacttaaaaatacataaagcagaaattcttagaaagtcaatgcgaagttgattaaaaaccagcattgtgagaaatattaactcatcggtcaactttagctagaccaaggagacacaaagtaaataataacttaaagaattaaaaccataatttcaratgtttaatttatatattaggctcccttataaacatagaagatactttgatcttacgtatctgtagatcatttaaaagctgaccataaaacaagccttaataaattctcccaaaaaagaattcaaaaacacagtctcttccataatcggttacaattaaaaattaataatagagaacaaatttgtaaaaaccctccactaaatttaaaacatctccaaaataac

SEQ ID NO: 779494 - DNA, 637 bp, Homo sapiens
cctctagaatcatgcattttcttattttaccatttccgaagagttttgtttgtggaggtgatataaaattttaagcaacaacttcccagttctcctacccaaaactagcagacacgctttcattaattcccaatgtaaaacgtctgcttctttttctgcatgctttttgctttataataatctgttaatgaaacaaaaaataaaaatcttctctacagtaataatctgatcttgagacagcagtaaaatacctcattgctgggtggtgagattgtgacattcaggggaactcaggccaatcagcatacagataatatgggttaatttacatactgtatttctattggatgagccgaggtaaagccttatcttgatgtcacagtcgttacacaaagccctatgttggtaatactgaaatgatgttaaatttccctgatttgttcttgaatttcctacgtccatttaaatacatggataatagtttgtttttttmgaaaagaatatacacaaggcactaaactttggcattcccttaacctagaaaaatcaatcctacagccatgctggaagtaacttgagggcatttccattcaaataaaacattccactttttgcaaagcaaatgaattcaaaactc

SEQ ID NO: 779495 - DNA, 475 bp, Homo sapiens
ttacaatgagttgtaattataatgatttagttcatatataattgccaatttgaagggagaaaaatcagccccattttctgttcttttattacaagagttcttcaccacctacacaaaccaccttcttgaaagggtccatggttggcaaaaccaaggctggcaggattaagctgtcacagagaagagaggattagggagaaaatatgaaacatagcattaaatctgtatttacaaaatttatatgaaatattgcactagagatacatatgtatatgtacacrtatatttatagcatacatactgcattaaatgcatatgtatatgaaatatggcattaaacatatattgaatggagaaaatagtagttctcttaggtatccacttcccaacaaccattcagacagccctcctcttgaattgccttcagttccttatttaggtggcggcatcactctggggtcagtctctcccctgt

SEQ ID NO: 779496 - DNA, 646 bp, Homo sapiens
tcaggaactattgcaataggggaaaggagcctcagaatacaactgggctcaagtctgaatacagcaaagacaagtgggaatttacagctgtgaactaaaaattaaaattctaagccccccaaccatctgaatgaacccctcttcttagccaagggcattccaaagttaacctgaaaatgtagttcaggccatgatgggaagtgggggtttgatgtgcctgattaccttcctccctttggaattcaggcacaactgaccagcattaacataaaaacagagatcttaatactttttgtagcaataagataccaaattccagcctgactctagtatagcatcacctgaccgacagcaggccctgaaagaaatcagagtattttaccctaaaatgtatttcttcgacatatcttgaaatggccctgcaaagctrtctcttgtagggaaaaaatctacattctgtagggaatccccttccatttccaggtcttggtcctgatccaggagagaattaacagagtctggcggcttttttagtctgataagaaacatttataagctattctctgaagcctgctaccagaatccttcatctgcataataagaaccgtggtctccacatcccttctcttaacccagacactccaag

SEQ ID NO: 779497 - DNA, 610 bp, Homo sapiens
  misc_feature 224, 281: n = A,T,C or G
gccacagattccggggcctcgtcctcactctggtctccgaagagatcagggtggctcaagacccgcttcttcagcttggggcgtcctgggaggggtctagcgagcaggccttccactccaccagcttcctgcaggggccttcgtgtgcttcctgtctgggagggttggggsagcaaatggacttcggtggccgaaaatggcttcttactggtcgcttcccccgnctcttgcggcaggggctgctgcctgcaggcccttcttgtccacaccgggcatctccnacggctgccctcagcccttgtccttggtcttgtcctcctcctgggcaccatctttgcggctggggtcccgcttttcttactcgggtttcccctcttagaggcagctaccatcctgccaggccaggcctgggaactgggtgtggccggggactccccagcagccggagtcccccacgtggcgctgcatggctatctccttggtcacccgcaggccgccccccctcagcctccagaccctccctggaggaaggctgcctggcggcttggctcccggggctggccctggctttgagcagggctggccatggcgggctccttggcggcatcag

SEQ ID NO: 779498 - DNA, 615 bp, Homo sapiens
catgcgtgtcctcaaccttggcaaaataaactttctaaattaactgagacttgtctcagattttctgggttcacataaccaaaaaccacttataccccaaaagctattgaagtaaaaaaattaaaaaattaagtaaatcctctaaagaaagaaatggggagtctcttttgcttcttgtactggagaaaattcaagtttcctttttttacatttgtctttgccgttacaccagaacccgagaaggctcccataggcccttttgttttggggtcccatccctagctggatgccttgctgaaggtcagatgaatctgacccaagagaaagttatattgttggttaaaatgggttgcagcacagcttccagtgcaggaaggckagggaaggccggcacaggcttctaaatcctccctctgctgcttgctctccagaggcaaaccacagacacctgtgtccaccaggcacacccacttgaatcctgcagtccagagtcctcataggaagctagtcgcatggacacgagcctgctgtgtgacaggctgtgattgaagttgaggacatcaagtcttcatgtttatgtgagacactgctgactgaacattctgcccccgctgc

SEQ ID NO: 779499 - DNA, 611 bp, Homo sapiens
tatgagcctggtagccaatagaaaaagcagaatagttctcgagctccatcaaggctcttttactaaaaaaactttcattgttttacctgtcatggaattccctggaagaacccacttaataggccctcattatttgacctaatttaaagctcagcaagggcaaacaagcttttccccagatacatttggcaaaagccgtaagagacaattgtttaatgtttcagctctctgaagcaacacacaacagttgaagccaacaataggtaaaccaaaaagctggaaaagaaaagctggtgmatggaatttccagagaaatctttaaaaagcctcaaagtattcctggactctggaagttcaaacacatgtatagaggtatgttcatgtccaaggctaccttcatgctcatacccaagaaggccctaagctctcacttttgtctgttcttcagattccgcacaagcaggaagtgaagactaaggtaattttcaactacctggctgaacattgaaggtgtgtcccaacatgcacacagagaccctctgccaaggtagggagatttatcagttccaggaaactctgaaaaatatctgtccgttgattagctacccact

SEQ ID NO: 779500 - DNA, 530 bp, Homo sapiens
ttttttgtatattagtatcagcccaaataactgttagattactttacattttcttttaacccttggacaaacaatttacatctaaatccaataactttaagaaatgtgttcatttgtattgctactagagctggctaaatttgtatagatgtatcagttgagatgtaagtgataatttttggaataaaagttattttgtatctttaatagcggtaaagcacgtgttcatcctatgaccagaaggttttctgagaacagtaatcacattcagtctccacatctccggggtccaaaccctttrcattgggcttcattgaaaggataaattggagtttgagttgataaaaaagttattttaatgcttttacttcatgtaccttttctaaatttttcttagaagatcgatattaacactggagctattttaggtaaacaatcagattttgaaaataatttattttggggaacaattctagtcctattagcaatatttcttggttggaacttcattaaggtggctttgaaaagga

SEQ ID NO: 779501 - DNA, 693 bp, Homo sapiens
agtccagaaacatttgtcccaaatgaaattatatccatccttatgacataaaacagtaaaaccacgaatttattagctactttatttttcccaagacattttcagacatctctttgcttttgttatcattctttgtaataagtttaatgagcagatgtgatttatgccatgtgtttgtaacagcccgaactttgatattgcatttttcatcactggcttccttgcatttgagatattttcaccaggtttagaaagactcttttctgttttgtttacaacagatgctagagaagtatagccaagaaagaaaagagtaatgagacttatctccatrtcctcccatcggtttctcaactagatctgaaaaatgctacaggcagccatacgaagagcaccggaatgcaaagggttggttctctcttaaagacacacagtcttggggtcgtatttttcaaactgtagttcattcatacaacagcttttttgagtaattgttacagggtgaaatgcaaaaacaaataacacggaagtccctaccattaagaggcttactgacagacttgaaaataggaattgtcactattttaaaataccatgctaggaaatggagaatgtttcctaatggctatgaggttttttagaggggaaggggtgacaaaaatattctaaaaatagaccatgttacacatgatc

SEQ ID NO: 779502 - DNA, 693 bp, Homo sapiens
agtccagaaacatttgtcccaaatgaaattatatccatccttatgacataaaacagtaaaaccacgaatttattagctactttatttttcccaagacattttcagacatctctttgcttttgttatcattctttgtaataagtttaatgagcagatgtgatttatgccatgtgtttgtaacagcccgaactttgatattgcatttttcatcactggcttccttgcatttgagatattttcaccaggtttagaaagactcttttctgttttgtttacaacagatgctagagaagtatagccaagaaagaaaagagtaatgagacttatctccatatcctcccatcggtttctcaactagatctgaaaaatgctacaggcagccatacgaagagcaccggaatgsaaagggttggttctctcttaaagacacacagtcttggggtcgtatttttcaaactgtagttcattcatacaacagcttttttgagtaattgttacagggtgaaatgcaaaaacaaataacacggaagtccctaccattaagaggcttactgacagacttgaaaataggaattgtcactattttaaaataccatgctaggaaatggagaatgtttcctaatggctatgaggttttttagaggggaaggggtgacaaaaatattctaaaaatagaccatgttacacatgatc

SEQ ID NO: 779503 - DNA, 612 bp, Homo sapiens
tcaggaccaggcgctggaagctgattgtcgcagcagcagtctgctcccctgagttctgaaaggggcgaacccattcaatacccacaacagagtcccatcccgagagggtgtcaggtgtagatctgctcacgtatgcttctcctgtcctgtacttagtgtttaacccgccacgaggacggcacattcatccacattaaggctctcctrttgtgaactgatgcatttcaacatgggaatatcatgactcgccttttatctgttttcctattgttatggaacatctgaatttcttcttttgtgaattgtctgttcgtgttccattgcctggttttctcctgggagatcctttttcctgttgacttgaaaattattcatcttttgtgctgcaggagaacaactggaatctcttaaattacctgttctcagcagtcttgctgaagttcactgtgcaatcattgagcctctagagtaattgtacaatttctttcatggtcacttgttttctgtatttttctgcatttttggaagttttggtcacgggctttctatatttttctgaatacattttggaagtttgttccctgaaaacgtatctatttcaacaagatgtta

SEQ ID NO: 779504 - DNA, 612 bp, Homo sapiens
tgtacaaaggagttgtaaaaatattcttataattaatttgagagcaacataaatgtcaaacaataaggaggcaataaaataaatttcagtatatcagaaaaatggaattagccataaaagataagttcaagaaataacatctaacgatgaggaacaagatttaatttacaaatataaaattaagtacgtaaagttacatcttgtaaaccttatttcaaattggaagtctccaatgacaagaaaagggatatgaaaattgtatggatggggtgatctcaattataaggaagaaaaattcataaagactaaagtatttcaacatgtaaataggcaggggatctgagggktggcattctgcaatgcaatcctgtcactaactaaggtggctcaaattccacaggttaagggcacagttagcacaagactgccctcactttagatgccagccacaagcttggggttcccaggcaaccctaaccaactggttacaaatccagaggcttccaccatccactgaggttcaataattcagaaaacaactcacagaactcaagaaagtcatatacttatgattatagttttattacagaaaaaagtatgtaaataagaacc

SEQ ID NO: 779505 - DNA, 642 bp, Homo sapiens
ataaaatccagacttcttaccatgtgatattagtcaggattgacttattattacttaaaagcacaaagttttatttctctcttactcaaaatctgagtctccatgactcataatgggcactccagcctgggcaacagagcaagactccatcttaaaaaaaaaaaaagtacactatacattgtaaattgagattcaacataacctggatgtggtgccactccccaacctggaggatcaccaaggcagggctgtcattacacacctgtggtgtatagcagtggtttctcaagatgaggacctcttttaatcccttttccccaccaaagaatcwgaccttacgtagtggaagttgtgcttttattatctaatggtgtatgtaaggcaaaagacatttggatttcaataggatttttagataaatttataggttttaaaaattagccacaacagtctctttatatgtttgaaaaatagcattacatatatgtataaagcaaaaacccgtgagagatcctggggagaagaattgcctggagggggaaattgagtccatctccaatgttcagcacctcttctctttctatttttgaccccctggtttcctgtagacatccacacaaatcttgaggtagaagtgaaaac

SEQ ID NO: 779506 - DNA, 596 bp, Homo sapiens
tccatcaagcattcatcttaaaaagtttttgtaacaatagtattattgaaagcattaaaatttgccctttggaactgcccttagggatttggtgctttcttttagggcatgccacccacacggttccatggtgccaaacaatttttttttgtgggcgaatgtgctttttaagaactactggttcattctgaaccaagtctgggaaaggtgagtgacaaactccttgaagacaacgcctgaaaagaggtcattttggagcaaatattttaccctactggtagtaaactcagagaattctctttccccaagaggtgaaatcatttgaaaatatacaatgaaaacgatgggtttatatgaatatatacatcttaggcctataayggcttaagatggcttacaaggtgaactgagatgctcaaaatattaatacttgtttaaattgtacggctgatcatacagaggaccacaggtctctctccctacccctagccccactcccaaggataggttttgtgactgtatagtaagaaacaaaacactgagtttgataatacagttgcacataagtatatagcacaatatatactatatggcat

SEQ ID NO: 779507 - DNA, 618 bp, Homo sapiens
gccccatccagccacactcaccttagaagccactgcagcacagagccatgtggcacccctgctctcaggaccctccatctatagggtgggggatggtgctagaggagaaaacgagggaggactgtgatcaactcacatgtgacaggggcaagaagtgcttcagggttatggaaggggtatgttgcctttgaacttgcagtagcttctccaatctccctgcccacsctaagctctccatgactcacctcctcttccggaagctgcacctgcatttagggaattacagtggatgccatggatgaagggatttaaagggccttaaaggactggggcagggtgaggacctcaaggagaggctgcctgttcagaggcacagggcaggaacgtgtgcgtatgcttcaggaaccgtgggcaggtgggtgtgcatgtggctcagattgtggcagaggaacaagtagaagccttcctgggaggctgggaatactgggctgggatgtgcaggctgcattctcaaacagtgggggccgtcggaccacgacaccatcagagcagcttccggaagaggaggtgggtcatggagagcctggggttgggcagggagattggagaagaagctac

SEQ ID NO: 779508 - DNA, 564 bp, Homo sapiens
tccaggtgctaacctgggactggtctggtccctcatcagctcaaagaggaatgccagggaggccgacctagagtaaggaggcgttgccatgaggcgccagggcacctggctcccagtattccatttcaccatggaagcatcgcccactgcctctcccatcaggggtctgcagtgcgcccgtgccttcatttaccctaaytccgagcccacacgctctccactgggggttcggcacagacagacatttctcctcatttctcacccctgctccttcgcaggtgccaaccacagagtgtctccctgaccctccagagtggctgcacaggggccctgcaggatttgctagcctgccaaagaaaccaactccattaaaagatgaaagaacacatttgaaaaagggctcttatcttggctctgtcccaacttgacagcccccaggtgaagagatccaaggaccaatccacctttccacaggcagtttattcccctcagcccagcaaatgccttctctctggattttcctggtcatctctcctcaggtgactaagccagccagtcatggca

SEQ ID NO: 779509 - DNA, 564 bp, Homo sapiens
tccaggtgctaacctgggactggtctggtccctcatcagctcaaagaggaatgccagggaggccgacctagagtaaggaggcgttgccatgaggcgccagggcacctggctcccagtattccatttcaccatggaagcatcgcccactgcctctcccatcaggggtctgcagtgcgcccgtgccttcatttaccctaattcygagcccacacgctctccactgggggttcggcacagacagacatttctcctcatttctcacccctgctccttcgcaggtgccaaccacagagtgtctccctgaccctccagagtggctgcacaggggccctgcaggatttgctagcctgccaaagaaaccaactccattaaaagatgaaagaacacatttgaaaaagggctcttatcttggctctgtcccaacttgacagcccccaggtgaagagatccaaggaccaatccacctttccacaggcagtttattcccctcagcccagcaaatgccttctctctggattttcctggtcatctctcctcaggtgactaagccagccagtcatggca

SEQ ID NO: 779510 - DNA, 542 bp, Homo sapiens
  misc_feature 165: n = A,T,C or G
acatacatactcatttctctcaccccaactataataacaataagtatgttggtttacaatgataacttttctctttcttgagcctagtttcaaagtaattttacttcaatctcatatggcacaggacagttaaacagtgataatgggagaaatgggtttaagtgnatgaggaacagatactcagagtcagaattagatagaagtgaagcattatggagcattagagatagagggattgtaagtcaaaatctatgacattcttagcccccacrcctgacacatcacaccactcctctaaaagatcaagacattgtaaacatgaactaatataactatattctgacatagctagaaactgaaactgcacccttcaataactcactgggttgccctctctagtgccttgatatttctgttttataaggctttggtatcacataggtaactaactgtagtctcttatatatggtatctaaggcagatttgttgatacagtctacacattttataaagttatgcattcttggaaacataaaattcta

SEQ ID NO: 779511 - DNA, 604 bp, Homo sapiens
tgatttttgcacattgattttgtatcctgagactttcctgaagttgcttatcagcttaaggagattttgggctgagatgatggggttttctaaatatacaatcatgtcatctgcaaacagaaacaatttaacttcctctcttcctaattgaataccctttatttatttcccttgcctttttgccctggccagaatttccaatactatgttgaataggagtggtgagagagggcatccttgtattgtgccggttttcaaagggaatgcttccagtttttgccccttcagtatgatattggctgtggrtttgtcataaatagcaattattattttcagatatgttccatcaatgtctagtttattgagaatttttagcatgaagggcttttgaattttgttgaaggccttttctgcatctattaagataatcatgtggtttttgtcattggttctgtttatgggatggattatgtttattgatttgcatatgttgaaccagccttgcatcctagaaatgaagccaacttgattgtggtggataagcttttgaatgtgctgctggattcagttcaccagtattttattgaggatttccgcatcgatg

SEQ ID NO: 779512 - DNA, 548 bp, Homo sapiens
catgtttataggagtattggtctgtagctttctttttcattttctttttttttttgttttgttatgttcttccctggcttttttttttattagggtgatactggcttcatagaatgatctagggaggattccctctgtctctatcttttggaatagtgtcattaggattggtaccaattcgtcaatgaatgtgacagaattcagctttgaattttctggtcctaaattttttttactggtaatttttaaattaccatttcaatctcrctgcttgttattggtctgttcagagattctataccttcctgattcaatctaggagagttgtatattttcagaaatttatccatctcctttgggttttctagtttatgtgtgtaaatgtgttcatagtagctttgaataaatattttgtatttatgtggtatcaatagtgatatctccagtttcatttctagttgagcttattgagatctcttttctttttttggttaatctcactaacggtctatcaattttgtttaccttttcaaagaaccagcttttcg

SEQ ID NO: 779513 - DNA, 641 bp, Homo sapiens
gtatcatttccaacatatgaaagatgggtgctgctcctgcccaacaatgtgacttggaagacctgacaatatcaatttacaatggacagttccagttgcatagtcactgatgtcagagtcggaacttaggctgtaataggccccaggaacccaacaggagctgcttttcaggcagctataaaagaaaaagaaattacacccaaactcaagagtatagtctgaaaatttcctactgggatctrgcagagactccacaaggcatctttgtctatgatgagtacctctggtttacctagatctactggattatatggcctgagtagtaagacagtttataccatagcctaaatctgacacagagcccatgcttgctctgggtcccacctaaaactggaatcctttcaagtcacacagtgaaagggtcagagcactagttttaagtgtgttgtatcttgtctctgaaatccaaagcagtagaccaagagctgtgttgttttagtggatgggatacacgatgtagtaacatatcctattcatggagaggatatcctccagatcatcaaacttttaaaacttcactgacatgtcaggccctgaatatttgaagggtttgtcttcaaccatctggcatgcaatgtgtc

SEQ ID NO: 779514 - DNA, 658 bp, Homo sapiens
ctatttatgaaaaatacaagtcaaaacaaatcaagaggaaagtatatagaaataaacataaactttaaaaactctcttgcagattaatttgcaaagtagggatagggaacctgtaatcaaacctagagttgaaaaaatagaaaggagaaagaggaagaagaggagactaggaataagaagaatgaggagttgaaaaaccaaaagaaagtaggagaaagasggataccagtgcctcacaagatagtgaactaaccttgtcttctggttgtctcccaaaaattcaatgataaagaaattatggaagtaagatggaggaactaatattaaaactgtgactaactcttggagagactaaagctgggatgaactaatgtgaaaaatttaacagtctgagaggtaggaagaaaggatagtgtagagattttacattctgctcattcctctctaccatattttccagggaaggtcactagtggcctctgctactgtaagaaagaaatcagaaccaagatttcatgccgctcaggagttcctcggtaatattggagccatgctggattgagattctgagaaaagtaaatgcaagctgaccaagtgtcataggacattgactcttccatcctattctcctctaaacctccaaggatggtggatgagc

SEQ ID NO: 779515 - DNA, 604 bp, Homo sapiens
aagatctaatatctattgaagaaatttaacatatttaaaaaaccttcccacaaagaaaagaacgaaatggcttccttggttaatcctaccaaatttttaaaaacagtaatgccaattctacacactgttccagaaaactgatgaaaccataacacttccccaaaaggatttgtgagcagaatatattaaagaattctyagctgggcacagtgagtggctcatgcctgtaatcccagccctttgggaggctgaggtgggcgaatggctggagcccaggagtttgagaccagcctgggcaacatagcgagatgtcgtctctacaaaaaatataaaaattacctgggtgtggtggcatgcatctctagtcccagctagttgggaggttgaggttgggggatcacttgagcctgggaggcaaaggctgcagtgagcccagattgcaccactgtgctccagcctgggtgacaaagagagaccctgtctcaaaaaaaaaaaaaaaagaattttcaaaaccaaacaataagaaaacaaataactgaaactgaattggcaaagtttttaaactgtaactacaatcaaataagatatatagatggctaataaa

SEQ ID NO: 779516 - DNA, 565 bp, Homo sapiens
tttaattaaaccattgtgattctgcttttggctgttaagtcagatagtgataactgaaactgttaagtcagatccggaacttgaggactccagggtccagtggagtccagtggttctagtgtcaggctctctgtgccttatctcatgggaaccttctgagaaccaggaggtagtggctgagatttcccccactagagatgaagggacctgcctcggttaatgagtagtagcaccagaacctgaatctagcccagactagacccaaagccagtgattctaatcaccatgcctcatcacttactaatcgcatagtagctaatacctagtgtagtggatactgtaatgtgccacccaggaccccctggaagaatgaaggattcacacccccagctgatgatagtattgccrgagaatatctctctgctgtcagtctctccaacaattgactgaggctgaaaacaactgccttgcccaaggtcaatttccttccaggagccgcccacatctaatactgattgtttcaatgtgcaacagtactaaagggtcattccggcaggagacctgg

SEQ ID NO: 779517 - DNA, 589 bp, Homo sapiens
tgtgattttctctgaattggccttatttccagatgagacatctgtgtgacagatatctaatatcctacaaagatcacgggaaagaatgttctttttaattgcatctgtgagatatattgcaaaatattcactaaatcttaagtacacagtcacagtcattagaaacagtcatttgtgtctgttttttccccctgaccatgccttggtaatgagggtggatggaaaggtgaatcccacatcttgtccatgaaggcttccttgatgggtaggaagcaatatgggatttctttccaycctactctaatcaaatagccatgtattctctcgttttcttttactcccattctctcttctgcccttctttctctccatcttttcatcccaccattcttcccttttccatccttccttcctctttccatctgtccatccttccattctcccattcttctccattcctttatccgttcttctgtcttcccattctcacttttattccatccatttatcctttaattctttcatcttcctcccccatcctcccttccttttatgctgtgttcccatcctcccatcctctctgtccttc

SEQ ID NO: 779518 - DNA, 603 bp, Homo sapiens
gatctcctgacctcgtgatccgcccgcctcggcctcccaaagtgctgggattacaggcgtgagccactgcgcctggccaatttcaactctctctataagctccccagcatggggtcgggggtacataggaaacatcttggtgctccttggaagataccttggcaaaaggtgaatatatygtataaactcttttctctgtggccttcaaatgccacctctctgccgtccgctcccagctctggaatggaacgctgtgttccttcccccaggtgttgcttaataaaggagaggctgaagtcctcctctctctttgttttcatgcaaaataaatcactctgacaagggcttgttattacttaactctgtacattgtttcggcaatgccctggtaggagagagaaaggcattattttgcccagaatcgcttcaggaatggaaatatttttttgtgaattaatattcatcaaatagatcaggtaaacatccagtaatgacaatgcatgggcaatttatcaattccagcttcagagtgcaattatcagtcaaatggcaccgaggcacagtaatgaagcctgcctgaaaaatcccattactcccagattg

SEQ ID NO: 779519 - DNA, 623 bp, Homo sapiens
gtgtgaattcctagtgcccctccatggaccttccaggggtcaaggctgagaaaaagctgagctacgataaaagattcttgaggaatatagaatttattactagccgagtccctacagagcctcataaagacacttgctgtatatttgtggaattattaaatggattctctctgaactgaaggggccacggttattatataaagggtgaatgcaaagagaacagtaatcactattaggagaaaattgatgttatctttttaaaataacccattcattttctcatttattcatttcacagaattatcttgagtgtctactatgttctcagggactgtatcaggtactaagtatactggaagattataataagaacttgatacttgaggagtttttatttaaaaaaaagactatattgmaaagtaaggtgtaattataataaatgttatcaaaaaaagaaaaacaagaaaaaaagaacagcagaggaaactggggatatatttgttcattgtggtaaaatcaacctggaatttctaaccgatagacttaggaaataaatttccaaaggcagacatttagaaggaagtggtcctagggtgatttgtttaccctctgatttgttcagt

SEQ ID NO: 779520 - DNA, 623 bp, Homo sapiens
gtgtgaattcctagtgcccctccatggaccttccaggggtcaaggctgagaaaaagctgagctacgataaaagattcttgaggaatatagaatttattactagccgagtccctacagagcctcataaagacacttgctgtatatttgtggaattattaaatggattctctctgaactgaaggggccacggttattatataaagggtgaatgcaaagagaacagtaatcactattaggagaaaattgatgttatctttttaaaataacccattcattttctcatttattcatttcacagaattatcttgagtgtctactatgttctcagggactgtatcaggtactaagtatactggaagattataataagaacttgatacttgaggagtttttatttaaaaaaaagactatattgaaaartaaggtgtaattataataaatgttatcaaaaaaagaaaaacaagaaaaaaagaacagcagaggaaactggggatatatttgttcattgtggtaaaatcaacctggaatttctaaccgatagacttaggaaataaatttccaaaggcagacatttagaaggaagtggtcctagggtgatttgtttaccctctgatttgttcagt

SEQ ID NO: 779521 - DNA, 498 bp, Homo sapiens
ctatcttcaacttttattccatgtattactgtattgaatttatgtgattataagttatatatctttcttaatagtctgaattcttttagggcatgatacatatatgatttctaattgtgatctctacaacatctgagaaaatatctagcaaataattatatttctgtagacaaaaaataaataaaaagcacctaacatatgtcracctctataacttcagaaattttaaataaaatgcaatataaattatgataccttcaatataatgactcatttactgtagctgatattacattgtattataacgatttggattgtctttgtctttgcttatttttatagacacttatgttttatgtattattggtatttttttagatagggtcttgctttgttgcccaggctggtgtgcaacaacagtccgatcgcagctcacttcagccttgacctccagggctcaagtgatcctcctgcctcaacctcccaagtatctgggac

SEQ ID NO: 779522 - DNA, 643 bp, Homo sapiens
atgataactcattgtggttttaatatgcatttccccagtggctgataatgttaaacatcttttactgtgcttatttgtctatctctctctctctctctctctctctctcacacacacacacacacacacacagtttattttatcttattttttggaaacagagtctcgccctgtcrcccaggctggagtgcagtactgcaatcttggctcactgcaacctccacctcacaggttctagcaattctcgtgcctcagacgcctgagtagctgggattacatgcatgtgccaccacacctagctaattctcactcatatattttctttggtgaagtgtctgttcaaatctttagcctatttttaatgtggattgtttgtttcttactattgaattttgagaattctttatatattctggatgcaagtcctttgttggatatgtgatttgcaaatatttcctcccagtctatagtgtctattaattctcctaacaccgtcatttggtgaactctaatttaccaatttttatgttgacagatcatgcttttggcatcctgtctaaaaaactctttgcctttgggaggccgaggtgggcggatcatgaggtcaagaaatcgagaccatcctggccaacatggtgaaacc

SEQ ID NO: 779523 - DNA, 598 bp, Homo sapiens
ggccaagtattggaagaaatgaggcagttaggaagttccggggcattaaaggactgaccttcagacttccgggtgttacaaaggtctggcgattcacaacaacaggccgaggtcttcagcggcagctccctgaagcctctgacaggcacactcagtcctgtcagcttggactcaaccctgccagmgccagcaaacaaacacacgcattcttcccagagctgacaccccatacaacacggcctctctacagggcctgtttatttaaggaaccagatgctttaaagttggagtagaagttgggaagttatgtttacagaagtagttagtgacaggagcagagggaggacagaaaataagcaagagttcctggctttattcatcataagtttaaaaagttttaaggaaattgtcaaatggtctgtacacaggaatgagaagtaaggaaattatgtcagccaccaccacaactctggccaaggcatttcatctgttcctttaagacagtttcatgcctaccctcaaaggggtgcttacagcagaaatgttttgaagcaatccaacttagtaaccaacaataaagtcttctaggcctgctcaa

SEQ ID NO: 779524 - DNA, 588 bp, Homo sapiens
gaaaagaatgcatatatgtatgaattacatgattaattttcattctaataaatgtagagatggatttttaaaaaccactgacacatcagttctcatgcaaaatgctatggccagtgctgtgcagaatgcctaacaagcagaatacagatcttgtctgcaaggggctctgaggtgtaggggaacacctccaacattgtgtgggatacatttcagaagaggagtagaaaatttgattggatgggggcatgttcacaatgtattgggaatcagggaagaatrtggcaaccaaggagaggcaaaactgggcaggaaccaaggcaacattgattgaaaggtgtggagggaggagctcctggggcctgtaagggaagatgaagatgggaagggtgggaggcattgtggaaggaaggccaccatgtggggagatgatgctgactccagtcccaggcagcaggggtccctgagaggtctgtgaacagactggaagcttgcctgaaactttgcagagaaaagaagcttggcatccctgcaggggtggattgtcagggtctggaggcaagggacaagtgaagggattaactgtcccac

SEQ ID NO: 779525 - DNA, 594 bp, Homo sapiens
ggactgccatgccaatggattccttggagtcagaagctttggtgttcagtattttttatggagacatcggtggtgcagtttggactaagcctcacctgacaggttcctcccatgtgaggaggggctaactcaccattgttgagtctgctgggtctcagctcttaacttcytctaaacagaacatccacagaacagggacatgcacgctcacaaagacctgtgaccatgcaggcaaagtaggctcacatcttgcctggaggctcttcccctcaggcaacctgatctcgggggggatgagctctgcctacagctgggccctcttgtacctgatcacagaacaatcaggctttttaggtcttagcttctcaaatgtctttatttcatagatctgcaaatagtctttgctttttcatttacataaccaaatggttgggtcaagtggtttcattaaaacaagagtagtctgcacacactatagctgtggacaggagagccaggggccttctgggaagggtgacggtggaattaatgtggaaaatgactctcagaccaaaggtgtaaactggagtgccccctgcaaggagcatcccatgc

SEQ ID NO: 779526 - DNA, 621 bp, Homo sapiens
cagtggtgcaatctcagctcaccgcaacttccgactcccgggttcaagcgattctcctgcctcagcctccctagtagctgggattacaggcatgtgccaccacacttggataattttgttggtggtggtggtgttttggtttgttttgttttttgagatggagtttcactcttgttgcccagactgaagtacaatgacgtgatcttggctcactgcaacctccacctcccgggttcaagctattctcctgcctcagccttcccgagtagctgggattgcaggcatgygcaaccacgcctggctaattttttgtatttttagtagaaaagtggtttctccatgttggtcaggctggacttgaactcccaacctcaggtgatccgcctgcctcagcctcccaaagtgctgggattacaggtgtgagccaccacacctggccttttttgtatttttagtagagacagggtttcaccatgttggccaggctggtctcgatctcctgacctcaggtgatctgcctgccttggcctcccaaattgctgggattacaggcataagccactgtgcctggtccattttaagtttttttaaaaagatttttttaattagcaaaaatgtttg

SEQ ID NO: 779527 - DNA, 518 bp, Homo sapiens
gtcatacattctccttgtacaggttaactcaagagtttggcatgttaaaaggccacgttgccaaggttaaaatccaaccatctgactgaagtcagagtctaaaaaaattttaagcttgctcctccgtcaactggtttcaaggacattcartttcgtttcatgccaggctgtgaagcttttcttttcaatgctagaacctaaccatggaaagtggaattgaaaacaattacacagcgaattggcttatgcgtggacttcgatctgggatccacgaacatacctaatgcttggcaaaatggagaggggtgctatgtgttattattatgtgttattattaatcacataactgaactctgtggctccaggccttccatggctcgtctcccaatcaattcttttcagaactaagaatcacgacaggggccgggcgcggtggctgagcctgcaatcccaccactttgggaagtcgaggcaggaagatcgcttgagcccaggaaattgagtccccctgggcaaca

SEQ ID NO: 779528 - DNA, 487 bp, Homo sapiens
acaaataaaaaaagggtagatcaatgacactacaatatgtttcaatatcaaatatgcaggcaatatcaaattcctttcttcctttctttctgtctagcattcctccttcctgtcttccttctttccatcatgcaccatgtactgtatacccactagaggttaaaaatcatctctaggtctcagtttaaatttctgcaaaacccactacatgccattccttaataaaaatgcaccasacaataaagatatgattaaatgccacgtttagccttccagagcgatgactctgtgctgaagtgattaggaacagtctcccacagaagataaaccctgagctggcccttgaggacagagtatctagataggaaaaataacctaggaaggggcagaagcaaaaggtgagaagctaaaatgtgagagatgtttggtttccaataaaggatataacttggctaaatacactgttcacagagaacagccatcttaa

SEQ ID NO: 779529 - DNA, 609 bp, Homo sapiens
ttcatttagactgttgattagaacacttctttctggatattttacagcatagaaaatgaattacattgtgggattgtgaattttttaaatattcataaaaatcctcgtagcattaaaggatttagaaagatatatttaccactgagaaatagttcctacaaaggaaataataattacattagccagacrcattttaaaaattatgattcccttcagaaatctgaagaaatggataactttgataggctttggtgttacttttggatgccaaattctataagggtccatccatctcatacttaagaatttcaaagactgtattgaatatggcatactgaaatgtttacatatttgtaaaatagataaattgagccaaataaatatttgccagtattttgcatttggaacagtgagtagatcatcagttacctaaattataggttaaataaatatatagacttctctctcccattcccacctagccaaaactgaattacacattttcggtgtatattgatagctgctggagtctctctgatgctacttagatatcacatggcaaaaaagagaggcttttaaatttttttcctgaagtcctttcatcctgat

SEQ ID NO: 779530 - DNA, 546 bp, Homo sapiens
cctaacccagaacaagcaagagggatcctgacaaaaatggtgactgtatcaggtttccaacttttttttttctttttgaggacgggtcttgctccactgcctaggctggaatacggtggtgtgatcatggctcactgcagcctcaacctcctggactcaagtgatcctcctgcttcagcctcccaaatagctgggatcacaggcatgtgccaccacacctcgctatttttaaaaaaagctttttggagagtcagggtctttccctgttgtccaggcttgtctcgaactcctgggctcaagctgaggctggcaaattattttctccttccttccttcctttctttttctttctttctttctgwcagacagagccttgctctgtcgcccaggctggaatgcagtggcgcaatctcagctcactgcaacctccacctcctaagttcaagagattctcctgcctcagcctcctgagtagatgggattacaggtgagtgccagcatgcccggctaatttttacatttttgtagagatggggtttcaccatt

SEQ ID NO: 779531 - DNA, 587 bp, Homo sapiens
ggtggctcatgcctataatctcagcactttgagaggccgaggtggggtcagttgagtccaggagttcgagaccagcctgggcaacatggcaaaacctcatctctacaaaaaattagccgggcatggtagcacgcacctgtgatcccagctactcgagagactgaggtgggaggatagcttgagcccaggaggcagaggttgtagtgagccgagatctcaccactgcactccagcggtgagctaccatacctagccctaaaaatattttataaactgccttgagagtgcctatgtttyttaaaacaggtccttgattttagaaccaaaaaaatggggaaaaaaatcctcagattcacatctcacttctagcccaattatttagctaggaaacaagagattacatcggactacacatagaggatggtggcatgagggtcaaactccaacaggcatctcagtagggttgaacaaacttttgctgcaatagatacttgacccaagtctgagacagaaaaaaaaaaaaaaaaaacaaaacacaatcacctgagaaacacacttagaacctcaggaatcttgctgtatgctgc

SEQ ID NO: 779532 - DNA, 639 bp, Homo sapiens
tgtttcccctaagaggtgggcgtcctgccacaagaaatggctcatcgggaaacactgagtgaaaacccacattcagagcaaggcttcccagtaactgagatccagcctgaggtttccaggagctgagcctcagatggaatgagggcgggctcagagctcagccaaccctttgaaactgagcctgcgggtgaagtcaggtcaatacattcacaggcgtttcaggccctatcgacgtctggggtgggaaacccacccgaaagctgttgaaatacaggggccagcactggttctgcagaacagtggctctttgagtggaaggtgttcgagaattaagtttccccagtgttcccagggctcagactttaagccaaggggggctggggcccccagtgcctgatggagccgctgataggtccctgctggctaaaagtgatgacattggcaagaaactgatctttctggggagcagaaactcaagagcactcaagtgmagaacacaaggcaagttgtgttacctgccacaaagccccagctttcaggaccaggggaggggtagatggggaccacttggtattgggtatcaggagacccagaccagaccctgaaggaggaaacggctgaagcgagacctcttatctt

SEQ ID NO: 779533 - DNA, 625 bp, Homo sapiens
cgcttactagcatgttgcatatgttatcattcaggaccaataatcttaggagaacattgagacttagaagggctgagtgacttgtagttaaatagtggcaacatttcaattcaaacttaagattgcttgagtttaaactctgtggttttcccactgtattttccacttaccagagttgctatagtctaaggraattgaggaatcttaatgaatcttgaaagctatctgtaactgttgttcaattatagacatgtatctggaaaaggagagttaaataaagaaacaatattttccttagatgcagttgggacttgagggccaagtaagtcctctcacaaggttaggagtgtcagaggaatttatcagccttattgttgcaaggaaactaaggagaatgaagataatatttagaaggagtcactaggtacaacaagattgcaaacttaattgtaatgctgatcccctctgcgccatcttattaaacagccaagaaaatcctttatcacaaaagatttccaaggatgtgacattttcctctctctaattctatttcacttaaattatcaccctgaagatttcaaaggggtgctctcggcagtctgatagattgaagcccctctctaac

SEQ ID NO: 779534 - DNA, 629 bp, Homo sapiens
agggtgggcggtgcagatggggtacgacttgactgaaaaacttttcttggtgtcacagagtccagagggcaggtgggccaaggaatggtggatttgagatgtttggggggtgttgtaccagaaaaggagaactgagccagctcaagcagcgttcagagatagcacacatttccatcctcggctcggaaactagcgagctttgaacatttttgacaaaagcccatatgctgttccctcaaatacacccaaaacagcaccctcctccacgcctttytggcggctgctgccgctgctgctgaattctctcctctccagcatccaaaaccaagactctgagctcaggagtcagggaggagccttccaagatcgtgaagatgatcttggaagagttttattttgtttttttttgttttttttttttttttccaaaaagaatctgattgctttgaactcagggatgagaaccgatccttggatggtggtagacatggtgctgatggaaggaagaataagggaagaaatgaaagaaacaggggaacaggaggtggggtgagagggagaggaggttgggggaaaatggaagcattccaagacagagaaaaatccaattcttttcataaatcattcaa

SEQ ID NO: 779535 - DNA, 649 bp, Homo sapiens
acattgaagccatgtaataaataagaagcataagaagatgtaagaataagaataaaataattcaatcagggttagcatgcactgtacttgaggactcatttatttatttatgtcttgtgggaaatggaacactgaaatgtgacattttttcatttaaaaaatgggagcctagctgtacagatattatacttttttaataagtataactttatcttcattatctagtatgtgtcaaatcccaaatacatcttagttgcataccacatccatgttttaaagcttattctgtaattttataattgcatttcctctgctatttttttcactctgatttcctcatgcatcatatttaataatcatgtctctctctctctctctycttgtgtgtgtgtgtgtgtgtgtgtgtgtagattttatatatgtatccacacatatatatttattgtgtggtgtaagtataataatgattctgccttgaggacatgttgtaaatagctgtccaaaaatattatttctttataaacatgataattgttggagttctggaaaagtttaaatccttgcagcctgaatggaaaaactattccattccctctatatgtaaatattccatttattctaataactatagattttctatacataatta

SEQ ID NO: 779536 - DNA, 611 bp, Homo sapiens
tgtagaaattcaaaataaggactctttcttcttctgttcatagtatttgtttaggcatcatggcatcagaaaaagttcacaccaattagtgtttaaggtaaatattcaggcaacaaactttttgataagcagatatttcctaagcctcaaagtctgcagaacactaaaaattgcataacacattatttctgtttctggacctcaagttctctttggggaagatacttacatattcaacactcaatttttaaaaatctttcattctacccaatatgtaccttggtctgttgaggaaagctccttcttattggagggtttcatcctttacgaattcccacctaggatggaggcaaatgttttcattgtaaaaccccattactactcatatcacttttgcaaaaacaaactttgttttgatatttaattagcagatattttaattgaataaawttgaaaaagaaaacaaaaatggctattctgtcttctaatgtagcatcggattattcttctatcccaaatatttctttttttaaaaaaatgtaggggtcccttgtttagataacatttttaaaagagtagtaataatttctattcaactttaaatttttttg

SEQ ID NO: 779537 - DNA, 376 bp, Homo sapiens
tacagatcactgaaacattacgcttactttctggtaaaaaataagagtcaagacttgcctttgagaatggtggaaacctactccatgaaatcaataaaaacactggaaaaaaaaatgtcaaaagtcaactttttcagaacactagagattaactaaagaattgcaacaatgtcragttttactaagaaaaaaaaaagctgaatttcagtaagagcaatgagtaccgttgcattttaacttgctgaaatcacaccctcctctccccagctccatggcaccctgggaaataagcagacatataaccatggtagctgtgaaaaacagccacctagtagccactggatggagcagaatgggttggggaaaaaagctgagg

SEQ ID NO: 779538 - DNA, 644 bp, Homo sapiens
cctagggaggctgaggtgggaggaccgcttgagcccaggacgttaaggctgcagtgagctatgattacaccagtgtactctagccttggcaacagagtgagacctctggctccaaaaaaaagagaaagaaataaagaaagaaaactaatatgcatcatccaggacaaaaacctaaccaactccacctaactacatgaaatttgggtaataattagggaaagcacttaaattttttctataggcttgccagcacakaatttttttttattgttttcgaataaaaacttaaaaactgagaaagaggctgggcacagtggctcacgcctgtaagcccagcactttgggaggccgaggtgggcagattacctgaggtgaggggttcaagaccagcccagccaacatggcgaaaccccgtctctactaaaagtacaaaaattagcccagcgtggtggtgcacagcctgtaatcccagctactcaggaggctaaggcaggagaatcgcttgaacccaagaggcggaggtggcagtgagctgagatcccaccactgcactccagcctgggcgacagagtgagactctgtctgaaaaataaataaataaaaactgagaaagagcatgaaacttttattacctagataagctt

SEQ ID NO: 779539 - DNA, 638 bp, Homo sapiens
ttttttttttgagacagggtcttgctctgtggcccagactggagtgcagcgacacaatcactgctcactggggccttgacctcctgggctcaagggatcctcccacctcagcctggagtaactgggaccagagaggtgcgtgccaccacaccaggctaattaaaaactttctttctttcttttttttttttgtagagaaggggcctccctgtgttgcccaggctggtcttgaactcctgggctcaaatgatcctcccgcaatggcctcccaaaatgctgggattacaggcgtgagcccctgcacccggcctataaaaccttttctacaggcagtttgacactcacctaacaaaaacttgtagttacccaatttattttgaatggcgaagcccagtggttgatacagggktctctttctatttggcacagaacctcttgtgcagtcttgaagagggaataagaaatgtctgaaaataacttatgcaaggcagaatgtgagtatcatagcagagttttatgggaggtgttttctgaggggcctctggagagattacaatctattagagtgagatttccctgtggatcacttcccttacctggatgagacatgaaaagtaatgttgtctagttgtaatcag

SEQ ID NO: 779540 - DNA, 652 bp, Homo sapiens
agaaaaaattatggtagagaaacttatgaaaaatccatctattaattttctttcctgtgaattagaaaaataccattgttcttttccagccaaaagaatatctccctctaggagccattaaatattttgaaaaggagtgacatggtgtggaatgtgttttaggagtcaggtggtagtgacatgtaggattagaggactggcaatgagtcagtaaygtggtgcagtggtccagatgtggtgaggatctgaaccttagtagcagcagcagtgaaaatagaatgaaaggaaatagagatccacaccaggccctctgtttctaaataggaaatagttaccaattattaaccagctttcatattgttaggatattacgggtctcaatggtcggttatctctggtctcaagtcctttcactctatttttagggaaaatgtgtttaaacccctattttaaggaaatgatagtttatagattatttataaattatagttaatttagaaaatagaaaaaaggaaaaaaatccataatttcatcatcctaacaagaccgctatcattttacatttacttaccccgatgttgctgagttttaaacttctctgttaattcattctgcgcacatttagctctgagaaacaggtttctgaactaat

SEQ ID NO: 779541 - DNA, 624 bp, Homo sapiens
tctctctcaaactgtctctttctcattcctttgactccactggacttgccgcccccgcgacctggtgttgggtctcatcaccccaacagattcccattctaaagatgagggaaccaagaggtggaaggtacagttagaataagaaccgtttcttctgactctgaaatctttcagttctagcatgctaccacccacactttaaaaaactctgaagtaggcagagaattcccttttgttggaggaattgctttgagagacctggttttactggatgaggctttggaaaccaacctgaggcaggcgctagcacatcctgagaggggtgtgacctggcacagaggcccagcctgggcttcatgtctcagctggcaagatggcctgctcattgccattccaggccaggcagggccaaggggcttcagggacccatgccctcatgggtgaaatgtgtacatcragccctggatttattcccatttggatggaaacactaggcaaggtattttcttgttgatataaaacattttacatatttatggagtacatttgagcatttcttacatgcacagaatgtgtggtgatcaatcagggtgtttgtggtgtccatcaccttgaatattcggt

SEQ ID NO: 779542 - DNA, 591 bp, Homo sapiens
aaggttctgccctcggccaaagcctggacccctgactgctgggcccaagagctccagctacggagaggtagcttcggtacagaacacgagaacccaaggttggtactgctgccagttccccacgtggcccagccccacccacaggctctcctgggcccaggaatgtcctgcaggagggaggagtcggtttccaatgccagccgccctaacaacccaggaactcagctcaactggttacagacctcgaattttcagcccatgttacttgaaggagaagcagttcttgggctttaccacctgccacctgggccagagttctcttatccttatcctaagagtctttaagactcaaagaagaaaaggtcttgtctgatgtataatcttaaaataaacccacacttagccacctcaaatcctttctgaaatyatgtaagatgaaaacttaaatgccttatagataccaagtatctcctcacaatattgaattccatgaaaccacttatctttgcatgcaatgaagcatccacaaaaccatttcagctgaaggatgtagcaaagaacaggaaaggcctccgccgtccagtgcttgct

SEQ ID NO: 779543 - DNA, 376 bp, Homo sapiens
aagcattgctgaccgccagcaatgcaggcctgggctgcagagggagggctgggactgaggggcaggggtggggatggtgatggcagaggccccagaagagggtctgactgcccatgggaagaatcaagtggatgtgggaaagcaaccaaagagagaccctgggaacccgtcatgcaaggggcagaaggtgagagagatggagatgtggtcaggaggccaaagaaacaggcagggatgcccagtgaagaggggttcctggaagcagaaagggcagcatctccayggggctgctgagaggccctggggtttggagattggaggtcactgtgggcagcgggggtggctgatgacgcagaccgcgcttctctctgtgagg

SEQ ID NO: 779544 - DNA, 622 bp, Homo sapiens
aagtgttttatgaacagaaaagttttgtaaataatggtgtaaagaaagagaaaaaaatctatactgccttttttttttttggtttgagtgtctgggaggatattgttcaaatttattattgtggtacaacttaaccaaggcaaaaaatgagtagtcaccttcaactgtattacaattgaaagtcctctcagtcaaacctcccaraaccttaaagtttacaatttttggatttcttcacttatcccttgcatgagttagatttctccagattgctgttgtttcttatagggagtaagagcagagactggtacacgatggtgtagagctacaacgactgagtctctctgaaatagagcaaatctttcggaggtaatgtaacaatgtgcctacgaaagtaatcacaacattacatctacagttcatctgaagctaatgaaatcatttggtgtgaccaagacaatgaggagatgaatgctgaccattgcattttttgatgaaagaaaattatcttgtgctaattgtatgggttgtttctatttcctaatgaactctatttttaactgttaaagttttagttatcagatttatcagttatcagaaaaacacaagtcttatcggctaa

SEQ ID NO: 779545 - DNA, 622 bp, Homo sapiens
aagtgttttatgaacagaaaagttttgtaaataatggtgtaaagaaagagaaaaaaatctatactgccttttttttttttggtttgagtgtctgggaggatattgttcaaatttattattgtggtacaacttaaccaaggcaaaaaatgagtagtcaccttcaactgtattacaattgaaagtcctctcagtcaaacctcccaaaaccttaragtttacaatttttggatttcttcacttatcccttgcatgagttagatttctccagattgctgttgtttcttatagggagtaagagcagagactggtacacgatggtgtagagctacaacgactgagtctctctgaaatagagcaaatctttcggaggtaatgtaacaatgtgcctacgaaagtaatcacaacattacatctacagttcatctgaagctaatgaaatcatttggtgtgaccaagacaatgaggagatgaatgctgaccattgcattttttgatgaaagaaaattatcttgtgctaattgtatgggttgtttctatttcctaatgaactctatttttaactgttaaagttttagttatcagatttatcagttatcagaaaaacacaagtcttatcggctaa

SEQ ID NO: 779546 - DNA, 530 bp, Homo sapiens
tcaaggaggaaatttttaaaaatgaaattatgattttagttcatttcacatagcatccacatattttagtgatacaccttgtcattattccctcagttgactaaagtaaagctgagctagaaatgcttaacgcaaatagagccctcccaaccctacagagggtcctgttaacaatggagtgtatcattttctattatatttttgggaactgggctcctgtgaagaacacacagtttcttttgtcctgtcactagtgtcagagggtggaatcaatctaaactgtaggtaaactacatctaggyttcatcgtggttttatttattttgggcccaccccggtgtcaaacattttgaggacagggacatgactctgatttcaccagggcttggagcctaagcactggtgaaatcctgaatttctgttgaggtttcatagcagaaatgcaggctttgcacattttgggaaatttccctgtgcttcatagactgcatgacaatttttgtatattctgggatgttctctttgctctt

SEQ ID NO: 779547 - DNA, 625 bp, Homo sapiens
tatattcattgattttagttaaagattaatgagaaataacattgtattgaagtattatttctgcaacaaaatcgttcactacactgtttaaagtaaacgatttaaatcaaggatatttttaagaattagatgagttagtaacaattatcttttttatttgacaacttaaaaaatataaatgaagcacattagagaargttgtttgtattttttgcttatttttgtttgtttattgtaaatattggataagctattttgaaagtgaatctttaaacctaaaagaatcagaattatcatatcataagaagttcagactggaagtagaaaatttcactataaatctaacctccaaattagctagacactaggatatgtgcaaatgtctgtgtactccaaactaaataggaaatgtacatgtcattaacaattatatgctagagtcataactattattcacttatcacctgcttatgctaactatgttacaataagttgttattatattgttatgttacttttctttacctcgtaaggaagagaactgggaaaacgtatgtctcagttaaggtacatactcttcatccatccttctttcttttatttctttaattattgcttcattcat

SEQ ID NO: 779548 - DNA, 658 bp, Homo sapiens
aaatagatttaaagtgtctgtgaaagctggcaggaaaaaaggtgaggattgggcagtaaaataaggaaaccaatttatatgcatttagataattacgtgttagtttatttgtaattatgcatctttcaaggtgttctatttaatatcatcatagactaattcttccattataatcagcatttgtgagaacctttctggaaaactcaattcttaaacctaayggataaggaatatgaagaccttaagcatttagaaaagaacatttgaaggaagctcaaacattgttatttggagttatgctcacttctatttacttccatttaggatagactctaatagactctagagagaccagaagaaatggccctaaacttcagaaagatcatttgaagttgaataaggtagaatttcccatcatcagttgctatttgagatgaaaagtgacaatgaaacaggtagcgaggtaatttttctagagtgtttgaaaaacaaacaggttttctgactttgatgcagatctgattacctaaaggaagtacttacctccagcctttgatctgtatatgtatttattggtgaaacgtatctaatgcatcattttgtattaagaatgaatagtaagttctctcatgagagtacattgaacagccatcataca

SEQ ID NO: 779549 - DNA, 573 bp, Homo sapiens
ttagtaatccactaggatttgaattcatgcttgtgtggatcctagcatctgttctttccatttcatcatgacctctttcttttgaaggcaataagaaacccttaaagacttcttaggacagtacatggtatctggcaccagtttgcctgagttagaaggaggcaaggctaagggatatgagtgtccttagcaggaaactggcaggtgaatgaagagtaagaaatcatcttcaggacatggcagaaatgaactctaaaaggtttagtactatttagattttgtagtatagtaggakgtattgataaacacaaacagggtaacctgtttttaactctgaagtttgtggttgaacctgctttcctgtcatctagctgccagtctttgtaattctggacccttccttgagccatttttatcactttcaccttcatatgagggtttgcattaaaaacagaaccatattgcactaaataaaatccacccatagctcctggcatcaacctttcaatggaatgtgtgttttaatggttgtcagttttccctccattgggattcctatggcgttaattccca

SEQ ID NO: 779550 - DNA, 656 bp, Homo sapiens
atgctttaccacacagctttgagatatttgattccaaacttacaactttgattctcattaataaaaaagaattttgaaccaccactacacagacactgccaactgtctcctaaaccacttaatacaatgatctccatgtaacaagcaatgatatatttttaaaaaatggaattaatttacccattttaacacatttttaaaattatttttgagacggagtctcgctctgttgccaggctggagtgcaatggcgtgatcttggctcactgcaatctctgcctccagggttcaagcgattctcctgcctcagcctcygaagtagctgggactatgggcacacaccaccatgcccggctaatttttgtatttttagtagagatggggtttcaccatgttggccaggatggtctcgatctcctgaccttgtgatccgcccacttcacatgtttacatatgctttagtcatggagaatttcaatagagagatccatttacctcacatcagaaaaataaaaattcacattagttatcgttttcatggtggaatctaaaatatgctcaatccattttagtgtgaagaaatgaaaactaattgttgctgaacaatataaaatcacagaatggcatgtaagattcaactgtatctgcttttgacc

SEQ ID NO: 779551 - DNA, 595 bp, Homo sapiens
agatgatcagatgttacttctctgaacactgaaaattaatgtaaataacttcacagtttttaatgttttcccagtgtctagtcaggccagagttcccattagcagtccagggaagttttctaacttgactgtatatttttgcctccatcactatgatgaagtcagttaccaagactctctcaccttatcctaaaaatgtgctatttctttacttcccaattgtcattatgttagttacattgctggaggaaatcaagggagtgaaatataatggatcagagacctatcaagtaaagtaatcaagaatggatttctggacaaccctgtttaaaataagaasccttgcaataaaagtgcataaatgtttcactctgtgttacacaataatacctcaaaatccactttctggtagttcagatctctgagttacaaccctgagcaaagaagtaactgaagaccttcaagtgtccaaatgagtttcccccaaatcttctaccaaaccctgcattcaagcagtattgtctctacagttcttatttatttgattttctaatccaaagcacattagaaaatacatttagcagagaggatttag

SEQ ID NO: 779552 - DNA, 570 bp, Homo sapiens
cacccatcattataatttctacttctatgtatttgactattttatatacttcatataagtgcagtatttatcctgctgtgtgactgagatttttttttttttttttacttagcataatgctctcaaagctcatccatcttatggcatatgataagatttccttcttttaaagcaggggtccccaacctttttggcatgagggaccaatttcctggaagacagttttttcatggatgaggtgggtgtggggtggtttcaggatgaagctgtttcacctcaggtcatcaggcatcagattctcataaggagcctgcaaccaaaaacccttgcaacctagatccctcacatgtgcmcttcacaatagggttcacattcctattataatataatgctgtacctgaactgacaggaagcagagctcaggtggtactgctgcctcaccagacactcacctcctgttgtggttcttaatgggccacacactgataccaatctgaggccacagtttagggatccatgttttaaaggcttaattatatatatagatatagatgtctatgagatatatat

SEQ ID NO: 779553 - DNA, 554 bp, Homo sapiens
acccattaactcgtcatttagcattaggtatatctcctaatggtatccctctcccctccccccaccccacaacagtccccggtgtgtgatgttccccttcctgtgtccatgtgttctcattgttcaattcccacctatgagtgagaacatgsagtgtttggttttttgtccttgcgatagtttgctgagaatgatggtttccagcttcatccacgtccctacaaaagacatgaactcatcatttgttatggctgcacagtatcccatggtgtatatgtgccacattttcttaatccagtctatccttgttggacatttgggttggttccaagtctttgctattgtgaatagtgctgtaataaacatacgtgtgcatgtgtctttacagcagcatgatttaaaaattaataagtatctggtaaccgagatgaacatagacttgttgaactgattagtataaaccaccccatcataacatatgtaccttgtgggcaagttcacaaatgaaacttgcagacattaatctaagtgaaagaaacaagacacaaagaccc

SEQ ID NO: 779554 - DNA, 638 bp, Homo sapiens
tgatcattagagaaatgcaaatcaaagtcacaacgatatatcatctcacactggtcaaaatggctattatcaaaaagtcaaaaaataacatatgccaggaaggttgtggagaaaaaggaacacttatacactgttggtgggagtctaaattaattcagccattttggacacatgcacgtgtatgtttgttgcagcactgttcrcaataacaaagacgtagaatcaatctaaatgcctatcagtgctaatctggataaagaaaatgtggtaaatatacaccatggaatactatgcagccataaaaaagaattcttaaaggttgattctacatctgaaaattacttgaaattaaactaaaaaagcccagtgtttaaattttttggcatttgacattagaatatccatgctatggagaaaaagaaaactttaagaatattttttaaacagagaagaagaacatactgtactgatatcttgaaggatttcaagctaaactaaaaattcaatagaaaaaataaaattagtgctaaaggaagtaaagaacagacattgtagtacaaaattgaataagaggattggaagaacaccttgagaaactctcacagaagcagaggaaacaatgagaacgataaaagaga

SEQ ID NO: 779555 - DNA, 641 bp, Homo sapiens
ctacttcattgcctttggaaacttgcagttctctgttgcttgattgcctacaactttatatagcaatcagaggcccgaattcactccagcaagtacccttctaaagctgctgtcaggagccttacctggatttcctcacccacctgccttgtgtgagtcggcggctaggatgcggtccaagcttctgagtgtgccagcacagctgagtctctatttatgcaccagggcayacctcaatcccacccaccagtgctgcatttacttgttgctaactcagaaacgaaccttcctttccccaagtgattatcttccctgggttaaagagttccttgtttttaaaaataacattgcaaaagtatgcttttcagtatgcatgtttttaactatttgtgaaacgtattgttaagaggttttgaaacgatgggcagagtgccaaatccaggtagactttgaatgaagacatttgatttgcctgaaggctgatttgtctttacatgattggacagagtttgtagtttgtagattttttttctgctccgtgggcagattgcctttatttacttgaagacacacaagagatgattcacaattctgatcctcgcagtcatataacctgccatactccattatgataaaaatta

SEQ ID NO: 779556 - DNA, 641 bp, Homo sapiens
ctacttcattgcctttggaaacttgcagttctctgttgcttgattgcctacaactttatatagcaatcagaggcccgaattcactccagcaagtacccttctaaagctgctgtcaggagccttacctggatttcctcacccacctgccttgtgtgagtcggcggctaggatgcggtccaagcttctgagtgtgccagcacagctgagtctctatttatgcaccagggcacacctcaatcccacccacyagtgctgcatttacttgttgctaactcagaaacgaaccttcctttccccaagtgattatcttccctgggttaaagagttccttgtttttaaaaataacattgcaaaagtatgcttttcagtatgcatgtttttaactatttgtgaaacgtattgttaagaggttttgaaacgatgggcagagtgccaaatccaggtagactttgaatgaagacatttgatttgcctgaaggctgatttgtctttacatgattggacagagtttgtagtttgtagattttttttctgctccgtgggcagattgcctttatttacttgaagacacacaagagatgattcacaattctgatcctcgcagtcatataacctgccatactccattatgataaaaatta

SEQ ID NO: 779557 - DNA, 681 bp, Homo sapiens
tgaatgtacaaaatgagcttacaaacttacaaaacgaagaagactatttaaatttatctgtacttagttttgagatatttgaaaaattaatttttaaaacattttagtccctctaaagatggcagacactgacacaactaaagattaagttaaaaatgtgttatttggctaagtgtatgaaataatcattagagaaatgcaaagaaaaaagacacaatgagatatcaccgcacacccatttggatggctactatcaaaaaaaggaaagaaaagaaaagaacaagtgctggcaytgatatggagaaagtggaactcttgtgcaccattggtgggaatgtaaaatagtgccactgctatagaaaacatagtggttctcaaaaaactaataatagaactaccatatgatccagcaattccacttctacacatatatctgacagaattgaaaataggtctcaaagagctatttgtacacccgtgttcatagcaggattattcacaatagccaagggatggaagaaaccctagtgtccatcaacagatgagtgcatcaacaaatgtagcatatacatacaagggcatatgactcagctttcagaaggaaaaatattctgacgcatgcaacaacgtgaatgaacattgaggacattatgcaaagtgaaataagccagtcacaaagac

SEQ ID NO: 779558 - DNA, 600 bp, Homo sapiens
ttttttaactggctgaattgattacaacagtatcaatgaaatcatagtcagtaatgatcaccaggctggtgagtaaattcaacctcctaaacaaacattgttcgcaactttaagtgaacaaacaattctctaaaacaaatattttcacaaacattgttttcataagacgaaagggttctaaggtcaatagtccttacagcataactaatamaaataaattttaaatataaatgtaaaaaaaaccccaaaattgacatattaagggaaatttcccttccccttttagtaaacagactaagatattctgttttaggatgataagggacagactacatgtagatttaacttattttttatggcaaataaaggctaaatatctttattcattctctttctcccttacctctctaagcacatagtaatgactaacctagtacctttcattctcagtctattatttcaacaccttttcatttttccttacaggtttgcttttagaaatctttgtctagtacctttttttcccgcttaatttaatcaaggcttaattaaagtatctggggattataatttcttttaccttattcaatactgtgaatg

SEQ ID NO: 779559 - DNA, 599 bp, Homo sapiens
cagcatagtctaccatatctgactaatacagagcctaacccagacctaggagttagacgaccaagagtgaaaagaatatcagagaattaaaaatagttcagtgtgactggatcaaagagtgcttgaaggtcagtaagaagaattaggttgaaagatagataaggtccaggctttgaaaaacttygtaaactatgttaaggaatctttaaaatggcaaagagccattaaggattttaagcgagagtgacaatcaggtcaaatttattttttagaatgatttcttttgttgaagggtagagaatagatggaagcaactaaagtctgagataagaagactacttatagacgctatagtagcatgtcagaagaaagcgatcctgaaataggcaggaactgagggtggagaacaggaaagaattaaaagattataaatagatctcttccaaggccttgggagggattctgggaatgtgttcacatagtcctatctttttgtaaaatttgcaaacttaagatatttaaatttcaaaccattaaggctgttgactctattacgacttcacctctgccaggtggctttatagaggccatcaacatac

SEQ ID NO: 779560 - DNA, 567 bp, Homo sapiens; identical to SEQ ID NO: 766668

SEQ ID NO: 779561 - DNA, 622 bp, Homo sapiens
gtaaaaatagtagtagcttttaatattcacaaccaaccactctagtgctgacataggaggctacaaacttaaaattttttgatcataactagatgatcaagatggagccctttttgggggtaaaaattccttctactccrtatttgacactgttaagaggatataaaggaaagttaaattatttaagatttttcacaaaagatttaagaatgaaagaataaatcctgctggaaaagaatatgacagccataccatctgcaaagtaaatcttctacagaggtgcagcttgactctttttatagtaataaataaacactgcttagttccataaggcactgtcactgcagctagtgcacactagtgccacccactgtccccagtgtgcaacaggaagggtggaggtgcgttccagtgttactgatgctaagcttcatctcttggttaagtggtggcttccagatgcttccgttgtaagattctattttcccctttgcagttaggaagcaatttaagaggtgatacttctcccaaatcctttcatctaatgattttagcatttgtattagtttgctcctataacaatgtactacggatggggtggcttaagcaatagagatgtgtt

SEQ ID NO: 779562 - DNA, 646 bp, Homo sapiens
acacagtgtcattcttcacactaaatatttttgttgcattgaaaaatacagttatttttcctaaaaatatgtaatttatttaccatgtaataggtttattattttaatgaattgatatatttaatattaattttatattaacaaataygcatatattttatatgtaatcttatatataattaacatatattaacatttgatatttaatcaattaataaaacatttcccagttttaatttcccatacagtaaatagcaatagctctaaccccatgaacaaaaggtctttggcattctcaataattttttttttttgacacaagttctcactctgtcacccaggctggagtgcagtggcacactcatggctcactgtagcctcaacctccccaggctcgggtgatctcctgcctcagcctccagaatagctgggcccacaggtgtgtaccacaatgcctggctaatttttgtattttttgtagagacgcggttttgccatgttgcccaagctggtcttgaactcctgggctcaggtaatccactggcctttggcctcccaaagtgctgggattacaggcatgagccactgtgcgtgacctcaaaaatatttttttaatgtaaaagggtcctgagaccaaagagctttg

SEQ ID NO: 779563 - DNA, 460 bp, Homo sapiens
cagaaagtagctctgggagttatttcccaaacctatccaaggtggccttagactgatacattgtttgaaagtttcagtttaagataaaaaaatggtccccccatgtccagtctttaatctcctcatcctcacaaggcttatttcagaagcacccacccctgcatctaggtgargggagcccagggaaagcaattccaatagcatgtgtcccacaggcgtcatggcagagtcatggagccagcctgggacagtggagccaactcaagttcacctcgagtccccaactctgctactggccagctctgtggccttgagaaacgtcagcctttctggattcagtttccttctctgaaaagagaggactcttctctaaggtccccttcagccctaacattcgaccacagcaacagagatgagtcgggcgtgttctcatatgcctgacttcaaattcgaaacacct

SEQ ID NO: 779564 - DNA, 460 bp, Homo sapiens
cagaaagtagctctgggagttatttcccaaacctatccaaggtggccttagactgatacattgtttgaaagtttcagtttaagataaaaaaatggtccccccatgtccagtctttaatctcctcatcctcacaaggcttatttcagaagcacccacccctgcatctaggtgaagggagcccagggaaagcaattccaatagcatgtgtcccacaggcgtcatggcagagtcatggagccagcctgggacagtggagccaactcaagttcacctcgagtccccaactctgctactggccagctctgtggccttgagaaacrtcagcctttctggattcagtttccttctctgaaaagagaggactcttctctaaggtccccttcagccctaacattcgaccacagcaacagagatgagtcgggcgtgttctcatatgcctgacttcaaattcgaaacacct

SEQ ID NO: 779565 - DNA, 431 bp, Homo sapiens
tctaggagtcctgagatttccaaagttgcttcttcctgaagatcacagagtttgcagtgacacactttcttgtaagaaaggccaggaaacaatacacggaagttacctctgaagatttgggggaccctccctgacatccatttaaaacagaaccttggatatccctaaaataggtctaggcttcagccagctcctgtaatatctattagcmtttgctttgcttttacttataaagaggcaaagcgtgaggttactgaccctaggtgatttgcggcccttccccaagctatggcttccattagcattactgatgcacaaatgtgggccctgggagtcagaaggccaaaggcaaaatactccatcccattatcccattagtgcaggggcaagagtctgtgcatcaggagagtccttcgatctcttggtcccag

SEQ ID NO: 779566 - DNA, 431 bp, Homo sapiens
tctaggagtcctgagatttccaaagttgcttcttcctgaagatcacagagtttgcagtgacacactttcttgtaagaaaggccaggaaacaatacacggaagttacctctgaagatttgggggaccctccctgacatccatttaaaacagaaccttggatatccctaaaataggtctaggcttcagccagctcctgtaatatctattagcatttgctttgcttttacttataaagaggcaaagygtgaggttactgaccctaggtgatttgcggcccttccccaagctatggcttccattagcattactgatgcacaaatgtgggccctgggagtcagaaggccaaaggcaaaatactccatcccattatcccattagtgcaggggcaagagtctgtgcatcaggagagtccttcgatctcttggtcccag

SEQ ID NO: 779567 - DNA, 604 bp, Homo sapiens
gaaggcctatattcagaaagtaggtctctgccttttatcactctagtcttttcaccctaaggctaaaaaagccagagactgaagaaaagaagcattcctatgctcttagaaacaaaatctacaacattcataaactactctttgatcattgcttgtcttctgctttgaaaaatattcagaaagagagtgccaatacctcccaaaatatgagataaacatgcattccttatgcggraaatgtaaaaaagttaatgtaagaccatggactaaagaaggagaatagcttagcgacattgctcaacctacgtctaaagagcacacagaactgagaccaagtttctcccacgggatttcagtggaaaaacaaaaggcttctaaacatttggaggtcattgaccttggcttccccacatctttgatgctccttctcatatcatgtgcaaactgatactttagtaggtcattggtgaaaaacaaatttctgaattcaatgtgtatctttgtgaacagacgaaagtcaatgaaaagtggtaaaaaaaaactacaccataaatctccaacaagcaaccccatacggacaaattcatcttgtctctacaacagc

SEQ ID NO: 779568 - DNA, 523 bp, Homo sapiens
ctgtgatggactgggtaagacaacctcttggccttcaggtgacacttgcaaggaggtaccaggtgatgtgatggtggctgggagtttaggccaaccataggccccagaaagatgctcaggtacccaaggtggtggattgaattgcacagttcccaggaccccagaatatgtgccctgtctgaaagagggggcaaagctgggctgtgcaggtttgtgctcaggccccttggtgagagcaggcaccaccattggtggccaggataaggtgatcctcaggccccaggcagagtgctcaggtaagggatgatggcagctgtgctaaagtgctaccactggacagagtgtggctgtgytctgtggccacagcctgggctggtaggtgagaatgtatgtccttcccacagtcccagtggggcttgctttccagccttgacaatgttagcccatgcctgtctcaccctcccaccctggctgcaggaggccccatttcagctggtgagcaagtcccagtggcaacttacac

SEQ ID NO: 779569 - DNA, 628 bp, Homo sapiens
ataattatgtaatcctccttattttcctctaagaaccattgtcttcctttacctcttcaaaaacacgcatagtttactatggcacatgtattcccattgcaatgccctattccccaatacatatcattttctttcttttagagagcctctctctgttatctatctaggttgacagagatgatggagtagagctgccccagttaaggtattccaacagacagaggccccagttgacccacattcaactgagcccaacytaagtcagctgactgaccccctactaacccccgagctatgataataaatgactgttgctttaagccattgaattttaagacaagacagtttgttacacagaaatagataagtgatacaatgccttatgagctaatgatggcaacttggaaagcaatgctccaggtggtttttacatgatctctttgtaatgtttgcttctgcctagtgaatgtcccaggccataacattttaggcactttgtttatagctggttgcaatcctacagtctcatcatacatagggcaataaccaggaacagagcaatcagaaccttccccactcaccccccgacccaccaccccaaatacaaagagagctcacattacggtag

SEQ ID NO: 779570 - DNA, 444 bp, Homo sapiens
ccaaagtgctcagatacaggtgcccggcatccaccgcgcccagcatccaaagagagaatcttcttgaggaactcaaaagacttttctcttttggataagcagttcatatttctgcatttattagggattttcacattttacttcattttacactacattttttttttgttcagtggtataacattttcaccaaggcactgaaaattccatttgcattagtgtccaatgtcatatattccctaccatgttgcaaatacagttcatttgtccagctttattgaggtataattcacaaataaaaattgtrtacatttactaggtacaacatgatgttttgctgtccaagcatacctcattttatcgcactacattttattgtacttcacagatactatgttttttacaaattgaaagtttatgcccaccctgtgtcaaacaaatctt

SEQ ID NO: 779571 - DNA, 618 bp, Homo sapiens
aggaatgtagaatgctataactttcatggaagatgtttacaaagttaataatacatttaccatacattccagcaacatcacttctaattacttaaccctcccccaaaaatgaaaacctaagttcaggcagagatttccacatgaatgttaataaaagctttattcatatagccaaaacctggaagcaacacaaacatccaacaacacaatatttattcacagattttggtatatccagaaaaaaaaaatccctctatcctcctgggtttagtaactgagacctgtgaattaaactgacaaattaacagaagaaaaagcacacaaattttattagacagagtcttgctctctcacccaggctggaatgcagtggtgcactcacagctcactgcagccttgacctcctaggctcaagtgatcctcctgcctcgacctccmaaatagctgagacttcaagcatgcataactttgctcagttacttatttttattttttgtaggtataaggacagggtctcattatgttgcccaggctgtctcaaatttctgggctcaagtgatcctccctcctcgtcctcccaaagtgccgggtttacaggcatgagccattgtgccttgt

SEQ ID NO: 779572 - DNA, 597 bp, Homo sapiens
aatgctgaagacaatatacagctcttgggggaaatggaatgaaaagaaataaatatctccaaaacatattgttgtgcttttattttaaatccatggggagagcttaaaagagaatcacttaagttccaagtgacgtctttgggttataatattgtaactttaaattgggaatggyttagggtatgtggaagaatctttctgttttcaggtggcctggacctgttattctcattagctgggagccagtataagagacagcccgtgtctgtcttgggttttgctggggcaattcatgccacccatagaaagctctttcccagtcacagtatttacttacaatgtatttttttcttttaaaaatttatacaaggactgacgtcagtaaaatgataaaataggactctccagtgctcttccccccactgaaacatcaatttgaacaactatcctcatgcaaaaatatcttcacaaaagctaaggaaactagatgagagattacagcacctgggtgtagcacagaaataagaaaagatgcattgaagaaggtaggaaggacagttttacatcaactgtattcctttacctccaaccacaggc

SEQ ID NO: 779573 - DNA, 589 bp, Homo sapiens
ctgctggtggtgggttgatgataaccatatttgacgcccttaaatttctaaaattaggagtcattgtattcattctagattgaggaggatagcatttaattggggcttaagtatgccttgtaagtatgtaaaaagatataaaattaccatgcatactgtctttcaataacataacaagactgtagtttagtgarctcaaggtgacaaaatagccattattttcttactgtgagagtcattttgtttattgtttgcatgagtgacaatttttccaatgaaactttcttggttaatagaccctttcttatacataaatatgaaataagagggtgatagaaatcagatattatatctagtttttatgactagcagattacacagaataaaaacatcacaatgacacaaaacataatcttacacattagacaaaggcatacaactttaaaaaatattgcaatcaaaaagatgtaattaaattaccctgattcattgaaactttagcttttaaaaggttcatttttgtgggtataaataaattttgttatcttaattttatacaagttacaattatattattgttaatgacaga

SEQ ID NO: 779574 - DNA, 630 bp, Homo sapiens
aacaaaaagcaaagtcaagatttggatgttcagtgtattcattgctacttgcacacacacacacacacacacacacacacacacaaacacacacaatatagttttatcagaatacacatattctgatagcagaattgaaagcttacataactgtgcaagctttggattctgctattctctggtttactcatccccagttttccaatccatcaataaggatagcctcaattatctaataagcatttcatgtgtatttcaataaaataatgcattttaatgaaaaattcttagaatagttcttggcacatgccatatttaaatgtcgccactgcctcattcatacagatcgtacccaagtaaaagtgtatatatggagaataaaaatgaaaacaggaagtaagacagtaaatggaggaagtcatttagatttgatagcatggtttccaaaggcagtgtcctattagaagygttcaggtaaataaaacgttattggcagagacagatggtaaagccattttagaaataaaaatgaaccaggtaagcacatgccaattttgggaaaacaatttattgtacctttttttctggagcttatttcaatgtaaaagtactttaaaaacttagaaaata

SEQ ID NO: 779575 - DNA, 599 bp, Homo sapiens
tatagtggatcatgctgccagatgattttgccttgttttaagctaatgtcagtgttctgagcatgtttaaggtaggtgaggcttagctatgctgttctgtaggctagctgtattcaatgcattttcgacttaactatattttcaacttacagtggatttatagggacccaattgcaaactggggagcatatatttgataagtgtttgtggttatgttccaaagtactcrgaattatttttacactgtggttgggttaagaaagcatagaatatgtaagccatttacaaatgtgtttcttaaagttcttttggtatgtcattttgatgaggtgagttgcatttataaagaaatgtcaactatgtgagcaacagatttccccatgatatcaactaaataaaatctgcctacacacacacatatgtacacacacaaaaacacatatattcttagagatatagaggatcaaacatgttataaactgaacatgttgattagtcaaactgaaatggactacaaggtctacacgtccaaaggttatatttcttacccataatgaaatgtccctaatacttgtgaatgatatggtctatattgttca

SEQ ID NO: 779576 - DNA, 609 bp, Homo sapiens
gacttagactcccacacaataattatgggagattttaacaccccactgtcaacattagacagatcaatgagacagaaagttaacaaggatatccaggaattgaactcagctctgcaccaagcagacctaatagacatctacagaactctccaccccagatcaaaagaatacacattcttctcagtgccacatcacacttattccaaaattgatcacacagtttgaagtaaagcactcctcattagaatcaaactagaactcaggattaagaaactcactccaaactaaacaactacgtggagactgaacaacctgctcctgaatgactactgagcacataacaaaatgaaggcagaaataaagatgttmtttgaaaccaatgagaacaaagacacaacataccagaatctctgggacacatttaaagcagtgtgtgcagggaaatttatagtactaagtgcccacaagagaaagcaggaaaaatctaaaattgacaccctaacatcacaattaaaagaactagaaaagcacgagcaaacacattcaaaagctagcagaaggcaagaaataaccaagatcagagcagaaatgaaggtgatagagacacaa

SEQ ID NO: 779577 - DNA, 586 bp, Homo sapiens
aatttcttaaacacaaggtgcactggacaactgcttcttagagcaaactcaaactgcctggaaagattagagatgcttctaaactaaaactaagctaaagaataaaaacatctttgaatgctattagaggacactggtgtacatctcctttaggaggaaaaattctacaactgtggatggcacctgacatcccaccaggcagctrggtacatgtaggttatacaaaagactcttaaacaataaatgcagaagcaaataaatcaagtttaacacattcccaaatgaatctagtcatgtggatgactaaaggagagtttttcccaggaatgcaaattttttaacacttaaaaatatctactttaaacagatcatcacaggttgaatcctctctggaaggatgtttttgttggtttgtttctgtttttttgttttttcgttttttttttttttttttttttttttttgacacagaacctcactctgttgcccaggttggagggcagtggtgcaatctcagctcactgcaatctctgcctcccaggttcaaacgattctcctacctcagcctcccaaatagctgggatta

SEQ ID NO: 779578 - DNA, 618 bp, Homo sapiens
ctgtgtgtatgtgtgtattttggaaacaaagaacatcgttatatataatatagcattatacgtgcccacactgtatgaagcagacctcttttttcctcgtataggtttaggtatcatcaggttttggtagttttgtgagatgaactggcattttctatacctttaaataattttaaatagtttatatcatagaaatcatctgtttaaaatgtttgaaagtgctagttcctacaackctctaaatcttgtcctgtttttgggattgagggggagcatcatggctccatctttaacattattttcaagtttccccccacttattgttatattcaatccaagttcttataataatttttaaataaattacataatttagattcacttgggacaaaaactatccatttcatgaggatactgaaatttattttctagagttgttcatcgagtctgaagtggctgtaagcctccctgttctcccttttcctgccacaaataatgtgtaatctatttactctttggcctaggactttatacaaattctagtgtgtggagttggggagttcaattgtttattattcacttatgttggactatattatagtccgagaatgttacctg

SEQ ID NO: 779579 - DNA, 578 bp, Homo sapiens
ccaaataagaaacacgatagttgaaaataatttttatagtaaataattgttttgggctgatttttcagtaaatccaaagtgacttaggttagaagttacactaaggaccaggggttggaatcagaatttagtttaagatttgaggaaaagggtaagggttagtttcagttttaggattagagctagaattgggttaggtgagaaagaaagttaaggttaaggctagagttgtctttaagggttagggttaggaccaggttaggtcagggttggattgggtttagattggggccagtgctggtgttagtgatagtgtcaggatggaggttaggtttggagtaagcgttgttgctgaagtgagttcaggctagcattaaattgtaagttctgaagctgatttggttrtggggtctttcccctgtatactaccagttgtgtctttagatggcacacaagtccaaataagtggtcatacttctttattcagggtctcagctgcctgtacacctgctgcctacatcttcttggcaacaaagttacctgccacagctctgctgagcctagttcctggtcagtaa

SEQ ID NO: 779580 - DNA, 624 bp, Homo sapiens
gaagaagcaacctttgttttctccactgtggtcagtagcctaaattcttattcaaagccatagtcaccagggcagttccaagaaggctgccagagctacaaagaatgagaaatgattctactttgctaccataattttttggtttcttttttttgtttgtttgttttctttgagagacaagatcttgctttgttgccagggctagagcaccgtggtgcaatcataactcactgcagcctcaaactcctggggtccagcaatcctcctgcctcagcctctcgagtagctaggactgccggtgaccaccaccatgcccagctaattttgtaaaaagyttttttagaaatggggttctcaccatgttgcccaggctggtctcgaacttcttgcctcaagcgaacctcctggctcagcctctatcaggtttcataattttactttagccttcgcaatggaatttaaattgtgccagccatcttttatctgtcagacccaggggatttttattgtcattttgaaccagatctatttttgcttaattctatgggaaccacacatagtttgtacatttgccagaaatttgttttccagtgaatattactcaattctaagtaagtacattcc

SEQ ID NO: 779581 - DNA, 647 bp, Homo sapiens
cacaagtctgtaaagagttgtgggagcatcgcaattgatgaaaaagggaggcagggaaaaaggaagggaagaaatgtcaggcataaaagaggccctgtagttacttcctgctgccatgctggagaaagctatactaatcatactagataactcactcttgtggacagagttgacacaaaaagtctcatctctattttttcatattcataaccctggaacaagaccagcagaggaaggtcaaggcacaacggtttagatttctcctgctgtgtttgtgtgtctcagttatacatgacaaaagaattgaaytgcaaaagacactgaaaagactaactcgctttccttgcttttagcacaccactaacacctgcagacactaaggcgatgtttggaagcatcatttaaggaatgagacaaaggttacaacgattacatctttttctttaaagagcttgaggaacacaaagataaccaaaattgagactaaacccagatgaaaatagatgtcatcaattattccaaagaatttccagaagcactcaatagtaagatagtcaaaatatcagggacaataaggaagtcattagtctgtttaaaccgagaatattctccaatgccacagacaaatgagaaaaaaccaaacctgc

SEQ ID NO: 779582 - DNA, 556 bp, Homo sapiens
taaattctttatataaatcttttagaatctaaagtacaggtaaaaattatacatttataagattaccaaattttcagtcattcctatcagacactaggtttatcctggcacttgctgtcagcaaattctcacagccaaagtaaaacattgatttgttttaaggaatggaggatggataaaagtgaagtatagcttttaaaaaagtgaattattmaaaaaaattattttatccagtttcaggtaattttactattaaaaaaaggaagccccaatgaaataagtgattttaaagatgttggcccttcaaatggactccctttccagttttcccatttctgccaaaagtgtcattgttttcccagtccacaggctcgacaccttagagatttctttgccttgcccattccttacttactgatattcagcttgtgtacagttattactcattttctttctctattttcagagccactatctggtctaggacatggatgctgcacatggataatggcatggcttctgcactgatcctctggctccctgtctctcaacactt

SEQ ID NO: 779583 - DNA, 638 bp, Homo sapiens
aaaacaacaccagaaattgtctttcatttcccaccttaccttggagtctcaaagttaggtacatcattgtgtgacgattaaaactataaaaagaaaagaattctttaacgtttttaaatggtatctggtatgtctaattattgaaatgcaatggtaagatagcagatagtcttaaaaccaaaatttcaagcttaaacatactgttcaaggaattagaaaagcaaatacattcatggaaagtccattctctgaaagtcagtttagaaagcataatagtctttagcatttttctgaatttctgaaacatgttacataaaaaataycagagacgggaggctgaggcaggagaatggcatgaaacagggaggtggaacttgcagtgagccgagattgcgccactgcactccagcttgggtgacagagcgagataccgtctcaaaaaaaaaaaaaaaaatcaaagagaaacttaatgtgtttgtatctggagagaaaaagcaaaccataaggaatgtttttaaatgtttataattgttgattactgagaacagaaaatcaatcgaaagtccagataaaatgttatattttataatttaaagtattaatgatatactataagatataaggaggaaaaaaatgac

SEQ ID NO: 779584 - DNA, 620 bp, Homo sapiens
cccaggtttaaaggtaaaagcggtcaccttcccagctaggcttagggattcttagttagcctaggaaatccagctagttctgtctctcaatgacacaagaagtgaagggagaaatattcaagaaactaggtagcttaaagaaaaaactgtcaaaaatttaggaaactttggacacacttttagaaatgtgaaatgctctggaaagtctcagcaatagaattgaaaaagtagaagaaagattcagagctagaagacaaggtctttgaattaacccaatccaacaaagacaaagaaaaaagaataagaaaatatgaacaaagcctccaagaagtctggaattatattaaacaaacaaamctaagaataattggtattcctgaggaaaaagataattctaaaagcttggaagacacatttaggggaataatcaaggaaaatttccccagccttgctggagacctagacatccaaatacaagatgcacaaagaacacctgggaaattcatcacaaaaagatcattgcctgggcacattgtcatcaggttgtccaaagttaaggtgaaggaaagaatcttaagagctttgagacagaagcaccagctaacctataaaggaaaacc

SEQ ID NO: 779585 - DNA, 522 bp, Homo sapiens
cagccccaaaactccctaagctgataagcaacttcagcaaagtctcaggatacaatatcaatgtgcaaaaatcacaagctttcctatacaccaacaatagacaagtggagagccaaatcatgagtgaactcccattcagaattcctataaagagaataaamtacctaggaatccaacttacaagggatgtgaatgacctcttcaaggagaactacaaaccacttctcaatgaaataaaagaggacacaaacaaatggaagaatattccatgctcatggatatgaagaatcaatatcgtgaaaatggccatactgcccaaagtaatttacagattcaatgccatccccatcaagctaccaatgactttcttcacagaattggaaaaaactactttaaagttcatatggaaccaaaaaagagcccgcattgccaagacaagcctaagcaaaaagaacaaagctggaggcatcacgctacctgacttcaaactataatacaaggctacagtaaccaaaacagcat

SEQ ID NO: 779586 - DNA, 442 bp, Homo sapiens
tcaagtgattctcatgctcagcctcttgagtagctgggactacaggcgcgcaccaccatgcccagctaatttttgaatttttagtggagactgggattcaccatgttggccaggctgatcttcaactattgcttacctcaagtgatctgtctgcttcagcctcccaaagtgctgggattacaggtgtgagctacygcacccggactattattattattctaatagtttttggggaacaggtagtgtttagcgacatggataagttctccaggtgtgatatctgggatttggtgcatccatcactcaagcagtgtacgcagcagcatccagtgtgtagtcttctatccctcacccctgctcccagtcttcccaagtccccatagtccactatatcattcttatgactttgcgtcctcatagcttagctcccacttaaaattaa

SEQ ID NO: 779587 - DNA, 599 bp, Homo sapiens
caccatattggccaagatggtctcgaactcctgacctccgataatcatcccacctcggcctcccgaagtgctgggattataggcctgagccaccgtgcctggccacgctgtcagcatttttaaaggctcagagaggccctgcaacaaataaacctgttaaactttgtttaatctgtcatttcccaagtttatttcatctgagaaccgccccccccccaactttttttgytttttttttaacagagtttcgctcttgttgcccaggctggagtacaatggggcggtcttggctcactgcagctctggcctcccagattcaagtgattcttgtgcctcagcctccggagtagctgggattacaggcgcctgctaccatgcccggctaatttttttttttttggagacggaatttcgctcttgttgcccaggctggagtgcaatggcgcaagggggcttggctcaccgcaacctctgtctcccgggttcaagcgattctcctgcctcagcctcccaagtagctgggattacaggcatgtgccaccacaccccgctaattttgtatttttttagtagagacggggtttctccatgttggtcag

SEQ ID NO: 779588 - DNA, 599 bp, Homo sapiens
caccatattggccaagatggtctcgaactcctgacctccgataatcatcccacctcggcctcccgaagtgctgggattataggcctgagccaccgtgcctggccacgctgtcagcatttttaaaggctcagagaggccctgcaacaaataaacctgttaaactttgtttaatctgtcatttcccaagtttatttcatctgagaaccgccccccccccaactttttttgttttttttttaacagagtttcgctcttgttgcccaggctggagtrcaatggggcggtcttggctcactgcagctctggcctcccagattcaagtgattcttgtgcctcagcctccggagtagctgggattacaggcgcctgctaccatgcccggctaatttttttttttttggagacggaatttcgctcttgttgcccaggctggagtgcaatggcgcaagggggcttggctcaccgcaacctctgtctcccgggttcaagcgattctcctgcctcagcctcccaagtagctgggattacaggcatgtgccaccacaccccgctaattttgtatttttttagtagagacggggtttctccatgttggtcag

SEQ ID NO: 779589 - DNA, 631 bp, Homo sapiens
acaaatgtgccctattctgaaaaaaaaaaatgccacaaaggacatttgttagtaaggaagagaagtgtattagtcagggttctctacagggacagaactaataggatatttaagaagtatgtaagaagcattaactcacacgatcacaaggtcccacaataggccagctgcaagctgaggggcaagaaagccagtttgagtcccacagctgaagaagttagagtccaacgttcaasgccaggaagcatctagcacaggagaaagatgtaggctgggaggctaagccagtctagtcttttcaggtttttctgcctgctttatattctggctgtgctggcagctgattagatggtgccctcccagattaacggtgggtctgactttcccagcccactgactcaaatgttaatctcctttggcaacactgtctcagacacacccaggatcaatactttgcatccttcaatcaaaccaagttgacactcagtattaaccatcacaagaagcaagcatcaggctttaaggcagaaagggataggccaacactactgttttgtgcaaatgcagtagggtttatgatcaggactgcctttgtctgtaaagctgttaactttgagccttgaagggaaaa

SEQ ID NO: 779590 - DNA, 580 bp, Homo sapiens
tcaattggtcccattctttaggaatttataactttgcctgggtggtagtaagaggatgtaagggatagatttaagacactcccccctttaaagggccttgcccaaattcaactaccatacagtctcttctgagcccctggggtacccccggagccttatgggccaactggatctaggaaattagcagggcagagagctagggtatcacacaggtaaacatggctactcctgctgactagctcctccagatccatgggtgaaggtcatgcttgcatccatgcrtggcacctatgatggttgccaggacccagaggagacaggagggaagaggagaatggggatgtcctttttgtctttctcgccactctgggtcactccgaaaggaggaaggagacttcttctcccctctttcctagataggtaacaacccatcttcaagcctgcactccccttgagtgcagcctggatcttctttaaaccttagaccctacagttcactctgggaaagccccaacatcactcacatatagaggccttccaggatttatcccaagtatttaaagtctcctggaaggatgtg

SEQ ID NO: 779591 - DNA, 550 bp, Homo sapiens
atgacatttaccagcctttcagtgatgggcagaataatggtcccccatagatgtctactttctaatccctcaaattgttaatatgtgaggttacatggtaaagaggaattaaggttgctagtcagttgaccttgaaatggggacgttatcctggattattcacatgtgcccaaagtatataatcacaagggtcyttattcatggaagagggaggcaaaggagagaaccaaagagatggaagtatgagaaggttatgatcttcccttgatggctttgaagatggaagaaggggttcatgagcccaaggaatgtggatagcctctaaaagctggaaaaaggaaggaaaccaattttcttctagagcctctagaaggaacacagccctgatggcaccttcattttagcccagtaagacacatttcagatttctggtccttagacctgtaagataataaatttgtgttgttttaagctaccaagtcagtagtaatttgtttttgcaaccagtgaaaatatactgattcaaatatttgcccattctctaccccct

SEQ ID NO: 779592 - DNA, 571 bp, Homo sapiens
tccaccctccatcgaagcttggagcctacctgccatcctgtgggcatttgtccccggacatggcagcatcagtacccactgacagctgcctctgcctctcatgcttgcttccctcctctactggtttccctgctcccagatcctcctggcttccaaggtttctggattaagtctgggttttgcttgcttggcacccagcccatgtttgaaaggggtgttggggctctgtaaaggggggccagccctgaataagaaactacatgaagatgcatctccatcatcctgaggtctgtagaaaaatcagttgacatgtcctggcctcaacttcttccctggtaaggaaagattagtttccatctgccaacttcagatggatgagaacaygtaagctgccaaacaacatcaagaagtgtcgggctccttctgcccttcatcccctcaacctacattgcacagtttctcaaagaaaagactgttattcattatgttgtaactgctgttattatgttccagtaatttgccgatctcaggccaagacatgagtgtaaggatttgggaaggctggatttct

SEQ ID NO: 779593 - DNA, 586 bp, Homo sapiens
gttgccaattatcccaacatcatttgttgaatagggtgtcctttccccactttatgtttttgtttgctttgttgaagatcagttggctgtaaatatttggttttatttctgggttctttattctgttcgattggtctatgtgcctatttttataccagtaccatgctattttggtgactatgtccttatagtatagtttgaagtcggataatgtgatgcctccagatttgttctttttgcttagtcttgctttgactgtgtgggttattttttggttccatatgaattttaggattttttttttagttctgtgaagagtaatggtggtgttttgatgggaattgcattgaattgcagattgcttttggcagtatggtcattttcacaatattgattctacccatccgtgagcatggcatgtgtttcctttrtttgcgtcatctgtgatttcttttaacagtgttttgtagttttccttgtagaggtggttcacctccttgtttaggtatattcctaagtattttattttattttttgtagctattgtgaaaggggttgtgttcttgatttgactctcagcttggtc

SEQ ID NO: 779594 - DNA, 618 bp, Homo sapiens
caattatctcataccaatgcaggctaaaatgattttctaaaaatctattggcagcattttttgcttatattgagaatttgacaactaaaattctaaaccagaacagacatatatttcatagatatttgtatggttttttttgggggggggtgtttttgtaaacagaggtaaaaccatgctataagtaaaatttgactctagctattgttgtattagccagttaatttgtactggtctttgagttcttagagtttttcaataagatgtattaaaatgttcttttacagatgagtaatmttgaatgatttcttctaactgatctttagaataaattgaatcaaaatgatagaaacaaaaaatggaaactgttagaccatttgaatattttggtctaaattccaagtacacaatgattaaaatgtatattttattgaactgtagcctggtaccatagggaaatttagaaaggggaatatttttcttaagttgtatgttaatccagaaataaatcacaaacctattgtaaaaaaataataataatttcccaccctagttcttatatatcctattatatattttccaagagcacagagagttacacagtttagaatttgggtt

SEQ ID NO: 779595 - DNA, 618 bp, Homo sapiens
caattatctcataccaatgcaggctaaaatgattttctaaaaatctattggcagcattttttgcttatattgagaatttgacaactaaaattctaaaccagaacagacatatatttcatagatatttgtatggttttttttgggggggggtgtttttgtaaacagaggtaaaaccatgctataagtaaaatttgactctagctattgttgtattagccagttaatttgtactggtctttgagttcttagagtttttcaataagatgtattaaaatgttcttttacagatgagtaatcttgaatgatttcttctaactgatctttagaataaattgaatcaaaatgatagaaacaaaaaayggaaactgttagaccatttgaatattttggtctaaattccaagtacacaatgattaaaatgtatattttattgaactgtagcctggtaccatagggaaatttagaaaggggaatatttttcttaagttgtatgttaatccagaaataaatcacaaacctattgtaaaaaaataataataatttcccaccctagttcttatatatcctattatatattttccaagagcacagagagttacacagtttagaatttgggtt

SEQ ID NO: 779596 - DNA, 638 bp, Homo sapiens
cttcatgtagtctcccctgacaccaaggggagggtggcctcattactgctgggtagtgttgaaaatcttcactttccaataaacccaccctgacacagctaccctacccagctcagtgggcagtggggggtggggtgcctcattactgttgggtgggggagaaagtccaggcttttgactcggctttgtccgggaccactctggcaggtgttggrgcacccagttacaggcagcagaagtctaggctccccacacagcctttactgaggaggtaggtgatggggtttcagttttctcctgcagtgtttggcaggggtggtcagttatcatctaagtttgctgtcttcataggctgccctttcctggccttttggcagagagaccaggcttttgttgagaccctttttttttgtctgtacctttctgtgttataggcttcttcagctccaaatctgatatattcgaggccaaaacagaacctagaaaactgaccaccctgtcattcctgggtccccgtctgatctgtgtcctctctacctttcagagtctccttatgtttgttttataggcaatgtccaggctttgagtcgtactcagcagggggaataggaaaaagtgtatccgttccatcctgccag

SEQ ID NO: 779597 - DNA, 622 bp, Homo sapiens
ggcccttgagggtaggaaaagaggtacatggggaaacataacaaacaccgactttggaggctttaatatatactaccacgtgacctttggcaaatgacttaacctctctgagcctcagtttccacatctgtaacctagagcaaagaataattacctcatatgcaagttgtagaaagtaattaaaagaatgcaggtttttctgtaaatattacttccactccctttctctcaaatgtgtagctttgtgccttatacatggtaaatatccaataaatacattagcatattttctgcaacaaaggcctttaacaatacatcgggaccaaaattagtattttctgaatagcctgatagcaataaaaaagacmcagatatctgtgtatccaacatgcttccaatgagtgcttatgaggatagagttcaactagaaattgtgccttttggggtgactacaatttctcatgtgtcgactcatgacactaagtcaggagagttaatagaagaaagaataaaaactttgcacagtctcctggagaggaaatgaacagtattcaatgaaatgtttttctcatatctcaaacacaggcatacatttttggctcctgtttccctcctccctgtg

SEQ ID NO: 779598 - DNA, 553 bp, Homo sapiens
atctgccttccccagcccactgactcaaatgttattctcttttggcaacacccacacagacacagccaggataaatactttgtatccctcaatccaatcaagttgacactccctattaaccatcacacttgggtatgtctttatagcagtgtgaaaatgaactaatacagtaagacttccttttcaacaytgatgcatttattctgcagtgaacagaagccaagagaatactttctggaatattagattgagaacctacattttgaaaatataccactgtaatgaagaatagtaaccattctactggttctttaaaaatattattgtctaccctctttgggctagtcaaaagagtctcgcctttcagcagttcagcaattgtttcagatgcaccttatagcttggggtctgagatattggagaagaaaatgcaaacattcacagagttgaggatgggcaagatccctactccctggtgctgcaagtgtagaatacatctgttccactaactggcacagactctaggtcaaactgcaactcttgtaaggctaag

SEQ ID NO: 779599 - DNA, 467 bp, Homo sapiens
tcttttatatcttctgtacctctaattttcatgctcgctcatcattctcacttcttgaatatatgggatacaatagtaaaacaaaaatgttcttgtttactactttgatcatcagtattatttcttggtcagtattgattgattgttttggatttttttctcctcattctaggttatattttcctgcttagttcatacttggcaacatttgattggatgacagaccttgtgaattttacctyattggatctggacatttgtgtttcctagaaatattccaagcttcatttatgacaagttaagttacttggaaacattttgggtcttgcttgaaagttgttagttgagatcagagcagcatttagtgtagggttaattttgctttactactgatgcaaactctatcccatgccccatgaattatgagacttttctctctggattgtgggaataagcagcagatagtt

SEQ ID NO: 779600 - DNA, 586 bp, Homo sapiens
aaataagcagtttttttcattgacaagtaaaattgtatatatttatggtgtacagcatgacgttttgatatttgtatacattgtggaacggctaactcaarctttttaacatatatagtacctcacatacttattattgtttgttttgtgtgtgtgtgtgcagtaagaacacttacaatctactcttttatcaattttcaagtacacaatatattaactgtagtccccgtgatgtataaaagatctcttgaacttattcctcttgtctaactgatattttgtgtcgtttgaacaacacgtctccaatatctccacctccccagcctctggtaactagcattttactctttctttttgtaagtttcactgttttgcttttttttttttttttaaaggtgttattgaaatgagtcactgtaatacttttggcttaaaactgatttaactgattaatgctcttaaatatttttaaatttttaaaaatgttttataatatacacacatgtacaagtagatatatatgtgtatatgtgtgtgtgtttatatatatacacacacatttatgtatatgtgtgtataaatgtgt

SEQ ID NO: 779601 - DNA, 586 bp, Homo sapiens
aaataagcagtttttttcattgacaagtaaaattgtatatatttatggtgtacagcatgacgttttgatatttgtatacattgtggaacggctaactcaagctttttaacatatatagtacctcacatacttattattgtttgttttgtgtgtgtgtgtgcagtaagaacacttacaatctactcttttatcaattttcaagtacacaatatattaactgtagtccccgtgatgtataaaagatctcttgaacttattcctcttgtctaactgatattttgtgtcgtttgaacaacacgtctccaatatctccacctccccagcctctggyaactagcattttactctttctttttgtaagtttcactgttttgcttttttttttttttttaaaggtgttattgaaatgagtcactgtaatacttttggcttaaaactgatttaactgattaatgctcttaaatatttttaaatttttaaaaatgttttataatatacacacatgtacaagtagatatatatgtgtatatgtgtgtgtgtttatatatatacacacacatttatgtatatgtgtgtataaatgtgt

SEQ ID NO: 779602 - DNA, 590 bp, Homo sapiens
ttattctctgacactccatgcactttataggcttgggtaaatttgcaaggagaaggtagttcctttgaagcaaggaggcaagtaaagagagtgacctgagctacatgcaatttgtgctgtgatgttgatattataaccaggttccaattgtaagttttggctatatcactcttgcaattggagctacctgagggagtgaggtggtaatacctgctgagctaatatcacatgactggtgctaacagcatgtggaaattcgtattcttaaaatgcacacrcatggacctacacataaccatctatatattttctccttcttggaaaaccatggaaggagtcagcatccatgggacaaattttaatgttgatgctattttgagaaaatcaatttcatcggtgagtagaagtcatgcaaagatggtgtaaatgaagcaggcctgatttctccattacatggtaggaattaagaggggaatctgtgagttacatttgaaagaaatataatcttgttgccttctgattgttaagtagtgctgagagtttttgatatgcaagagtattttcataaccaacaagaagtgacatatttt

SEQ ID NO: 779603 - DNA, 610 bp, Homo sapiens
agttggccagtcagcaactagttttcttcagatcttttcaaaggctgcttgttgtcgctttatccaaaggagttgatagatgtgtatgaagcattctggctgacccatggcaatttgtgtttggaagaatgagatttagagccagggttagtacaccatgtggattgccatgggcattatttaggtgtagataagcttatctgaaattgcatctggattacctgactaatccaaaaaaggaaagaaaagtagagacctgctatggaaatagtcatgaaacaaaggagcgctaggggagaggtgggtaactaaatgctagtttttaaataatgttatatcagacttaaaagatacatggaagataagacaggcctaagagtttgctagcagctggatcagattrcaaggaagaatctcagtctatcctttattactcaagccagagcacaagactagtttccacattttataaatatagagtcttttttggagactgtgaaatttggatagaatgttttatttctcattactgtttacagattcgttatgaccttggcctgtatacactttcatgacaggttaagtgaacagaggttaaaggaggcaaact

SEQ ID NO: 779604 - DNA, 610 bp, Homo sapiens
agttggccagtcagcaactagttttcttcagatcttttcaaaggctgcttgttgtcgctttatccaaaggagttgatagatgtgtatgaagcattctggctgacccatggcaatttgtgtttggaagaatgagatttagagccagggttagtacaccatgtggattgccatgggcattatttaggtgtagataagcttatctgaaattgcatctggattacctgactaatccaaaaaaggaaagaaaagtagagacctgctatggaaatagtcatgaaacaaaggagcgctaggggagaggtgggtaactaaatgctagtttttaaataatgttatatcagacttaaaagatacatggaagataagacaggcctaagagtttgctagcagctggatcagattgcraggaagaatctcagtctatcctttattactcaagccagagcacaagactagtttccacattttataaatatagagtcttttttggagactgtgaaatttggatagaatgttttatttctcattactgtttacagattcgttatgaccttggcctgtatacactttcatgacaggttaagtgaacagaggttaaaggaggcaaact

SEQ ID NO: 779605 - DNA, 633 bp, Homo sapiens
tccgtttgggtttagtaatttttctctggtagtatgttttgattccttgctttttattttgtgtgtctcttataccatgaagcttataaaaaatcttatagctatataaagctcttttaaacaaacaacaattaactttgataacaaagaaaagatacagaaacaaagaaaactataaaacratctttgaacttcatccccccagcatattgacctttttgttgtctcagtttggatctttttatatctcttaacaagttctcatagttattatttttaaaaatttgtgttttagtcttcatactatagatatgagtggttttcacattgcaatgacagtgttagagtattctgaatttgtctgtgtacttacttttatctgtgagtctatacattaagatgttgtttaactgcatattagtgtctttttcttttaaactgaaaaattcattttattacttcttttaagaaagggtctggtcttggtgaatttcctcagcttccgttttctgggaaaagctcctcattccttcaggtttgaaggatacttttactgagtatagtatgttttgtttagcaagttttttacttcagtactttttatatatcctttttttaacttcagtacttttt

SEQ ID NO: 779606 - DNA, 599 bp, Homo sapiens
cctttcttttgtaaagtgtaagaaacatgataatgacagtggaggtggtttacctgtgtgttctcagttgaataaattttagaaaagagtatatgtggaaactgaagatctgaatgttgatttcctttaagtgtttttgtctgtgaatcacctgaaaaatctttgtctatccccagaaatacttatgccccagtttgaagacagcactggcttattttacctaaagtggaactcctaacaagaatagacaattgaatttactaattwaaaaaaaattaaaccaactgattattcaggaactttaattcattatggtaaaggagtcctaacacaagagcttttgttcaattgtgatagtttccaaaaattcactcattaatttattcaacaaatatttctggagctccaaatatggaccaagcatggttttatgccctgagaaggcatcagtgaatacagcagacatatccccatgtttgtaaactgggaatttacagtgaatggaaaatggcagtgatgtaaataaggaggactgacggagccaaagagtcccacaaaaggaaccatggaaagagactttgtgataaatctcaacgcat

SEQ ID NO: 779607 - DNA, 647 bp, Homo sapiens
ataaattggaaccactgtgcactgttggtgggaatgtaaaatggtacagctgcagtggaaaatagaatggtggttcctcaaaaattaaaaatataattacaatataattcagcaatttcacttctggatatatactgcaaagaactgaaagcagaacctcgaagagatatttatacacccacattcacagcagtattattcacaacagctaaaatatgaaagcaatacaagggttcactgaaagtattcactttgaataaacaaaatgcggtacggtattacatacaatggaatattattcagctttaaaaaagaagaaaattcggatacacgctacaatatgggtgaaacttgaggtcattgtactaaatgaaataagccwgtcaaaaaaaaaataactgtataattctacttaaataaggtacttagtgtcatcaaaatcataaagctggaaaatagaatggatgttgccagaggctgagaggagagaatagtggggagttattgtttaatgggtacagagtttcagttttatcagatggaagagttctggagatggatagtggcagtggttgtacaacaatgtgaatgcacttaatgtcactgaactgtatatttaaaaatggttgaaatggtaattttaatgt

SEQ ID NO: 779608 - DNA, 647 bp, Homo sapiens
ataaattggaaccactgtgcactgttggtgggaatgtaaaatggtacagctgcagtggaaaatagaatggtggttcctcaaaaattaaaaatataattacaatataattcagcaatttcacttctggatatatactgcaaagaactgaaagcagaacctcgaagagatatttatacacccacattcacagcagtattattcacaacagctaaaatatgaaagcaatacaagggttcactgaaagtattcactttgaataaacaaaatgcggtacggtattacatacaatggaatattattcagctttaaaaaagaagaaaattcggatacacgctacaatatgggtgaaacttgaggtcattgtactaaatgaaataagccagtcaaaaaaaaaataactgtataattctayttaaataaggtacttagtgtcatcaaaatcataaagctggaaaatagaatggatgttgccagaggctgagaggagagaatagtggggagttattgtttaatgggtacagagtttcagttttatcagatggaagagttctggagatggatagtggcagtggttgtacaacaatgtgaatgcacttaatgtcactgaactgtatatttaaaaatggttgaaatggtaattttaatgt

SEQ ID NO: 779609 - DNA, 647 bp, Homo sapiens
ataaattggaaccactgtgcactgttggtgggaatgtaaaatggtacagctgcagtggaaaatagaatggtggttcctcaaaaattaaaaatataattacaatataattcagcaatttcacttctggatatatactgcaaagaactgaaagcagaacctcgaagagatatttatacacccacattcacagcagtattattcacaacagctaaaatatgaaagcaatacaagggttcactgaaagtattcactttgaataaacaaaatgcggtacggtattacatacaatggaatattattcagctttaaaaaagaagaaaattcggatacacgctacaatatgggtgaaacttgaggtcattgtactaaatgaaataagccagtcaaaaaaaaaataactgtataattctacttaaataaggtacttagtgtcatcaaaatcataaagctggaaaatagaatggatgttgccagaggctgagaggagakaatagtggggagttattgtttaatgggtacagagtttcagttttatcagatggaagagttctggagatggatagtggcagtggttgtacaacaatgtgaatgcacttaatgtcactgaactgtatatttaaaaatggttgaaatggtaattttaatgt

SEQ ID NO: 779610 - DNA, 603 bp, Homo sapiens
gggcaacccagagctctttcctcagtcttcattacagggtggggttgtttgtggctagtgtggggagaagctgaaattgaaatattagagaagacactaatttgaaaggtagagaagatctgtaacatcttcacagaaatttcyttcttggagttaggctttaaatggacataaactgctcctctggaatcactggacatcattaaataaatatactcttctactattacaaaagccatgctttctctattttattctaggaccctaagtgactatagtttctaaaaagagaatgattcttgaatagttcaggaattttataatgtctgttcttcttgtttgacccctgtccctagtcttgcttttattaaaggtatgtatcattctatttctagatttttaaaaaatactaaggattaataaaattaaacatagacactgtactctggttggcaaatctgcttcttataatagggtatggattagcaattctgaaataactttatgtctataatgaataagtaatatagctaatgaaaaccaaaaagagaagttatagtacacataatcaaaggaagaataatagaatgaacctggtggcat

SEQ ID NO: 779611 - DNA, 622 bp, Homo sapiens
ctgtcagtggcccacctgcccctggccacagcaaatgggtcagagatgagcttgtgacactagcaggaccagccagcagccagccagggcccctgctgggcccatcagcatcaagcagtgcagcctggagctgctgagacaggcccatgtggagggaagtgagaccaagaagccaaggatcagggtccccccagcagcagaggccctggcatcagctgggcctggagcccacattggaggctccgcttacttcagcctatcaactccatttccccttagacaaatgtgggttggactggtttcaactgaagtgtgcttgaactagggatggttgtctctgagcctggggctggagagtggccttggaataggagccgcagcaaacaggattcttgaaggagcaggagggaggctaaggtcagaacgaggaaggctggccagaggctaggaggtgcctgagagcggcwcacccaaacacacatctgctgtgtatctgctctggactggacactcagacagcgtgtctgtgctgggggcctggccttgtgctggcggcaggggatctgcagatgatgcaggcctggttcccactgccatggtgctcatggtctaggggagggag

SEQ ID NO: 779612 - DNA, 611 bp, Homo sapiens
gctagtagaatgttctgtacacattacattgcatgcactgcacacacaactacaaaacaagtatttaatgaaagggcattatcagcatataaactagactggaaatccagcagcttgacaataaactgcattttaggtaccctgagatctgacctctgagaacagcagtgaccaccttggagctggcacttcctggaatgctttgctgcattacacattaaaggtatatgctcagggagtaaaggaaacagagcttaatgaaaaatacctctatcgaggccaagccaagagataggtcaggtctatatccatacagctagtctaaggctgaatctcagtttctcagtgtacaaccagcaaccagtagaaataggcyccaccccaaagtggccccaggctctcagcttcctggctcacttttccactctccgtggatagtatatgcctgcctaaaaatttataaaagaggttaataatgaagcagggtacagaggtcacctctcaggctgcccatattttacctcataggtagttgccttcaaccatctactaggatttagactaaggcattacattttaactaagagggaaagctcatcagtcaagaaagc

SEQ ID NO: 779613 - DNA, 606 bp, Homo sapiens
gacggtcttgctttctttcctttttctcccttcctcccgccctccctttcttccttcctccctcccttcctttcctctttttccttcctttctttgcctctttattttctttgtttctttgacttcctcccttttacmattctctcttcctcctttccttcctcccttcctcctttctttctttctttctctgtttctctctttctttctctttcattcattcattctttctttctttccttctttcttccttgtgttcatgctttcttttttctcccttcctgtctttctcccttcctcccttcttccctcatttcctcattcttttctttcttctttctttatttccttccttccttctttccttccttctttttctttctttgtttccttttctttctttctctttactacaattcatattatttttaaaaaattaagagagggagacagaaaaataaagaatgctttaatctgcaggtaaatagattatgtctgctgtaggccaaagaatgttctccccaaaattttcatgtcctaattcccagattctaacatacaaatacgttaggttgcactgcagtgtgaaattagattacaagtgaa

SEQ ID NO: 779614 - DNA, 330 bp, Homo sapiens
gttgaagctttcttttaatagagcagttttcaatctctctttcagaagaatctgcaagtggatatttggatagctttgaggatttccttggaaacgggaatagcttcatataaaatctagacagaagtattctcagaaactacttggtgatgtttgcattcaggtcacagagttcaatattccatttcatakagcaggtttgaaaccctctttttatagtatctggaagtggacctttggagcgattgaggcctatggtgaaaaacaaaaattcttcccataaaaactagactgaagcactctcagaaacttgttcctgatgtgtgtacg

SEQ ID NO: 779615 - DNA, 645 bp, Homo sapiens
atgattccattcgagtccattcaatgatgccattagattccatttaatcatgattctgctggatgccattcgatgattccattcgatttcattcaacgatgattccacttgtgtccattcgatgattccattcgattccatttgatggtcattccactcgagtccattcgatgattccattcaattccatttgatgatgattccattataatccatttgatgactccattcgattctattcgatgatgactgcattcggttccatctgatgatgattccaatggattccattcgatttctccatttgatttcattcgttgatgattccattcgtttccattaaatgatgattccattagaatccattcratgatgattccattcgattccattcaaagattccattcaattccattcaatgatgattccattcgattccatttgatgattccattcgattccattcaatggtgattccattagggtccattcgatgattccattcgattccattcgatgatgatttcattcgagtacattcaatgattccattcaagtccatttgatgattcctttcgattccattcgatgatgattccattcgagcgcattccatgattccattcgattcctctgaaagataac

SEQ ID NO: 779616 - DNA, 596 bp, Homo sapiens
tttgtcatgtgtctactcaactaacagagttgaaccttgcttttgatagagcagattggaaacactctgtttgtagaatctgcaagtggatatttggatagctttgaggatttcgttggaaacgggaatatcatcatataaaatctagacagatgcattctcagaaacttctttatgatgatagcattcaagtcccagggttgaacattccctttcacagagccggtacgatacactctttttgtagaatctggaagtggacatttggagcgctttcaggcctacggtgaaaaagaaatatcttcccataaaaactagacagaagcattstcagaaacttgtttctgatgtgcgtacacaactaacagagttgaacctttcttttgatagagcagttttgaaacactcttgttatagaatctgcaagtggatatttggattgctttgaggatttcgttggaaacgagattatctccatatgaaaagaagaagcattctcagaaacttcgtagtgatgtttgcattcaagtcacagtgttgagcattcccctttaaagagcaggttttgaagcagtctttttctagtatctggaagt

SEQ ID NO: 779617 - DNA, 612 bp, Homo sapiens
cttttcatagagcagttaggaaacacactgtttgtgaagcctgccagtggatattcggacctctttgaggccttcgttggaaacgggatttcttcatattatgctagacagaagatttctcagtaacttctttgtgttgtgtgtatgcamctcacagagttcaaccttcctttacacagagtagatttgaagcactctttttgtggaatttgcaagtggagatttcaagcgcttcaatgccaatggtagaaaaggaaatatcttcgtataaaaagaagacaaactcgttcccagacactgcgtagtgatgtgtgtgtttaactcacagagtttaacctttcttttcatacagcattctggaaaccctctgtttgtaaagtctgcaagtggatatttttacctcttagatgtcttcgttggaaacgggatttcttcatataatgctagagggaagaattcttagtaacttctttgtgttgtgtgtattcaactgacagagttgaaccttcctttagacagagcagatttggaactctctttttgtggaatttgcaagtggagatttcaagcgctttgaggccaaaagcagaaaaggaaatattttcctatgaa

SEQ ID NO: 779618 - DNA, 612 bp, Homo sapiens
cttttcatagagcagttaggaaacacactgtttgtgaagcctgccagtggatattcggacctctttgaggccttcgttggaaacgggatttcttcatattatgctagacagaagatttctcagtaacttctttgtgttgtgtgtatgcaactcacagagttcaaccttcctttacacagagtagatttgaagcactctttttgtggaatttgcaagtggagatttcaagcgcttcratgccaatggtagaaaaggaaatatcttcgtataaaaagaagacaaactcgttcccagacactgcgtagtgatgtgtgtgtttaactcacagagtttaacctttcttttcatacagcattctggaaaccctctgtttgtaaagtctgcaagtggatatttttacctcttagatgtcttcgttggaaacgggatttcttcatataatgctagagggaagaattcttagtaacttctttgtgttgtgtgtattcaactgacagagttgaaccttcctttagacagagcagatttggaactctctttttgtggaatttgcaagtggagatttcaagcgctttgaggccaaaagcagaaaaggaaatattttcctatgaa

SEQ ID NO: 779619 - DNA, 612 bp, Homo sapiens
cttttcatagagcagttaggaaacacactgtttgtgaagcctgccagtggatattcggacctctttgaggccttcgttggaaacgggatttcttcatattatgctagacagaagatttctcagtaacttctttgtgttgtgtgtatgcaactcacagagttcaaccttcctttacacagagtagatttgaagcactctttttgtggaatttgcaagtggagatttcaagcgcttcaatgccaatggtagaaaaggaaatatcttcgtataaaaagaagacaaactcgttcccagacactgcgtagtgatgtgtgtgtttaactcacagagtttmacctttcttttcatacagcattctggaaaccctctgtttgtaaagtctgcaagtggatatttttacctcttagatgtcttcgttggaaacgggatttcttcatataatgctagagggaagaattcttagtaacttctttgtgttgtgtgtattcaactgacagagttgaaccttcctttagacagagcagatttggaactctctttttgtggaatttgcaagtggagatttcaagcgctttgaggccaaaagcagaaaaggaaatattttcctatgaa

SEQ ID NO: 779620 - DNA, 346 bp, Homo sapiens
tcacctctgttagtttcgtacacacatcaggaacaagtttctgagagtgcttcagtctagtttttatgggaagaatttttgtttttcaccataggcctcaatcgctccaaaggtccacttccagatactataaaaagagggtttccaacctgctmtatgaaatggaatattgaactctgtgacctgaatgcaaacatcaccaagtagtttctgagaatacttctgtctagattttatatgaagctattcccgtttccaaggaaatcctcaaagctatccaaatatccacttgcagattcttctaaaagagagattgaaaactgctctattaaaagaaagcttcaac

SEQ ID NO: 779621 - DNA, 630 bp, Homo sapiens
atccaagtatccacttgcagattccacaaaaagcgtgtttcaaaactgctctatcaaaagaaaggttcaactctgttagttgagtacacacatcaggaacaagtttctgagagtgcttcagtctagtttttatgggaagaatttttgtttttcaccayaggcctcaatcgctccaaaggtccacttccagatactataaaaagagggtttccaacctgctctatgaaatggaatattgaactctgtgacctgaatgcaaacatcaccaagtagtttctgagaatacttctgtctagattttatatgaagctattcccgtttccaaggaaatcctcaaagctatccaaatatccacttgcagattcttctgaaagagagattgaaaactgctctattaaaagaaagcttcaacactgttagtggagtacacacatgacaaacaagtttctgagaatgcttctgtctagtttttatgggaagatgtttcctttttcgccgtaggcctcacagcgctccaaatgtccacttccagatacggcaaaaagagtgtttcaaacctgctccatggaagggaatgttcaaccctgggacttcaatgcatacatcgcaaagaagtttctgaaaatgctt

SEQ ID NO: 779622 - DNA, 610 bp, Homo sapiens
gaagctattcccgtttccaaggaaatcctcaaagctatccaaatatccacttgcagattcttctgaaagagagattgaaaactgctctattaaaagaaagcttcaacactgttagtggagtacacacatgacaaacaagtttctgagaatgcttctgtctagtttttatgggaagatgtttcctttttcgccgtaggcctcacagcactccaaatgtccacttccagatacggcaaaaagagtgtttcaaacctgctccatggaagggaatgttcaaccctgggacttsaatgcatacatcgcaaagaagtttctgaaaatgcttctgtctactttttatataatgatatccccgtttcctccgaaatactcaaagctatccaaatatccacttgtagatactacaaaaagggtgtttcaaaactgctctctcaaaagaaaggttcaactctcttagttgagtacacacatcacaaacaagtttctgagaatgcttctgtctagttttcatgggaagagatttcctttttcaccatgggactcagagccttcggaatgtccacttccagatactagaaaaagactgtttcaaaacccgctctgtaaaagg

SEQ ID NO: 779623 - DNA, 624 bp, Homo sapiens
atgggaagagatttcctttttcaccatgggcctcagagccttcggaatgtccacttccagatactagaaaaagactgtttcaaaacccgctctgtaaaagggaatgctcaactctgtgagttgaatgcaaacatcactacgaagtttccgagaatgtttctgcttttcatatggagataatcccttttccaacgaaatcctcagagcaatccaaatatccacttacagatcctacaacaagagtgtttcaaaactactctatcaaaagaaaggttcaactctgttagttgtgtacacacatcaaaaaacaagtttcggagaatgcttctgtctactttttgkggaagagatagcctttttcaccataggcctcaaagcgctccaaatgtccacttccagattctacaaaaagagggtttcgtacctcatctgtgaaagggaatgttcaaccctgggacttgaatgcatacatcacaaagaagtttctgaaaatgctcctgtctactttttatataaagatattgccgtttcctctgaaatcctcaaagctatccaaatatccacttgcagattctacaaacagagtgttcccgatctgctctatcaaacgaaaggttcaactct

SEQ ID NO: 779624 - DNA, 584 bp, Homo sapiens
tgtgttgaaagcaacgaaacttgcacagcaaaattaaagatctaaataaacggagataaatgcatgaatgtgaattgcatgactcgatattattaaaatggcaattccccagttgatctatagaggtaatgcaatcactatcaaamtttaagtagtttttgtctagaaactgatgatctaattttacagtttatatggaaatttaaagaacctagaatagctaaaactattttaaaaataattctactacctgatttcaaaacttactacaaagcaatagcaatctagacgaagtggtcccggcataaagatagacatatagtgaatgcaatagaattgagtgttaggaaaagcatggatcattaacttcaatataagacctaaaattataaaacttctaaataaaaacttagtagaaaatctttgtgacttggattaggcaaaaacctcttagttatgatttacaatccttaaaattaaaaacagagagagagaattgagcatcaaaatgtagcattttattcttcaacaaaccattaaaaataaaaaaaaacatgcacggaatgtgagaaaatacttgtaaa

SEQ ID NO: 779625 - DNA, 584 bp, Homo sapiens
tgtgttgaaagcaacgaaacttgcacagcaaaattaaagatctaaataaacggagataaatgcatgaatgtgaattgcatgactcgatattattaaaatggcaattccccagttgatctatagaggtaatgcaatcactatcaaaatttaagtagtttttgtctagaaactgatgatctaattttacagtttatatggaaatttaaagaacctagaatagctaaaactattttaaaaataattctactacctgatttcaaaacttactacaaagcaatagcaatctagacgaagtggtcccggcataaagatagacatatagtgaatgcaatagaattgagtgttaggaaaagcatggatcattaacttcaatataagacctaaaattataaaacttytaaataaaaacttagtagaaaatctttgtgacttggattaggcaaaaacctcttagttatgatttacaatccttaaaattaaaaacagagagagagaattgagcatcaaaatgtagcattttattcttcaacaaaccattaaaaataaaaaaaaacatgcacggaatgtgagaaaatacttgtaaa

SEQ ID NO: 779626 - DNA, 611 bp, Homo sapiens
ttttttttttttttttgaggcggagtctcgctctgtcgcccaggctggagcgcagtggcgcgatctcggctcactgcaagctccgcctcccgggttcacgccattctcctgcctcagcctcccgagtacctgggactgcaggcrcctgccaccacgtccagctaattttttgtatttttagtagagacggggtttcaccgtgttagccaggatggtctccatctcctgacctcgtgatccgcccgcctcagcctcccaaagtgctgggattacaggcgtgagccaccgcgcccggcctaaactcttatattttttattaatgagcagatccatgctccaagaaaaccctgttactcggacacagtggtccaggctctggccgtgcatcggtctgcttttcatatttaggtttagtttttagaaaaactaaatgacctctttttaatttcagcccacatgatcatacacaaaattattttcacaagatcactctttcacaaactttctacaacttgcttaaaccttcagttatgtgtatcatgtcttaccattttatcctaggacaaaggtttactttattttcccccttattattacgaccacacagaatt

SEQ ID NO: 779627 - DNA, 611 bp, Homo sapiens
ttttttttttttttttgaggcggagtctcgctctgtcgcccaggctggagcgcagtggcgcgatctcggctcactgcaagctccgcctcccgggttcacgccattctcctgcctcagcctcccgagtacctgggactgcaggcaccygccaccacgtccagctaattttttgtatttttagtagagacggggtttcaccgtgttagccaggatggtctccatctcctgacctcgtgatccgcccgcctcagcctcccaaagtgctgggattacaggcgtgagccaccgcgcccggcctaaactcttatattttttattaatgagcagatccatgctccaagaaaaccctgttactcggacacagtggtccaggctctggccgtgcatcggtctgcttttcatatttaggtttagtttttagaaaaactaaatgacctctttttaatttcagcccacatgatcatacacaaaattattttcacaagatcactctttcacaaactttctacaacttgcttaaaccttcagttatgtgtatcatgtcttaccattttatcctaggacaaaggtttactttattttcccccttattattacgaccacacagaatt

SEQ ID NO: 779628 - DNA, 578 bp, Homo sapiens
aagggaactgtgagtacccacaaagaacctgatattgacggcacatacatttcttcattaggaagaataaatttagactgtaacaatttaaaaaaccagaaaatacaactgtacattttagttcttattaaaatccaagaggtttaacttatttgctccttgtttaggtaattagtgtctaaaacatttcaaagataacatatatagtggctaygatttctagtactttttaaaaattcaagcccagtctcttctaattaaatgtataaatgatttatctctgtctttcttaaaaagaaccaagagccccaattaaaaagtaaaacttaaatttcctcttaaaaaattgttacgtcaaaattatctaataaaccatagttcagaaaataatttctgaattaagaaaatatgaataataaaaccaacagtttatgtgctgaatttcacatttttattttttattatttttaaaattttgttttaagttctagggtacatgtgcaggagtgttacgtagggaaacgtgtgccatggtggtttggtccacctatcaactcatcacctcagtgttaagccca

SEQ ID NO: 779629 - DNA, 481 bp, Homo sapiens
agggacttcacagaaggaggctggagagcatcagcagaggcagcctggaccttggatctgtaaacagaagacactgtttgaaactgcacaactgagttagggtttccaacaaggcaggtgggggcctgtgggtaggtgtgtgcggcagccacagaggctgggatagcttggcactggggtcagggctcagccagcctatgtgtcttcacacctggtaatgagatcacttgtaaacaatttctgtttrtgaattacaggatattgaagccaaaaaagaaggacagaaggaaaaagaaattgatgaacaggaagcaaatgcctcaacatttcatagaaggaggactccattggataaagaccttattaatacggggatctgtgagtcttctggcaaacagtgtttgcctctggttcagctcatacaacagcttcttaggtaaatcatattagctgtattgtattgtgttttatttatttactt

SEQ ID NO: 779630 - DNA, 481 bp, Homo sapiens
agggacttcacagaaggaggctggagagcatcagcagaggcagcctggaccttggatctgtaaacagaagacactgtttgaaactgcacaactgagttagggtttccaacaaggcaggtgggggcctgtgggtaggtgtgtgcggcagccacagaggctgggatagcttggcactggggtcagggctcagccagcctatgtgtcttcacacctggtaatgagatcacttgtaaacaatttctgtttatsaattacaggatattgaagccaaaaaagaaggacagaaggaaaaagaaattgatgaacaggaagcaaatgcctcaacatttcatagaaggaggactccattggataaagaccttattaatacggggatctgtgagtcttctggcaaacagtgtttgcctctggttcagctcatacaacagcttcttaggtaaatcatattagctgtattgtattgtgttttatttatttactt

SEQ ID NO: 779631 - DNA, 595 bp, Homo sapiens
aaaggttttccacatccacagtcaacgatgggaacctttcattcctcagaaataagccctttttaggtcattgaaaaagagtacaactgctgcagctcatgatgcagtatcttcatgagcccagagcacatacaaatcctaagggaaccaccataatacactgctaattcctggcaccggaacagatgaaacacactctatcctggacatacctgccagaggaggccactttcctcttctgtgagatttaaaaagctcccycaaaaggtttcactcccatcaccaatacacagaaaatggaggaaaggctgtttccagttcttggcctttaaacaactctaaatgtcagtactcatagtggcatattacaaagtaataaacagtgcacgcttgggggcaaactacatattgagctaacgaagagctcactgtgattaagattagatcaaacaacagcagaacataggcaaattttgtctgaattctgtagtgaatatacatgctgcaataacattaaaaaagcatggcagcctattccaaaccagcgagaacagttttgggcaaagagtgggtctttgtgtgtttgaacccccac

SEQ ID NO: 779632 - DNA, 528 bp, Homo sapiens
tttaacaaaaattgtgctttcaagggaccaaacttgaatactacaccttcatgttctaagaatcaggggacttatataaaacctcagttgcctgataaggactacatcaaagtgaaaagccatgggaaagaactagaaagtatacttttgaccctagttctgtaaagtttccttatgccacaggtaatacacatcgcaattcctgccaaattctttccctcacttctgtttatggtctcgattccataaataggagaagggcatgaatttgctttagttagatagacagatagatggatagakagatagatggatggatggatggatggatggatagatagatagacagagataaagatagagacaaagatggagacagagatggacatagagacagatttgcagaagataagttctaggtgaactagtgtcaacattaaagtggtatgcctacatctaactattctggagagaaaaacatacctcaaagaaattgacttaaatatatacagagaaaaagtttaagct

SEQ ID NO: 779633 - DNA, 622 bp, Homo sapiens
gtccctgggtaatttttatatttgtcttagtcccttcatagtgccataacaaaacacctgagactgggtaatttacacagagcagaagtttattttctcagttctggaggttgggaagaacaagatcaagactccagcagacacagtgtctagtgagggcctggtctctgcttccaagatggtacgttgaatgctgcttcctctggagcaggcaaatgctatgttctcatgaggcagaagggacagatttaccaccacccacaagcccttttataaggaaggcactaatctcatgcatgagggctcacccttatgtcttaatcacttcttaaaggccccacttcttagtactatcatcttgggaattaagttttaatacatgaattttgggagacacattcaggctatggcaatactcttcatgaaaggcctgtgtatactttgctagatatattctcagggttttgttgctattgtsaatagaatctcttttttttttttttttttgccacggagtctggctcctttgcccaggctggagtgcagtggcgtgatctcggctcactgcaagctctgcccctccaggtttaagcagcctgttgcccaggctggaatgcagtag

SEQ ID NO: 779634 - DNA, 586 bp, Homo sapiens
ggatgtcttcgctgaagctaagcaaaaactgaacatgagggaccagtagccacctgctggcagacaagcatttgcaggaattagtaggcctgggggctgtgtgtgtctccggttgcaagaaggggaggaggttagttcaaagaaagctagaaagcactatggagactcctcaaaccaccttactatccagcaaccccacttytgggtatatacccaaaggaaataatttttttttttttttttgagatggagtttcgctcttgtcacccaggctggcatgcaatggcatgatctcggctcactgcaaggtccacctcctgggttcaagcgattctcctgcctcagcctcccaagtagctgggattacaagtgcccgccaccatacctgggtaatttttttgtatttttagtagagacggggtttcaccatgttgcccaggctggtctcaaacacctgacctcaggtgatccacccaccttggcctcccaaagtgctgggattacaggcgtgagtcaccacactcggcccaggaaataaaatttttatcctgaacagatattggcactctcgtgttcactgcagcct

SEQ ID NO: 779635 - DNA, 586 bp, Homo sapiens
ggatgtcttcgctgaagctaagcaaaaactgaacatgagggaccagtagccacctgctggcagacaagcatttgcaggaattagtaggcctgggggctgtgtgtgtctccggttgcaagaaggggaggaggttagttcaaagaaagctagaaagcactatggagactcctcaaaccaccttactatccagcaaccccacttctgggtatatacccaaaggaaataatttttttttttttttttgagatggagtttcgctcttgtcacccaggctggcatgcaatggcatgatctcggctcactgcaaggtccacctcctgggttcaagcgattctcctgcctcagcctcccaagtagctgggattacaagtgcccgccaccatacmtgggtaatttttttgtatttttagtagagacggggtttcaccatgttgcccaggctggtctcaaacacctgacctcaggtgatccacccaccttggcctcccaaagtgctgggattacaggcgtgagtcaccacactcggcccaggaaataaaatttttatcctgaacagatattggcactctcgtgttcactgcagcct

SEQ ID NO: 779636 - DNA, 642 bp, Homo sapiens
agaatcaaagcatattaaacctggagggcatttgggagatcatgtggcaaaatccctccattttatgaagggaaaatgaagcctggatcaggaagtgatttgcccaaagccacatggtcactggtagaactgggttaaaaacccatttgtcttcttactttggtactttctcctttggttatatcatctaggcccccagtgcagattttcttcatagcaaatctagggtttaccatcccccgtccctgccaataccactgtctgtaaaatatagactcctcctcaagttagtttccctcctgttgaggcaaagattggaaaagtgtaattagaccaacaacactcagctttattaatgagyctttcaagatgctgcctgcttcccatgtgtgggactggaccaaatgggacagttgcccaataagagcccaaggaaagaagaatgtgagggatgagtcaatcctgggcatgtgcttactcaacctagactagcacatgtagttggtgggagaacttgaactgtgacagggaggatcaaggttacagctaaaaattagcgctgaatgtcaagttcaaaaggtgaggctagggatgaaattggaggatgaatcatgaagttgaagccaaaaggttcaagaaaag

SEQ ID NO: 779637 - DNA, 642 bp, Homo sapiens
agaatcaaagcatattaaacctggagggcatttgggagatcatgtggcaaaatccctccattttatgaagggaaaatgaagcctggatcaggaagtgatttgcccaaagccacatggtcactggtagaactgggttaaaaacccatttgtcttcttactttggtactttctcctttggttatatcatctaggcccccagtgcagattttcttcatagcaaatctagggtttaccatcccccgtccctgccaataccactgtctgtaaaatatagactcctcctcaagttagtttccctcctgttgaggcaaagattggaaaagtgtaattagaccaacaacactcagctttattaatgagcctttcaagatgctgcctgcttcccaygtgtgggactggaccaaatgggacagttgcccaataagagcccaaggaaagaagaatgtgagggatgagtcaatcctgggcatgtgcttactcaacctagactagcacatgtagttggtgggagaacttgaactgtgacagggaggatcaaggttacagctaaaaattagcgctgaatgtcaagttcaaaaggtgaggctagggatgaaattggaggatgaatcatgaagttgaagccaaaaggttcaagaaaag

SEQ ID NO: 779638 - DNA, 642 bp, Homo sapiens
agaatcaaagcatattaaacctggagggcatttgggagatcatgtggcaaaatccctccattttatgaagggaaaatgaagcctggatcaggaagtgatttgcccaaagccacatggtcactggtagaactgggttaaaaacccatttgtcttcttactttggtactttctcctttggttatatcatctaggcccccagtgcagattttcttcatagcaaatctagggtttaccatcccccgtccctgccaataccactgtctgtaaaatatagactcctcctcaagttagtttccctcctgttgaggcaaagattggaaaagtgtaattagaccaacaacactcagctttattaatgagcctttcaagatgctgcctgcttcccatgtgtgggactggaccaaatgggacagttgcccaataagagcccaaggaaagragaatgtgagggatgagtcaatcctgggcatgtgcttactcaacctagactagcacatgtagttggtgggagaacttgaactgtgacagggaggatcaaggttacagctaaaaattagcgctgaatgtcaagttcaaaaggtgaggctagggatgaaattggaggatgaatcatgaagttgaagccaaaaggttcaagaaaag

SEQ ID NO: 779639 - DNA, 578 bp, Homo sapiens
gggtttggtttggtcttctattttcttttgctttatgatgtatcgctggcttgttaaagcttttctgctttttttgatgtagattcttattcctgtaaactttcctcttcatactacttttgctgtatcccatagatttttggtgtgttgtgtttccatttttatttgtttcttgaaatttttttatttttctccttratttcttcatcgagccactcatcattcagaagcatatcatctaatttccatggtttgtatagtttacaaaattcctcttctttttgatttttaattttattccactgtagtaagagaagatacttgatatcattctaatgtctttgaagtttttacaacttgttttatggcttcatatatggtgtgtccttgagataatccatgagctgaggagaagagtgttctgcagccattagattaaattttctgtgaatatcaattaggtccgtttcctggatagtgcacataagttcaaattttctttgttgattttctctctacataatctgtccagtgctgaaattggggtgttaaaatctccggctattgtactgaaatct

SEQ ID NO: 779640 - DNA, 578 bp, Homo sapiens
gggtttggtttggtcttctattttcttttgctttatgatgtatcgctggcttgttaaagcttttctgctttttttgatgtagattcttattcctgtaaactttcctcttcatactacttttgctgtatcccatagatttttggtgtgttgtgtttccatttttatttgtttcttgaaatttttttatttttctccttgatttcttcatcgagccactcatcattcagaagcatatcatctaatttccrtggtttgtatagtttacaaaattcctcttctttttgatttttaattttattccactgtagtaagagaagatacttgatatcattctaatgtctttgaagtttttacaacttgttttatggcttcatatatggtgtgtccttgagataatccatgagctgaggagaagagtgttctgcagccattagattaaattttctgtgaatatcaattaggtccgtttcctggatagtgcacataagttcaaattttctttgttgattttctctctacataatctgtccagtgctgaaattggggtgttaaaatctccggctattgtactgaaatct

SEQ ID NO: 779641 - DNA, 576 bp, Homo sapiens
gtaaagcattttagctaaaacataaaaatgtctgtggttctcagaaattttagccgaaatatttaggcatttggaaatataaagctatgttttaatcaaaacccttatttactattattaaattaaaagattctactaaaacaaaaaatagcacatctgttaaatctggtaggtgagtatgtgragatctgttatattagtttcatatacataaaatttcacaattaaaaattcagaaattaaaatacattcataagaaaaatatatagaaagtctacatattttagttctcccctccttcaagattaaaattggaagggcaaaaatgaaattacattgcttgaaagtttgtctagaactatccccttaaatgtttttatactagcagtgccctttaaattttaattttctgagctgatattataatattattcttggtataaatattgctaaaatatttagagtaaatgtaatattaatacggtcccacacccaaaagtggtttggaattaaatctatttatacacattgtttatgatgctctagtatagcaatatatagctaagcatattctaa

SEQ ID NO: 779642 - DNA, 616 bp, Homo sapiens
aattgcatgacatcttgtccttttttttaaacgttagcctgccaccatttcccctccattttaaaaaccattgtgccttataataaaacacacaaatctttctctagagggtgaaaggagggattggggaagggcagagaagggcccaagttcatgctatttgaatgactggacaatattartcatttattacagaagcaattttcaataaacttgtaactcatcaaaatgtatcagagaaacggatcacttgacatggcactgtttatgactagattatatgccagtcctcagatttaagatctgtaaactgcctaagaaattatgacagtaatatgacattaacatgacattaacattttatccacattaaagatattttaatttgcacacattcataggatgcactgtgtgttaaaaggaaagagaaagatttatggaattggtcttgtagaaagaagaaaaacttcatgctgtttcatctcatgatcacagtttgaggaaagtgtctgttttaatacgcagtttcaccctaaacctcaaatgtatattgtcttaggtgagaaaaatatattaaaatgttgggagaaaggtatctattatgctgacatcctta

SEQ ID NO: 779643 - DNA, 480 bp, Homo sapiens
gataaatattaagaagaccatgattagaaatactacagtcaaattgataaaaactaaaggtaaagagaaatcttgaaagtattcagaggaaaaaacaacacattacatacaggggaacaatgatacaaattattgctactgacctcttatcaaaaataatggaaatcagaagacagtggaatgaaattcttaacatggtgaaagaaaacaaaaggtcaacctagaattttatacccagcaaaaacatccctcaaaaatgaaagtaaaataaggacatttttgagacaaaggaaaagtaaacaaatatcaacagaagacttgcattmcaataaatactaaagaaagttcttcaggctgaaaaggaatgacaacagatgaaagcatggctctttaggaggaaatgaagactaatagaaagtaaataaatgggtaagtatcaaaaactgcttatttcccttaatttatttaaaacacatataa

SEQ ID NO: 779644 - DNA, 355 bp, Homo sapiens
caactagctcggtgtctgcccaacccgccacccaatttgtgcttgaatcccagaggccctggtggtgtaggcacacgagggaatccctggtctgcagattgcaaaaaccatgggaagagcatagtatctgggccagatagcacagtccctcacggcttcccttggcttctggaggaggtcygctccttgcatttccagagtgtggcaatgccccaccctgcttctgcttgccctccgtagtctgcaccccctggctaaccagtcccagtgagatgaactgggtacctcagttggaaatgcagaaatcacccgccttctgcattggtctcgctgggagctgcagaccagagctgtt

SEQ ID NO: 779645 - DNA, 600 bp, Homo sapiens
taaaatcaactgaataaattaaaaattgataacgaggtatactatagttaaattacttaaagccatggataataccaaaaaaaaaataagctataggtaaaaaaaaactttaagtacagtacaacaatgataagaattatggcttaattctcatcagataaaataagagccagaagacagagagaacatctttaaagtgttaagacagaaaacagaaacaaaaattttcaaactacaattatatatgcagcataagtatccttcaagaattaaagcaaagacattttcaataaaaaaaaaatttatactacaagatccatactacaagatatacaaaagtagttcttcaggctgaaggaaaattataccacagataaacttagatcyatagaaaagaatacaaagtactagatacagcaaatatgtggttaaatataaaagtttatgtttttaaaaaacagtttaagttgtttaaactctattatgaaaacaaaaaatattatagtagggccgataacatatgtagaattaaaatgtattacaatatgtgatatgagtactaaaattgtttcatcaaaccaaaagaaatcagaaaaggaa

SEQ ID NO: 779646 - DNA, 632 bp, Homo sapiens
aagtaaacaaacaatggatgaaataaaaagaaaaaaatcgcaagatcttagccttaaattcagccatattaattattatattaaatgttgaagggcttaaaaacttccattcaaaggcaaaagttttatatctggattaaaaaaactatatgctcttcacaaagctacattaaatattatgatacgttaaaagcaaaagaatggaaaagatacaccayaaaaacactaatcacaagaaagtttgctttgctatattaatatcagacaaagtagatgtcaagataagaaaaattaccagaggaaaaggtttgatgttttataataataaaagggtcaattcaaaaaattataaatatctatctgataacagagattcaacatatatgaaggaaaaattgatataactaaagcaggaaatttaaacaatacttatttatggctagatatttcaacttcattttttttttttttttgagacggagtcttgctctgttgcccaggctggagtgcagtggtgtgatcttggctcactataacctccgcgccctgggttcaaatgattgtcctgcctcagcctcctggatagctgggactacaggcatgcaccaccatacccggctaatttttttgta

SEQ ID NO: 779647 - DNA, 632 bp, Homo sapiens
aagtaaacaaacaatggatgaaataaaaagaaaaaaatcgcaagatcttagccttaaattcagccatattaattattatattaaatgttgaagggcttaaaaacttccattcaaaggcaaaagttttatatctggattaaaaaaactatatgctcttcacaaagctacattaaatattatgatacgttaaaagcaaaagaatggaaaagatacaccacaaaaacactaatcacaagaaagtttgctttgctatattaataycagacaaagtagatgtcaagataagaaaaattaccagaggaaaaggtttgatgttttataataataaaagggtcaattcaaaaaattataaatatctatctgataacagagattcaacatatatgaaggaaaaattgatataactaaagcaggaaatttaaacaatacttatttatggctagatatttcaacttcattttttttttttttttgagacggagtcttgctctgttgcccaggctggagtgcagtggtgtgatcttggctcactataacctccgcgccctgggttcaaatgattgtcctgcctcagcctcctggatagctgggactacaggcatgcaccaccatacccggctaatttttttgta

SEQ ID NO: 779648 - DNA, 607 bp, Homo sapiens
gcagcttcatgattggttagggaagccttgtagaatgtaagggaaagctgatatcacctccttgatggttattaccattcaagtggatgtattataacagccacatggttaggatggaatattgctgtcacagatttgtatcatcattaccattactggatttgctttaggttatttctgccatactacttcagcagttactctgtagcactaggtacaatgaagacataaaagaattatgtgtcatggtgtcagcctgtagtctctgtagcactaggtacaatgaagacataaaagaattatgtgtcatggtgtcagcctgtagtaatgaccatgaaaatcaaggcaggtgggcaaggcatacttcaggaatggaatcatgaataattgctgagcaattggtcagcagatgtgagacccakcaataacggtggattctatattagttaaaatactgaacgctaagagttaaatgttgtgctctaatccaaggtttttgttttctacccgccctcacccactacccccagcaagccaccttttcaaattggacagtagtttctgcatctgtaaaggaggaagttaaactaagtgatttcaatattgt

SEQ ID NO: 779649 - DNA, 494 bp, Homo sapiens
gtacatcagttttgatctaaaacttattaaaactcagttctaaattagcaaataaaagccaaagcatttaaagaagtacacatgattttatccctaaaagtttaatcttttaagccctggcttcagtgaagtagttaaaatctggcctaagaaatgagaactacccttcatctttacttcaaatcgattcttttgcaatagttrtgccataaacacacactcacacacacacatgcacactcacagctggtatgtttattggtttagtcactaaaggatttagctggacaaacatcacaaagatgatggctgatttaattgaatttatgatcaaatgttttctattgcaggaagagtgggaaatcacttatggggagatttgaataatttaagggaagttctctatttggcattatgtttgtatatcaagtcttgagggattaaatacagctgaggactagcagagaattcacatagagatacacaaagatatg

SEQ ID NO: 779650 - DNA, 532 bp, Homo sapiens
aaatatcttcaatcaagtttaaaatatctactaatttttgacaaaatgcaggaaacttctaaggcatattttattacaggaaaactgctaaagacagtagtgaaaaaacagatcatatttaagagattatttctattatttacaaataatcrtgatatattatactttcttttctttgtttttccataactgattagtatgactttttctattattgtgtttttttgcaagtggagcataacataggtcaagatttcacaaactttgtaaagggcctgatggtaaaaaatgtaggttttgcaggacatgtggtttctgtagcaactacttatctttgtcatttcgatgagaaagcagccatacatggtacctaaatgaatgagtgtggttgtttttcattaaagcttattcatagatattgaaattagaatttcaggtaatgttcgtatgtcaccaaatattcttctttcgatatttttcaaccatttaaaaatgtagaagccattcttagaatggaatatggacttctgct

SEQ ID NO: 779651 - DNA, 597 bp, Homo sapiens
gtacatcctgataagaaaggaaagaggacaaaagggtgaattcctaaaagatacgcaggtttggtaggtatagatttgactgctagacaaccttccttgggtggcagtaatgagcaatgcttccattaggcaagatttgaattgatcgctggccagcacagtgcattaactaacactaagtgggggtcccacaagcctgattaggaactaggtggggacaaaggcaagaaccaaaggcagaggtagtaaaactagacaaagaaaaaaggtggaracttgagacaagaagcaggaacttgaagagggagcctaacatgataaaactcacagtcaggacactcagagctgttttcctgcaggatcagctcacttctctcttggagtgtacttgttttttttttcctactatgagctctttggtccctatttcccttcaacaaagctctctgttatctttgaaccttctcttgacagaaatcatttccccaatttatacaagaacaggagactcctgcacttggcattaacagcgccttttgaaacgtgtttaggtcatgagagccctgcccctgtgaatgggttaatgccattataaaa

SEQ ID NO: 779652 - DNA, 488 bp, Homo sapiens
tcttctcacaacatgacttgtattttcatttttgttgtgtattttattaaactgaagttttaattttaacaaagtcaaatttactaattttttccattaatgctcaccctttctctgatgtattttttaaagtatgttccttactttgggaggctgaggcaggcagatcatgaggtcaggagtttgagaccagcctggccaacatagtgaaaccccygtctctacaaaaaatacaaaagaagttggcctggtgtggtggcagatgcctgtaatcccagctactcaggaggcttaggcaggagaattgcttgaacccaggaggcagaggttgcagtgagccaagatcactacactgcacaccaccctgggcgacagagcaagactctgtctcggaaaaaaaaaaagaaaaaaaaaaggatgttcctacagcatgttgataaggatatattctttattttcttcaaggttttaagctttgtattaaaatt

SEQ ID NO: 779653 - DNA, 488 bp, Homo sapiens
tcttctcacaacatgacttgtattttcatttttgttgtgtattttattaaactgaagttttaattttaacaaagtcaaatttactaattttttccattaatgctcaccctttctctgatgtattttttaaagtatgttccttactttgggaggctgaggcaggcagatcatgaggtcaggagtttgagaccagcctggccaacatagtgaaacccctgtctctacaaaaaatacaaaaraagttggcctggtgtggtggcagatgcctgtaatcccagctactcaggaggcttaggcaggagaattgcttgaacccaggaggcagaggttgcagtgagccaagatcactacactgcacaccaccctgggcgacagagcaagactctgtctcggaaaaaaaaaaagaaaaaaaaaaggatgttcctacagcatgttgataaggatatattctttattttcttcaaggttttaagctttgtattaaaatt

SEQ ID NO: 779654 - DNA, 631 bp, Homo sapiens
attatccctatatcagtttttaaacagatcttctctttaataacgaaagaccagtggattacgagtatttccacccccatcatctccacacacattgaggaaatgataaaaaggagcagacagaagaaagttaagatcctggctgtgaggtggggtaaatcggtatgtctcatagtgattttaaaaagcaggcgcagcttctgtgaacattttcttagaaatgagcaatggactgaatgaagtgttaaagcattctgcaggsagagatggccttgaagaggcggcccgagtcatacaaaaatgaacagagatcttcatgcaatagattggttcggggtctgggagaagaaagggccagtcagaaaaccaatccacctctctcctctttgcttgccatagtcccaccctgggaagaagtacatttcagaagctggagccaaaaggtttgaaataattggggacaaaacgatgtaagatttagcaatatcaccacttcctaaatgccaccttccctacaagaggaactctggtgattcttaaaattaacactgaggcaaaacaaactgcaagttgtgaagtttaaaagagaagaggaggtaagaaaacaaaaagtgaaccctatccggtccat

SEQ ID NO: 779655 - DNA, 585 bp, Homo sapiens
tatccaatgggtggctataatattctaaaccctttgttgttactttaacaatgttcatagcatcttcatcaggagtaacattccattggaagacatccttttcttaaccttaataagcaactccaaatccattcaagtttcatcatgacattgcagcaattcagtgacatcttcaggctccgcttctaattctagttcccttcctatttccaccacatcttcagttcctctcctattgaagtcttgagaccctcaaaatcacccatgagggttggaatcaacttattccaaattcctgttaatgttgatattttgacctgttcctarattcatggatgttcttaatggcatctagaatggtgaatcctttctagaaggttttgaatttactttgcccagatccatcagaggtatcactctctatggtagctacagctttacaaaatgtttttcttttctttttctttttgtttttttgagacggaatctcgctctgtcacccaggctggagtgcggtggcgcaatctcggctcactgcaagctccacctcccgtgttcacaccattcgcctgcctcagcctcccg

SEQ ID NO: 779656 - DNA, 643 bp, Homo sapiens
tggtaagactaatgaaaggccacaagatgaggattttgggaagagcctgagttctgctaaaatgtaggcaaagtttctgtaaccctttactgctcagtggtcatatggccagaggtcacaagatctgtggcttccccaattgctcctatagaaaacatcactattgtagaaactaagattaactttttatgagatttttttcaaactgaccctacccagactcatgactcatgacccaactggtcctgggcccccacccagaggcagactcagtgtatgagaaacgttttccacacccttatgacttcattccccacccaatcagcagcaccccttctctgcaccctgcccaccaaattgtccataaaaactctcatctccaagccttcagggagactgatttgagttaaaactctgtttaccatgtgacctgccttgcattaatcagactctttcttyatttacctttcatcattgaaacaggcagaaagaacccattaggtgatttacatgtgcagcctggttctgtaaggtgggctgtgtggtcacagcagctaggacggtatctagattgcccccatgcttgggcattaaggtgcagagacaggctaactcacttaatagaaatatgactcatcctgcc

SEQ ID NO: 779657 - DNA, 643 bp, Homo sapiens
tggtaagactaatgaaaggccacaagatgaggattttgggaagagcctgagttctgctaaaatgtaggcaaagtttctgtaaccctttactgctcagtggtcatatggccagaggtcacaagatctgtggcttccccaattgctcctatagaaaacatcactattgtagaaactaagattaactttttatgagatttttttcaaactgaccctacccagactcatgactcatgacccaactggtcctgggcccccacccagaggcagactcagtgtatgagaaacgttttccacacccttatgacttcattccccacccaatcagcagcaccccttctctgcaccctgcccaccaaattgtccataaaaactctcatctccaagccttcagggagactgatttgagttaaaactctgtttaccatgtgacctgccttgcattaatcagactctttctttatttacctttcatcattgaaacaggcagaaagaayccattaggtgatttacatgtgcagcctggttctgtaaggtgggctgtgtggtcacagcagctaggacggtatctagattgcccccatgcttgggcattaaggtgcagagacaggctaactcacttaatagaaatatgactcatcctgcc

SEQ ID NO: 779658 - DNA, 598 bp, Homo sapiens
caccaggtactgcccactggcccagggaaactcaaaacccagagaagacggccatcagaatagataataacaaattttgttatacgacccaaagtccttcacatgacggcctcctgtaacctatctgaccatgtgtttggagagtctctaaaaatycctaacagagtgaaaccactaaacctcttacaaaatagaaatcttttcagaactgggggaaatatttcttttatctcagtttgtggaaaggcatcaaataaaagtaagcaacattctctttaggtattccttcttagattttatttttaatgaaacatttggcttcaaaacatactttcaaagtctaatgccccataaatggcaattactattttaaaaagcaaagcgtttaccctccaaaatctaaaaccttcagacctcacatggcattaaccagctcttcaaagtttactaaaataaatcttaagagcttcttctgttttattttgaattgtatgttgacttggaaacaacagaatttttcccctctcctgtctcctgagtactggtcctcaagagcaaaaagttctccatatgtaagaacaaaaaaagggaaaacagc

SEQ ID NO: 779659 - DNA, 594 bp, Homo sapiens
tgggtatctgattattttgttttttttaaggtctatttctctctgtccttcagattgagcaatttctattgttttacattaagttcattgaatctttcctctgtcttctccattctgctattgagcctatccagtgagattattattattttttaatttggtcattggttcttcatgtctcctattttatttttttcttgcaaaagatatactttgtcatttgtttcaagcatgcttgtaaattacttaatacaatatttttataatggctgctttaaaatccttgtcagagattttcagcatctatgtcatctggtgaattattgactatattttcttatttaagytgcaatttgtctggttcttgttatgacatcaaagtgattttttttaccgtaccggtgcattttgggtatttcattatgagaccatggatcttagttaaatcttttgttttagttggcgtcctctaaaggaaggcgttacgtcattactgacaaatggtagtagagtccagggtccctcttcaacctcttgtgacacctcagttggggagggatttctcattattgttaggcagagttggaagttctg

SEQ ID NO: 779660 - DNA, 620 bp, Homo sapiens
gccagatttttttttgagacagtcttgctcagttgcccaggctggagtgcagtggcgtcatctcagttcactgcaatgtccacctcctgggttcaggcaattctctgcctcagcctcccgagtagctgagattacaggcgcctgccaccacacctggctaattttttgtatttttagtagagatggggagkgggggggcgggtctcaccatcttggccaggctggtcttgaactcctgacctcgtgatccacccgcctcagcctcccaaggtgctgggattacgggcatgagccactgcgcccggccacttctggtcagactttaacagacgagctacacggtctaagccagctggggctcaccagcgccgggcaaggccagacctgcgacctgtcgagaagatgtggtcctccaggaaagctctacttcaacgacaaataggtggggttacgttcatttgggtgaaatgcatcagcttttaaaatcacagaatgaagtgagttcactgttaattaaagggtgccaaggtgacaggcctggaacaagagcccttcattttcaccaacaggaccaggcaagagacaggaagcccttccaccgaccatggccctctgtgcct

SEQ ID NO: 779661 - DNA, 532 bp, Homo sapiens
ttgtcctcaggacctgcactgagaccccagggtggggggtatctcagtcgaagattatgggctggagggagacctgggggcttcccagatggggcgaggctggctcgaggtcccccgtccaaatgaagtgctgaccatctgcggtgcgtgccccccaggaccccctcctccgcgtccaggaggtgctgaatggcacrgaggtgaacctgcagcacctcaccgccctggtggactgccgcagcctgcatctggtgagaggcagggcctgggacagggccatggcagcttgtagggtgggaacaggggagcagctgttcgggaggatggggaccctcagcagacagtgggtcctcagccctgcctctggggggcggtccaggccgccgtggctgggctgaaggtctcacgctgccccctccaccctccctgtctctggatcctgccatctcatcccacggcctcaggactacgtgcaagcgctgaccggcttctgctatgacggcgtggagggcctcatctacctggccctctt

SEQ ID NO: 779662 - DNA, 616 bp, Homo sapiens
ttggattgtagagatggctgcacaactcagtaaatgtactaaaaatcttttaactttaagtcaaaacagatacattctatagtatgtaaattatatttcaacaaagctgttttaataaaaaaggaaaaatgtttactatatcggcttagaaacatgcctcatttctaggaaataaaagaggtgagagatgatttactttgagaaaagacattgtgtcacctatgaaattttattaggcacagagtcatattttaaggtagatagttctgtactgctgaaatagtaattttaatgtctttayattgccacatgttaagaccataatgtagttataaatggaaatgtttacacctgaagtattttcaaattaaaatttaattaagtgattttcttcgacacttaattctagattccccagatgaattgaagtgtattgctgtgtcttgtagtaccttgctttaactagctttttatgtattttagttggtatagctttgttattattcatattaatttaacaaatctgaaaatatgtcaaattacgtatttttatgaccacgtaatgttttaaaggcacctacttgttataaaatcataatttaggagaaatgtggta

SEQ ID NO: 779663 - DNA, 564 bp, Homo sapiens
attgccttctgcatggctctcctagacatgttggtggaagctgcaacaggagtggttattattaatcccttttagagaactatactagtctcacctctgaaccacccatcaatattgtgctcaattagcactttatttcaattgacaatgaaattatatactgaaaacagcatgaatccatgacctgaccagaagcattctctagccagtgaatgatttttctatccttgcctcyttttcaatttaacaaaagaggataacactgaattcagactacagttgtgcagaccctcattgttttaagtcatcagaaagaacataattaaaaattaatttaaaaactaggaatatttatattgtctttccttacagatttcctcttctggtcttttgccttaatagttatttactatttctcattcatatttggtagaaagtgtcattatacaatgtataacaaaggtcttgagaacacaaatgtataactctttcatataattataatccaaagaaatctttaatatattcatgttaaacatcggtttatatgatatttgcaatcca

SEQ ID NO: 779664 - DNA, 564 bp, Homo sapiens
attgccttctgcatggctctcctagacatgttggtggaagctgcaacaggagtggttattattaatcccttttagagaactatactagtctcacctctgaaccacccatcaatattgtgctcaattagcactttatttcaattgacaatgaaattatatactgaaaacagcatgaatccatgacctgaccagaagcattctctagccagtgaatgatttttctatccttgcctctttttcaatttaacaaaagaggataacactgaattcagactacagttgtgcagaccctcattgttttaagtcatcagaaagaacataattaaaaattaatttaaaaactaggaatatttatatygtctttccttacagatttcctcttctggtcttttgccttaatagttatttactatttctcattcatatttggtagaaagtgtcattatacaatgtataacaaaggtcttgagaacacaaatgtataactctttcatataattataatccaaagaaatctttaatatattcatgttaaacatcggtttatatgatatttgcaatcca

SEQ ID NO: 779665 - DNA, 623 bp, Homo sapiens
actccagagtttactccagcttttccacagtatggatgcctagcaaagcgactataccatcctatttgacgttccttgtgttctggggccattgcagaatttgtgtggaattaaatttctttagtaaagaccaaatattatcagctggtcttttaaaaaggctatcagtgtgagagtcaacttctttcaggaataacggcaaggacaatctctgcaaaccacatggtttaaagagtttttccactctactgcattctcacttggaaaggttatggagtatattgtataattaaatatttgtagaaatgacccctgtcaagccttcctttaaagctatgatgtagttgatcttcagcaaaaatctggaattgaagaggtttgatcctgaaaataatagctgacttcaacatsgtcatagtttcttccaatctttcacctagatgcattttctcaacaggctgtattttcagactacacctgtcccacctgccgggatgcgcagcgggaccagcgctgcccgcgcctctcaccgcactgcatccgcctcccgccagccaggaagccactgcggcctgaggcttcccgccaccaccgcgcgcgccttcctccggggacatggggag

SEQ ID NO: 779666 - DNA, 603 bp, Homo sapiens
aatcagttttaagaacacagactttatcaaagaaaattatctctttaaaatatttgcactagtggaaaatatgtgaaccacccagtcttattttattggaccccaagttagtttgtgtttgtgtgtatgtgtgggcatttatctgatatcaaccattatcttttaacatcagcatgaaacaacatgctggtctgaaacataaaaatatatatcactcttaccaaagccagtctgtattttaatagctttttcctgaaagtggaatcatgtagaacttaaaaacagattgaaatgaaagggaaaaatttgattctgtaattaacttaccatgtgaccttcaccacactgatggtccttacagatctaaatttctatatctgtaaaataaagaaggttgattttacatgatttcmaaaaatatatctttttttgacagtcgtagaaattttatataattctctattctagtctactgcaaaggaatagcagcaggtgaaaactataatgtttgaccctgaagattattatgtgatatgtataagggtcttaatgtgtacaattccatttttaggggctcaagagataaaatttcttttccaaaat

SEQ ID NO: 779667 - DNA, 448 bp, Homo sapiens
atttttaccaaagattgatttacccgatttggagtatttcttgcagtctttgatttcatctctagtgactgaacagttggttcaagttgttttgcttcaacttctttcttatattgtttctctttcctttctaattcttctctattttttttgtacagcatattaacatttgttttttcttcattttcttgttttaaggtgcatctgcagataaagacatttatcttaaaattcattttgttaaaaaataaagagttcatcctgtgatatacctctgcagatgtttattatcctaataaaatttctatrttctggattatttttcctttgcagttctcagatatttaatttctcacttcaacatcttcaaaagaatgcatatacttgaaaagtagtaaggaaagaatattctgctaaagtttttgttactattcactctaatatatat

SEQ ID NO: 779668 - DNA, 505 bp, Homo sapiens
cctgtagtcccagctactcaagaagcttaggtgagaagatccctcgagcccaggagtttgaggttgcagtgagtctcgatcacaccatcgcactccaccctgggtgatagagtaagaacttgtctccaacaacagaaaaagaaaaaaaaaaggctcagaatgctgtgtgaagtcttccttgattctagctatctttctccacacacacgggtatctgcttcattggagtcccttagtactttgtcaatttttccagtgtcactttaccacctgaactgcacatcatgtcttaacatgtygatcccctttgctgctagactgtagaggacaatcttttgaatcatctttgtataaacagtcttaattttgctaaataattacttattgagttcctgctaagtgttaggcactggggtataaggaaggaaaataaaagctgtcagggatggctttcctaaagatcatgcatgagctgagacttagagagtaaggttagccagattaa

SEQ ID NO: 779669 - DNA, 614 bp, Homo sapiens
ataatttgatcagtggatgaataaatgaacacataatagctaaatgtattgactgttttacagtattatcagtgctttttatttaatcttcaaaataacttgataagtactattattattcccattttatagaggaggaaagtgagccccagagaagttaagttacttgctcaaagtcaccattccaacaagaaaaggaacyagactttgaacccagacatcatgctcaatctataaaggggtcccttcaatactcaccctcttttcagcctagctctgaacaatttgagaaataaaacaaaagaacaataacggggatggaaatgttatctttataattgatggaggccaagttggaagacattgagcattaggcctttcaggaaagtagacgttaacattgaactccagatctggcagtcctgtgctctcagccctgggaagcagtacagaggggtcctgccggaggggcttacatcaatgagggagcagagcaacatgcccaaaaggaaagaaggaaccaagcaagcccagctcttcttctcaaattgaccaatcaaataagccatcccacctctctagggcagagttggtaaaagggcacagggaggtca

SEQ ID NO: 779670 - DNA, 624 bp, Homo sapiens
atatctggaggagggtctaatgagcaataaggggaagcaaaaagattagatcagtccccatggaagctctaagcattgcatagaaataagtgcaggatgataactgaagagattcaagcacatgagtttcctctcatctctttttgttagtgatggcagagtgttactcaaaatcagaagactaaatatattgccttggctgctaaaaatgaaaatacctaaaaaytctttctgcagatactacacacaagccttatagcctgtgaccatctttcgtcttggccagtatgagaaatcatccatgatatctgcccattgtacatgtctattgcatttgccagctaatgtttagtaactagggctgtttgttcttctcaaaaatttgaactttctccatttgtgtttaccttcacatccaaactcgaacaactctgctctgagttaattccccaatttcattatggccacactggggaaggggagaggaatctgtgtacaaaccaccagacagaaaacaatgggaacaggcagcaatccaagagctttggcatgatttgcaagagaaaaccagctctgattaatgctatcaaaatgcttgtctttcctgtgattgatattccagcc

SEQ ID NO: 779671 - DNA, 563 bp, Homo sapiens
gaaatcaagacccaaagatcctatgcaaattgatgttgagcacatcacacttacttaacagtagactcagagtttgaacccagaatctgatgacagagttcattcagttcctaacctatcacattctttaaaatttgggggttttcatcattctcagcaaactatcacaagaacagaaaaccaaataccgcatgttcttactcataagtgggagatgaacaaggaaaacacatggacatagggagggaaacatcacacactggggtctgtctgggggtggggggctaggaaaaggataacattaggagaaatacctaatataggtgacaggttgatgggtgcagcaaaccaccatggcacgtgtatacctatgtaacaaaactgcatgttctgcacatgtaccccagaacttaaagtatcaaaaaaawtttttttttttttttttttttttgccagagtctcgctctgttgcccaggctggagtgcagtggcatgtctcagctcaccgcaacctcagtgggaggcagaggctcgagaattgcttgaacacgggaggcagaaat

SEQ ID NO: 779672 - DNA, 613 bp, Homo sapiens
gttcttactcataagtgggagatgaacaaggaaaacacatggacatagggagggaaacatcacacactggggtctgtctgggggtggggggctaggaaaaggataacattaggagaaatacctaatataggtgacaggttgatgggtgcagcaaaccaccatggcacgtgtatacctatgtaacaaaactgcatgttctgcacatgtaccccagaacttaaagtatcaaaaaaaawttttttttttttttttttttttgccagagtctcgctctgttgcccaggctggagtgcagtggcatgtctcagctcaccgcaacctcagtgggaggcagaggctcgagaattgcttgaacacgggaggcagaaattacaggcgtccaccatcacacccagctaatttttgtgtttttagtagagatcgtgtttcaccaggttgaccaggctggtcttgaactcttgacctcaagcaatctgcctgccttggcctcccaaagtgctaggattacaggcatgagccaccccgcccggcctaaattctttaaaattaacaagcgatatcaaaatatatcaacagagataagtgaccaaaatataatgatgaatgcaaaagg

SEQ ID NO: 779673 - DNA, 631 bp, Homo sapiens
ttgcaaatgccttacacatgtgagttattattcagtggtgagtcctgatttccataatgtttgatttgtcagtggtttggggtaatcagtgccgaggtctttctcccttcaaagcttggccatggctgtgattcacagagagtttgtggaaggcagcactagtttagtggcaagcaggctcagtttctgattctagccccgcagtcattggcgggtcctgcatggaatgacttcaggccaaataaaacctctctctgggatttagagtcttctttcaacacagtgggtggcatagagttgacaatcagcaaatartggtgtccttttcttcctttctaagtctggtattgcctgtgtgtctagaaacccatttaacttccctgggcctcagtttccttgttaagaaaatgggaataatcatcttcactggatactttgtaggattattttgaagctcaaacagcagttgggataagatggtgcaatgctttgtaagctgaatcactttacaaacatacgggatcattattataaactgagccaagttcaaatggttccactgaaattctgagtccctgaggctaaaatgagttaatatttggagtggcctcctgagctccaaggaagaata

SEQ ID NO: 779674 - DNA, 648 bp, Homo sapiens
ttgcttgcattcattctttgcattttgttcccttcctgctacaatggtgtctaggtaattactaagggcctccacatttaacattcagtgatctgaatgaattcactgtacactatgctataattcatctggtgggaaactgaatgccaaaagactgttagctttagtaagtggttaccgagttgcttggttgtctaggcagtttggtggtgggagattctgtttcaacgtctgtctggggaggcaaacaaacaaagctttaaaccctgttgacacgtgtgccctgggtgactcaagattctracaggaagatagtctctggcgtcccgttaccttacgactggagcaatgttccactggatgtggaattccttggagaggaacaatgtggttagttaaattatgggcaactgtctttaggatgcaaatcaggaaggcagtgggctcaaggtagacacttaggggaatgggtggttttaagagactctgagtcaggtctgagggaatgaatggaggatatgtaccatgggaaatcatattatatgctctgcaaagtgaaaagcaataagtagaccacttttatcttttcccgtttaccacatcctcaaattcacaccacacacctacagatatagtttattttccagc

SEQ ID NO: 779675 - DNA, 627 bp, Homo sapiens
aggagatagctggatgtgaaaagtctgccatcactggatgtatgtaagaggacactgaacctgtggggcattctagaagggattcctgctctgtgggagggaaacttaactaggcaccagagtcccttgcgagtttataatttgacagttctgggtttcttatagcaaataccttgcacagtacagaatgcataatatatgcacagcaaaaacatgacgattattaccaaacattctgtgcccactaaagttgccatagagataattaattctcttcttacttctatgagtgtcttctttcttcatattgacactccattcattttatttctccctgcctgcagctagcccaggggatgtaasagccctgtttccaagcatgcgggaacccccagtgtttgacacaaggggggcttctaggaggccaggcttggcaatggggaagaatatggctgtagaagccatggaggggcacggcttggaccatccttcaagaaacaacttgccgtaggtgcaaggagtacagtgagctgactcctccagatactagctcctttaggactcatctcggctttcttgccgaggtctcagaagtcccagatagccccgcgaaaactcccgaacatc

SEQ ID NO: 779676 - DNA, 649 bp, Homo sapiens
tgttatttgaaattccgaaatcaggatacaaaatcctcctgatgttaggacacatatgggaagagctagccagggactacttcataaagaaggtgactcccatgtaactgcacaaagattgagcagaggtttgaaatgagattagagtcaggccatgatagtcaacctacctcatcttctaccctcaataatggtagacactaataacaacccacattactgtcccaacgamacgtgaaggatttctactcccattctctttcggtcagctttttgtttgtttgtttgtttttgaggcagagtctcactctgtcgcccaggcttgagtgcagtggctctatcttggctcattgcaagctccgcctcccaggttcaggccattctcctgcttcagcctcccaagtagctgggactataggcgcccgccgcggcactcggctaattttttgtatttttaggagagacggggtttcaccgtcttagccaggatgatctcgatctcctgacctcatgatccgcccgccttggcctcccaaagtgctgggattacaggcctgagccactgcgcccggctcagtcagcttcttaacatccacttaaaggcaatgctctaaaagcccaacgatagtgtaactccaaagtcaggtga

SEQ ID NO: 779677 - DNA, 622 bp, Homo sapiens
attggataatggactatttgggggtgttttaatttatttttcaagttacaaatgatgctgtttctatattttggttatatctatgacagatttcctaaagtatgatttttagataaaaggaaatgaatactttttgactctcaataatattctcaaatttcaaattaaaggattctatttagagggtaatataagtctcattttttaaagcaaacctattatccctaaatgtctatttttaaaaattaaaaatatttagcaaaaatgttttctattaaaaaaggagagatttaaaacattaatagttattttcataattgttttgtttcatatggcttttgctactaattttttttccacattcagtgtaagcttccttttacaattaggttaacattgttattttttgctcttttkgtggctttcttaaagtttttcatagtctaaatgcatatttaattaataatcaaaggtaaaagcaaacaaaagttttgatattttgtgcaccataggtttttttggcattaattttgattctttaaaaatattgcattacagtcttatttatcttgctgacatctcttaaaattttgctctggaggcaagtgccttgctcacctca

SEQ ID NO: 779678 - DNA, 623 bp, Homo sapiens
tgagtcagttcttgccctggtagttcccatgagatctggttgtttaaggagcctggcacctcaccccttccctcaccatgtgatgcctgctctctgtcttccgctatgattggaaacttcctgaggcctccccagaagctaagcagatgccaacaccatgctttgtgtacagcctgcaggaccgtgagccaatcaaacctcttttctttgtaaattactcagtctcaggtatttctttwtagtaatgcaggaatgaactaacaagtatggcttcaaagtctccaggtacacttacaggcatcagacaaaaagatgtcctatcattgtctattactacctacagtctccaacacaacctaaacaaagcaacttgtttcacccacactccctcagagtcgtgattgttttccacttccatcagattaccaccaaatcctctctcctgagttttaaattcatgacagaagctgctactgattctgtctacaatggcagaatctcccaaagaagccgagagtgagagccagtccttcctgccctgtcttctttatttctagagctgaaaaaaaaaaaaaacaaacctggaagccccactcagcagcagcttttgcagtctgtggctt

SEQ ID NO: 779679 - DNA, 584 bp, Homo sapiens
gaagggaattagagggtcatttgtcatagataccaaggaagacaagggttggaggtaggggaaaagaaaaagaggagaaaaagtgagaaaaaaatggagggatgggtttgagtgcttttggctgcccaggcctgtgaatcggttttatcttaatttagagaagacatccctgaagcctagagaagttaggtgacttccctaagaggttaatatttcctaaggtgacttatcttgtcagtggcaaagctcaaattcaaattcaggtcttacttattccgaaaccaatacttttgttctactttgcaactcaaatttaatactcagcaggcatctgggtggggtgcagcttcctatagaggtgaggagaacccaataaatgcagctaaacaagggacactgatcacytattcgtcaacataattaatgataagtaaataataaattacacttgggaaattactatatacacactatgcatgccacttaatcttcagaataacagttctcaatcctggtagcacattagaattacttgaggagcttttaaacataagcttggcctgttatgtttaacagttctccag

SEQ ID NO: 779680 - DNA, 480 bp, Homo sapiens
ggtatatacttatcactttaaaatggcaacaacttcaaaaaaaagcatcaagtgctaataaaaaaatgcatgaatgttttatttaccagaaaatccttgttgacatgtagaaaggaatctggccaagtaacttagaatcagaatttgttatgtcagcatctgcagaaactagaaacatgagagctactttaaaaatgccttagtgccatccacagcctcctgctgcaacttttctgttcagcctgcacttctgcagcatcttttgctctgtgatgaatkcctgtgctctgtaaaatgtgcaaggttttttcatagcatgaatttccattgacagcatattttgaatggggaagtctcttgtggctatcctgtcccagtctcacacttgtttgttgggtacattgagggcacataacttgtttttttagttcataggtctctaatcgtgggaaacctcgtatggcagaatgcaggtccaaa

SEQ ID NO: 779681 - DNA, 658 bp, Homo sapiens
aacaagatccccaaaatgttataatttatcaaagccaaatgatggatacataggaatccattatactattctctctacttttgtgtatgttttcatttttccataataaaaacagattttaaaaaaaataatgccttgagctgggtgcagtagctcacacctgtaaccctagctacttgggaggctgagggtaaaggactgcttgagcctgagaatttgaggctgcagtgagctgattgtgctgccactgcactccagcctgggtaacagaataagatgctgtcttcaataaataaataaataaaatgactctacgctagtggcctgaaacatataaacgcataacaaatgtgtgttgaattaaagtgcmtaagaagaaacaataaacaaataataaagaaataaagctaataagtagaaacatttttaaatttcaatgaagactactgtaaccattgagaaattaaattatattcctgggtccctttagtgtttgtttcccttatacattatataatttttcaatcctattgccttattttgtgatcttaagatcacatcaaagggtgaaaggtggcttgtatatcatcaatgattaacatttacaaagtccccactatgtaaacacacagcactctgctggactccttttaatata

SEQ ID NO: 779682 - DNA, 509 bp, Homo sapiens
agtaaattataggagtattttaaatacattgcatgaaattaagtctgaagtggactgtacagactcattttccttcataatattccgttcctattagatttcaagcaatgctagaaagccctagaggaagtataaaactggtatatgtaacccaattgtctcagtggatgattgtatgtgtatatataatctcattgtctgaggctggaagattgaaggagagtgagaacaattttgaagacttgggcaggaaatttattaataggttttagtctttaaactggcataataaatattgtcctgcttaccttttccttctaaatttgttatttattaattttccctccttatactctgaacttygacattttcatatatatgaaatatgtatgtgtccacatatatagcatatatgtatgtgtcgacacatataacatatatgtatgtgtccacacatatgacatatatgtatgtgtccacacatatgacatatatgtatgtgtacacac

SEQ ID NO: 779683 - DNA, 568 bp, Homo sapiens
tatggcctgaattatgtcccactcaaattcatatgttgaatccttaacccccaatacctggtcatgatgtattatcctttcagtgcattgcagtattcaacttcctaatattttgtttaagattgctgcatctatgcttacgagrgattaaggtctgcaattttcttttctttttctttttttttttttgagacggaatcttgctctgtcacccaggctggagggcagtgggacgatttcggctcactgcagcttccacctcctgggttcaagcaattctcccacctcagcctcccaagtagctgggattacaggcacccaccaccatgcctggctaattttcatagagatggggtttcaccatattggccaggctgttctcgaactcctggcctcaagtgatccacctgcctcttgtaacgtccatgtcaggtttcagttttggggttctgtatcctcataaaatgagttgggaggtgttttttcttcctctgttttctggaagagttggtgtaaaactggtatttcttccttaaatatttggaaaatttaccaatgaagtcatctg

SEQ ID NO: 779684 - DNA, 567 bp, Homo sapiens
gagatcctgccggtgggatccagaggaagggtctggcttcctagcctcctggaaggaccttgctgccaactcttcccttctcacctgctcagtgacttgtctgaacttacataactagttactggcagagctgagtccagaccccaattatctcgagtcaggacaggtgactttttgccatcccagggtgcccacccctgtagcttgaggccatctcccctggtggagtcccagtttcctcagctgagaaagggggtgagcccttcctgtcccactggccttccagggaggcggtggacccacctgccatgtgaactgtgcaaaccagagtcaagagtgtgtgccgctaacatggtgacatcagcaccgattgtagttgaaagttttattggattaaaaaaaagasagacaatactggtcacataaatgggtgttttttttttctcttaaggtttgaggccttatttattgttttatgtacgtagttccatacttccagcagtaattcaggaaacaggagagagagataaggtaagaaaaagagagaaaggcagctgggctcccaag

SEQ ID NO: 779685 - DNA, 602 bp, Homo sapiens
ataattatatctaataagctgaaagtgtaattaaaatatttatacaagattatttgtaagatgtggaagacaacatatattattcattctctgtaactttgttggtacccattaaccatccccaccttctctccagtcccccgttaatcttttcaacctctggcaacaatccttctactctctatgtccatgactttaattgcttcgatttttagatcccacaaataagtgggatgcaatgtttgtctttctgtgcctagcttattttacttaacataatgatctccagttctatccacgttgttgcagctggctagatctcattcttttcatggctgaatagtagtgcrttgtgtatatgaaccacattttctttattcattcatttgttgatgaatacgtaagttgctttcaaatcttatctattgtaaagatttgtttacagtgctgcaacaaacacaagagtgcagctatctctttgatatacggatttcctttcttttgggtatatacccagcagtgggattgctggatcacatagtagctcaatttttagttttttgaggaatctccaatctcttctccatagtggttgtactaat

SEQ ID NO: 779686 - DNA, 590 bp, Homo sapiens
aaagagaatgaagttaaagaatgatgtgttgttcttagtgcatttatatagctgtatcttaatttttggaatgtctcgtgaagattcataaaacagcttcagtgacatcatcgaaagctgcccctttacaatttttctgatcctttccacattgcctctaaaatctatgatgaaaagttcttcctctttttagggaattttgttcatagaatgctatctggacacacatggaaaaaaaatagatgagaaagtcccccattctttttttttttwaaaaaaactgcaatttgataatcctttacttttctctctacctgcttcctcattagtcaagtgaaatgataatacttctgcactttggaagtttgtagaaagactcgaaatcagaatttttctgtcttaaaatgtatagaaggagatagttatattaattatctttgaaacatagtgataatgaacataatctccccatcaccaatacaggaagtctcaaatgagaattagacagtgtatatttcaaatttaaacaattaaatggactcttaacctttctgatttcatctaaaaatcctgcttcccattgtgttctt

SEQ ID NO: 779687 - DNA, 559 bp, Homo sapiens
gcataattttaaaattactacctttacttgaggtctattctgatgttgtttgacttaagttttgggtaatttgtatttttgtagtcatccagtttgttgactaccagatgtttataaaattctcttacagtcttcttcttaaatatctgtaaggtccatagtaatattctctacctttttttcccccattttagtaatttgagacttctttatttcttgaacagtctagcaaaagattcttaattttgtagaaggtttaaaaatttctttgaatttgcttacgttcatttttttctattgtatacttgattattctcactagaatatttgttattctgcttaccrtaagtttagcttgtactttttccaggacagtgaggtggaaggtgaggctatttatgtaagattttttctttttaaatatagttatttactactctaaatttccctctatgcaattcttcagttgcatttcatacattttgatgtatttgatctccattttcgttcatattatttttaaatttccctagtgatttctttaactcctttgggtttt

SEQ ID NO: 779688 - DNA, 617 bp, Homo sapiens
caaacctcttactcacaatactgtattttaagtgagaacttttattaaggtggctacagatttggttagtatgtgctgtattatatttttggtttgtttgctttaactggacataaattctgaaaatctcataatcctcatttataactggtggcaaaacctgatacctgatcaatttttgcctggcgcatgatagctatgcaataaatattcatgcattccatccatttctatccatgcagaaaactgttaagtaccgggaactcagtgaattctactaccattcactttcatctcctctgtagcactccccragttaaaactgattttaacctgtttttttatggggccataagacctacccctggctgttacgttcacaggcctagtgcctgtaacagcaaagatgggcaattttcttactttccttcttcccctctttttatattctttcactcgccaaatgattcacttcatgttaatactgaaaagcttccttagaaatgcttatttcccaatttgctcctaaggttgaaaatagtaaaaagcaactcaaagcaacatgagttgcctcatgtgacagtttaatttatttttacatcttctaagctctggga

SEQ ID NO: 779689 - DNA, 632 bp, Homo sapiens
gaattcaggagaaagaacactaaacagggctaggaactgcacttagtgaaaaagtcaacaatccacattgcaataaaattttcacattgttagacagctaagtaccaaacagcatagaattaattgtcataaggcaaaaacaaaggaactataagaataaatatggccgggcgcgatgtctcatgcctgtaatcccagcactttgggaggccaaggtgggcggatcacttgaagtcaggagttcaagaccagcctggccaacatggtaaaaccccrtctctactaaaaatacaaaaattagctgggcgtggtgatgcatgcacctgtaatcccagctacttgggagactgaggcaggagaactgtttgaacctgggagagggaggttgcagagctgagatcacattgtggcattccagcctggatgacacagcaagactccatctgaaaataatactaatagtaataataataataataataataataataataataaatatatgtaaaaagcatttgtttataatagggatccacaaactactggtacctgtctcactgcctcattttggggaaaaaaaaaaaaaaaaagaaaagagaaaagaaaaaaaaagccctgttggaatcccactg

SEQ ID NO: 779690 - DNA, 618 bp, Homo sapiens
ttatttctgaagttttatgtctgaattaaaaatgtatttttctaacatgatatcatgaacaaattatgttttatattctccaatttcataattctgcctgtcatcttgatgctttgattgacctcatgataactgtcttcaactatttctcgacaatagtgcctaattggctgttgaacccagtcactgtagtttcatttaagctaccgtaatttttttcttttcttttcttttcttttttttttttagacagagtcttctttgctcaggcttggaatgcaatggcgtgatctcggctccgtgtaatctctgcctcttgggttcaaacgattcttctgcctcagcctcccaagtagctgagattacaggcggctgccaccacaccaggctactttttgtgtttttagtagagatggggtttyaccatgtggaccaagctggtctcgaactcctgacctcaagtgatccgcctgccttggcctcctatagtgctgggattacaggtgtgagccactgcacccagccctgtatttttatctccacaaattttatttattcctttaaaacagcattgttaaagaactttattcttctcttttcaaaatatttatttaaatg

SEQ ID NO: 779691 - DNA, 643 bp, Homo sapiens
  misc_feature 1, 2, 3, 4, 5, 6, 7, 8, 9, 10, 11, 12, 13, 14: n = A,T,C or G
nnnnnnnnnnnnnnatgagaaggagagtgggaaagacatgtgaaagcgttattcttgggatgtttttacagttagatgataagcatcttgaagaacaacaacatagctaatacatgtttacctcctgaagatagtcctgagctcacagggtgtttgctcccaggtaaaggaagaactagtggtgtttcacaaaaatagaagctgctatagtaggtggacatttttattttattttatcacatgtcagtagtttaacccagtagtttccctactcagctttgygtcaaaaaaaatgaaagagctttaaaaaatacagattttcaggaacaactctatatctattgaatcaaaatgtcagatacaagatattcaggattctatatttagaatgagcttcctctgggattctgacatgtagacatgtatgggatctactggaatctacagtcagtgatacctatgtttttggctgtataatttgatatataaaatgtaaatagatagaaggatagatagataggcagataggtagatagatttgtactggctgtgtttagcaatgttaatgtaattatctttatccttagtctggctaaatgtttgtcaattatgttggtgttttcaaaataccaactgttagttt

SEQ ID NO: 779692 - DNA, 643 bp, Homo sapiens
  misc_feature 1, 2, 3, 4, 5, 6, 7, 8, 9, 10, 11, 12, 13, 14: n = A,T,C or G
nnnnnnnnnnnnnnatgagaaggagagtgggaaagacatgtgaaagcgttattcttgggatgtttttacagttagatgataagcatcttgaagaacaacaacatagctaatacatgtttacctcctgaagatagtcctgagctcacagggtgtttgctcccaggtaaaggaagaactagtggtgtttcacaaaaatagaagctgctatagtaggtggacatttttattttattttatcacatgtcagtagtttaacccagtagtttccctactcagctttgcgtcaaaaaaaatgaaagagctttaaaaaatacagattttcaggaacaactctatatctattgaatcaaaatgtcagatacaagatattcaggattctatatttagaatgagcttcctctgggattctgacatgtrgacatgtatgggatctactggaatctacagtcagtgatacctatgtttttggctgtataatttgatatataaaatgtaaatagatagaaggatagatagataggcagataggtagatagatttgtactggctgtgtttagcaatgttaatgtaattatctttatccttagtctggctaaatgtttgtcaattatgttggtgttttcaaaataccaactgttagttt

SEQ ID NO: 779693 - DNA, 632 bp, Homo sapiens
atcctaaacttaatatggagaggcaaaagacctacagtagcttaaacattactgaaatacagcagttgatagaacttcactccctaaattcaagacctactgtaaagttacgttattcaaagtagcattatacaagaccacatggtactggtgaaagagcacaaggaacaatactccaatagcagtaagaatgcctagtgatggaatagtgatttataatgctgctctcccatgaaaggaatcagagttccttggagaaatggttgattccaggactggcgctgggcwtatacaagtggatcctgcagtatcttatagtgcaggaaataagaagggttaaaaaatatgtaaaatgataggaatgtgtaaaaggaacacaagggtcaaatgatagtgctcctaatgtccagatttgaaatactttgagcaaaacattacgtaatgtagtatttgactataccctgagttaagaaataagtatccatgagtccatatggatataatatattaaaaaataaatgaaagatggtagacaagtctgctgtggagaataattttagaaaatatacacacacaaaaatactctgctcacaagggagttgaacataacttcccaccccttcaacgtaggc

SEQ ID NO: 779694 - DNA, 624 bp, Homo sapiens
cgttgactaatggatttgtgagtttttgttctcttccatttttttttaaataactgtttttaaaaatgtgtgtatggtggggtggggacggctgctaaagcaatgagaagtgagtccttaattcctaccctgacctcttccctacccccttatttccatctgctcttttcaatctggctgtttggatgtgaggtattctaagatcccaccgtcttcctacataataggacagcatttcacacmaagctgctgcctggcaggtggcaatgaggtcatgtttgaagagtgggcaaggtgagccacttgcaaataacgtgaggaagggctcagtgtgacttgtgctctaaagagatgcaggggcttcagacatggatctttgaaacaaaccccgtggaggctgcagagagattttaacgttattaaggcacaagttgcacaataccactggggccactgccatctgatttgtgcctcatattctgggagcaattctttcgtttgcttttgaatgactctgaaaaaagtggcatcagtcagcgaatgcatgtctgtataaattatgcatctgtgagttcatgctcacatggcattcaggaagctccatgatgtacggcagaggccttt

SEQ ID NO: 779695 - DNA, 624 bp, Homo sapiens
cgttgactaatggatttgtgagtttttgttctcttccatttttttttaaataactgtttttaaaaatgtgtgtatggtggggtggggacggctgctaaagcaatgagaagtgagtccttaattcctaccctgacctcttccctacccccttatttccatctgctcttttcaatctggctgtttggatgtgaggtattctaagatcccaccgtcttcctacataataggacagcatttcacacaaagctgctgcctggcaggtggcaatgaggtcatgtttgaagagtgggcaaggtgagccacttgcaaataacgtgaggaagggctcagtgtgacttgtgcwctaaagagatgcaggggcttcagacatggatctttgaaacaaaccccgtggaggctgcagagagattttaacgttattaaggcacaagttgcacaataccactggggccactgccatctgatttgtgcctcatattctgggagcaattctttcgtttgcttttgaatgactctgaaaaaagtggcatcagtcagcgaatgcatgtctgtataaattatgcatctgtgagttcatgctcacatggcattcaggaagctccatgatgtacggcagaggccttt

SEQ ID NO: 779696 - DNA, 627 bp, Homo sapiens
ttcagatctggaaggacactagatcccattctctccaacttcttcattggacagatgggagaagggtggcacacacagctagtagaggacaagccaagctcagaaaccagatttcttgctgcccagtccaatgttctgactatagtgcactgccaaaggaaaattctgtgaagttagttttgtccaygatctgtctattcttaataaaggatggttttcctgtggagtctgaaatgtttcagcgtctgtgtttaggccattgattgagaatgacattccatagaaaacacccctgaggaccatacatgaatttccagcagggaagggttaaagtttcagtgattttgcaggctggatcaaatgttcttgagaggctattcttcacatcttgtttctttagcactagggtagggtgagtaatcaaaggtgacaagctttcttgtctggtcccactactggtacaggacagcccaggagcacattgatccacagtggcagctgctgctggcctcccgtgaagacactgagatacatggggctcctttgtactattggaaggaaggagggaaggaataatatgccactatcagagaattaagacaatttttttttcaaaccagagattaa

SEQ ID NO: 779697 - DNA, 627 bp, Homo sapiens
ttcagatctggaaggacactagatcccattctctccaacttcttcattggacagatgggagaagggtggcacacacagctagtagaggacaagccaagctcagaaaccagatttcttgctgcccagtccaatgttctgactatagtgcactgccaaaggaaaattctgtgaagttagttttgtccacgatctgtctattcttaataaaggatggttttcctgtggagtctgaaatgtttcagcgtctgtgtttaggccattgrttgagaatgacattccatagaaaacacccctgaggaccatacatgaatttccagcagggaagggttaaagtttcagtgattttgcaggctggatcaaatgttcttgagaggctattcttcacatcttgtttctttagcactagggtagggtgagtaatcaaaggtgacaagctttcttgtctggtcccactactggtacaggacagcccaggagcacattgatccacagtggcagctgctgctggcctcccgtgaagacactgagatacatggggctcctttgtactattggaaggaaggagggaaggaataatatgccactatcagagaattaagacaatttttttttcaaaccagagattaa

SEQ ID NO: 779698 - DNA, 624 bp, Homo sapiens
agcagtatcagaataacgatcaaagtgtttacatttgtaatttaccaaggaatatcataaaactggtagcagagtgggtgggaagttagaatcagtgcttagagattttgaagtatcttaaccaggaggatggaacatagataatgactgcatttaatgtcttacattgaacaactatctaaccctttaaaaagtttgctaatgcaaacatgaacaccatgcctgattgttccccatgttattgattgatcagatcatcgttacccaatacagagaaagggattaaaagatttcagagaacaaacatgtttgaatgagtccgccatgtgcttcctgagccactcttggcttcagaayatactaggaagagaagtgcccagatcttctaaaaagcctaccctagttcttctggctatatgcctgtcctgaaaaggtcaggcatatcagaagagaaaagcttcaactgagtaagattgttgatctaccactgaatataaggtgctgtgtgcacagggtccacatggcagtagtttaccacaagtgaaaattcagcaacgtgaatgtggtacctggtttgggaaatgattcaatccatcctatcaaggataatatgtatcaatgtat

SEQ ID NO: 779699 - DNA, 603 bp, Homo sapiens
actgaatattttaaggtaaagtaaagttcgcttttcccttccatctccattttagagaccctgtttggttgatcacagggcaccaatttctagcagggagccagggctgtgctatgtaatggtcaagatatcctccagactcatttccttgacaaaagccagcttccagctcagatacattcaggcaaagatttaraaaatgtttcagatttctaatcaggttcccaggattgtttgccgaaggggaaatggtcaaagccggcatcctctctaaattaataaaaatccacactggggcaccctatctcctctcttgtctttgtgatctatggttactggaaattcaaccacaggttcatgggttctaatgcaaactcattttcaggcagtgtaagttttcatactagtggaaagctacagaaaacagaaagcaaatggaagttaactctcaagaaaaaatatcaaatcatgaaagcaaacaatttactttgttcttaactgtgacatgaatctattaagtggtattttattcaataataatgtattatatttcaataaaaattagtatcaattttttaactttcatatgtaatcatgcaaatc

SEQ ID NO: 779700 - DNA, 502 bp, Homo sapiens
agcactgccttcttctgcactccagtctgttggccgtgaccaaggcagcctacttaccttctaagagaataatcctctttcctggactggacccagtgctcatgccctctgaccaatatttttccatctgtcttatcccttaatattaactgactccaaatgtgtcctgtgttgctgaatacaccaattaagaccatttccagaattagtattgacatattttcactctgttccacactgggcccgaatgaatgcscttctggagctgactatagcggccaattctctgaacccctgtccagccttagtgagtatatgtcagatgatgctactacaataatcaccttccaatttatcttttatgttaatgcatattcacaaatatctaacttaccaaaggatagttttatctgtattcttcctttttaaaatatttcttttctgaaatttgaacatgacagaaagtattctaaattattactgtaagtcattttagaacctt

SEQ ID NO: 779701 - DNA, 619 bp, Homo sapiens
tctgtaggtgaacgtgtgggttttcagccagggcgcttcttactgaagggcccgagggtcccggagaacatatctgaaacgtcttttgaaaagactgtagcactttgggaggccgaggcggagggatcacctgaggtcagacrttagagaccagcctggccaacacggagaaaccccatctctactaaaaatacaaaaattagctggacgtggtggcaaatgcctgtaatcccagctgaggcaatccctgtgaggctgaggcaggagaattgcttgaacctggggggcggaggttgcagtgagcagagatcgcaccactgcactccagcctgggcaacagagcaagactccatctcaaaaaaaggggggacaaaaaaagacaagacaagaccatgtagctagatatgaaacccacaattaaaataaggcaagcaaacaccaggctggggagtttaacatttggagctctctctgtgtagtgtctttaaaatgtactctctcttctaaacagtgtaaattttactaaattgtaattttctcctctcaggcacagctaggctttgctcctaaactcagcaaatgcttacgcatattacgaagaaacgctcttgaatggttt

SEQ ID NO: 779702 - DNA, 531 bp, Homo sapiens
aaaaatcatctcaagtggggatgagagctaagaatgaagtcacgtgacgggaaatcacagagggccttgctgagagtgggacgtttgagcagaatctgaaggagaggggctttgaggaacccaagaagaacacctcaggagtaggggtgtagaggcggaggcagaggcagaaggcagggctgggtggtgttgggggaatcagagatgccagctctcaccccagctgcggcccatagggtgccacctccaggcagctgggcagggyctgggtaggtcagaggtcttgagactggggtgaggggcaagacgcactgtccgagcggcaggtttgcgggggtggagcatggtggagaaggactctgttctagggaaaacccagatacagctttctttggagtcttttaaatcctttgagaagaagccaaagtgatgagtgagccagggtggccgggaacaaggggaagttgtgactttgagctggtctcggtcactcggggcaaccatggctggagagactgggatccccaaggg

SEQ ID NO: 779703 - DNA, 602 bp, Homo sapiens
ggtcctgcctgcttggagcctgtggcgcgagaaagacaggggcagaggcagcctgaccaaacctcctcttgctcccactctccgtggcttgcgggccaagcgacatcagctctgcacccctcggtttccttagccgatggactgggtttgattacttcatcacactgttttgggattaagacaggacaagcttagtgcacacattatagctgctcagtgcccattcagtaactggtagcttggtcctcctacctcgtgcccttgcggtagctctgggaagccaactctgtctycatttgactggtcctacaggtgcgggttttaaaccctacgtcacccacatctccttttggacatcacaaaactcctgaggtgcccagcccacttacccccaagtgctcaccttctgtgagctcctgagcttcttcaccagctgagatttttccttgtggagttttctacttctgttgtttgtaattcaaactaataagttcttcctgcatttgaaaaatgaaaacatggtgtaatattgaatgttgctgttcaaactgctccccacacccagcattttgcaatgtcccccaggggcacacacccttgat

SEQ ID NO: 779704 - DNA, 492 bp, Homo sapiens
atccaagggcccaaatgtcagggcctggccactcctgtctctgctgccaagttccagctaccccttggagcacagcgcgctggctcagtgttccctgccgaggtccaagtgctctggagtgtgcccatggtcagctcagctgcggcgkccaaaggtgtggaagaaaggtcccatcagaccccagcctcacagggacgccaagggccagggcaggggaaacttggggtttatgtcagggtcggtcaacctttctcttgcccttcttggcatcaggactggtccctgtgaggccagcacatccaggctctggaagctgctcttccttctcatctctgctcactgcacatgtgtgcaccttgggcctggcgctgtgcgctgtgggtcccccaggacagggaccacgtctgatataaagggcctggaccaggccctgctaccctatgtcttttggagccccttattctcttcctgaccctcagtttcttcttctat

SEQ ID NO: 779705 - DNA, 615 bp, Homo sapiens
cgccctagagtggaaaaggaaatatcttcaaatagaaactacacagaagcattcagagaaccttctttctgatgagtgcattcatcacagagttgaacctttgttttgatttagcagttttgacacaatctttccgtacartctggaagtgaatatttggagggctttgagttctgttttggagaaggagatatcttcatataaaaactacacagaagatttctgagaaactcctttgtgagttgtgcactgaagtcacagtgttgaacctatcttttgattcagcagttttgaatctctctttttacagaacctgcgagtggatatttggagcgctttgaggcgtactgtggaaaatgaaatatcttcacacaaaaactacacagaagcattctgagaaacttctttgtgatgggtgcattcatctcacagagttgaatgtctctgttgattgagcagttttgaaacactctttttgtagaatctgcaagtggatatttggagctcattggggcctactgtggaaaaacaaatatcttcacataaaaactacacagaagcattctgagaaacttctttgcgatctgtgcattcatctcacagagttgaatcttt

SEQ ID NO: 779706 - DNA, 615 bp, Homo sapiens
cgccctagagtggaaaaggaaatatcttcaaatagaaactacacagaagcattcagagaaccttctttctgatgagtgcattcatcacagagttgaacctttgttttgatttagcagttttgacacaatctttccgtacagtctggaagtgaatatttggagggctttgagttctgttttggagaaggagatatcttcatataaaaactacacagaagatttctgagaaacwcctttgtgagttgtgcactgaagtcacagtgttgaacctatcttttgattcagcagttttgaatctctctttttacagaacctgcgagtggatatttggagcgctttgaggcgtactgtggaaaatgaaatatcttcacacaaaaactacacagaagcattctgagaaacttctttgtgatgggtgcattcatctcacagagttgaatgtctctgttgattgagcagttttgaaacactctttttgtagaatctgcaagtggatatttggagctcattggggcctactgtggaaaaacaaatatcttcacataaaaactacacagaagcattctgagaaacttctttgcgatctgtgcattcatctcacagagttgaatcttt

SEQ ID NO: 779707 - DNA, 624 bp, Homo sapiens
tttagcagttttgacacaatctttccgtacagtctggaagtgaatatttggagggctttgagttctgttttggagaaggagatatcttcatataaaaactacacagaagatttctgagaaactcctttgtgagttgtgcactgaagtcacagtgttgaacctatcttttgattcagcagttttgaatctctctttttacagaacctgcgagtggatatttggagcgctttgaggcgtactgtgsaaaatgaaatatcttcacacaaaaactacacagaagcattctgagaaacttctttgtgatgggtgcattcatctcacagagttgaatgtctctgttgattgagcagttttgaaacactctttttgtagaatctgcaagtggatatttggagctcattggggcctactgtggaaaaacaaatatcttcacataaaaactacacagaagcattctgagaaacttctttgcgatctgtgcattcatctcacagagttgaatctttgttttgatacagcagttttgaaacactctttttttagaatccgcaagtggatatttggagccttttgaggcctatagtggagaaggaaatatcttcacataaaaactatgcagaagca

SEQ ID NO: 779708 - DNA, 615 bp, Homo sapiens
cgccctagagtggaaaaggaaatatcttcaaatagaaactacacagaagcattcagagaaccttctttctgatgagtgcattcatcacagagttgaacctttgttttgatttagcagttttgacacaatctttccgtacagtctggaagtgaatatttggagggctttgagttctgttttggagaaggagatatcttcatataaaaactacacagaagatttctgagaaactcctttgtgagttgtgcactgaagtcacagtgttgaacctatcttttgattcagcagttttgaatctctctttttacagaacctgcgagtggatatttggagcgctttgaggcgtactgtggaaaatgaaatatcttcacacaaaaactacacagaagcattctgagaaacttctttgtgatgggtgcattcatctcacagrgttgaatgtctctgttgattgagcagttttgaaacactctttttgtagaatctgcaagtggatatttggagctcattggggcctactgtggaaaaacaaatatcttcacataaaaactacacagaagcattctgagaaacttctttgcgatctgtgcattcatctcacagagttgaatcttt

SEQ ID NO: 779709 - DNA, 615 bp, Homo sapiens
cgccctagagtggaaaaggaaatatcttcaaatagaaactacacagaagcattcagagaaccttctttctgatgagtgcattcatcacagagttgaacctttgttttgatttagcagttttgacacaatctttccgtacagtctggaagtgaatatttggagggctttgagttctgttttggagaaggagatatcttcatataaaaactacacagaagatttctgagaaactcctttgtgagttgtgcactgaagtcacagtgttgaacctatcttttgattcagcagttttgaatctctctttttacagaacctgcgagtggatatttggagcgctttgaggcgtactgtggaaaatgaaatatcttcacacaaaaactacacagaagcattctgagaaacttctttgtgatgggtgcattcatctcacagagttgaatgtctctgttgattgagcagttttgaaacactctttttgtrgaatctgcaagtggatatttggagctcattggggcctactgtggaaaaacaaatatcttcacataaaaactacacagaagcattctgagaaacttctttgcgatctgtgcattcatctcacagagttgaatcttt

SEQ ID NO: 779710 - DNA, 603 bp, Homo sapiens
atggtgagacctgtctctactaaaaatgtaaaaaattagctgggtgtcgtagtacacacctatggtcccagctattcagaaggctgaggtgggaggatggcttgaccctgtctcaaaaaaaaagcttggattaatattgaaatattgaatctaatgaaatattcaacataccatgagagaatggtaacaatgcatctttgcctagaaagaatscatgtaacagagccgcacagggcaaatgcactatcaaaggctcaatccttcaattaacttgaaatgggccatagtgaatgtgttttctgagttataacagcactttcattttcaagaacagtctgtatgtagtctaacctagttaataaatacaggattatgtaacttggtaattaaccgggtttccaactcacatcttcaattcagaatgtcaaatactgacaaaaaaaaaacatagcaataagacactttcaagagagttgatgagccacttatttttgacaatatttaataatgaaacctcaaaacaagaaaatgaaggaaattcacagcttgatacgatggaatcaaatagtcaaaactaagcaatctagggaaaaaattagcctt

SEQ ID NO: 779711 - DNA, 603 bp, Homo sapiens
atggtgagacctgtctctactaaaaatgtaaaaaattagctgggtgtcgtagtacacacctatggtcccagctattcagaaggctgaggtgggaggatggcttgaccctgtctcaaaaaaaaagcttggattaatattgaaatattgaatctaatgaaatattcaacataccatgagagaatggtaacaatgcatctttgcctagaaagaatccatgtaacagagccgcacagggcaaatgcactatcaaaggctcaatccttcaattaacttgaaatgggccatagtgaatgtgttttctgagttataacagcactttcattttcaagaacagtctgtatgtagtctaacctagttaataaatacaggattatgtaacttggtaattaaccrggtttccaactcacatcttcaattcagaatgtcaaatactgacaaaaaaaaaacatagcaataagacactttcaagagagttgatgagccacttatttttgacaatatttaataatgaaacctcaaaacaagaaaatgaaggaaattcacagcttgatacgatggaatcaaatagtcaaaactaagcaatctagggaaaaaattagcctt

SEQ ID NO: 779712 - DNA, 622 bp, Homo sapiens
gtaaatgagtcagaacggagcaaatgagatttcccttatatttgggttccaaaaattacagagaaaatgtgcctgaggcagaaacaaactaaaaaaaaaaaatggaggtaggttattgaggcaggagccacatgggagagaacctttggacccagaaggctgggacgactttggcctcctctaggggttatgaaactgttctggctccagagaactcaatcccagaggccctgaagtggccacaatgctaatgggatgaacacaggcccagctgagcaggactcactgtgtctcagcctcacagtgtcagagaaagcagggaaaggaacagagggctgtaatgggcctgtcccctagcrgggagccaaaggccagcttttatcttctcagagaaacaagcagagacagagaaaaagagaaaaggaaaaaaaaacacctctgcccagctccatgtggccagagagggggagagagagaaacgtgaatggcaacggaatacttttgtttggagaacgccatttctcctaaatggcttcaaggcaggcacctagtaacgtgccagggtctcggcagacattcagtaaatactggaaggaaaggaaagagaaaggatggaaggtgg

SEQ ID NO: 779713 - DNA, 513 bp, Homo sapiens
tgatttcccaaaattcatttgttgaaatcctaacccccaatgtgatggtataaggaggtggggcatttagcaggtagttaggttgggatgtagtaaagccatgaaggtagaaccctcatgtatagcattattaatcttataaaaaggactccagagagcttttttgccctctttttgccttgtgaggacatacatgggaagaattcagaagtctgcaatcctgagaagggcccccaccagggcttagccatgctggcactctcatcttggacttttagtctccagaactgtgggtaattaattcattgtttatmagtcaccgagtctatggtacttagttatagcagcccaaactgagatacgatgtaaaggattctttcaaattacaacaagacaatataaattgaaaaccagacaaacattttaaaatattaatttaacaacaacaacaaattaaataactagaagtcttggtcaaccttagtaaagatcagtgaactattttaaggaaaa

SEQ ID NO: 779714 - DNA, 594 bp, Homo sapiens
atctacaaggaaaaacaacctttattagaacctaaaacaggtgatcccttttagtacctggttttatcttcagatcacagaaagaagtactgaagagatagaaaacacagagctgaatcactgatgccgcccctcccccgcccctggcagcagctgcctggtgcagagagcatctttgggtattgggggagggagaacacagcaactggaggcattgaactcagtgctgtcctgttagagctgaaagaaaaaccaaagtaaactyggccgacatctgcccatggaaagaacatttaaaccagccttagtcataggggtattgctgatcccaacagtcagaacttgaattctggaaacctcaccaccaagggctaacctgctctgggtctctcagcaaacctgaaaggcagtctaggccataaggactgcaactcttaggccagtcctagtgctaacctgggcccagagacagtagattgggaaagtatataacccaccaagacactagctggggcagctaagggagtactgatatcatccctcttctaatccaggctgcacagctcccagatccaaaagagaccccttcttcat

SEQ ID NO: 779715 - DNA, 594 bp, Homo sapiens
atctacaaggaaaaacaacctttattagaacctaaaacaggtgatcccttttagtacctggttttatcttcagatcacagaaagaagtactgaagagatagaaaacacagagctgaatcactgatgccgcccctcccccgcccctggcagcagctgcctggtgcagagagcatctttgggtattgggggagggagaacacagcaactggaggcattgaactcagtgctgtcctgttagagctgaaagaaaaaccaaagtaaactcggccgacatcygcccatggaaagaacatttaaaccagccttagtcataggggtattgctgatcccaacagtcagaacttgaattctggaaacctcaccaccaagggctaacctgctctgggtctctcagcaaacctgaaaggcagtctaggccataaggactgcaactcttaggccagtcctagtgctaacctgggcccagagacagtagattgggaaagtatataacccaccaagacactagctggggcagctaagggagtactgatatcatccctcttctaatccaggctgcacagctcccagatccaaaagagaccccttcttcat

SEQ ID NO: 779716 - DNA, 632 bp, Homo sapiens
gagagtggttacagcatgctgtgggcaggaccccagttatcagctggcttcaggtctgactcagcacagtaacagtgatggtggcctcaggggtgcctgtgtaactacacccccagctttaggtggttcagaacagacagagagacagactccatttttgggggagatagtaagggaagaaaacaagagtctctgtctggtattcagaaaattctgaatcttttccgagaccttcaaggcagtamctctatgagtctgcaaaaaccacagctttatttggcttagggtgtcccctaaagtagacataccttagatcacaacacccaaagtcttttgaaatatctggaaatcattctgcagaaggatgggtacaaagaaactcaaacattgaagactaccataaatacctaaccctccaatgcccagacatcaacaaacatccattagcatcaacaccacctaggaaaaagtgacctcaccagatgagccaaataaagcaccagggatcagtcctggtgaagcagagatatgtgacctttcagatagaaatttcgaaatagctggatagagcaacctgaaagtaatacgagataacacacagaagcaattctcaattctgtcagataaattta

SEQ ID NO: 779717 - DNA, 634 bp, Homo sapiens
aagcaggggagcaaagctaaggtgtagagtttttattagttttctttttgcttgtttgtttgtatgtttgtttatacaaacagtgttaagtttttatcaggttaaaataatgagttataagatggtatttgcgagcctcatggtagcctcaaacaaaaaaaacctacaatagatacacaaataataaaatggaagaaaccaaattatatcacaaaacaagtcttgaaacaacaaatttgaaataatatcaagcatcttttccaamcacaatggaataaaagtagaaattaaaaacaaaagaaatgttggaaactagacaaatacatggaaatttaaatttatgttcctggatgaccagtgggtcaataaataagtaaagaaggaaactaaaaaaaatcttgaaacaaatgataatggaaacaaaactagccaaaacctatgagatatagcaaaaatagtactaagacagaagtttatggttttaagtgcctacatcaaaggagaggaaaaacttcaaataaacaatctaataatgcattttaaagaattagaaaaatgagagcaaaccaagcccaaaattagtagaaaaaaaaagaaataaaaaagatcagagaagaaataaatgaaatggaaa

SEQ ID NO: 779718 - DNA, 601 bp, Homo sapiens
aaaacttggcatgttgttctgggttgtgattatggagatgtgtgtttgcaaaaaaattaaaaacttacaaaatgctttgcactttaatgtatggtaacagtatttcactactatgtttgcatttaaaaagttacaaagagcttatagtatttcactaatakgttttcatttaaaaagttacagagagcttgtagtcaaattggctttaaatatgtgaaccactaattttgagacaaaaataggagcttctagctccctgtttgttttgttttgttgttattattattattgctattctttcactattgcttattcaaaataaagttaatgaaagtataggtgacaatgatacagaaaacaacaccatagagtctgcatacacatacaagggaatatgagaggattctactcaatgatccagatggaacgattgacaggaaatgacaaagactctcagaaagcatactaagctcccaaatggggaaatgaaaatgtattagatttataatgcttggtaatacaatcttatttctaggaattatttcttcaaaactataaacatgatgtaaacatttagtattactttcaaatggcatttatt

SEQ ID NO: 779719 - DNA, 601 bp, Homo sapiens
aaaacttggcatgttgttctgggttgtgattatggagatgtgtgtttgcaaaaaaattaaaaacttacaaaatgctttgcactttaatgtatggtaacagtatttcactactatgtttgcatttaaaaagttacaaagagcttatagtatttcactaatatgttttcatttaaaaagttacagagagcttgtagtcaaattggctttaaatatgtgaaccactaattttgagacaaaaataggagcttctagctccctgtttgttttgtyttgttgttattattattattgctattctttcactattgcttattcaaaataaagttaatgaaagtataggtgacaatgatacagaaaacaacaccatagagtctgcatacacatacaagggaatatgagaggattctactcaatgatccagatggaacgattgacaggaaatgacaaagactctcagaaagcatactaagctcccaaatggggaaatgaaaatgtattagatttataatgcttggtaatacaatcttatttctaggaattatttcttcaaaactataaacatgatgtaaacatttagtattactttcaaatggcatttatt

SEQ ID NO: 779720 - DNA, 601 bp, Homo sapiens
aaaacttggcatgttgttctgggttgtgattatggagatgtgtgtttgcaaaaaaattaaaaacttacaaaatgctttgcactttaatgtatggtaacagtatttcactactatgtttgcatttaaaaagttacaaagagcttatagtatttcactaatatgttttcatttaaaaagttacagagagcttgtagtcaaattggctttaaatatgtgaaccactaattttgagacaaaaataggagcttctagctccctgtttgttttgttttgttgttattattattattgctattctttcactattgcttattcaaaataaagttaatgaaagtataggtgacaatgatacagaaaacaacaccatagrgtctgcatacacatacaagggaatatgagaggattctactcaatgatccagatggaacgattgacaggaaatgacaaagactctcagaaagcatactaagctcccaaatggggaaatgaaaatgtattagatttataatgcttggtaatacaatcttatttctaggaattatttcttcaaaactataaacatgatgtaaacatttagtattactttcaaatggcatttatt

SEQ ID NO: 779721 - DNA, 597 bp, Homo sapiens
agcatggatgttttgaaatttattgccagtcaccgtaagaattttttacaaatagataagtgtgttcacatttcccttaggcagtcatgatttcaaaggctggagtaattatgaggaaaaccacatccaacagatctcaggaatatagaaacaagcacattatacagagctgaacttcattacactttacataatgctcaaagctaacatttctcttatatattgcttgtggccaaaacaatataataatcacatgagtggaaatcaaaaacaaaaataaattcctcttatcatgactcaaaaatcaygccgttatttcctttgttatcttagagtctttgtccaaatggtaatataacttttcataaaccatgattattatttatataactataagatgaacttatgataaattttatactttgctttttcacatattatatatttggtatttttaaatatccattcaacactctataaactttactggatacctactatgttccataaatcgttgtaaatgaagtagtcacagaataataagttatgttttttggtctagaagtatctacctacaagtaataggaaacttgatat

SEQ ID NO: 779722 - DNA, 597 bp, Homo sapiens
agcatggatgttttgaaatttattgccagtcaccgtaagaattttttacaaatagataagtgtgttcacatttcccttaggcagtcatgatttcaaaggctggagtaattatgaggaaaaccacatccaacagatctcaggaatatagaaacaagcacattatacagagctgaacttcattacactttacataatgctcaaagctaacatttctcttatatattgcttgtggccaaaacaatataataatcacatgagtggaaatcaaaaacaaaaataaattcctcttatcatgactcaaaaatcatgcygttatttcctttgttatcttagagtctttgtccaaatggtaatataacttttcataaaccatgattattatttatataactataagatgaacttatgataaattttatactttgctttttcacatattatatatttggtatttttaaatatccattcaacactctataaactttactggatacctactatgttccataaatcgttgtaaatgaagtagtcacagaataataagttatgttttttggtctagaagtatctacctacaagtaataggaaacttgatat

SEQ ID NO: 779723 - DNA, 671 bp, Homo sapiens
caaacagctgggagagaaggccgttgccaaatgcctcctgagtgatcagtttcaacccactgagcatcgtctcacttgcagctggtcgtcccatgatttcggaaacgtaatggtagatcagctatctggaatctgcccagaggtagaagagggtgttggaaaccaagtcttttcattagcctaaaccatatcacaaagaggcaatacggatgctcctagtcgaatggctgggccattgagtgcttcaacaatacgcagcttaagctgaacaatagcattcaggaagttccttctatccaacaatgaaacakgcccgaacctggacccaatcgcatctactctgtacttcagagaccagacaagattgggagcgttcacggtggtatgactgtagattgttcacgacgtttccagtagcttctgccgttttaatgcttgctctctctctgtcctctgtcaaatgtcgtaaaaaataaataaggccaagtgcaccacggaagaccgtaccaatggcgctgagcagtccaaggttgctgtactttctggagtcagtactcccgaataaatagcgtgaatgttcccagtcctgcttgcaagcataagctaccagtgagcttgtctcaggctgtgagaatggataaggacagatggaagcaatggtgttcttctca

SEQ ID NO: 779724 - DNA, 736 bp, Homo sapiens
cccactgagcatcgtctcgcttgcagctggtcgtcccatgatttcggaaacgtaatggtagatcagctatgtgggatctgctcagaggtagaagagggtgttggaatccaagtcttttcattagcctaaaccatatcacaaagaggcaatacggatgctcctagtcgaatggctgggcrgctgactggtttagtaatagacagcttaagttaaatgatagcattcacaaagttccttccatccaactatgaaacaggcccctacctgggcccaatctcctctactctgtacttcagaggccagacgagattgggagcgttcacggtggtatggctgtagattgttcacgatgtttctggtagcttttgcccttttaatgcttgctctctttctgtcctctgtcaaacgttgtaaaacataaataaggtcaagtgtgccacagaagaccctacctaaggccctgagcagtacaaggttggtgtactttctggagttcaatgatcgcattcacgaagttccttccatccaataccctcttctacctccaggaagattccagatacctgacctagcattacatttccgaaataatgggatgatttatccagagtactcccgaataaatagcgtgaatgttcccggtcctgcttgcaagcataagctaccagtgagcttgtttcaggctgtgagaatgaagaaggacagccggaagcaatggtgttcttctcagctggat

SEQ ID NO: 779725 - DNA, 736 bp, Homo sapiens
cccactgagcatcgtctcgcttgcagctggtcgtcccatgatttcggaaacgtaatggtagatcagctatgtgggatctgctcagaggtagaagagggtgttggaatccaagtcttttcattagcctaaaccatatcacaaagaggcaatacggatgctcctagtcgaatggctgggcagctgactggtttagtaatagacagcttaagttaaatgatagcattcacaaagttccttccatccaactatgaaacaggcccctacctgggcccaatctcctctactctgtacttcagaggccagacgagattgggagcgttcacggtggtatggctgtagattgttcacgatgtttctggtagcttttgcccttttaatgcttgctctctttctgtcctctgtcaaacrttgtaaaacataaataaggtcaagtgtgccacagaagaccctacctaaggccctgagcagtacaaggttggtgtactttctggagttcaatgatcgcattcacgaagttccttccatccaataccctcttctacctccaggaagattccagatacctgacctagcattacatttccgaaataatgggatgatttatccagagtactcccgaataaatagcgtgaatgttcccggtcctgcttgcaagcataagctaccagtgagcttgtttcaggctgtgagaatgaagaaggacagccggaagcaatggtgttcttctcagctggat

SEQ ID NO: 779726 - DNA, 736 bp, Homo sapiens
cccactgagcatcgtctcgcttgcagctggtcgtcccatgatttcggaaacgtaatggtagatcagctatgtgggatctgctcagaggtagaagagggtgttggaatccaagtcttttcattagcctaaaccatatcacaaagaggcaatacggatgctcctagtcgaatggctgggcagctgactggtttagtaatagacagcttaagttaaatgatagcattcacaaagttccttccatccaactatgaaacaggcccctacctgggcccaatctcctctactctgtacttcagaggccagacgagattgggagcgttcacggtggtatggctgtagattgttcacgatgtttctggtagcttttgcccttttaatgcttgctctctttctgtcctctgtcaaacgttgtaaaacataaataaggtcaagtgygccacagaagaccctacctaaggccctgagcagtacaaggttggtgtactttctggagttcaatgatcgcattcacgaagttccttccatccaataccctcttctacctccaggaagattccagatacctgacctagcattacatttccgaaataatgggatgatttatccagagtactcccgaataaatagcgtgaatgttcccggtcctgcttgcaagcataagctaccagtgagcttgtttcaggctgtgagaatgaagaaggacagccggaagcaatggtgttcttctcagctggat

SEQ ID NO: 779727 - DNA, 592 bp, Homo sapiens
tctaaaaattagagcaaactttattttaagatcttagatatctgtttttattttaatcacttattttccatttctttgggtagtcattcaaattacgggaaataagaatttcaatttgctttaattaacatattcttcatttctacgtgagacagcactattaccttcataagataaatatagctggaagattgacagatgttattatgaacataaatggccgtaataatcggcatgagttttgaatgctgtaattacccartgggatggactaatgctgagtttgaccacaaaaaattttccctgaagccttgcatggaaaatttcatacatgatgtcaactcattgattttacaataacgtaattctggagcaaatactaactgtgtgtgtgttttgtataatatgctcttgatagttcaatatatcatgacactctacaaggcaggattcaggagggagtgctaacttgctgcaaaactctcactttttaatttactttactgactcattttgagattcaatgtcacgtaagtcagaccacagcttgtgtcattcttattctgataagaaaccatttggcattttgaaa

SEQ ID NO: 779728 - DNA, 605 bp, Homo sapiens
ataatctcaattattttgcttttgattttactgacaatctagaatatacttcatatattaacttattcataaaattattttttgtgtgtggttaatagtaaaatatttgttgaggtgttttgtgctatgtgcaatgacaactacttaacttgaattcaccataatcctataccacagtgacatttcttttccttctgtttggattttagaaaactgaagcctacccagagggtaratattgagtcaggatctaaacacagttggactttacagctctcaggatcgtaacacctaacttcttccaaaaagtgaaatgactttacttctaatttcctccattcatccaataccatttgaaaatagtgtctgagtgtatactatttttcaagcactgttcctgggaatccaggtacacagtaaactttagagacaaagttcctgatcttagtccactgttccagtaggaaaagacatcaacatcgggccaaatagataataaagaaataaaagttaagaaagtcttaagcgtaccaaaaaacataaagcaatgtcctgggatagaggatgactggtgcgtgttatgtttgatataataatcagggaaa

SEQ ID NO: 779729 - DNA, 601 bp, Homo sapiens
tattgcgggggtagagaaatgagacctcctccttttcacattttaagtatctattagtatatcataaaattctatatgagtgtttttagaatatgaagaatagaaaaggatatttacctctactccctctttcaggctatcaaaataataaatgtttctgaggactggctactttgctaaaatttttccatgttactttcaactcttagcactcccagaagatacattgtattatttacttttataaatttggatactgaaacacagagaagctaaataaattattcaggatcagagagccaagagttgcacagggtcccaaatggtttytttaggacaaaaaaaaaaaaaaaaaaaaaaaaaaaagcatccaggttccagcaagaaagacagaaaggtagaagttatatgcagttatatgcactctcttaaaaaacccattccagaagttgcagagctcattttagactctatctcattagccagaagttagtgacagggcccccactgaatcacagggaagtctggaaaacacatacagtctttattctggaaggctgtgctcatctaaattttctaactataaaaggatataaaggca

SEQ ID NO: 779730 - DNA, 601 bp, Homo sapiens
tattgcgggggtagagaaatgagacctcctccttttcacattttaagtatctattagtatatcataaaattctatatgagtgtttttagaatatgaagaatagaaaaggatatttacctctactccctctttcaggctatcaaaataataaatgtttctgaggactggctactttgctaaaatttttccatgttactttcaactcttagcactcccagaagatacattgtattatttacttttataaatttggatactgaaacacagagaagctaaataaattattcaggatcagagagccaagagttgcacagggtcccaaatggtttctttaggmcaaaaaaaaaaaaaaaaaaaaaaaaaaaagcatccaggttccagcaagaaagacagaaaggtagaagttatatgcagttatatgcactctcttaaaaaacccattccagaagttgcagagctcattttagactctatctcattagccagaagttagtgacagggcccccactgaatcacagggaagtctggaaaacacatacagtctttattctggaaggctgtgctcatctaaattttctaactataaaaggatataaaggca

SEQ ID NO: 779731 - DNA, 609 bp, Homo sapiens
tattaaatattgtttatgttactaaaaatgtaatttataatttcttacaaaaatttgtttataattacctacttactttcttagaatactgaatactggttatagaagatcttttgtctactgaaaggaaataaatgcagtatttacgatagtatacactcatgtatgtgaagacaacactaagtgaaggtgagaggatccaagtttggagaagctgagacaaagctgagttgtcgtgtgtaggaaatggagcaatgtayagagatgattggtgtgagatggttactggacagagaagactagagtcagtgactctggtggggacagaggagaaaaggatggcggggtgctcagacaaagcctgcagcagaggatcccagaaagagaggtaaaaggagacgtttgggggaggtaaaatgatgtccatgtgttgtgttaaatacccattttataattaatgcttatatagcacttattgtatgccaggccctatccaaagatttcacatatatttagtcattttagtcagtagttatcagtcacaatatacctatgagataggtaaattatttccgttttatggatgagaaaactgaggaggatgaggcc

SEQ ID NO: 779732 - DNA, 530 bp, Homo sapiens
tccaaagtgcaactcccaaagtgggtctgcctggcagccttctctcatttggagctgtaagtaacagaaaagttttgcctttcatctattcaagtattaccgtgttatggctctccatcaaaaaggtctttaaatcttataaaacacataacaactgtttaagtgtgttttgtrttgtcataacagaacaccacagactgggtaatttataaacaatagaaactctggaggctgtaaagtccaagaacaaggggatcacatttgctgaaggccttcttgctgtgccataacatggcaaaaggcatcacatggtgagaaaatgcacaagtgggcaagagggggctgaatttgcttttacaacaaacctactcacacgataactaacctactcctctgataatgacattaatccattcatgagggctctactctcataacctcacacctcttaaaggtgccacctcccaacactgttgcatcaagagttaagtttccaacacatgaacttgaggggtcatatttaaagcata

SEQ ID NO: 779733 - DNA, 530 bp, Homo sapiens
tccaaagtgcaactcccaaagtgggtctgcctggcagccttctctcatttggagctgtaagtaacagaaaagttttgcctttcatctattcaagtattaccgtgttatggctctccatcaaaaaggtctttaaatcttataaaacacataacaactgtttaagtgtgttttgtgttgtcataacagaacaccacagactgggtaatttataaacaatagaaactctggaggctgtaaagtccaagaacaaggggatcacatttgctgaaggccttcttgctgtgccataacatggcaaaaggcatcacatggtgagaaaatgcacaagtgrgcaagagggggctgaatttgcttttacaacaaacctactcacacgataactaacctactcctctgataatgacattaatccattcatgagggctctactctcataacctcacacctcttaaaggtgccacctcccaacactgttgcatcaagagttaagtttccaacacatgaacttgaggggtcatatttaaagcata

SEQ ID NO: 779734 - DNA, 530 bp, Homo sapiens
tccaaagtgcaactcccaaagtgggtctgcctggcagccttctctcatttggagctgtaagtaacagaaaagttttgcctttcatctattcaagtattaccgtgttatggctctccatcaaaaaggtctttaaatcttataaaacacataacaactgtttaagtgtgttttgtgttgtcataacagaacaccacagactgggtaatttataaacaatagaaactctggaggctgtaaagtccaagaacaaggggatcacatttgctgaaggccttcttgctgtgccataacatggcaaaaggcatcacatggtgagaaaatgcacaagtgggcaagagggggctgaatttgcttttacaacaaacctactcacacrataactaacctactcctctgataatgacattaatccattcatgagggctctactctcataacctcacacctcttaaaggtgccacctcccaacactgttgcatcaagagttaagtttccaacacatgaacttgaggggtcatatttaaagcata

SEQ ID NO: 779735 - DNA, 530 bp, Homo sapiens
tccaaagtgcaactcccaaagtgggtctgcctggcagccttctctcatttggagctgtaagtaacagaaaagttttgcctttcatctattcaagtattaccgtgttatggctctccatcaaaaaggtctttaaatcttataaaacacataacaactgtttaagtgtgttttgtgttgtcataacagaacaccacagactgggtaatttataaacaatagaaactctggaggctgtaaagtccaagaacaaggggatcacatttgctgaaggccttcttgctgtgccataacatggcaaaaggcatcacatggtgagaaaatgcacaagtgggcaagagggggctgaatttgcttttacaacaaacctactcacacgrtaactaacctactcctctgataatgacattaatccattcatgagggctctactctcataacctcacacctcttaaaggtgccacctcccaacactgttgcatcaagagttaagtttccaacacatgaacttgaggggtcatatttaaagcata

SEQ ID NO: 779736 - DNA, 616 bp, Homo sapiens
aaattatcattctgctttccacattgaattttgtaccctagattcagcatctctgagtacataagctctggaaatctggcagatcagattcctgagcatgtgaggactagataatgggccttgttgaatacaagattattctactttgtgtggctttttaaacattaatttttagaatatttcctggagataccctaaacttactgaagctgctctttattcaagtaataggcaataggcaatggmaacagaggaaaaccagcagaggataaagataataccataaatcctagaatgctctttcaattttataataggcatcatagattcaagctcttcctcttctctatgagggtgtgtgtgtgttttaaattcttgttattgatatcctatcacagaaggttgcatccttggctggatataaatgtcacttgagaagcttttagaaatcctgatcctccggcagcaccctgaaccaattttatcataacacctaagggtgagactcagcacttttttcagcactaaagttgagttctcaacacttttattctttaaaaatatttggcaaataaaaaattgaatatattcaaagccaatgtaaacctacatatac

SEQ ID NO: 779737 - DNA, 626 bp, Homo sapiens
taactacagatgtttacatagcaacaggtgagaacgtttatttctaaacaaatatagctgaaaaaatctattttaataatggattataatgcccattctatatgttaatatttatattaaatacaatataataaatatcaacaaagtktgccaaacctttacaagcatcaattcatgatgacaataattttttttcaaggctctttgaagagtaagcatggctaattacacccccaagaatttttaactgatatgagtcattatgataatttgacagatagaaaaataaaaggtacaaaagaggtacaataactcctgatgtcaccatagaggcactgaaaatacagagaataacattaggcctttaaatactgtttaccatataagcaaactcacattacccttgacaaatgtctcctaaaaactaatctaattatttttaaaagttatatgatgagatttgtgaatttttattgactttgatgagtacccctcactattatatttcagcttttatgggagcttgaatatttcagctttagttttctaacctttaattttctaacactattccttgcgactggaaagcatggacgatgcttatgttgatcacctccggatctcca

SEQ ID NO: 779738 - DNA, 493 bp, Homo sapiens
cttttatgaaattaatacagacatggatcctttaattcattctattttattagtctgcttacctgtaagtcctacattgtcagaattattgtcgtcttagtaagtaatgaaacaaggtcaataagtatcagtttatgccttgtctttaaaaccatctttggtttttttggttgtttttggctctctacacttctataggaattttagtgtaaacttgtcaagttccatgaaaaaaattgaattttgattgtaaygaatttaatgtatagatcaaattaggaagaattactctgtttaagaccttccactgaaggacataacatattgctctctttctaatcccctttttaattaatagaatttactttttagagcagttttaggtttatagaaaaattgagcagaaagtacaaagagttcccatgtacttctcataccacgtgccaccctgcccacctcatttcccctattattagcatcttgcattattgtg

SEQ ID NO: 779739 - DNA, 600 bp, Homo sapiens
tccaaggtcacacagctagcaagtggcagagctctgaatccagacaatgtggtcacactctttttttttttttttttttttttttgagacacagtctggctccatcgcccaggttggagtgcaatggcgccatcttggctcactgcaacctctgcctcccgggttcaagcgattctcctgcctcagcctcccgagtagctgggactacaggcatgcaccaccacgcccaggtaatttttgtatttttagtagagacagggtttcaccattttggycaggctggtcttgaactcttgaccttgtgatctgcctgccttggcctcccaaagtgctgggattaaaggcgtgacgactgcacccggccaatgtggccatgttcttaaccatgatatgatgttgcttcatatgagaaaagggaaatgtaccctaggccaggacagcaggggagtgggtctttcaggcttcctagagtcccctctccaactttttttttttttgagacagagtttctctcgtctcccaggctggagtgcaatggcgggatctcagcttaccgcaacctccgcttcccaggttcaagcgattctcctgcctcaatct

SEQ ID NO: 779740 - DNA, 585 bp, Homo sapiens
ccgaccaagcccacgtcctgtgcccactccaactgtgcttctgtggggggaaaggggaagcacttctgccaaagatacacaacagaactgtagtaagagcaggtggtattatacccattttacagattgaaactgagtcactatttccataacccgtccatgacacacgaggattgagcccaggaggcagtctggttcctgcctatgctgtgcttctctcatcacgggggttcccatcgggaaggtccaagtgcttttagggaggaggagctcggtagaagacagctggaaagagaccagtgtgcaccctctgagtcccagaggctgcgggtgccactcagcctctgaatgtcacaggaagactcgactgcagctgctaggagaagggatttgttcagagagacgaaggcctgcaagaacatctgwgtgtgtgcacagaagggagcagaatggattgagggtttctgactgagctggaaacaaatgccatcagcaaagcccatctgtcgggaggtgcttgcataagcaagtcagggtcgcatctgggccactggttttcccaacccagccttaagtgtggcctca

SEQ ID NO: 779741 - DNA, 489 bp, Homo sapiens
aaacagaaatttttttccaactggagtcagagagatgtggctaagtggaagccaaagagactagaagcttgagaaggactccacacatcattgctgatttgagatgtgcaatgtgacatggaatgcaggcacactttggagattagagaggtttctagtaacagccagtaaataaatagaggatctcagctagataatcacaaggaactaaattctrccaacaagctaaatgagcttgggagtgaattttttcccagagtctctggagcagatcacggtccagtcagcccacagatttgagccttgtggaaccaagctgtgaaccaggttagtcatgctgtaccctgatttctgatccatggaaacacagagaaaataaatgagaggttaagttgttatgattgtaataatttattatggcagcaataaaaaagtaatacatgagacaaaaacaaactttgttttttttaatagcttttgtcatacaaa

SEQ ID NO: 779742 - DNA, 583 bp, Homo sapiens
cagggcattaaaaactggttagaaacaggtgtgtcatttgcatagggtgagaatttctggcagccgccaccacagtcttttattatgcaggcgggttttcagcctgagctgcgccatgttgcccatttgtcttactgtacatgtgctaatgaaaaagggaaaatggagcttccatggtagacatgcctggcccccaggtaatgcttttctattgatgcagctgccaacattccccatgcgagattccagcttcctgatctatgtttgcagctcaatstttcaagatgattttgttagaaaaaaataattttgggcgctgctgtttgttagaaaggaagttctgctaaggaatcttttgccctcattatctgcctaaataatttgtttctatctcctgtatcaatagctcattggaacctcgaactattgggctcaagcaatcctctcacctcagcctcccacgtagctgggactacaggcatgcaacaccatatccagctaattttttaaatttcttgctatgttgcccaggcctgtttcaaacccctgacctcaagcaatcctcctgcctcagcctcccaaa

SEQ ID NO: 779743 - DNA, 583 bp, Homo sapiens
cagggcattaaaaactggttagaaacaggtgtgtcatttgcatagggtgagaatttctggcagccgccaccacagtcttttattatgcaggcgggttttcagcctgagctgcgccatgttgcccatttgtcttactgtacatgtgctaatgaaaaagggaaaatggagcttccatggtagacatgcctggcccccaggtaatgcttttctattgatgcagctgccaacattccccatgcgagattccagcttcctgatctatgtttgcagctcaatctttcaagatgattttgttagaaaaaaataattttgggcgctgctgtttgttagaaaggaagttctgctaaggaatcttttgccctcattatctgcctaaataatttgtttctatctcctgtatcaatagctcattggaacctcgaactattgggstcaagcaatcctctcacctcagcctcccacgtagctgggactacaggcatgcaacaccatatccagctaattttttaaatttcttgctatgttgcccaggcctgtttcaaacccctgacctcaagcaatcctcctgcctcagcctcccaaa

SEQ ID NO: 779744 - DNA, 477 bp, Homo sapiens
caaaagccaaaattgacaaatgggatccaattaaactaaagagtttctgcacagcaaaagaaactatcatcagagtgaacacacaacctacagaatgggagaaactttttgcaatctatccatctgacaacggtctaatatcaagagtctacaaggaacttaaacaaatttacaagcaaaaaacaaacaagcccattaaaaatgggcaaaggatatgagcagacacttctcaaaagaagacatttatgtgaccaacaaacatatgaaaaaaagctcaacatcactgatcrttagagaaatgcaaatcaaaaccacaatgagatatcatctcatgccagtcagaatagctactattaaaaagtcagcaaacaacagatgctggcaaagttgcagagaaaaaggaacgtttctacacggttggtgggaatgtaaattagttcaaccatgtggaagacagtgtagccattcctcaaatac

SEQ ID NO: 779745 - DNA, 642 bp, Homo sapiens
gatctgtttaagtccaatgaagcgttgaatgaattaaaattactcttaatctttcattttctattccatgaaataaatcttttctctttccttcctgccttcttttttcttcttttctttctttctttcttctttctttcctctttcttctttctttctttatctctgtcttkctcttctctctctctctttctttctttctctccttccttcctctctttctttctttctccttccttccttcctttcttccttcctcctctcctctcctctcctctcctctcctctcctctcctctccttttttttcaaatgctcactctgttgcccaggctggagtgcagtggcatgatcatggctcactacagccttgaccacctgggatcaagcaatcctcccacctctgcctcccaagtagctgggaccacaagtgtgcatcaccatgcccaacaattttttcttttatttcttgtagagacagggtatccttatattgcccaggctagtcttgaactcctgggctcaaatgatcctccagctttggcttctcaaagtgctgggattgcaggcatgagccactgcacctggccatttatctttttctactcactcagttcaatcactttaaataaatagtggtgtc

SEQ ID NO: 779746 - DNA, 564 bp, Homo sapiens
catttacttattcttcccagatttataattttgagccagacttttctgaactacagctatttcaagtcactgtttactccacagtattacttagatttctcaagggtttttcaggactgatatgcctgggtttaattgataagttttttctcaaatattgttatattccagagtttcttacagtattgagctattcatcttcttctacaggtcaattcctactatttaatatctatcaggaagtcccattaatttttccttctaaatatcgttaaacgtgaaaattacattctttccttaatatcatcattttggatcaataaatcatatctcatctagactataatggcttctttatcaatgtcatccattctcaatgccttcacttccgtatctacattttagccaarctggtcatggtaaaatccaaacctgttggtcttaccccaaccctctcctctccattacttatgtttggctttcagttctttgaaagatcttagcctatttcgccacctgtatttgttatcaagcatccccttttccttcacattccactcacac

SEQ ID NO: 779747 - DNA, 603 bp, Homo sapiens
tcaggaggctgaggtgggaggatagcttgagccaggaaggtcaaggctgcagtgagccgagatcatgccattgtgctccagcctgggtgacagagtgagaccctgtctcaaaacaaaagagaaaaagcaaaaaatcttgtgagctctccactgcctgtttttgtagaaaaagttgtattgaaatgcagccatgcccatattgtctgtgaataccttcttgctaaaatggcagagctgagtagatggaggggtagagaccatagaaactgcaaagccaaaaatatccactacctgctccttcacagaaaaagcttgccaaacccaacttcacatgaaaatatgtcacatattctatttaaaagaacaacgaaaaaggctgatttgttcactcaccwatttaaacatgtttctataaaaatgaagtagatatttaaatcagaggttatgtaagtggatgccgaagacagagctttgtgtatcagaggttgtgcatcggtagtgcctaatgtttttgtctgtgtggttacacagaaattccaatcaaagatcctaagctttctaaaaatatatgttttcattgtaagtcaagacagtgatttagtt

SEQ ID NO: 779748 - DNA, 622 bp, Homo sapiens
tattaaatacaccaattcctgggctcactcccagtgactcccagtttgatgattgggggctcagctaggacctatgttttcaaaagctcccaggtgatctcatgcagccagactggctctggctctggctctgggagctgggttgggaactagtctttggtgctattctgctgaaacttcaagttgggctctttgactccatcttgtattgtcatcacttgtattcaggtctgttcttcctctggattgtaaactccttgatgtctgggtcatctcagctcatgagctgagctttcagtcggtgctcagtggaacaggtgctggatgcagtcaggctctagggaggccaacgtgtgttggtaagtgagtgaaaaaaatcattttaaaaagaaactttttgctcttcagttttgtttgccatgagtcaatgtgatttactstagtggaagccagtgcagcttaagtggaggtcttgccctgaaatggagccaggttatggatcagcagagctgccgaaagcattttgggggaaatgtttctctgtcaccctcagttgactgaactcaagttttcactcccgtttaacacgacgtgggggccattctgacttctgcggagtgag

SEQ ID NO: 779749 - DNA, 627 bp, Homo sapiens
cctgtgagaatgacctaagtagaaatttttttaaacaaaataaaaattttcaaaaagagaaaagacaacagagggaaaattcaagaggccaggcgcagtggctcacgcctgtaatcccagcactttaggagaccaaggtggcagatcacctgaggtcaggagtttgagaccagcctggccaacatggcaaaaccccatctctactaaaaatacaaaaattacctgggcatggtggygggcacctgtagtcccaactactcgggaggctgaggcaggagaatcacttgaacccaggagacagaggttgcagtgaaccaagatcacaccactgcactccatccagcctgggcgacagagcaagactccatctacggaaaaaaaaaaaaaaaagaaaaaaaaaagcaagaaaggataaatgcaagtgcaaggaaataaattgtctagaataaactaagatgcagagaaatgactaagactagagtatcaggacacagaatagaagacagcagggccaatgtcgtaagttatagaaagcaggtttagaaaaatcaatatttcaaagacaggaagagctaagggaacacctgtcaaattggtgaagacaatgtacttagaacccaacaaaga

SEQ ID NO: 779750 - DNA, 624 bp, Homo sapiens
aaacaaacaaacaacaaccagaattcaccactttttcaactgtgtgctttttctttgatacctctgataatttagctatgttaccttattactgtacttgcatgttgtaaatgatcaatacatggtttttaaattgagtagggtatctacaagacacacttaactgcataatttgtgtctaaatatgtcatgtatgtattttttttgtgtgactcacttatagaaaggacttccctgttgtggttcttcggttgagataattaacacctcaaaatatcatatatagttctgaatttctagagttttattagttgtaaagtgattttagaaatgcactctgattctaaatgtttgtcatgtggatagaaattttgctatgaataatacattttcattaaaataaagacgtgtttttcatgctatatatatatatatatttttttttttttagtgtaattgcccatttgttcttttttttktttgtttgtttttttgatatggagtctcactctgccacccagtctggaggggagtggtgtgatctcagctcactgtaacctctgcctctcaggttcaagtgattctcctgcctcagcgtcccaagtagctgagattacaggcatg

SEQ ID NO: 779751 - DNA, 603 bp, Homo sapiens
tgaacccaggagttggaggccacagtgagctatgatcatgccactggattccagcctgagcaacagagagatactgtgtctctaaaaaagtaaaataggcctggcacggtggcttatgcctgtaatctcagcactctgggaggccaaggcaggcagatcatgasatcaggatttcgagaccagcctgaccaacatggtgaaaccccctctctactaaaaatacaaaaataaacagggcatgatggcgcacacctgttgcacctgtaatcccagctactcaggaggctgaggcaggagaatcacttgaactggggaggcggagtttgcagtgagccgagatcaagccactgcactccagcctgggcgacagagtgagactccatctcaaaaagaaaaaaaaagaaaaaaaggtaaaataaactcatttttatctaagtgaatttcccacatactatgaccaggaaacaaaagtaatcatgagtaaattatacctagatttgattttttttttttcctttcagtgtcctactttcaaattgttgttgtctaggcacattttcggaagtcatcacttttctgtttgcatcgcgatagtcttttttc

SEQ ID NO: 779752 - DNA, 608 bp, Homo sapiens
gccattccagccttctttcctcctggttgaaactatgtcttcctgatctacagatgtggcttttacttctgaggatttagtgaaaacttcctggttcaagcataaaaagaaaaagataaaaaaagatatatgtatatcatctatatctatatatctatatctatatctatatctagggttgcctgtaaatgaggcattacaaaaatcaattgcttttgattcatcaaaaattgattaaacaccatgggctgtaactatatttgaatccacgtagtcaaatcaatgttattcaagtagttatatttataagacagcctcatgactaatcaagtaggattcttagcttgatcttctgttttaagcatttggcttgaccatagaagtcttttggctatttaaaatatcaaatttattttcaaaggataaagatttttcccttttggaaaacagtgcctctgaaagcaatmctaaagatgtaattgctgcaatataaaatttggaacttagcttccaacagtgaccactttggaagtttatgattaagtgtaaattctggtataatagtttaacttcatgctcattatttttacagccagacctattaagaa

SEQ ID NO: 779753 - DNA, 600 bp, Homo sapiens
gtacacaataaacgtaatgtgcttgaattgtcccgaaaccactccacccacctggtctatggaaaaaattgttttccacaaaaccagagcctggtgccaaaaaggttggggactgctaccttaaataatggggctcagaaagcttctgggttgatgaacatstggaggtgctgggagtatggtatgtccagagagggcatggaagttctgtgcctgtttccctatatcctgccctatttatcctttctgtttaactgttcttgagttgatcctttataataaactggtaatagtaggcaaagtgttttcctgagtcccgtgagtcattctagaaattatcaaaacttaagtggggaagattgtggaaaccccaaactttgtagcgaatcagaagtatgggtaacctggtgtacaagtctgttcttgcactgctataaatgaataaatacctgaaactgggtaatttataaagaaatgggctcacagttctgcagggtgtacaggaagcatgatactggcatctgctttgcttctggggaggcctcaggaaacttacaatgatggcagaaggcaaaggagaagcagacatgtcttacgtgg

SEQ ID NO: 779754 - DNA, 631 bp, Homo sapiens; identical to SEQ ID NO: 776980

SEQ ID NO: 779755 - DNA, 588 bp, Homo sapiens
atgatagcgtgttttttcattcctgagattaaaaaattaccataaatttccgctcatactttttaaggtaaagaatagatagtggtatataataatacaatatgtttaaagccttagagaaatattgtgcattttacaaatgtaattttttttaaatgtggaggatatattggctggttaccctgtctgaattagggctcttaaaggcaaatgggagaaatgaaacacttctattgacattaaccagaaatggaaatggaaagactggaaaaccaggcatagaacataagcagagactaagagaagcrgagcactgacaaggtcactgctcctgtgccatcttctttaaacatctctgtgttccttcaaaattcatatgctgaagtcctaaacttcacaactcagaatttgaccttctttggaaataaggttgttgcagatgtaataagctaaaattaggccgtaatggagtagggtggatcccttatctagtatgactaatgtccttataaagtgaaatatttagactcagagacacatacagggaaaatatcatgtgaagacgaaggcagaatttgggatgatctt

SEQ ID NO: 779756 - DNA, 620 bp, Homo sapiens
aataaacattagagcagaaataaataaaatatagactaaaaaacaatacaaaatattaacaaaatagttttttttccccaaatatgaacaacttgacaaagtttaaactatccaagaaaaaagagagatgacccaaataaattaaatcagcagtgaaaaagcagacattacaactaataccacagaaatacaaaggattggccaggcgtggtggctcatgcctgtgatctcagcactttggggggctgaggcaggtggatcacttgaggtcaggagtttgagaccagcctggccaacatggtgagaccccatctctattaaaaatacaaaaattagttgggcatggtggtgcatgcctgtaatcccagctactcaggaggctgaggcaggagaatagcttgaacmcaggagggggaggttgcagtgaactgagattatgccactgcactccagcctggacaacagagtgagactgtctcaaaaaaaaaaaaaaaaaaaaggaaaagaaaagaaaagaaagaaatacaaaagatcataaaacactattatgaacaactaaatttaacaaattagatagctgaaggagaaacgaataaattcctggacacatgcaacctagc

SEQ ID NO: 779757 - DNA, 568 bp, Homo sapiens
atattaaaaatatattaagtactttctactattgtttttaatttgcgtttagactctgatataatgctttatattttgtaatgtgagtcaaatgagttagggcacttataaaaactcctttatcggccgggtgtggtggctcacgcctgtaatcccagcactttgggaggccaaggcaggtgggttacctgaggtcaggaatttgagaccagcctcaccaacatggtgaaactccatctctactaaaaattcaaaaattagctggatgtggtggtgtgtacctgtagtcccagctactcaacaggctgagacaggagaatcgcttgaacccaggaggtgkgttgcagtgagccaagatcataccactgcactccagcctgggcgacagagtgagactctgtttcaaaaaaaaaaaaattccttcatcaagagtcatttgtaaaatgatatattagacatgtatggaaatcaaactcctaaatcataaataaaatggtgcatgcagatggtttttatattgtgattgtttctattgcaaaaatggcctttctcaaatagtttttttttt

SEQ ID NO: 779758 - DNA, 641 bp, Homo sapiens
aatattatcttattgttaaaaatacagcattgattccatgtgttaagctctcagactttttcttttgatatgtttctttaaatgtgcccatttatggatctttgaatcaggaaaaggagaatgattgtcctaatgaatgttttaaatcaagaaatatttcagatgatagtatatataatatgtgcttataagatgcatgttctaataaaagatattccctaaacaaggtggtggataagacttgatggcaaagatttttgatgttttaaagaatcagcatactcctcattctgtaagaagcagtaagtttaatggcactttaaagttgaactaaaaagaatttgtgcccagygtaatttttcagttttgtgttccaaaaatagactctatatgggtacatttaaccagttattgaatttttaaattacttttcattttaacggcaaaatagtattaccacttaatactaaatgacaaagaaaagcctatttatgaaggaattttgactttatgaaagtggcagtgtccgggaatcacatgaatggacttcattctccatttcaggtctgagtggatgtgcacactatgcttcatgtatggaagaaatatctccctctgcccatctccaactcaagagttcc

SEQ ID NO: 779759 - DNA, 608 bp, Homo sapiens
tatatacacatttatacaactgtgtatatatacacatttacttctatattatagacacatagatagatagataattcttcttttacactgacatcagcataccaaatccaacatcacaggttaattctagttttatacctttccatatctgcaactttctttctttgacagtgagaagttaagagtccattagcctcaacttttttacctgtttgagctctactctcctatgtgtaacccgtcatcttttgctacctgtgttctacccaacctcctacccactatggagattcccttttcaccccactctgaatccagcacccatccygagtccccactgccacttccctctcacatgggtgctcttctcactctacctgggcaccaaaaacctgcactaggctgctgccattgccaccaaaagtgtggccctcctcactttgctctgtctgcctacctaagctagcactctctttaccctgctcaagctccagtgctgcaggctggagcactaacactgctgcctccattctgcttggctgtgggggtcctccgcctcccacatgcatacctacttcactcagtccacctagtggcttgtagcgtga

SEQ ID NO: 779760 - DNA, 626 bp, Homo sapiens
tgatattgattttttaaatcacgccattttcttgtttaaagtccttaaatagctccccacagctttcaaggataaagttcaaactctttcatttagtacatacagcctttcatgaccccatttcttcctgtaatttcagctttattgtctgctactccttcacattcgccctttgctccagccatactgagctatttgtagttctttgcagtttccaagagaaccagaccacttttcaggataatcccctcctgggatgacttaatgcactttatgtgtgctcctaacactctctgaccactctgtccatctatcactgcacttgtactgtgccacatgctctttgatttgcaccttcttgagagcaaacaccatgtttcagtcagatttgcatccctagcacctggtaggtgtttgctcaataaatgaataaagaaaggggtaaccaaagctattctaccgatagataatsgggtacaattttgagttgtttggaaagttggttggtgttgactagttaattttccttctattgcttcctatgaagttaatgttgcatgtgtatgttgggtgatattggtaatggggagagggtatggctgtgtgtgttgtgtgtgtttgggaag

SEQ ID NO: 779761 - DNA, 638 bp, Homo sapiens
tcacttgtttgccacctctacttcttcaaatgataaaaagcttcatcgctaccttgttcaccataatgctttagcacaagtgtactatatgaatcactatcaatctgtcttccaagaagacatgggtagtgagaatgaaagtgaggactcccactaatgaatgaagttctcaaagagggggaataagggaggagaccacccctcatgttgacttatgcccaatttctgcctccaaagaaagaagaagtaaaaactaaaaggcagaaatgaaatccacaggcagacagcccagcgctgcaccatgggcctggcagttaaagatcgacccctgacctaatcagttatgttatctatagattacacacattgtatggaaaagcattgtgaaaatcgctgtcctgttctgttccattctaattactggtgcattcagcccccagtcactgcttgctcaattgatcacaatcctctaatgtggacycccttagagttgtaagcccttaagagggacaggaatggctcactcggggagcttggtttttgagacatgagtattgccaatgctcccggctgaataaagcccttccttctttaactcggtgtctgaagggttttgtctgtggctcatcctgctacat

SEQ ID NO: 779762 - DNA, 553 bp, Homo sapiens
ttggtgggagtgtgaattagttcaatcattgtggaagagagtgtggtgattcctccaagatctagaaccagaaataccatttgacccaccaatcccattactgggtatatactcaaaggattataaatcattctactataaagacacatacacacgtatgtttaytgtggcactgatcacaatagcaaagacttggaatcacccaaatgtccataaacgatagtctggattaagaaaatgtggcacatatacaccacagaatactatgcagccataaatggatgagttcatgtccctttcagggacatagatgaagctggaaaccatcattctcaggaaactaacacaagaatagaaaaccaaataccacatgttctcactcataagtgagagtagaaaaatgagaacatttgaacacaaggaggggaacatcacacactgggacctgtcgggaggtaggggattaagggagaaatagcattaggagaaataccaaatgtagatgacagggtgatgggtgcaggaaaccatcatggcacatgtatacctatgt

SEQ ID NO: 779763 - DNA, 625 bp, Homo sapiens
gcatgtgggtggggccagataagggaataaaagcaggccagggagccagcagctgcacccactcaggtccccttccacactgtggaagatttgttgtttagctctctgcaataaatcttgctgcttctcactctttgggtccacgctgcctttatgagctgtaasactcaccacaaaggtctgcagcttcactcctgaagccagcgagaccacgaacccacagggagggatgaacaactccggatgggaggaacgaataactccggacgcgccccctttatgaacagtaactcactgcaaaggtctgcagcttcactcctgagaccagtgagaccacaaacccaccagaaggaacaaacaactccagacccaccgccttttaagagctgtaacactcactgcaaaggtctgcagcttcactcctgaagtcagcaagaccacgaacccatcagaaggaagaaactctggacacatctgaacatctgaaggaacaaactccggacacaccatctttaagaactgtaacactcaccgtgagggtctgtggcttcattcctgaagtcagtgagaccaagaacccaccaattctgggcacaccttgatccctattaaaaccagagcctta

SEQ ID NO: 779764 - DNA, 625 bp, Homo sapiens
gcatgtgggtggggccagataagggaataaaagcaggccagggagccagcagctgcacccactcaggtccccttccacactgtggaagatttgttgtttagctctctgcaataaatcttgctgcttctcactctttgggtccacgctgcctttatgagctgtaacactcaccacaaaggtctgcagcttcactcctgaagccagcgagaccacgaacccacagggagggatgaacaactccggatgggaggaacgaataactccggacgcgccmcctttatgaacagtaactcactgcaaaggtctgcagcttcactcctgagaccagtgagaccacaaacccaccagaaggaacaaacaactccagacccaccgccttttaagagctgtaacactcactgcaaaggtctgcagcttcactcctgaagtcagcaagaccacgaacccatcagaaggaagaaactctggacacatctgaacatctgaaggaacaaactccggacacaccatctttaagaactgtaacactcaccgtgagggtctgtggcttcattcctgaagtcagtgagaccaagaacccaccaattctgggcacaccttgatccctattaaaaccagagcctta

SEQ ID NO: 779765 - DNA, 358 bp, Homo sapiens
tagctctttccaggctcctctttcagagggacaggggaaaagagaatcctacttaccatggcaatttactagttctctctttttctgaagagatctatgctgccatctgcctgaagccttgttctgtcattcatttagcaccactgtggccaagcccccactgccgcttagaccaccctggatattcacatctgccgagatcrgggcagttctgacactttctgattaatcctatgcctgggtcagactgcttggcatccaagcttcctcctcttgttacaagctatgctttgcagccaagccaagtgacgtacaacatgagctgaaaaaggagtgctctaactgaaaaagcacaatg

SEQ ID NO: 779766 - DNA, 631 bp, Homo sapiens
tcttttctccaaaacaataaattactggtcgtttgattcaaattctgcttagtatgcatatgctgtgtttgtatgtttctgactgtgaagataaaggcaaagaatcctcgctatccttactcagtgccttcctctaccatgcagcaggtaagtggaactaacagaactcactgttctttgtttcctgcccagctccctctgccttgcttttctgggaccccaagaaattcctgttgtgaaaactgcaagaaaaaaccctgtctcagccaaacagaattcatccaaggacctcagcgtgtgtgtgctttggggaagggttaagaagggaagaatattttcctttcttttatttttatttttatttatttattttattttattttattttattttattttttgagacagagtctcagtctgtcacccaggctggagtgtagcggcatgatttcggttcactgcaagctccrccttcagggttcacgccattctcctgcctcagcctcctgagtagctagaactacaggtgcccgccactacgcccggctaattttttgtgtgtgtgtttttagtaaagacagggtttcaccgtgttagccaggatggtctcgatctcctgacctcatgatctg

SEQ ID NO: 779767 - DNA, 628 bp, Homo sapiens
aatcacaaaatctgagactgcttcagatgcttgctttgtttctccagactgtgggtgttcagttgttgttgtttgtttcttagcatacatttttgttgacagtgagacatgatgccctgggtaaaagcaattgagaaacacagattttaggtgttagggtttatgtttacttggctaggagtaaggctgtgtttactctttgctgttgctgtggtttcagaggctaaaatttcctttaatgtcctttttatctccctaattgtcctgagttttcctagaaactccaccttaagtacagtataagccttgctattgtttcagctgtaatcccctgtttctttattttattttattttttattttttggcaaaggagtctcactctgtttccgaggctggagtgcagtggcgcaatctcagctcgctgcaacctccgcctcctggattcaagtgattctcctgcctcagcytctccagtagctgggattacaggcgtgcatcaccacgcccagctaatttttgtttttttagtagagaccgggtttcaacatgttggccagggtggtctgaaactcctgtcctcaagtgatccacctgccttggcctctcagagtgctgggattacaggt

SEQ ID NO: 779768 - DNA, 627 bp, Homo sapiens; identical to SEQ ID NO: 731361

SEQ ID NO: 779769 - DNA, 603 bp, Homo sapiens
gggtgcagtggacggcgcctgtaatctcagctactcaggaggctgaggcgggagaactgcttgaacccgggagtcagaggttgcagtgagccgagatcatgccactgcactccagcctgggtgacagagtgagattctgtctgaaaaaaacaaacaaaaaaaacaaacaaaaacccagactatattgtttagggatacttagttgacaaaataacagacacaaacaggacataattaccataaaaatcaggacctggkgggcggttggggggggagatttaagtggaaagaatggagcggtgacaatgtgtgtcaacctgggaggtggtgaccctggggttcgctttgtaattcctcaaaatgagcatttatgtgctattcacttttcacagggcagaatctctgaactaacatgtttacgcagccatatgcaaaaaaaaaaaaatggataatttgtattctaattaaaatatttaaaaattggagacaaggcggccgggcgcggtggctcaggcctgtaatcccagcactttgggaggctgaggcgggtggatcacaaggtcaggagatcgagcccatcctggctaacacagtgaaaccctg

SEQ ID NO: 779770 - DNA, 603 bp, Homo sapiens
gggtgcagtggacggcgcctgtaatctcagctactcaggaggctgaggcgggagaactgcttgaacccgggagtcagaggttgcagtgagccgagatcatgccactgcactccagcctgggtgacagagtgagattctgtctgaaaaaaacaaacaaaaaaaacaaacaaaaacccagactatattgtttagggatacttagttgacaaaataacagacacaaacaggacataattaccataaaaatcaggacctggggggsggttggggggggagatttaagtggaaagaatggagcggtgacaatgtgtgtcaacctgggaggtggtgaccctggggttcgctttgtaattcctcaaaatgagcatttatgtgctattcacttttcacagggcagaatctctgaactaacatgtttacgcagccatatgcaaaaaaaaaaaaatggataatttgtattctaattaaaatatttaaaaattggagacaaggcggccgggcgcggtggctcaggcctgtaatcccagcactttgggaggctgaggcgggtggatcacaaggtcaggagatcgagcccatcctggctaacacagtgaaaccctg

SEQ ID NO: 779771 - DNA, 596 bp, Homo sapiens
aggaaatgaggcacgggaaggacaacccttcctagtattctctccgaagaagagaatcaaatgctactcacttagcgggtagagagatcactgctctttgtagagaaaaacaatcatggcccaggaagtcatccatcactcatccataaatgggagagtaatatggacctagagttaaatttcacccatgaaacatcarccacatgtcatatcaattcaagtgtgtaacattgatataatcgggtacaccacagcagcactgacagaaacagaaatgattcagagaaagccaattaaaacagccaggggataaagcagatctgtatgacattagcttttttccttctggaaagataaaaaaccaagatatattattataacctacacaaaataacctcatatgtggtaataaataaggatacacagacctgtttacaaaatccccaagtagaagaactaggggacaccagataaaaagtttatacaatttaccaggcaacaagtaaagaactctttactcacccatctgccacctcccagcccccaccaggggttgtacatactgaacacagaaatgtgtttaagagaggtttaga

SEQ ID NO: 779772 - DNA, 631 bp, Homo sapiens
cagatattcactcctaagaagaagctcatactaatggccaaggtcctttattagtctcctcaagctgctataactgaataccacagactaggcagctgaaactacagaaaattattttcgcacagttctggaggctggaaagtcaaggtgccatcaaggttgatgtctggtggggactctcttcctggcttacagacggctactttcttgctgtgtgctcacatgcttttcctctatgtgcatactctcttccttttttttawtttttttatttttttttgagactgagtctcgctctattgctcaggctggagtgcagtggcgcaacctcggctcacttcaatctccgcctcctgggttcaaccgattctcctgcctcagccttccaactagctgggactacagtcatgcaccaccatgcccaccaccacgcccagctaatttttgcatttttactagagtaggggtttcaccatgttgtccaggctagtctcgatctcctgacctcaaatgatccgcctgcctcggcctcccaaagttctgggattacaggcatgagccaccacacccggcctcttcctcttctcataaggacaccaatcctatagggttagggctgcaccctggacct

SEQ ID NO: 779773 - DNA, 620 bp, Homo sapiens
tgatcacaaggaagtaatttaaaatgtgggcaaaatcttatgttcacagaggttcactgaagttttatttattttaagtatacatatatgtacgtatgtctgtgtctgtgtgatatctatacatatatatatatgatatatatatataacctcatgattatggctttgccatcttccaggtgaaagatgatggtgctttaaatcaatacgatagcagtggggttggtgacaagccattaaaaaccatgttgtagaattcttatgataatttaaatgcaagcaaaacaaacaaacaaataccttatgactacttgtcatgattttgtaaacctgggaaaaattagtttaagaacatattcccaaataatcacaccrgttatcttggctggttggtgctggcttaaactttttgagttttctttttctttttagaccaagtcttgctctgttgcccaggctggagtgcagtgatatgatctcagctcactgcaacttctgcctcccaggttcaagtgattttcgtgcctcagcctcctgagtagctgggattacaggggcctgccaccatgcccagctaatttttgtatttttagtagagacagggtttctccctgttggcc

SEQ ID NO: 779774 - DNA, 626 bp, Homo sapiens
tctctcttataaagtttcatcaaacttatattcactgacatgtaatgataatcatcaagactaaatcacatcccaggaggtatctgaatgcaaccgtgaggtgctccttcatgtccgaagatgcatttataacaatctggaaaacagtctagatcttcttggaagttagaccttcaactttatctgaattttgatgataaatgaagagctcttcttgtgcagtttctgaggttcttcaaaagagtgactgtttctctgtttcyccagaaaaatactacaatatgtggtgtgtgtgtgtgtaggtgcctgtgcacatgtgtgggtgtgtgtgaatttgcctatatgtgtgtgtggatggagtaggtatacatgctgtgtgtgtgtggatgtgcattgtgagtgtgggtgggagatcgtgagtgcatgtgagtgtgtgtgtggatggagtaggtatacatgcctgtgaatgtgtgtgtggatgcggatgtgtgagtgtgggtgggagatcgtgagtgcatgtgagtgtgtggatggaataggtatacatgctgtgagtgtgtgtgtggatgcggatgtgtgagtgtgggtgggagtttgtgagtgcatctgagtgagtgtgtgtggcg

SEQ ID NO: 779775 - DNA, 631 bp, Homo sapiens
ttatgatctatacattttatattcaactagatacaacatttagccataaccaaatattactttacattttctttcaggaaggttgaaaaatattttatctttcttaatacttacttatcttcctgctttctcttactcacattgatccattctttctataaaatgattatattcatccatcagctccttgttcttctcttgtagtgaaagaatctgcatttcactctcagcttgaagatttttggcagcagaatgaaactggtcttggatagtactgattgtcttttcttgactgttagctttcttgtgarcatcatccagttgctgtcgaagcaacatattttcactttgtagttgagataatctctcctctacagattcctgcttggcaatgtatttcttcagtttgctttggtacatttgttcagtttctttcttctgacactgtgtttggctgaggtctctttgcacacgttccaaaatcaaactctctcttccaagagcatctcttgtgttatggagctgaatttgtaggctgttaattttactttcagcattagaaagtttttcagaaagaatctcattcttagcttgtaggccagacatatcaaccttcattttgtcatgtaaa

SEQ ID NO: 779776 - DNA, 631 bp, Homo sapiens
ttatgatctatacattttatattcaactagatacaacatttagccataaccaaatattactttacattttctttcaggaaggttgaaaaatattttatctttcttaatacttacttatcttcctgctttctcttactcacattgatccattctttctataaaatgattatattcatccatcagctccttgttcttctcttgtagtgaaagaatctgcatttcactctcagcttgaagatttttggcagcagaatgaaactggtcttggatagtactgattgtcttttcttgactgttagctttcttgtgaacatcatccagttgctgtcgaagcaacrtattttcactttgtagttgagataatctctcctctacagattcctgcttggcaatgtatttcttcagtttgctttggtacatttgttcagtttctttcttctgacactgtgtttggctgaggtctctttgcacacgttccaaaatcaaactctctcttccaagagcatctcttgtgttatggagctgaatttgtaggctgttaattttactttcagcattagaaagtttttcagaaagaatctcattcttagcttgtaggccagacatatcaaccttcattttgtcatgtaaa

SEQ ID NO: 779777 - DNA, 574 bp, Homo sapiens
gggggatgagatgggaggatcccttgagcccaggaagtcgaggctgcagtgagctatgatcgtaccactgcactccagcctgggtgaaagaaaaaagtccctgtctctaaagaaaaaaataaattaattaaatgaataaatggagaagattgcatttgaaatatcactgcatgtatttttttcctttggagaccttcagcttcattcctgtggcccaatggaaattcctgccccaaggaagggagagacagaaagctacctgagaggagagggccctctgaggtaggatctgtctctgtgcaacaggatgggagtgggaagccctcctggtgctgggaggtgggggaaamagagggagagggaaagaggaaggggtggaagatcagaggcatggttctgattcccccggttggaggattcagggggatcagggcctccctgcccttggcatctcctgggggcactgcaggtctctcagagaagtccgacagcaggatggcaatgacggagagaagtcatcaagaatctaggtggcggacgtgaggttgagctagcatctacgaagcccagaagt

SEQ ID NO: 779778 - DNA, 445 bp, Homo sapiens
agagatcagccaggcctgcgtgagggtcgggggacctcccagccactgacaagccacgtgagctcctctctgttcccagacagcccaccttgggagggaggaaggggtgggaaacagccctgatacaatgttagtattttgaatggacttagtagtttccagaaaaggccttgaaaccgaaagagaccaaattacttcggatgtcaattttcagtattttcatgtcagcagaaggagagcttcagagtggatgaragcagttatgggaaacggaggaagtttgatttttgcaactctcagtcacagtgtgcaaggttcagcccagaacataatcatccaactctgaccatcccactccttccttagaccttcagctcccagggccccattcatcctggagtccaggttaatggcatccctgggtgcaggttgtgcctgtggagtg

SEQ ID NO: 779779 - DNA, 522 bp, Homo sapiens
gatatatggccacgttttcaccgatcaaggacagtggctcagcagcatgatgaagatggaattgaagaggaagatgatgatgataatgaaattgatggtgatgatacaatttctgactggaatctaaggaaatgttctgttgctgccctagatgttcttgcaaacgtgcatcatgatgaactgctgccatatatattgccccttttgaaagaattactttttcatcatgaatgggttgttaaagaattagccatcttgggtttaggaacagttgctgaaggtttgcatgcagggcatgattccttgcttgcctgagcttattcctcaccttattcagtgcytctctgataaaaaggctcttgtccgttccataacatgctggactcttagccgctatgcacactgggtagtcagccagccaccagacacgtacctgaagtcattaatgacagagttgctaaaacgcatcctggatagcaacaagagagtaccagaagctgcctgcagtgtctttgctaccct

SEQ ID NO: 779780 - DNA, 516 bp, Homo sapiens
ctgatttcatgtctcaatattgggaaccaacctaactcctagaattcatttcagtctgcaacaatgacacatgagcaattggagaaatctccattcaaatgggtatagagatgcagccttatatttaccctatggtgttgcaccagcttgtagaaatcattaacagacccaacacaccaaagacgttgctaaagaatacagcagtaacaattggttgtcttggttatgtttgtcctcaagaggtggyccccatgctacagcagtttacgagaccctggtgtacctctctgagaaacataagagacaatgagaaaaagattcagcattccgtggaatctgcatcatgatcagtgtgaatccccatggtataatccaagattttatatttttttgtgatgctgttgcatcatggattaacccaaaagattatctcagagacatgttctgtaagatccttcatggatttaaaaatcaaattggcaatgaaaatgggaggcatttctctgaccagtttcc

SEQ ID NO: 779781 - DNA, 516 bp, Homo sapiens
ctgatttcatgtctcaatattgggaaccaacctaactcctagaattcatttcagtctgcaacaatgacacatgagcaattggagaaatctccattcaaatgggtatagagatgcagccttatatttaccctatggtgttgcaccagcttgtagaaatcattaacagacccaacacaccaaagacgttgctaaagaatacagcagtaacaattggttgtcttggttatgtttgtcctcaagaggtggcccccatgctacagcagtttacgagaccctggtgyacctctctgagaaacataagagacaatgagaaaaagattcagcattccgtggaatctgcatcatgatcagtgtgaatccccatggtataatccaagattttatatttttttgtgatgctgttgcatcatggattaacccaaaagattatctcagagacatgttctgtaagatccttcatggatttaaaaatcaaattggcaatgaaaatgggaggcatttctctgaccagtttcc

SEQ ID NO: 779782 - DNA, 516 bp, Homo sapiens
ctgatttcatgtctcaatattgggaaccaacctaactcctagaattcatttcagtctgcaacaatgacacatgagcaattggagaaatctccattcaaatgggtatagagatgcagccttatatttaccctatggtgttgcaccagcttgtagaaatcattaacagacccaacacaccaaagacgttgctaaagaatacagcagtaacaattggttgtcttggttatgtttgtcctcaagaggtggcccccatgctacagcagtttacgagaccctggtgtacctctctgagaaacataagagacaatgagaaaargattcagcattccgtggaatctgcatcatgatcagtgtgaatccccatggtataatccaagattttatatttttttgtgatgctgttgcatcatggattaacccaaaagattatctcagagacatgttctgtaagatccttcatggatttaaaaatcaaattggcaatgaaaatgggaggcatttctctgaccagtttcc

SEQ ID NO: 779783 - DNA, 515 bp, Homo sapiens
gggccgtccacatgctgcgagcattgaacgtgatgcgttgccagagctcacgtgggctggaaagaaggcatcaccgggtcactgcaatcaatgcacagcttcccttctgggaatggacttagtgatcctggaagggaggtgcagatcctggctggatgagggcagccatcaggctttgaacattcactttatgtgctaagtgcttcacacacttcattgatttggtcatcaccacaagcctgccaagtagcaagatcccacttcccttatcaacaaggagacggaggttccaggaggtgcaggaacccgtagcggggctgagggctgwcttggtgtcccccatggactcaggggactggggaaaggggagttagtgtttaatgggagtttcatttggagatgaaaaggttctggagatggatggtggtgatggttgcataacagtgtgaatgtacttaatgctagtaatttgtacatttccaaatggtttaaatgataacttttatattctgtac

SEQ ID NO: 779784 - DNA, 603 bp, Homo sapiens
gttaaacggcagagattgagagactgaatttaaaaaacaagaccaaactatatcctggctacaaaaatcacactttaaatacgaagatacaagttcactgaaagtgaaagggtggaataatatatgccatgataacactaatcaaaagagctggagtggctacattaatattagacaaagctgatttcagactagagaatactatcagggatacagwgggtcatttcataatgaaaaagacatcgactcctcaagagttcataacaatactaaacatatatgtacctaataaggatctcaaaataaataaagtaaaaatttatagaactaaaaagaaaaatagacacatccacaaatatagttggatatttcaatatcccttccttaacaattgatgagaaaagtagacagataattagtaagtatacagaaaacttaaataacactgtcaaccaacttgacctgattgacatttattttatacttcaccaaattattttatacattctttctaagtgtacatggatcatttaccaagataggccatattcatggacataaaacaattctcaataaatttaaaaggatttgactcacacaaaa

SEQ ID NO: 779785 - DNA, 603 bp, Homo sapiens
gttaaacggcagagattgagagactgaatttaaaaaacaagaccaaactatatcctggctacaaaaatcacactttaaatacgaagatacaagttcactgaaagtgaaagggtggaataatatatgccatgataacactaatcaaaagagctggagtggctacattaatattagacaaagctgatttcagactagagaatactatcagggatacagagggtcatttcataatgaaaaagacatcgactcctcaagagttcataacaatactaaacatatatgtacctaataaggatctcaaaataaataaagtaaaaatttatagaactaaaaagaaaaatagacacatccacaaatatagttggatatttcaatatccyttccttaacaattgatgagaaaagtagacagataattagtaagtatacagaaaacttaaataacactgtcaaccaacttgacctgattgacatttattttatacttcaccaaattattttatacattctttctaagtgtacatggatcatttaccaagataggccatattcatggacataaaacaattctcaataaatttaaaaggatttgactcacacaaaa

SEQ ID NO: 779786 - DNA, 566 bp, Homo sapiens
aataatattttcatggcaggaaatttggaaaatgtagaaaaagctaaagaaaaaaagaactacccatcatcttgcctttaaatttataatactttttaaatagttgagattattttatatgaacagctacatttttttttacctaatgtcataatatcaaagtctttgtaaatataacttctaagttactagaaaatatcttgtcctacttcaatattgggcagttaagctgattgctattttttgctmttataattactgctgaagtgatcatatttgcttatcagtattttctagttatagtgatcataatttttatcattttcttgttttcttctcaaaaggacttaagagagcttaatttaagtatagttatcttcaaaggttttctggcttacctagatgagaaaactttatttgaatgtggtcagaaattgcaatagtttattagagtaattcagtaccattgattgtacatcacagtgcattgtgctttttaagatattgctgctttctagtattccacgacaaacaagtttccaatgtaactaaaagttcactgacat

SEQ ID NO: 779787 - DNA, 592 bp, Homo sapiens
tttaaaagctggcaacggtgtttcagttatcagaagtgaaaggcaatgggtttccaattatgagtagttctactgtaaaaactacaagcccattaacttggcattgagaatggccaaataatctatacattattaaaggggtgttatatctctcctaaaatggattctggttcactaagaaaaacttaggtagcactaaacttgtttttttatctgataatgttgctggtctgctaaaaaaattgatgtgtataacagtatgtttagaatacagtataaaatgatatcttgatgggaaagatgaataaatatgggcttgccrctggttgatttaggggagttagtaactaattgaaatgcttaaacttaaagttactgatcagttttgtaatagaagagaacttcgtcttcaaccctgccttcttaagcattaaaaaaaatgaactggattaagatgtacaatttatgcttaaaaactatgttcgccatttgaagatatacagaagattccacatttgtcatgatggaatgagaaattcataaaatttcaaagagcaagaacattagagtaaatctatcaagaaaatacaaa

SEQ ID NO: 779788 - DNA, 626 bp, Homo sapiens
aacaaggagaatgtactcctgtattacttgtgctcctcaaaagcaaatgcctatacatgtatcactcgcatcacagcacgacctgagatctatttctacttctacccttagcttatttgagcattcattgttaaacagaaatggtttacctgggactggcttttcccctcttctgtgtgaccctggttgaattataccattaatctgggcttcctttttctcatttgtaaaataagggagttgagcctgttggtgtaaaagaccttcccagcactgacattctgtgattctattacaggttcccttcatgctctgaggctctgggaatccctgctaggtaaatgacgaagggtggggtggggggatctctttccagagaaagagagcaaaatgtaaygttccacactcttacctgaagtccactatttcaactgaagtaaaataacgactcagagagggcgatgtactgtacacatctgtgagctaaaacaaacagaagcaaattaaaccacacacattaccgacagatcatattacacatcacctgacaaagcaaaactgcttctaaggcagaggagattccactccagcctggaatcaacgttatctggaagctctggatcaag

SEQ ID NO: 779789 - DNA, 613 bp, Homo sapiens
gtggtgaaaatcatgattggtctgtataattactttccatgaaaattgacaagtgccttttccacagattcgggagttctgcttctcagatattttgatccgtgggtattttctctaagctgaagccagaactgaattattgagttcaaaagtaactggaaattctctgtcctatgggtagagatgggggttagggaggctgccttgaattgaaacataccctggktgcaactctaccttaggactccgtgtgtgtgtgtgtgtgtgcatgtgtgtctgtgtgtttgtgcatgcacacatttgttttgttagggaagactcacctgcatgaaaggacagtgttatttttattctcatttggttgagatgcccaaaagctagaacccactgtaaataattactgttttaaaaatgttttcttagtgtaaaacccagtagccctcagcccattttcctcacactttaattcatcaggaaacagaaacggtgaaaatctaagaatgaagatttgtcggaaaggctctttaattagggaatgagtgattgcattgtcaattttacatcttggtgtactattacatcttggtgtgctattactttaaatgtatatgtt

SEQ ID NO: 779790 - DNA, 573 bp, Homo sapiens
cttcaaatcattctgccaaatatttgagacacattaacaatatcacactttgaagtttctttttttttagccacattttctttattattacatttacttatttgaatcatacatcgtgatctccttttggtcctcttactttgtggcatatggggagtagtgcctgttcttatgactatgttagagtgggctaatgaactgaaactgcagtcatcccttggtatctgaaggggattgcttccaagacctcccatggataccaaaatccacagatggtcaagtctctgagaaaaaaaatggtgtagtatttgcacataatcttgtataatctaaatcattgccagattacttaaaatacctagtacaatgtaagcgctatgtaaattgttgctrtactgtatcgtttagggaatacggacaagaaaaaaagactgtacacgttcaatacagaggtaaccttttttttccagatatttttgatacaaagttagttgaatccatggatgcagaaaccatgaatatggagagctgactgtctttgttttagcctaaaagcagcctcagttcctccca

SEQ ID NO: 779791 - DNA, 633 bp, Homo sapiens
ctgctgccttttgttcgactatgccctgcccccagaggtggagtctacagaggcaggcagacctccttgagctgcggtggggtccacccacttcgagcttcctggtgactttgtttacccactcaagcctcagcaatggcaggacgcccctcccccagcctcgctgccaccttgcagttcaatctcagactgctgtactagcaatgagtgaggctccgtgggtgtgggaccctctgagccaggcgcgggatataatctggtgtgccatttgctaagaccgttggaaaagtgcagtattagggtgggagtgacccgattttccagtgccttctgtcactgcttcccttggctaggaaagggaattccctgaccccttgtgcttccygggtgaggcgatgcctcatcctgcttaagctcatgctcggtgggctgcacccactgtcctgcccctactgtccgacaagccccagtgagatgaacccggtacgtccgttggaaatgcagaaatcacctgtcttctgcgttgctcatgctgggagctgtagactggagctgttcctatttggccgtcttggaacccattaatacccttaattccccctcccccagttatggatatggctcctaaaaatt

SEQ ID NO: 779792 - DNA, 602 bp, Homo sapiens
  misc_feature 484: n = A,T,C or G
taagtccttgtctcctctatatgttgctcatgtctacttatggtttgtggtctatatatttactctcttttgggtgacttctgataaatagaagttctttattttactataaatgaattcatccaaatattcctttatgttttatatcttatttaagaaattctccatacccaaagtcataaagcttttctctatttgctaaaggtttctggtcctttcaaatttaagtctttaatacttaatgtgtgtgtgcacgcacgctcatgcttgtgtgtgtatgcacatgtgtatgtggtaratttatgctgtctcgtcctcattttgtcactgtggaagattaaccactgcttcaattttgtttatatttatgggactatttaaaatttttaaaacattaaaaaaacttgtatttgagtattttgttgggttgtatttatgcaagaatttgtcaatttcatctaatctatttcaaacgtttgcatanaactgttcatgaaatgctcttatttcttttatctctgcagcacgtttaaggcccttcttgcttcctatattttaaaattgtgctttcttatttgtttcctctctttatttatattgtc

SEQ ID NO: 779793 - DNA, 598 bp, Homo sapiens
cgatactagattttctaatggcctgtgatgattgctctaaagggtaacttcataaaacattcttgaaaattcttagtgggcttgctccgagagatgctatcatcatggtgaaaaaaatagctaacagaaggcaataatttgagaatgcattaaactttccagatggatggcttttttcttatatgacttgtcttttgtcatatcaggtattgatttatacgtgagaatgggcttacagcatccagcaaagtatttttccccagttatttctgagattcccccaggaagtgtcttgagatatcctctccccagattttctgggttctactcctggctccaayggtaagagtcacactgcctcagtttcctcatggaaatattgcaacaataatagaatctgtttcaaggctattatgaggactaaattagttaatctatgtaaagcacatagaaaagtgcctggtgtaccataaacactccataaagatggttattgttattatgatctatttatttttacaaataagatagtttaatagtgaaatgacttgttccagccatcacagttagaaagtaaccgacatatgataaatatttc

SEQ ID NO: 779794 - DNA, 576 bp, Homo sapiens
ttttagcattacaaaaaatgtacatagtataatttgtaagaatgaagaacaatgactgaagccttatatttggcaccatctgttcttagaaatccataggatgagccacacagaataagagctgagtatattgactgacctataggattatgcaaagtcaaaattcagttcttcatayacagaaaaggtgagttagatatttgaatggtgaacatgtaagcacaaagtaagtttgaaaataagttgaaaattagaaaattctgcaatatgtacccccaaattaaaattatatatatatatgtattatatgtgttgtgtatacatataagaaaattccacgcagaaaaagcaacagatgagatgtcaaaaataaataatataatggtgactgttataattctaacagtgtccaaaattcaggaagtttgtttcaacagaagtggaacaaataatcactaaaaaatgaagagctatgcaatgtagcagtcaagttacgtagatgggaagctggcattcacaggaatttaagtaaaaattcaatctagtcatgctgctattaggcgtgttcttaatttt

SEQ ID NO: 779795 - DNA, 633 bp, Homo sapiens
ttgttgttctatgagttattattagtcatcttattttaattttccatctgtttcccttcttagttattttacatacctttatgcttccccttttttttttcttcttcttcttttttttttttttttttgagatggagtctcgctctgtcacccaggctggagtgcagtggcaccgtctyggctcgctgcactccacctcccggggttcacaccattctcttgcctcagcctccctagtagctgggactacaggcgcctgtcaccacgcccagctaatttttgtatttttagtagagatggggtttcaccattttagccaggatggtctcgatctcctgaccttgtgatccgcccaccttgccataatttctttctgatctggaggttacacctgataaattttatttatcttgtggttattcttaactttctacagctgtgtaggcatgcatatataatctattcctgtaaatttcttcagcttgacatattcgtatcttcatccagaacaaagagatgccttggcgcattttgtaatttcctagtctccacaaagtccctgactctctaccctctcatcatagtgtttaatctataagtctagcttaaattgtttcatatagaaaagtaggt

SEQ ID NO: 779796 - DNA, 526 bp, Homo sapiens
aggaacaccatacggcagtggcaagtgagagaaagagtagccaggagctgttgtacagttgtaaatgaccagatcttatgtgaactcagagccagaactcacttatcaccaaagagacggcccaagccattcatgagggatcctccccaatgatccaaacacctgctaccagggtccaactccaacactgggattacatttcaacatgaaatttgggtggggacaaatattcaaactataccaayaatatatttgataaagggttaatttaaaaaatatataaggaactcaactctatgcaagaaaacaaacaaactgattaaaaaatgggcacagaactttaataaatatttttcaaaagaagagaatcaaaaggccaataagtatacaaaaaaaaaaatatttcacatcactaatcatcaggggaatgcaaattcacaggtgtgaatgagctatcacttcacacctgtgagaatagcatttattaaaataccaaagacaaatatttgcaaatatgtagagaaaa

SEQ ID NO: 779797 - DNA, 586 bp, Homo sapiens
ggaaggccaggaaactgagggctcaggggactgaaaagggaggagcaggtgggcctcagtcatggctggacccggggaccccgaggacgccgtctagacctgctctgtctgccccctgcctctgctgtcctccagacaggcccctccataggagcagagctggctcctgcagcatcgcctcatgtgggtttgggtcctgagaacccagaaggagagcaaggagggtggggaccatgaggggggcggcgaggstggggaggatgagggaaatgaggagggaggggaggggatgcctctttcctgaggaatgtagtcctaaattttgtgatctggaggaaacaccgtcttctgcgtcagatttcttggggaaagcctgcatgcttaccgatttcctcctaatgaaagaaagtggggggcctgccactctttatgtgtgatttccaaaattcttcaggaaaatggtcaaagaaaaatgcaatctattttcctcaaaaagatgccatctcagttatttggggagatctttccaagatagtgaatgaaaagttgacccttccttggcccctcctgctgaagtttccaccag

SEQ ID NO: 779798 - DNA, 542 bp, Homo sapiens
ttccattcgggtccattcgatgatgatcacactggatttcattccataattctattcgattccattcgatgatgattccattcatttccatccgatgatgattccattcgattccgttcaatgattattccattcgagtccattcgatgattccattcgattccattcgatgatgattgcattmgagtccatggattattccattccattccattagatgattccattcgggtccattcgatgattctcttcgattccatacgataattccgtttttttccgtttgatgttgattccattcgattccattcgatgataattccattcgattctatgtgatgattccattccattccatttgaagatgattccattcgagaccattcgatgattgcattcaattcattcgatgacgattccattcaattccgttcaatgattccatttgattccatttgatgttgattccattcgattccatttgatgatgattccatgcaattccattagatgatgactcctttcatttccattcgatgatg

SEQ ID NO: 779799 - DNA, 655 bp, Homo sapiens
cagcaaactaacacaggaacagaaaaccaaacaccgcatgttctcactcctaagtgggagttgaacaatgaggacacatggacacagggaggggaacatcacacaccagggcctgtcgggggatagggagcaagggaagggagagcattaggacaaatgcttaatgcatgtggggcttaaaacctagacgacgggttgataggtgcagcaaaccaccatggcacatgtatacctatgtaacaaacctgcacgttctgcacatgtatcctatgacttagagtataattttttaaaaaaatcttttagatttttcattagaatctcattaattctatatactaatatgtgaaaactgacatattttcaatattgaacatttccttctagaccagccttcttgtatgttcttcagraaaaaaaaatcattttctttatttaggtcctacacatttcttgttaattcctagatattttgttggctctttttatgaatgtaatattttccattatattttctatttggttcagaagcaaaggttaatttgactgttctcctgcagtctggctgtaagaggattggtcttctgcagaactccacagaacttggataaagccaagcattaaaatcaatcctggcataatattaaggcggcag

SEQ ID NO: 779800 - DNA, 571 bp, Homo sapiens
ctgttggtgggaatgtaaatttgtaaaacctctatggcaaataatatgaggatttatcaaataactaaaaatagaactatcatgtccgcaatgaaactaccacatacccacaatagaactaccagatccagcaatcccactgctaggtatctacccaaaggaaaataaatcaatatatcaaaaatatacctgcacgtgtawgtttattgcagcactattcacaataggaaagatatggaattaacctaagtgtccatcaacagatgattggatatatcattcatcactatatacacacaaaggaatactattcagccataaaaagaacaaaatcatgtcctttgtagcaacatggatggaattataggttattatcgtaagtgaaacaaatgagacacagaaatacaaatattgcacattctcactcataggtaggagttaaaaaaatgtgtatacatggatgcagagagtagaatgataagacaatggagacttggaagggtgaggggatgtataatgagaaattacttaacaggcacaatgcgtattatttggataatggataccctaa

SEQ ID NO: 779801 - DNA, 571 bp, Homo sapiens
ctgttggtgggaatgtaaatttgtaaaacctctatggcaaataatatgaggatttatcaaataactaaaaatagaactatcatgtccgcaatgaaactaccacatacccacaatagaactaccagatccagcaatcccactgctaggtatctacccaaaggaaaataaatcaatatatcaaaaatatacctgcacgtgtatgtttattgcagcactattcacaataggaaagatatggaattaacctaagtgtccatcaacagatgattggatatatcattcatcactatatacacacaaaggaatactattcagccataaaaagaacaaaatcatgtcctttgtagcaacatggatggaattataggttattatmgtaagtgaaacaaatgagacacagaaatacaaatattgcacattctcactcataggtaggagttaaaaaaatgtgtatacatggatgcagagagtagaatgataagacaatggagacttggaagggtgaggggatgtataatgagaaattacttaacaggcacaatgcgtattatttggataatggataccctaa

SEQ ID NO: 779802 - DNA, 509 bp, Homo sapiens
agtaactcagacttgtaatcccagtgctttgggaagcgaaggtgggaagaacttgagcccaggagttcaaggctgtagtgagctatgatcttaccactgcactccagcctgggtgacaaagtgagacactgaataaaaagaaaagactgatttatgaaagtaaatatatacttaaaatgtgtatttgcatgaataaaactgaaaaatgaaaacccaaaccttaaaaatatatttccaacatgtcagatgggaaatagccagtgaaaggacattcaatatccacttttccagagctttactgtrttttcaggagaaatttttctgcctagagttcaacagatgttaagaatagtgacattataaagttcgacttgatggccgaaaatcggcaattcaggataatgttgtctaaagagcaacataaattatttccttattatttggttggtgggtatcattttcagcaggataggttttaaaatccacaatgggaactttgtgtaaaaatg

SEQ ID NO: 779803 - DNA, 495 bp, Homo sapiens
cttcttgatattcaatccctggcagtgacagaatgaaatttagaataagatgaggaaagtgagcagtttatgtaagatctgtgtaatagaaggttctaatctacacagaacacagtaagaagaatttggaaaagcaaaatctaagaatggaaacaaaatagaattaagagggcatttagaaagtaaggcaaagaaagactaagataagggtggggagagaaggagagaccgtgaaaccaaagacataagtactgaagactacagttcttttgcatcatgactaagggccagaggtctgatttagrtgccacagcaaattttgaaatgggaacactgtagagtaaatgttactgagtaaattttacatatattctatgtatgaaattgaagtagttgggagaactagaactgataaggaacaatgtggagtccagggctccctgtgttttgtgaaatttaaattcaaatccaagccctatgtcatttgccaatctt

SEQ ID NO: 779804 - DNA, 631 bp, Homo sapiens
atgcattcgtcacgtagttctcatgccgtggttttcagctccatcaggtcctttaagtacttctcttcattggttattctagttagctattcgtctaatttttttttcaaagattttaacttctttgtcattggttcttacttcctcctttagctcagagtagtttgattgtctgaagccttcttctctcagctcatcaaagtcactctctatcctgctttgttccattgctggtgaggagctgcgttcctttggggkaggagaggcactctgatttttaacgtttctagtttttctggtctgttttttccctatctttatggtattatctacctttggtctttgatgatagtgatgtacagatttgtttttggtttggatgtcctttctgtttgttaattttccttctaacagtcaaaaccctcacctgcaggtccgttggagtttgctggatgtccgtaaactgtttgcatgggtatcagcagtggttgctgcagaacagcagatattggtgaagtgcaaatgctgctgcctgatcgttcctctggaagttttgtctcagaggagtacctggtcctgtgtgttgtcagtctgcccctactggggggtgcctccttgttaggccactcag

SEQ ID NO: 779805 - DNA, 582 bp, Homo sapiens
cactccctaatctcaagtgcccagggacacaaaacactgtggaaggccgcagggacctctgcctaggaaagccaggtattgtgcaaggtttttccccatgtgatagtctgaaatatgacctcatggcaagggaaagacctgaccatcccccagccygacacccataaagggtctgtgctgaggaggattagtaaaagagaaagtcctctttgcagttgagataagaggaaggcatctgtctcctgctcctccctgggcaatggaatgtctcagtgtaaaacctgattgtatattccatctactgagataggagaaaacccccttaacgctggaggtgagaagtgctggtggcaatactgctctttaatgcaccagatatgtttatgtatgtgcacatcaaaacacagcacattttctaaccttgtttctgacactgagacatttcttcacgttttcctgctgacccttcccccgctattaccctattgtcctgccacatctccctctctgagatggtagtgataatgatcagtaaataactagggaactcagagattggtgccggtgccggtcctccatctg

SEQ ID NO: 779806 - DNA, 582 bp, Homo sapiens
cactccctaatctcaagtgcccagggacacaaaacactgtggaaggccgcagggacctctgcctaggaaagccaggtattgtgcaaggtttttccccatgtgatagtctgaaatatgacctcatggcaagggaaagacctgaccatcccccagcctgacacccataaagggtctgtgctgaggaggattagtaaaagagaaagtcctctttgcagttgagataagaggaaggcatctgtctcctgctcctccctgggcaatggaatgtctcagtgtaaaacctgattgtatattccatctactgagataggagaaaacccccttaacgctggaggtgagamgtgctggtggcaatactgctctttaatgcaccagatatgtttatgtatgtgcacatcaaaacacagcacattttctaaccttgtttctgacactgagacatttcttcacgttttcctgctgacccttcccccgctattaccctattgtcctgccacatctccctctctgagatggtagtgataatgatcagtaaataactagggaactcagagattggtgccggtgccggtcctccatctg

SEQ ID NO: 779807 - DNA, 553 bp, Homo sapiens
tttgggaggccaacacaggaggatccctggagcccaaaagttgagaccagcctgggaaagatatggagacccctctttataaaaataatttaataatgccaggcatggtggtatgcagctgtggtacctgctacttgggagatggagggggagtcaaaatgtgccactacactccagcttgaatgacagagtgagaccctgtctccaaaaaacaaaaaaaagctgttcatttcaggcatgttaagtatattctcatkgttatgtaaaatacttctagacactttacatcttgtaaaactaaaactcaatacccattaaataacaactgctcattttaccctctctcaccctcgacagacaaaccttccactttctgttttatgatttgactacttaagatatccataatttgttactggattaattcaagtgacataatattctcaatgttcatcttaaaatgtgacaagattattctttttaagatggaataatattccatgtatgtatatgttacatatttgatgtgtttataaatcaagagacatctggg

SEQ ID NO: 779808 - DNA, 656 bp, Homo sapiens
ctgaagcacttgtactgcaaaagcaagaacagttcagtgcataaactgaacagtgcagtctgtagttgtaccttgctttctattacttcataacaattagtatagttatgtgtaatgtttgcagactacctgcattcatataaattaaacagtattttcttttctttttttttttttttttttttgagacagagtctcactcttgcccaggctggagttcagtggcrtaatctcagctcactgcaaccgctgcctcccgggttgaagtgattctcctgcctcagcctccagaatagctgggattacaggtgtgcccaaccatgcctgtctaaattattgtatttatagtagggatggtgtgttatcatgttcaccagcttaatcttgaatccttgacctcaggtgatccacccgcctcagcctcctaaagtgctgggattacaggggtgagccataaacagtattttctacaatagtatgagtacaaagctgcactacttactttgaattaatcacttaaatggttattttaatatcattatttacacttctgaaatataaaatgttttaactgaagtatagttttaatttttaaaactataattttaaactatacacatactatatacatactatatacattatgactagttcat

SEQ ID NO: 779809 - DNA, 584 bp, Homo sapiens
caatagcaaagacacggacaggcactaaatgcctaccaatgatagactagataaagaaaatatggtatggtcagatgttgtggctcatgcctataatcccagcactttgggaggccatggcaggtgggttgcctgagcttagaagtttgagaccagcctgggcaacaagacaaaatcttgtctccccggaaaaaaaaaatatataaaattgcccagktatggtaatgcacgtatgtagtcccagctacaagggaagatgaggtaggagagaattgcttgagcctgggagattgtggctaaagtaagccaatatcatgccctggcactgtagcctaggcaataagcctgtctccaaaaataaaataaaataaaagatttagtaaaaacaaaatatggtatataaacattacaaaatactgggtagctatttaaaaaaaatcatgtcctttgcaataacatagatgaatctggagaccattattcttagaaaatgaatgcagaggctggacatggtggctcatgcctgtaatgctaacactttgggaggccgaggtgggcgaaccacctgaggttgggagtttgag

SEQ ID NO: 779810 - DNA, 573 bp, Homo sapiens
ttaataaatatttgttacatagttttctataaacttgtggtttctctgcctgcaaacacaagagttttagttttaattttcatagagtgaaatatccacatattactctgaaggtaaaccttaggtgtaagaaaaatataaagtgagtaagtgtatttgtgagtttgckttggtacatattttcagaagaaaagcacaattattgaaacaaaacaacttattttaatttggtgaataacagaaaacaccttcaaaatgttgaaagcaaatctacactttctgctttgtattgaatttattaatgtaaaattttatagcttatgtttcaaattctttccagaatctgcctattgaagcacaggcaattttgtctccataaataacactcttgagtacaacaataaaagccctcttcaaacaaacaaattatttataacacttattttaatgaaaatgtaaccaaaagtatataattggatatatttttgttgttctatgtgtgtgcgaatgtataaattggtacataaggacaaaataatttaagccagaaaaaaagatgttagctaatatttg

SEQ ID NO: 779811 - DNA, 507 bp, Homo sapiens
ttttttccaagaatgtgtgatgtaaaatcacactcttatctttttgtttttgtggcagaagttgggtatttaaggttatgaaaaaaaagtctaggtctccttttagtagacaggtgatgatggaagcaaatataatagtacatggtatttggccacatttcaaatgggtgatagtgaacattcactgaagtgtcatagatggctcttatttgccaggtcaaatcttctttgcgagaaagtctcagccaactgttgtcaagcatttctggtggttcctagatacatgaacaaaacctcactagrctggtttactgagagcagaattaaaaacacccgggtgccaggttattaaaaacatttttacatttttacatttatggaaaaaaaaatgtgatgtggtgtgtggcttggtttgaatacatcttcactgagctaagtagctgattgaatttacctaacctgaaggaaaaaaaaagaaaaaagaaaaaacctacactgaaaaaacac

SEQ ID NO: 779812 - DNA, 607 bp, Homo sapiens
gccaagacaatcccaagccaagagaacaaagctggaggcatcacactacctgatttcaaactgtactacaaggctacagtaaccaaaacagcatgatactagtatgaaaacagagatatagaccaatggaacagaacagagcctcagaaataacaccacacatctaccaccayctgatctttgacaaacctgacaaaaataagaaatggggaaaggattccctatttaataaatggtgctgggaaaactggctagccatatgtagaaagctgaaactggatcccttccttacactttatacaaaaattaattcaaggtggattaaagacttaagtgttagacctaaaaccataaaaaccctagaagaaaacctaggcaataccactcaggacataggaatgggcaaggacttcatgactaaaacaccgaaagcaatggcaacaaaagccaaaattgacaagtgagatctaattaaactaaagagcttctgcacagcaaaagaaactaccatcagagtgaacaggcaacctacagaatgggagaaaagttttaaaatctacccatctgacaaagggctaatatctagaatctacaaagaacttaaaca

SEQ ID NO: 779813 - DNA, 596 bp, Homo sapiens
ctcattgatctaatattgatagtggggtggtaatgtctccctgtattattgtatggaagtctaagtctctttgtaggtctccaagaacttgtttcatgaatctgtgtgcacctgtattgaatgcctatatatttaggataggtagctcttcttgttgaattgattcctttataattattaagggaagagaccacccctaatattgtcttatacccaatttctgcctccaaagaaagaagaagtaaaaactaaaaggcagaaatgaaatcyacaggcagacagcccagcgccgtgccctgggcctggttaaagtatgacgcctgacctaactggttatgttatctatagattccagacattgtatggaaaagcattgtgaaaatccctgtcttgttctgttccattctgattaatggtgcattcagcccccagtcacataccccctgcttgctcagttgatcatgaccctctcacactgaaccccttacagttgtaagcccttaaaaggacaggaactgctcactcggggagcttggtttttggagacgtgagtcttgctgaagctcccagctgaataaagcccttccttctttaac

SEQ ID NO: 779814 - DNA, 435 bp, Homo sapiens
ggccctgcctacattgtgtattgtgacatatggctgggtccaccacctagttgatgtgactcttatgcgtgggttctatttacaggggtattaagatatattttttcattcatcccctaggtgatgtgcctcttctcttctgcctgggccctgccaataaaaggggattgtaatgaatcactggacccagaacctaggtgaggtgacactcctattttgcctgggccctgcatatttgggtattgtatcatatcactggactcaacacatargggataggaggcacatgcatgcgtcctgctcacagaaggccttgtgacatatctctgcatccattaccagtgagatatgactgtcctcttctacctgcaccctgcctatagagaagactgtaacatattgctgggcctactgaccagatgatgtgtttctttt

SEQ ID NO: 779815 - DNA, 517 bp, Homo sapiens
cacgggttcattccatattccattccattccattccattccattccattccattccattttccgttccattccattctattccttaccattccattccattccattcccttccatgccatttcactcgggtttattccattcctttccattccattcgggttgaatccattccattccattccattccattccattgaactcgggttgattccattccattccatgccattccatttcattccattccattccattccattccaatccattccattccattccgttcccttccattccattacattcggattgattctttttaattcscttacactccattacattcctttccattcgggtactttccattccattccattccattccactgcattctattgcactcgggttgattgattccattccattgcattccattccattccattcccctgcactcgggttgatcccattccattgcattccattccattccattccattccattccgttcc

SEQ ID NO: 779816 - DNA, 462 bp, Homo sapiens
gcgttgattccattccattccattcctttccattccagtcctttccattacattccactcgggttgattccattctattagtttccattccattccattcccttccattccactctggttgattccattcctttccattccactcgaatacattccctcctattccactcggaacgattccattccattccattccattccattccattccattccattccattccatttctttccattccattctattccgtatcattccattccrttccattccattccattccattccattcgtgttgattccattcctttccattccattcggtttgaaggcattccattccattccattccattccattccattgcattccattccattccattccattgtactcgggttgattccattccattgcattccattccattccattccattccattccgttgcattcca

SEQ ID NO: 779817 - DNA, 537 bp, Homo sapiens
ctctggttgattccattcctttccattccactcgaatacattccctcctattccactcggaacgattccattccattccattccattccattccattccattccattccattccattccatttcgttccattccattctattccgtatcattccattccattccattccattccattccattccattccattccattgtactcgggttgattccattccattgcattccattccattccattccattccgttgcattccattccattmcattcggattgattctattcaactcccttactctccattacattccattccattcgggttgttcccttccattccattccattccactccattccattgcactcgggttgattccattccattccgttccattccattccattccattccggatgattccattccattgcattcctttccattacattcccctgcactcgcgttgattccattccattccattcaattccattccattacaattcgttccattccattctattccgtac

SEQ ID NO: 779818 - DNA, 537 bp, Homo sapiens
ctctggttgattccattcctttccattccactcgaatacattccctcctattccactcggaacgattccattccattccattccattccattccattccattccattccattccattccatttcgttccattccattctattccgtatcattccattccattccattccattccattccattccattccattccattgtactcgggttgattccattccattgcattccattccattccattccattccgttgcattccattccattacattcggattgattctattcaactcccttactctccattacattccattccattcgggttgttccmttccattccattccattccactccattccattgcactcgggttgattccattccattccgttccattccattccattccattccggatgattccattccattgcattcctttccattacattcccctgcactcgcgttgattccattccattccattcaattccattccattacaattcgttccattccattctattccgtac

SEQ ID NO: 779819 - DNA, 572 bp, Homo sapiens
ttccattccattccgttccattccattccattacattcggattgattgtattcaattcccttacactccatttcattccattccattcgggttgtttccataccattccattccattctattccatttcgttccattccattctattcggtaccattccattccattccattccatgccattccacttgggttgattcccttcctttccattccattcgggttgaatccattccattccattccattccattccattccattccattcctttccattccattgcacacgggttgattccattccattcctttctgttccattccggatgactccattccattgcattccattccattccattcccctgccctcgggttcattacattccattccatttacttccawtccattgcattccattcaattccattctattcgggttaattccattccattccattccattccattccattccattccattccattccattccattccattccattccattccattgcaatcgagttgattccattccattccattcaattccatatgattccatt

SEQ ID NO: 779820 - DNA, 572 bp, Homo sapiens
ttccattccattccgttccattccattccattacattcggattgattgtattcaattcccttacactccatttcattccattccattcgggttgtttccataccattccattccattctattccatttcgttccattccattctattcggtaccattccattccattccattccatgccattccacttgggttgattcccttcctttccattccattcgggttgaatccattccattccattccattccattccattccattccattcctttccattccattgcacacgggttgattccattccattcctttctgttccattccggatgactccattccattgcattccattccattccattcccctgccctcgggttcattacattccattccatttacttccaatccattscattccattcaattccattctattcgggttaattccattccattccattccattccattccattccattccattccattccattccattccattccattccattccattgcaatcgagttgattccattccattccattcaattccatatgattccatt

SEQ ID NO: 779821 - DNA, 631 bp, Homo sapiens
acattggaatcaacccgagtggaatggaatggaaaggactggaatggagtggaatggaatggaatggaatggaatggaatcaactcgattggaatggaatggaatggaatggaatggaatggaattaacccgaatagaatggaatggaatggaatggaacggaatggaatggaatggaatggaatggaatggaatggaatggaatggaatggaatcaacccgactgcaggggaatggaatggaatggaaggcaatggaatggattcaacttgaatggaatggaaagaatggaatcaacacgagtggaatggcatggattggaatggaatggaatggaatcaacccgagtacaggggaatggaatggaatggaatgcaatggaatggaatcatccgtaatggaatggaaaggaatggaatkgaatggaatggaatggaatggaatcaactcgattgcaatcgaatggaatggaatggaattaacccgaatagaatggaatggaatggaatggaacggaacggaacggaacggaacggagtggaatggaatggaatggaattgtatggaatggaatggcatggtacggaatagaatggaatggaaagaattggaatggaatggaatcgaatgg

SEQ ID NO: 779822 - DNA, 638 bp, Homo sapiens
atcccttgctgcccagcattaggcttctttcctaagggttaaacagaaaccagcctttttacttgctccactgctaatataaaccaacctcctgacattgcccctccctcttgtggtttcctcacaaccaccaaccagcattccttcytaataggagaccaccagacacggagtggttctggccagtctacagaggatgcgcagtgaggcttttcatgtcctctgcttcaccttttgaggccagaggctcaaaaactccacccttggatcatgctaatactgccttttctctgtacatgcaacccataaaggggtaagaagctcaactgtgcatgtacatgtttctcctttcataaatattcatgactcctcctatagcttattgaaaatgtacatttcgccaccttattcagcataaatccctgtcttatttttctaaccctcaaagtatgttttctgatcctggccagcggctcttgctatacagtaaatatttatataaatacgtatctctccaattatattgtgacctccttgagaacagagaccatatcttatttatatttggagcccaagaatctaatgcagtgcctggcacataatagaatatcaatataagcttatgaaaagtgcaaaca

SEQ ID NO: 779823 - DNA, 587 bp, Homo sapiens
taataaagtgtcattttggaaaaggaccacacagtatcacatttttctaacttagtataatgcagaagatgagtttctctgtaggctaccactgcataggacatgtatccgagatatcattggggctccaatttccgtcaaaacataaactaatctacataaacaaaaaaaaaaaatcgctaaaatagcaagtatttctatgaataattcaccgtaaacactaaatcagtagtatcaggatgctaatttttagtgtcatatttgcgttrataaataggcacagtcttcaatcacaagtttcttctacatgtaaactaagagttaagaaagaaaaatagttaagaaagacaagttaaagaaacaatcagagaacaaaccagaaaaaggtaaaatatattttatttgggaacaaatagagctatctcatattacaaatagtccctattttacattacaaacaaaaattaattccagatggattgaagaccaaaatataataaatacaaccatataaacaggtgaagaaaacacagatgttgtttataaatttggggttggaaaggcaattctaagacacaaaatgttga

SEQ ID NO: 779824 - DNA, 608 bp, Homo sapiens
ggctcaggggcactcagccccatctctaatgcggtgtctccaggatgggaatcgccttcccctcacctgactcccgcgtccggccccgcaccacctcgctccacggcccagccccgacggcgttgaaggcctgcatctgcagctcgtaytccatccactcctccagctcctcgatggtgaattctctctccagccggtcactgacgacttgggccactgctgaggactggaggtctgagcgccagtacttaatcctgtagcccacggactcggggttcccgttgtactgagaatccggcaggggctaggaaggaacgaggagtcgcgatgagctgacatctcagaactgccaccctcacgggttgtaagggatgggcctgccctgtgaggccaactccgtggaggaggtgttcctgggggaaatagtcttagaaggatctactttattcttccctgaaacttttgttctgtgaattaaatgaaaccctgtcagtaactttggctgcatataatttcttttaatacattttggcttaattttgtgggcaaatgttctgattaaatatcaggctggctctcttacaaatattgagtattggttccatgtt

SEQ ID NO: 779825 - DNA, 621 bp, Homo sapiens
tgcctttagaatacctgtatgacagatgaaatataatagtggtgttcaaaaaaaaataatgaaagaaagaggcagatgttttaaggagctaaaagtagacacgcaagaatatacggtggttcacaagtttagagagtagtctagaataataaaaaattaaaaataacaacaaacagcataaataattttatatttattaggttattttatgataaaaattcttaacgaactagatatagaaagratgtacctcgacataatagagaccatgcatgacaaacccacagttaataacatactcagtggtggaaaaccgaaagctttttctctaaaatcaagagaaagcaagcatgcccactctcaccacttcttttcaacatgtattactttttgaatatttaggaattattttacagtgtggagattttgtaaaatacaaaaaaagttaagtaaaattaaaattaaattacaactaggattgtgttttgtgtttaggagtatacttttaattaatatttataaatgaatctaccagattaaaagacataattatagaatttaggcatttacagtgaacaaatgttctttaacatgttggaaaaaaagatgctacctgcataa

SEQ ID NO: 779826 - DNA, 571 bp, Homo sapiens
ataagaagaagttcattgttaatttggataactctgacttggcttcttcaggataacacagcacatagcatgtactgaaatagagggaattagtactgggaactagttacaagggttgggagagctgaaaagaaaaaaaacaagttggtgaggaagtgaagacctttgttacaggagaaaacaccaccatacatgggactggggaaccaaaggaagatgtggtgttaccggagcctcagagttaggcctgcttgatcccaagtagmtaaatggcagaggatctccagggaaactgggcccagggagcgaaaacctgtcccttgcggatgttgctgctggaagaggctgcctgaggaagagagagaagatgagctatatcttggcctctcatttccttctgccttcctatctattgccattgcctcctgatggctggacttatctgtcagccagctgacactgtggcctgggaaatgtagcttgctgtggaaatgtaagaaatatgtttttttggtccaaaaagcaagtaactggcatggccagcattaagagattttcagacatggtgaca

SEQ ID NO: 779827 - DNA, 611 bp, Homo sapiens
gcgcggtggctcatgcctgtagtcccagcactttgggaggccaaggtgggtggatcacaaggtcaggagtttgagaccagcctggccaatatggtgaaaccccgtctctactaaaaatacaaaaattagccaggcatggtgatcggtgcctgtaatcccaactactcaggaggcttaggtagaagaattgcttgaacccgggaggtggaggttgcagtgagccaagatcgcaccattgcactccagcctgggtgacaagagcaaaactccrtctcaaaaaaaaaaaaaaaaaaattcccttttatttcattattattttcttcttcactcaatcttatggataggccctaatgataaaatagggcattttcctggctttattaaacaagacccgtgataagatccaacaggcttagctcttagaaatgtatattggtggtttgagtatattgtctcatttaaaccatataactcccctgtggcataggtgctatcttttttcctattttacagaagaggaactgaggctctgcaaagggtaatcactatcccattgttgacttcaggcatgtggcagggcctaacactccttacatctctatatatagtga

SEQ ID NO: 779828 - DNA, 638 bp, Homo sapiens
aactaaaatcctgacaattgaaaaattatttggaagtttttacatggctactcagtgactgtaaaaacactacttgctttatacacatggatatttcctgccatatctggatttaatattggttcaaaatgagattcaaaatatcaagcatattctaacaccagagacattctggtgctcacaatgttcaaaagtctcgaatagtcaaatcaccattgagaagattccaattccctcagatttataactgatcctagaaagaaaacacgtattaatatacaaagaggctactttaattccactctttgggtatctgctgcaagcagaaacccagtgcatattgaatcataacttcaaccaaagttatgatacagatcttcagaatccagaaaacagcaataaggggcagrtcaactaatttactaggaaaaagtcattagttcttttggaatcaaactggaatatgatccagaaatgttaaaaaaaaataaaaatcagaccgtcttcaccaatgagcaactttatttaacacttgcacatttgttagtagagtgctgactacccacaccatggtggtcaatatttgtttcactgaactaacataacaggtaactatattaatgaaatttaatccatat

SEQ ID NO: 779829 - DNA, 658 bp, Homo sapiens
taggaaaaaagaattgagtttggttgaagcatgaaatatttaatagtgtctccaaattagaaaccctattttgtttcgcgctggaaatgccacgatattacctgggctttgcactcaaataagataaaatgcaaaggcagtcttgagattaaacacacaattacagccgttttctccagagagatggggagtgagacaggtttggggagtggaagtgattgagtttcatttttacgatatgcttaaaattatattatcattctctgccttgagggttggacttgagactgctgaagctacttaaccaccgaaaacggtgtcaaaatcagtgactccgcggaggcctattctcaggctctttaaaccgtcgtcttgggatgggcccagtgacaagcaaaaaactccgtaactttctctgcttgctaggacaaaagtattcggtggtttaggataaaaattaagctccaactgacacagtggatcctggcaacctctgccrgcacgtgtaatttatttacagggttggaaagttggcaaaatacatcatcaactcttacacaaacttctactaggtattaaatacccaaccctctgagaagtaattcatatagtccagcagcgttccaaaataaacccaatctccagtcctccggagagc

SEQ ID NO: 779830 - DNA, 629 bp, Homo sapiens
ccaagagttttgctcaaaaggaaaggaaaggaacgaaggcagtctctgaagagggaagtgggttgagaggtttgttttggtttgtaaaatggtagaaacatcagcttgcttacatggggatggggatgactcaacagaaaggaaatgctgatgatgaggagctatgtcttggagcaggtgacggggcctagtgcacagggccagtgtgacgctcacacaccccagaggctggccaggcaggaggacctgtcctcattttttaggtgaggaaactgaggctgaaaatggctaacctgtaccttcagatgtaggaatgcccaggtgttcctttctcacytgacaccttacttaaaaacctcctgtaaccccccagagggtgaggaatctgcattttaaccccttccctaaatgtttcttatgcacactgaggtttgataatcactgctctagacgagttgtctccaacttttttgatctcatatcccaatctggagaaaatgtattcattgataatttaactatgtatatataaccaaatgcattctaccacatgctagttatatggccttggggtgcaaggaagttctccgtgtctcagtttcctcatttgtaaaaaccacatatctcat

SEQ ID NO: 779831 - DNA, 636 bp, Homo sapiens
cagagcagtgagctggattgacaacagggcttctctgccaacccaaacccagttggcttttgaggccttgcatttgcaggtctctgtgaagtctgcctgcagcctctgatgctttgtttgacaatgtgccctgcaagactttccacctgctcctctatctccccttcccgacacaaacctcgagttttctctctttctatgccccacagcacccagytcagggctgggtataaaagcgggccgtgatctcccaaatgtagctgcccacagtggcaagagcgccctggagctgctgtggccctaccctactctctgctgggactggctgcagggctcaggcagcgtgggccctcccctaggcccaacatagccagactgtccccaggtctctgcccagccaggtcgctccagtgtcgggtacattactccctgagctggcaagcactccgtgttccccacaatctcatgcctataaaggcctaagtggcgccagtggaggtggaagccttgttccaatctgggtccccacaagccccccttcatttcccgagcccacactcagtttaggctcataagtgttatgtctttaacctcttgtccacaccatgcccacagaatttttgttgttgttgctag

SEQ ID NO: 779832 - DNA, 636 bp, Homo sapiens
cagagcagtgagctggattgacaacagggcttctctgccaacccaaacccagttggcttttgaggccttgcatttgcaggtctctgtgaagtctgcctgcagcctctgatgctttgtttgacaatgtgccctgcaagactttccacctgctcctctatctccccttcccgacacaaacctcgagttttctctctttctatgccccacagcacccagctcagggctgggtataaaagcgggccgtgatctcccaaatgtagctgcccacagtggcaagagygccctggagctgctgtggccctaccctactctctgctgggactggctgcagggctcaggcagcgtgggccctcccctaggcccaacatagccagactgtccccaggtctctgcccagccaggtcgctccagtgtcgggtacattactccctgagctggcaagcactccgtgttccccacaatctcatgcctataaaggcctaagtggcgccagtggaggtggaagccttgttccaatctgggtccccacaagccccccttcatttcccgagcccacactcagtttaggctcataagtgttatgtctttaacctcttgtccacaccatgcccacagaatttttgttgttgttgctag

SEQ ID NO: 779833 - DNA, 636 bp, Homo sapiens
cagagcagtgagctggattgacaacagggcttctctgccaacccaaacccagttggcttttgaggccttgcatttgcaggtctctgtgaagtctgcctgcagcctctgatgctttgtttgacaatgtgccctgcaagactttccacctgctcctctatctccccttcccgacacaaacctcgagttttctctctttctatgccccacagcacccagctcagggctgggtataaaagcgggccgtgatctcccaaatgtagctgcccacagtggcaagagcgccctggagctgctgtggccctaccctactctctgctgggactggctgcagggctcaggcagcgtgggccctcccctaggcccaacatagccagactgtccccaggtctctgcccagccaggtcgctccagtgtcgggtacattaytccctgagctggcaagcactccgtgttccccacaatctcatgcctataaaggcctaagtggcgccagtggaggtggaagccttgttccaatctgggtccccacaagccccccttcatttcccgagcccacactcagtttaggctcataagtgttatgtctttaacctcttgtccacaccatgcccacagaatttttgttgttgttgctag

SEQ ID NO: 779834 - DNA, 616 bp, Homo sapiens
acgactcaaaaacaaaaacacaacccaaccaaaaaataggcacaggagttgaatagacatttcttcaaagaagatatacaagtggccaagcacatgaaaagatgctcaacattattagccattaggaaaatgcaaatcataaccagaatgagctactagagaagctgaggtaggaagattgcttgaggccaggagttcgagactgcagtgctgatgatcacgtctgtgaatagccactgcactctagcctgggcaacatagtgagaccctatctccaaaaatttttttaaattttttaaataaataaaaacaaaacacartaaaatatcacttcacatccaataggatgatataactgaataaaaggaatgtctcaagttgaatgatgaggaatcataaaaaaaaatgagtgttggtgaggatgtggagaaataggaaccctcaaacattgctggtggaaatgtaaaatggttcagccactttgtattttttagtagagatggggtttcaccatgttggccctgctggtttcaaactcctgaactcaggtgatccaccccctcggcctcccaaagtgctgggattacaggtatgaggcaccacgcctgtctgattc

SEQ ID NO: 779835 - DNA, 506 bp, Homo sapiens
taaccttctcctttaaatcaagctaattaggtaactcctgtgcccacactggttttttccccctcactgataaaatgccttcaaatggctcaaaaatatacaaagtgtaagaaggactccatgacagcaacagggttgggtgggggatgcccagctctggacaggagaggggtgtgtgggagacagggatgccaacacctgacaacccctctctccacctccctccatcttgggtctccatgagaaggaytggtagctctgagtgagataatgtcactgtcctgggggacaatgcagacaccctggacacctcagctctccaggaacgggcacaatccggagatccagcccggagcagacaggggcaagagttccaagtccctctgaggctcgggatttctggattctgtggaaaagattatttgttccaccatgtggccagaaatagggaaagggctactggggaagtcacagctttggcttctgaaaaatcccacccccaaccc

SEQ ID NO: 779836 - DNA, 562 bp, Homo sapiens
cttccttgcatttggttagaacatgctcctttagcgcagaggagtttgttattacccaccatctgaagcttacttctgtcagttcatgaaactcattctctgtccagtttttttcccttgctggcgaggagttgtgatcctttggaggagaagaggcattctggtttcgraattttcagccattttgtgctggcttttcctcatcttcctggatttattaacctttggtctttgatgctggtgaccttcagatggagcttttctgtggacgtcctttttgttgatgttgatgctattcatttctgtttgttagttttccttctaacagctccaaccttttctttacagatctatagttgttaagatttagtcagatgtttaactaatcttgacattgctaagatccagattttggtgcattctctgagatttggataggagacaatctagaaattacatgcatttaagtgaaaatagcatacctaaattaagatgtagatgttgggatttcatcctaggacaatgttttccatgtctttgtgtctttgtttcttgatatata

SEQ ID NO: 779837 - DNA, 562 bp, Homo sapiens
cttccttgcatttggttagaacatgctcctttagcgcagaggagtttgttattacccaccatctgaagcttacttctgtcagttcatgaaactcattctctgtccagtttttttcccttgctggcgaggagttgtgatcctttggaggagaagaggcattctggtttcggaattttcagccattttgtgctggcttttcctcatcttcctggatttattaacctttggtctttgaygctggtgaccttcagatggagcttttctgtggacgtcctttttgttgatgttgatgctattcatttctgtttgttagttttccttctaacagctccaaccttttctttacagatctatagttgttaagatttagtcagatgtttaactaatcttgacattgctaagatccagattttggtgcattctctgagatttggataggagacaatctagaaattacatgcatttaagtgaaaatagcatacctaaattaagatgtagatgttgggatttcatcctaggacaatgttttccatgtctttgtgtctttgtttcttgatatata

SEQ ID NO: 779838 - DNA, 586 bp, Homo sapiens
acacagctcccagcctctgccagggttactcaagtaagaatgaatagccactctgcagggaactgatgagcgcccacagagagccctgagaggtgagcaggcattgcagcgctgtgatgtgggtcagacacacctctytgcccaccctgctgacggcccctcctcccgccctcttcacctcctcttgccggcaggcccatggaggcagattgtctgtcctggcctgagaatgtacctggcagggctggccgcggaagacccagtcatgcggggctggagtctgctttcctgtgaacgtcactgtctgcgtgcagaattacactgctgaggagcaagcagaatggatgatggaggctgacaggccacgagaccccagagcaatttcacctggttttgattcatggcttgtcagagcgctaaccaaatattccattttcattttcgccctccactctctcccattgactggcatcataattgaaaactccagcatgaagagctgggaccacctgtctgcagggccctcaattccgtctgctccgaatgtcttgctcctcaaagaggagggcagaggggaaaatcagca

SEQ ID NO: 779839 - DNA, 509 bp, Homo sapiens
aggctagacaccagcaggcttgccatgtaggcatgcttcctccctgaaaaagggcaaaggcaaaagatgtgttcatccttcctcttggagattctgatactgttcctgccttcctgcctcaggactgctcatctcttatctggtctagaacaggagcttcttaaaggagtatctcatccaatgtcactgttctccagccattccccacccaaagctgagggatattgctgatctgctcatgcctctccatgcttaaaataattccccagattccatcacttcaggatgaaatctacattgccccactggctgattcagtcttctcaacctgaccctggtcctttccagcttcccctctgccatgtgwcttcctgagtcacatcctcctagggaaagcacttgcagtaccaggagtgccactctctcacacccttgtcacttaagtcccatttccttcaatgcccagattgggatccactcattggaggagtcagaaccccttgcctcat

SEQ ID NO: 779840 - DNA, 612 bp, Homo sapiens
gtaattccatttgtttttttctggtaacctgtttaaaatttaaattgtatcttatttgatgttagtatagccaacccagctagcttttgcttgctatttgcgtggaatatctttttctgtcctttcacattaaacctttttgtgtctttggatataaagcaaacctcttatagacaattggatcaagttttaaaaaaataccaattctgtctttttcttttgattggagagttaaaccatttacatttaaaataattactcataaagagggacaaacttgtgttattttgccttttcttttctctatgtcttgtagtgtttttctgcctcatttcttccattactgccttttttgtatgtttagttgttttggtggtttgtgtttgtttgttgttgttgttgttgttgttgtttttgtagtgaaacagttcgatttcctttyaattttcttctgtatttaacatggagattacatttaacttcctaaaggtataacaatctaatttcaatttataccagcttaacttcaatgccatgtaaaaactctgctcctaatgactccatctctccatttttattactactgtcacaaattgcaacttggtatgttgt

SEQ ID NO: 779841 - DNA, 601 bp, Homo sapiens
aaaaagctactcttttcggctcaggctagctgaggccaggtcatttcagccctggctgccccagtgctaaccaggtcattgagcagcgggaggctggaactagagtttgtggttgctaccatcttgtgtccccttctcccatttagtggctagaagcacactgggaaactgtyttttagcaatttttatggggcaggtgtaagtgtcacaaactccttcagcttttttctgcgaatgtcttaatttcaaccctaatttttgaaggacagttttgctgaatttagaattcttattgcaagatttttcttttagccccttgaatatatcagctcattgccttctggcctctaacgttttggatgagaaattcgctgataatcttatcgaggatctcttatatgtgacaagttacttgtggtttttgagattttcgtctttggcttcctacattctgattgcattgtgtatcgataggggtctttttgagtgtatcttccttggagtttgttgaacatcttggatttgtagattcatgtctttcatgaaattggttatttatttagttagttatttaagtattctgtctttccatttttctttg

SEQ ID NO: 779842 - DNA, 621 bp, Homo sapiens
tatataatatgtatttttaatggacagggtcttgctctgttgtccaggttggagtgcagtggttcagtcacagctcattgcagcctcgacttcctgcactgaggtgatcttcctgcctcagcctttcaaaatagctaggactacaagagcatgccaccatgcccagctaacttttaatttttttaaattgttttgtagagactgggtcttgctgtattgcccaggcagatctcaaactcctggcctcaagcagtcctccttcctcagcctcccagattgttgagattacatgtgtgagccactgcacctggctcatattgttttgattactgtagtcatgtaatgtattttggaattaaaaagtgtgatacttccaactytattcttactcaagattgttttttgctatttggggccttttgtggttctgtatgaattttagggctgttttttctatttttgtaaggaatgccattgaggctgggtgtggtggcacacgcctattattcccagcactttggggaggccaaggagctaacttctgatagcttgagctcagaagttcgagactagcctgagcaacatgctgaaaccctgtctgtaccaaaaatacaaaaaact

SEQ ID NO: 779843 - DNA, 614 bp, Homo sapiens
tttaacaaggtcatttcatacctagagaaaccccatagaattctataaagaagttgctgcaaaatacattaactcaataaatatttaaactaattaaaactgtcatccataataacaaaataaaaacaaaaaacctaccattgtttacctaaaacaagaaagaaaaaaataattatttaataagtgggacacttacccttttttccatttccaacagtgatctatcagcaaatctttcttgtctctgcaacaaagtaagaaattataaaagagataagtgcaaaaaagttcaggggtgaccacagtaattctcttttaataggtattaaatcacaatattcaagtggagtaaaacacaggttcgtragtaaagcaaagagaaaacaggatttgtattaaaataataaagagtgcaatgaatgtttagaaatagaatggtaaccagagctctcattttatgttctctatcacttttccccaggaactttcatagtttagttgggcgtgagggtgagtgagtatgtggaagaaaaacaaaaaaaaactgtagctttccttctgaagctcaaattctttcctttcctacaccatcaggagtggctaatcagaatggt

SEQ ID NO: 779844 - DNA, 627 bp, Homo sapiens
caagaccgtattatttgagagaaagtctcgaacgctgctggctaaggggaaaagtgcgataacttgtgatgattcagggaatgactagacaggatgggaaaatacccacgtgtctcttttcctagtcgctgctcccttttcagatgtactagggcagcgggcaggagaatagaaagacctgagacaaacccagcaccctccttctaagaaaactgcggtgccctggtgaaaagggttggctaagaggaaggacttactagtatcttagggttgcgggagaaaaaactcagttcgacagtttattgtattggcgattccagtcttggagttttccccttaaccctgtctctgcctctcctctttacagagaatgaatttagcagcaaagctccctaccaaagtactaacgctgcactgatgctaatttgagatgagctggggcagtgattgtctctrttttttcattattaacatgccagaggcttatcctctgatgcaagtcatctgaaatttctggatcagagcggggtgggctgtcactgacgcacctaagactgacctttctatatccaagtaatgtcagggcacatcattgtgggaggctacaaatgccaggtctccattttg

SEQ ID NO: 779845 - DNA, 635 bp, Homo sapiens
aattcttgtcctgagaaccaaaatatatatttgatgaaatagttctcttcttttactcattctgaagtcattggaattgaatttggcatatgatataaatcctaattttatattttatgatattcaaaatttctaacaaatatttacttaataatctaatccaggtttctattgtttcttctgtttcctttataatgctttttctgaagttatttttcctagacttaaatattagtataatattatcatagaggaaaaaatatctgttagctatgaataaaaggctttcatcttattgttgcattaatatatttaaatgtagagagcatacagattagcaaagaaaaagtataattgcctttttttatagttgacatgaacatgtataaagaaaarccaaaaaaatcaataaaacaactagaacttattagtgaatttagcaagatcatagcatacaaagccaagattcaaaattccattttatttatctactaacaaaaactatttgaaatttgaaaatttaaatatgccatttacaataacatcaaaatattgaacaataaagtatttaggaatttataaaatgaaatctcctataccaggaattacagaccattgctgaaataaatgaaaga

SEQ ID NO: 779846 - DNA, 524 bp, Homo sapiens
tcatttcttggttctgccatcacaacatcctttaccaaaaactagcagatattccctcccatgacgttttctactttcagctaacaataatagaataataggtcattagtttcaaaatgtggcccacactttgggattctttccctcttatcactgtctcctatttttcacataactcatttttctctttcataacatccttgtagtaccttagttctttctggaactcatttaccactctatttaattagatgygattgccagcctatgtgactatattgcctaattaataaatagcctatattcattaatttgttcattcactccacaaacatttgttaaaactcaacacgtaaagaatatgacaaaaattctgcactcatggacttacattacaggtggggagatgcttcacacacacacatacacatgcttcacacccacacccacacacaagagtatataggctaggagagtaggatacagacagggtgggagctgagactgttctaaccactatgagt

SEQ ID NO: 779847 - DNA, 568 bp, Homo sapiens
taattatatacacaagaagttgcaaagatagtacagggaggtcccttgtatccttcatccagtttcccccaatgattatatatcttataaaattatattatatatcaaagccaggaatacaatattgatttacattaatagattgacatatgtggattcatgtgatggccatctcattcaaaatacaaaactaaagatctccctcttcctatagtcacactacctctctctctcctycatccttagcccttagcaatcactaatctgttctctgtttctttaattttgccatttctggaatgttatataaatggaattatacaaaatttgaccttctataactgtcttttttcactcagcataatacccctgggatccacccaagttgatgcacgtatcaatagtcatttctttatattgctgagtagtagtccatgatatagatgtatcagaatttgtttattaactggcctattaagggatatttttggttgtttcctttctttggctattaaaaaataaagctgctatgtacaggtttttgtgtggatctaatgtgatttgagaa

SEQ ID NO: 779848 - DNA, 616 bp, Homo sapiens
aaaaaaaaaagaaaagaaaaaagaaaaaaaaaacttcattatgtatgtattcgtgcagaactttgagaagaatgtttataacaagaaaaatataatggcaaagcatcgtggcaaaaagaaaaaaaagaaaaagaacacagaaaataattatgcaattttgttaattctgagaccaaagcaagctgttctggggagcaactyaggggaaatcccttaaactagcttctatcactgtctaattaaattcaacatgatttcttatagatcatgtagtaggataaatataggtgagataccaaatgaacataatacatgattccttcagttctagaaatgtttaacagagtagtttaagaggatttcatgaaaagtaaaaagaatatataacagtagactaacactttttttttttcaggaaagggaaccacatgagcaaatagatgtggcctgagcagggcataattgagatacgtggaaagatcagtttggttgcagaaaatcagcccctgcaccatagtatgagataaatgtttagcatccaaatataaagtacttttaatatcaatttaaagcagagcatttcttttattttaaaaaatagggagttattaaagat

SEQ ID NO: 779849 - DNA, 609 bp, Homo sapiens
aatttacattcccaccaacagtgtgcaagggttcccttttctccacatcctcgccaacacttatatttgattttttgataatagccattctaacaggtttgaggtggtatttcattgtggctttaatttgcattgccttgataattagtggtattaagcattttttcatatttctgttgaccatttaaatgtcttcttttgagaaatgtctagtcaggtcgtttgcccttcttttgattggtttatttgttttcttgctgtttgaggtccttatatattttggacattaaccccttatcagatgtatagtttgcaaatattttctccccttctgtagattgcccctttattttgttgattgtttcctctcctgtgcagaagctatttagtttgatataatcccattmgtctatttgcttttattacctgtgctttttgggtcatatccaaaaagttattgtcaagaccatgtcataaaatttttatcctgcattttattctagattcataattttgaatcttatatttaaatctttaattcattttagttgatttttgtacatgttgtgagatagagtatagtttcattcttatgcatgtggatatcca

SEQ ID NO: 779850 - DNA, 582 bp, Homo sapiens
tttttgctttcttacccggaggaggagagggacctgtctctcacattgctctgcatgagacatagctttgagctcacttagagctagcccatcactcttagtccatcctaatttcctccccaccctgaattttgtaccctaatatcgcaacaaaagctctaaatctagaattcygtatgacttgaagatctcatcaattatattactccaagttgcgtcatattttcttggttacaacttcatcaatctcataaatcttagaatattcctacacattgcatttactagacataaatactaattaaatgtggaccccaaagaaggcatcaggttgcattgaatgtttgggttcccccatttccaactactacccatagaaggggagtcacagaattatatcttctaaattaattaatcactttgagtttttcagcaacacttcagccacatcttgtcaaagctaaaatcagcagccttccaaaaccatgaacacaacttgactgattttgacagtccatttattaattgctgccaaactgtaattgttattgcattaacatcgcctatctgcagaagagcagc

SEQ ID NO: 779851 - DNA, 582 bp, Homo sapiens
tttcattcattcactatatatttgccaaataatccccacatgccaggcactgttctaaatactacaaatataaggataaataagatacacacatggctcctgcaagttaatggaatagtcaggattacctttacaacccagttcttctgacacctatatttgtgcgatgcaaattaagagtgttttgtgaccttcaaaatatttggggtgctttgcttatcattttactattaattacaraattaaataaattttgacaatcaagtttcagatgagcttttttgctttgtggatattactgaagcgaacaaagctctatgaattgtggaatgataaaatattcacagaaacttacaactctgcagttgaataacaattacatttgttccaaacaggcaattggtttccaaacacattaaacaaaggcaatttagaaagcttcttcttcttcctggcatcattaacattgttgaacgtcctgggattctgcagtgtttcacaaaggtaagtaagtgtgtggtaagatgaaaaatttctgagtccatgaaatattggtctgggaaccatcactgagccagggaa

SEQ ID NO: 779852 - DNA, 582 bp, Homo sapiens
tttcattcattcactatatatttgccaaataatccccacatgccaggcactgttctaaatactacaaatataaggataaataagatacacacatggctcctgcaagttaatggaatagtcaggattacctttacaacccagttcttctgacacctatatttgtgcgatgcaaattaagagtgttttgtgaccttcaaaatatttggggtgctttgcttatcattttactattaattacagaattaaataaattttgacaatcaagtttcagatgagcttttttgctttgtggatattactgaagcgaacaaagctctatgaattgtggaatgataaaatattcacagaaacttacaactctgcagttgaataacaattacatttgttccaaacaggcaattggtttccaaacacattaaacaaaggcaatttaraaagcttcttcttcttcctggcatcattaacattgttgaacgtcctgggattctgcagtgtttcacaaaggtaagtaagtgtgtggtaagatgaaaaatttctgagtccatgaaatattggtctgggaaccatcactgagccagggaa

SEQ ID NO: 779853 - DNA, 645 bp, Homo sapiens
tgaattcctcctctgccacttcctagccatgcagcactaggcaaatcatttaaactctctgaactgttcttcatctgaaaaaatggagattcttctgaatatttattatatgcccactatgtgtcagatgctgttctaggtgctgggggtctacttgtgattaagagtattaagctcggacgggtgcggtggctcatgcctgtaatcccagcactttgggaggccgaggcggacagatcacgaggtcaggagttcaagaccagcctggccaacatagtgaaaccgctgtctctgctaaaaataacaaaaaaattagcagggcatggtggcgcgtgcctgtagtcccagctactcragaggctgaggcagaagaatcgcttgaacccaggaggtggaggttgcagtgatccgagatcccaccaccgcactccagcttgggcaacagagtgagactttgtctcaaaaaaaaaaaaaaaaaaaaaaaaaagactattaagctcatattcttctaagggagagaagagacataacaaacacataaacacaggtgatgaatgccacagggaaaacaaaacagcgcgatgtgacaaagtgggtaagaaagcccacttcaggtggtcaaggcaggcctccctgtgaaggtga

SEQ ID NO: 779854 - DNA, 581 bp, Homo sapiens
gactgtcatagagaccattgtttttttgactacagtgcaatgaaatttgaaatcaacaatgaaaagaagttaaaaataataattacaacatatttggaaactagtaaaaaataccttctaaaacatggattaaagaggaatctacaatagaaatgataaaatatttagaagtaaatgacaatgaaagtttctcctatcacaacctgcgagagctggtccagaaaacaaaacaaaacgctgttaagaatatttttgaggtaacgaaccaaatttgaacaagatctgtagattagataatagtattatattacatttsctgattttggtaattctactttgtagtaacagaatgtctttgttcttagaaaatatacacaaaatatttagggataaatattttgaaacttattctgaaatggatcagatgatgatgatgatttgaaacttatttctgaaacttattctgaaaggtatcagatgatgatgacgatgatgatgatgatgatgatgatgatgatgatgatgatggtgatcatatccagagagaagcaaagtgaatgtggtaagttatcccaaaatgg

SEQ ID NO: 779855 - DNA, 725 bp, Homo sapiens
caccatgcagtttgcaatctgtttcattgttttaaattttagatacaaattaaaaactccttatggtcaaataggatggaaataattcacattttgtttcttcgtctagaagaagcaacagtccagctgttaaagcgtaggccatagcattgctatgttattattgcttatttcgaaactgtttacatgcaggaatgtgtagcatcccacaggctggaaataaaaaatgtgctgaagggagcttggatgaatcccacctgtctcaaacttactttgcaaaggaatgtctgtgacggggtccacctatgtcagcggcaacagcaactttagtaattgtttagagcttgcaargaagagtgttttatcagtgacactgtttaaaaattgtcagcatttgatgataataagcagcagactgacttggagtcagttttattattgtctttaaattctcaccccattactgcctgcacttgctctctctcacctccctgcccattatacaccactgtgggtggaccattacaggggaagctggtgatacacattaactccaggaacactgtactggagacacagcagagggaaggacacgtggtattatctatccgaaagatcaacaaagatgaaaaaagacagcttcctactagggaagtcttagtgtggctcattgttatgccaatgccctgtgttcaggatccagcaggaaggttgtgagcccaggg

SEQ ID NO: 779856 - DNA, 505 bp, Homo sapiens
ctgtaatcccagctactcgggaggctgaggcacgagaatggtgtgaacctgggaggcagagcttgaagctagcagagatcggccactgccctccagcctgggtgacagagagagactctgtctcaaaaaaaaaaaaaaagaattgtctattttgttaatacaaaataggtatgttgaattgtttgtcacagaaaccaaaaaatccacataaatctcttttttcctgtaccctcaccttgcctgtttcctattctccactaaatgcttyaactcttcattttgcctggcccttgcacccaagcatggctgacagaaaatcctaaaggcccaagattctatagtggctgtttgcaagggagacgaggctataagtaactgccacactggatcctcttatgtgagaagaaagaaagaaagtatcctgaatgcctctcacatataaaagagcaggatggcagggtgtctgtgtggcccaaggagccagaggtagcaaactgtgggcaaa

SEQ ID NO: 779857 - DNA, 589 bp, Homo sapiens
ttgcaccaactgcacaagttactagtttctagtacattcctagagttatgcaacagtcatattttcatcaccccaccccccaaaaattgcgtgcattcctctctccattccccagcccctggcaaccaccagctgctttctgtgtctatggattggcagtttctgggccccttatatgaatggaatcgtatggcatgtggcctctgtgtctggcttctttcacttagcaaaatgttctcatggttcatycactatgtaacctgtggcggtgctttattccctcctatggctaaataacgttccatcgtagagatggaccacattttctaatccattcatctgttgatggacatttgtgttatttccacctttcggctattatgaataatgctgccatgaccatttgtgtatgagtatttgcgtaaacatgtcttccagttctcttgagtgtctatctaggagtggaatagctgagtcatgggataattctatgattaactttttgaggaactgcccaattattttctctatcggcatcaccattttacattcacaccaacaatgaataaaggatccagttcctccatat

SEQ ID NO: 779858 - DNA, 589 bp, Homo sapiens
ttgcaccaactgcacaagttactagtttctagtacattcctagagttatgcaacagtcatattttcatcaccccaccccccaaaaattgcgtgcattcctctctccattccccagcccctggcaaccaccagctgctttctgtgtctatggattggcagtttctgggccccttatatgaatggaatcgtatggcatgtggcctctgtgtctggcttctttcacttagcaaaatgttctcatggttcatccactatgtarcctgtggcggtgctttattccctcctatggctaaataacgttccatcgtagagatggaccacattttctaatccattcatctgttgatggacatttgtgttatttccacctttcggctattatgaataatgctgccatgaccatttgtgtatgagtatttgcgtaaacatgtcttccagttctcttgagtgtctatctaggagtggaatagctgagtcatgggataattctatgattaactttttgaggaactgcccaattattttctctatcggcatcaccattttacattcacaccaacaatgaataaaggatccagttcctccatat

SEQ ID NO: 779859 - DNA, 589 bp, Homo sapiens
ttgcaccaactgcacaagttactagtttctagtacattcctagagttatgcaacagtcatattttcatcaccccaccccccaaaaattgcgtgcattcctctctccattccccagcccctggcaaccaccagctgctttctgtgtctatggattggcagtttctgggccccttatatgaatggaatcgtatggcatgtggcctctgtgtctggcttctttcacttagcaaaatgttctcatggttcatccactatgtaacctgtggcggtgctttattscctcctatggctaaataacgttccatcgtagagatggaccacattttctaatccattcatctgttgatggacatttgtgttatttccacctttcggctattatgaataatgctgccatgaccatttgtgtatgagtatttgcgtaaacatgtcttccagttctcttgagtgtctatctaggagtggaatagctgagtcatgggataattctatgattaactttttgaggaactgcccaattattttctctatcggcatcaccattttacattcacaccaacaatgaataaaggatccagttcctccatat

SEQ ID NO: 779860 - DNA, 589 bp, Homo sapiens
ttgcaccaactgcacaagttactagtttctagtacattcctagagttatgcaacagtcatattttcatcaccccaccccccaaaaattgcgtgcattcctctctccattccccagcccctggcaaccaccagctgctttctgtgtctatggattggcagtttctgggccccttatatgaatggaatcgtatggcatgtggcctctgtgtctggcttctttcacttagcaaaatgttctcatggttcatccactatgtaacctgtggcggtgctttattccctcctatggctaaataacgttccatcgtagagatggaccacattttctaatccattcatctgttgatggacatttgtgttatttccaccyttcggctattatgaataatgctgccatgaccatttgtgtatgagtatttgcgtaaacatgtcttccagttctcttgagtgtctatctaggagtggaatagctgagtcatgggataattctatgattaactttttgaggaactgcccaattattttctctatcggcatcaccattttacattcacaccaacaatgaataaaggatccagttcctccatat

SEQ ID NO: 779861 - DNA, 634 bp, Homo sapiens
accccactctcggtgatggacagatcatgcaaacaaaatcaacaaagaaacactggagttaaactatacactaaaccaaataggtttaactgacacttataggacatttcacccaactgctgcagaatacacattattttcatcagcatatggaacagtctccagaatataccatatcttaagcctcaacaaattcaaaaaggtagaaatcacatcaagtattttctaaccacaatggaataaaactagaaatcaataaaagaggaaactcagaaactgcacaaacacatggaaattaaccagcatgctcctgaatgatgaatgtacaatgaakaaattaagaagttaataaagaaatttaaaaatgtgttgaaacaaataaaaatggaaatgcaacataccaaaagctatgggatacagcaaatgcagtactaagagggaggtttataaaaagaaacacctacaacacaaaagtagaaagacttcaaataaataacccaacaatgcacctcaaggaactagaaaggcaagaaaaaaatgcaaaattaatagaaggacagaaataataaagtacagagcagaaataagggaaaatgagactaaaaaacaatacataagatcaataaaatgaaaa

SEQ ID NO: 779862 - DNA, 645 bp, Homo sapiens
agaccccagctcctctctgatattggatcctgtcccgcctccccagctgtgctgacctctgaagcaggagcttcggaatgtcctgggtttcttggctcctgcagagccccagggtccctgataaatgtctggcaatggtggtgcrcccggtaactgttcacccactcccataaatatgccgtttactgctgaattataaagggtgtgggaacgagagagtttcaaatcacttctcattcttatggtttgaatacattaccaccatgatctaattaggcttgtatttcatgcagagaccacacttcaaagtaaaattaaaaaataattctactatgagaggaaatgaatgtttctaatataaaatttcaaccgctgtgcttggcaggcagggaagcatgcagagcctcgttatcctaattgaggaagccctggaaaggagagccattaagagaagtgacattttcctggacgtctgtcctgagagctttccatccctcccagatgctccgggtctctgagcaccccagcctgtgggttctgacaggacgtgggtggggacgggacggggcctcaggcaggtgccccagccccgtggaggggagcagtggtggggcggtggggacttgctcagaccctccttttcct

SEQ ID NO: 779863 - DNA, 645 bp, Homo sapiens
agaccccagctcctctctgatattggatcctgtcccgcctccccagctgtgctgacctctgaagcaggagcttcggaatgtcctgggtttcttggctcctgcagagccccagggtccctgataaatgtctggcaatggtggtgcacccggtaactgttcacccactcccataaatatgccgtttactgctgaattataaagggtgtgggaackagagagtttcaaatcacttctcattcttatggtttgaatacattaccaccatgatctaattaggcttgtatttcatgcagagaccacacttcaaagtaaaattaaaaaataattctactatgagaggaaatgaatgtttctaatataaaatttcaaccgctgtgcttggcaggcagggaagcatgcagagcctcgttatcctaattgaggaagccctggaaaggagagccattaagagaagtgacattttcctggacgtctgtcctgagagctttccatccctcccagatgctccgggtctctgagcaccccagcctgtgggttctgacaggacgtgggtggggacgggacggggcctcaggcaggtgccccagccccgtggaggggagcagtggtggggcggtggggacttgctcagaccctccttttcct

SEQ ID NO: 779864 - DNA, 645 bp, Homo sapiens
agaccccagctcctctctgatattggatcctgtcccgcctccccagctgtgctgacctctgaagcaggagcttcggaatgtcctgggtttcttggctcctgcagagccccagggtccctgataaatgtctggcaatggtggtgcacccggtaactgttcacccactcccataaatatgccgtttactgctgaattataaagggtgtgggaacgagagagtttcaaatcacttctcattcttatggtttgaatacattaccaccatgatctaattaggcttgtatttcatgcagagaccacacttcaaagtaaaattaaaaaataattctactatgagaggaaatgaatgtttctaatataaaatttcaaccgctgtgcttggcaggcagggaagcatgcagagcctcgttatcctaattgaggaagccctggaaaggagagccattaagagaagtgacattttcctggacgtctgtcctgagagctttccatccctcccrgatgctccgggtctctgagcaccccagcctgtgggttctgacaggacgtgggtggggacgggacggggcctcaggcaggtgccccagccccgtggaggggagcagtggtggggcggtggggacttgctcagaccctccttttcct

SEQ ID NO: 779865 - DNA, 643 bp, Homo sapiens
aggctagcatataaagggttttaagcaagagagagacaaagtacaagttacatcttcaaaagagcattctgactgctctatggagaatgaatttttgtgggatgagagtgaaagcaaaacgaacacataagaggtagttttagcagaatgacaagaagtgatggtttgaacctggcagttgtattagaaaaggaaagaaagaaatagaataaagaaagtttctggtaatatcatccacagggctattgtttgattgaatacacaaaggcagagcaataaagaggaaaataaaccaagattggttgctaggtgtttaccttgaacckctgggaacatgctgatgccaagtattgagctgagcaatctttaaaactagattatagtagaaataaacagatctgttttgcacagaagtttgagaggtttattaaatattcaagtcaatctagggttctaatgagttgtccagtgagtagcaaggactagagttataaatttcagtcaatggactacatacagtttatacaatttatgacaggatgaaaatgtccatcccaaaggatattgatgcactaatctctggaacctaagaatgttatcatatacagcaaaaatttaaaaagatgtcattgcatttttcttt

SEQ ID NO: 779866 - DNA, 638 bp, Homo sapiens
ttgattgctcatttactgtgtgtcagtgtactctaccatgaccaggtcagagtgatgcacaagataaagcccctgccctcattcttctacctgctcatggagtctggcccctcgtcatttgccttgcatctaacttatagtcattcagctgatcagtcaatatctctatatttttatttcaaaatcccactaggagacatataatttactaaaacacatgcacacaaacacacgagttagtatataaattaatgactcttggatcaggtgcaatgccatatcagataagtcatagacagyaaaatctgcatggatactgaaggactttcctcatagtagaagttgtaggtaaaacaggtctcatggaagaggttaaatgtgaataggtggcataaacataaatagtgtatctacattataatatattctacttttaaaacttccccaaagactaagggtatgacctaagtgttggggctcagaaacagatacctgaaaataaatttgtatgccatttctcccatcaacgtgccttttgtcagtcagttgactttcagtgacttttagagggcaaaggtaaaattttcccatggcacataaagttttggcactctgagcagtataccaaagctgctcta

SEQ ID NO: 779867 - DNA, 396 bp, Homo sapiens
tctcaaatctacacttgattgacatggtttatgctgaagggtatgcctatctctcttcctgtctcattcttcacttttaacccttgacatctgggtcccagttctgacaccgtattatagcagctcttctggaggacaccagtggtgctttataaatcaatctattcttaactcttaattatcttgaattttggctgaatctracactattgattcttcctcctttcccacagcccttacacacctctcgctactccctgtctctgtgaaactctatcctcctttggctctcattacatttcactctttcagttttcccactattattctgactgttccctcagtcccctgaactgattctttgctcttccttcttggtctgaggatgcttgtttc

SEQ ID NO: 779868 - DNA, 603 bp, Homo sapiens
cctatcctcctcccaccccacaaccactatcctgactccaatcatcatagatttgactattcttgattccatataaatggattaatatattggaatagaatcatacaatgtatgtactcttttgtgtctgacttctcgcactcgatgttatgtttttgagattcattcatgttgttgtatgtatcaatactttattctttttttattactgagtagtattccacatagaagcatgccacaatgtgtttgttttcctattgacgaacatctgggtgttgccagttttctgtttgaatattttgtgcaagtcaytttgtggacatacgtatcattttccttgaataaatactttggcatggaattgcagggttataggtacacatgtatagacaggtatctaactctattagaaactcagttttcaacagcggttataccaatacgtacttctaccaggaaatataagtattgcagttgctcatcatcctcatcaacctttatatttacaccctatttaattttacccatcctgaaaatgttaatggtacctcattatggttttcatttatatttacctgatgtttaatgatgtttcatgagaag

SEQ ID NO: 779869 - DNA, 618 bp, Homo sapiens
ccagtctgtgcagatattttgctctgtgaatgcaagtttccaaaaagatttcccaaaggcaggtagagcaagtagaaaaccacgaaggcaactgccctccatattgaaagatcccatctgggttgctatggccaagtgagagagagatcaatgacactctttctgggccattcctgaataagaaatcatgtcaagttgccctcaaacaaatactttctataatgaagctttcctgaaatttgagttattttcttggtggttgtcctggattaccactagcatgcttacaggaatctagtttgaattcatgtttatttaaactaaaaagctttggcacagcaaaagaaactatcaacagagtatacagaaaacctacagaatgggggaaaatgtttgcaaactgtgcatctgacaaaggtctaatatccagaatctataaggaacttaaaccattcaacaaacataaaaccaataacyccattaaaaatgggcaaaagacatgaacacacacttctagaagacatacaagttgccaatgaacatatgaaaaaatgcccaacatcataatcatcagaggaatgcaaatcaaaaccacaatgagataccatctcacatcag

SEQ ID NO: 779870 - DNA, 583 bp, Homo sapiens
aagaaagaggtgcattttttccaatcatgagctcagcagtttcctgcagagtataataaaggggaaggaaggtgttgactactgcaagctgggtggggaaaggaggtcccagtgtgtagacgtgagatccttataggtgagatagaagcatagaaaggtctctctctctctctctcaagacagggtctggctctgttgtccaggccagagtgtggtggcacaatctyggctcactgcaacctctgtgtcctgggctcaagccatcctcctacttcagccttctaagtagctgtgactacaagcacacaccaccacacctggctaatttttgtatttttagtagagatggggttcaccatgttgcccgagctggtcttgaccttctgagctcaagtgatctacccgcctcggcctcccaaagggctgggattacagatgtcagccaccacaccctctaggcctcatgttttgaggtcaggcacacttcacgttgcccgctggctatcccagagaagttaccaagctttttggaagctcaaactcttcattagtaatgctactgaggattcttttttcagagagc

SEQ ID NO: 779871 - DNA, 586 bp, Homo sapiens
gtcagatgggaaacgttgagagggtgtagccacgttttgcttccagcacttatagctctgtgggaatgtgagaggcgtgtgaaccagagcaactccatcttgaacaggggccgggtaaaatgaggccgagacctactgggctgcattcccagacagtgaagacattctaagtcacaggatgagacaggaggtcaggacaagacacaggtcataaagaccttgctgataaaacagtttgcggtaaagaagccagtagaaacccaccaaaaccaagatgaccacgagagtgacctctgggcgtcctcactgctacactcccagcggcgccatgacagtttacaaatgccatggtaacgtcaggaagttaccctatatggtctacraaggggaggcatgaataatccaccccttgtttagcatatcgtcaagaaatcaccataaaaatgggcaaccggcggggcacggtggctcaggcctgtaatccaagcactttgggaggccgaggcaggcggatcacgaggtcaggaggtcgagaccatcctggctaacacagtgaaaccccatctctactaaaaatacaaaaaat

SEQ ID NO: 779872 - DNA, 543 bp, Homo sapiens
cacagagtggctggactgggggtgggggtggaagagactgaggaaggccaggtggacaaggcggggtggggcccacagtcctcattgccacagggctttgccatcttgccaaggagccaacttgccctgattccacggagcaggccactgggacttcccacttctgtgggggcgctgcgactgcctccaagatcctccccaaatctctctgggcctcagtgaggtgcctggggaatggatttaagattggtggcccagtttccggacagytgggagatgagctcagccttactaatgtgatcgaagttgccaacccctgccccgcacatcctcaggggaccctaggctgctggccaccagcaaggttgtcttgtctgtttgatcttcgattcctgagggtagtgggcacctcggtaggtgatcctgcccaaatcccgcctccgcttgtcctcttggcagggcggcctccctcccgcataccacagccttcctgcaatgctgcgactcgggttcattccaggggatccttgagcgctggcggca

SEQ ID NO: 779873 - DNA, 646 bp, Homo sapiens
caagactagtctgggtaatatggtgagaccctcatcaatacaaaaaaaatacaaaaattagccaggcgtggtggtgggcgcctgtggtcccaactactcaggaggctgaggtaggattgctggaagccaagaggttgaggctgcagtgagctgtgatcatgccactgcactccagcctgcgagacagagtgagacactgtctcaaaaagaaaaaataccatcaataggtggcttaaaccatttatttctcacagctctggaggctggaagtctgagaccagggttccagcagggttgggttctggtgaggcgtctcttcctggcttcagacggccgccttctctgtgtcctcacatggcctttcctcggtgtgaaagggggaagagagagggagagcgagagctctgtggtgtctcttrtaaggacactgatgctatcagatcagggcctcatttaattattttcttagaggccccatctccagacacagccacactggaggttagggcttcaacaggaattttgggtcaacacaaacatttagcctataccatctggattgcctttcaagtctcaggacacaattggtcaaaactatattactatgttttatgtgacatatcaaagtagcaaaattttattggaa

SEQ ID NO: 779874 - DNA, 630 bp, Homo sapiens
caagaccgtattatttgagagaaagtctcgaacgctgctggctaaggggaaaagtgcgataacttgtgatgattcagggaatgactagacaggatgggaaaatacccacgtgtctcttttcctagtcgctgctcccttttcagatgtactagggcagcgggcaggagaatagaaagacctgagacaaacccagcaccctccttctaagaaaactgcggtgccctggtgaaaagggttggctaagaggaaggacttactagtatcttagggttgcgggagaaaaaactcagttcgacagtttattgtattggcgattccagtcttggagttttccccttaaccctgtctctgcctctcctctttacagagaatgaatttagcagcaaagctccctaccaaagtactaacgctgcactgatgctaatttgagatgagctggggcagtgattgtctctrttttttcattattaacatgccagaggcttatcctctgatgcaagtcatctgaaatttctggatcagagcggggtgggctgtcactgacgcacctaagactgacctttctatatccaagtaatgtcagggcacatcattgtgggaggctacaaatgccaggtctccattttgtaa

SEQ ID NO: 779875 - DNA, 469 bp, Homo sapiens
tgtatctagagattttaaaaaaactaatttaataaatccactcctccaacacaaagcacaaaatagagacaggatacattaaatatcttccaagtttattgttttatgaatagctgattctcattacacttagctactttcccttaggtacaaaaaatatgggtcaagtcctattttcatggccctattaaatcacaactgcaggtaccatttttaagcatctatagcattgttttaaaggtatctttcacatgaaggtagtttgaaaagtcgttcttccctgggttttgcataattattttctctyattccaaaactcagaatttttggtctagtctgttttaaccaccttgaatcttgccaattaaaatgctagcctcctggccctaacttcctttcccttgttcctagcaagcatctgttcttccacattcttgtatagtttaactcaaaatgccaatcagtgatg

SEQ ID NO: 779876 - DNA, 363 bp, Homo sapiens
cagtgacatacaatggtcaccacaaaagcagtgcattattctcctttcccaaagcatctacttagcaacctctctttattccttctctttgaatcacatatgccaggatgaatcagccgttcattgattatagaggatacattgaagatttggcatattattggccagatttgttgaatagtaaggataatggattgtgttgcstccgcatgcaataaaaacttttgaatgagaattgttaaatgaggaggaatgcctccttaatttgcatatacatacataaacctagaaagggctatgactatttctaaaagaaaacttttttatatgccttatcctaaaaggagttgttctgtgcaccag

SEQ ID NO: 779877 - DNA, 644 bp, Homo sapiens
gacaagtagagttcataaaatgtcatttcacaatgaaatatcttctcacttgtttcctgtaggtttggcttcataagctttcagactgaaaatatggataatataactgagtggaattcagaaagagtaagaaatgcagacagatgaatttccctgaacatttaggaatatggttttggcttagtgtacaccactgtataccatgcaaacagatcacctrgagtcacaagttctcctaggtgacctctgtctgcatgagttaccattcttgatgacttaaagctagtttttacatggatatttgaattctgaaatctcaagaagcattttctttattctgtttaaaaagacttacaatggacatgtaccatagggaaacttgaaaaaaacttgaaaaagaaaaaaaatcatagtgaacagtctagatatctccatattgggaatatctgaatgggaaaaacaaaagcaaaaagaatcctactgaaagaaaaaaaataaccaaaacaagaaaaacccaaacgacaagaccttcacatttcagccacacaaacattccactcttacccaaatgttccacattctttttgatgtctacatttttattcatgcatgaaattgccctcttccttcttccttttggaata

SEQ ID NO: 779878 - DNA, 644 bp, Homo sapiens
gacaagtagagttcataaaatgtcatttcacaatgaaatatcttctcacttgtttcctgtaggtttggcttcataagctttcagactgaaaatatggataatataactgagtggaattcagaaagagtaagaaatgcagacagatgaatttccctgaacatttaggaatatggttttggcttagtgtacaccactgtataccatgcaaacagatcacctggagtcacaagttctcytaggtgacctctgtctgcatgagttaccattcttgatgacttaaagctagtttttacatggatatttgaattctgaaatctcaagaagcattttctttattctgtttaaaaagacttacaatggacatgtaccatagggaaacttgaaaaaaacttgaaaaagaaaaaaaatcatagtgaacagtctagatatctccatattgggaatatctgaatgggaaaaacaaaagcaaaaagaatcctactgaaagaaaaaaaataaccaaaacaagaaaaacccaaacgacaagaccttcacatttcagccacacaaacattccactcttacccaaatgttccacattctttttgatgtctacatttttattcatgcatgaaattgccctcttccttcttccttttggaata

SEQ ID NO: 779879 - DNA, 582 bp, Homo sapiens
taacttcttatttttaacagggatgccttttatttctttttttgcctaattgctctggctagaactttcaatactacattgaataggagtggtaaaagtaggcacctttgtaatgtttctgatcttagaggtttcaggttttccccattcagtatgatgttagctacaggtttgtcatacatggccttcattgtgttgagatgcatattctccatacctaattttttaagagttttttttttttatcatgaaaggatgttgaacgttgtcaaatgctttctctgcatctattgaaatgatcacgtttttgtctttttattaatgtgttttaatgcatttattgatttctacatgttraaccatccttgaatccctggataaatctcccttggtgatagtgaattatctttttaatgtactgcttgctagtttgctagtatcttgttgagaatttttgtatctatgttcatcagtaatattggcctgtagtttatttttttgttgtgtccttgtctggttttggaataagagtaatatggcctcatgagttttgaagtgcttccccgtcttcaattttctgga

SEQ ID NO: 779880 - DNA, 563 bp, Homo sapiens
gaatgaatgaataaataactacccttgttcctctgaaatttaccacagaatgacatgttatcagaggaaacaggacatttaacataaaaacccaatatttttatttgattaaatccctcaaaaccaattgtattagtccattctcactttgctaataaagacatacctgagactggataatttataaaagaaagaggtttaattgactcacagttcagcaatgctggggaggccccaggaaacttgcaatcatggtatatatatatrtatatatatatatatatatatatacacacacacacacacacacacacatatgtataaatactagagatacaaggcaatatacatatatatatatacacacacagggatatagatatgtatctctagtatttttatatatatatttgatatttatatatatacacatatataaatactcgagatacaagagatatatatatatattttgagagtgaaggctatgctatatagcactctcaaaataccactaaaatataaaaggaaacaaatatttgaagataaagtttggacaaagc

SEQ ID NO: 779881 - DNA, 551 bp, Homo sapiens
tgggatggatcagccgtctccagctttgtgtaccatccttttctctctgcgtttccccagggctccctgtgccactacttgacccagtacaccagtgactggggaagttccctgcggatggcactgtccctggcccagggcctggcatttctccatgaggagcgctggcagaatggtgggtgagctgggcataggaagtcaagggagccacagtgctatgtttgtgattctgccttagtttggaggggaaagattgggtcaaaaragggaggaagagccgggcacggtggctcacgcctataatcccagcactttgggaggccgaggtgggcggatcacaaggtcaggagatcgaggccatcctggctaacacggtgaaaccctgtctctattaaaaatacaaaatattagccgggcgtggtggcatgtgcctgtagtcccagctactcgggaggctgaggcaggagaatcacttgaacccgggaggcggaggttgcagtgagccgagatcgcgacactgcactccagcctgggcgacagagcgagacgcc

SEQ ID NO: 779882 - DNA, 604 bp, Homo sapiens; identical to SEQ ID NO: 729395

SEQ ID NO: 779883 - DNA, 631 bp, Homo sapiens
ttaactcccaaacacctcacctcttaatagcatcacattggggattagggtttcaacgtctgaattaggggagggaggcacacaaacattcagtccacaacaccaaagaacacagtaaagcccagtttgaaaatgttagtgttaggcaattgcttctcttatatagagtttcacaaggattgctacttttttttttttttttttttgkgatggagtttcactcttgttgcccaggctggagtgcaatggcatgatcttggctcactgcaacctccacctcccaggttcaagcaattctcctgcctcagcttcccgagtagctgggattacaggcatgcaccaccatgcccggctaatttttgtattttttttaaatagagacggggtttctccatgttggtctgctggtctcgaactcccaacctcaggtgatcctcctgcctcagcctcccaaagtgctgggattacaggcgtgagccactgcacctggccgaggattgctacaattttaaagttaatattgataatagctaaaattattgcaggttaagtataaatgaattccatgctaagagccttacgtgttcaaatgaccccagttagtcctcatctccactccataagcatttat

SEQ ID NO: 779884 - DNA, 631 bp, Homo sapiens
ttaactcccaaacacctcacctcttaatagcatcacattggggattagggtttcaacgtctgaattaggggagggaggcacacaaacattcagtccacaacaccaaagaacacagtaaagcccagtttgaaaatgttagtgttaggcaattgcttctcttatatagagtttcacaaggattgctacttttttttttttttttttttgtgatggagtttcactcttgttgcccaggctggagtgcaatggcatgatcttggctcactgcaacctccacctcccaggttcaagcaattctcctgcctcagcttcccgagtagctgggattacaggcatgcaccaccatgcccggctaatttttgtattttttttaaatagagacggggtttctccatgttggtctgctggtctcgaactcccaacctcaggtgatcctyctgcctcagcctcccaaagtgctgggattacaggcgtgagccactgcacctggccgaggattgctacaattttaaagttaatattgataatagctaaaattattgcaggttaagtataaatgaattccatgctaagagccttacgtgttcaaatgaccccagttagtcctcatctccactccataagcatttat

SEQ ID NO: 779885 - DNA, 423 bp, Homo sapiens
aattttatctatttttgtgttagttatgtataacaaaaggtaagttagtgtgtgtgtgtatctgtctgtttgtgagtcattctcaaatgggcgcaatttctgcctgtcccctaggcatttgacagtatctggtgacttttggggttgtcctaatttgtgggtggtagttgctcctcagatctagtgggtggagaccagggatgctgctcaacrtcctacattgcacaggacagtacaccatgtcaaataatcatctggccctaaatgtcaatagtaatgagacaggagagttcactggccctccttgcagggcatgcaacaggggtgcagctctctctttgactgctgtgagctcaaacacctacgggagggggagcacacagacaagcaggtgcaggagctggggcaagcgctttgggctct

SEQ ID NO: 779886 - DNA, 628 bp, Homo sapiens
caaaaatatttatgataaagaattggctcatttgattatggaggctgagaagtgccataaccacctgtctccaggataaagacccaggaaagccagtggtgtagtccaaagaccaaagaaacagaggacgatggtgcagattccagtctcctctgaagatctgagaaccaggagcacagaggacagaagataaatgttccagctcaaatagtcaggcagagttaattcaaacttcttccactttgtgttctattcagtcctttaaggaattaaatgaggcacactgacactggggagggaaaaatattttttgagttgactaatttaaatgtggattccttgtggaaacaccctcaccctcacaggcacacccagagataatatttaaccagctatctgggcacccgtagtccagtcaagttgatgcataaaattawccattgcaatgctgaactctctatagaataccattataactaacatctcaaaatgaaatggttaagtaccaggagacatcaacactacaaaaagtcaaataagtttgcttagaagggtgttcagatggcaccaattactttatgcataacatatgtttctgattgaaattttttaggccagaggtaactgt

SEQ ID NO: 779887 - DNA, 612 bp, Homo sapiens
gatagaatcctgacattaagtgttgcgggaatcaggaggaccagagacgccacagggtaaagcagaagtattttattcagtgcactcagacccagtggattatcattcagagactgggcccagaacaaagacagcacttgacctttatacacacttcaaaaagggggttggctagcctgaaacaagcttacagtggtgcgaagcaaaagcaaggatacagaggcaaaacaaaggcagttaatcaaattgtgacaggtgcattactcaggattacacgtgacatcttgctatgtggcccagatggctattatctaggcttgctctagtgccttgcctgggcttatctcataaccttcactatgtcgcccaggtggctgtagtccaggcctgctcagatagctcatgaccttcactgtaccgcttagataaaacagaatrcttgaagttaccagttacagagaacaggaatctataaactcataccataagagaaacgaaaattgcttttctcctccctatgttgagggagtgctgggagagtctccagagcacattcctttgtgtcctaacttctcagatagtgtttatggaggctcttcctgggtctgggct

SEQ ID NO: 779888 - DNA, 655 bp, Homo sapiens
ggaaccatgccagccacttgactataaatagttcagccatagttctatgttccagggaggtggaccaaaaaagatgaaggcaagtggattggcctcttggggctgccgtaacaaagtaccaccaattgagtggctttaaccacagaaatttattcccttgaagttctggagcctggaagtccaatatgaaggtgttagcaaggtctccccattctgagagctgtgagggagaacctgtcctgtgcgtctccctttgcttctggtggttgctggcaatcttcgawgttccttggtttgtagatgcatcacgccctctgccttcttcatgcgacgttctgcctgtgtgcatgtctgtgtccaaatttctcccttttttaagacaccagtcatcttggattaggtcccacccaactccagtgtaacctcttcttaaataattacaactcccatgagcctgtttccaaataagcctgtgtgtgtggtacaggggaagaggtacgattccataacaggaagagagcatggcaaacagtgaggctgagatggactgagcacctggtgtgctgggcttgtagcttccacactcactcccttggccatcccaagacacctgtggtgcagccattaggatcctaattttaacaatgagcttcat

SEQ ID NO: 779889 - DNA, 509 bp, Homo sapiens
gacatcccaagcctgacgttttctctttcttgccctcaaatcctcaatgatacccatttcagaataaagttgccggggcaccaagacactccactatctttccctcatggccttctcagcttcctccctcttttcccctcctcttaccagctactccctgctgcgactctgctgaacttctcacccgcacccaacacctttactcccctgcctccctgcctttgcttggtcctccctccctacagaatctaagtatcaggattgtttctctttatattgaactctsaatccacctggaatttacttagatgcatagtacaccgcaagatgtaaattttttaatagaagaaaccaattatcccaactctcaccatttattggaaaatccttccttcggatttgggtttcctatagatttattctgtttcaaaaatctgtttccagacttgtgtcttactgttttaattattgtaattttagaatatgtgtaagagcagccctactcatta

SEQ ID NO: 779890 - DNA, 503 bp, Homo sapiens
caggatttgaacccgggtaatattattacgcgccttaatcctcgccttgtcatcctcagccatctcacaggcgagtaaacagaggcgaggagaggataagccagctgccccaggccacattgctgggaagccaagaggcaaggccacactgccctgcggctggggtcccgtttgctaattctagtgcctaactttctccaacgttcccgggcctytttcacccggtcccaggggcgcaggcaccacccttttcctccaggaggagcagggagagggcgggttccccagcgcagtcccctccccgaccctcccccaggctttaagccggcgccggggccaggcggggcagtcccgggccggcccgtaccgccaggcgatcgcgctgatggcggcgctggcagcagcggccaagaaggtgtggagcgcgcggcggctgctggtgctgctgttcacgccgctcgcgctgctgccggtggtcttcgccctcccgcccaaggtaacgc

SEQ ID NO: 779891 - DNA, 599 bp, Homo sapiens
cagaaatgtattctgccaacagccttctaagtgagtttggaagtggatccttccccagttgggtcttcacttaggactcgagacctacctggctgacgccttgattgtaaccagccagagaccctaaagcagaagactcagctaaaccatatctgggctcctgacccacagaaactgagataagaaatgtatgttgttttaaaccactacatttgtggtcatttgctatgcataggtaacaatagagctgagattccccagaagtcaaccctgagacaagaatttatgcgcagttagtttaactgggaggtgattcctggaagcaccagtaggggagtagggaaatgagagaagacaggaagaaaagcctatasaggttgcattatcaaacaggtagctgctgtgggtgactgaggctcagtctctctgggcacctctgcaaattagtgtagaatctgtaccagagttgtcccccaagagtgaggcaggaaacccgggtatttattccccaacactcagcacagaacacttctgtgaccaaaacatatgggggtgttcctcaactccaaaccattctctagcctacgccaactgcatat

SEQ ID NO: 779892 - DNA, 630 bp, Homo sapiens
aaaaatacaaaaaaaaattttttttttgtatttttagtagagacggggctggcctcaagtgatctgctgacttcagcctcccaaagtgctgggattacaggcgtgagccaccggccgccatctgggatttttaagcagcatagtgacctgctcagacttgggtttctaaaggtaggtggggcagaagtgtttcagaagaggggaggacctgggtccacaggaaggcagtggcaatgggaggtggctggtctagaggagatggagctggcaggatggtggctggragaagggggcacacaggtgcaagcctgggggtcctagcgtggccagtagagtgtgtaggtgggactgcaccctccccccgtcccctgctgacagcaagtctatgctggatatttgccatctgccagactccaggcaggaatgacttggtaactgtggagggaggaaactcaagtacaggaaggaaggctgactggggaggtggtccccgtgtcgagggttcgggagtggatgaacacgttctgggcattttgtagtgcagtgattttcatactccgtttagcagcagcaccttttgtcactctttgctaaaaagaatattttttacatgtaatgctgttagcagat

SEQ ID NO: 779893 - DNA, 568 bp, Homo sapiens
aaaaagagaaagacaagacagaagagcagaaaaagccacgtggaggaaacagtagccacaaaggaatggagtggttctgcagctgtaaacatgagaagaggctaggatccaacctgcaaaccttcagtataggcgtgtctttgagtttataggcaaatgagggaggaataagggcagaggaggaagggagaggagacctcgtgaagcctgggggagtcagaaggcttggtaagagtgatgccaacaatgagtcttcaattaggaaagggaggcakgaggaatgttggtataggaaaaacatgtaaggacacgaagccaagaaatagcatctactcatgggagtcagcttctagcttggtggtgttgagcatacatccaaggcaggaagaggtggctggggaggagggaagagccaggaaacagagtgcaggtgtcttctgagggatggggagctagtgaaactgtcaggctggaagccagtcaagacacagtactggcgggtggagatgagggctgggaccatgtccggtccacccaggtggcgctctctggccctgggtcccttcct

SEQ ID NO: 779894 - DNA, 653 bp, Homo sapiens
catttagaaaagacattgtgtttccattttatgatgctgctatttgaatatgcactgcagatcgtgtccctgaatacggttctctttatgaagaagtacactctcattttcacagttctgtgacctttcatttgttatttatgagcttttgcaaatctaataccgctctgacagatttaatttgtgctctaaattacctttgcatgagttactcaactgctggttttattccaatggattacttgctacattccaaaacagaaaaaaaaaaattagttcaagatctattggacttcctccacttgggagaaagttgagaagagktgcactctgaaccttcactgtgtggatggtactagacaatataaaggaggatttctacatcagtcagaggcaaagtgctaggaccataagccaggtcaagttttacaagtctacatcctaattactatttcatgtacagtctataaaatgagatacttccacttaaactggtcactagatgaaaattaagcactttggaagctatcttaagaaccaagtactaaattacaaaatctcaggactaagtcagtatatacgcaattataaagtggcaaacaaatacaaatctaaatatttcaatgctattcaaacagaaatttaaaaatgcc

SEQ ID NO: 779895 - DNA, 554 bp, Homo sapiens
gtaatatgaaacaaacaaaataatatgaaagcattataattagttggatggcacatttattatattttattttatttataataagcgcttttgatcttgggaaaaatgaatgaggattctgcatttatctgtaatccttaacactcaataaatttcttttctgtttccactgtatcatttagactgacttaaaatgtgatatgaattcattcattcattcaccaattatttttgaatgcacacttttaccaaacactgtacttttttttttttttgagatggagtctcactctgtcgctcaggctagagtgcagtggcacaatctcggctcactgcaacctctgccccctgagttcaagcgattctgcctcctcagcctcccgagtagttaggattacaggcgcctgccaccgyacctggctgatttttgtatttttagtagagacggggtttcaccatcttggccaggctggtcttgaacgcctgatcttgtgatccaccagccttggcctccaaaagtgttgggattacaggcgtgagccaccgaccctggc

SEQ ID NO: 779896 - DNA, 615 bp, Homo sapiens
ttatataatgagcctcgataaatatttgttgaaaaaatagaatttaaaaagtagagtaaaagaattcacaagtaagaatgattacatagaaaaagcttatttcaatatcaagccaaataaataagtaatcaacatactgatttccagatttaacttgtttgccatcagttctccaccaaggaaagataagttgatattgccagcctttcatgagcttcctcctaacagtaggcttatcgcctttgcacattcctatagcagagaacatagatctgactgccttaaggtaatacctttgtgtttcactgagakagtcactcttagctgataatagatccattctttgttggaagactcgtgctcagtgtaattttttttcttccagataaaaagggtagcccccatagacatgttcagcatggtgaattagaattaggatgtgtgtgtgcccgtgtgtgtgtgtgtgtaagagggggagtctcaatgtgttgtccaggttgcacttgaacttttagtgtcaagtgatcctcctgcctcagcctctcaactacctggggctacaagcacacactactgcacttcggcatgaatttgggtttattactcttatcatta

SEQ ID NO: 779897 - DNA, 643 bp, Homo sapiens
tcatttttaatcctactgtcattaaatactatgattgcatcatttcactttcccatttgaagcctaaatttaaaaatgggtatagaattattttcacttaggaagcatgatttaatttacataagtcaacttttacactcaarcagaatatccctttttccctcacttaatgatgaataacaaccccctgcaaatggtgatataagaagggtgtgcaggagatgaggctgattttgctcactcgcgttatctttcggtttgactcattaagattgggtagcccattagtccaccaaatcttcttaaacacccatgaacatatcattctttgtgttttttgtttttttctttgttttttgagatggagtttcactcttgtggctcaggctggagtacaatggcacagtctcggctcactgcaacctccacctcctgggttcaagcaattctcctgcctcagcctcccgagtagctgggattacaggtatgtgtcaccaaactcggctaatttttgtatttttagtagagacggggaacattttggtcaggttggtctcaaactcctgacctcaggtgctccatccgccttggcctcccgatcatatcattcttaatactgtcttcatgtgtatttattttgttg

SEQ ID NO: 779898 - DNA, 630 bp, Homo sapiens
tggatccatagttggggagctggtatgatattttgggggtgttatagaaccctgttttgtcatattaccagaattacctttctggtttcctctcatttgggtagactatttaaaaaaattgttcttgaatttatttgtgattggcctttttttttttttttttttttagttgttgttttttcctcttaaggattagactttaatatttattttagccgaatttgaattttggtgcttgtgtgggtgaagactgtataattttcttagttgcagagtctttgcatgctgactttctccaatgcctgttgtagtagttgtattttttggtgtgtaggcgagttctctgtatggagttgagatggtaggtatctcttgaaacttatcttgttcccttgtggtgtatagtttatttatttatttatttattattttcctggtgttttatttactgagttgatggyaggtaatcctgggtaggcacctgttgtggctaaggcaggtgggtagatgtaatcctcattgttcggccaatgtcccagccttgatgaaagttgctgcaggagctttttattagatgtgttgaggttttatcagggtgaagattaggagctacctcagttcccctgccag

SEQ ID NO: 779899 - DNA, 621 bp, Homo sapiens
ttatcccttaaaaaatcaacagatattaatactggaaaaataaaatttagttctggaaccaacagaaaatattttcttaagagactgaactccctttattgtagcacataagatctgtataaaacattttgatctaggccacttcaggatagaagtgtcacagttcaactgctatgcatactaaatattggcaattatgaaaattagaggaagcagaacaagaaaaggaaagagagattaaagatttgtgaataaaaaagagagaataatacacatgataacaggtttgagtctaattataagagtcaagcagtaaattctcttacaggkcaaatggctaacaattaattttaaattcttgctagaatatgttttgtcatttttccccaatcctctttctcaaatctgttgcatactatattgaagtgattgtttggcgaatgaaaggggtaggatgctattcaataggtcagcattcctagagaagggatatcctattcagatcgtagaactacagatatagttgacaattcattagtaagaaaatctctgtgttagaggtgcctagaaaactaggaaaagcacttgacactcatgaattccatatacagattctcattg

SEQ ID NO: 779900 - DNA, 603 bp, Homo sapiens
tcatactgtatggtgaaaaataaaaggccttttctctaagacctggaacatgacaaagatgctgactttcaccactgttattttacataatactggaagacccgggtaaagcaatgaggcaagaaaaagaaagaaagggcatccaaactggaaaagaagaaatcaaattatccttgttgtcagatgatataatcttacatttggaaaaacctaaagactccaccaaaaacctattagaaaagagaaacaaattcaataaagttgcaagatgcaaaatccacgtacagaaatcagtagcattttygtttgtttgtttgtttgtttgtttagagatggagttccactctgtcacccaggctgcagtgcagcgaagcgatcttggctcactgcaacctccgcctcccaggttcaagcgattctcctgcttcagcctcccaagtagctgggactagagggcgtgccaccacgcctggctaatacttgtatttttagttgagatgtggtttcaccatgttggccaggctggtctcaaaatcctaacctcaagtgatctgcctgcctcggcttcccaaagtgctgggattacaggcatgaatcaccatg

SEQ ID NO: 779901 - DNA, 634 bp, Homo sapiens
acaggagatcaccttttcaaagctgaatatcaaagtcagaaaatcaactaaatgaaaggcaggtttatctataaaaatcaaaatgttatttatcataaaatgccataaatacctttggataaaaagacattataaataatgactgccacattcaatcattcatgacaaatttattcattcatgtcatattcaagtattttcaagatttaggcttttttctattaagatgcaataaagaactaaagcttgaaaatacatttcaatcaggaatgactacacaawacaatatgtttcatctcaagcagagaagtgctcaaacattgaggttaatagtatgaactctaacaataatgatcatgttcaaataaacatcaactctaagggtccctgttgtgaggacaaagttatttaatcactctttgtgactattaccttatccacaaatgaacatattaatagtacctacttcagagctatataagaaataaatgtgttaatacagataaggaaattaaatgaatttaatataggtaaaggcttagaacaaaaaaatcgcacatattcattatcactgtatttcagtaatggtgttaccaatccgtaaaataaaatctaaaacaatggtgagtatatc

SEQ ID NO: 779902 - DNA, 634 bp, Homo sapiens
acaggagatcaccttttcaaagctgaatatcaaagtcagaaaatcaactaaatgaaaggcaggtttatctataaaaatcaaaatgttatttatcataaaatgccataaatacctttggataaaaagacattataaataatgactgccacattcaatcattcatgacaaatttattcattcatgtcatattcaagtattttcaagatttaggcttttttctattaagatgcaataaagaactaaagcttgaaaatacatttcaatcaggaatgactacacaatacaatatgtttcatctcaagcagagaagtgctcaaacattgaggttaatagtatgaactctaacaataatgatcatgttcaaakaaacatcaactctaagggtccctgttgtgaggacaaagttatttaatcactctttgtgactattaccttatccacaaatgaacatattaatagtacctacttcagagctatataagaaataaatgtgttaatacagataaggaaattaaatgaatttaatataggtaaaggcttagaacaaaaaaatcgcacatattcattatcactgtatttcagtaatggtgttaccaatccgtaaaataaaatctaaaacaatggtgagtatatc

SEQ ID NO: 779903 - DNA, 667 bp, Homo sapiens
attcatatactgaagggctaaaccccaatatgatggtatttagaggtgcggtctttgatagataattatgtttgatgatggcataagggtaggaccctcatgatgggattagtgcccttataagaagagacacaaaaaaatcttgcttgctttctgtccaccatttaagaacaaatggttcttaaaacaagaaccattctatattcccaccagcaatgaatgagagttcatgttgctctacatccttaccaccattggttgtcgttagtgctttagattgtgcctgttctaatatatgtgtagtggatctcattcttgtcttaagttgcatttccatgatgacataggatgtggagcatcttttcatatgcttactttccayctgtatatattttctgatgaggtgtctgttcaggtattttgtgcattttttattcatttgtttgtgttcttattgttgctatttaaagtttctgtatgtatttggtataacaatcctttatcacatatatcttttgcaaatattttctttgagtttgtggcttgtcttctcatttccttggcagtatctttcacaaagcagaagattttaattttaatgaatttcagcttattgataatttattccatggattttggttttggagttatatctgaaaaggcatca

SEQ ID NO: 779904 - DNA, 558 bp, Homo sapiens
tcctttatcatatgtaatcataaatatttacaggtgatattaatttaaaatgtccaaaatgttttttttttttcttggaggaggttgggagagatgtgtagagaaaaattataaatattaaatttaggtatggaagagaatgtgtaagaaaatagacttataaaattaaagaaaggtgacttttagggggaaggggcagctgtgggcacaccttagcagwcttaaacgttcctacctgccagctgtgaaggtagcagcggatctcccagcacaatgcttgagctctgctaagggacagactgcctcctcaagtgggtccctgacgcccctgacagggagacacctcccagcaggagtcgacatacacctcctacaggagggctctggctggcatctggcaggtgcccctctgggaagaagcttccagaggaaggagcaagtagcaatctttgctgttctgcagcctctgctggcaatacgtgggcaaacagtgtctgtagtggactcccagcaagctccagcagacctgcagaagaggggcctgttagaaggaaaact

SEQ ID NO: 779905 - DNA, 558 bp, Homo sapiens
tcctttatcatatgtaatcataaatatttacaggtgatattaatttaaaatgtccaaaatgttttttttttttcttggaggaggttgggagagatgtgtagagaaaaattataaatattaaatttaggtatggaagagaatgtgtaagaaaatagacttataaaattaaagaaaggtgacttttagggggaaggggcagctgtgggcacaccttagcagacttaaacgttcctacctgccagctstgaaggtagcagcggatctcccagcacaatgcttgagctctgctaagggacagactgcctcctcaagtgggtccctgacgcccctgacagggagacacctcccagcaggagtcgacatacacctcctacaggagggctctggctggcatctggcaggtgcccctctgggaagaagcttccagaggaaggagcaagtagcaatctttgctgttctgcagcctctgctggcaatacgtgggcaaacagtgtctgtagtggactcccagcaagctccagcagacctgcagaagaggggcctgttagaaggaaaact

SEQ ID NO: 779906 - DNA, 577 bp, Homo sapiens
cttctttctcacaatgtagtgctgtgagagaacattgtctgcatattattacaacttttacttaacacagtattcactgttcacattattttcattgtataaatggcatttacttctgagtcttgtagcatactattttttctttgtacaaatttgggaatcaatcattagttcaaatttctttgccttttgttgctcatttttctatgacaaaactctgatgttcctttcattcataagcacatcatgtaagttatcagtcatttttggaactcttgtatctgtcatctgtatttctgtcttcctttttgtctgtattctggaagaactcctggagtcagttgtccagctcactaattttatcttcacctktactcattctgctatgtagtcttctattgagtttttcagtgattatatttttagttttcagtatctccaaatgcaattctagatattttagacatgaaagacttttaattctcatttggatatggaccttatattaggaacattttttaattttttgaaataccaacactttctttgaatatttgttaaattcactgacttcctt

SEQ ID NO: 779907 - DNA, 535 bp, Homo sapiens
atgtagccatggagctgcatgaagttctattcctgccatcgcgcccagaaggacttgtcctggcctctgtacctgctcacctgcatgctccctgtcccatgagaggtggagagctgtgggctgattaaatgagccaaccccttagmcagtcctgcgaaggggccaggggaactgcccatttcagtactactcctgacactccataatcagtgttgtggctgtttttgtttttgtttttgttttgttttgtttttgagacggagtctcgctctgtcgcccaggctggagtgcagcggcgcgatctcggctcactgcaacctctgcctcccgggttcacgacattctcctgcctcagcctcccgagtagctgggactacagatgcccaccaccacgcccagctaattttttgtatttttagtagagacaggtttcaccgtgttagccaggatggtctcgatctcctgacttcgtgatccgcccacctcggatcccaaattgctgggattacggacgtgagccaccacacccggcctg

SEQ ID NO: 779908 - DNA, 618 bp, Homo sapiens
ccttgtttaaatattgttcagggtgcttcatgaagcagtgatataattttgagtgaattaagtggattctctaaatttcagattgcttacttataaaggatgtgataacagtattagcttcacagagttgaggtacaaatatagtaagactgtatcagaaaaagacttggtgtagtgcttggcaacagtaagagctattatgtttatttttataaattatctcactatgtctatagactaagctcctgaacgtaaaattttgggaatttatctaatatttatagttttmtacattttgatatatatgtgatatttatctccagcaatattttacagattctattaaaactctgcaaaagcaaaacatacctaaatccattgatatagatcagttttcattacttaaaataatgaattaattacagtttgattttcctagaagcaaaatgtatgtcttagatttctttctgtgaaaatgaaattatcttcaccctattttgtataaaacataaaataatagattttctttagatccacttttgatgactacatattcatgacactatactaacaaaattctcaaaaataaaacctgaagaaaaaggaaggcaatgataa

SEQ ID NO: 779909 - DNA, 590 bp, Homo sapiens
agttattgcttatacaggttgaatacctgttattcaaaatgcctgggacaagaagtgtttgggttttgttttttttttttttaagattttggaaaatttgtatatacataaggagatagtttgattacgagacccaactctaagcacaaaatttatttatgtttcatatacaccttaaacatatagcctgaaggtaattctatacaatattttaaattatttgtttaatgaggtagagtttatgctaggtacttatgtgtagaattttatacttgtggtatgatagtagtgtttcacgtttcagtaaagtttcagattttggaacatttgggatttcaaatatttggatgagraatgctcagctttttatagaaaatgaaatgtaaaaatttaaataaatctgatagaaaaatataggttttaaaaaatgttacatggaaaattcaatatcaatgaaaatttaacttaatttagaatgcctctgcactacaggatgggagaggtgacacatgcctgtaatcccagtactttgggaggccaaggtgggaggatcacctgagcccaggatttccaggcagcagtaagcaacg

SEQ ID NO: 779910 - DNA, 370 bp, Homo sapiens
tcttactaaaaagggatgagatcgatggcatttgaattagcattggaattgaacagtatcctcactccacaaatttggtagtcttgaaaacagcagtcttaaaacttttgtagctgtggaaaacagtagtctagtagatgctggaggragaatgtgtttggagctttcgaaaaccctgtccataaggaatttttactattacacctgaaatgagtgctccctagaaaaaccccatttacagagcttgtgttcatttgatttgattcagagatcacccagggcatttgtcaaaaacaatcagcagcaattgtttaccattgtagctgcctaaaggggcaatgccaattgaagtaaataggaaggtggcatg

SEQ ID NO: 779911 - DNA, 566 bp, Homo sapiens
agtgtatttacaagtatatatctgtctatatctacatctgattctaagtctataatagtatctccaactgcctaagatgatgtcaaaggagagggagaactgaaaatattatgtgtgaggtggaacttagagaatgttcaaaggcaaattattctactactgtgcaaactcattttcaaggcagtggcccaaaatatttaaaagctggaagtcatctgtatcaacaaatgaggagaatataaaatcaacctggggtggagagtttgattgctggttctgagagctctagataaaaaaaaacaaaaaacaacaacaaaaaaaaacaagccactccaagatgaagcagttccaccatgaatgctaagtctaagacatgcacctacaacttgtttatttgcttacctgtccacraatctagcttccagactgtcctcaccatctgtggaagtttcctaatttcatcaacactaagcaagtcaatgcacacgtaagggatcaagtcccttttataaaaaggaaggtaataaacaccttgtaaggatgttgcagtctccagctcttatttc

SEQ ID NO: 779912 - DNA, 383 bp, Homo sapiens
ggctcctgtagtcccagctactcgggaggttgaggcaggcgaatggcatgaaccctggaggcggagcttgcagtgagctgagatcgcgccactgcactccagcctgggtgacagagagagactccatctcaaaaaaaaaaaaaaaaaaaaaaaaggagataatggtttgtagattttttttatcatggtatctttgtgtagttttggtatcaggataacactggcttcatatcatrcgttgggaagtgttccgttctactgtttggaagagcttttgaagaattaatgtttaattattcaagtgtttgatagaaataaccagtgaaccttaaatcagttttggtagtttatctctttttaataatttgtttattttatctaag

SEQ ID NO: 779913 - DNA, 582 bp, Homo sapiens
aatccctgttgctccatctttctagaagtgcacatctaaaaggagtatttagaataaatctacagagaatttggttggatcatagggaatttcaagaaaaaaagttgaattgaggtatactttcagaaagatattttggagcaaactttcaaatagccctaaagttatcataaaaaacaacagcatttcacttaatggagtcagggaaagcttctctcaagtcagcgaacacagccacagctcagtacaagattaacctgccagctagcagtgagccagtggcctggactgtggagccacacaaggctgagagaccacctaggaccttgactacarcccaggcaaggagttgtaaggacttcgagtggaggtgagaatcaggaatgtagaataatcaagagatagatcatccataggtggccagagtgaggagataggaattaaggatagctctggagtctgattctggctgaccaggaggataatgtgcaactaataaaaactagaggtgctggatgaaggatagtttttgagaagagaggcatttttttgtatattacttatgctttattacttagggct

SEQ ID NO: 779914 - DNA, 648 bp, Homo sapiens
tagaatattatattcatgtcacatgtttatttcatttctgctgagtctccttttccccattgtctatcagaacttggttgggatcccactttcgtggagttcccctttctccctttcactgggatgaggtgtggggaggctgagggacttgcacaaatcacagagcatgagctcactttacagtggtgagatgattccattcagcataattagctctatgtgaaaataagatcaaaatacccctctgtgaatgcattcttagaaaacctcatacacagttaatttccaaaaaggacagattaaaaaaaaattacaaaagaagaaagccgcatcaacatcttaatgcaagtaagaatatgtttgtagatcattaactgctcaagggtatgaaaagagggaaattaaagctaagtgttaggaaccactgtctattgaagytcattcagcaacaaggataaaatattctgaaattataatgaaagtcaacaagaaaagttaattttaaatcaaaggacaattttccaaccatgctttactaggaaataggttttgcatagtacagcacccttttattaaaaacaaaagtcaacgggtgactatgattcattgtgctatgacatctttctttttagaatttataagtatagt

SEQ ID NO: 779915 - DNA, 581 bp, Homo sapiens
agagacaggtcttgggatcccacctccaacaatcagtgattaatctcaaggcttcaaaatgtgtagtgcttgaagaccatctctaactttaaaatcataggtgcaaatctgccaatatttgtaaagaacattaaattatttagatttctagagtcccatatttccttttaattcttcattattggtgtatcaaaagtgctagaaacagtttctgtcmcataaaacacacaaaatatatatgtgcaaaatgaaagaatgagagagtagtctgaaaagcagaccaaaatgtatgcataaaaaagtttatcagagcattatgtactaagctaaaaattactggaaataaaagtctttaaaacagagctctagtcacataagtcttatgatcaatatctattcatacaataaaatatgcaagatttgcatttattgaaatttaatgacatcagaaaatggaaccaatacaatacaaccctacaaaataggatataaaattactttatctgcattgtaatcccctttaattaaaattatctataaacaatgtaaacatgttggagaggattgtgagaagatgaaaa

SEQ ID NO: 779916 - DNA, 581 bp, Homo sapiens
agagacaggtcttgggatcccacctccaacaatcagtgattaatctcaaggcttcaaaatgtgtagtgcttgaagaccatctctaactttaaaatcataggtgcaaatctgccaatatttgtaaagaacattaaattatttagatttctagagtcccatatttccttttaattcttcattattggtgtatcaaaagtgctagaaacagtttctgtcccataaaacacacaaaatatatatgtgcaaaatgaaagaatgagagagtagtctgaaaagcagaccaaaatgtatgcataaaaaagtttatcagagcattatgtactaagctaaaaattactggaaataaaagtctttaaaacagagctctagtcacataagtcttatgatcaatatctattcatacaataaaatatgcaagmtttgcatttattgaaatttaatgacatcagaaaatggaaccaatacaatacaaccctacaaaataggatataaaattactttatctgcattgtaatcccctttaattaaaattatctataaacaatgtaaacatgttggagaggattgtgagaagatgaaaa

SEQ ID NO: 779917 - DNA, 496 bp, Homo sapiens
tgcggttttggcatttagtattgtattagaaaggtctcctcctgttagaatattattaaaatattcatattttcttccagcattttaatagtattattttttcatatcaaaattgttaatttatctgaaatttatttccatgtaaagtgtgaggtaaggatctaaacttttcccccaaatattagtctgttatcataatgtcttttatttgaataaaccatccttctactttacctttatattamattctaatgaatatttagatccattctgtggacatctattctggcccattgattgatttctactgttatggccagtatcaccctgttctaattagtgactctttaaaatacatttttatctcttttagagcaccttacccactactcttttctgagctatttttgtgtaatattattccaaatgaattatataatttttgtcagatttcaaaaaatcccattagaactttgattgcatttgcattaaattt

SEQ ID NO: 779918 - DNA, 585 bp, Homo sapiens
tttgtgttcctggaacctggttccatgccttgcacatagtgcatgctcaatgtatatttctcaagtgagtgaattagtgaatgagttctatttctcagtttgaaagagcttgctagttgatgggaaatgcctgtaaaacactgctggatgtgttaaatgcttccagaagttcacagaacatgcactcagaggaagatattactcccccggctcgttcatacacattcctcatcccttgctttgtttttagmaactttttgtagtatcattcacagacaatggtgttgttttagaatttaaagtaatatttattaagcagtcctacacctgaatccatgcttatttcatggattaaccaacctttctctgtgcagagatgtctgtactctctagtagcctggttgtgaagatgtccttcgagtaaccttaagaaagaaatgtggaaatgccatctttataacatgactttgtattatctgtgagtatgaacagaaacatattttggtaagtttttccccaaataaaaatagatgtcttattttttctttttttaaattagtaattcactaataatcaaagaaaaaa

SEQ ID NO: 779919 - DNA, 669 bp, Homo sapiens
atcttgcttgtctgaggttgcaaataaatgcaaatgtatgctatatttattatattatattgttcatattattatgttccaaatgcccagtcagaacttttccacataaatattaactagtcttaattatcaccttgcaaagtcctgcccgttcttgacagtgtctgtcttatttgttcaatagttaytccttctttttaatgtttataagctcctgtgattttcaagaaacatttgagtttttagtgaacttgtaaatgaaagagctctcatttcaaaataaaaccaaaatcccaaatcatgtaggtgttcataataattacatttatttgagcatgaacatgaacattcacgtttagctttcaatttctgtaacaaatattttttaattcaagggtcgttaaagagttcattcagagtactaaggataatctagttaccacagagtatttcttacttcttcactttagatgctgctattcatagtataacaaacagaattttcatatgttcaaaaaccggactctttcgttgctactttatcagctgccttaagcaagatgccaaccattttaatgttttaagtaaacaacttgcaagccttacgtatgaaaaaactttaagaatgcgcaattttgtgcatatacaaccatatggcccttctcaaag

SEQ ID NO: 779920 - DNA, 669 bp, Homo sapiens
atcttgcttgtctgaggttgcaaataaatgcaaatgtatgctatatttattatattatattgttcatattattatgttccaaatgcccagtcagaacttttccacataaatattaactagtcttaattatcaccttgcaaagtcctgcccgttcttgacagtgtctgtcttatttgttcaatagttattccttctttttaatgttyataagctcctgtgattttcaagaaacatttgagtttttagtgaacttgtaaatgaaagagctctcatttcaaaataaaaccaaaatcccaaatcatgtaggtgttcataataattacatttatttgagcatgaacatgaacattcacgtttagctttcaatttctgtaacaaatattttttaattcaagggtcgttaaagagttcattcagagtactaaggataatctagttaccacagagtatttcttacttcttcactttagatgctgctattcatagtataacaaacagaattttcatatgttcaaaaaccggactctttcgttgctactttatcagctgccttaagcaagatgccaaccattttaatgttttaagtaaacaacttgcaagccttacgtatgaaaaaactttaagaatgcgcaattttgtgcatatacaaccatatggcccttctcaaag

SEQ ID NO: 779921 - DNA, 601 bp, Homo sapiens
tattgaacaaatatatattattcttgctagttgtgatctcagaatacactgattacccatttattcctgaccaaataataccctaaagtaatgtgctgttcccttatcagtgttttactatggaaaaacacagtgtggtgtctaaagtaggttaaacatcactgtcatgtaataaatcattatgctcttcttgctattacattctttattctccaaatatgatttatattacaaaggtctcaatgcatttctctggaaaatacagctttcatctcataaatcttacatgatcacctattataatgtttcaaaaaacgaaggatttcacatgactctattgtgttgttagcagcrgtttttaaataaacaggaaagaatgtaataggaaagaatatatcatttgcactgttgaggcccccaaaataaaacacaaatcctgcttctgaataaacttgattattatggaggtgcaatgtgtacatgggaatagcacagcagcaaaggcaaattaaaggaacggaattgtaagatttcaacatcactgttttggggcagaaaacatagaggattgggaaaagtttcctttgagttgaagtgctta

SEQ ID NO: 779922 - DNA, 514 bp, Homo sapiens
agcagtacttactttctttttttttttttttgagatagtgtctcactctgttggccaggctggatgcaatggcatgtgttggctcactgcaacctctgcctcacaggttcaagcaattctgtctgcctcagcttcccaagtagctgggattacaggtgcttgccaccgcgcctggctaatttttgtgtgtgtgtgtktttttttttttcccagtagacagggttttgccatgttggccgagctggtcttgaactcctgacctaaggtgatccgcctgcctcggcctcccaaagtgctgggattacaggcgtgagccaccgcgcccaggccgccagcagtactttctactgtgctgtttttttttttttttttttttgagatggagtctcgctctgtgtcacccagactggagtgcggtggcgccatcttggctcagtgcagcctccacctcctgggttcaagtgattcttctgtctcagcctcccgagtaactgggactataggtgtgtgccac

SEQ ID NO: 779923 - DNA, 585 bp, Homo sapiens
atgtgttcctgtgtccttggcccagcttcctccactgcacactcatctcccaccatgaatagcctgtgctcttggtttcttaggtttccattcacactgttgtagacaggtacaaacatatacaaatggaaagtcttattttttctctcatttttactcaaaaattgacatcatatacatacgacttcatttttttcacctagtatttcttggcagtcttcacatatgactagatagttttctcattttttgaagtagatacttkgtattctgttatgtgaatgtgccagtgttgaattaacccgtcctctattaatgggcagctgggttgtttccagaccttgtacatatgtcatttcacatttatataaatattgtacctgtagaataaattcccaaagataagaattttgggggcaaagactgtgtgcatttataattttgaaagatattggcatattgtccttcataggggtagtcatcaattcacataccatctaaaatttatgatagtacttgctaacctgcaacattaccaatgtagatgttattaaaatgttggattctggccattctggtagatga

SEQ ID NO: 779924 - DNA, 585 bp, Homo sapiens
atgtgttcctgtgtccttggcccagcttcctccactgcacactcatctcccaccatgaatagcctgtgctcttggtttcttaggtttccattcacactgttgtagacaggtacaaacatatacaaatggaaagtcttattttttctctcatttttactcaaaaattgacatcatatacatacgacttcatttttttcacctagtatttcttggcagtcttcacatatgactagatagttttctcattttttgaagtagatacttgrtattctgttatgtgaatgtgccagtgttgaattaacccgtcctctattaatgggcagctgggttgtttccagaccttgtacatatgtcatttcacatttatataaatattgtacctgtagaataaattcccaaagataagaattttgggggcaaagactgtgtgcatttataattttgaaagatattggcatattgtccttcataggggtagtcatcaattcacataccatctaaaatttatgatagtacttgctaacctgcaacattaccaatgtagatgttattaaaatgttggattctggccattctggtagatga

SEQ ID NO: 779925 - DNA, 616 bp, Homo sapiens
tagtatcgctatgttgcctaggcttgtctcaacctcctgggctcaagcgatacttccagctaagtctcccaagtagctgggactacaggcatgcaccaccatgcctggcttcattgctaatgtaaatggtggtttcctttctgttataacttctaaatggttattattcacatttatgaagatattgactttttgtatatcamgtttatggcttgctatattaacatatgttttattgtttttattattgattctttagcattttttacatattacttttttcatgtaactacattttcttatttttgagacagagtctcactgtcacccaggctggagtgcagtggcgtgatcttggctcactgcaacctctacctcctgggttcaagcaattctcatgcctctgcctgcccctcaaccagtagctggaattacagcacacgccaccatgcccagctagtttcttgtatttttagtggagacagggttctgccatgttgaccagactagtctcgaactcctggcctcaactgatccacttgcctcagcctcccagcgtgccgggattacaggcagaagccaccatgcccagacaacttttttcatttataaatgg

SEQ ID NO: 779926 - DNA, 616 bp, Homo sapiens
tagtatcgctatgttgcctaggcttgtctcaacctcctgggctcaagcgatacttccagctaagtctcccaagtagctgggactacaggcatgcaccaccatgcctggcttcattgctaatgtaaatggtggtttcctttctgttataacttctaaatggttattattcacatttatgaagatattgactttttgtatatcaagtttatggcttgctatattaacatatgttttattgtttttattattgattctttagcattttttacatatwacttttttcatgtaactacattttcttatttttgagacagagtctcactgtcacccaggctggagtgcagtggcgtgatcttggctcactgcaacctctacctcctgggttcaagcaattctcatgcctctgcctgcccctcaaccagtagctggaattacagcacacgccaccatgcccagctagtttcttgtatttttagtggagacagggttctgccatgttgaccagactagtctcgaactcctggcctcaactgatccacttgcctcagcctcccagcgtgccgggattacaggcagaagccaccatgcccagacaacttttttcatttataaatgg

SEQ ID NO: 779927 - DNA, 616 bp, Homo sapiens
tagtatcgctatgttgcctaggcttgtctcaacctcctgggctcaagcgatacttccagctaagtctcccaagtagctgggactacaggcatgcaccaccatgcctggcttcattgctaatgtaaatggtggtttcctttctgttataacttctaaatggttattattcacatttatgaagatattgactttttgtatatcaagtttatggcttgctatattaacatatgttttattgtttttattattgattctttagcattttttacatattacttttttcatgtaactacattttcttatttttgagacagagtctcactgtcacccaggctggagtgcagtggcgtgatcttggctcactgcaacctctacctcctgggttcaagcaattctcatgcctctgcctgccccycaaccagtagctggaattacagcacacgccaccatgcccagctagtttcttgtatttttagtggagacagggttctgccatgttgaccagactagtctcgaactcctggcctcaactgatccacttgcctcagcctcccagcgtgccgggattacaggcagaagccaccatgcccagacaacttttttcatttataaatgg

SEQ ID NO: 779928 - DNA, 593 bp, Homo sapiens
atttttaaaattctttgcatattgtcaaaagacaaactcataatgaatttagttaaagatctcagttggctttattgtgattgtagaattgggcaccgttcattccataaaatagaataagtattccaatgagttgagcaaaggggattgtctttataaacagaaagggctgaataaatcagaaacaaagaacaaaaagcagaytggtcattttaaagttactttccttgtggccaggtgcagtggcttgtgcctgtaatcctagcactttgggaggtgaagtcgggtggaacacctgagatcaggagtttgagaccagcctggccaacatggcaaaaccccatctcttctaaaaatacaaaattagccgggtgtggtggcagcacctataatccctgttattcgggaggctgaggcaggagaatcggttgaacctaaggggcagaggttgcagtgagccgaggtcatgccatttcgctccagcctgggcaaaagggcgaaactccatctcaaaaaaaaaaaaaattaaataaaataaagttactttccttgtaaggtggtgatatagtttgaatatacatccccgccacatc

SEQ ID NO: 779929 - DNA, 593 bp, Homo sapiens
atttttaaaattctttgcatattgtcaaaagacaaactcataatgaatttagttaaagatctcagttggctttattgtgattgtagaattgggcaccgttcattccataaaatagaataagtattccaatgagttgagcaaaggggattgtctttataaacagaaagggctgaataaatcagaaacaaagaacaaaaagcagattggtcattttaaagttactttccttgtggccaggtgcagtggctygtgcctgtaatcctagcactttgggaggtgaagtcgggtggaacacctgagatcaggagtttgagaccagcctggccaacatggcaaaaccccatctcttctaaaaatacaaaattagccgggtgtggtggcagcacctataatccctgttattcgggaggctgaggcaggagaatcggttgaacctaaggggcagaggttgcagtgagccgaggtcatgccatttcgctccagcctgggcaaaagggcgaaactccatctcaaaaaaaaaaaaaattaaataaaataaagttactttccttgtaaggtggtgatatagtttgaatatacatccccgccacatc

SEQ ID NO: 779930 - DNA, 593 bp, Homo sapiens
atttttaaaattctttgcatattgtcaaaagacaaactcataatgaatttagttaaagatctcagttggctttattgtgattgtagaattgggcaccgttcattccataaaatagaataagtattccaatgagttgagcaaaggggattgtctttataaacagaaagggctgaataaatcagaaacaaagaacaaaaagcagattggtcattttaaagttactttccttgtggccaggtgcagtggcttgtgcctgtaatcctagcactttgggaggtgaagtygggtggaacacctgagatcaggagtttgagaccagcctggccaacatggcaaaaccccatctcttctaaaaatacaaaattagccgggtgtggtggcagcacctataatccctgttattcgggaggctgaggcaggagaatcggttgaacctaaggggcagaggttgcagtgagccgaggtcatgccatttcgctccagcctgggcaaaagggcgaaactccatctcaaaaaaaaaaaaaattaaataaaataaagttactttccttgtaaggtggtgatatagtttgaatatacatccccgccacatc

SEQ ID NO: 779931 - DNA, 593 bp, Homo sapiens
atttttaaaattctttgcatattgtcaaaagacaaactcataatgaatttagttaaagatctcagttggctttattgtgattgtagaattgggcaccgttcattccataaaatagaataagtattccaatgagttgagcaaaggggattgtctttataaacagaaagggctgaataaatcagaaacaaagaacaaaaagcagattggtcattttaaagttactttccttgtggccaggtgcagtggcttgtgcctgtaatcctagcactttgggaggtgaagtcgggtggaacacctgagatcaggagtttgagaccagcctggccaacatggcaaaaccccatctcttctaaaaatacaaaattagccgggtgtggtggcagcacctataatccctgttattcgggaggctgaggcaggagaatyggttgaacctaaggggcagaggttgcagtgagccgaggtcatgccatttcgctccagcctgggcaaaagggcgaaactccatctcaaaaaaaaaaaaaattaaataaaataaagttactttccttgtaaggtggtgatatagtttgaatatacatccccgccacatc

SEQ ID NO: 779932 - DNA, 610 bp, Homo sapiens
ttaaatgatgaatgtgaaagcagtttgaaagcataatgcacaatgcacactgatttgtaagccttggattaggcttttctctggaattgggacaggtgccccttgacaatcttcatctgtaggctcttctttgatgatactcctggagtcttggcaagacagttgcaaaagagttaatatctagttaccatggatttatatccaaaatctcatacacctctgtagtgaagaaaactcagagttctggcaggaactgagtctgtcctgggcaaagtcaattactagctctacaatctttgccaaggcacttcttcctctgaaacttggattcctcatctatttaataagtacaaatgtctgtctcacatagttgcagaagaaatmacagccaagcctaggatttcagaattgctcagtctgtgttagttctgatcccatctgcccaaactctacactattacactaatgttctaggccatttgataaacaggaagatgggaaaggcagcactagtcaaggtcacagctgtaaaaatgcagagacccccagtttcaagtttttagaaatagtgtctataaaatgtatgtttccaatttttagctcatttatc

SEQ ID NO: 779933 - DNA, 622 bp, Homo sapiens
cagcagcaatagttgcacttcctatgctcccatggggttattcaatattcatgatattgcattaaacacaatgaaaaagacatgagaactacaggagattacattttttttttttttttgagacagtcggtcacccaggctggagtacaatggtgtaatctcggctcactgcaacctctgcctcccaagttcaagcrattctcctgcctcagcctcctgggtagctgggattataggcacctgccaccacaccaagctaatttttatatttttagcagaaacaaggcttcaccatcttggccaggctggtctcaaactcctgacctcaggtgatccgcccacctcggccttccaaagtgctaggattacaggccaccacacccagccaagagatcactttttactgtgcagatatgcaatttgttagaaagttgagccactcacctgaagatgactagcatcacaaagctttttatgggaatactcacatttgaactcaccacaagaacaggaggttgctacaaaattactacagtactacagtgagtactaaagttaattgtatgcagctatgatttaatattgcatcttcacatttgttttcattttgcttgactgcaaa

SEQ ID NO: 779934 - DNA, 601 bp, Homo sapiens
aaaatataagactgcaaaaggcctgttttacctcaaccatacggcttcaggaaatggtctgtatttccaacagaaaagtggtatctaactctcaggatgrtttctaacaactggatagatacctgggtctttgcggcctgtgatgcagcctaacaatacaggaccttgtgtgatcagctaggtctgctaaagcaaggggacatccatgttctagatttttatttatttatttttttttgagacggagtcttgctctgtcgcccaggctggagtgcagtggcgtgatctcggctcactgcaagctccgcctcccgggttcaagccattctcctgcctcagcctcctgagtagctgggactacaggcgcccgccaccacgcccggctaattttttgtatttttcgtagagacggggtttcaccgtattagccaagatggtctcgatctcctgacttcgtgatccgcccgccttggcctcccaaagtgctgggattacaggcgtgagccacctcgcccggcccatgttctagattttttattctggtttagcaggatccaaactgcctgtcctgaagagactctctttctcttccatacaacgg

SEQ ID NO: 779935 - DNA, 648 bp, Homo sapiens
actgtacatagacagctctcaaaaacttcccaagtccaagaaacccagaaaaacacccataacagctttcttccgtgtcataggaaaactgttcttttagcgaaaatttataatgaagcagaattctgctaaataagatggctgtttatttgggagactgtccttgtgactttaagacattggagctgttagatttctcactgtcactgatcctttcaccctgtttttacaatgttttatatatatatatatatatatatatatatataatatatataaaatatataaaatatatttatatattatataatataatatataatactacatatatataatatatatgtagtatttgagtctatcaactttaagctaccagaggcaaaaccagtttaatgttcatgtcttstgaatccaaattctaatatttattcaaatattcactaatctaggagcatttctttggggaggcttcaggagtacagattatagtgggccgaatgtagacaccagaatagactataatgcaagagacaacaattgagatggatgaagttggtcactgcatttggccatttgtaagaaagattgtacacaatgttttatacttatgatgactttgtgctatattaaattttaaagaggata

SEQ ID NO: 779936 - DNA, 626 bp, Homo sapiens
gaagcacaataaaacaaggtatgcttgtatcaaatcatataactaaattatgcaaccacactacatcaggctgggcagggcaggtagggaggctgataaaggacaggagaaggggaggagaagagaacccacctccaaggcagacaatgtcctgggctccttgtgagaaccccagagaaaagatacggaggctgagttctggcagaacagcaggatacctgctgaccgacctccccagtgagccacaattaaacattttgcgcaatgagccttgaggcacttagggacttattttatgtggttttcaagagtggctacctaaaattctacawgttaaaatgttccactccctaagagtctatcctttaaattgctgtccccaccaaaagcaaaaacagaagtcattggaatccgaagcaatttcaaatatagtggcacaactttccttttttccataaggcagatgccagaggcttcagttgtccatcgctgagtacactcaccctggcctatgctggccttcaaatgaacttgtgccttgggtcaggcttgggattctggagcaccatctgcccccagtgagtctattagtggattcaacgtgtctgcagatgttattgcagggg

SEQ ID NO: 779937 - DNA, 671 bp, Homo sapiens
aattcgtcactttttaaagaggaaaagaccagggaagaaaaactaacaaacaaattaagtggcctggagactttctaaagtcttttaacctagtgggcaaaataatatattggttactgtatctacattttgaaaatactattggccgggcgcagtggctcacgcctgtaatcccagcacttcgggaggccaagacagatggatcacaagatcaggagttcaagaccagtctggccaacatagtgaaaccccatctctactgaaaatacaaaaattagccaggcttggtggcacgttcctrtaatcccagctacttaggaggctgaggcgggagaattgcttgaacctaggaggtggaggttgcagtgagccgagatcacgccactgcactccagcctaggtaacagaacaagactcggtctcaaaaaaaaaaaaaaagaaagaaaagaaaagaaaagaaaaggaaatactgttaattttacgtttgcatacacttttttgaagatttaaaaaaataagagctttactgagacaactcacaatcataaaattcacccttttaaactatacaacccagtggtttttagtatattcacaaagttgtacaaccatcaccactatctaattccagaacattttcatcaaatattctaaaagaaactctacccatt

SEQ ID NO: 779938 - DNA, 588 bp, Homo sapiens
gagcagtaggaagttgcaaaggtttttgggtctctgaagctttgttctactctttggtaattttgctgtggtggggcaagaagtctgatggcaaaaatgttctaacttttctttgtgatgtttgtccctgggagaggtggggtagtgggggtgtcactgctgtgtacagtgggacactacacaatggttacgtttgagctgatggtaacgcttctgatggaaagtggagttactgacaggctgtagggaggaaaacaaggctgggaaggggaacccgcccccatcacacagctggatcrtggtgtatttgagattaaagtagcccccactgcccgagtgtgagactggatgactctcctcaggaaagcaaggccactcttctattggttggtgaattttatccagtttgcacacttttgagttagaactttttaggagatgacctctcctatcacgtttgccaccaaaaatatcattttcaaaacgaaataatagcaacgtttgtagttttctttgctcgcaagaccatcctgaaaacacagtccactgtggaacatattaagtagacgggggaaaaaaagcatagga

SEQ ID NO: 779939 - DNA, 472 bp, Homo sapiens
agagattaacaagcttctttcccagtaaaggtgatgtactgggtgggattatattgagtaagtaacagacattaagtgtttggagctaacctggcaaactattataacacagaatggaagacagaaaaaaacaggcagttgaaataattttataattaaatctgttaatgcaattaatactgatcgaccatagtgggggtctgggcaatgagtgtccacaaagagcagctgggggcttactccggaggctgaggcaggagaatggcgtgaacctgggaggcggagcttgtagygagccgagatcgcaccactgcactccagcctgggcgacagagcaagactccgtctcaaaaaaaaaaaaaaaaaaaaaaaaaaaaaaaaagcagctggcggctgatgcatgaagtggatttcctttatttggattctgtaagtcaggaatcactatgattaaccctaaggataataatag

SEQ ID NO: 779940 - DNA, 470 bp, Homo sapiens
atagatagcactgagttttcactgcagttctagctcctgactcatcccagcctctcaaattacaaatcactgaacctgtgaccaactgctgagactcaataagtacacaaacactgtgagaaaacagaagaccagacaccatgggtatggctagtrttggtggacaagaattaaactttataaaaggtgatacagtataaattctaacaatgattttgttactattatcataacattgcatcacatttaataaagtttaattcatggcttcctatgccagccccctcacatttaattagccctctttgtcctaataaaatctgagtggcaccacacagtggctgacagaactttacctcctattttttgagcctcccaaaggagacctaacatttgttgtatacctgctatatgtaccatgaggccctaaatgtcatctaatttggacctaacagtgaccttataaaaat

SEQ ID NO: 779941 - DNA, 593 bp, Homo sapiens
atacagtataaattctaacaatgattttgttactattatcataacattgcatcacatttaataaagtttaattcatggcttcctatgccagccccctcacatttaattagccctctttgtcctaataaaatctgagtggcaccacacagtggctgacagaactttacctcctattttttgagcctcccaarggagacctaacatttgttgtatacctgctatatgtaccatgaggccctaaatgtcatctaatttggacctaacagtgaccttataaaaatgatccccactttacagatgaagaatctgtggctcagagatgttatgtaacttgatcacacagtcagtaaattacacagatggagttggagaccaagtgtctctggttcaaatgcccagggtctttccactacaccagaagtcttttccaaggatgaaaatccacagccttttctgatattagttctttttgtttggaatatctttccgactcttattcatctggataacttatatacattcttcaatatttagctgaggtgtcttatttatgaagccttccctgaacttctaggttgtcctaaataatcttt

SEQ ID NO: 779942 - DNA, 593 bp, Homo sapiens
atacagtataaattctaacaatgattttgttactattatcataacattgcatcacatttaataaagtttaattcatggcttcctatgccagccccctcacatttaattagccctctttgtcctaataaaatctgagtggcaccacacagtggctgacagaactttacctcctattttttgagcctcccaaaggagacctaacatttgttgtatacctgctatatgtaccatgaggccctaaatgtcatctaatttggacctaacartgaccttataaaaatgatccccactttacagatgaagaatctgtggctcagagatgttatgtaacttgatcacacagtcagtaaattacacagatggagttggagaccaagtgtctctggttcaaatgcccagggtctttccactacaccagaagtcttttccaaggatgaaaatccacagccttttctgatattagttctttttgtttggaatatctttccgactcttattcatctggataacttatatacattcttcaatatttagctgaggtgtcttatttatgaagccttccctgaacttctaggttgtcctaaataatcttt

SEQ ID NO: 779943 - DNA, 523 bp, Homo sapiens
tgtatacctgctatatgtaccatgaggccctaaatgtcatctaatttggacctaacagtgaccttataaaaatgatccccactttacagatgaagaatctgtggctcagagatgttatgtaacttgatcacacagtcagtaaattacasagatggagttggagaccaagtgtctctggttcaaatgcccagggtctttccactacaccagaagtcttttccaaggatgaaaatccacagccttttctgatattagttctttttgtttggaatatctttccgactcttattcatctggataacttatatacattcttcaatatttagctgaggtgtcttatttatgaagccttccctgaacttctaggttgtcctaaataatctttttttctgagctctaccagcatccccttcttatttctctttattgtaattttttttttttttttgagacatggtcttgctatattgcccaggcaagtctcgaactcctgggctcaagtgatgctcccacctgggctcca

SEQ ID NO: 779944 - DNA, 642 bp, Homo sapiens
atccatgtagttactcctgccagaagcacaagtatctctcacccctgctcctttatcccccatgacccacagccaagatccacatcaccaaggcctgttaattctgccacctaagcatcttttgaatcacttacttctcaccctgccctgtctagcccaatcatctccccactatttcttttttttttccccgagacgggttctcactcttgcccaggtcggagtgtggtggtgcgatctcagctcactgcaayctctgcctcccgagtgcaagcaattctcctgcctcagcctccccagtagctgggattataggcgcgtgccatcacgcccagctaatttttgtatttttagtagagatggggtttcaccatgttggccaggctggtctcgaactcctgacctcaagtgatctgcccgcctcagcttcccaaaatgctgtgattacaagcgtgagccactgcgcccagcccccccgactatttctaaccagtctcacttatacttgcacttttccaccaccatttattctccacactgtagccagtgtaatatcacactctaatcagatcttacctcactttaccactggcagggggaacactctttaagcctgtcaaaaccccaaaaaacttccatatt

SEQ ID NO: 779945 - DNA, 550 bp, Homo sapiens
gcgcacgctgagctctgtgcactcggagcaggtcttcgccttgcggctccaggacaagaagctgccgcctctgctgtcggagatctgggacgtccacgagtgaggggctggccacccagccccacagccttgcctgaccaccctccagcagatagacgccggcaccccttcctcttcctagggtggaaggggccctgggccgagcctgtagacctatcggctctcatcccttgggataagccccagtccaggtccaggaggctccctccctgcccagcgagtcttccagaaggggtgaaagggttgcaggtcccgaccactgacccttcccggctgccctccctccccagcttacacctcaagcccasgacgcagtgcaccttgaacagagggaggggaggacccatggctctcccccctagcccgggagaccaggggccttcctcttcctctgcttttatttaataaaaactaaaaacagaaacaggaaaataaaatatgaatacaatccagcccggagctggagtgcaagatggagagggcgcgggct

SEQ ID NO: 779946 - DNA, 583 bp, Homo sapiens
cctgagcacccttcctgcatggtacccacatgattctcttgtcacagctgtccccaaacagaatttattatgcatgtaactggtacgtccaggcatagggtggacgccaggtgcagctggatccaggcacagggaaggcgtcctcaggacccactccatcgctgggctgggctttgccctccttgtggtggcttttcccctaggtggggcggtcccagctgctcctggcctcacccaccagccgggccaccccaacaggaagagtcctgggtcgactcaggttggctggcctggggagtgtgggccgtgaggtgggtggggctggagaggggccttcgcggagkcctggtgggcatcacagcctgtccagggctgacaccatccttctgaccagcaccctcttctcccatccccaggatgtggcagccctgaatggcctgtaccgggtccggatcccaaggcgacccggggccctggatggctggaagctggtggctatgtctcctcctttgtccctgcggtgagttggtgtcggggatgagcccccttctccctcgtcctcctcatcccctaccctggtcct

SEQ ID NO: 779947 - DNA, 652 bp, Homo sapiens
ttgaaaatattattaaattaaggcttttgatatggggagattatcctgaaatctgacgacagtctctctatatctggtagtatatcttgccttaaagtctactctttctaatgttgcctaacacctccaggtttcttaagcttactgtttgaataacttttttcatcactgtaatttcaatctgtctttaatttaaagtatatcacatgtagacatcatagaattggtgtgacaatctctgacttttatttgtagtgtttagtctatttacatagaatattaactattgatttttttatttaggtgtaccattttcctgtctctttaaatttgtcccatctatagtttwtcttctatttccctttcctatcaccttctagataaactaaatacttttaagtttttattttaattcctttattgacacattagacatacctttttggattattatagtgtttgttattgagattatactatgcacccttaaatttcacagtctattaagagttgatactgcaacacttcacataaaatgtaagagccttggaaaagtacacttacatttgtgctcctatccactacaccatcatcacataaattaaatctatagatgctataacccccagaatatgggattatagtattttct

SEQ ID NO: 779948 - DNA, 636 bp, Homo sapiens
atagacatataaatcggtagaaaagaatagagaactcagaaacatagccaaatacctacaatcaactgattcttgacaaaaatatgcactggtgaaaggactccctattcaataaatggtactgggaaaactgggatgtcatatgcagaagaatgaaatctctcaccatgtacaaaaattaactcaagatggatttaaggcttaaatgtaagacctgaaactataaaattactagaagaaaaatctaggaaacactctctggacattggcctaggcaaagaatttatgaccaagtcctcaaaagaaaccacaacagaaacaaaatcagacaaaaggggacttaattaaactaaaaagcttctgcacagtaaaaaaataaaatagagtaaacagacaaccaacagaatgggttaaaatattygcaaacagtgtatctgacaaagggctaagatccagaatctataaggaactcaacaggaaaaaaaacacataaccccattaaaaagtgggcaaaggacatgaacaggtatttttccaaaaaaaaggcatacaagtggccaaaaaacatgaaaaaatgctcaacatcactaatcatcagagaaatgcaaattaaaaccacaaatgagatgatatctt

SEQ ID NO: 779949 - DNA, 667 bp, Homo sapiens
gcatggcatggtaaagtgtatgtgcatgggagagggagtgtgcagggattgtgagactttacattggactcagtgctgccctgtcacagtggagggcaaaacggaccaaactcagctgatacccacccatggaggaagcatttagatgagcgctagccggaggggaataacccatcccagtggttgaaacctgagttctggcaagcctcgccactgtgagctgaattgctttggggccctaaataaacttgaarggtagtctaggccacaaggactgcaactcctaggcaagtccttgtgctgagctgggctttgagccagtggaattagggggcacctactgagataccagccagggtggccaagggaatgcttgtgccattgctctcccaaccccaagcagcacaacttgcagctccaaaagagaccctttctttctgcttgaggagaggagagggaagagtaaagagtactttgtcttgcatcttggatgcaagccacagtagaatagggcactagtcagagtcgtgaggtccccattccaaaccctagttcctgaaagacatttgtagagacacctagacataccctgggccaaaagtgaatcctctgtcttgaagataagtacacagtcctgacaggatcccttacctgctgatgaaagaat

SEQ ID NO: 779950 - DNA, 667 bp, Homo sapiens
gcatggcatggtaaagtgtatgtgcatgggagagggagtgtgcagggattgtgagactttacattggactcagtgctgccctgtcacagtggagggcaaaacggaccaaactcagctgatacccacccatggaggaagcatttagatgagcgctagccggaggggaataacccatcccagtggttgaaacctgagttctggcaagcctcgccactgtgagctgaattgctttggggccctaaataaacttgaagggtagtctaggccacaaggactgcaactcctaggcaagtccttgtgctgagctgggctttgagccagtggaattagggggcacctactgagataccagccagggtggccaagggaatgcttgtgccattgctctcccaaccccaagmagcacaacttgcagctccaaaagagaccctttctttctgcttgaggagaggagagggaagagtaaagagtactttgtcttgcatcttggatgcaagccacagtagaatagggcactagtcagagtcgtgaggtccccattccaaaccctagttcctgaaagacatttgtagagacacctagacataccctgggccaaaagtgaatcctctgtcttgaagataagtacacagtcctgacaggatcccttacctgctgatgaaagaat

SEQ ID NO: 779951 - DNA, 612 bp, Homo sapiens
cctgcccacaccccctgaaagcagccacacattgtggagaaatcaatttctttgagagaaggagagtgcagtgattgagggactttacattgaactcagtgctgctctgtaaaagtggagacctgacaggatgcatcacctactgactaaagagcccccgggccctgaataaccaacagtgatatccaggtaatatgctgcagtttgggctctgagacatgttggcttcaggtgtgatccagcacatctccagctgtggtggttatggtttgagaaaagcaagaggaaaagtaaatggggctttgtcttccaccttaggtcccaatttagccacagtaggttagagcaccaagcaggatcttggagtccctgaatccaggcctaggctcttggtcagtatttctgagcctgtcctgggctggagggaaatccactgccttgaagaatgagttctasgtctggcagcattcatcacaagctgactgaagagctcttaatctttaagtgaacatcagtggaggcctggcagaactccctgtggaaccatggtggtcatggccacaagagaggctcctctgcctggggaaagggcagagaagaatgggaaaaact

SEQ ID NO: 779952 - DNA, 600 bp, Homo sapiens
aaaagttgcaaattaaaaagacaaagaactgtcttgctagagactcttcccagtgtcccttgcaactaaggatgaccatatgacacatttttcattagtgggatctaggcggaattcatttgtgccactgcttgtagatgaaacggatatatgctcacctgaactttcccttcccactagctagagtataaatgctacaggaggaaccagagcagccwttgtggaccatgacatgaaagctgcatgttaagaaggacataccaatgagactgagtgagtctgagtccctgggtggctatgtgagtggtaatacactaccagccctggactgtctttggactacaacataagaatgaatcacacaaaccaaaacacttatctctttgggaggtgggcaagattacttataacagcaacctggactgtaccttaactgatactcatccttactccatgtgacatcaccctaagagtattccagtgactgtcctgtcctattttggattagggttcattctactctcactacccccaacttccagaaagtttaaccacatttctctttcctagtttttcttggataaatctgttttcatgcct

SEQ ID NO: 779953 - DNA, 610 bp, Homo sapiens
aatgggtgctttaaatgactttcctcttcatacactttcttctcatgcctgtaatcttggaattagaaaataatttagttatctaaatataaaagtatttactttttttctttatagctcaaatgtgactctattatgttattgttaggatcattatttatatttgtacccctcagagaatggtaaattttatcacaagtcatggcggagatagaaagcattttccagatttgtcttgttgctattgtcaaagttagcattccatttgaaggtactgttatytagagcagggaccagcaaacaacagcctgtgggccaaatgtggcccctctgcctatttttataaagttctattggaacacctgttcatttccttattgtctatagctgctttcctgctacagtgcagagtggagtagttgtcacagagatcatatgagttttaagtcttaaatactttctggccctttgcagaaagtttgttggcctttaatctagagcttgacatagtagagaataggaaccagaatcctccctcccacaaacccacaaacaggttggcctctttcctccccttctgggacacagcaatggaaatgccttgccacta

SEQ ID NO: 779954 - DNA, 643 bp, Homo sapiens
ataccatccccactgcataacatctacctggtttcccagctgctttcccccccaaaatcccatgctctatttggtagacagaaggatctttgaaaaatatgacttacggggattatgttccctcttaaaattcttcagtggctttccattgcacttaaaggccacttgcctgatctctttggccttatctcatttatctgttggtggacacttggatagcttctaccttttttctattgtgaataatggagttacgaattctttttttttggagattgagtctcgctctgtcgcccccaggcaggattgcagaggtgtgatcttggctcacagcaacctctgcctcctgtgtccaagcgatcctcccaccctagcctccagagtagctgsgattacaggcacgtgccaccgcacccagctaatttttgtatttttattagaggtggggtttcgccatgttggccaggctggtttcgaactcctgacctcaggtgatccagccacctcagcctctcaagtgctggattacaggagtgagccactgcacctggccaatgaattctttcgggtatatacctagaagtagaattgctggatcatatggtaattctatttttaattttttgaggaaccgcaatactgt

SEQ ID NO: 779955 - DNA, 588 bp, Homo sapiens
ctcactgcaagctccacctcccaggttcacaccattttcctgcctcagcctcccaagtagctgggactacaggcacccaccaccacgcccgctaatgtttttgtatttatagtagagacaaggtttcaccttgttagccacagtggtctggagctcctgacctcgtgatcctcctgcctcagcctcccaaagtgctggaattacaggcatgagccacggcacccggatgaaaagctgaaaattctaaaaaccagagtgcctcttctcctccaaaggatygcaactccttgccagcagcagagcaaagctggacggataatgactttgacgagttgacaggagtaggcttcaaaaagtcagtaataacaaacttctctgagctaaagggggaggttcaaatccatagcaaggaagctaaaaccttgaaaaaagattagacgaatggctaactagaataaatagtgtagagaataccttaaatgacctgatggagcagaaaaccatggcacgagaactaggtgatgcatacacaagcttcagtagtcgattcaatcaagtggaagaaagggtatcagtgattgaagatca

SEQ ID NO: 779956 - DNA, 588 bp, Homo sapiens
ctcactgcaagctccacctcccaggttcacaccattttcctgcctcagcctcccaagtagctgggactacaggcacccaccaccacgcccgctaatgtttttgtatttatagtagagacaaggtttcaccttgttagccacagtggtctggagctcctgacctcgtgatcctcctgcctcagcctcccaaagtgctggaattacaggcatgagccacggcacccggatgaaaagctgaaaattctaaaaaccagagtgcctcttctcctccaaaggattgcaactccttgccagcagcagagcaaagctggacggataatgactttgacgagttgacaggagtaggcttcaraaagtcagtaataacaaacttctctgagctaaagggggaggttcaaatccatagcaaggaagctaaaaccttgaaaaaagattagacgaatggctaactagaataaatagtgtagagaataccttaaatgacctgatggagcagaaaaccatggcacgagaactaggtgatgcatacacaagcttcagtagtcgattcaatcaagtggaagaaagggtatcagtgattgaagatca

SEQ ID NO: 779957 - DNA, 606 bp, Homo sapiens
caatctatggaaacagactgtcttttcattattggtggcttctttaattttttacaattaaagaagtctgtctctttttttttttttttctttttttgagatggagttttgctcttgttgcccaggctggagtgcaatggcgcaatttcagctcaccgcaacctctacctccccagttcaagagattttcctgcctcagcctcgcgagtagctgggattacaagcatgcgccaccatgcccagctaattttgtatttttagtagagacagartttctccattttggtcaggctggtctctaactcctgacacgtgtgatccacccgcctcagcctcccaaagtgttgggatcacaggcaagagtcaccgcacctggctgtctttctccttcttggttaagtttattcctaagtattttatttttttgatggtactgtaaataatttttttgattttattctctgattttttattgttagtgtatagaaaaacaactgatttttgcatattgattttgtatcttgcaaattgctaaatttgtttactagttctattagttttacggaatcaaggattttccttgtttctttaaaaactttattttag

SEQ ID NO: 779958 - DNA, 606 bp, Homo sapiens
caatctatggaaacagactgtcttttcattattggtggcttctttaattttttacaattaaagaagtctgtctctttttttttttttttctttttttgagatggagttttgctcttgttgcccaggctggagtgcaatggcgcaatttcagctcaccgcaacctctacctccccagttcaagagattttcctgcctcagcctcgcgagtagctgggattacaagcatgcgccaccatgcccagctaattttgtatttttagtagagacagaatttctccattttggtcaggctggtctctaactcctgacacgtgtgatccacccgcctcagcctcccaaagtgttgggatcacaggcaagagtcaccgcacctggctgtctttctccttcttggttaagtttattcctaagtattttatttttttgatggtactgtaaataatttttttrattttattctctgattttttattgttagtgtatagaaaaacaactgatttttgcatattgattttgtatcttgcaaattgctaaatttgtttactagttctattagttttacggaatcaaggattttccttgtttctttaaaaactttattttag

SEQ ID NO: 779959 - DNA, 608 bp, Homo sapiens
agagtgaactcatttttgacaacgttgccaagaacataccttgaggaaaagatagtcttttcaataaacggtactgggaaaactgaatatccataggcagaagagtgaaactaggtccctatctcttactttttatgaaaacaaaatcaaaatggattaaagctttaaatctaagacctcaaactatggaagtactataagaaaacattgaggaaaatctccaggrcattgatctggacagaaatttcttgagcagtatcctacaagcacaggcaaccatcgcaaaaatagacaaatgggattatatatcaagtttaaaagcttctgcacagcaaaggaaactatcaacaaaataaagagacaacccacacaatgggagaaaatatttgcaaatgacctgtctgacaaggaactaataacaagaatatatgcaaacaactctatggggaaaattttaataatttaatcaaaagattggcaaattatttgaacagatatttctcaaaggaagatatacgaatgacaaacaggcatatgaaaagatactcaacgtcactgataatcagagaaaatcaaatcaaagctacaatgagatatcacctcacccc

SEQ ID NO: 779960 - DNA, 564 bp, Homo sapiens
aacaagttaccccaaaccgtgtagcttaataaaacacataattattatcttactgttcctgtaggtcagaagcctgggcaggcttggctggctctactgctttggatcttacgagcctgaaatcaaggtcttgataggcccggcctcttctctggaggctctgtgggagaaatcacttctcagctcactcaagtctttggcagaattcaattgcctgcagatgtagtactgatttccttgctgcctgtcagttggagattctctcggttcctaaaggtcacttgctttcctgcagcagcacagcaagcctttctcatactttraatctctctgatttacccttctgtcactcttctgcctttagtcagagaaaattcccttttgccacatgatgtaacatttataggttacagggatgaggatgtggacatctttgggaaacattctgcctattacagagttcaagggctccaactgctgcaccttgaaatccatcattgggtttgtgctgaggccatcctttccatgggctgctcaatgatggaatgtggcagaaatactaag

SEQ ID NO: 779961 - DNA, 478 bp, Homo sapiens
tagtaaatacatttttcatttatttttgaatgaataaatttaaatcaggattatatatatacatatgtaagtatatttgattcattcatttctgaactaatatatgccagatcctgttctagggggtccatcctacctattcagaacaacattcctataattaattcctcacttgttgcgtagacttgctccatgcctggtatggagaaggtgcttatcagtgataattggtatcatgatcacaagtccctgaagggtaagtagattgccttaggcagcatagttaatamattttgaatccaggatggaacctaggtctgatttcaaagtccaggtcttttttccagcagattttacgtgtaaagccttccactctaaggaacaaaatgtcctcaagcactctttgttagttaagttgaacttctatattcacagtcattaaatgtatcatattatggagagataataaaatagcaca

SEQ ID NO: 779962 - DNA, 561 bp, Homo sapiens
atttgatcactttttctgttattcacaatgtgacagctacagagtatacatacttttaaaaataaaactttatttcaaaatgattagaggttcacaaaagtaaaaagttatatgtggaggtcccatacacccttcacttctccacctccactgttaacaccttacatgactataggagaatataaaaaccaggaaaytgacattgctacaattcacagagcttattcagatttcaccagttatatacactcatgtgtgcgtaattttatcctgtgtagcttcatgaaacttccaccatcaagatgcaaaactgttccatcaccacaaatatgcccatgttattccttcatagtcatacctgtcccattcttggcccccaaatagtaactcctggcaaccaggaatctgtgatcctttctataatttcattacatccaggatgttatataacctttcgaaactggcttttttcaatcaacataattctcctagggcctacccaagttgttgcatgtatctaatagttcatacctgttcattactgaatagtattccacaata

SEQ ID NO: 779963 - DNA, 614 bp, Homo sapiens
taattaaatgtattaaagaaataaaaaggttgcattagaacatatctacataaaacaaaagaagataataaatggggaacagaggaataaaagaagcaatgggacattaagcacagaaaaagcaaaatggcagatataaatccagccatatcactactaacattaaaagtgactgcactggccgggcatggtggctcacatctgtaatcccaacactttctgaggccaaggtgggtggattgcttgatccctggagtttgagagcagcctgggcaacatggtgaaaccccatcyctactaaaagtcgaaaatgtagctggccttggtggtacccgcctgtatttccagctatttaaaaaggtgaggtgggaggatagattgagcttggaaggcaaaggttgcagtgagccaagaatatgccactgaattacagcctgagtgacagatggagacatcttttccaaaaaaaaaaaaaaaaaaaaaaaaaaggttggggtgaatggattatacaaaaaatcaaaagacagatgatcaggttagattgttaaaaacgtgatccaactatatgctgtctacaggagacagagtttagattcaaagatacagattgaacg

SEQ ID NO: 779964 - DNA, 614 bp, Homo sapiens
taattaaatgtattaaagaaataaaaaggttgcattagaacatatctacataaaacaaaagaagataataaatggggaacagaggaataaaagaagcaatgggacattaagcacagaaaaagcaaaatggcagatataaatccagccatatcactactaacattaaaagtgactgcactggccgggcatggtggctcacatctgtaatcccaacactttctgaggccaaggtgggtggattgcttgatccctggagtttgagagcagcctgggcaacatggtgaaaccccatccctactaaaagtcgaaaatgtagctggccttggtggtacccgcctgtatttccagctatttaaaaaggtgaggtgggaggatagattgagctyggaaggcaaaggttgcagtgagccaagaatatgccactgaattacagcctgagtgacagatggagacatcttttccaaaaaaaaaaaaaaaaaaaaaaaaaaggttggggtgaatggattatacaaaaaatcaaaagacagatgatcaggttagattgttaaaaacgtgatccaactatatgctgtctacaggagacagagtttagattcaaagatacagattgaacg

SEQ ID NO: 779965 - DNA, 614 bp, Homo sapiens
taattaaatgtattaaagaaataaaaaggttgcattagaacatatctacataaaacaaaagaagataataaatggggaacagaggaataaaagaagcaatgggacattaagcacagaaaaagcaaaatggcagatataaatccagccatatcactactaacattaaaagtgactgcactggccgggcatggtggctcacatctgtaatcccaacactttctgaggccaaggtgggtggattgcttgatccctggagtttgagagcagcctgggcaacatggtgaaaccccatccctactaaaagtcgaaaatgtagctggccttggtggtacccgcctgtatttccagctatttaaaaaggtgaggtgggaggatagattgagcttggaaggcaraggttgcagtgagccaagaatatgccactgaattacagcctgagtgacagatggagacatcttttccaaaaaaaaaaaaaaaaaaaaaaaaaaggttggggtgaatggattatacaaaaaatcaaaagacagatgatcaggttagattgttaaaaacgtgatccaactatatgctgtctacaggagacagagtttagattcaaagatacagattgaacg

SEQ ID NO: 779966 - DNA, 590 bp, Homo sapiens
tttatcaaattttttatctttacaaccactttgtatgggagatgatattgtccttattcttaagaacttgaggcttagataggtataattacttgccagaagcaagatagagtctttctgttgcccatttttcttccatggctcctctttggatgaaattcaagcttcctagcctggatgacaagaccctgattatctatcccttgttaatcttttggggggtttttttgtatattttgtagagatctggtttcaccacgttgtgcaggctggtctcgaattcataggctcaagcgatctgcccacctccacctcccaaartgctaggattataggcgtgagccactgtgcctggcctgtcccttgttaatctttacagcgtcatatcttttcattccacacctaaacttcaagtttatagatctttcacttcctgtaatatgacatatgttgtttctactgtgagcaacattccctttcatgtcccactgttctgtgactaactcctcttcattcatcaagtttccgcttaagtaccacatcctccaggagacttcatcaagttcaccattgatgagcatgatgaatga

SEQ ID NO: 779967 - DNA, 618 bp, Homo sapiens
tattactttataaaattgatgtgtttttgtcacgataaaggggttgagccaaatcagattttatggctcttaattgcttccttggtaaatattaaaaaacaaaggcagggggagcaatatcctctgtaaggcatgagctgaatatgtgaccgtttcttgaaaaatcaatggaaagttcctaatctactgtaaagtctttcattttcacccagttagaattctgcttatagtcagcttctgcgactcaaccaaggagtcattaaacagacggaacacaacatcttagagaacaaaagtgcatggaatccaattagagtttggaagtgaaagtgacttataattaaacagaaaataaccaaataatgacagtwattgggcatttgagtgtagtctgtccatttttaagacttcctatccaaagaatttggttatgttttatgacaagagaggtggagaaaaatttaggctcttctggccttccttaaaatccattgaacacttaaaatccgttacacccttaaaatccattacacaggagaaacttttttaaaaaaaattacattttaaaggctcttctgttgctttcaaagtgggttgtaagacagaatagccttatgc

SEQ ID NO: 779968 - DNA, 619 bp, Homo sapiens
ctctgagaatcacagtgaatatgataatttttctaagaaacagagggagactttcttccatgatcacacgtgaacacacatggatgatttttcctaaaggtgcaaggagatatcttggaaatgcacagacagatggtttcttagtcagctcgggctgctgtaacaaaatgccacagggtgatgtagaccatagacatttgattctsgcaattctggaggctaggaaatccaagatcaaggtgtccacagatttggttcctggcaaggtctctcttcctggcttgcaaacagccaccttcttgctatgttcacatatggtgaagagagcgagctctggtttctcttcctcttcttgcaaggacatttgtcccatcatggtggcccccaccctcatgacctcatctaaacataattaccttccaaaggccccaccccaaaataccatccattggggtttagagcttcaacatacgaattttggggagacacaatccttcagtccataaccaatggtcaagggtgggtgaaaagggcatcctaacagggataatgcaaagaggcattttggttatttattgttttgcaatatccatcccaaatttagtggcttaaaacaaca

SEQ ID NO: 779969 - DNA, 609 bp, Homo sapiens
gcatctcactggatccatggatcaaattgcagataattgacatcttaacagtccatgaacatgatgcatctcttcatttatttaggtcttctttgatttcagcaaagtcttacagcttttagtgtagagatcttgcacatcttttgttaaatttatctaagtsttttatgtatcttaacgctgtttaaataccagtgtccttgccttttccagtatgtttattgctagtattagacatttttgtatgtttgtatattgacagtgtgccctgcgtatttgctaaattcacttaatttagtaggttttaaaatagatttcttaagatatctcttaggaatatcaaatagaatcatctacaagtagagatggctttacttactattttccaaacttacaccttgtgtttctttttctttccttaatgcacttactagaacctccaataccatgtggaatagaagtgatgggaagatagcttcgtcttattcctaatcttaggcaagaaacattcaacctgggaatttatttttataataagagaagaatccagtttttgtcccaaatggctagccagtgatccccagaactctttattgaataattcaacct

SEQ ID NO: 779970 - DNA, 672 bp, Homo sapiens
tagaagctcccccatacagagacagagggaggggggctccaaagccaagagaggaaaccccaagtggggcagaaaccagccaggtgtgtatatatagaggctggaggaggcagtgtatatatagaggctggaggaggtggtgtctgatttgcatagggcccaggggattggtttgaccaggcatatcattcacgtagcctgcaaaaaagctggccctcccaccctagccttttaatatgcaaatgcagggcaccaagatattctacacacgtggggctatgtgggggtggccatgttgccaggaacatgtggggcaagggcaagaaggccgagggaatcgccatgttgggtagactcagtttctaatggacttcatttgtatatcaaaggttgccggcctggctctcagagctgcggctttacaagaaacttttccgcagatgctttwaaaaatgaaaacttcccaaggactcctttctctctatctgcttaaaataatttcttaataactcctaccacattcctccctgtggcgatatcacactaactgctgttacagggttttggatgatgactctttctggctacttcctgctgaaaaggggtgttgaatggggaacagcagctagggcttctcctggggtggatctaagggtccccagaagaatggcg

SEQ ID NO: 779971 - DNA, 635 bp, Homo sapiens
tgcctggacttccccagacctggcttcctgacctctaggaggttacaactgacgtaaatggagaggaaggaagctggcattgattgaacgcacactcctctctaagactcatttgcttttcgctgatatatcctagtgcctaggacattggcatgtgggcagtgctcaaaaacactcagggaaggaatgaatacatggagaaactctttgaggtcgatttatatttcttccattttacagattagaaattaagggttaaggaggctaaacaacctgctggaggtctaaaatcagtaaatgacagaaataagatttaaatgcaggtcagaattccaaagcctttgccctttctgtgtcacaagtctaaagacatggcttaagcacactggctgctgggccaggatttgacmaatgatgccagtactgacccaccaactgtccaatcgccaccaagtcagagcttctcctgggagtggtttcctggttgtccctggatgtccaaggaggagagggattctgagcccagtaagagatttgtgattcggattttcactggttctgctcttcgtggaccatgtctcagtccaaggaaaagagaggactaaagagatatattcatgaaaatcctctaattc

SEQ ID NO: 779972 - DNA, 611 bp, Homo sapiens
tcccagctactcaggaggctaaggcaggaaaatcacttgaactcgggaggaggaggttgcagtgatccaagccatgctactgcactccagcctgggcaacagagcaagactctgtctcaaaaaaataaataaatgaatgaatgaatgaatgaatgaatgaatraataaataaataaataaaataatatatttctaaagaaggaactttgacaaatattaatattagcaaaatgtttattagtctgcataaactttgtgagatctagatctttgttatccataaactaatatattctataaataaattaacaaatgctattcattttgaaatgggaattttcctttataacattttaattacatatttggaaataactaatttattagaatgtttagggttgacaaattaaattattttttccctggctttattaagatataattgacaaataaaaattgtatatatttgttatataagatgatatcttggtatgtgcatacattgtgaaatgattaaatcaagctaattaacatatccatcatctcacctacttattgtagcttgagaaaaacaactaaaaaattatttgggggggtgaattattgcattt

SEQ ID NO: 779973 - DNA, 647 bp, Homo sapiens
accaaactttccagatttgaatgacataatttcagacatcataagatactttaattcatattggaaaaatcgtgtaatttctatgtaacctttcagcaaaagtcttagatttactatattttgtcacttttcaaatagatatatcactagggtgtagggtactgccagtatctaatgtgtaaaggccaatgacattgctagacatcctataatgcacaagaccacctcccacgacaaagaatcatcttgcctaaatgtcaatattgctgaggttaagcaactgtaacttaggaacggagataattatattcctttcatcccatctgccttagatttaaagtgaaatgatactacattttgcaaatataactttaatgaaattgggctctttcaatctagcyactggttttaaatacaaaagaaatgcaactccaattctgaaagtcttaagagcaatgtaagtctttactgacattcacttgaaaaaaaaattgaagcagtcattagaggactcaacacaggcaagactccctaaaaattctcttaactcatcttttccctcaagcccacagctgtagatagctattaattttctctcttctcgtctgtcccttcgcatcaatccatgtcagaactcatgcagagta

SEQ ID NO: 779974 - DNA, 647 bp, Homo sapiens
accaaactttccagatttgaatgacataatttcagacatcataagatactttaattcatattggaaaaatcgtgtaatttctatgtaacctttcagcaaaagtcttagatttactatattttgtcacttttcaaatagatatatcactagggtgtagggtactgccagtatctaatgtgtaaaggccaatgacattgctagacatcctataatgcacaagaccacctcccacgacaaagaatcatcttgcctaaatgtcaatattgctgaggttaagcaactgtaacttaggaacggagataattatattcctttcatcccatctgccttagatttaaagtgaaatgatactacattttgcaaatataactttaatgaaattgggctctttcaatctagccactggtttyaaatacaaaagaaatgcaactccaattctgaaagtcttaagagcaatgtaagtctttactgacattcacttgaaaaaaaaattgaagcagtcattagaggactcaacacaggcaagactccctaaaaattctcttaactcatcttttccctcaagcccacagctgtagatagctattaattttctctcttctcgtctgtcccttcgcatcaatccatgtcagaactcatgcagagta

SEQ ID NO: 779975 - DNA, 604 bp, Homo sapiens
ggagtttaaacaagtcaaactctttctgagttttcaacaatactcatacctttgatttgctgttaccctgaagcgttttcttactttgcaaatcttttttttggaaagactaggaataagaaaatatcttatttttcagtccatcatatcctaggcctctgtgtttcctctgccttgtgtctgcaaatgaaacagctcatttctgtctcttccagcaccttataatgttcagctaaaagaagccamctgacactttcagcattctgcaaggaaatctccctagccagaatcatgagttcaagttactgcaggtgacagaatatataatgtacaaaatatgtacggctctttctccaatttccaatggcggttccctcactgcccaatcagcctccgctaataggctctttgtgtccttccaatctccttcccctatttggtcgcaagacaatgccatatgtcttagatttttgttagagcaacaccacactcctggtagcaatttctgttttggttagcttttcctgtgcaacaaaccaccaccaaatcttagtggtgtggagcaacaacagtttaggatttctcatgtttctgtgagtgagtt

SEQ ID NO: 779976 - DNA, 609 bp, Homo sapiens
tcatcatagtaaaggtccccctaactgattgtttggtatatataaagaataccttatacaaactggatggcaaaacttgtccagtaattactaattttttttattctggtgtaataaagtctctttattggcttcacacaatatttacattcattcattcattcattcagtcagtcagtcagccagcaagccagcaatagatatgaagtgcctgccacatgtttgacaaagtttakgagaggtcgcttacctggatttaagagtcatgtataagcagaaaaaaatttgtaaagaacaaaggactcaggattgagtggtgaatggccatggttaggaagaagagaggagaaagaaagagaaagggctgtgaactaggcagtctggtcacagagttttgggtaggaacagatcagggagagaatggtattggcaatgtcccatgcagaggggccagtaggctgctgagctgttcagctgtcgctgctgatcggaaggccaattccaggagccttgtggagggaacagctggagggaaaaggaaagcacctgcagcatgagtagcaacagaggagggaaagaagagaggcagaagtgaggtgagaggacgtg

SEQ ID NO: 779977 - DNA, 578 bp, Homo sapiens
aatctctctcttatcttttaggttgatagtatcctcttttccttcccttatcccacaccatcctgcccttgtcaaaaatcactttctagaaagaagctggtacatacattaaggctcaagcattaaatcttctgaggtttttgaatatcgagttttatctccactggattgtttttcttctcacagttatcgaaaggcaattggcaactcaatccaaaataaagaattaaagtatatagaagcctctcctacaaatttcaccaccataagtaacaaaggtgagagagagaaagagagaaacagagagggaagagatattttctgyacttattcctctttgcttttacagcggaaacctccaatggtggtggacgatctttttgaagacatgaaagatggtgttaaactgcttgcccttctggaggtcctgtctgggcagaaactggtaagaatttttttgtgtgatcatacttgtcaaattgtttccatttggaatttggggactatggagttgagagtgctaagatgtgctgcccaggtaaaagaaagttatttgtcgtggttggtagtatactgga

SEQ ID NO: 779978 - DNA, 561 bp, Homo sapiens
acatcaacacacatcattcacacacaacacccatgaacaaataccatggaataacttttattccacagcttttggcattacaccaattcattccccttacctccgctctctctcctttttaagttactcttcatccctagcgaaagtgagttgcccttcaggaaagactttttctggaacgaatctttccaactgcagaggagcttttgagtatctggcaacgatgagtagtattactgacattctggttttgtgacgttgggcgggtcatagactctggagctgtttcctaatccataaaaagtgctcttattctagaaatctattattctgggagtccccttattctgtttattggytttgaagctcttccaatccaaacaatttctcccataaggcataggaaatgagcacttttacaaaaagcaagacattgaggactgaagtgagtcattctaacagctaattagattgttgtgcattttggatacatgtaattaatggaccctcctttaagaatagtgaggagaactgaattggcaaaatggacaaaaatagaac

SEQ ID NO: 779979 - DNA, 521 bp, Homo sapiens
taccaccagacctgccttacaagagctcctgaaggaagtactaaatatgaaaaggaaaaaccggtaccagcctctgcaaaaacaaaccaaaatgtaaagaccatagacactatgaagaaactgcatcaactaacgggcaaaataactagctagcatcataatgacaggatcaaattcacacgtaacaatgttaaccttaaatgtaagctggctaaatgccctaattaaaaggcacagactggcaaattggatatagagtcaagayccatcagtgtgctgtattcatgagacacatctcacgtgcaaagatacacatagtctcaaaataaagggatggaggaagattcaccagtcaaatggaaagcaaaaaaaaaaaaaaaaaaaggcaggggttgcaatcctagtctctgataaaacagactttaaagcaacaaagatcaaaaaagacaaaaaagggcattacataatggtaaatggatcattgcaacaagaggagctaactatcctaaatatatatgcac

SEQ ID NO: 779980 - DNA, 521 bp, Homo sapiens
taccaccagacctgccttacaagagctcctgaaggaagtactaaatatgaaaaggaaaaaccggtaccagcctctgcaaaaacaaaccaaaatgtaaagaccatagacactatgaagaaactgcatcaactaacgggcaaaataactagctagcatcataatgacaggatcaaattcacacgtaacaatgttaaccttaaatgtaagctggctaaatgccctaattaaaaggcacagactggcaaattggatatagagtcaagatccatcagtgtgctgtattcakgagacacatctcacgtgcaaagatacacatagtctcaaaataaagggatggaggaagattcaccagtcaaatggaaagcaaaaaaaaaaaaaaaaaaaggcaggggttgcaatcctagtctctgataaaacagactttaaagcaacaaagatcaaaaaagacaaaaaagggcattacataatggtaaatggatcattgcaacaagaggagctaactatcctaaatatatatgcac

SEQ ID NO: 779981 - DNA, 521 bp, Homo sapiens
taccaccagacctgccttacaagagctcctgaaggaagtactaaatatgaaaaggaaaaaccggtaccagcctctgcaaaaacaaaccaaaatgtaaagaccatagacactatgaagaaactgcatcaactaacgggcaaaataactagctagcatcataatgacaggatcaaattcacacgtaacaatgttaaccttaaatgtaagctggctaaatgccctaattaaaaggcacagactggcaaattggatatagagtcaagatccatcagtgtgctgtattcatgagacacatctcacgtgcaaagatacacatagtctcaaaataaagggatggaggaagattyaccagtcaaatggaaagcaaaaaaaaaaaaaaaaaaaggcaggggttgcaatcctagtctctgataaaacagactttaaagcaacaaagatcaaaaaagacaaaaaagggcattacataatggtaaatggatcattgcaacaagaggagctaactatcctaaatatatatgcac

SEQ ID NO: 779982 - DNA, 667 bp, Homo sapiens
gggggcatttcacattttggttttttgcaggatattcaacctgtatatttttatttgtttctagtatactgatattttacttttctttataaaatttataaagtactttaaatctacaatgaagtgtataggacggaacaattccctgtgaatctacttcttagattgcatatcttaatattttggtttcttccaatccctcttttttcccccagaaaactttttacttttctacatgcagtcatcatctactgagttagtacgctggtgttcgtattccatgcattgttagctagtaacccagtttatgttatactatcactcagtcattcacaattttttttattttttaagtcagatttctcaagttgaaatgttattcacaaattttgatgctaaattttaacaaggggaataaatcctttcaataaaaaaattatcaagtcatcagcctttgagtagtagaaatagtttggcagyggctgggcgcgcatggctcacgcctataatcccaggactttgggaggccgagacgggcagatcacgaggtcaggagatcgagaccatcctggctaacacggtcgcacctcgtctctactgcacatacaacaattagctgggcctggtggcgggcgtctgtagtcccagctactcggcatgctgaggc

SEQ ID NO: 779983 - DNA, 558 bp, Homo sapiens
gcttatcccaaaattcttaagaaatgtaagagactcaggataaccaaaacaatcttgaaaggaaaaacaaagttggaggactcgcatttccagaattaaaaatttactacaaagctatggaatttaagacacagtagtaatggcctaataacagacatacagatcaacaaaatataatttagaatccagaagaaacccttacatttatggtcaactatattcaccaaggataccaagacaattaaacaggaaaaaaactagccttttcaacaaatggtgytaggacgactgaaaatccacatgtaaaagagtaacgctggaccactttcctcacactatacacaaaaattaacttcaaatggagtaaagacttcagtgtaagagagaaaaccataaaatacttaatagaaagtgtaggagtaaatcttcataatcactacaccaaaagtacaagtgacaaaaaaagataaattagactttatcaaaattaaaatattttgtgcttcaaacgacgccatcaaaaaagtgaaaagacaacctatagaatgaaagaaaagg

SEQ ID NO: 779984 - DNA, 538 bp, Homo sapiens
gcagtaagctataatcacaccactggactccagcctgggcggcagagtgagaccctgtctcaaaaaacaaaacaaaacaaaaaaagtattttcctcacgatatttattatttacaaaatgaaaaatcgtgacattacagtggagaaacctggcagacaccaccgtaaccagggaatcaaatttcacgccactagtaataagatagattggtatcatattgtcccatttgatgctctgagaagggcatatcactttgaagggggcctgcccctccacrcctgtgggtatttctcgaaaggtggagatgagagactgagaaaagaaataagatacagagagacaaagtatagaggaagaaaagtgggcccaggggaccggcactcagcatatggaggacctgcaccggcactggtctctgagttccctcagtatttattgatcactatctctaccatctcagcgagggggatgtggcaggactatagggtaatggtggggagagggtcagcaggaaaacatgtgagcaaaggactctgtg

SEQ ID NO: 779985 - DNA, 601 bp, Homo sapiens
atttccaaaaaatgaaagaaaaacaaaattcaagagagattaaatgatttgtccagggtcacacctttgggatggattttgagcccagccgagccctgctctttcctaaggtgcacttcccattgcccccaccttgcatttgtatkgttcttctgacttttccaggatgtgagctccactattaaaatcagggttttgctctaaattaaatgatatgtaaaaggctcgaatagatacatttggtctcctgtgctggtggcaaggagggagggagctgggccatgaacagagttggtgctggaagcagacagagatcaccatgcaactgttgagccttgtcaaatttgagagtgtatgtgagacccaccaacaaatatccctgtgtcttttgcaagacttcagacattccaggccaccaggctgatcaaaccaatttaacggggctaggggtgagggtgggctcagatttgttcaacattaggctgtgtctgggcgtgcaaagtagtgcatttctcactgactgtcatactgctgcagcgaagaaagaattaaggaacatgcgaactgaaaagtgctgtcttgtgctacattatcctggcac

SEQ ID NO: 779986 - DNA, 601 bp, Homo sapiens
atttccaaaaaatgaaagaaaaacaaaattcaagagagattaaatgatttgtccagggtcacacctttgggatggattttgagcccagccgagccctgctctttcctaaggtgcacttcccattgcccccaccttgcatttgtattgttcttytgacttttccaggatgtgagctccactattaaaatcagggttttgctctaaattaaatgatatgtaaaaggctcgaatagatacatttggtctcctgtgctggtggcaaggagggagggagctgggccatgaacagagttggtgctggaagcagacagagatcaccatgcaactgttgagccttgtcaaatttgagagtgtatgtgagacccaccaacaaatatccctgtgtcttttgcaagacttcagacattccaggccaccaggctgatcaaaccaatttaacggggctaggggtgagggtgggctcagatttgttcaacattaggctgtgtctgggcgtgcaaagtagtgcatttctcactgactgtcatactgctgcagcgaagaaagaattaaggaacatgcgaactgaaaagtgctgtcttgtgctacattatcctggcac

SEQ ID NO: 779987 - DNA, 601 bp, Homo sapiens
atttccaaaaaatgaaagaaaaacaaaattcaagagagattaaatgatttgtccagggtcacacctttgggatggattttgagcccagccgagccctgctctttcctaaggtgcacttcccattgcccccaccttgcatttgtattgttcttctgacttttccaggatgtgagctccactattaaaatcagggttttgctctaaattaaatgatatgtaaaaggctcgaatagatacatttggtctcctgtgctggtggcaaggagggagggagctgggccatgaacagagttggtgctggaagcagacagagatcaccatgcaactgttgagccttgtcaaatttgagagtgtatgtgagacccaccaacaaayatccctgtgtcttttgcaagacttcagacattccaggccaccaggctgatcaaaccaatttaacggggctaggggtgagggtgggctcagatttgttcaacattaggctgtgtctgggcgtgcaaagtagtgcatttctcactgactgtcatactgctgcagcgaagaaagaattaaggaacatgcgaactgaaaagtgctgtcttgtgctacattatcctggcac

SEQ ID NO: 779988 - DNA, 647 bp, Homo sapiens
gtttcagataaatattgggtaagttgaattgttaaatatctgtgagaaactcatgaagaagagaaaactgaaggaggataaggtgaccatttttgtagacatagagattttcacaaagaagtttgaaaaggtttgattctagtggctcaataggcagagtgcccaagtgtgccccgagcccttatctctctgagtgggaatcagtatttcctgtgctgagatcccatatcccagccacactcaccaatgagctaaaagatttttgcataatgcataatcgtggttttcttgctagagacaaaatgaaggggaatggtataatgcctagcaatgggttggacaacgggaatagttttcagatgggaagacttaaaagaaacagaaaaaagrtcgctgagccttgtgtgtgagtgcgtgcatgtgtgcaaacatgtcttgatgtttgtctggccatgtgtttaaccctcagaaaaatgatgagggtggaggcatttttagaatggcttgaatgccttctgacctagagatagaggaaggagccatggatcagtccttttttctttgacttaggtaattgaaaagggtgtatgccttctctcctggcccagagtataatctttactggggctggacttcttgctgcccaa

SEQ ID NO: 779989 - DNA, 645 bp, Homo sapiens
gtccttgaagcttacattcttggaattctaggactctttctgggattcttttaggcatagtctatacatgtagaccagtttcagtaaaaatgactgaagtaggagttggctgaagtcaaagaaacagcaatgtggttgtttaaactgctttccttcacctttcccaggccagattttggtggtgagcaggctagtggctggtcttcctataaagtgtaccacctgcctaatctcttagtttgacagggtgtaggtcagagaaagactaggatctgacaccaccagaattcccttttttaaaatgaagtgagtttgcccctaataaaggccgtttataaaagccaaggatactatgtccctggggagagattcagaactggcctctgagctgaaagatgaccgtttcttgttggtgtcttggttaggaaatcaaacttgaggcctttgragagtgttcgtgtgtcactttcgggaggttataatgcttacgcagaggctggtcttgaatttcttcaacctaagggaaagtctcttttttgatattgttttttatagtgaaggaccttataaaggagatggctccttgtgcttttccttgggaaccctagtcattgagctggcagcctctctgtggggtcaaggatt

SEQ ID NO: 779990 - DNA, 384 bp, Homo sapiens
agccatgtgaatacactgtaattgcagatattataatactttaccccaaagcacgtcagcctgaatctctctctcttttttttttttgagacagagttttgctcttgttgcccaggatgaagtacaatggtgcaatatcggctcactgcaacctcctccacctcctgggttcaggcaattcttctgcctcagcctcccaagtagctgggattacagrcatgcaacatcacacccggctaattttgtatttttggtagagatggggtttcaccatgttggtcaagttggtcttgacctcctgatctcaggtgattcacccacctcagcctcccaaagtgctgggattacaggcatgagccaccgtacccagcccagcctgaatct

SEQ ID NO: 779991 - DNA, 621 bp, Homo sapiens
aaataaaggtattactgcctgtgctctcatctggagcccaggttcctcttctatctcattaaggtcgtgggtagaattcagatcctatggttataggactgagatcctcattttcttgctagctgtccactggaaccactcatttcctaaaggctgcctatagatccttgccacatggccccctcataggcacttcacaacagtgctgtttgcttttttccaggctagtaggaagtatacatcttgcttacttcagacttctctttttatcctctagacccagatttaaagggctcatatgggcagagcatggtggctcatgcctgtaatcccagcactttgggaggctgaggcaagaggatcacttgaatctaggtgtttgagaccagccctgacaacatagygataccctcttctctacaaaaagtttaaaaatagccagacatggtggtgcacacctgtagtcccagctatttgggaggctaaggtgggaggattgcttgagcctgggaggtcgaggctgtagtgagccgtggtcgggccactgctctccagcctggacaacagagcaagagcctgtctcaaaaacaaacagaagggctcatatgattggatctgacc

SEQ ID NO: 779992 - DNA, 610 bp, Homo sapiens
aataaacaagtccgcctccagaacatagggacatctgcagggtcccctccagcccctctcctctaaatcccacactaccctggagagacagtaccacagagatgcacacaaggtgacagaggaacttttttcagtttccctgaacaagcctcagaaaaagtgaacatgcattgcctatccatttacaacatctaacagcccatattcctttaaaaaaaaaaaaaaacaggctgggcacagtggctcatgcctgtaattccagcattttgggaggctgaggcgggcagatcacctgaggtcaggagttcgagaccagcctgaccaacatggagaaaccccatctctactaaaaatacaaaattagccgggtgtggtggcgcatgcctgtaaycccagctactcgggaagctgaggcaggagaatcgcttgaacccaggaggcggaggttgcagtgagccgagattgcgccattgcactccagcctgggcaacaagagcaaaactccatctcaaaaaaaacaaaaaaaaacaaaaaaaaaaacaaaaaaacaataaagcactgattacatattcagaggatgtgctatatatccaggaaaaaattatgatca

SEQ ID NO: 779993 - DNA, 532 bp, Homo sapiens
cagtttcactgcatgcatcaggtatgtgataccatatgccggtaatggtcattttgtcttctcctcttgtatcttttttgtttcccctcacaagacagagtttcactcttgtcacccaggctggagtacagtggcgwgatctcggctcactgcaacctctgcctcctgggttcaagcgattctcctgcctcagcctcccgagtagctgggattacaggtgcctgccaccacgcccagctaatttttgtatttttagtagaaacgaggtttcaccatgttggccaggctgattttgaactcctgacctcaggtgatcccccccagcttggcctcccaaagtgctgggattacaggcatgagccactgtgcctggccctcctctcatgtcttattcagagcctgatggtgcggtgcatgcttccagaacagtagcgatgggtgtgcctcatgaccgtaatggagctgctgctcgctccaccgttaaacaccatgctgactttggctgagctgtatttttttcttatcatgttat

SEQ ID NO: 779994 - DNA, 616 bp, Homo sapiens
ctaccattttcttctcttcatccacttcctcagtttttgctgaatcttcactttggagttttcttctcttttgcttgggagccatgaagccttggagaaatttctttatgacactggcctgaagggcaatcacacactcaccaaaatccttcaatttctctaatgaaatgacctataggaaaggattttaaaaccagactgagaaaaggccmagaggaagacgaaaggaatccaacctcaaattcaaataaatctagactcaaatgccacataacattcattaaacaaaatcgagagccacataccattaatttaactgtgctcctcagttcactgcatggctcatgcatttaaaagtacttgactggccgggtgcagtggctcacgcctgtaatcccagcattttggggggccaaggcgggcgaatcacctgaggtcaggagttcaagaccactttggccaacatggcaaaaccccatctctactaaaaatacaaaaattagccaggcgtggtggcacgtgcctgtaatcccagctactcgggaagcaggagaatcacttgaacccgggaggaggaggttgcagtgagccaagatcgtgctactgtactccagtc

SEQ ID NO: 779995 - DNA, 597 bp, Homo sapiens
tcacttctttaactaaattttttattgataaatatgggaagtgatccagtagggaaccatgttggtttagaggcaagacactttagggaaaaagaagtaatcacgcttatgttatggcacaaatttgaagacaccctttggtctttctggatgcaataatgttactctttgtttcccagctactttgcccatatttctcctctgtagctgtggtacccccagaactcttattgccatggcttcgtttattgggacagatggtctcagtcaggttgtattatataagaaatcagcatctggcttagttttattgctgtctttgttttgtttttttttgtttttttttgagacagagtctcactctgttgcccaggctakagtgcagtggcatgatctcggctcactgcaacctctacatcctggatttaagcgattctcgtgcctcagcctcccaggtggctgggattacaggcgagtgccaccatacgtggctaatttttgtatttttagtagagatggggtttcaccaggctgatcttgaactcctgacctcaggcgatccccctgcctcgacctcccaaagtgttggtattacag

SEQ ID NO: 779996 - DNA, 600 bp, Homo sapiens
tcaagatagtttgactataggtaattttctttttttatctttgtaataaacattgatagcatttgcaataaaatgtgcatattaaaatatagctttttattaactcaactcataaatcacttataaagaacacagattgattatcatcagatttggagtctgttaycttcagcaaaagaatgcaaataggaatcaatcttgtcaacctaaattacaaacagatagaggctctcttaatagaaaattatatttatttggaaatagaacgttgcagtggtgacgcacaaggaagaagtattttttgtgtaagattgcaatggcctttgtgcaagctcgtggtttttgcagtctcctatgacaatatttttgccaagcatttataaatgagaattctctcttcatagccttctccagctctatttgttagtttagtttttttttttaacacaagtgacaaatttgattctgacaactttcacaatttccaactattctagttgtagttctttttgaattcagttgaagtttaaaagtcatttaatctccaatattgacaggattcaataagtggccaatataacatggattgacatcaaaatg

SEQ ID NO: 779997 - DNA, 612 bp, Homo sapiens
taaaagaaaaaaagaacaatggaaagagcaaaacataggtaaataaagtagactcatttcctcttgagattactaaactatatttaatggttgaaggcaaaagaataacattgtttcaaataggcagatagaatattttgacaattatgcatggagaaaggtaaaaatgagaagtaatagttytacatgtcactcaagctggtaaaatgtcaacattagtagactgtgataagttatgtatgtcccaagtaaaatctatagcaacaactttaaaatctatataaaaagagaattttatatagataactaaaagtagaattttaagaaattctacttttatatagatagctaaaagtagaattttaagaaatttaacccaaagaaacgcagaaaaaaataagagttaacaaaaagatttaaaaaaaaaaaacatggaacaaccagaaagcaaaaagtaaaatgacagataagccctgacatatcaatatttattaatgaaatgtaaattatctaaatataccaattaacagacagaaatggcagagattttataaaatgacctaactataagccatcaacaagaaactccctttaaatattatcatagattga

SEQ ID NO: 779998 - DNA, 612 bp, Homo sapiens
taaaagaaaaaaagaacaatggaaagagcaaaacataggtaaataaagtagactcatttcctcttgagattactaaactatatttaatggttgaaggcaaaagaataacattgtttcaaataggcagatagaatattttgacaattatgcatggagaaaggtaaaaatgagaagtaatagttctacatgtcactcaagctggtaaaatgtcaacattagtagactgtgataagttatgtatgtcccaagtaaaatctatagcaacaactttaaaatctatataaaaagagaattttatatagataactaaaagtagaattttaagaaattctacttttatatagatagctaaaagtagaattttaagaaatttaacccaaagaaaygcagaaaaaaataagagttaacaaaaagatttaaaaaaaaaaaacatggaacaaccagaaagcaaaaagtaaaatgacagataagccctgacatatcaatatttattaatgaaatgtaaattatctaaatataccaattaacagacagaaatggcagagattttataaaatgacctaactataagccatcaacaagaaactccctttaaatattatcatagattga

SEQ ID NO: 779999 - DNA, 526 bp, Homo sapiens
aagaactatagacccatgtccctcctgaacattgacacaaaattactctgaattataagcaaatgaaatccagcagtacattaaagaaatgacatagaatggagaagatttatcccaggattgcaaagttgatttaccttaaatatctaattaatatcattaccattcaccatatcaataaaataaagaagaaaaactatatgaacatcattagatgcagaaaaggcattagacaaaatacaacacatattcatggtaaaatatctcagcacattagggatagaaggaatcttttcaacctgataaagggcatctacaaaaaacaaacaaacaaaaaaacacagctaacatcctgcttaatgataaaagattcaattttaaggmtgagagtataacaagtatgtctgtttttaccacttctatttaacattacaagggtcctagaccacggttctaattcatgcaaaaaccaacgcaaagaataaaaggtatacaaattagaaaggaagaagtgaagctgtctgta

SEQ ID NO: 780000 - DNA, 559 bp, Homo sapiens
aaaccatgttttcctctgccctcataccacaacaacaatcatcaacacagaagaagacttctgtgaccaaagtgtgggggtttttccccgggtatcctccaatcagttctaacattatgtacccagaaacagcaacagatatcacatatggagggctcagtcctacaagtctgcccccttctcccaccagcctcaagtccaggcctccagaactcctgacmgatcagcttcaagttggggttcccatgaccctatctttgggtttgatttatttattagagcagctcatagaacttacagaaacatatttactggtatgttatgaaggatattttaaagaatacaaataaacagccaaatgaagagatacatagggaaggtctggaagcatggacaactgtgtcacaatgtgactgtacagaaaggatatgacctgaataaacccagcaaggcctgcctgctcagggttttctggatctctctgtgcagcattccttcctgcggagtatggggtagaacccactctggaatgaggttctcatgacccacaatcagatga

SEQ ID NO: 780001 - DNA, 589 bp, Homo sapiens
taatccctttctcatcacttttctttccaaaggaactaattacatatgggttgcaataatagttgttcatattaatgagcatttacttagtgtctgacatcttgttaggtactttagactcattatttaacccccacaactaacctcacctatgagctatgtatcatcatcactgttattattagtatgataattctccttttacagaggtggtattcaaggctcaaattatttagataattggccaaaagttgcacaagaagtaaactacagaactggaattcaaacctctctcagactgcctcagaagtctatgctatattgtcyctcctcactccaagagagtgttcttgattttggttggcacatattttctcaataaattgatacaaaatggagaagtaaggaaatcctcacccctttttgtcatagtcagaagaacataggcaagcaagaagggtaatttcaaaattatttaaaattgtgattagaatttcttgaataccatgaataaaatgtatagtctgaagctatacttctttaacatgtttttgtcctcgcatccactattcttatcccctccagataa

SEQ ID NO: 780002 - DNA, 589 bp, Homo sapiens
taatccctttctcatcacttttctttccaaaggaactaattacatatgggttgcaataatagttgttcatattaatgagcatttacttagtgtctgacatcttgttaggtactttagactcattatttaacccccacaactaacctcacctatgagctatgtatcatcatcactgttattattagtatgataattctccttttacagaggtggtattcaaggctcaaattatttagataattggccaaaagttgcacaagaagtaaactacagaactggaattcaaacctctctcagactgcctcagaagtctatgctatattgtctctcctcactccaagagagtgttcttgattttggttggcacatattttctcaataaattgatacaaaatggagaagtaaggaaatcctcacccctttttgtcatagtcaraagaacataggcaagcaagaagggtaatttcaaaattatttaaaattgtgattagaatttcttgaataccatgaataaaatgtatagtctgaagctatacttctttaacatgtttttgtcctcgcatccactattcttatcccctccagataa

SEQ ID NO: 780003 - DNA, 574 bp, Homo sapiens
tgatttgtgagatgccagcatgaaatttttatgattacgtgggatgctgctgaaaacagtgatccacacttttcaaatctatttaaaaacagaattgaattttgatccaactgagtctccggggatctcctataactcacattctcacttcctaggtgaaaaatgaggtttttcctatgattcaagtaaaaaactgatttagtctgtctaatctaggttcacatgggcgaattmtgttaaaaatgtcatatttatataagataattcagctaactaaaacttaggatttttcctcgctttttttttacactcctagtcactccaaggtgttgtcatataaaaagtttacaatactttacaagtagagacttcttaagctgatatgaaaagaagctgaatataaaattttggagctattaaatattcaaacattactagggaaaaagaaatgggcgttgagaaaagatggagttttggggaataggagactggaggagtccaaactgtaaaggatcagtgtgcatgaaggaaaggcatattcttctaggtgcaagataggtaaggcagagtagtt

SEQ ID NO: 780004 - DNA, 634 bp, Homo sapiens
aaatgactgagaaatagggatgctatcaccttctatgttcagatttcagagatggttcccagattcttgaggatgacattttctgaattataaaactagcaaaatatttacatacatttcaaagggacagagaaaaatttacatttgttaagtattctaaagtaaatgttctaagaaaagagagtttggcagcctattgtcaggaagaaacctgtktaatgtaggcaagcttaggctttttgggtcaattacattcaaaaattgcctaggaaatgtaaaatgaacaaacctaccaaaaaacaaaacaaacaaacacataaattccaggtcctactgtggaccgattaaatctgaaaattagaatctctagtgacctgggcatcaatattttgaaaagctactcaggtgactggaatatggactgagcatcatatgtctatatgcctgtcccataacattatactccaacacctctcccctaactgagccataatggtctttagccccatgatcggcttattggctaggattattttagatgtatttttagatgtagtgacggtttgtaggggcaaaggggaagttttatctctgaaggcctctgaaaatcaactgacgaaaggcagattaatac

SEQ ID NO: 780005 - DNA, 618 bp, Homo sapiens
tggtgttagagctttactgcttagtatgagaacttaaacactcatctgttcttgcttcatgttatgggcaggacttacagtgagtgctggaactaaacctactacactggaactaacttgctgccctgatgttgttttctaatatgaggaagacttatagtgaactctggaacttcaatatttctccagaacaaaattactgcgcctctgttgtttcccattctggggaagacttaaagtgagcaccagaacctaaatgtcgtcttagaactatattgctgccctgccattgtttccagtcttgggaagacttagtggacactagaactttattctgaccttttagttgtttccaggcctgaggaaggctccatatgagcacctgggaattgtggaaaatcctattaggtattttcatggattgtgcccctggagtrctatagcactggccaatctcttcaaagagttgtatctccattgattagagtgcaagtagccatcaatatcttcgtgacagtcagtgagctcagcaccccactcttcgtccccaattcactccacttggttcagccctcctggcactttcaatggttcaaatggaataggactgaagtagcc

SEQ ID NO: 780006 - DNA, 578 bp, Homo sapiens
tagtcccagctactagggaggctaaggcaggagaatggggtgaacctgggaggcagagcttgcagtgagccgagatcgtgccactgtacttcagcctgggcaacagagcgagagtctgtcaaaaaaaaaaagaaaagatgaatatttatagctgtgttgtgcttaaatsaatgtttatacaaacaataggaatcaaaaatatttatatttgatcatagggactttttattcacctaatatatcatgaaataatttccatgtttaaagctatacattattaaaataaagagtgtatggtatgttttgctgtaatttatgtaagcagtgcctattaatgaagagttaggtgctttctaacttactgccctgatgaatcagtgttctgagtgctctcatccccagaatatgtattgatagatgaactgctggatcgtaagataggaaatctcatattttatagaaatatttacaagttgcagtgagccgagatcgtgtcactgcactccagcttgggctacagagtgagactcagtctcaggaaaaaaaaaaaaaaaaaaaaagaaatatttacaagttag

SEQ ID NO: 780007 - DNA, 555 bp, Homo sapiens
gaagctccaatgctcgcccagccatcctggtctggatatcaatcatccgtgagctggtaaggcagaaacacaagtggacatggtaaaggagttctgggtgaatacttcccccagaccaaaaaacaaaaaacaaaaaaaagccaagttaaaaacaaacaaaaaacggatcaatcatcccgaggtactcttttctgaccccttctaagttgggatcaacaaattcaaccattygaaagtgaccccaaaaattccatgtaattcaggaccatgttattttgtggtaacaacttatcattgcaccagctgccaagcagatgtgtaaaagcaaatcacttagctagtaataaacaaccactgggatctgcaactctattaggctgggctgctctagcacttgttgaaaacattttctccaaaaattattctccatagtttctctcatctagaaggatcaacaatgcacaaaaacctacagcagcactgtctgtgagaaacagaatgtgagccacgcatggcttcccaatagccagtcaagaagaaacttaaagaaacagg

SEQ ID NO: 780008 - DNA, 555 bp, Homo sapiens
gaagctccaatgctcgcccagccatcctggtctggatatcaatcatccgtgagctggtaaggcagaaacacaagtggacatggtaaaggagttctgggtgaatacttcccccagaccaaaaaacaaaaaacaaaaaaaagccaagttaaaaacaaacaaaaaacggatcaatcatcccgaggtactcttttctgaccccttctaagttgggatcaacaaattcaaccattcgaaagtgaccccaaaaattccatgtaattcaggaccatgttattttgtggtaacaacttatcaytgcaccagctgccaagcagatgtgtaaaagcaaatcacttagctagtaataaacaaccactgggatctgcaactctattaggctgggctgctctagcacttgttgaaaacattttctccaaaaattattctccatagtttctctcatctagaaggatcaacaatgcacaaaaacctacagcagcactgtctgtgagaaacagaatgtgagccacgcatggcttcccaatagccagtcaagaagaaacttaaagaaacagg

SEQ ID NO: 780009 - DNA, 570 bp, Homo sapiens
tgggattacaggcatgcgccactacgccggctaattttgtatttttagtagagacggggtttctccacgttggtcaggctggttcaaactcccgacctcaggtgatctgcccgcctcggcctcccaaaatgctgggattacaggtgtgagccactgcgcctggccattaatttttttttttttttgagacagggtctggctctgtcatggaggctggaacctggctcactgcaacctctgcctcccgggttcaagcagttctcatgcctcagtctcccgagtagctgggactacaggcgcgcatcaccacacctggctgatttttttctgtttttggcagagacaggatttcaccatgctgsccaagctgaggatgtgtcctaactctgtaaagctccatctcctgcttaatgggaccctgaggtgtttggttccaatctgaggagggctgaggtcaccgaggactctaagcacaccaggtggtgtgatcatgtttcccgcatagtaattaggggagtgatgaggacatctgagccctgtatgggggctggtcccaggcctgggaggggt

SEQ ID NO: 780010 - DNA, 620 bp, Homo sapiens
tctgcatattcactagtacttgttgttgtctgtctttttgattatagccatcctggtgggtatgaagtgatatctcattgtggttttgatttgcatttcctgatggctaatcatgttgagcatcttttcgtatgctttttgaccattcgtgtatctttggagaaatgtctattcaagttctttgtccatttttaaaaaaacttttaggttcagggatacacatgcaggtttgttgtataggtaaagctgtgtcataggggtttgttgtacagattattttgttacccaggtgttaagcccaggacccattaattattttttccgatcctctccctcctctcaacctcttacctccagttagtcccagtgtctgtcttctttgtgttcatgtgttctcatcatttaactcccacttataaataagarcatgtggtatttggttttctgatcctgtgttaatttgctaaggataatggcctccagcgccatccatgttcctgcagaggacatgatttcattctttttttatggctgcatagtattccatggtgcatatctaccacattttctttatccagtccactgttgttgggcatttaagttgattccatgtctttgct

SEQ ID NO: 780011 - DNA, 630 bp, Homo sapiens
aaggaattagtttaattgagggacataaagcaggattgtcaacaggcactatagtacacccatgttcatagcaggattctcactatatccaaaagatggaagcaaaccaagtggccagtgatggatgaatggataaacaaaatatggcttacctacatacatacgtacatatatatatatatatatatatatatatatatatatatacacacacacacacacacacacacacayatacacacacacacattatatatatgcacacatgataaaatacaattcatccttaaacatgaagaaaattgtaatatattttacaatataaatggaccttgaagactttaggctaagtgaaataagccagtcacaaaaggacaaatattgtataattccacctatatgaggtatctagagaagttgaattcataagaattcataaagaagtagaatggtggtttctaagggctggagggaagaggtaatggttaggtggtatttaacgggtctagtttcagttggggaagatgaaaaatatccagacgtgactggcagtatgttgcacaacaatgtaaatatgcttaatgccacagaactgtaaactttaaaatggttaaaatagtaaattttatg

SEQ ID NO: 780012 - DNA, 630 bp, Homo sapiens
aaggaattagtttaattgagggacataaagcaggattgtcaacaggcactatagtacacccatgttcatagcaggattctcactatatccaaaagatggaagcaaaccaagtggccagtgatggatgaatggataaacaaaatatggcttacctacatacatacgtacatatatatatatatatatatatatatatatatatatatacacacacacacacacacacacacacacatacacacacacacattatatatatgcacacatgayaaaatacaattcatccttaaacatgaagaaaattgtaatatattttacaatataaatggaccttgaagactttaggctaagtgaaataagccagtcacaaaaggacaaatattgtataattccacctatatgaggtatctagagaagttgaattcataagaattcataaagaagtagaatggtggtttctaagggctggagggaagaggtaatggttaggtggtatttaacgggtctagtttcagttggggaagatgaaaaatatccagacgtgactggcagtatgttgcacaacaatgtaaatatgcttaatgccacagaactgtaaactttaaaatggttaaaatagtaaattttatg

SEQ ID NO: 780013 - DNA, 603 bp, Homo sapiens
aacactactccactcctcctcagtataaataggtttgattcacataagatatccaggatgggagagccaaatactgaccatcatcatatcctgatgataagtatgctagttctggcactgtaagaatgccgtttccttttctcaggaagaaccaaggcagagttagcccctggggtcaaacttaatcaccctctctgacagaagttgccagtgsatctggattttgctaggtatttctctagtatgctttcaaggtttgcttcacaaaaactttgaaaaccatactgccgaagtcaacgtgtaaaatatgttgaattatccctttgggagaggtgattggagaaaccaaataatcacatcctccttataaccttgatgaggtttagctatgatttatctatggtggcccatgttatgtgtcatccactggcgaagaagaaactccttttcttttgtgtggcagtgattgatgtctaattgggaatcagagttttagctaagtctcaatgttcctagactcccaccaatggagctaatccaccccaaatccatagacaacccaacttcagaatgaagtagaaccagactttgttttatcttgcc

SEQ ID NO: 780014 - DNA, 623 bp, Homo sapiens
ttatgcaggatatgtacactagggacagggaatcttggtagccatcttatatttctgcccaccacaatattatatgtaatagtttttgtattttcagaatttgtttatttccactttcttcttattataaataatgttttgggtgaaatgacattttgtaatttgcattttctaatgaagttaaacattaattttcatatgttttttgaccatgtrtatttcttcttatgtgaattattccttgctgttcttttttacagtattttttctaattgatatataatgctttttcaatagtaaggttactaagcctttgctgatttaaaaaaaattgtttattgaaaggagtcacactatgttgcccagactagtcaataagcaatcctcccactttggccttccagagcactggaattacagttgtaagtcattgtgcctggccccagctgctaattttatcacaaatattttacctttgcttactttttgatgcacaaatattttaaacatatatatacacaattctacctgtatctttctttttctttctgcctttggagtcatttagaaagtccttttgtaccccaaaattttagaagtattgagttacatttctgtgttac

SEQ ID NO: 780015 - DNA, 623 bp, Homo sapiens
ttatgcaggatatgtacactagggacagggaatcttggtagccatcttatatttctgcccaccacaatattatatgtaatagtttttgtattttcagaatttgtttatttccactttcttcttattataaataatgttttgggtgaaatgacattttgtaatttgcattttctaatgaagttaaacattaattttcatatgttttttgaccatgtatatttcttcttatgtgaattattccttgctgttcttttttacagtattttttctaattgatatataatgctttttcaatagtaaggttactaagcctttgctgatttaaaaaaaattgtttatwgaaaggagtcacactatgttgcccagactagtcaataagcaatcctcccactttggccttccagagcactggaattacagttgtaagtcattgtgcctggccccagctgctaattttatcacaaatattttacctttgcttactttttgatgcacaaatattttaaacatatatatacacaattctacctgtatctttctttttctttctgcctttggagtcatttagaaagtccttttgtaccccaaaattttagaagtattgagttacatttctgtgttac

SEQ ID NO: 780016 - DNA, 623 bp, Homo sapiens
ttatgcaggatatgtacactagggacagggaatcttggtagccatcttatatttctgcccaccacaatattatatgtaatagtttttgtattttcagaatttgtttatttccactttcttcttattataaataatgttttgggtgaaatgacattttgtaatttgcattttctaatgaagttaaacattaattttcatatgttttttgaccatgtatatttcttcttatgtgaattattccttgctgttcttttttacagtattttttctaattgatatataatgctttttcaatagtaaggttactaagcctttgctgatttaaaaaaaattgtttattgaaaggagtcwcactatgttgcccagactagtcaataagcaatcctcccactttggccttccagagcactggaattacagttgtaagtcattgtgcctggccccagctgctaattttatcacaaatattttacctttgcttactttttgatgcacaaatattttaaacatatatatacacaattctacctgtatctttctttttctttctgcctttggagtcatttagaaagtccttttgtaccccaaaattttagaagtattgagttacatttctgtgttac

SEQ ID NO: 780017 - DNA, 623 bp, Homo sapiens
ttatgcaggatatgtacactagggacagggaatcttggtagccatcttatatttctgcccaccacaatattatatgtaatagtttttgtattttcagaatttgtttatttccactttcttcttattataaataatgttttgggtgaaatgacattttgtaatttgcattttctaatgaagttaaacattaattttcatatgttttttgaccatgtatatttcttcttatgtgaattattccttgctgttcttttttacagtattttttctaattgatatataatgctttttcaatagtaaggttactaagcctttgctgatttaaaaaaaattgtttattgaaaggagtcacactatgttgcccagactartcaataagcaatcctcccactttggccttccagagcactggaattacagttgtaagtcattgtgcctggccccagctgctaattttatcacaaatattttacctttgcttactttttgatgcacaaatattttaaacatatatatacacaattctacctgtatctttctttttctttctgcctttggagtcatttagaaagtccttttgtaccccaaaattttagaagtattgagttacatttctgtgttac

SEQ ID NO: 780018 - DNA, 600 bp, Homo sapiens
aggctcaaagtgacacctgtgcagaggctgccagtgctgtggtattgcaggcccagattcccttcttttaccttaattagctggacgtataggatttggctccagaaaacccagtttttaatgcaagcttcgaccatcttacttgctgtgtaaccttatggaagtgagtccacctctctgagtatttgtttcctcatttgtacaaccagcctgagcactatctaaactctcataggtttcatgaggttgtttgttttgttttgctctattgtgggtcaagttcagtgagagaagccaggtacaaggagtggagcttgcagtcgaattaaaaaacaatcaaagcaataattttaatgcaacatgaggaatgtgagaaaagtgttaaaagtgatttaataaatgcatatgtgcrtagtgttcaataaagcctgagggaaatatgtggtgtaggcagaaacgacgaatcaggcaaagcttatgtgaagtggtgcttcatctgaggatggaaggtgaggagtcaggtcagggaaacacagtgggaggaacatcaatctagagaagcttcagtgtttggcttatttcacttagcacaatgtcctg

SEQ ID NO: 780019 - DNA, 600 bp, Homo sapiens
aggctcaaagtgacacctgtgcagaggctgccagtgctgtggtattgcaggcccagattcccttcttttaccttaattagctggacgtataggatttggctccagaaaacccagtttttaatgcaagcttcgaccatcttacttgctgtgtaaccttatggaagtgagtccacctctctgagtatttgtttcctcatttgtacaaccagcctgagcactatctaaactctcataggtttcatgaggttgtttgttttgttttgctctattgtgggtcaagttcagtgagagaagccaggtacaaggagtggagcttgcagtcgaattaaaaaacaatcaaagcaataattttaatgcaacatgaggaatgtgagaaaagtgttaaaagtgatttaataaatgcatatgtgcatagtgttcartaaagcctgagggaaatatgtggtgtaggcagaaacgacgaatcaggcaaagcttatgtgaagtggtgcttcatctgaggatggaaggtgaggagtcaggtcagggaaacacagtgggaggaacatcaatctagagaagcttcagtgtttggcttatttcacttagcacaatgtcctg

SEQ ID NO: 780020 - DNA, 547 bp, Homo sapiens
ctttattcatagtgtgacaatacaaataaggggtcagatagctggggttccagttatgactccagcactttttagctctgtggcctttcctcacctgtttctccatctgtaaaatagtcggaatatcagtactacctcataaaatccttacatggattaaatgaggcmatgcatgcaaattacagcacccagcacacaataaggttgacaatgttatctgacattggctccatattcaggatttaagttgggatttgtgaaaacctggtctgcatctttctggcagaaactaatagaagaaactccacacagattaaagatattaaagcaggaaaaaaaaaagcccacacaaccccacaatagattaccaacccaaatacctagcatatggagtcaggaagcagaagacgtcatatctgagttacagctgaaagcttcatctcagcacagatgggggacacaggacccatgtccatgtcttgggtaggtgtgaccacttccaccaggaactatgctctgtgcttccttgcattgctcatggggaaca

SEQ ID NO: 780021 - DNA, 531 bp, Homo sapiens
aatacctagcatatggagtcaggaagcagaagacgtcatatctgagttacagctgaaagcttcatctcagcacagatgggggacacaggacccatgtccatgtcttgggtaggtgtgaccacttccaccaggaactatgctctgtgcttccttgcattgctcatggggaacaaatgttgcctctctwtggaggccagtgccctctccacctggagtattcacagggggtctcctaggattccctctcatttacttcttatgtaaagacttttttattgaaagtaacaaatatccaaatcaaactataacaggatcagaaaggatggggacagaatgggatctgtataaacaactagacccaggtactcagcattctgaggacttccctggaatctctaactctgcttctcctggtgtatacctttacttatttatttatttttagacaaattccttcatgtggtaggatcattgttgtggagaattccagtatcctctattttgtaacctaacagtggcagctcctgttaa

SEQ ID NO: 780022 - DNA, 647 bp, Homo sapiens
ccaggtggcaaaatttggccgaacattgagtttcagttagtttcagtctggtttattttgcaagcgcattcattatttattccccagagagtgctgaaattcataaacttttaaccagttgctctggtataaccacactaaattaatattctgttcacatgcaatgtggagatcattatgaaagccacgtatatgtcacagrcatgtgcctgaagtgtcaaatgaaagattttaaagacttgaatgattatgcaatatacaccggccaaatattcccaagaaaatctgcttataaaaataagttttatggaataaaagtaccaaattaaaaacatattttgaggaataaattagcacttcttgaggaatgaaattcttactttggtggggaggtaaaagacaaagcaagaaaacaaaattgcagaaatggctcaaattcaagaaaagtcaccctcccccaggagtgatttcaccatgtgaagaatggtgcttagcacaaggcaggctttcttcccagttcccctttggaaggaccacagaattttgcacacacacacacccttatttatttattttaaattgccaagtttaaacctgtgtttctaggtaaagtgccttctttattgctccaatgaaaattctgtagg

SEQ ID NO: 780023 - DNA, 647 bp, Homo sapiens
ccaggtggcaaaatttggccgaacattgagtttcagttagtttcagtctggtttattttgcaagcgcattcattatttattccccagagagtgctgaaattcataaacttttaaccagttgctctggtataaccacactaaattaatattctgttcacatgcaatgtggagatcattatgaaagccacgtatatgtcacagacatgtgcctgaagtgtcaaatgaaagattttaaagacttgaatgattatgcaatatacaccggccaaataytcccaagaaaatctgcttataaaaataagttttatggaataaaagtaccaaattaaaaacatattttgaggaataaattagcacttcttgaggaatgaaattcttactttggtggggaggtaaaagacaaagcaagaaaacaaaattgcagaaatggctcaaattcaagaaaagtcaccctcccccaggagtgatttcaccatgtgaagaatggtgcttagcacaaggcaggctttcttcccagttcccctttggaaggaccacagaattttgcacacacacacacccttatttatttattttaaattgccaagtttaaacctgtgtttctaggtaaagtgccttctttattgctccaatgaaaattctgtagg

SEQ ID NO: 780024 - DNA, 579 bp, Homo sapiens
tccctggtgggctctgtatttgttttgctgctggacagaagagctccttcttttagaatcatttgcagcagtggcctctacatactggttggaaatctataattatatggaataaatagacacaaaatgagaacaagaaggattgaagtgatgaatgtttcacacagctaaagttactcrttttcaaagaatgtcctctgctcaataatctgttcttcctacttcgtggtgtgaaaacagcctttgtgttgtgaaatggtaatgacagcagagaatgctctgggaattgtttgctattttccagtgtcccaacttaccccagccctgccatgcccatatttggacaaatatctggtatccctatgttggtatctgccccacagtatttttttggaggggagggggcggtggggagggcggatattttttccatttcttactgccaacaatgtgggaactactgatttgtagtaattaaagactgtgaagatttccaaagagagaaatggaacacaaaattgtgtcaggtgtggcggctcacacctgtaatcctcgcattttgggaggccgaggctggca

SEQ ID NO: 780025 - DNA, 579 bp, Homo sapiens
tccctggtgggctctgtatttgttttgctgctggacagaagagctccttcttttagaatcatttgcagcagtggcctctacatactggttggaaatctataattatatggaataaatagacacaaaatgagaacaagaaggattgaagtgatgaatgtttcacacagctaaagttactcattttcaaagaatgtcctctgctcaataatctgttcttcctacttcgtggtgtgaaaacagcctttgtgttgtgaaatgrtaatgacagcagagaatgctctgggaattgtttgctattttccagtgtcccaacttaccccagccctgccatgcccatatttggacaaatatctggtatccctatgttggtatctgccccacagtatttttttggaggggagggggcggtggggagggcggatattttttccatttcttactgccaacaatgtgggaactactgatttgtagtaattaaagactgtgaagatttccaaagagagaaatggaacacaaaattgtgtcaggtgtggcggctcacacctgtaatcctcgcattttgggaggccgaggctggca

SEQ ID NO: 780026 - DNA, 623 bp, Homo sapiens
agtgattccttatatgtttacatgtgatttccctgagagagttctgcagttcagctagaatggatgtaaacctttccttatttctctttgctgcctttccctctggttatttcttctctcttatcctggcaggaaagctgaaaacaacaaaaatgttggatgcatatatgtggaatcacaggcaagacacattccagagtctctgtttggaaggatatgctggtcagccagtasgtagatgtggttttctttccaccactgggcatccactggatgtgatcttgaagggagaaacatgcagacttacggacagaagaagttagaagtttccagaaaggggcgagatcagttgttggttcatgactgaggacatacctgaagcagtaaagggagaggtttcttttgtcagttcacttgcagaggaacatttggcattttcttgtgggaaacacatgaccatgtttgttgaggagcacagaagggatctatctgactgtttaaaaaaaaggatgaattgtgggtgtggccagagtgtagtgatgggtagcatttaggtctaaaatactaattaatttaatagtctgcatgcttacacaaaagaaatgataaaaagcttgttattt

SEQ ID NO: 780027 - DNA, 623 bp, Homo sapiens
agtgattccttatatgtttacatgtgatttccctgagagagttctgcagttcagctagaatggatgtaaacctttccttatttctctttgctgcctttccctctggttatttcttctctcttatcctggcaggaaagctgaaaacaacaaaaatgttggatgcatatatgtggaatcacaggcaagacacattccagagtctctgtttggaaggatatgctggtcagccagtaggtagatgtggttttctttccaccactgggcatccactggatgtgatcttgaagggagaaacatgcagacttacggacagaagaagttagaagtttccagaaaggggcgagatcagttgttggttcaygactgaggacatacctgaagcagtaaagggagaggtttcttttgtcagttcacttgcagaggaacatttggcattttcttgtgggaaacacatgaccatgtttgttgaggagcacagaagggatctatctgactgtttaaaaaaaaggatgaattgtgggtgtggccagagtgtagtgatgggtagcatttaggtctaaaatactaattaatttaatagtctgcatgcttacacaaaagaaatgataaaaagcttgttattt

SEQ ID NO: 780028 - DNA, 582 bp, Homo sapiens
gctataataagatattgctgatgttttggctgatatgcaccagaaagccttgggaggaaagtggcctagagactgtaatgaatgagagcataatgtcctgcccttgaagccacacaatcagaaagtgagaggactacagaaaaaccagcagggcactggcattttccagttgagcattctgagctgacagtgaaaataacgaatgaaacacggcagagcagaagtggactttatttggaaaaccttgttttcccggaactgaagctaacctctgggacgagaggtttcagaacaatgaagaatcaacaaataagatgaagagacgcctactgacaaagacaaattccataccctggaactggacatcttcctggcagagggaaacatcctgctctaaaatgggcacaatcagcagyagttatgaacgtcggcttttccacttgcaaaagaaagattttaactttgcctgacaggaaggaacactgaccaagaaaacagtaagttatggattactttgctacggatgctggctatacctctttaggatactttttttatagaaaaccaagcattacttttctg

SEQ ID NO: 780029 - DNA, 623 bp, Homo sapiens
agtgattccttatatgtttacatgtgatttccctgagagagttctgcagttcagctagaatggatgtaaacctttccttatttctctttgctgcctttccctctggttatttcttctctcttatcctggcaggaaagctgaaaacaacaaaaatgttggatgcatatatgtggaatcacaggcaagacacattccagagtctctgtttggaaggatatgctggtcagccagtaggtagatgtggttttctttccaccactgggcatccactggatgtgatcttgaagggagaaacatgcagacttacggacagaagaagttagaagtttccagaaaggggcgagatcagttgttggttcatgactgaggacatacctgaagcagtaaaggsagaggtttcttttgtcagttcacttgcagaggaacatttggcattttcttgtgggaaacacatgaccatgtttgttgaggagcacagaagggatctatctgactgtttaaaaaaaaggatgaattgtgggtgtggccagagtgtagtgatgggtagcatttaggtctaaaatactaattaatttaatagtctgcatgcttacacaaaagaaatgataaaaagcttgttattt

SEQ ID NO: 780030 - DNA, 647 bp, Homo sapiens
gtggataatcctccagggtccttggccgcagggcagataatctcttcggggttatctgttaattaccagtgaatgtgtgaagtatttgtgcaaaggcttttgaagtgagctccacgcactgttgcctgggccgccactggccctgcttcccaggcagagggtttcgaggcccagcttggttcccctcaagtgctggtggtattctcttgctaaattgtttgcctttctaatgaagtgaactgtttgtttgactctgcggtagaaggtatttaactggggactaaagtaaacgttgaagacattcaaataagccatgcatatctgctttgtggagggaaggaaaacagtttggcctcactcacctccgggaagaatcgttaaggaactgtttaaataataaactgagccgagcgagcggatattgctgcagcccagtctggggcttttgtgctagtcctggckggcctgggaattcctctgtagcagccacgaggggagaagagagcggctggattcttgcagttagtaattgtgatttatatatgtgtagagggacttctgctgtgttcggtctaaacaagcccaattagccctcaggacagcaggccggtggatggcgactgtgttagcacagtgtgcgcaggccc

SEQ ID NO: 780031 - DNA, 577 bp, Homo sapiens
attgtaggatagacccaaatttaatagtttaaagaattgaggaagttggatccttttcaaagcgtacaacaagaatccaaactatatcagaagacagggagaagagagcaataaaatgccagatcggttactctaaattaacccaaactgtgaacagcacacagagaaaaatcaagccctttccctaagaactatgaagatacagcacaaatttacaggtatgagatcaagaaagctaaggcaggatgggagattgcagcttcaagagacatcaaaggtaacattctttaattayacaagaaaaaggaggagggccgaggataatgttgcctctattaagaaagcgggagggaaagctgttagcagatggctatgaaatggcaagagttgctgtttctcatgctttactctaggagggaaggaaggaaggaaacagggagggaaaggacggagggaaagaaatcacaagcaactactaaaaaagtgccatttgggtgggtgccaaattagaaaagataaataattacatggaatctttaagcaactggattcatgatcctgaactgagttgcagatg

SEQ ID NO: 780032 - DNA, 599 bp, Homo sapiens
actgtagatagtttctgctggaaccagtaacagagctagagtttcttatttgcaaatgtagtaagtatttgagaacactgtatgacatatttgtaggtgaaaactatcaagcttgttatacaaagataaatgtatctcttttacaatattcatcaccctctgcatagatatcataattttcaacctcaattaaatttactaaaagaatgttcattttaatgaagctttacaaactatttcagtatttaaatgtttagtagtctcttgccatggaaaaaggagaagctttmtcaatttttcaatcacaaatttatagtgacaaatataccattgagacaacaaaggctaggccatttcataatttacatgaatatataatatctagatccctagatatgccataagggtagtctacagaagctaccagaacataatagtaccttgcacttgtaaaacaattactacaacatgttttcatgtaatgtatcttactttttatatgtaaatgtatttttctttattacaataaaaatacccacacaatataagaaaattggaaaacagacacataaacagaagaaaaataaaacaacattact

SEQ ID NO: 780033 - DNA, 569 bp, Homo sapiens
tgtttgcaaagttctgaaaactatttggctatagtattgtgtaagaaaactgtcatgcaaaagtgaaagcaatattttttaagggtaaataaaccaggtatcatagcagacaccgtggatcactaagatgaaacagttataggttctgttttaggaacattcgtcttgtagaggtaagaagactgcttcaagaatcttcytgaccactaaccttggttggatcactctcttctctgcttgaacatcactgttttccccccttcattaaatctgcttcataaattgaagcaatccatttatttgtctgttgtacccactagaccataaaccccttgaaggcaggaatgatgccctactccttacaagagactatgtgaaaggcaggacatagaaacttaacaggcagagtataattataccataggaaatttgtcgcattttatcattcagaggtactgatacggtttggctctgtgttcccacccaatgtggaattttaatccgcatatgtcaggggagggacctggtgggagatgattagatcatggaggaggatttcccccatgctg

SEQ ID NO: 780034 - DNA, 592 bp, Homo sapiens
aaaaagataaaaattggaactattacctgctaataaaattatttggttcaagcgattctcctgcctcagcctcctgagtacctgggattataggcatgcaccaccatgcccagctaatttatttttgtatttttagtagagatggggtttcaccatattggtcaggctggtcacaaactcctcacctcgtgatccgcccgcctcggcctcccaaagcgctgggattacaggtgtaagttatccttttctttcccttgttggaggaggactcaattccacagcttcatcttagatttggcgtatgataaggagtccatgcaacccccctcacgacacrtttttgttccaaactcaactccaagctttaggtcaaagccctaagaaagaaaactgggtcaaagaaatccagaggcagatgatgactgaagttaaaaggcacagttaaaaggtgagcatggctaattcccactgattaagccaagcctcccatttcatgaataaatgtcatgctaatatccatggcataaatgaggtctagggaactccaaggctactggcagtaagggagagagagatataggtgagagcagat

SEQ ID NO: 780035 - DNA, 590 bp, Homo sapiens
ggaatacagatgaaaaggtggaaagagcgagagaaaaggagaacacaagagggaagatagattgattcatggttctctaaacagttatttaaattagacataatagagaaaatcatagaaaaaacacttttggccgggcgtggtggctcacrcctgtaatcccagcactttgggaagctgaggtgggtgaatcatgaggtcaagagatcgagaccatcctggccaacatggtgaaaacttgtctctactaaaaatacaaaaattagctgggcatggtggcgtgtgctgtaattccagctactcagaggctgaggtaggagaatcacttgaacccgggaggcggaggttgcagtgagccgagatgatgccactgcactccagcctggtgacagagcaagactcagtctcaaaacaaaacaaacaaaaaaaaattataataaaatggtaacatattttttaaagaatatgaatagaatatctcctaagaattatttggatttggagaattatttgagccaagtgtctagatatctgtacatttcttctaggtttctaacattagaaatgagtacttctttctaaaatattat

SEQ ID NO: 780036 - DNA, 680 bp, Homo sapiens
aatatgatttttattactattaataagtgtatgtacatttagtcatagtaaaatatttatactgtttaactcaaagtggtgaaattatgggtgacttttatcttttctgcttagttgaattttctgttgttttataatgaacatgttaattaaaaagataatgaaattgcaataactgtttaaaagaagagctcatggagaggaatgcaggacaagaacaaggctttatatttagttaatgaaaggtattgagagagtatgtattttaattattgtgagtattgagagaacagtttttgtagcagataaaagttagattccatggaataagggaaatgggaccaggcaatagaaacattgaatatataatatatatgattataattatttgttatatattatattacatgttaatatattacatgatatattccatattaatatacattatgttgtattgttatatattaatatatgttatatrtattatgacaatattatatataatattcaatgcctctaccaccttctaccaccagaactttgatggtaaagggaagaagaaaaatcagatggtcgattgaaaagataacagaatgagagacattttaattttggggggagcatattcttagaatagttgaaggatccagtgggaatagaggagctacagaaatgca

SEQ ID NO: 780037 - DNA, 582 bp, Homo sapiens
aaaaactatcattatggattcatagagttaaatatatgtgtttcaataagtattcttactgctgctcaatatgttctgtttttgatagttgggagcctttggatttagctcctgggttctttttacataaaccaagcaatctttgattccttccttgctttctggtataataaaatgtttagtgttatccttagtgtttayttttattctgaagctgaggaagctcaagctcatgcaggttaagtaattcaaccaaagttttataggtagtaaacaacgggcttgatattctgacccagctacattttattctaaaacttcaagtcgagtgttcattagagacccttctaccccacaaatttaattcttatttagcattatttaactaattataattttgacaaattctgctttaaaggaaaaaggaattaagtttttttgtttttctttttaagcaaaaactctttacttttaagaaaaaggtataattttttcatttactattcttggcataaattttgattttttccagtgaaaccaaaatctcctgaacccccttcagtatcatccaagtcttgaata

SEQ ID NO: 780038 - DNA, 588 bp, Homo sapiens
ccatatttcttagaggttttgttggttccttttactcttttttctctaaacttgtcttctcactttatttcattaatttgttcttcaaccactgatacccttttgattgaatcagctattgaagcttgtgcatgcatcatgaagttcttgtgccatggttttcakctctgtcaggtcacgtaaggtcttctctacactgtttattctagttagccattcgtctaaccttttttcaaggtttttagctagcttgcttgtgatgggctcaaacatgctcctttagctcggagaagctcattactgattctttttactgatcttctgaagcctacttctgtcaactggtgaaagtcattctccacccagctttgttttgttgctgttgaggatctgcaatcctttagaggagaagaggcactctggtttttagaattttcagcttttctgctttggtttctccccatctttgtggttttatctacctttggtctttgatgttggtgacctacagatagggttttggcatagatgtcctctttgttgatgttgatgctattcctttttgtttgttagttttccttttaacaa

SEQ ID NO: 780039 - DNA, 625 bp, Homo sapiens
acttgcaaaaggtattagcatcaccagaaagctagtatttgggagtcaacggaagaccagcaaagttgtaaaagcaaatatagaaagaagtgcctatgcataaaatattcagcaagataataaggtagtatgacattaytgacctgtaaaaagtgtcatgcagagtgcacatgaaaagtaagaacaaaatatttcaaaaggctaaagattcgtgactttattccggtaagaatatagtaaaagtcaatgaagaaaaaaattgaacaaatgtataagagagatgctatttttctgatcgtaaaaatggaaactaaatataaattacttgcttcttatctaagcctcctcttcctctttacctaacctgatccacagcatagactcttgtctcttttataatgccctttctgaagttgaaataaaacattggaacaaaaatgcacagaaattcataatttttattttgtttttcaatttcccacttttattttaagctcagggtacatgtacaggatgtgcaggtttgttacatgggtaaacatgtgccatggtggtttgctgcacagatcatgcaatcacccagatattaaccccagcatccattagctattaaaaagtcaaaaaa

SEQ ID NO: 780040 - DNA, 579 bp, Homo sapiens
aaaattgcatacttcataattttctttttggtggttgttgcttttgtttttgttttcattttcttttttgttaaaattttcttatttacagtagttatgatttagtttctgtctcacccaactagtgtgttagctccaccagaacaaggatttttttgtcttttatttgctgatgtaccccaatatttagaatagggcttgcaacatcagtatttaagtatttgttgaaaaaaatagatcacaaagaattttgataattaattcttcattggaattcagggttgtgccattagtgcttctctttcctatactctatgtcattttatttactttttatctttaccataactyttcttatatcataagttgtatatgaatgaattatgaaattgtgaggtcaggaatgctggtgtctttatgagtaggcacttagtgcttatcaaagggtccggcatagagtaggggctcaataagtatttgtagcattctaagcattttaggaattatcaaagtttattgaaatgttatgctaaataaaaatcaaaagaaatttgaccaaattaagagttggattagaga

SEQ ID NO: 780041 - DNA, 617 bp, Homo sapiens
taggtaaattgtggtgagggttggcacatggtttgcctataggatgcaatctttagatacagttgttattaataacagaaagaaatgcattccagaattgtaattcttccaagttcaagaacaataaatacacattttgaacagcataatgttgatttcaattgaattacatgtttaaaaataaagctgcctccttcaaaataggtaagtctctaacagaatgtagcctacatcccccaaaatgtgtcattagtcatattaaataataatttttaagagccataactccagtaagggaaactaaaaattgacaagcagatattatattagaaaagcaatcagctaaacataataatatataatacaaagkcataataatatacaatacaatagatgatcagtttacaaaatgtaaaactaaaatgttcaaagtatgagttcctgtagtaaatatttctctcaatgatacaatgaagttgcattttgatgctcaatggagaagtcccaaagtgaaatattttggattgcctggaatggacagtcagaaatttagaaggttggttggattgtagaaatattaaaggttctttgccaccttctaatattattattgtttt

SEQ ID NO: 780042 - DNA, 602 bp, Homo sapiens
atatttctatgactttacagtcttaggaaacaatcccaaattgttaacaatgaatgactaaagaccacgtgtggcctcattgctgcctatctttgcaggctcattttccactgcccacctccaggtcctgccataggagccattcttcttgtcgccatcatgcttctgtgcacatgctctttcttatwtttggaagcccctctgccctgctttttcctgctcaactattattcattccttgaatatcagcttcaacttacttcctaaaggaagacttctttgaattcctagtttaaaacatatgatatttttgtagctgtcttggttcatgtttctttttctcagagcactcagctcttctataattatgaactcatcagctggatttttattttatatttgttttctgtactagattttttgctctctgaaagtcaaggtcacgactctttcctcttgccattttatccccaatgcctagcacagcagctggcatatagtgagttttcactctgctttcactccacatttatggctggtacttcataaatccattaccacacaaaccattgtttttccatctgtgaaatggagaacaacta

SEQ ID NO: 780043 - DNA, 611 bp, Homo sapiens
tacgtaagaggtaattctgggctgggcgccgtggctcgcacctgtaatcccaacactttggtagactgaggcgggtgaatcacctgagttcaggagttcaagaccagcctggccaacatggtgaaactgtctctagtaaaaatacaraaagaattagtgaggcatggtggtgggtgcctgtaatcccagctattcaggaggttgaggcaagagattgcttgaagccgggaggcagaggttgcagtgaaccaagattgcgccattgcactccagcctgtacaacaagagcaagactccatctcaaaaacaaacaaacaaaaaacacccaaaacttgtatcccataaaaataccaaaagaagatggatgcaatacgtataaccatttcctcttaatcacacttgaaaaattaaaaggcttgacaataccaagcactggaaataatctagaaaaataagaattatcatacactactggcaggaaaataaactggtacaaccatttcagagagcaatttagcaatatctaaaaaagataacaaagctcatattctatgtcccaaccactgcattcagagaaagagactattataacaggctatatttcccagtaa

SEQ ID NO: 780044 - DNA, 611 bp, Homo sapiens
tacgtaagaggtaattctgggctgggcgccgtggctcgcacctgtaatcccaacactttggtagactgaggcgggtgaatcacctgagttcaggagttcaagaccagcctggccaacatggtgaaactgtctctagtaaaaatacaaaaagaattagtgaggcatggtggtgggtgcctgtaatcccagctattcaggaggttgaggcaagagattgcttgaagccgggaggcagaggttgcagtgaaccaagattgcgccaytgcactccagcctgtacaacaagagcaagactccatctcaaaaacaaacaaacaaaaaacacccaaaacttgtatcccataaaaataccaaaagaagatggatgcaatacgtataaccatttcctcttaatcacacttgaaaaattaaaaggcttgacaataccaagcactggaaataatctagaaaaataagaattatcatacactactggcaggaaaataaactggtacaaccatttcagagagcaatttagcaatatctaaaaaagataacaaagctcatattctatgtcccaaccactgcattcagagaaagagactattataacaggctatatttcccagtaa

SEQ ID NO: 780045 - DNA, 590 bp, Homo sapiens
ttagacctataactagactcaaggcccagcaggaccctaaaggtgaggctgaaagtgttacccataatgaggtatactacactctaaaagaatgacttgagttttgttaatttatacagacagaaatctgggaacttgtgtgagaatggatattgagagtgtaggataacggtggaaaaagcataaagctgaatcaggctgaatttattaatatggtckcactaaaagaaattctgtatttaacattgtagcttagggagttagggatggctctaaaggtttggttagtaggttggctgaaacacagaccaaaaggcagcccacagagagtgaactggaaagccaaatctgccttggtttaatgcagcggaggagattcaaaggcttagggaaggctgggtgtggtggctcatgcctgtaatcccagcactttgggagaagaccaacctggtcgacacagcaagaccctatctcaaaaaaaaaaaaaagcttagggagactggaatgtgagagatgtgagagtaggtgtttcatataacagctacttttccacactgaatggatccagaagacatacctttcaccacaac

SEQ ID NO: 780046 - DNA, 564 bp, Homo sapiens
  misc_feature 229, 262: n = A,T,C or G
tgtaaaatgtaagggaaaaaaaccaaatattattttgttcaatattacagaagaccaatagttataagtggccgttccttttaaaactcatttcccatggtaagagactgttgcatctgaaatgaagttaacatgtctgtcagwcaaaggaaattagtaaatcttactctgaaatcaaggaatctatgaaagtatatataacaacatataattactctacatgcaacantctaatagctcaaataatgtcctttatcccggngccatattccatagttcgacagagaacacatagcagtaaggggataaaacacctttcatctcagagtttttggctaattttagtttaataaagacttatctacagctcaatagccaatgctttacattgtctatagagaaattgcaagtgttgaatgaaaccttaaatgcagatagaagggcagtaatattttgcggtttgtaagtaagactatatgtaataatatccacatcttaattcattacttgggagctaaatcccttttctcatgttacatcaaaaaaggaggctgtgcctaaaga

SEQ ID NO: 780047 - DNA, 643 bp, Homo sapiens
cccaggaggcggagcttgcagtgagccgagatcgtgccactgcactccagcctggggggcagagtgagaccccgtctccaaaaaaataaaagaaaggctttaaggaaaactgttccttacagctttaaggaaaactctcaagttctcaaatgcaaacctttcattctatatactgtcttcctcactgccactaaatccactctttgcccttatatcttgccacaccctttaagtaaaattaaactcatttttcttccaaactcttgctcttgtamtgcttggcactactaagtcacaaagtactaacagctccaactactataaaactcacacttgctataactaagactgcaagagtacttaatatatattcatccctaattgacctatcttgcattcccagtaccatttaaaagcccctttctcaaaaaattaccttatttcattttagaagccaaaactgcaatatctttagcttctcaagatctgtctatatctttatccatcttttctcctttccctatatctcaccaaactgttctttgatgtcatccctctctcccatttcttctgggacctcactccattatctcctacctgatatatattcaatctttccctctccacccctttcccactccct

SEQ ID NO: 780048 - DNA, 548 bp, Homo sapiens
agatttctatccttacgaagacttccgtgcaaagttggcccttggttgacgtctgggaacatgactagtaaacagttccctacactgatataaaacctttcctaaacaataagtgaggctcactgtgcctaaatttattgtataaataatgtggtttatggctgggtgcagtggcttatgcctgtaatcccagcactttgggargccaaagcaggcagatcactttaggtcaggagttcaagaccagcctggccaaaatggtgaaaccccgtctctactaaaaaaaaaaaaatacaaaaattagcccggcatggtggcgtattcctgtagccctagctattcgggaggctgaggcaggagagtcacttgaacccgggaggtggtggttgcagtgacccaagacaatgccactacactccaggctgggcaacagcgtgagactccatctcagaacaaacaaacaaacaaacaaacaatgtggtttatgctgaacgcctgctttccttctgggagtctggatttttggaatgtgctaggcagaggatgcc

SEQ ID NO: 780049 - DNA, 623 bp, Homo sapiens
gaagttcatccagcagcactcagactgatatgtcaaaattaatcataactggcggaaacccggaggtactaacaacagggttcatagaaggttcaagggccagaccttgatgcccaacactggttatgagagcagcaaaaaaacaaagcacatgctgcccagtggcttctggaagttcctgatctacaacgtcagggagctggaagtgctgctgatgtgcaacaaatcttactgtgctgctatcactcacaatgtttcctccaagaaccgcaaagccatcctggaaagaggagcccagcgggccatcagtcaccaatcccaatgcgaggctgtacaacgcagaaagtgaatagacagcttatgtgcacgttttgtgtttaaataaaaccataaaaactgtaaaaaaaaamaacaacaaaaaacaaacaaaaaaaccccctaaaaacaggattaccatgtggtccagccattccactactgggtatataccaaaatgaaagtaaatcaatatatcaaagagatatctgcactctcatgtatatttcagcattattcacaatagccaaaatatgaaattaacctaagtgcccatcaacagatgaatggataaagaaaatgtgatg

SEQ ID NO: 780050 - DNA, 570 bp, Homo sapiens
tgccgttacaagaaagtagtgctgttaagtttaagccatttttgaatgtcagatatttttaatgaaattgtgcataggaatcatagttaaaatatgtcataccatggatattgcaaaattggtaattttgtggcagatagtcacttttttgaaaacactgtcaagtttgtcttaggggcttaactagagaatattctgaattttaattcctgtcgagcagtctactaagttggaagtataagtkttttttttttatgaatggtttccttttttttttttttgagatggagctctgtcgccaggctggaatgcagtggcgtgacctgggcgcactgcaaactccgtctccccgattcaagtgattttcctgcctcagcctcccaagtagctgggactacaggcgcgggccaccacgcccagctaatttttgtatttttattttttattttttttattttttatttttttcataggtatataaactatttattaacagacaaggcctacagacttatttcttcttggacacacccacggtgcggccacggcggccagtggtcttggtgtgct

SEQ ID NO: 780051 - DNA, 570 bp, Homo sapiens
tgccgttacaagaaagtagtgctgttaagtttaagccatttttgaatgtcagatatttttaatgaaattgtgcataggaatcatagttaaaatatgtcataccatggatattgcaaaattggtaattttgtggcagatagtcacttttttgaaaacactgtcaagtttgtcttaggggcttaactagagaatattctgaattttaattcctgtcgagcagtctactaagttggaagtataagttttttttttttatgaatrgtttccttttttttttttttgagatggagctctgtcgccaggctggaatgcagtggcgtgacctgggcgcactgcaaactccgtctccccgattcaagtgattttcctgcctcagcctcccaagtagctgggactacaggcgcgggccaccacgcccagctaatttttgtatttttattttttattttttttattttttatttttttcataggtatataaactatttattaacagacaaggcctacagacttatttcttcttggacacacccacggtgcggccacggcggccagtggtcttggtgtgct

SEQ ID NO: 780052 - DNA, 494 bp, Homo sapiens
caaggactgaaagactttattaactatatcaactattttggttagcagttgggcattactccccaaaatgacctccagattccattcactccctaccaaaattccaacagcctgttttgcagaaatggacaaactgatctgaygattaattgctagaggctcagaagaaccaaaacaatcttgaagaaggagagcaaaattagaggactcacatttcagtttcaaaatttactatgaagctagagtaatcaaaataatgttggcaacgggtaaacatacagatttatgggacagaattgaaagtctagaaataaacccatatatctaggaccaataattgattttcagcaaggatgccaaaaccattcatgagagaaaaataaactttcaacaaatagttctagaacaactgaaccgccacatgcaaaagcaggaacttgcacacttgcttcacatcatattcaaaaatgaattcaaatggagagaagacctaa

SEQ ID NO: 780053 - DNA, 494 bp, Homo sapiens
caaggactgaaagactttattaactatatcaactattttggttagcagttgggcattactccccaaaatgacctccagattccattcactccctaccaaaattccaacagcctgttttgcagaaatggacaaactgatctgatgattaattgctagaggctcagaagaaccaaaacaatcttgaagaaggagagcaaaattagaggactcacatttcagtttcaaaatttactatgaagctasagtaatcaaaataatgttggcaacgggtaaacatacagatttatgggacagaattgaaagtctagaaataaacccatatatctaggaccaataattgattttcagcaaggatgccaaaaccattcatgagagaaaaataaactttcaacaaatagttctagaacaactgaaccgccacatgcaaaagcaggaacttgcacacttgcttcacatcatattcaaaaatgaattcaaatggagagaagacctaa

SEQ ID NO: 780054 - DNA, 605 bp, Homo sapiens
acagcaccctaataccgacgcgtggttcaagaaccactagcctcagtgtcggccgggagccggttagaaaaacacagagtgccagggcaccccaaatttctcatgaaagtttgagaggtgctgcacagtgaaactgaggaaagcatgcatggacgaacaaaaacctgtggcttttgtctcagagtccctttgctaaaatcttgccgattgcctctttccaagcatcaagacctgatatcctctgaaatctcagaaatctctaaagcgatgatatttgacagacttatgtggccttacgaaccacctggatacctcaaaggacttttccagcttaaattgatttatctgatgcccccacaattgacagagctactgcagctggcgtcacgacgttaagagctgccacaaagtctccctgttttcttgagtgtttacgttatacyttcaatgattgaccttccagagacacgatttcactgaggcttagaacattgaattatttcaagacacagctccacacacacgtattagttcccctaaaaacctggatattaggtgcatctgaactaccctaggtattcagtggcacagcgtctgcctcggct

SEQ ID NO: 780055 - DNA, 515 bp, Homo sapiens
aagcgattcttctgcctcagcctcctgagtagctgggactacaggtatgcgccaccatgcccagctaattttttgtatttttagtagagatggggtttcaccatgttggccaggctggtctcgaactccagacctcgtgatctgcctgcctcaacttcccaaagtgctgggattacaggcrtgagccaccgcacctggccaagattatttttcaagtacatgtaataaacacaagattccagtggcttaggcaagtagaggggcaatatggcagttctgcaatgtcaccagggactcgagcaccttctagcctgtggctctgtcattcttagcttatgggatatttcaggcaggtgtatttaggtgtaactcatatacgaaaataatcactctttctagagtacagctccatgagtttcgacaaacacatagtcatgtaaccactaccattacaagacacaaaatttgtccaacactgcaaaaaatttccctaagaagggaaatatttaattttt

SEQ ID NO: 780056 - DNA, 515 bp, Homo sapiens
aagcgattcttctgcctcagcctcctgagtagctgggactacaggtatgcgccaccatgcccagctaattttttgtatttttagtagagatggggtttcaccatgttggccaggctggtctcgaactccagacctcgtgatctgcctgcctcaacttcccaaagtgctgggattacaggcgtgagccaccgcacctggccaagattatttttcaagtacatgtaataaacacaagattccagtggcttaggcaagtagaggggcaatatggcagttytgcaatgtcaccagggactcgagcaccttctagcctgtggctctgtcattcttagcttatgggatatttcaggcaggtgtatttaggtgtaactcatatacgaaaataatcactctttctagagtacagctccatgagtttcgacaaacacatagtcatgtaaccactaccattacaagacacaaaatttgtccaacactgcaaaaaatttccctaagaagggaaatatttaattttt

SEQ ID NO: 780057 - DNA, 515 bp, Homo sapiens
aagcgattcttctgcctcagcctcctgagtagctgggactacaggtatgcgccaccatgcccagctaattttttgtatttttagtagagatggggtttcaccatgttggccaggctggtctcgaactccagacctcgtgatctgcctgcctcaacttcccaaagtgctgggattacaggcgtgagccaccgcacctggccaagattatttttcaagtacatgtaataaacacaagattccagtggcttaggcaagtagaggggcaatatggcagttctgcaatgtcaccagggactcgagcaccttctagcctgtggctctgtcattyttagcttatgggatatttcaggcaggtgtatttaggtgtaactcatatacgaaaataatcactctttctagagtacagctccatgagtttcgacaaacacatagtcatgtaaccactaccattacaagacacaaaatttgtccaacactgcaaaaaatttccctaagaagggaaatatttaattttt

SEQ ID NO: 780058 - DNA, 514 bp, Homo sapiens
ctccagcgtctcccggacagatttgtcacgagactcatcttccgtgcggagccctggtcttttagagcctcatgtgctcatcgtggccactgacttctggaggctcgtccccagtctagggctcttcagggtggctttgggaggagtcaggatgtctctgatcacagcagctcccgggagggggcaccaagctcaggtggttcccagcaggcactttgtcaccagggcttgaacacccgtccctgcctgggtcactgcctgcctctgtggtcacrtttatcaaggctgtggacaggcagaatctacctgaatccaccagcgtccgcagtgtctgcactgggccagagggtgatgctgccccgcgtgtcctgcgtggttttgtgtgggttttgggggtgttgaatgggttgggcttccactgtcctgttgaccaggagacagaactcttcaaggtgtaacggaggcagaatcctagcttcgccttctcccatcctgggagacttttcctattcca

SEQ ID NO: 780059 - DNA, 657 bp, Homo sapiens
caccccgaccgctgttctgcactcacacccactggtctgggggccgggctctctgctgaaggggaagtcagggcagggcctggctggaggctctgtggagcttgggcctctctggcgttgcattttggagctctggttgtctctattccacttctctgcctccagtagcatctgcccacctggcccttctttgtgtgtaaactccagtgtgtgtgtgtgtgtgtgtgtgtgtgtgtgtgtgtgtgtgtgtgwgacactagctgcctgtctggattctgcccctgacagctggaaatacatccagctgcctcacccccgccaagcctggcccaggcacatgggtaagagggttcagtggtgctgagagagaacacgtgcccagaactggtccaaagaggcccatgatgggacggtgggtgcaggggagaggcagaaggatatttgccctgggctttatttctataaatggtgccaaatttagactttagaccttaccttcacatgaggttatggacacagtcttagagagtcactgaattcaaagaagacatttgtcattcgtgtataaggcagtgtctcattgcccaccatgctttctgtgatgccttatgaattaacatatctgttagaagtccttcaaatgtcttgtgacaatat

SEQ ID NO: 780060 - DNA, 657 bp, Homo sapiens
caccccgaccgctgttctgcactcacacccactggtctgggggccgggctctctgctgaaggggaagtcagggcagggcctggctggaggctctgtggagcttgggcctctctggcgttgcattttggagctctggttgtctctattccacttctctgcctccagtagcatctgcccacctggcccttctttgtgtgtaaactccagtgtgtgtgtgtgtgtgtgtgtgtgtgtgtgtgtgtgtgtgtgtgagacactagctgcctgtctggattctgcccctgacagctggaaatacatccagctgcctcacccccgccaagcctggcccaggcacatgggtaagagggttcagtggtgctgagagagaacacgtgcccagaactggtccaaagaggcccatgatgggacggtgggtgcaggggagaggcagaaggatatttgccctgggctttatttctataaatggtgccaaatttagactttagaccttaccttcacatgaggttatggacacagtcttagagagtcactgaattcaaagaagacatttgtcattcgtgtataaggcagtgtctcattgcccaccrtgctttctgtgatgccttatgaattaacatatctgttagaagtccttcaaatgtcttgtgacaatat

SEQ ID NO: 780061 - DNA, 625 bp, Homo sapiens
aaaaaggctaacaacggaataccacaaaaaactctgtgcctataaattaaacaactttgatgaaattgatgaatatttcaaaaaaacataaactgcttgaacttatttaaaaagaagtagacgacctacatagtcctgcatccataaaagaaactgaakgtgtagttgaaaacctgccaacattgaaaatgaaggctcaggtgacttcatggtgaattctactaaaatggaagaaataatatcaattctatacagactattccaaagtgcatcccaaaatgtaacttttataaaggtatcattacctcgatataaaaacaaagacattaccaaaaaaagaaaactgcagaccaatatccaacatgcacgtagacacaaaaattctcaacaactgtagccaattagatttagcagtatacaaaaagataatacatcatgaccaagtgtggtttaccccacaaaagcaaagctggtgaaacttccagctttaatcataatgatcccactctgaaaactacccaaatgttcctctactcgggagaagataaataaactacggtacatccatgtaacggaataccccctcagcagtgaaatgtgaaaacaagatgttgatatatccaac

SEQ ID NO: 780062 - DNA, 625 bp, Homo sapiens
aaaaaggctaacaacggaataccacaaaaaactctgtgcctataaattaaacaactttgatgaaattgatgaatatttcaaaaaaacataaactgcttgaacttatttaaaaagaagtagacgacctacatagtcctgcatccataaaagaaactgaatgtgtagttgaaaacctgccaacattgaaaatgaaggctcaggtgacttcatggtgaattctactaaaatggaagaaataatatcaattctatacagactattccaaagtgcatcccaaaatgtaacttttatraaggtatcattacctcgatataaaaacaaagacattaccaaaaaaagaaaactgcagaccaatatccaacatgcacgtagacacaaaaattctcaacaactgtagccaattagatttagcagtatacaaaaagataatacatcatgaccaagtgtggtttaccccacaaaagcaaagctggtgaaacttccagctttaatcataatgatcccactctgaaaactacccaaatgttcctctactcgggagaagataaataaactacggtacatccatgtaacggaataccccctcagcagtgaaatgtgaaaacaagatgttgatatatccaac

SEQ ID NO: 780063 - DNA, 614 bp, Homo sapiens
ctgggactatagacgcatgccaccatacctggctaagttttgtatattttgtagagacaagatgtcgagcccttgttgcccaggctggtcttgaactcctgggctcaagtgatctactctcctaggtctcccaaaatgctgggattataggcatgagccactgtgcccagcccagagacacttttgagtgaaagatcctccatgggttactgggagagcggggaaagttagggtatgaacttaacctcagggctacatgcaatagggccaactattactccacgatgtgtgttttgatggcacttgtccactttatcagggaccaaaggtcatgtgccttccatcttcccaaccagtaaccttttcacccatttgtgtatccatcccagccttccagttgtttatgcaaccatcccctcatccactcatcyatctatccatgcattcaaacaaccatccccatccaccatctattcatacatttatccactcatacactcatcacaaacatctttattgaacactttctagcttccaggcactgttaggcattgttgtgacctaatgccgaatatcatatgaatttcaccttcaaggaatttatactctagagg

SEQ ID NO: 780064 - DNA, 397 bp, Homo sapiens
atagatctatcacattttcctccctcctctggggttctggaagaatgctatcttcccatctccgtccattgcacctggtagggtgcccacctgtggactcctgccgcacactgtccttctgacccccatcacagcattgatttcatgtgatagccaktttctgttcacttgcaggtcttctcctcaggctgtgagttccttgatgtcaggggccacattttatttgtctttttattgatagcacctggcagcatgcttagcacatggggtctcagtcaatagttgctaaacgtaaaagtgaacaactagggaggaaatagaaggaaggatttgggactatgagttagatttggatatcgatgaacgatgacaataccagtgcagacacctcattcct

SEQ ID NO: 780065 - DNA, 584 bp, Homo sapiens
atatgtgaagtccgggatttagggtccaggctttcctatgatgtttttctgctctcacctccagatctccagtaaaagaaatggggctaattagggcaatgaaagatgtctagcagagaacttaggaggaggctcccagaggaatactcttaaaacagatgtgggaacatgaaagcattcctcaaggacccccagaaatgcccagggagcactacctggtataaaactgcaattcttttggatcaacgcaaaacagagctcaattatataacactgtaatggaagatgacccatgaaagctggaaaattccaagacatctgggtaacaatgaactccacagaaacgactgagatcaattctgtattcagaaatagaaagacaatggtgaggctgggcgcagtggctcaatgcctgtaatcccagcactttgggaggccaaggagrgtggatcccaaggtcaggagttcaagaccagcctggccaacatggtgaaaccccatctctattaaaaatacaaaaattagccgggcgtgttggtggacgcctgtaatcccagctactggggaggctgagacaggagaat

SEQ ID NO: 780066 - DNA, 554 bp, Homo sapiens
ttaaatctgccattttggatattcagttatgatttaaaaattacttgagaagtaaaatttccaatcagaacaaaatccacctagtctggagggatcattctgagtttattggattctgcctggctaaatctctctgtcttgtgttgggtgttcctctcatgcagatcggctactgctctaccagccaaggtctggggaaggcagctccgggcaccaaggcacaaacttccttccttgtccttgctccttttcctctgttgctggtgggtctwctctgtgtgcccttttgctgaactgggagtggtaaaacctacttgtgttgggacttgcagtagaatggacagaactagtaatttcacctgctctggcctgtgctactttggcctccacttcctccacttggtctagcctgattgaccagaggtccacagaagtgctcggggccagagctccagcttagtaatggtgatgacttgctttgctttgtctcctgagcttgctccattgtggatccttgacagggacagggaaatgaaatattcctaaatctcagc

SEQ ID NO: 780067 - DNA, 554 bp, Homo sapiens
ttaaatctgccattttggatattcagttatgatttaaaaattacttgagaagtaaaatttccaatcagaacaaaatccacctagtctggagggatcattctgagtttattggattctgcctggctaaatctctctgtcttgtgttgggtgttcctctcatgcagatcggctactgctctaccagccaaggtctggggaaggcagctccgggcaccaaggcacaaacttccttccttgtccttgctccttttcctctgttgctggtgggtctactctgtgtgcccttttgctgaactgggagtggtaaaacctacttgtgttgggacttgcagtagaatggacagamctagtaatttcacctgctctggcctgtgctactttggcctccacttcctccacttggtctagcctgattgaccagaggtccacagaagtgctcggggccagagctccagcttagtaatggtgatgacttgctttgctttgtctcctgagcttgctccattgtggatccttgacagggacagggaaatgaaatattcctaaatctcagc

SEQ ID NO: 780068 - DNA, 554 bp, Homo sapiens
ttaaatctgccattttggatattcagttatgatttaaaaattacttgagaagtaaaatttccaatcagaacaaaatccacctagtctggagggatcattctgagtttattggattctgcctggctaaatctctctgtcttgtgttgggtgttcctctcatgcagatcggctactgctctaccagccaaggtctggggaaggcagctccgggcaccaaggcacaaacttccttccttgtccttgctccttttcctctgttgctggtgggtctactctgtgtgcccttttgctgaactgggagtggtaaaacctacttgtgttgggacttgcagtagaatggacagaactagtaatttcacctgctctggcctgtgctactttggcctccacttcctccacttrgtctagcctgattgaccagaggtccacagaagtgctcggggccagagctccagcttagtaatggtgatgacttgctttgctttgtctcctgagcttgctccattgtggatccttgacagggacagggaaatgaaatattcctaaatctcagc

SEQ ID NO: 780069 - DNA, 631 bp, Homo sapiens
tccttgacacctggctcaccctggatccttggagatcctgaatgtcctggctccccctgcaaagagattgaggtcaaaaacctatttgccccctcaaaaaatcctggtgttccccacatctcattcttttatgtctccccagtcaaaattggcagaaaaccaactttcatccctcagttgaaatacttgtccattcacccccttcccagtgaccatctctccagggggacycaggttcccaatgcctcctggggcgctttgtgggcctgaaggaggagcagaaataggcgtcattgcttagggaggtgggcccatttctggggcagaggccaggataagtgctccaaggtcactacagggagacagtgaagccctcctggggaaaggggcttcttttggcccctgagacaagactagagtttatggcctggggaaagggaggcagaggaccagacacattaatcaggaagaccctagggacagaggtgggctgagtcaggagaatgggggcaggggctggggtcctcactggggtgaggaaggagctggctcacccaggctccctgggagcatggagagagaggacactcatgccacacacaccctgtctctggggggcccatggaggcct

SEQ ID NO: 780070 - DNA, 590 bp, Homo sapiens
tgtgtgtgggtctcttccccagcagccttcccaaagtgctgctgtgcatgtggggtactgcgtatcgggcactacgcaccagcacctgcccgcaagcctcactgcctctctctgcagggtcctgtgaaggcgtccatccaggagtgcatcctccctgacagtcctctgtaccacaacaaggtccagttcacccctactgggggccttggtctgaacytggccctgagtatcctttggtggccctgaggtagggaggctgtgggtggcccagcacttgacacttgcggggggtgtggctcatcaaccctgcgtgtttgcccctgacgctgctctcagatccattcgagtattacatattcttctttgccttgagcctcatcactcagaaggtaaggaagggatgccttttgctgggagaggtggggccacggcccagggcttccctgcacttgttggtgcttggtggcctggcagtgtccagagcccacgctaacaactagcttggttttccagccactccctgtgtccctccacgtccgtacttcagactgtgcctatttcatcctggtggacaggtacctgtcatggtt

SEQ ID NO: 780071 - DNA, 590 bp, Homo sapiens
tgtgtgtgggtctcttccccagcagccttcccaaagtgctgctgtgcatgtggggtactgcgtatcgggcactacgcaccagcacctgcccgcaagcctcactgcctctctctgcagggtcctgtgaaggcgtccatccaggagtgcatcctccctgacagtcctctgtaccacaacaaggtccagttcacccctactgggggccttggtctgaacctggccctgagtatcctttggtggccctgaggtagggaggctgtgggtggcccagcacttgacacttgcggggggtgtggctcatcaaccctgcgtgtttgcccctgacgctgctctcagatccrttcgagtattacatattcttctttgccttgagcctcatcactcagaaggtaaggaagggatgccttttgctgggagaggtggggccacggcccagggcttccctgcacttgttggtgcttggtggcctggcagtgtccagagcccacgctaacaactagcttggttttccagccactccctgtgtccctccacgtccgtacttcagactgtgcctatttcatcctggtggacaggtacctgtcatggtt

SEQ ID NO: 780072 - DNA, 642 bp, Homo sapiens
tggagactttaataccccacttacactaatgggtataacaactagacacaagataacaaggaaatagaaaatatgaacaacattagaaaccaaatacacctaacagatacatatggaacacgccattcaacagcagaatctgtattcttcccaaatgcacacagaacattttctaagacactatgcaaagccataaaacaaacatcaattaaattgaaggattaaaataatacaaagaatattttctcatcatartaaaagcaaattagggatcaatgaaaagaagaaatctgggaaactcctaaaaatgtgaacattagcaaaaattttccaaaataataaaaggccaaaaaagaaaccacaagtagtataagacagtattttaagataaatgaaaaagtagacaaaacctaaaaaaacttacaggattaattgaaaaccatgctctgaaggaagcttatagcagaattccatcaatgaaaaagcagaaaaatctcaaatcaataattaaatgcctgttaaaaacatttaaacggaaatggctgaccccactcatctgagaaaaggatatcagttggggcaaaaatagtcttgctgaaaaaccctaggaaggaagacttggaaaggacaccctttggaatt

SEQ ID NO: 780073 - DNA, 361 bp, Homo sapiens
acactgtcctccctccctggcacaagccctcaggttcctcctctcctctgcagtggctcctgcggaatgaggtgcccccgtgtgctgtggccgccatccagcccaccagcgctaaggggccaacacattttctcatcttrtgctcaaattcctgttcaatcatgtgtgctccttcccaggtgaacgggacagatcactggctgtgagcacagcccgtctcccccggctctcacagattcctctgtcatccctgaagttccctacaggtctgaactctgcttcactgacctcaaatccatccacacacttgtcatttctgcctaggcagctgcaacctctatgaggtcaccacccactctaa

SEQ ID NO: 780074 - DNA, 361 bp, Homo sapiens
acactgtcctccctccctggcacaagccctcaggttcctcctctcctctgcagtggctcctgcggaatgaggtgcccccgtgtgctgtggccgccatccagcccaccagcgctaaggggccaacacattttctcatcttgtgctcaaattcctgttcaatcatgtgtgctcyttcccaggtgaacgggacagatcactggctgtgagcacagcccgtctcccccggctctcacagattcctctgtcatccctgaagttccctacaggtctgaactctgcttcactgacctcaaatccatccacacacttgtcatttctgcctaggcagctgcaacctctatgaggtcaccacccactctaa

SEQ ID NO: 780075 - DNA, 639 bp, Homo sapiens
aaggttataaaagacctcgttggcgctgggattttggcagccccctcagtgactgtcgtctgctggactaaacgtgggcgctcttctccgcagggcccggtgccgctctccatcgctgctggattcgcagccctggggactgcccctcgcgataaacckggctcttctctcgtaaccacagaaaaccgaattagtcaagatgcacgtttctcaaattaggacctgggcgccaccatgttggtacagtcgaggtatgttacttctagtcccagtcttttgagggtttttttttaatcatgaatggatattaaattctatcaaataatttttcagcctcaatttacataatcatatggtttttctccttcattctgctgatttgatgtatcacgttgattgatttacatatggtaaaccatccgtgtatcacgaagataaatcccagttggtcatgattaatgatgtttttaatgtattgtcgaattatgtttgctagtattttgttgaggatttttgcatccatatatatcagaagtattggtctgtagttagtttatttatttatttacttatttatttttatgtgtctttgtctagttttggtgtcagtgtaatactggccttacaaaatgcatttga

SEQ ID NO: 780076 - DNA, 599 bp, Homo sapiens
ttctacaactctgcattcactgtcctttcaatatgtcccaatttgaatacaaccttttagaagtatgatatgcagaactaaaaggaattatatgatataaatttaagttagactggggctacctcttctcatcttttttcttttttggaaactaaatttcaattacacacaattaaattacattagtttttaaawttttctttgaaaactcactgttaaaaaatattaaatacatgttgtatggctgagtttggctcctccaaatcctctcctgatgcagaagtttttactgtaagatcatagtatttattccttttgaatttcactttgaattcagccccactattccagcgttttaaaatactttaaatatgaccttatgtcatatacaaatgtgaaaatatgcttcaatattttcatagcaataaatgttgagcagaataaagatacagatagtaccccttgacattctaccatagtcctatcctccaagtggatatcaatccatacattgatatatgtggtgtggccaattatttctctaatgcctttgtcccccgtatatttcatacttttgttcactaggactgcataagaaa

SEQ ID NO: 780077 - DNA, 565 bp, Homo sapiens
tttcaagaactcaagtattgctgcattaccttctgattaaaaaaaaaaaacttgcagcatccttatgaattcgttgcagcaccctctcttgatacacagtttggaaaactacagcattttggtaatcatcagtaaccatctgtttacctgctgcttattatgcatggcactatgytagatgtgaaaattacatcagtaaataacatggtaataataatagtagtaagcaacaacggtggccatcctagcaagaacaacacatactatgttccaggcactgtgctaagtaaatgaaatgaatttatgctgccttattagcaatttagtggtactgaagattctgtgacccaacaaagatgtgtgtgaaagacatagagctaaatgaaatagaatataaaaaggattaaaataaaaatataaaagtcatgctttacgtttttaggttaaaagttaacaaaatggtcaggtatattatcattcgatcctcaggatgattttgagaggcatgtataccctgaaatttagaaaacttaggctacttaaccaaagttataagcttataaaa

SEQ ID NO: 780078 - DNA, 458 bp, Homo sapiens
tgactttaatcttatattctgtaattatctaaaattgttagttttagcagcattttttgtagggtttatagaattttctacatagatatgttttctaagtataaaaggatgttgttgcatcttcctttttaatcttgataccttttatttctttttcttattgcacttgccaaacttctaatacaatgtttaaatagaaagatgagaagcaaatatttttgccttttgcttgatcataagaagaaagcattaatttttccattattttarctgtacctgtttttgtcaaagcccctttattaagctgagtatttttctttctattcctagtttttattccaggaaaaaatgttgcattttgttgaacaaatgtatatacctgtttatctttgtgttaagtataagtgtgtgcatgtttttcatatattcccttatccttttaaaatatctataaactt

SEQ ID NO: 780079 - DNA, 620 bp, Homo sapiens
cagaacatggggactagagttgctcccaaatttcattcattcttacaacataattctcctcaacagttgcccttattaaaaaggattaacggctggccactgtaatttccattctacccaaggcatccttttaaaatgggctgttgatagtcgctgccaatgaatgctccaagttgatgacatttcaaacaggctttcagggtgctgacaatggaccttcccttatgttcagccagggcactcacttccgasatttacccgagaggaaaagggtaaaccactttcaaagtccaatttaatttgtctaagtcttaaacggaaggtcatttttctgtcttactaaaaggcccaacctccttgctctctttctcaaaagatctgtaaatcattgtttaagcagacaaattataaaatgtgatatcatatcctacataaatgtaccatagttcttcatttctaagacacaggttctccctctcccacccctgcacaagcatgtgctaacgtttctgaaatccagatatcctacaatcaacatagcagtttttaacgtcctagtgtttctcaaactcactccctccccaaaaaaccagtattaagtcaatggtacaccttgtaat

SEQ ID NO: 780080 - DNA, 470 bp, Homo sapiens
aaaaataggaagtaaagaaaacaacatggaaataaaaatgatatactagaatatgtctatttaaaacaaaagaaagaagtaatggaagaaaacagaaaaaaagaaataaaatatacacgtaccaatttggcataaataaatcctacctaaccagtaatgagacttaaaatgaatgaactaaacatttcaatcaaaaggcagagattggaagattagtttaaaaaacatatgatccaactagatgttggataaatgaaacaaaattyactttcaaagacacaaataagtaaggattaaaaaagatgtaccattcataaaatgcccaaaagagagttggaatggttatactatatgatgtgttttgtttttgttttcaatgaaattataaatgaaaatgaaaacaaattatacaaaaatttatagaatgcagctgaagcagtgctcagaaggagattttacaggcctatttt

SEQ ID NO: 780081 - DNA, 668 bp, Homo sapiens
aggcaaaagcttgagtctttctgatgtttcttcacatgtcacatacaatatctcaatatgtttataaattatgccttcaaagcatagcttaaatgtgtttatttctcttcatctccactgctaacacattggtctttttatatcttacctagaatygtacagtaacttgttaagaggtcacctagacgttctcttaggttcctttctcctacagaagctaaggggaccgtctgttaaaaagtaagtctgatttttgtcgatcctcaccttaaggatcttccaatggctatccataacaatagcaataaaaatcccaagtcctttttgggttgtgtcctttcttggttttggtattagggtgatgctggcttcattgaatgattcagggagggttccttctttctctatcttgcggaatagggtcaaaaggattgataccaattatttaaacatctggtagaattctgctgtgaatccatccggtcctgggctttttttgctgttgttggtaatttttaaattactgtttcaatcttgctactggtaattggtctgttcagggtatctaattgtttctgatttaagctaggagggttgcctccaccaagatgtcattattgggagcccgtgctggggcacttttcccactttgactcgttacttttcta

SEQ ID NO: 780082 - DNA, 668 bp, Homo sapiens
aggcaaaagcttgagtctttctgatgtttcttcacatgtcacatacaatatctcaatatgtttataaattatgccttcaaagcatagcttaaatgtgtttatttctcttcatctccactgctaacacattggtctttttatatcttacctagaattgtacagtaacttgttaagaggtcacctagacgttctcttaggttcctttctcctacagaagctaaggggaccgtctgttaaaaagtaagtctgatttttgtcgatcctcaccttwaggatcttccaatggctatccataacaatagcaataaaaatcccaagtcctttttgggttgtgtcctttcttggttttggtattagggtgatgctggcttcattgaatgattcagggagggttccttctttctctatcttgcggaatagggtcaaaaggattgataccaattatttaaacatctggtagaattctgctgtgaatccatccggtcctgggctttttttgctgttgttggtaatttttaaattactgtttcaatcttgctactggtaattggtctgttcagggtatctaattgtttctgatttaagctaggagggttgcctccaccaagatgtcattattgggagcccgtgctggggcacttttcccactttgactcgttacttttcta

SEQ ID NO: 780083 - DNA, 668 bp, Homo sapiens
aggcaaaagcttgagtctttctgatgtttcttcacatgtcacatacaatatctcaatatgtttataaattatgccttcaaagcatagcttaaatgtgtttatttctcttcatctccactgctaacacattggtctttttatatcttacctagaattgtacagtaacttgttaagaggtcacctagacgttctcttaggttcctttctcctacagaagctaaggggaccgtctgttaaaaagtaagtctgatttttgtcgatcctcaccttaaggatcttccaatggctatccataacaatagcaataaaaatcccaagtcctttttgggttgtgtcctttcttggttttggtattagggtgatgctggcttcattgaatgattcagggagggttccttctttctctatcttgcggaatagggtcaaaaggattgataccaattatttaaacatctggtagaattctgctgtgaatccatcyggtcctgggctttttttgctgttgttggtaatttttaaattactgtttcaatcttgctactggtaattggtctgttcagggtatctaattgtttctgatttaagctaggagggttgcctccaccaagatgtcattattgggagcccgtgctggggcacttttcccactttgactcgttacttttcta

SEQ ID NO: 780084 - DNA, 585 bp, Homo sapiens
ctgaaagtcctagctatagcaatcagacaagagaaagaagtaaataatatccaaactggaaaggaagaagtcaaattattcttgtttgcagatgacatgacatatttgaaaaagtctaaagactctacaaaaaaaaaaactattataactgataaaccaattccgtaaagtcacaggattacaaaatccacacacaaaaatgagtagtatttctatatgccaacaatgaacaatctgaaaaagaaatgaaaatgtaatctcacttacaatagccacaaataaaattaaatacctaaatggatagaactggagactgygatttgaagtgaaataagccaaggacagaaaaacaaacatagcacgtccttacttatttgtgggtctaaaaatcaaaacaattgaactcatggaaatagatagtagaaggatgattaccagaggctgggaaggataatggggttgggggagaagtggggatggttaatgggtacaaaagaataaataaaaagatgtataagacctactatttcatagcacaatagggtgaccatagtcaataataatttagttctgcattgtaaaaca

SEQ ID NO: 780085 - DNA, 585 bp, Homo sapiens
ctgaaagtcctagctatagcaatcagacaagagaaagaagtaaataatatccaaactggaaaggaagaagtcaaattattcttgtttgcagatgacatgacatatttgaaaaagtctaaagactctacaaaaaaaaaaactattataactgataaaccaattccgtaaagtcacaggattacaaaatccacacacaaaaatgagtagtatttctatatgccaacaatgaacaatctgaaaaagaaatgaaaatgtaatctcacttacaatagccacaaataaaattaaatacctaaatggatagaactggagactgcgatttgaagtgaaataagccarggacagaaaaacaaacatagcacgtccttacttatttgtgggtctaaaaatcaaaacaattgaactcatggaaatagatagtagaaggatgattaccagaggctgggaaggataatggggttgggggagaagtggggatggttaatgggtacaaaagaataaataaaaagatgtataagacctactatttcatagcacaatagggtgaccatagtcaataataatttagttctgcattgtaaaaca

SEQ ID NO: 780086 - DNA, 585 bp, Homo sapiens
ctgaaagtcctagctatagcaatcagacaagagaaagaagtaaataatatccaaactggaaaggaagaagtcaaattattcttgtttgcagatgacatgacatatttgaaaaagtctaaagactctacaaaaaaaaaaactattataactgataaaccaattccgtaaagtcacaggattacaaaatccacacacaaaaatgagtagtatttctatatgccaacaatgaacaatctgaaaaagaaatgaaaatgtaatctcacttacaatagccacaaataaaattaaatacctaaatggatagaactggagactgcgatttgaagtgaaataagccaaggacagaaaaacaaacatagcaygtccttacttatttgtgggtctaaaaatcaaaacaattgaactcatggaaatagatagtagaaggatgattaccagaggctgggaaggataatggggttgggggagaagtggggatggttaatgggtacaaaagaataaataaaaagatgtataagacctactatttcatagcacaatagggtgaccatagtcaataataatttagttctgcattgtaaaaca

SEQ ID NO: 780087 - DNA, 612 bp, Homo sapiens
ctgagtagtattccatggtgtatatataccatattttctttatccactcattggtcgatgggcacttaggttggttctatatatttgcaattgcaaattgtgctgtgataaacatacttgtgcaagtgtcttttagatataataatttcttttcctatgkgtatataaccagcagtgagattgctggatggaatggtagatctacttttagttctttaagaaatatctagccaggcgcagtggctcatgcctgtaatcccaacactttgggaggccgaggcggatggatcacaaggtcaggagtttgagaacagcctggccaacatggtaaaaccccatctttattaaaaatacaaaaattagccggcgctgtggtggcgcctgtaatcccagctactcaggagcctgagccaggagaatcacttgaactcaggaggccgagtttgcagtgagctgagatcatgccactgcactctagcctgcattacagagcaagactccatctccaaaaaaataaaataaaataaaaaagaaatatccatactgctttccatagaggttgtactaatttacattctcaccagcagtgtataaacattcccttaaacacat

SEQ ID NO: 780088 - DNA, 612 bp, Homo sapiens
ctgagtagtattccatggtgtatatataccatattttctttatccactcattggtcgatgggcacttaggttggttctatatatttgcaattgcaaattgtgctgtgataaacatacttgtgcaagtgtcttttagatataataatttcttttcctatgggtatataaccagcagtgagattgctggatggaatggtagatctacttttagttctttaagaaatatctagccaggcgcagtggctcatgcctgtaatcccaacactttgggaggccgaggcggatggatcacaaggtcaggagtttgagaacagcctggccaacatggtaaaaccccatctttattaaaaatacaaaaattagccggcgctgtggtggcgcctgtaatcycagctactcaggagcctgagccaggagaatcacttgaactcaggaggccgagtttgcagtgagctgagatcatgccactgcactctagcctgcattacagagcaagactccatctccaaaaaaataaaataaaataaaaaagaaatatccatactgctttccatagaggttgtactaatttacattctcaccagcagtgtataaacattcccttaaacacat

SEQ ID NO: 780089 - DNA, 681 bp, Homo sapiens
acattcctgcctagcaccacagggatccaatgggagaggagcagggggtaaaactacaagggagaaagaaatctgtagcagaactttgtaacaatttgaatgctgttagaagcctactggacagaacttgcgggagggcacaaatccagtgtgcagactccacagatgagagaagaaccaagcccttttctttcgcagctgggaggtggagagcctgggacagggtttcaagtccatatcgctctctacctggaaacagtctgggggccattaagggtggggggcatggtggaagtgagaccggtccttcagtttgcrtgggagctgggtgaggcctgtgactgccagctttcccctacttccctgacaacctgcatgactcagcagaggcagccataatcctaggtacaaactctagtgatctgggaatcttacccccacccccgacagcagctgcatcaagacctgcccaaggagagtctgagctcagacatgcctagacccacccccacctgatggaccttccctactcaccctggtagcagaagacaaaatgcatataatcttgggagttttagggccccacccaccaccggttcctccccatactaccatggctgatgctctctggaaagcaccacctcctggcacgaggccaaccagcacaaaaatagagcatta

SEQ ID NO: 780090 - DNA, 455 bp, Homo sapiens
gctatgaacccccacggagtccattgcacacagccccgccccctgccggccgcaccacctccaccaaaacagatagctagtatcaacggctaagagacccatagactgttcaaatcacaggactctgtgcagacaacccccagtaccagactgaagccaggtagactcactgagtgggtagatctggaagagagacaataatcactgcagtttggctcacaggaagccacatccataggaaaagggggagaatactacatcragggaacacctgtgggacaaaagaatctgaacaacagccttcagccctagaccttccctgtgacagagcctgcccaaatgagaaggaaccataaaaccaaccctggtaatataacaaaatgaggctcttcaacaccccaaaacatcacactagttcaccagcaatggatccaaaccaagaagaaatccctgat

SEQ ID NO: 780091 - DNA, 548 bp, Homo sapiens
acatcaggagtagagaaatgggttgtaggtataagacttatcttttttttttctttaattttagcattttatttatttattttatttttattttattattattatactttaagttttagggtacaggtgcacaatctgcaggtttgttacagatgtacacatgtgccatgttggtgtcctgcacccattaactcatcatttagcattaggtatatctcctaatgctatccctccccactgcccccaccccacaacagtccccggagtgtgatgttccccttcctrtgtccatgtgttctcattgttcaattcccacctatgagtgagaacatggggtgtttggttttttgtccttgtgatagtttgctgagaatgatgatttccagtttcatccatgtccctacaaaggacatgaactcatcattttttatggctgcatagtattccatggtgtatatgtgccacattttcttaatccagtctatcattgttggacatttggcttggttcaaagtctttgctattgtgaatagtgctgctataaatat

SEQ ID NO: 780092 - DNA, 588 bp, Homo sapiens
agtatcatgctgttttgcttactgtagccttgtagtatagtttgaaatcaggtagcatgacacctccagctttgttctttttgctaagaattgtcttggctatatgggatcttctttgattccatatgaaatttaaagtagcttttcctcgttctgcaaagaatgtcagtggtagtttgatggaaatagcatygaatctataaattgatgcaaacatctttaataatatactggcaaaccaaattcagcagcacatccaaaatcttatcagccacgctcaagttggatgcttccccgtgatgcaaggttggttcaacatacacaaatcaacatatgtaattcacaacataaacagaactaaagacaaaaaccatataattatctcaatagatgcagaaaaggcctttgataaaattcaatatccctttatgttaaaaattctcaataaaataggtattgatggaacatatcatctcaaaatagtaagagctatttatgacaaagccacagccaatatcatattgaatgggcaaaagctggaagcattccctttgaaaactggtacaagatgaggatgacctctctcac

SEQ ID NO: 780093 - DNA, 625 bp, Homo sapiens
aaaattttggaatactaggcttaatatctgggtgatgaaataatctgtacaacaaccccccatgacacatgtttacctgtgtaacaaacctgcacatcctgcacatgtacccctgaacttaaaattaaaaaaaaaagaaagacaaatgtcacatgttctcacttatttgtgagatctaaaaattaatttaactcatggacatagagagtagaaagatggttaccacaagctgggaaaagtagtggggatggcgaggaggtggggatggttaatgagttccaaaatagttagaatgaataagacctactatttgacagcacaacaggatgactatagtcaataataacttaattktacatttaaaagtaactaaaagagtataattggactgtttgtaacacagaggataaatgcttgaggggatggataccccactctacatgatatgattattacacattgtatacctgtatcaaaatatctcatgtacaaatactatgtccccacaaaaattaaaaataaaaatattttttaaacttgtgtagcaaatcacattttcaagaaagtgaaaagacaatccagagagtgggagaaatattttacaaatcacgtatctcataaggga

SEQ ID NO: 780094 - DNA, 627 bp, Homo sapiens
aattgatttgtttgagcttcttatatattctagttattaatccttatcagatggttaatttgcaaatatttcctctcattctgtagattgcctcttcactcttttgattgcttctgttgctgtgcagaagctttataacacaatgtgacaaactcccatttgttcatttttgctttggttgcctgtggttttgagatattactcaagcaatatttgcycagaccaatgtcctggctagtttcctcaatgttttcttttagtagtttcatagttttaggtcttagatttaagtctttaatccattgtgatttgaattttgaatatagcaagagatagagacatagtttcattcttcccatataaatatccagttttctcagtatcaggtattaaataaactgtcctttccaaatgcatgttcttgacaccattgtcaaaaatgaattcatggtatatttatggatttatttttgggttctctgttcttacctattggtccatgtgactgtttttcttttgttgttgttgttttgttgtgttttctttgccgttagcaatctgtaggttactataacactgttgtgtaatttgaaatcaggaaatgtgagttttctagttttgttcttt

SEQ ID NO: 780095 - DNA, 599 bp, Homo sapiens
taagttttatatgaaaggacaaaagatacgttaaatttgtttattgattctctttgatcttcctaaatttctaacatgtaacattttactgtcttgaatgcctatcgtttttagaaaacatgattattcttatcactaagaatgattaataataatactttactatttatgcttcaagaattataaaaaagaagtaattattttaaaagataaaaaatctttattcattagggaagttgcccaagcaaaagggaatttcagatgaattctcatatagggagaaaatgactcttttacagtacatcctatttcacttcatcatgtttatctttgatcaaatgttgttactgcatattcyttaagggaaccaaaaaacttcaatgttttacattttatgcagccaaacctgtctgaagagaaatcttgggaaaagaaaaaccagtctcaagagcagctgctcaaatgatgcctaattaaattttcacgcacatgttaaaaggatatgttaatactttgtgtgcactcagtgagctttgtaaagcaacttagacaatcagaatttataaagtattgaggaatgcctctaaattctacctgct

SEQ ID NO: 780096 - DNA, 617 bp, Homo sapiens
ttagttttgggtaaggcagataaggggggcttcagagaaagcctgtttgcatctgctgtttactttactaatgtagattttctatacagatgtaaaccctcccacaaaaagacagcttttcaaagctgttcctgtagtctgtagcmcctctgaatagcatcttaaaatatgccaaagaaatatattttggggtaaaatattctggtttccttcaaagtctcagtaagaaatatgcacaatgtgttttattgtgcaaatgcaacacgatttaatactttccttaactcttattttccatttgatacctgtgagttaagatttgccatcaaaaatgcaaaagaaatgagaagggaactagcatcaactgttccaagtacttcatatacatcatttgttgaatcccaatcaacagtcttacaaagtcttattacctctgttttgaaaataacatagccaaggatcaaagaacctaacagacttgccagtaaagctgtttgtcttcagaactgcccaggtctacattattgacaactcattaatctccctggcaaacttatattctactgtcaacaaaattataccatacatttgggtattttcttatgttattgagttta

SEQ ID NO: 780097 - DNA, 583 bp, Homo sapiens
ggtggtgacaaaatctctcagcatttccttgtctgtaaagtattttatttctccttcacgtatgaagcttagtttggctggatatgaaattatgggttgaaaattcttttctttaagaatgttgaatattggcccccactctcttctggcttgtagagtttctgctgagagatcagctgttagtctgatgggcttccctttgtggataacctgacctttctctctggctgcccttaacattttttccttcatttcaaccctggtgaatctgacaattatgtgtcttrgggatgctcttcttgaggagtatctttgtggtgttctctgtatttcttgaatttgaatgttggcctgccttgctaggttggggaatttctcttggataatatcctacagagtgttttccaacttgttccattctccccatcactttcagtacaccaatcagacatagatttggtcttttcacatagtcccatatttcttggaggctttgttcatttatttttactcttttttctctaaacttctcttctcacttcatttattaatttgatcttccatcactgataccctttcttcc

SEQ ID NO: 780098 - DNA, 577 bp, Homo sapiens
tagccattctaactgaggtgagatggtatatcattgtggttttgttaccagcagtgaatccagtgggtctacagcaaactcaatccttgcctccttggaggaaagaattcagctgaggggcagaagtaggtttaaggctgaggaagagaccaaggcaagttttagaacaggagtgagagtttagtgaaaagtttcatagcaggggtgaaaggaagcaaagtacacttggaagagggcctagcrggcaacttgagagatccaagtgccctgcttggcccttaagatggggctttatacattggcatggttccagggtttccatttctctccccttgatttttcccttggagcggctgtccacacgtggggtggcctgccaggacttgggaggggctgcacacacagtgtgtttactaaagttgtgcacatcctccatgaggcatttttcccttacctggtctagcattttcacaggaaggtcatataccagttaaacgctgccattttgcctcttagtatgaatgcttgagcctgctcacccaactcctgagatcttattgggaagctgctgttcacc

SEQ ID NO: 780099 - DNA, 610 bp, Homo sapiens
tgagacaaaggctcagatatggcagaactgggattccagtccctgtctgactcacttcagagcccatcagtgtttttatctgtgcttttcttctggcaagagattgctcgagtcatatatttcacacttatttatcaacccrtaggcattcataccacaagtgcttaatcaaatgaatttaactatataacaaatagccccagtccttttcttcaaggacttgatcactacaagtgtatattgttgggtgataactatgagaaacaggtggaaaaaactgatgccagaagcctacaataataaattaattgaccccaaagactctacctttaaataaataattgtatctctggaaaggtaatagaaaaaggtttagaagttttttacactttaccagtaatcagtttttccaaatcctttgcagaaagtaatttttgggaagcagggaactagaatccaaggattctgaatgttgtttttatgtgtactggaggggtggttgagggtattcaaacaaagctggagtaaactccagcagattcaccagaaatatgtaaatgttataatggcagtccatttaccttggatgaacaggacacttttcctgatg

SEQ ID NO: 780100 - DNA, 609 bp, Homo sapiens
atataaccacaagttccgggtattaaagtgaggacattttggtaaacctaaggcaaaaagtgatcatgttgaaacaaactattgtttcagttcttcaattgctatttctttagcttatattccacatttctcacctatagagcagctataatgaaatttagattcgttctaacattgctttttaacttcatatcaacgtgtttataaaataaatgaatataaactgtacacctaactttattcttgaatctcattctagctgatgatttagtgtactgataattttaggaaaaatctaccaaatgaagaatcatcataattttccagataattcatgggagaaattgcaagaacttgttgatttaacatcttttgtttcatacctaagctatttgcttcattttttaggtaactttatgtttaarttgtgaatatttaccacaatgtctcaaatttttaaaaagatttccattataaaaattattgtgacttaacactatatagtcagtcaaatctcctttactgggaaaacatctctggatggaaataatagaatagatttgccttagaaaaatgtatagcagaataataatacattctgatcataag

SEQ ID NO: 780101 - DNA, 609 bp, Homo sapiens
tctgtgactatgccatgcctaattgattggaggaaacaatatcaaagtatatgcttctgaaaaactttaacttagccaaaacatttttcttctagtcacccaaatgaatatttaacgaaaattaaattttaaaaatgaagatttttaaaaatttgaaacacccaggggaatacagtgcgaaatatattattccctagagcatggaatgaaattctataaacaaagtagaattgtcaggattggcttatcgagtttcttacgtttgtgtgtctaagcatatctgcagttcccaggcaaggaacctatcaaaggacatgttaagtctacaagctaaataattcaagcagatttttattttaaatatattcttcacttttacaaataatttcagtttatgtttttcaaaactataagtattttcttgtgaaggtgatgctctgaaagggmagagggcatttatttaaatgctgcttgttgccattgcattggcaaatgttcagcttttagactgggcatggaagaaatatgataataaattgcattgctcaggaacctcaatcacaactcatcttttctgcatgcagttattctcttctacgatgtacaaaa

SEQ ID NO: 780102 - DNA, 593 bp, Homo sapiens
tcttttgggtatacacccagcagggggattgctagaacatatggtagcttaatttttagtttttttgggaacctccaaactgttctccatagtggttgtactaatttacattcacaccaactgtgtagcagagttcccttttctctgcattttcatcagcattcactatggcctgttgtattagtctgttttcacactgctgataaagacatattcaatttacataggcagtgtacaaaataaagaggtttaatggttaattaaacttacccgtggctggggaggcctcacaatcatggtggaaggtgaaacggatgtctcacatggcagcaaagagaagagagcttgtgcagggaaactcccatttttaaaaccattagatctcgtgagacttatttactatcacaagaacagcaygggaaagacctgcccccatgattcaattaccttccaacagataagatttgggtggggacacagccaaaccataccagctgtcttttggatataaactgttttaactggtttgagatgatatcccattgtaattttcatttgcatgtctttcatgatcaatgatgttgagcaccttt

SEQ ID NO: 780103 - DNA, 589 bp, Homo sapiens
agatgacatttctacacaccccttggaccagaagggaaaccactgccttgaagggaagaacccaattctggcagcattcatcacctactaactgaagagtcgttgggcccgaataaccagcagtgatacccaagtactacgttgagggcctttggtaaaaccttgagttgtgctagcttcaagtgagacttagcacattttcaactgttgtggcttcagggtgagacttcttttgcttgagaaaagcagagggaaaagtaaagggcactttgacttgcatcttaggtaccagcccaaccataccagggtagcgtaccaagtagggacttgggtaccctgattccaggacttggttttggacagcatttctggacctgccctgggccagagggaagcccaytgccctgaaggcctagtcccaggccaagcagcattaatcacaagctgactgaagagcccttgggtctcaaggcaaaataaatggtagtctggtagtactccttgtgggcctgtggtagtggaggcatggggtgaggctcctctgcctttagaaaggagagggaagagtgggaaagactgtgttttgtgg

SEQ ID NO: 780104 - DNA, 659 bp, Homo sapiens
gtatcatcgacccaggaaatcattagtctatggagtcttggctcaaacatcagctctggtcctcataaccacatcattaatggggaagggttatgtgaaagaaagatgggacataggaacattgtttatccaggacaggtagcgtggtccttccaacctggtttgaacytgaagtgtgttaacttactccatagctttcctcttgcttctggatttgtgtttaactggtttggtaaatcatgtgattcaagcattttaatttgttttctgagtcttctattccataacctctgagatagcttgcctgctggtgtacttgtagctcaaccattgtatcaaggtaatttcccatagaatacctactgaatcagaatcttgatgctaacaagatctcccaagtgattcatatgcatattaaagtttaagaagcactgacaaaactgttataaaggaagcctccgcaaagacaaaaagttggatctcaacagaactattccctgaaaaccatcctgaacaaaaaaacttcatatatccatgaatgccctaactatgactcggagcccccaaaaagggagagaatacaagaagatccattttcaacaactatcatgtaaggtttgaagaagctctggtgcccttgctgattatttgaattctaa

SEQ ID NO: 780105 - DNA, 585 bp, Homo sapiens
tacaaagtgaaataacaagtggaaaaaatgaaaaaattaaaaagtaaataaatcactttatcaaaattaaaatcatttacctttcatcaggaatacaacattgagcaaaacaaaatccctgcccacgtggtgcatagtctagcagcctggcacccaaccaacaaaatgccaattctaacagcttacaaacgaaagtatatagtttttccatgaaaaattacytccattatctctgttctaggataatcagaaatctttactcaagtcagcaagagaaaaatatattaaaatcctcttttccacagggaaacattcgacagatctttgttaagatatggactgtagtctgtgggaaggaatcatcatttgtagtgtgtccttccccttcaccatgacaacgtgcagcagcaaagctggatgaagtgcatgtacccatctgtcatcaggagtatatttaaccaatgactacaggacagcgacatccaacaggtcaccagtcataccacagtatacggtatctactctcagtcatatccagtcatatccattctattattgagcctatccagtaagcttttattctat

SEQ ID NO: 780106 - DNA, 644 bp, Homo sapiens
gaggcctagaactcaaaatcctatttttaactgggtgtgtacatgagttttttcaaaggattatatataagcaagataatgaacttgacatctccactgtctcaccttcacagagagcaagcctgttgaggctcaataatctaagacatcagaaagacattatgccacatgggaaaatggttaagtttcctttaagtacatgtttattatttttagtaagactactcattaaaatatgtttcacttcaaattcattatacccagtgtttgaaagcatattttaagtaacacattagaatatcatatacacaatagtcgaacttaaggaaaacatctcaggcctatgcaaatgctrtataatcacaatttaaaatgaattggagggtctccttccccataatacttacaaggttagccacaaatgtgggatcaattttaccaaggtttaagaaatatgcacttaatgaattcaactgtcaaaagttcatccattttcttaaagtaacaccttcttcagtgttacataaatttacactattaaaccaaattttttttctgtgacatgttgtcctccaaataaaagtacattaaaagactaattattagaatttggggcagcattttaaaaagtgtttttgttaact

SEQ ID NO: 780107 - DNA, 483 bp, Homo sapiens
gtcaatcatcttttctcccaaaagtaaaggtgcgagttgggatggggagagtgagaaggagcattgatttctgctttctagccccaggctaaaagttggcaacttggtaaggatatatattcaatccagacaacccaagtacctgtcagtggggttctcattatagtctgggccatcttggcctcctgtctaatatctgttccctccaatgaagtccatcatgtgatgacaggtggtactcagggcttccaactgttaaatcccttcaccataatcacctcagagctatcactgctctgtcattasaaatcaaagcattttaactcaataaagaagtattataatcaggagtcattgtaacacatctttatcatgctaacattgttttgactgcaaatgacagtgtcataaggatagaggagtccattgtcactgggaggtctataggtgatattagaatagtcaaccccagggaagcaaatc

SEQ ID NO: 780108 - DNA, 563 bp, Homo sapiens
ttctggtagctcagagcgagaaaaagtcccttcatgggactaactcagaataccaagcttaagccccaaatcttgctttccagataaatgtagtttttaatttaagtgacaatgtgattttcctggggtccacagccctgaacttttagaagtcatgtttcaggacagtttgattagktatatgcatgtatgtctgtctgtttctataaatcatgtttaaatgtacatatacacatttatgtggtctcttattaatttgcaaactcttaaagcataccaatgcttttctctcctttcttttgccacatacaatatcttacggtatactgtttgatcctccatgataatcaattatgactctaccttatagcttcttaatatcaagaatggcatcacacacatacagacacatgcacacacaaacacacacccctatctcatacctagcatataataggcattcagtaaatgtctagtgaactgaattgtttaactggctgtctgtgctatttttttttgttctctttaaacaataaactattacctataaatcaccaataaaa

SEQ ID NO: 780109 - DNA, 614 bp, Homo sapiens
cccctcagcttcctgtgtagctgagactacaggtacacaacaccacactggctctgcttcttatctttccctaagaagggaaaacaactgtgggtatctgtctggggagaaggggcagggagggcaaggatgggaatgttagcttgagaaggaagcatgtgtatgtcctcccccagtcctactggcacagaaattttccaaacctgtggaagtgcaagggaagccatgaaatcgttctgttccttcgtgggtaggaagaagagagatcctcctccaaaactcagatagtttatgtggaaggggaaaaaataaggccagcrtacaggatccaaggaaagaaaaatatggggatctcaccattgagaaacatgcaggagtttcacagtccaggaggataacatgggcactagagctctaactcccatgacaagcaaacaccttgtctgcccaagggtggtgaaatgaagatagctggtatttattaaatatttactagtaccatctgaaaataatattaaaagtcaacctcaggctttaatgccaggctgcttggattcaaattctggttctgctactcaccgggtgtgctatcaacctcatgagatagtcaagag

SEQ ID NO: 780110 - DNA, 581 bp, Homo sapiens
tgaagccgggagggggaggttgcagtgaggtgagatcacgccatcgcactccagcctgggcgacaagagcgtgactctgtctcaaaaaaaaaaaaaaaaaagagagagagagcagaattatatttacatttatagaaatctaagccagagtagtttatagaaatatatcaccactaggtattataaagaattactaattcaaacaaatagagacaaggagactataaattcataaatgaataaagtacatatgatacctttatttctactgagtttttaatgacacaattaggcttacaaagcttgtcaattaaagcttatgtcttttttcaaatataaatggatgtttacatttaaaagtaatctgttcttttaaagtctttatggcgtttgcttagcaaccaatatataaacataamataaagataaatcatccttaccagtatttagagagttacaaacttgaatagagttaggttcaaattaatatgtttacttgtatcagatacaatgataatttgaatatatataacatatgcaacatatataaacacacaaacatgtaactttttatattatat

SEQ ID NO: 780111 - DNA, 596 bp, Homo sapiens
tctccgaagttgaattcaagagagacagggaatagctcatgttagtttgctatgttgtactgcactggcactttccccctccctaactttgtatttttatttattccatcatcctgtttctcttaggaatgtttgattactcatattctaacttcttgaaaccaatgctgaatttattgtcatacttgattgtttaaatatgagagcagttaaaattatgaacctgtctcttattatgcctttgsgcacatctcgtttcaacgtgcattcttctcattttcatcacttcataaatagtctatattttttatttttactttcattttctctttgacttgaacaattggggaaactttttaatttgtaactttttaatctatttaatgttttattacattgaggccagataatagtgtcttttcaagtttttctttttttgaatgtgttgcttttattgtagactaatactggtgtttttggtaaaagtgacacgatgtgttttagaccttctggatccatattcatttttccttaatctaggaaattgagaattatatatactgaaattatacctcattgttgtattttgtgtctta

SEQ ID NO: 780112 - DNA, 596 bp, Homo sapiens
tctccgaagttgaattcaagagagacagggaatagctcatgttagtttgctatgttgtactgcactggcactttccccctccctaactttgtatttttatttattccatcatcctgtttctcttaggaatgtttgattactcatattctaacttcttgaaaccaatgctgaatttattgtcatacttgattgtttaaatatgagagcagttaaaattatgaacctgtctcttattatgcctttgcscacatctcgtttcaacgtgcattcttctcattttcatcacttcataaatagtctatattttttatttttactttcattttctctttgacttgaacaattggggaaactttttaatttgtaactttttaatctatttaatgttttattacattgaggccagataatagtgtcttttcaagtttttctttttttgaatgtgttgcttttattgtagactaatactggtgtttttggtaaaagtgacacgatgtgttttagaccttctggatccatattcatttttccttaatctaggaaattgagaattatatatactgaaattatacctcattgttgtattttgtgtctta

SEQ ID NO: 780113 - DNA, 649 bp, Homo sapiens
taacaaaagcatggaatcaacatagctgcccatcagtggttgactggataaataaaatgtggtacaaatacatcatggaatactatgcagccataaaaaagaacaaaattatatcatttgcagcaacgtggtcagagctggagaggccattatcctaagtgaattaatgtaggaataggaaaccaaatatcacatgttctcacttataagtgggagctaaacactgagtatacatgtacacaaagacaggaataatagaccccakatcctacttggggatggagggtaagaagggtgtaagaattgaaaaactacctatcgggtactgggctcattacttgtgtgataaaataatccgtacacaaaacccctgcaacatgcactttatccatataataaatctgcacatgtaccctgctgtacctaaaataaaagttggaaagaaaaaaaaatagtagaggtaaaaaaagaaatgattttgctctttcacatatgttgtcatattttgtttttccattttcatttgtcttaagaaatttgtttaattttccttttaattttttcattgacatactggtttttcaggagcatgtttaatttccatgtatttgcaaattttctgaatgtatcctgttattgatatctaatt

SEQ ID NO: 780114 - DNA, 644 bp, Homo sapiens
gtatatgcagtatacatgcagtccattgttgactgaaacattgtcatgtggtgcatgacgctattggtaaagtacccagagactctttggagagagcagcaggaactaagatcaaaaccattttcttcagggctgctcaggctgaaatatttacttttttaaaccaaccaatctgctttcaaaattctactaatcattcaaggcccagttataaagggctcttttcttcacatttgcatagttggcattacttacaggtgtattcatctatatctactttcccagttaaaactatcaacttgtatcaaaggctatgtctagaagcaaacaatcacatgcataaaccaagttctgagcctcatttatgcatttaaccaccacacttttaactgatagtgagtgaccctaaaggcctgtgtagtaatttggaaaatgctgaggcagggtctagaactgatcatgytgtgaggtgctgggcagcggcaagccacttagctgcctggtaaaccttgctgcatctcagtgggatatgactgtctgctatgcattagctcccttagctagaaattttgttacagtgaaaaaacaactttaatttgtgtgtgtgtgagaaaaatatcactccaaataaagccaactgcttc

SEQ ID NO: 780115 - DNA, 644 bp, Homo sapiens
gtatatgcagtatacatgcagtccattgttgactgaaacattgtcatgtggtgcatgacgctattggtaaagtacccagagactctttggagagagcagcaggaactaagatcaaaaccattttcttcagggctgctcaggctgaaatatttacttttttaaaccaaccaatctgctttcaaaattctactaatcattcaaggcccagttataaagggctcttttcttcacatttgcatagttggcattacttacaggtgtattcatctatatctactttcccagttaaaactatcaacttgtatcaaaggctatgtctagaagcaaacaatcacatgcataaaccaagttctgagcctcatttatgcatttaaccaccacacttttaactgatagtgagtgaccctaaaggcctgtgtagtaatttggaaaatgctgaggcagggtctagaactgatcatgttgtgaggtgctgggcagcggcaagccacttagctgsctggtaaaccttgctgcatctcagtgggatatgactgtctgctatgcattagctcccttagctagaaattttgttacagtgaaaaaacaactttaatttgtgtgtgtgtgagaaaaatatcactccaaataaagccaactgcttc

SEQ ID NO: 780116 - DNA, 641 bp, Homo sapiens
caatgacttcaaccaaagaggatttagcatggggattttattacttgcaacaagtaaagagcacactagggatagttcccaaagcagtaacctctctgagctggggtgccgcggacctattggactgaacaaagtggggcaaacatgggaataaaagacaagagacaaagaagtatatttggaagaaagggtcagggggcaccttgcctctagtggacaagcgccctgagctttacacggccctccatatttattaggcaaaagagatagtgagaaagtggggagtgattgtcgagtaattgtcagtcgggcgtttggttcacagcaggctttcgagattgcatcctttgagcaataggcgctaatattctcagtagataacttcaaggagcccggagcccgggaatgatgtccctcagcaaaccttttggtggcagggcagtgtgagtttgcccacatcctgcmttcatgataaacagtttgttatttgatcatatagcctccagcggaatgctgagttggtcacgatccctttggccttttcggctcccaacactgggggcagggtcaggatttttataagcatagggtaaggaggcatgatgtgattggatcttgcaatgaggtgatgccaggaggca

SEQ ID NO: 780117 - DNA, 610 bp, Homo sapiens
atattattctccttgcagtcaatatcttcaccactcaagctacaactgtcttacatttaaaatatcatgccagggcacccagaggtggattgtcatcaatttgtttaataaagtgctgcctcagcacccatttttaggactgccataagttatttgaagcccagtcatatactgtcacctttggcccagttaaaactttccctccctgtgtggttgtttgcaatacagcccgttttttcctcatctcattgaaccaaacccaacatattccacaggtgctgccgtgataaaacttaatgkttaacaccagagtcttgtaaacaagttccccaattcacaggtgttttctttaaagtaaaaaattcacaacccctgaggaaagtgtaagggctaacacccgtgcaccttaataaagacctggccccacagctcttctctctgtctcttgctccccacccgttggttgagctccctgccacctctagccttcccgtcagcctcctgttgacacccctaacctctatgtgatctgtaagtaataaccttcttgtgtttcatgcatttggttttacttcctcattttgtctcacctgcctgatacacccgaatc

SEQ ID NO: 780118 - DNA, 588 bp, Homo sapiens
tagtagaatggaaaaaaagttatgatatagtcatatagcagcaaacctgaatgaactattattttcatatacactgaagaaagaagtcaaataaatatggtgtgaatgcattagtacaaaactgaaaaacaggcaaaacaacaatatcgtgaggaatgcaggtattcayggtaaaacgttaaagaaagcaagcaaattactatcacaaaaattaaatagtggttaactccactaacaaggttgtgactggaaatggggacatggggtcttctcggatcctggggggcaatgtttcatattctaagctgtgttatgtttatatgagtgtttataattattcttcaaattgtatgtatatgtcgttgacttccatttttaagctactaaaaacttctggagtggaaaagataattgttcaaagtgtgggcatgggaaagagagataaagtgtaatctctaaatggacagtccaaaggcatttggagacatttgctcaagatcaaggaaagaaagagtggacacgatatggaacccctcctccttctcccaatgcatattgagccttataaatgacagtgttttaccattg

SEQ ID NO: 780119 - DNA, 600 bp, Homo sapiens
cctaagaacaaaatgtgaggatgtttggtgtggtactttgagtaagcaggtgtttctttttcttgctttctttctttctttttttttttttttgcagacagagtctcactttgttgcccaggctggagtgcagtggtgcatctccgctcactgcaagctccatcccccaggctcatgccattctcctgcctcagcctcccaagtagctggaactacaggcgcccaccaccatgcctgcctaatgtttttgtatttttagtagagacagggtttcacagtgttcaccaggttggtttygatctcctgaccttgtgatccgcctgcctcggcctcccaaagtgctaggattacaggcgtgagccaccgcgcccagccacaggtgtttcttttcattcctgaatttgaaaggtaccattaactgtgtccagagttagggcccatttacatgatctcaggaaatttgccctgcagtctccttttggaagagttactatcatctagtgttgattgccatgcctgcactatctccctacacaggggactctactgggacaaccctattggcatcactatttgatgaccagtatggggtgcttgtct

SEQ ID NO: 780120 - DNA, 562 bp, Homo sapiens
agagctgtgctgtgtcttggtagattattttaaaaatagtattattataaaatgcatagaaatttggaaaaggaggatatgcagaaaagctacaaaatgaagcagaatatattcttccaggatgtttaaattaattgtagtttctgaattatttggagacatttttgctgtgtttctgccccctcgtacttataaagtccttgaaagctttgcagtcttttgaatggattagatagatatataactgttaagatatgatgaactcccaacagtagctttttacaaaataagcctccttcaacttttcttagaagctctaagtccctctttcattcaatgcaatttaactyatttgaatattttattagttgctttctgtatgtcagcatggtgttaaaccatgaggttatatataaacacacatactagcttctgctttcaagaagctcacagtctgaaggggaaatagactttccgataaataattatgatatggtatgaaaactagtaacataattgcaaatataagatacagaaatagcactgagaatgtatcgataaa

SEQ ID NO: 780121 - DNA, 439 bp, Homo sapiens
ttgactgaggaagagaagactaggggcctggttcacacgatgcttctgcacgatatgcaggcaccacccgaaagtgggcagttgcgcactacagcccctttctaggatatccctgaaagatagcagtgaagggaaatcttcccagtggtcagaacttcaagcagtgcacttggttgcacactttgcatggaatgagaaatgggcagatatgtgattatatactgattcagtggctgtagccaatggtttggctggattgccaaggacttggaagaaccatgattggaaaattggtgacraagaaatttggggaagaggtatgtgggtgaacctctataagtggtgaaaaactgtgaagatacttgtatcccatgtgagttcttaccaatgggtgacctcagcagaggaggagtttaataattaagtggacaagatgacc

SEQ ID NO: 780122 - DNA, 360 bp, Homo sapiens
gaaacagctcttgaaaaatagctaactgatcaggtccagagatgccttttataagctattgaatcttttctgtctcttacttagcactttgctgcttatacactgttaatgaaaatattttacatgtttggatgcctgakgtgaaaatatttctgttgtagttgaacttaagaaactacatgaattcacatgttatttcagtcatcaaattagaatcttatggcaaggaaatgttttacctgtagatttataattaacacattaatttttaaaaatttaccagaatattattattaagattccttaagaaaagatatagcttcaaaagtatctgaaagatgggtaagctagatattttgc

SEQ ID NO: 780123 - DNA, 560 bp, Homo sapiens
tctgatatttgtcacttatagtaatggccttgggggtttaaatgatgactgccggacttagggccttttagttaaataatttgtttttaagtttttcttcattcattaactaaattataaaaataataattatcttttcaagggttgaaaatatatacatcaagaaaaagttaatagtcctctccattcccccctttatttttgagctaatcaatattatcagattggtatctgcctttacctgacttcyttcatgttatacccatgttagagatgatgaaaccagcagagatagattaagtaacttgcaaaagatatggacctaccaagtaacatagccgggatttaaacaaaggcagtccacttccaaaacctacatcaaaaccattatactaaaaggctgcttctgttagattttatgaccgaataagtgaatgaatgatttaggtgacataaaagttacattgacccctatgtttcattttgggtgagtataatcattaatagatattgggtatgaaggggatggagatttggagtaggagttacataaattcatt

SEQ ID NO: 780124 - DNA, 652 bp, Homo sapiens
tacttctatagagtttaaaactttttaatgttttgtttctttaaaaaaattggtactctatagataagatactcataaaaattctacattaacttaaatacatttgtttcttattttgtcactctaggtgtgcactttttaaaaacatgaatgtcaacagttgcagataaaatttagaaaattttgcgagaaagttgaacattttggtttattaaacctaaaagaaatggattttaaacatccctcataaatctgatccctgattctgagagttcaggctcgttggaggggggaaaggagaagagattacatcacagtttttcctcaggtttctttatcrgctaaggcagtgtgactatttgtacatctcatcctctgacactccattcctaacatgaagactagtgaaaagttaaacaaattactattttaactgagtttgaagaagtttatagctgtaaacttaactggataaaaatcttgacattctatgggtttccagttttattcagctcctaaaagagaactcttgtcatcctgtttctatatatattttaattgcactttgttctaaagaactacattcatcctacagcaaattggaatgggatgcatatgtttgctcataaaacctataacagcccttaaaatg

SEQ ID NO: 780125 - DNA, 593 bp, Homo sapiens
ccatcttacggtacaaatagtatttttatgtctctgggtacatttttggaaaacggaaatgatcatatttgcctctggatgatgcttgcaaagaaaatagcttatcttagagacagcatttttataagtacaaaaaaagacctctttaaaagtgtttttttttaaaaaagcaaacaatagcaactgtacaacttcaactcaaagtttaccaattttttttgttaggtcattccaagtcaagagtaatcagatgcacaaaaggataaagagaaatagctgaatttactccagtaagggagacttgaacagctattgatttacggatactgacagactaaacttcagaatttttaygacgtataaccatgcttttctttgaaaactagaaaaatagtattgtatttacaaatcttagaagtaagttttctctagatgatagttgcagattaaaattaaaagacaaatttgccttcttttctaagatgtatgtgtgtgtacataggtacatattttaaagacaacttcatttctttaaataagttattgataaattatcactttcattatagtgcttccatggtatttcttttttt

SEQ ID NO: 780126 - DNA, 520 bp, Homo sapiens
agatatatatcatatttctcatatatatatatgatatacatggtaaagagtgctctgcaattgttggatataatgttctataagccaaattaggtcagtttggttaatgtcattctaaacttctgtatccttttctttcgtatgctttttctattagttattgaaattggtcatagcctatgattgtagatttgtatatgactcctttagttctttcaactttttgctttatacagttaaattttgtgctaattaggtattgaaaactttgtgattttatagcttgctatggacttaacccttttatgactttgaaatgtacatctttatattttgcacttctacttaagatctacttttttcactrttaatttaaccacataatttttctttttgttaatatatggtagacttatttttgtctttatcctttttaactatgtattcatacatatgcttacaatgttacttctgtaaacagaataaaactgcattttttttcaagtctgacaaattctgt

SEQ ID NO: 780127 - DNA, 564 bp, Homo sapiens
gaattgcagttcccataatccctatatgtagcgggagggaccaggtggaaataattgaaacatgggggcagttgccccatcctgttctcatgatagtgagttagttctcatgagagctgatggttttataaagggcttccccctttgttgggcactcattcttctctctcctgccaccatgtggagaagsacatgtttgcttcccttccaccatgattgtaagtttcctgatgcctccccagccatgctgaactgtgagtcaattaaacctctttcctttataaactacccagcctcaggtatgtcttcattagcagcataagaatgaactaatagagtaaattggtactgagtagttgggcactgctgtaaagatatccaaaaatgtggaagcgactttgaaactgggtaagaggcagagtctgaaacagtttagagtgctcagagataggaaaatgtgggaaagtttggaacttgctagaaacttggagggctcagaagacagaaagatgtgggaaagtttggaatttcctagagacttgtggaatggcttgaccaaaatgc

SEQ ID NO: 780128 - DNA, 646 bp, Homo sapiens
aaagtgtatatatttaaggtataaacatgatgttttcatatctgtacacattgtagaatggctaaatcaagttatttaacatatgcattacctcacgtccttattttttgtggtgattaaaatctattctcttaggaattttcaagtatatgatatagcattattaactgtggtcaacattttatactatagatctcttgaacttatttctgtctacataaaattttgttcaataataattttatttttttaattaataaaatctttgactaatatctcctcactccccccactctccatccgctagtaaccatcactttactctctgttcctaggagttcaaatttttttaacactccacaataaatatgatgtagtatttgtctttctgtgcaccttagcctcccaagtcactgggactgcagacacatgccaggtccagctaatttttccttttttttttttttggtagagatggggtttcccatrttgcacaggctggtctcgaactcctgagcttaggtaatctgcctgccttggcttccacgagtgttgggattacaggcgtgagccattgtgcccacccccctatgttttaacataatataatgttcaggtttgtccaggttgtcacaaatgacaggtt

SEQ ID NO: 780129 - DNA, 507 bp, Homo sapiens
gtcaaaatgtcaaaacacaaagagagaaacgaaagcagtatgaaaaaaatattccagcatgtacagggaacctgaataaaaataacagttgatttctcatgagaaaccaaggatgccaaaaggcagcagtataacaattcaaagtgctgaaacaaaaggtcaaccaagacttctataactgggaaaactatccttcaaaaaatgaaggcaaaattaagccattctcaaataagcaaaacttgagagaatctgtcaccatcacatcctacaagaaatactaaaaggagtccttgaggctgaaataaaaacracaccaaacattaactcaaagccacacagaaatagagtattggtaaagctatctacacagagaagataaatatatttatatttataaccctttctttttatctaatttaaatgacaattgcataaagcaattatttaaaaagtgtagtcacgggtttataatgtataaagatgtaatctgtattacaatgagagcaa

SEQ ID NO: 780130 - DNA, 619 bp, Homo sapiens
ccacttctgtgggccaatgattagtacaatcattggggaagttcaatatacatttttgaatgaacgtcaaccacaggaaaatttattctttcctagtctttttgatattttactcatggccttacatttcctttttcaatgtatttttgtttaatctcacaaggcgttcttgaatagtcattgtttaaaattttagaaggctgccaaatactattttcaggaggataaatgatgctattgaactattggtttctgagatatgctaatacttgcctaccttctttgaaaaatgctcttttcttagtcactcttaattaacctcaagtgctgtcaygtagaaaacatttgtcgaagttatcttcctgccgtgtctctgatatatatacatttaagtacaccttttacttaatctttatgtcctctttgtcaggtatctgtgtggataagtgcctttggtagtatatggcattttgttcaatttgtttgctaatgggcaaataaatagaaagcagctactctggttccctcagaaccagaactgcaatgttgaaagagatgtgtcagtttgtggaattcatcccatttctcatttatagatacgtagacaagccatgtacat

SEQ ID NO: 780131 - DNA, 612 bp, Homo sapiens
gatatttgaatcatggggacggttcctccatgctgttctcatgacagtgagtgtgttctcatgagatctgatggttttataaggggcttttcccccttttgctcagcacttcctcttgctgcctccatgtgaagaaggatgtatttacttccccttccgccgtgattgtaagtttcctgagcctccccaaccatgctgaactgtgagtcaattaaatctctttcctttataaattacccagtcttaggtttgtctttattagcagcatgagaacgaaatgaaacaaaaatagtctgccttagcagcaattatcaatctcattaacctatagacatgtttgttggatagttgttggcagagtttgctcagaatagaattctaaacagtacaatgagtgcattttatgcacatatgattcttctacttttcaaatgtgttctttttttaaaacagaactcaacaactttyatttcacttgaccagcgttgctggtgtctaaatcagtcgaacacagtggtgcatagtttgagggcattgggagcattgcagtgaagaaagaggtatgggaaatgaagagttagcagcagggccagtgtcagtgaagggtaaaca

SEQ ID NO: 780132 - DNA, 647 bp, Homo sapiens
tattttgttatagcaacaacaggaaactaatacaatagtttacatgagtatagaagagttcactttttttttttcctttccaaattttgaatggtttgcgagcaagctctctacaactaccactttctctgatttccaccctattttaccagtatagtttgcagcattgggcttaagactgccacatttttactgagcacatgaaattaaaagaaaaaaaaatctggggaaactatctaacttgcaaaggcatgttaaatgaaaatgtacacrgcaaatgtccagaaaaatatccagagaaattttatactttttcctgctgaaatgataaatgaacacattttcgtcagttatatgaatattacaaaagaacttttaaaaatgtctacatagtttgatggcttttagcactgagatacagaaatagctcccaggataatattattacccttttactattttatcctcttcttatccttttatagtagtcataaaaataagcagtgaaatttggaatctgggaagcatgttgtatttcccaaatggaaaagaaaagggaaatcctcaatggaaaaaagtttaataccagtatcgcctagatgcttaaattatcttgaaataaactatgtgaagaaaatacacacaga

SEQ ID NO: 780133 - DNA, 613 bp, Homo sapiens
gtggatcacctgaaattgggagttcgagaccaccctgaccaacatggagaaaccctgtctctactaaaaatacaaaattagccgcgcgtggtggtacatgcctgtaatcccagctactcgggaggctgaggcaggagaattgcttgaaccctgraggcggaggttgcggtgagccgagatcgcatcattggactccagcctgggcaacaagagcaaaactccgtctaaaaaaaaaaaagtttcttatacatttttcgatgccgtttctttttttctttgtttatgaaaatgtctcagatcaaagtaatatatcttcattgtccaggatatttcgttaagtatagaaaaatataaagcagcatgaaacatactatccttcatctcaccacccagagatcacatcttaatatttttggccattgcattcaatctagggcaaaaacaggcagcataacttgcacacagtggatgctcactgcatccctgctgaatgcatgaatgcagaaagagaacttggagaagggcccatttgtcttgctaatagaatcaattatacagctcttatggtctaaaattatttgtcttctcaagtttgcctcattattgtcacaca

SEQ ID NO: 780134 - DNA, 590 bp, Homo sapiens; identical to SEQ ID NO: 744707

SEQ ID NO: 780135 - DNA, 631 bp, Homo sapiens
actatacatcaaaatatactcaatctcaataataaaaacaaaatttaagaattagtgagatagtttttcatttattagataagcaaagattgtctttattatttttttttttagatggagacttactctgttccccaggctggagtgcagtggcgtgatcctggctcactgcaacctccacctcctgggtacaagcaattctctgcctcagcctcccaagtagctgggattacaggcgcccaccaccatactyggctaatttttatatttttagtagagacggggtttcaccatcttggccaggctggtcttgaactcctgacctcatgatccacccgcctcagcctcccgaagtgctgggattacaggcatgagccagggtgcccagccaagattgtcttttaaaaaggcaatacccactgttggtaaaagcacaggcaaaagagaattctgaatcattcatggtaagaatgtaaattggtacctctttctggagagcaattagatgattcttaaccaaaccttttgttatggtggccaaaagttagcaacaggctaagtgtcagcaagggactggctaacaaaccatgatgtgcaatgcaaccaccaaaaataattatgcaaaattata

SEQ ID NO: 780136 - DNA, 607 bp, Homo sapiens
gatgatattacaaggaaatgtttcatgcctgacccatccccagtcttggccaaacttttgctgatttatagcaataaaagtctgaattcccagccaggtgcggtggctcacgcctgtaatcccagcacgttgggaggccaaggtgggcggatcacctgaggtcaggagatcgagatcatcctggctaacacggtgaaaccccrtctctactaaaaatacaaaaaattagccaggcgtggtggcgggcgcctgtagtcccagctactcgggaggctgaggcaggagaatggcgtgaacccgggaggcggagcttgcaacgagccaagatcgcgccactgcactccagcctgggcgacagagcaagactctgtctcaaaaaaaaaaaaaaaaaaagtctgaattccctaacaggtgaaattttacttttttttttttttttgaggaaagggaacaattggagaaaccctatgctgataggctagaaaaggaagattttactctaaacatgctaagtgaatattaataaataaacaaaatcacagacaaatctgcataggcaaaaagacaatctgtttcctgatttgcatgctcacttccttctctggct

SEQ ID NO: 780137 - DNA, 607 bp, Homo sapiens
gatgatattacaaggaaatgtttcatgcctgacccatccccagtcttggccaaacttttgctgatttatagcaataaaagtctgaattcccagccaggtgcggtggctcacgcctgtaatcccagcacgttgggaggccaaggtgggcggatcacctgaggtcaggagatcgagatcatcctggctaacacggtgaaaccccgwctctactaaaaatacaaaaaattagccaggcgtggtggcgggcgcctgtagtcccagctactcgggaggctgaggcaggagaatggcgtgaacccgggaggcggagcttgcaacgagccaagatcgcgccactgcactccagcctgggcgacagagcaagactctgtctcaaaaaaaaaaaaaaaaaaagtctgaattccctaacaggtgaaattttacttttttttttttttttgaggaaagggaacaattggagaaaccctatgctgataggctagaaaaggaagattttactctaaacatgctaagtgaatattaataaataaacaaaatcacagacaaatctgcataggcaaaaagacaatctgtttcctgatttgcatgctcacttccttctctggct

SEQ ID NO: 780138 - DNA, 471 bp, Homo sapiens
agcatgttagaatatttaaaacttgtgaaaagttaatttactaagtaaaataaaattataatatttaaagtttcttcaaattaattttaagtaaactaaaatagcagtattcaaaacttcgtttcactaaaaaatgaaattgyaatattcaaaacttcttaaagttagttttataaagtaaactgcaatattttaaatttcttaaaacttacttttttgtactttttaaagaggttttaaatattgtaaggcaaagtcaacacaaaacagaccatggcagatagtattggtgcagggaaggatgtaagagatggtaggatggaaagatgctgttagcagggaaatgtctttaaaaaacaaatccagaaatagtaatgccacagatccacaaagactgagtatcactgaactttacatcacagttcaattcagaaaaaaatctagcatttgcagcgaaagagaccacgcacc

SEQ ID NO: 780139 - DNA, 619 bp, Homo sapiens
attcccatctggctggggtttgctctggaagatagaaaacaaggtcagcagctgaaaatgagtcttgtcaagtgctaaagaaagaacattctaatatctgtgagcttggtgaccaactgacaagggaatgagaagaggctaggtcctaatgtggaagcaatctcttttacagaatttgagtatgaaagcaaagggacagtctctccttcccttttatctcaagatgagcaaaagtatagagaagaaatttaagtggaagtttgttgagagagttcacatagggtatatttaaatttcagaagaagaatatggattataaagtaagaaagaattattaactccgagaattatttggcatttgaatagctcatcagaggggactggaatgacctagaatggyttaaatagaggttgggatggtgtgacctccgaggatcacatagcctttaaatttcatcacatatctcagtggttctcaaccctggctacatattagaatcaccgtagtaactcaaatatactgtacccaagccttaaacccatggattctcatttcaatggtctaaaaacagtggcctactccaaatacagtccacagattggcagcgtcagtagcact

SEQ ID NO: 780140 - DNA, 619 bp, Homo sapiens
attcccatctggctggggtttgctctggaagatagaaaacaaggtcagcagctgaaaatgagtcttgtcaagtgctaaagaaagaacattctaatatctgtgagcttggtgaccaactgacaagggaatgagaagaggctaggtcctaatgtggaagcaatctcttttacagaatttgagtatgaaagcaaagggacagtctctccttcccttttatctcaagatgagcaaaagtatagagaagaaatttaagtggaagtttgttgagagagttcacatagggtatatttaaatttcagaagaagaatatggattataaagtaagaaagaattattaactccgagaattatttggcatttgaatagctcatcagaggggactggaatgacctagaatggcttaaatagaggttgggatggtgtgacctccgaggatcacatagcctttaaatttcatcacmtatctcagtggttctcaaccctggctacatattagaatcaccgtagtaactcaaatatactgtacccaagccttaaacccatggattctcatttcaatggtctaaaaacagtggcctactccaaatacagtccacagattggcagcgtcagtagcact

SEQ ID NO: 780141 - DNA, 645 bp, Homo sapiens
ccctccatctctcaaagactattgtctcatctgtaaaatgggtctacatgagcaacagggcctgccgcagaagggctgtgtcatgcatgtaaccgaggaaggcacccagcaacgtgccggcaacagcagtccgatgcattgctgcatttgagctggaaagctgtttacacaasttcccatctttaattctcacgatccagaagccacgatgcaggaggcagtcaccagggctggtgggcttggggacaagcaggaaggaagctggggaactgtctggacagaggcatggccctcccggggccccaactgccattcgctgcatccacccttcccacagagacaattattgagccccagccaggtctcagccactcgctgggcactggggactcagccacaggctgaagacgcagaacccacaccacagctggggctggggcaggtctctgggcgtgacgcccgacagcagagctctggcacccgcagcctgcggggcagctccaggctaaggagtcaacacgcagctcgagcccttggcccttgaacatggagcgctttacagacctggagctgagtcaaggcacgtttcccaagattttggggctcccctctcagggagagggaaggaagagtcggaaacaaagc

SEQ ID NO: 780142 - DNA, 645 bp, Homo sapiens
ccctccatctctcaaagactattgtctcatctgtaaaatgggtctacatgagcaacagggcctgccgcagaagggctgtgtcatgcatgtaaccgaggaaggcacccagcaacgtgccggcaacagcagtccgatgcattgctgcatttgagctggaaagctgtttacacaacttcccatctttaattctcacgatccagaagccacgatgcrggaggcagtcaccagggctggtgggcttggggacaagcaggaaggaagctggggaactgtctggacagaggcatggccctcccggggccccaactgccattcgctgcatccacccttcccacagagacaattattgagccccagccaggtctcagccactcgctgggcactggggactcagccacaggctgaagacgcagaacccacaccacagctggggctggggcaggtctctgggcgtgacgcccgacagcagagctctggcacccgcagcctgcggggcagctccaggctaaggagtcaacacgcagctcgagcccttggcccttgaacatggagcgctttacagacctggagctgagtcaaggcacgtttcccaagattttggggctcccctctcagggagagggaaggaagagtcggaaacaaagc

SEQ ID NO: 780143 - DNA, 646 bp, Homo sapiens
gaaaggggttcccttcttttgaggatccctttaagtgggtgctacctaagactgcaggtccacggtctcaaataattctcttctttcctccaaaccaagaagtcacgaataacctaaattaaaaataaatgttcactgcatcaaatgtgtagccaacaatttggtgccaggcaccgtgcctcacgcctgtaatcccagcactttggaaggccgagatgggcggatcacttgaggtcacgagttcttgaccagcctggccaacctggtgaaaccctctctctactgaaaatacaaaaattagcctggcatggtggcgggtgcctgtaatcccwgctactcaggagactgaggcaggagaatcacttgaacccgggaggtggaggttgcagtgagccaagatcactccattgcactctactagcctgggcaacaagagcgaaactccaattcaaaaaaaaaaaaaaaaaagtgctgggattacaggcgtgccaccacacccagccctagggtttcaattacttagaacacaaaagatgaactacaaataattcatctaataaaccttttaaatttttagcaaaaaaaattatttccattttaaaataaaacatttattaattaattatttcttggaataccttttagg

SEQ ID NO: 780144 - DNA, 606 bp, Homo sapiens
ttaagccgaggcagacgctgtgccactgagtacctagggtagttcagatgcacctaatatccaggtttttaggggaactaatacgtgtgtgtggagctgtgtcttgaaataattcaatgttctaagctcagtgaaatcgtgtctctggaaggtcaatcattgaargtataacgtaaacactcaagaaaacagggagactttgtggcagctcttaacgtcgtgacgccagctgcagtagctctgtcaattgtgggggcatcagataaatcaatttaagctggaaaagtcctttgaggtatccaggtggttcgtaaggccacataagtctgtcaaatatcatcgctttagagatttctgagggttcagaggatatcaggtcttgatgcttggaaagaggcaatcggcaagattttagcaaagggactctgagacaaaagccacaggtttttgttcgtccatgcatgctttcctcagtttcactgtgcagcacctctcaaactttcatgagaaatttggggtgccctggcactctgtgtttttctaaccggctcccggccgacactgaggctagtggttcttgaaccacgcgtcggtattagggtgctg

SEQ ID NO: 780145 - DNA, 636 bp, Homo sapiens
tttattactgttttaaatatttgtaacattataggaaaacaagccataaagaatattcattttgaaaccaaaggtagaatttagaccagactccgctgtaatgatctaaatatttaatcttgttaagggtgtggagaaatgtctctagacatggacatatgaactaatatgacctttcaggagtgccatctaggaatrcatttcaacattttaaatgtgcagctgttttgatctattaattcaacatagagaaattaatcctaaaggaagagggaaaatattcaagcacgaacatattgtatagtgttgtttatattgatgaaaaattaaactatgtgttcatatggaattgataaaactaatgctactacaaataataatactaatcatatgtcacctttattgagtttttacgatgtgtcagcaaaatagtaagcactttacatgtgttatgtcacttaattttctccacatcctaataatataggtactataattgtccccatttttcagacaatgaagctagctaagcggtagagatgttaaataccatctcaaggtcttatagccagtgagtggcagaattgaacacatattataaattcataatatggagtcattaagaaagagataagc

SEQ ID NO: 780146 - DNA, 636 bp, Homo sapiens
tttattactgttttaaatatttgtaacattataggaaaacaagccataaagaatattcattttgaaaccaaaggtagaatttagaccagactccgctgtaatgatctaaatatttaatcttgttaagggtgtggagaaatgtctctagacatggacatatgaactaatatgacctttcaggagtgccatctaggaatacatttcaacattttaaatgtgcagctgttttgatctattaattcaacatagagaaattaatcctaaaggaagagggaaaatattcaagcacgaacatattgtatagtgttgtttatattgatgaaaaattaaactatrtgttcatatggaattgataaaactaatgctactacaaataataatactaatcatatgtcacctttattgagtttttacgatgtgtcagcaaaatagtaagcactttacatgtgttatgtcacttaattttctccacatcctaataatataggtactataattgtccccatttttcagacaatgaagctagctaagcggtagagatgttaaataccatctcaaggtcttatagccagtgagtggcagaattgaacacatattataaattcataatatggagtcattaagaaagagataagc

SEQ ID NO: 780147 - DNA, 598 bp, Homo sapiens
ctttctatccagggtgttaagcccagaatcttgcgtaaagatttttcttgagctacagcaactgttgcaaataataatagtgactgcgtgttgagcttcaactgcatgtcatacaccaagatgagcattttgtagttactgttatatataatcttcaggaatcactagtgagccaattattattatccccattttaaggatagggaaactgaggcttagaragatgaaggtcttgtcgaaggtggcagatagaactctaggctctattttacttttctaatctccaaagactgattataagtccgtaggaaatctcaaagccttcgaatatttttctttacagtgggaaaacaatacatttgcaaaatatttctgcattgaggggtttgagattcttacatgagaatatattttcaggcccatgctgaacccctcagagccaggccctttctatgaactttttaagtagtctcagcacattagtattactgcacctacctagtcatccattggatatctactagactgtgaacaaatgatgggtaaatattatgttgtatttgtgtttttttcctcaatatctgatgtagtacctgac

SEQ ID NO: 780148 - DNA, 598 bp, Homo sapiens
ctttctatccagggtgttaagcccagaatcttgcgtaaagatttttcttgagctacagcaactgttgcaaataataatagtgactgcgtgttgagcttcaactgcatgtcatacaccaagatgagcattttgtagttactgttatatataatcttcaggaatcactagtgagccaattattattatccccattttaaggatagggaaactgaggcttagaaagatgaaggtcttgtcgaaggtggcagatagaactctaggctctattttacttttctaatctccaaagactgattataagtccgtaggaaatctcaaagccttygaatatttttctttacagtgggaaaacaatacatttgcaaaatatttctgcattgaggggtttgagattcttacatgagaatatattttcaggcccatgctgaacccctcagagccaggccctttctatgaactttttaagtagtctcagcacattagtattactgcacctacctagtcatccattggatatctactagactgtgaacaaatgatgggtaaatattatgttgtatttgtgtttttttcctcaatatctgatgtagtacctgac

SEQ ID NO: 780149 - DNA, 479 bp, Homo sapiens
taatcattcagattgcaattgtcaaacagacaattggaacccttctgcacaaaagctgagtaaacagggtgcagtttgggggaaatagaaaaagaatgaaaacagaggattaaagcaaataaaatagattaacccttgacaygataatttatactaggactagaagtccaacagaagagctgttgtagattacatacgtgattaatcactgctatagtttcattggtgacaaaatgattaataaagtttaagacaaaaacaaatcttttcgcatctgcacctaagtgtgcaaaatctagcaagggtttctcatccagaccttggttcccttgcaggatggacaaacttttaattcagatttttgcggccctggttaagataaaagcatcatctttacaatagatccaccctggcttacttgtgaaataaagggttaggaacaggaacccaattctgaaaaggcttactagcacgaggtt

SEQ ID NO: 780150 - DNA, 593 bp, Homo sapiens
ccaaattttatatcattgtgaatttttctaaggagagatccatagctttcatgggattcatgatcaaaacgaagaatcaccagaaaaactaacccaaattctattttaatgagtatgtatcaactgtaaatggtatttccttttatatctagcatattccatcatggaatgactgtttttataggtcaaacatagcgaaccaagcaccagaaatttcaattggtcccacctaataacaaacatttaatataaatatataaataaaagtgtattaaataagctttttataaatgaaaatcacattttaatataacttatacaaacaatrtatttaatcatgtaatacttcaatatatctgagtaaatttatgctaaatgcatctgtttatggctatgctttacatagacagcagcaattattagagctttctaatatgtataccagacacataggcacttacaaggtcataaaagcactttggaggccttttgtacacagctattggtctccgggatgactgggtgagattgtttttcttttccagaatcttttttttaaagggaataccgtaccttatatataaaggcatcaa

SEQ ID NO: 780151 - DNA, 587 bp, Homo sapiens
gcctttatatataaggtacggtattccctttaaaaaaaagattctggaaaagaaaaacaatctcacccagtcatcccggagaccaatagctgtgtacaaaaggcctccaaagtgcttttatgaccttgtaagtgcctatgtgtctggtatacatattagaaagctctaataattgctgctgtctatgtaaagcatagccataaacagatgcatttagcataaatttactcagatatattgaagtattacatgattaaatayattgtttgtataagttatattaaaatgtgattttcatttataaaaagcttatttaatacacttttatttatatatttatattaaatgtttgttattaggtgggaccaattgaaatttctggtgcttggttcgctatgtttgacctataaaaacagtcattccatgatggaatatgctagatataaaaggaaataccatttacagttgatacatactcattaaaatagaatttgggttagtttttctggtgattcttcgttttgatcatgaatcccatgaaagctatggatctctccttagaaaaattcacaatgatataaaatttg

SEQ ID NO: 780152 - DNA, 471 bp, Homo sapiens
gctagtaagccttttcagaattgggttcctgttcctaaccctttatttcacaagtaagccagggtggatctattgtaaagatgatgcttttatcttaaccagggccgcaaaaatctgaattaaaagtttgtccatcctgcaagggaaccaaggtctggatgagaaacccttgctagattttgcacacttaggtgcagatgcgaaaagatttgtttttgtcttaaactttattaatcattttgtcaccaatgaaactatagcagtgattaatcacgtatgtaatctacaacagctcttctgttggacttctagtcctagtataaattatcrtgtcaagggttaatctattttatttgctttaatcctctgttttcattctttttctatttcccccaaactgcaccctgtttactcagcttttgtgcagaagggttccaattgtctgtttgacaattgcaatctgaatgatta

SEQ ID NO: 780153 - DNA, 554 bp, Homo sapiens
atgactaggtaggtgcagtaatactaatgtgctgagactacttaaaaagttcatagaaagggcctggctctgaggggttcagcatgggcctgaaaatatattctcatgtaagaatctcaaacccctcaatgcagaaatattttgcaaatgtattgttttcccactgtaaagaaaaatattcraaggctttgagatttcctacggacttataatcagtctttggagattagaaaagtaaaatagagcctagagttctatctgccaccttcgacaagaccttcatctttctaagcctcagtttccctatccttaaaatggggataataataattggctcactagtgattcctgaagattatatataacagtaactacaaaatgctcatcttggtgtatgacatgcagttgaagctcaacacgcagtcactattattatttgcaacagttgctgtagctcaagaaaaatctttacgcaagattctgggcttaacaccctggatagaaagaaaaatggaaaacatttttttccctagatttataatccaatttagcgg

SEQ ID NO: 780154 - DNA, 554 bp, Homo sapiens
atgactaggtaggtgcagtaatactaatgtgctgagactacttaaaaagttcatagaaagggcctggctctgaggggttcagcatgggcctgaaaatatattctcatgtaagaatctcaaacccctcaatgcagaaatattttgcaaatgtattgttttcccactgtaaagaaaaatattcgaaggctttgagatttcctacggacttataatcagtctttggagattagaaaagtaaaatagagcctagagttctatctgccaccttcgacaagaccttcatctytctaagcctcagtttccctatccttaaaatggggataataataattggctcactagtgattcctgaagattatatataacagtaactacaaaatgctcatcttggtgtatgacatgcagttgaagctcaacacgcagtcactattattatttgcaacagttgctgtagctcaagaaaaatctttacgcaagattctgggcttaacaccctggatagaaagaaaaatggaaaacatttttttccctagatttataatccaatttagcgg

SEQ ID NO: 780155 - DNA, 661 bp, Homo sapiens
ttctacttcaaagttatattcaaagttgaaaagttatagtaatttattaatattacatgccattgtgactattggcaaagcactttgaaataaaaataaaattgtgacacatcacaataaaacttccccaagttgtaaatggattgaaaaatctaaatgaaaagaaaaccataaaatataagcatatttaaagtgatttctgagatagggagggagacgatggcttttccaaacctgaggtgtaagttatattgataattttgaaaagcaagttatataatctcattaaaatagtatacatgtgtttaaagagttacaagacaagaagtatggaaaaaatgtcaaactcctaagggtaagatggatcgtgcatggcttgggacggacatttataaygtatgttattcctatattgcttgaatttgttacaatagtattgatgacacctgtaattagaaaaagttgataacaataacaaaggggtagaggttattccttcatcttgactacttttgttcaattgtatacagtaataaaagatttctaaatatatttttaactttcaatacaatgtttcccatgtttttgtttgtttgtttgttttttgtttagagacagagtttcgctctttttgcccaggttggagtgcagcgatgcaatc

SEQ ID NO: 780156 - DNA, 626 bp, Homo sapiens
aacatgtgacattaggagacatgtgcttattacatattataatgcatcaatttgcctatgaaacccttgagaaaatcatctgtgtcttgtctagtcttatttatttttatttttgagacagggtctcactctgcacacagtgaccggtcactgcagcgtcaacctcccaggctcaactgatcctctcgcctcagctccccaagtaactggactacaggtcatgccaccacgccttactaatttttgtattttttgtagaggttgggttttgccatgttgcccaggcaggtcttgaactcccaggctcaagctattctccagcctcggcctccaatctttacaccccgtgtctggcacggcatagctttgagcatgttagaatggattgcatatgcaattgcatccacctttttttttttttctttsagacggagtctcactctgttgccaggctggagtgcagtggcaccatcttggctcactgcaacctctgcctcccgggttcaagtaattcctctgcttcagcttcctgagtagctgggactacaggcacgcgccaccacacccagctaatttttgtactgttagtagagacggggtttcactatatgttggccaggatggtc

SEQ ID NO: 780157 - DNA, 605 bp, Homo sapiens
tccctgtgcaaactgtccgagtgccacagcaaggggaacaaggtcaccagtccctccgcaaagagctgggagaggacagacggaggaggcaggggacagggggctgtagtgggagggaggagagagaaagggagaaaggtgggggaggagcagagacctggaggaggaagggtgagaggagagacccagggacagggtgaggaggggagggggcgggggaggaggaagaggagagatgggggagagagagaaggggagagagagagagagagctagagacagagttaaaagacttagatgggggaaagagagagagacgggaaagcacatgcagagaaacagacgagacgtggacacagagataaagacacagagaaatagaaagagggaggaagacatgggaagagaaacagacgtagccacccgtgtgcgcgcatacacacacasagagagagagagagagagaaacctagaaaaatgcaggagattcagagccaggggcttgggcagagcagacccagagggacagagatggggaacagtggagagtggacggcagcagtcgggggcggagcctcggcctccctgggcttccttcttggacc

SEQ ID NO: 780158 - DNA, 614 bp, Homo sapiens
accagcctgggtcagagattttttttttttttaagacagtgtcttgctctgttgtccaggctggagtgcagtggtgtgatcatagctcactgcagccttgacctccgaggctcaagaaatcctcctatctcagcctccccagkagcttggactataggtgtgtgcctgtttttaaagttttttgtagagatggggtcttgctatgttgcacagactggtctcgaactcctggcttcaagcaatcctcctgcctcatcctcccaaagtgctgggcctataggcatgagccaccgtgcccggcaagccagtgactatctgcaaggtttctactccagccccaggaagggaaaagcatctgtgatttgtccaaacttccctggcagatgaggcttcttggggtcggggactgtgacagattctttatttgcccacccactcacgtattccctggtggatctgctaactgccaggcgctgtgctagggactgggaagcagagtggggcgttcatacccagcaaccacgtcaatgggtgcaaagccacacaggtgctgagtgtgggaggcgcccggcccttgtgtgggagggatccaacccctggtcccagtattcatg

SEQ ID NO: 780159 - DNA, 610 bp, Homo sapiens
gcgagtactacgagaagcagttccctgagatccgcaagcagcgcgagctgcaggagcgcatgcagaggtgagcggggcctgagcccagggcccccgacgtcagggcccggggtcagctccagcatcctcagtagagrtggcctggccaggaaggaacagaacagcacagcagcttctcaggccagtggccagggccctaccagaccctggcctgtgtcacgtggagcctctttggcctaatacttacttggaacttaaatacattttggggacaagcacttcttcccatgtgccatagcgtgcacctgccagcttcactcatttctggggcctgcacgacccctgaaggcagctgagtttgagatccctggtgtgggacaaaggggagagacgtggctaagagaccacgctgtcagcctcccccagtggctgtgaggactgggtgggccccatctgagaggtgcctggtgacaggcagctgtggttctatggccatttttctttggatgcacagataaggcgattcattggtaatgataacaacacctttcacccttaactgaagtcacaagccatgtctcattaagtccccacaacagctctaggcagc

SEQ ID NO: 780160 - DNA, 610 bp, Homo sapiens
gcgagtactacgagaagcagttccctgagatccgcaagcagcgcgagctgcaggagcgcatgcagaggtgagcggggcctgagcccagggcccccgacgtcagggcccggggtcagctccagcatcctcagtagagatggcctggccaggaaggaacagaacagcacagcagcttctcaggccagtggccagggccctaccagaccctggcctgtgtcacgtggagcctctttggcctaatacttacttggaacttaaatacattttggggacaagcacttcttcccrtgtgccatagcgtgcacctgccagcttcactcatttctggggcctgcacgacccctgaaggcagctgagtttgagatccctggtgtgggacaaaggggagagacgtggctaagagaccacgctgtcagcctcccccagtggctgtgaggactgggtgggccccatctgagaggtgcctggtgacaggcagctgtggttctatggccatttttctttggatgcacagataaggcgattcattggtaatgataacaacacctttcacccttaactgaagtcacaagccatgtctcattaagtccccacaacagctctaggcagc

SEQ ID NO: 780161 - DNA, 597 bp, Homo sapiens
aacccagcactgccactcctaggcacacaccaggcaaatgagagcaaatgtctatgcagaaacctgcacgtgcccaccactgcagcaccgcccagcgcacaacagccagaaggcagagacaacccgacatccaccaagagamgaatgaggagacaaagcgtgccctgtccgcacgatggaacacatggccatcaaaaggcatgaggctctgacacgggctatgacgtgggtggaccctgaagacacgatgcgcgtgaaacaagctagtcgcagaaggcctctagtgtagattccgtttctgtgaaaagtccagaacgggccaatccatcggggacagaaaggagatgagtgggtgccagggctgggaggagggaggataggggtgactagtgatgggcatagggtttctttcttagtataacactgaatatactaagaagaactgaatgatacacgttttttttgagacagggtcttgctatgtcactcaggctggagtgcagtgctgtaatctcactgcagccttgaccccctgggctcacgcaatcctcccacctcagcctccggaattgctgaagctaaaggcacacatcaccg

SEQ ID NO: 780162 - DNA, 580 bp, Homo sapiens
acatgtgggaattatgggagctacaattcaagatgatatttgggtggggacacagccaaaccatatcaatctgtaaaaagggtcccagtatctaccttgtttgttgtttgtgaggattaaattgaaagcatgtaacacactgtgtggcatataataaactaatagttaataaaagttagctacctttatggtcagctttccctatgaaaagatagaatttggaaaagagcacattaaaagcaaacatttccaaggcacccacagttgagtttgtgttcactgtgcaaagaagctcagcataaaggtataatttctatagtcagagttccttcttccttcatctcttctttaggcattttttttctctatccttttgccagtttggttccrggcacaaagttgtttctggcttgatctatcagataaagcccaaggctggtcctagccacaaaataatcttctctagctgctgctggcttgtccaaaccaacgtgaaatccaaagcccttactcttctcccataatgagatgctctattatttttaaaaacaaacttggagccgggtgtggtggctcatgc

SEQ ID NO: 780163 - DNA, 584 bp, Homo sapiens
tgccaggtaccacgctaattgctttacatacattagtcacctataaccctcccatcttacacaggagctaattactagtattatccccattttacagatgaggaaactgaggtgctcagttcatttgtccaaagtcacataactagtaagatgtagggatgggatatgagcctagatgattggattttgaagactgctcttttgaccaccatagtaaatatgtaattttcagagccatttaagcctacagtgactcctgtggaataatgaaggaggcaggcacttctgtattccaggactttggggatttcagaatgggttcatatgattttcttttttatttttggtagtttaaaaattttattctatcagtatttttaataaatgtttattgctgcattcccracacccccagtgtattactgtttcattgttttgctatccttgtagtactggaatttagttggaagaataagacatttacttctaatctgatttaaaaaaaaccagatgggtagtatttgaatacagccagtgttttaaatgtaaaagaaaatgtttaatctggtatttctagagttgag

SEQ ID NO: 780164 - DNA, 645 bp, Homo sapiens
aacaatactaacctaggaaaacaatgaaagaaagtcctctctaattttacatcaaagtgatttttattcttgcagacaccagtttaaaaaaatggtctaactgtgcctctatgtttgtatgtatcaattatctgtctgcatgtacacatgcttgcatgtacatatacacaaaaatgctcatatacagtgtatatttttttcattcatttcatycagtttttaaatttacatcatcatatcaaaatgttttcagaactgctgcacagtcttcacattaatgcctaccttgtattccactggttttctatgccagcatgtactgagtcatttctctattacatagttatattctcatttgaatttcccttccctggaacaaagtatctcttagctgaaaaagtcttattctgtgaaagaaaatgctgcctcttccatgctatgtctaagatatggcagaatgtgcaaactagcagaaagcatctgtatttagccacaagcattgacttcagtcggccccatgtagatctgtattagatgggtttccctgctgcttgctgcctcaggcttccatggggagcacccagaatacagtatgtgcagaggtgttcttaatttcacactgaagatgctcactcctctgcacac

SEQ ID NO: 780165 - DNA, 645 bp, Homo sapiens
aacaatactaacctaggaaaacaatgaaagaaagtcctctctaattttacatcaaagtgatttttattcttgcagacaccagtttaaaaaaatggtctaactgtgcctctatgtttgtatgtatcaattatctgtctgcatgtacacatgcttgcatgtacatatacacaaaaatgctcatatacagtgtatatttttttcattcatttcattyagtttttaaatttacatcatcatatcaaaatgttttcagaactgctgcacagtcttcacattaatgcctaccttgtattccactggttttctatgccagcatgtactgagtcatttctctattacatagttatattctcatttgaatttcccttccctggaacaaagtatctcttagctgaaaaagtcttattctgtgaaagaaaatgctgcctcttccatgctatgtctaagatatggcagaatgtgcaaactagcagaaagcatctgtatttagccacaagcattgacttcagtcggccccatgtagatctgtattagatgggtttccctgctgcttgctgcctcaggcttccatggggagcacccagaatacagtatgtgcagaggtgttcttaatttcacactgaagatgctcactcctctgcacac

SEQ ID NO: 780166 - DNA, 645 bp, Homo sapiens
aacaatactaacctaggaaaacaatgaaagaaagtcctctctaattttacatcaaagtgatttttattcttgcagacaccagtttaaaaaaatggtctaactgtgcctctatgtttgtatgtatcaattatctgtctgcatgtacacatgcttgcatgtacatatacacaaaaatgctcatatacagtgtatatttttttcattcatttcattcagtttttaaatttacatcatcatatcaaaatgttttcagaactgctgcacagtcttcacattaatgcctaccttgtattccactggttttctatgccagcatgtactgagtcatttctctattacatagttatattctcatttgaatttcccttccctggaacaaagtatctcttagctgaaaaagtcttattctgtraaagaaaatgctgcctcttccatgctatgtctaagatatggcagaatgtgcaaactagcagaaagcatctgtatttagccacaagcattgacttcagtcggccccatgtagatctgtattagatgggtttccctgctgcttgctgcctcaggcttccatggggagcacccagaatacagtatgtgcagaggtgttcttaatttcacactgaagatgctcactcctctgcacac

SEQ ID NO: 780167 - DNA, 641 bp, Homo sapiens
ttggaaaactttttaagcataccagtactttgaagataagcaaaatatttatttttcctatcaagttatctttcagttcatatagaacttacttcagatgagcaacagatctgcagctctttagtccctctttatttccctaatttcattcactccgtcccagttcctttcagttgtttcttcccttctgaacttcctcattcacatctctatcccaggattatctctaggcccaaggcctagaagtcattacatgattccttactcttctctggaaagacacttgaattttaggagaatgcttggatttaaaagattatttttgttgtgctaatactgacaaactcattgaaaaaataaatataccaatagtcagagaaatggaaattaagcttacarctagatactgcattcaactattaaccttacaaacattgtatgaagatctaataaagatctgttataaatgtgaaaaaataacatctttttggcattctgggtagatacagtaaattttcaaaatactcataaccttttactgaaaaattataaacacagaaatctaattcgtatgcatattaccaatccacaagacctgtatatagaatgtttgcagtaatattatctactagtggccaaag

SEQ ID NO: 780168 - DNA, 641 bp, Homo sapiens
ttggaaaactttttaagcataccagtactttgaagataagcaaaatatttatttttcctatcaagttatctttcagttcatatagaacttacttcagatgagcaacagatctgcagctctttagtccctctttatttccctaatttcattcactccgtcccagttcctttcagttgtttcttcccttctgaacttcctcattcacatctctatcccaggattatctctaggcccaaggcctagaagtcattacatgattccttactcttctctggaaagacacttgaattttaggagaatgcttggatttaaaagattatttttgttgtgctaatactgacaaactcattgaaaaaataaatataccaatagtcagagaaatggaaattaagcttacagctagatactgcattcaactattaaccttacaaacattgtatgaagatctaataaagatctgttataaatgtgaaaaaataacatctttttggcattctgggtaratacagtaaattttcaaaatactcataaccttttactgaaaaattataaacacagaaatctaattcgtatgcatattaccaatccacaagacctgtatatagaatgtttgcagtaatattatctactagtggccaaag

SEQ ID NO: 780169 - DNA, 581 bp, Homo sapiens
cattactgcctgagcactgcctcctatccagtcagcagcggcattagattctcacaagagcacaaaccctattatgaactacgcacatgaaggwtccatgctgcacactccttatgcaaatcacgagtctaatgcctgatgatatgtcaccgtctaccgtcacccccagatgggatcgtctaattgcaggaaaaaaagttcagggctcccactgattctacattatggtgagaatgtagtaataatagaaataaagtggacaataaatgtaataccctcgaagcccttgaatcatcttgaaaccatcaccaccaccacccactaacccccacggaaaaattttcttccacgaaaccagtcactggtgccaaaaatattggagaccactgcctcagatggctaaatatcaccactcacttctaagaagctgctctcatttacgcagtccaactaaaatctgactttatgtttccacatttcatttagatagtaagtgtatgagtgctcacacctactgtgcctttgtgttcttgtcaatggacacttttctctgatagtaaattgttacagttctcttcttt

SEQ ID NO: 780170 - DNA, 488 bp, Homo sapiens
agtcagtgcagtgttttaatgtcagattgtaatttaagcaaatttacattttagaatgctcactctctgtttcaatcaggagaatggattgtatggagacaagactggcttgtgtaagaaggcttgcgtatatcaaaaccaagcttcaacttatcctttccttaagtcattgaatcagatttcctattttatgaaagatgcaaaatytggactctgaagttagtgcttctactgtaaaacaaattgggtggtaaaatgctgctaccaattactgttggccaactgtcctgcatcaatacaaaatgttgcttaaaagcatacccaaaaggaatctttattaaagtaaactcatttgtcctatataagtgtgaatggaactcaggcttttttaaaaagtgaatttgaaaatttcagatacttattttaaagcacaactaataactaatgtgtctttaatatttaataatctgatttttttcttattttaa

SEQ ID NO: 780171 - DNA, 604 bp, Homo sapiens
gcaaattatttagctagctgagtttagtcactagcaggtagtaatcatgagccattgtgcatagtggatgacaacggcgaaaatacctgacttgtatctttcctatgacattaggcaagcttatcaaatattctgatcctccatgttgtcacctgaaacaaagcttcattactgaaggatatgggtcaagggatgactggtcattcactgggatagtcatgatactcatttatatcccagtatcagtcacatttgacattcagctggagtgatggcagatgtagataacatcggtctttcagtgtatgcttcatggaggataatgatggtttgcagctrttatgttcaaatgggacttagaaaatagcctactaattaaatgactaaatcaaataaaactacacattttaaaatttctcctttatttaaacttagcaaattatattttttgatcttctatactgagtttctgacttactcatctcagcccaatttgtgtatatctgagctttgagtggaatgtgcccttccaaactataatacttctatagaatgtgaatatttttacacgttgcttatggaacactcaacttcttgaaattct

SEQ ID NO: 780172 - DNA, 621 bp, Homo sapiens
agagtcattgttatgctgtttataacagatttacataaccgagaatcctagtaatgagggtttggataaataattttgattaatccctataatattacgcgttataattaatgaagcataaatataacttctaacaaaaaatgttcaatgtatatacgttgttttttcctctacctagaagaacaacaaagggccattacagagaagggtcccaggagtctattgtatttaatatccttggtgttttggcagtgtaataactcacctatacaacaggaaacttgattgtgagagaaaagtggattttatttgtccagaaagcagaaaattccccaccccctgaaaaggggagaaaacacatttggaacaatataaaagaactgcaatgcctttgtaataatkacattattttagatacttggatagggctaaggagttgaaagtcctgagctggaagaaaattagatagttctgctcatttgtcaataaattcgagttatgatgaaatgtatattaataatgccttttgctgtcaaatcgtgactcgtcttttttttcttcaacagttgaagaaaatattataccccaaatcttctttaatgctaccacatagaagtaaat

SEQ ID NO: 780173 - DNA, 618 bp, Homo sapiens
gtagattcactgacagcttgcactgtgagtctggaaaagctgcagacactcaatgtcagcccgtgaaagcagctggggaggggggctgtaccctgcaaagccgcaggggcagaactacccaaggccgtgggagcctacctcttgcatcagcrtgacctggatgtgaatcatggagtcaaaggagatcattttggaactttaaaatttgactgccctgctggattttggacttgcaagggccctgtaacccctttgttgtgccgaatttctcccatttggaacatctgtatttacccaattacctgtacccccattgtatctaggaagtaactagcttgcatttgagtttacaggctcataggccgaagggacttgccttgtctcagatgagactttggacagttgacatttgggttaatgctgaaatgagttaagactatgggggactgttgggaaggcatgattggttttgaaatgtgaggacatgagatttggaggggccaggggtggaataatatggtttggctgtgtccccacccaaatctcaacttgaattatatctaccagaattcccacatgttgtgggagggacccagggggaggtaattgaatcatggg

SEQ ID NO: 780174 - DNA, 618 bp, Homo sapiens
gtagattcactgacagcttgcactgtgagtctggaaaagctgcagacactcaatgtcagcccgtgaaagcagctggggaggggggctgtaccctgcaaagccgcaggggcagaactacccaaggccgtgggagcctacctcttgcatcagcatgacctggatgtgaatcatggagtcaaaggagatcattktggaactttaaaatttgactgccctgctggattttggacttgcaagggccctgtaacccctttgttgtgccgaatttctcccatttggaacatctgtatttacccaattacctgtacccccattgtatctaggaagtaactagcttgcatttgagtttacaggctcataggccgaagggacttgccttgtctcagatgagactttggacagttgacatttgggttaatgctgaaatgagttaagactatgggggactgttgggaaggcatgattggttttgaaatgtgaggacatgagatttggaggggccaggggtggaataatatggtttggctgtgtccccacccaaatctcaacttgaattatatctaccagaattcccacatgttgtgggagggacccagggggaggtaattgaatcatggg

SEQ ID NO: 780175 - DNA, 509 bp, Homo sapiens
aaaaaaaagaaaaaaaaaaaaggaaagagctggtttctgtttagcccctagggaagaaagcctaagggggttagcgaggtggaggtgtgcagcaaggtgcgtctgacctctgacctcccatcccctcacagcctagaactcagttttcaaagttacttggggagtccccttgacgaaaacaatgtgaacccagaaaatctgagacaggtctcagttaatttagaaagtttattttttcaaggttggggaatgcgcccgtgacacagcttcatgaaatcctgatgacacatgcccagggtagttggggcacagcttggttttatacgatttagggagacatgartgagacatcaatcaatatacgtaagaagtacattggtttggtctggaaaggcaggacagcttgaaacaaaagcaggaagactcaagtggggagggagggagcttccaggtcacaggtaggtgataacaaactgtatcattcttttgagtttctggttagcctttcc

SEQ ID NO: 780176 - DNA, 603 bp, Homo sapiens
  misc_feature 517: n = A,T,C or G
tcacctagtatacatgtgctagagtttctcaaagtggacttgctgtgtcgtggaatatgcacataattaattttactagatcataaattgttttcccaaatgggtgtgccagtttatagtcctgccagcagtgttttgagatttttctactgttccrtattctcaccaacactttagtattgttaggattaaaaaattggttttgctcatctggcagatgtaaaacaatattgtagttttcttgggaatttccctgattactaatgaaggtgaggatggataatcaaattacatccacacagatcagaaatcttgcccagtgtcaagctttactaataatgtaggaatacaaggaatgaaaaggcacaaatggggcagagtgaggcccgggcatctgcccggctcccctggcccttcctgctctttctgactcaggaggaaacccgaggcaggcgtgagcaatccatgcacacagcaggaaacaccgaggttgtgaatcacctgcattttacactcnaagttgcacagctgggtgacatttccggaaagcatgcctcataatgcattgattctagactttttaccaaatgcagttctaaagtc

SEQ ID NO: 780177 - DNA, 603 bp, Homo sapiens
  misc_feature 517: n = A,T,C or G
tcacctagtatacatgtgctagagtttctcaaagtggacttgctgtgtcgtggaatatgcacataattaattttactagatcataaattgttttcccaaatgggtgtgccagtttatagtcctgccagcagtgttttgagatttttctactgttccatattctcaccaacactttagtattgttaggattaaaaaattggttttgctcatctggcagatgtaaaacaatattgtagttttcttgggaatttccctgattactaatgaagktgaggatggataatcaaattacatccacacagatcagaaatcttgcccagtgtcaagctttactaataatgtaggaatacaaggaatgaaaaggcacaaatggggcagagtgaggcccgggcatctgcccggctcccctggcccttcctgctctttctgactcaggaggaaacccgaggcaggcgtgagcaatccatgcacacagcaggaaacaccgaggttgtgaatcacctgcattttacactcnaagttgcacagctgggtgacatttccggaaagcatgcctcataatgcattgattctagactttttaccaaatgcagttctaaagtc

SEQ ID NO: 780178 - DNA, 573 bp, Homo sapiens
ggatgggaaggtatccctgggttttaccactgtaagcaatgaaagcagtgtagagaagaacagcccagcaatcagaaaagtaatgaaagttctaagaaagaactgagtagatcaggagaaatttttaattttctactatacttaaaattaacttacaaccctgaaaacaggaaaacgacaacttcaaataaccataaccattctcctataacctttttgacagatctgagaatcataggytaaacactaaaacccagagagccagaacccaaaattcatcttgccagaaaaacatgaagattaatggtaatcaaaggcaggatgagtgatcacaccaggaccaaggtcagggctagctaccccaaaccaaacagccccttaatgccagcccaatcacaaaaacatattcatgagtttagaacttaaaaactgtctagacagtataaccaaaaatacagattcagtcactgaaagaaaaaatagagtacatcttattcccattaccatctaaacacactaatgccaagtaaaaatgtacacagtaatggaattccagtagtgggttggacaatt

SEQ ID NO: 780179 - DNA, 611 bp, Homo sapiens
aaagagtatgaaagtcaaatttcagtgtccataaataaagttttattggaacacgtcaagctcattcatttatgtattgtctagggctgcttttgcactagaacagcagagttgagtagttgcgacagagaccatatggctggcaaagcctaaaatatttattacctggccctttacagagtaagtttgccaacccctgatataaagcattatgacaagcgagtgagatgaaaactagttttatggtcgtctaaatagcaagtgcatggcaaaaataaattctggaccaattcaagttacacaaactgctcgtttttataatcagagaaggagctgcagtatatggcaataagaatttagtttcagaatcaaatcaatgwcagcagtgacctttgaaagttatttaattggctccattagcctccatttcatcatttataaaataaatacataagaatatatataagttgttatgatccagtttgtcaatctgttgctgaaataaaaataaaataaagagttgttatgaaacctaaacaaaataaaagcacttagcacagagcccagcacaaggacacaataaatatagccaacattgttgttacaagaaa

SEQ ID NO: 780180 - DNA, 551 bp, Homo sapiens
aaacaaacaaagcatcctatttcttgaacttccttgaaaataaatttaggaaatatgttcctctcagtaataatggcctgaatatattgagcactaaacatatgcactaaacagactctgtgctacatgcttttacctacattacataatttaacccttaagacaatcctatgaagtagatatagtcaatctctttccacaaaggaggacattagtgcttagaaaaggtgatgaaccaaatctaggtcaacagctaataaggatggagtcaagatttgaacctagaactttctaccataaatagtcttctctgagctatttgactagcctgcttccaagatatccaagcatgttcctctcatcctgggcctgyacctgtagaattcagaagctgagcaaagaaagagttttcaactctccagtaagtttcctttgggaaaacaggagaaaactcaacaccgtggaataactttctgcctccattcttcccagcccacctccagcttcaacccattccccatactgccaacctgatgttctttctaaaatgc

SEQ ID NO: 780181 - DNA, 579 bp, Homo sapiens; identical to SEQ ID NO: 746369

SEQ ID NO: 780182 - DNA, 608 bp, Homo sapiens
tggttaaatacgagaaggcaatctttcactgtgtcccagtgatggaaaagctattgtgatgacatcattgtgaatatgaggcatcccatgccaaagggattgataggattaggctgtggggttgctgaactcgagcaaatactaagtgcgtatacacatgcgaatcctataatgtaatccagttcctactgtgttgtgaatgtcttcacctgtatgaaggtatgaggaatacttcccttttaataagcatcttggccactaaagaagtctgagtgcacttatccagttagaaataatctctcccatgcctgtatttgcagagcaacttttggttcctttattatagctctcatcagtttgcttcatatttgttagttgtatatttctcgtagattgcatactttaaaaagctacttctggctrggcatggtggttcacacctgtaatgccagcactttgggaggctgaggagagtggactgcctgaggtcacgagtttgagaccagcctgaccaacatggtgaaaccctgtctctcccaaaaatacaaaaattagccaggcatggtgacaggtgcctgtaatcccaactacttggggagctgaaacag

SEQ ID NO: 780183 - DNA, 523 bp, Homo sapiens
tgaaaaatccaacctttgaaggctacatctgaataattctatttgtatgactttttggaaaagaataaagagatggcaaacagatcagtggttgccagaagttaagggagagaggtggcagaaggttgaataggtgaagcacagaaaatattttagggtggtgacattattctgtatggtacygtagtggtgaatacgcaacactatacattcgtcaaaacccattgcactttatagcataaagagtatgccttaatgtctgcaaattaaaaactaaccaattagaggttggaagatctcagaatggaatgtagactgtgacaaaaaaaatgtaagcatataaacaatgtgttatttcactgaaggaagatggaagaaatttgctgacttaggtaactggaaatgagtggagattgtatgactgaagacaaaaggaactgcatataagcactgtgctttatttgattagtttccaatagaagtacatgttatcagttctgaaatcactatacatgtatagagt

SEQ ID NO: 780184 - DNA, 639 bp, Homo sapiens
agatgaaagaaatactgtacatggaaaggccctgcaaaccataactcactcataaacatgttaccttttaacaaaacagatagattagcgaattgactcttcctccatagtcatcaacaagtgtctcgtcaatttggatattaaaaagcaaaccctattaaagatgctgtgaaattaactcagttatgtctgttattatgtatctaaggcctttagtaaagacagcacaattaatttattcagaacttttaattttctgagtgatggrgaaagggaagtaaaggtggtaactttcattaagtcttaactaggttcaaggtgacacatcccctgaggattccctgcccgcaggaggcatgtgggagggacagatggaggcacacaggcacttggtgacagcgtaaggggactgagacctgacgaataaacaggagttagacaggcagaagaaatagcaggtccaaggtccttccagacttgggagagcatgggctgcccatccttggagaagcaagtgattcattgtgagagaagtgtgatctgaaacctgtcaggggactttaaaacccatccagcgtcttagagtgtccaggaatggcaaaggtgaaatggtgtgggctggatcccgggggtcttata

SEQ ID NO: 780185 - DNA, 639 bp, Homo sapiens
agatgaaagaaatactgtacatggaaaggccctgcaaaccataactcactcataaacatgttaccttttaacaaaacagatagattagcgaattgactcttcctccatagtcatcaacaagtgtctcgtcaatttggatattaaaaagcaaaccctattaaagatgctgtgaaattaactcagttatgtctgttattatgtatctaaggcctttagtaaagacagcacaattaatttattcagaacttttaattttctgagtgatggagaaagggaagtaaaggtggtaactttcattaagtcttaactaggttcaaggtgacacatcccctgaggattccctgcccgcargaggcatgtgggagggacagatggaggcacacaggcacttggtgacagcgtaaggggactgagacctgacgaataaacaggagttagacaggcagaagaaatagcaggtccaaggtccttccagacttgggagagcatgggctgcccatccttggagaagcaagtgattcattgtgagagaagtgtgatctgaaacctgtcaggggactttaaaacccatccagcgtcttagagtgtccaggaatggcaaaggtgaaatggtgtgggctggatcccgggggtcttata

SEQ ID NO: 780186 - DNA, 670 bp, Homo sapiens
aattacacaggaaacattttaaaataaggagccatcttctaatggtagattttcatatattatggtttgataatctgcatcataaattcattgtaaagaaaaagcagaattagaaacatgcttttgtaagagcctgcacaatgatggatgatacggaaggtattaaacttagactatgattctgtcatcagcgccttctttaacagaacttggctattttatagaaggccattcagaagaaaaaaaaggagcaaacatttcttcatcgggaatctgtttcccaatggtctcagggttctgtttactgggctttctgtgtgtaatctcaactactgcattccctgaggagtgggagcggcagaggtggttctgcacaaatgcaagcttycgaggcagacccagctgcggttgctagaagaaacagctgtatggactctccgggaaagcctgtgtattttaattcagctttttttttccttcctagcaaataaaaagaaaatggatcttgattttccaaaaacaaaatttaaaaacccactctagtaaaaatactcctggaaacttcaggctaaagaacttataagacttgtaattctttactgaacatcaggcttcaggctaaggaacttataagacttataattctttactgaatatcaggtgcaaatta

SEQ ID NO: 780187 - DNA, 627 bp, Homo sapiens
ggctaaatccaaagaaacaaaatatctcagtaacttttatgtggattatatgttgatataatattttgggtagattaaaaatatactattaaaatttctttttatctttaataaatttagaaaatgtatgattatttatgtggctcacattatatttccattggaaagcactggtctatacaggaacttgatgattccttttagctttgatggagcaaatactgagcagtcagttcccttggtgatttttcatggtccctgctctagaccctttgactttctagagagaaaaggatttcccaacccagggatatccacctctgaaaaacagtgggggaagagagaggaggcaggggcagacagcagtagraagagagagactgagagacatagagaagggaatcttggaaggcccattggccagagggctccccagacccacaaacccaaaatgcagaaaaccaaaagaccttgaaagcatcgctaactcatttggggttataatcctccacaaacaacagcttctatcccatatgtctatacctgggaatactaggtaaagaacaagaatattagtcacccttgttattccagggagggatgtggtgccactgcctcccagccact

SEQ ID NO: 780188 - DNA, 604 bp, Homo sapiens
tactaaacaggtcaatttattcctctgtcaatggaggatggttcatgagtcaccctgggacatgaacaccatcagaagctgtccccattctccaggtcccatctggctgccagcttctgtccatttaaaatgcagatcacacagcatatcacatatctgcttcaaacctttcaatggctccctacttccctccrtgtttacctctctggacacatctcaccccattactccttcacttcccaggctccagccagaattactttatctcagcttctttaacgcaatcgttccctccaaccaggctttcacattgttccctctgccttcaactcttctccttccctattcagttgttcactcactcactcattcattctacatttattaagcacctgtgcaggccctgaatccctgcgtctactgatccagactcagaagctctattcacaaggttccactttggcttctactcagtataagccaaaaggatgcttcctcaagggaagactttcctgacctctgaccctaagtagtaacctccaacacacacacacatatgcatgcaccacaaacacacacacccacagcagcttacacttccact

SEQ ID NO: 780189 - DNA, 400 bp, Homo sapiens
atccctcatgaatggcttggtgctctccccacagaaatgagtgagttctcactctattagttcatataagagctagttgtttaaaagagtctggtgcctctctcccctctttcttgctctctctcacaccrtgtgacatgtttgctccccctttgcctttcaccatatgtaaaagattcctgaggcctcaccagaagccaagaagatgttgctgccatacttgtacagcttgcagaactgtgagcccaatggacttcttttctttataaattatccagcctcaggtatttctaaatagcaatgcaaaatggaccaatacagaaagttggtactgaggaatggggcattgctacaaagataccagaaaatgtgtaagcagctttgaactgagtaatgagaa

SEQ ID NO: 780190 - DNA, 645 bp, Homo sapiens
gtctagattgtcagttattcccttgaagcacatagacgatattatattttgccgggtatagtggctcatgcctgtaatcctagcactttgggaggccaaggcgggcagatcacttgaggtcaggagtttgagaccagcctggccaacatgatgcaaccccatttctactaaaaatatgaaaattcgcttggcatggtagcgcctgcctgtaatccaagctacttgggaggctgaggcaggagaatcacttgaacccaggaagcagtggttgcagtaagccgagattgcgccattgcactccagcacgggtgacagagcaagactctgtctaaaaaaaaaaaaaccaaagatattatatttatattctggggttcattgttgcagagaattcaactrcttttctagcttattagggtgtttcttggaaagtaatctgtatttttaattttaagatttttctctatgtctttggcgttttataatttcacttcattgtgttgacgtgtggatttatattttattcatcctatttaggatttgctgagcttcctgaatctgtaagttgaaatctttcatcagttctggaaaattctctgctattatctcttcaaatataatctcctttccattctccatattcttttc

SEQ ID NO: 780191 - DNA, 631 bp, Homo sapiens
acagataatggtgtgagtagcctgcagatagcagtaccttagggtccgccacaggggctcagggttgtggtccaggggaataaccagaaggggtctctaatacaacctgtgcaggtcctggaggcctcgaatggctgcatctcacataccctgtccctttgtttccaccagtccttgtgcttccactgttctgaggtataatcagagaacttggtttccaaccccttggatctacttagatgcctggcccatctcccggacctactcttctgtcagaggcaggagcctctttggacaggctcaycagaaacagaacatcttctgcagtggacacagacacaactatttgatagagaggctgggagacccccggccatctggccagctctaatggctcacggagaatcgaggagtgggggcgccacatgagggactgttcgcctcatggaacacaggagatttccagtagattttgttatttgaggagtgggcatagggtagaggtaggggtgtctttcagaggattcctggggtcagccttctaggaagaaggagtccatttggcctctttttttcaggctttttatctcctccacacccccaaacagtagaaagcctgcaaggggtttac

SEQ ID NO: 780192 - DNA, 513 bp, Homo sapiens
aaactaccccaaggcatatattataatcatcaaactctcaaagtccaaggacaaagagagaatcctaaaagcagcaacaaaaaagaagcaaatgacatttgaaggaaccccaattcatctggcaacagacttctcagtggaaaccatataggccaggagggaatggaacagcattttcaatgtactgaaagaaaaaaaataactgttatccaagactactgtatcaagcagttatccttcaaatatgaagggtaaataaattttctcccagacaaacaaaagcagagagaattcaccaccatcacaggcatcttacaagaaatgctaaaggcagtttttcaatgtgaaagaaaaaaaaaacactgcgggtacaaagcctgttggtaccattacgtacacrgacaaacccacaacactctaatactgtaattgctgtgtataatccacttataacactagtatgaagcccaaaagacaaagctattaaaagcaataatagctagaacaatctct

SEQ ID NO: 780193 - DNA, 549 bp, Homo sapiens
acaattatatttttcagcttcccttgtaattagattgggttcaggtcaatgcaggtagagtgatgtatgcagtttgcaggcttggtatagttccctctgagcaatccttcttttctctcttttcctcccatggcaactgccatggtatcttcttcaaggagaacacttggacccacattgggctttggtataaatgaaacacaagtattatgttaagctgctgatattttgggttgtttgttatggtagcttgctttacttatcatgactaatacaagtgattatgctatgacagatattagacatgcatgaactcattaaatgcttagaacaatcctatgagataggcctactastagcacccctgttctacaaatgaggatgcaaagatgtggaataacttgtccaaagactcgcagctaggaaatgacagggtcaggcatcaaattcttgtagtctggctcccaaatccccatgtttggccttcctgctgcattcattactgggaactgactactgcaggatcctgtggatgaggcagatcatagc

SEQ ID NO: 780194 - DNA, 581 bp, Homo sapiens
gtaggaggtaggctctggtgggaagtgtttgggtcatgggggtggatccttcatgaatggattagcaccatccccttagctatgagtgagttcacacaagatctgattgcttaaaagtgtgtggcacctcccaccctctcttgctcctgctcctgccgtgtgatgtgcaagctccctctttatcttctgccaagagtagaagctccctgaggcctccccagaagctgagcagatgtcagcgccatgcttcttgtacagcctgcagaacagtgagcaaattagacctgttttcttcataaatgacccagtcttgggtatttctttataccaatgcaagaatggctaacacagtctccttcttggtcagtwatcagagacaaaagggcctcccttctctgttagtgagaggattaaaataaattacagtgcttgtcaaaggccctcagacagtgtctgcagaatctggagtcctactgcaggggagtctactcctgtcggttggttgtggctctagtttgaggatcatgattccttctggattttgatccaaccccaaccctgacctgccaatttcctaccca

SEQ ID NO: 780195 - DNA, 636 bp, Homo sapiens
tgtaaatttttacgtgcttttcaaattgtcctccagaaaggctagccaatttgtacccttgccaacaatcaatgagagtgcccattgcatcagcccctcaccaacatgagtattgtcagggtttttcacatttatcaatctggcaattgacaaatgataccttaatttactttttgggggagttggcaataaagtgcagaatcttttcttgtaataattcacctctttccttccttccttctttcctgcttgtctttttgtatcctttgctcattttctactgtgtgtattgggkgagtgagtttcacttttattgggtgggtgcaaaagtaattgcggtttttgctattagtttcaatggtaaaaaccgtgactacttctgcaccaacctagtatttttataatttgcagttctttgtattaaccttttgttgttcccatatgtggcaaatagtttccttagctttattttcaatcttttttatgattttacatttgctttatgaaagtgtttgagttttacgtggtcatgtctatcaatctttctggttctgcttcccaagttttctaatatccagtacttagaaagctcatccccattccgagaacatacaaatgttgacttatattgtcttt

SEQ ID NO: 780196 - DNA, 638 bp, Homo sapiens
tccttccatgaatcacagatgttcttaatgacactagaatggtgactcctttccagaaggtttccaatttactttgcctggatccatcagaggaatcactacctatggcaggtagagccttatgaaatgtatttcttagataatatgacttgaagttgaaattactccttgatttacgggctgcagaatggatatggtgttagcaggcatgaaaaaaaagtcccagatagcatcttcttccaatggaaggctgtctcattaacattgagaatttgttgtttagtayagccaccttcatcaatgatcttagctagatcttctggaaaacttgctgcagcttctatgtcgggacttgctgcttcatcttgtattttgatgttatggagatggctgttttctttaaacctcatgaaccaaccttttctagcttcaaacttttttctgcagcttcttcatctctctaagcctccataaaattgaaaagaattagggtctttctctggttaggctttcgctaaggggatgttgtagataatttgatctacccagaccactaagacattctctatgttagcagtatggctgttttgtgttatcattagtgtgttcactggagtagcacgtttactttccatgaa

SEQ ID NO: 780197 - DNA, 469 bp, Homo sapiens
cacagaagaaaacagtcaaagttaaaacatgctattattagctattacttctatttttagcaagtcataccctctgagttttaaaaaaatatttttgttcctgttctaaaacacttgatcttaacctactttaataagaaaactacttcaactacttcacggatattatcgtttgttttggggttaatgtctttaatagaattgttggaaaatcgtctacaaattaagagggaactgaatttttggtactgacattccttcacgggatcctaaataatccagaacattttggtgcttttgtttctagcatacaagttgaattayaattttgacatatgattattcttaagcatttgatcatttaaagcaatttaaataaatatcaaaatgtaccaaaaatataatcaaatatttttaaaaacaaacgtttacctaccgggtttttatcaggatgtaacttcaatgccaa

SEQ ID NO: 780198 - DNA, 592 bp, Homo sapiens
tcttcagaagcccatcagatctctgagaactcactatcacagaacagcatgggggaaaccacccccatgatccaatcacccccatcaggtccctccctcaacacatggggactacagttcgagatgagatttgagtggggacacagagccaaaccatattactacctatgttggaatccaaattctaccgcttactaacagtgtgacattggcaagtggctaaacctctctttgtgtcagcttcttcatcagtaaaattgacttaataacagcatttacctcatagggctgttgtgacaattaaatgtattattataactaaagtgcttaaaatagtatctgagaattataaagcagatgtaagttttggttattttgatgatcattatttcatactggtcaaaaaaaacaggaaccacagrttatgttcctatgtcatctatttacatttgagtatctttaggcaagtcactcatcagtcttcctgagcctcagtttcctcctctatgaattgaaggaatagacttcatgatctcaaagattgtacctggttctaaaattccaaatcttttgaggaattctttttcttaaa

SEQ ID NO: 780199 - DNA, 660 bp, Homo sapiens
caaaggtcaaacctctgtttgggcaagattaattctttgtcacacaccacaaaacttttaaattccagtcatatttcctttggaggaagtctggcataaggcatcactccctggacctgaggtcagctgttgaatcaaagacttccactgaggtttaatggatctcaacctggctgcacattaggcttacacagggataattaatgttgctgatgttttagcccatacccgctgtccccagagattctgatttaattagtctggggcaggtccaggattggtatgttttaaaagatctgcagataattctaattcatggtcaagatwgagaaccacttcatgaagtagctgggaaaactgcctagcaaagatgctctctggagtgtgatgtcctctcctggggagtctgactaagacaaataattggctccagcagtgggtgtagataaagatgtagtctcaggagaagaagcataaacagagaagctgaatcaagaaaatgattttctattggagttgctgaggtatgcagacaggcatgtcatgagactttactcaactattgctaggttgattttctggacatattatatccttacagtgggtatcttccatctgaagtaacctgtccttgtggtgtgccacatgaatgagtttacc

SEQ ID NO: 780200 - DNA, 614 bp, Homo sapiens
tgcattcacccaggaaacctggttttcaagacatcaatctaatgaaataattagatatagatttagggataaagatgttcatgtaggcattgtttatgataatgaggaactaggaaactatccagatgtttaacaatagggcaacggctaagtaagttgtattcttcaatatgaygcaatgttaaacacttacaaaactgggttttaaggagtatttaatgttgtgggaaaagctttaggataatttttttttctttttgagacagggtcttgttctgtcccccaggctggagtgcagtggcatgatctctgctcactgcaacctccacctcccaggctcaagtgatcctcccacctcagcctcccgaatagctgggactacaagcatgtgccaccacacccggctaatttttgtatcttatttgtagagacagggttttgccatgttgcccaggctggtctcaaactcctgaaagaaagagatgggctaaatagacttgtaacatgttaaaaaaaaaaaaactgtattagtaattttataacttcccacaaagaaaagtctaggcccagatagcttcactggtatattctggcaaacattaatgaagaaacaa

SEQ ID NO: 780201 - DNA, 614 bp, Homo sapiens
tgcattcacccaggaaacctggttttcaagacatcaatctaatgaaataattagatatagatttagggataaagatgttcatgtaggcattgtttatgataatgaggaactaggaaactatccagatgtttaacaatagggcaacggctaagtaagttgtattcttcaatatgacgcaatgttaaacacttacaaaactgggttttaaggagtatttaatgttgtgggaaaagctttaggataatttttttttctttttgagacagggtcttgttctgtcccccaggctggagtgcagtggcatgatctctgctcactgcaacctccacctcccaggctcaagygatcctcccacctcagcctcccgaatagctgggactacaagcatgtgccaccacacccggctaatttttgtatcttatttgtagagacagggttttgccatgttgcccaggctggtctcaaactcctgaaagaaagagatgggctaaatagacttgtaacatgttaaaaaaaaaaaaactgtattagtaattttataacttcccacaaagaaaagtctaggcccagatagcttcactggtatattctggcaaacattaatgaagaaacaa

SEQ ID NO: 780202 - DNA, 614 bp, Homo sapiens
tgcattcacccaggaaacctggttttcaagacatcaatctaatgaaataattagatatagatttagggataaagatgttcatgtaggcattgtttatgataatgaggaactaggaaactatccagatgtttaacaatagggcaacggctaagtaagttgtattcttcaatatgacgcaatgttaaacacttacaaaactgggttttaaggagtatttaatgttgtgggaaaagctttaggataatttttttttctttttgagacagggtcttgttctgtcccccaggctggagtgcagtggcatgatctctgctcactgcaacctccacctcccaggctcaagtgatcctcccacctcagcctcccgaatagctgggactacaagcatgtgccaccacacccggctaatttttgtatcttatttgtagagacagggttttgccatgttgcccaggctggtctcaaastcctgaaagaaagagatgggctaaatagacttgtaacatgttaaaaaaaaaaaaactgtattagtaattttataacttcccacaaagaaaagtctaggcccagatagcttcactggtatattctggcaaacattaatgaagaaacaa

SEQ ID NO: 780203 - DNA, 297 bp, Homo sapiens
aacatagaagcatcatacttgtccaccaaacactataaaacatccctgagagaaactaaaggtttaaataagtgaggatatattccatgttcatggattggaagactcaatatggttatgatggcagttctcctcaaagtgatctgtagatacattgygatcattataaaaatctcagcaagcatttttgcagaaattgacaagctaattctataatgtatatgaaaatgcaaaaaacccagaagagccaaaacaattttgaaaaagaagaaaagagtaggagaattcacacttcct

SEQ ID NO: 780204 - DNA, 640 bp, Homo sapiens
aaatgttaaggactttcaaaaattctaaaatactgagtgaatttaaacataggtaatgatattgacagaaccttctgagctcctactttgtgccaggcagggactgtgtcccagtggcaggaaggcgtgcggttgcctccaggcccaaacaggagccctggctggtgagaggtgacagcgtgctggcagtcctcacagccctccctcgctctcggcgcctcctctgcgtgggctcccactttggcggcacttgaggagcccttcagcccaccgctgcgctgtgggagcccctttctgggctggccaaggccggagcccactccctcagcttgcagggaggggtggagggagaggcgcgacgggaaccggggctgcgtgcggcgcttgcggccagctggagttccaggtgggcatgggcttggcgggccccacactcagagcagccgaccagccccgctgscccggggcaatgaggaacttagcacctgggccagcggctgtggagggtgtactgggtcccccagcagtgccagcccaccgggctgcactcgatttctcaccgggccttagctgccttcccgcgggccagggctcgggacctgcagcccgccatgcctgagcctcccaccccctccgtggg

SEQ ID NO: 780205 - DNA, 629 bp, Homo sapiens
aggacacgtgaaatggatcctctgggtgcagactggcgagggctggtgaggggctttcctgaatcaggctgccattgagtcatcctcctccccaccatgctttggccagccccaagtggtcctagagccacagggctcgcttaccagggaagttcagctgaggttaaggctctgagagctaagactgaagctgggaccctgggtggccaccmacagccaagaccctatgtgtccaggagcctagaggcagagaagcaggcctgcggctgggatgggagaatcaaggggtgagggggagatggagggctgacgtttggggcagactgccaccagatatcaccctgcggagtgctcactgtccaggccaaggggacagacaactcagcatgctgagatctggctgaccccccaggaaggcagccccgcaaggagctgcaagggatgggcagcctctgagagagtcagggaggcaggcagccaagggagtccgtgctggagtcccagaggctggaggatgagattggcctatttgttaagattccagctaaagcccttctcttccccagggtggggacctgctgcttcctcacctccccaccaggccctccctggttgctcactatacctgt

SEQ ID NO: 780206 - DNA, 612 bp, Homo sapiens
  misc_feature 42: n = A,T,C or G
agaatttaaacaattcactgacatattggtgctggaagcctnctgtgcttccctaacaccaatagcagggtctccattgcctgctgggtaataagttacctgactttaaaatcttatcttattcctttctcagaacactcctggtaacaagttcacatataggattctctagaaacagttctgaagtggrgcttggtgtttagggtatttattgagttcggcccggtggaaaggagggagatgaagcaggattaagcagaggaaaagtcaaactgccactcaagcccaataaaaccttattcaaccccatggagagctttggaattacatgcagccagtcaaagctatcttacctttggccagaatggttaggcatttacactagcacttcaataagccgttggatgtggagccactcccctcctgaccactggaaggggcagacgcttgggtaaggctctctgtagctgaggcaaaccctaaaagagctgatagttggagcaagaaatccttccttacagggatatctggatagcacatttctgtgtccactataattgttctacaggatgttaacagaagtgctggaaaacagtgcaatactctcaaacc

SEQ ID NO: 780207 - DNA, 622 bp, Homo sapiens
ggataaggaaagaatttctaattgcaaattttctaaagcaactgctctaagaaaagggaggtcaggggacctattgtcataaataaacctatttaaactctagtcaaactgtgggtatcagtagggttatattggacactgaaaatagaaagaggtagaacttcctaattatttcaaggccaatatgacattgatactaaaacatayaagaacagcactaaaaaggaattttataggccaatatcactaatgaatattaatgcaaaattactcaataaaatataagctactgaatctagaaattaatttgaaaatcaacatgtgtcatctctatgttggatttatcttgggaatacagagttggctttagttataaaactctgttaatgcaattcatcacataaacagattaaaggagaaaatccacattatcatctcaatagttgctttaaaagcattaaatagaattcaacaccaatacatataaataaacaaaaagaaaaaaacttaggaaattacggaaatagaggaatttttttctcataaagagtatccataaatccacagtaaagtcataataatgtcaaacattagacacacttcttttagtattgagaatggg

SEQ ID NO: 780208 - DNA, 635 bp, Homo sapiens
ctaagtttggcccctcacttggcacaaatcttgatccgccacctggcttgctgcaggtcagcagctgccctctccacagtgaggagcacttgccgagggacagacgtgagggacggacgtgagggtcgtctccaggctaaggcggggcttccttagccggaggcttcctggctcaggagtcccrcacaagcgccagctgagacagggactcacagcccgttctctggcacacacagccccagcacatgtggcccgacgtggctggcccctggggttgcatgggcgggtgccctcactgacctgcacggggtagggagaccccagggcattgcgtggttctctgagccacattccaggtgacttctctgcgccacccttcggcatctttcgccagggagccctgaggagcttggcaccttacgatccacagaggtgggaaccctgacaggagagcactccccagccggtgtcaggggagcatctgtgctgtcgaagggaggcccaggtcttcaagaccttttcccactaatggtcggtgaggactcagcagtacccaccccatttccctttctgactcggctgctgggaagctcagagctctggttccggatccatcagccctgccttctggaggc

SEQ ID NO: 780209 - DNA, 593 bp, Homo sapiens
  misc_feature 325: n = A,T,C or G
cgtgctcagtgtgtgcgtgtccccgaatgtgcacgtgtccacgtgtgtgctgaggacactgacgactgtcacattttaaaaaccacagaacaactttctaatggggggaaagaattttttgaaccaggggaggtggcgcagcaccagaaggtggtcgctcactcgctgtccacaactccccgcgtggacacagctgtggggaagggcatcaccttgctggcagcaggcacagagacggaccgtgactccgccgcgaagtcctgaggcagcagagggcagacgcgcggcgcagctcagcacgggccacgaggggccgctgcgggcntccggccggctgttcctgccgtctcacggtaagcccgagtgacrccgcacacaaaatccttggtcactccggatcgaactcgctgctcaaagcaagtgccacacgggagggacgggtgtcctgtcagcacctaggacagggtcagggctctgcgccactgtctcccctgcagcccaagggcctgctctttgaggctgtgacacccagacctggtggatttgatttttatgaattttgatgaaattacacaaaacttatttctaaaatc

SEQ ID NO: 780210 - DNA, 593 bp, Homo sapiens
  misc_feature 325: n = A,T,C or G
cgtgctcagtgtgtgcgtgtccccgaatgtgcacgtgtccacgtgtgtgctgaggacactgacgactgtcacattttaaaaaccacagaacaactttctaatggggggaaagaattttttgaaccaggggaggtggcgcagcaccagaaggtggtcgctcactcgctgtccacaactccccgcgtggacacagctgtggggaagggcatcaccttgctggcagcaggcacagagacggaccgtgactccgccgcgaagtcctgaggcagcagagggcagacgcgcggcgcagctcagcacgggccacgaggggccgctgcgggcntccggccggctgttcctgccgtctcacggtaagcccgagtgacgccgcacrcaaaatccttggtcactccggatcgaactcgctgctcaaagcaagtgccacacgggagggacgggtgtcctgtcagcacctaggacagggtcagggctctgcgccactgtctcccctgcagcccaagggcctgctctttgaggctgtgacacccagacctggtggatttgatttttatgaattttgatgaaattacacaaaacttatttctaaaatc

SEQ ID NO: 780211 - DNA, 640 bp, Homo sapiens
taatttgagcaacaaaataaatgatggaattttggattataactcaacatataataaatatatatgagtccatactgatagaaaaattaatacatgaataaataaataagggagaatagaaaaaaaaaactttcctgtacagaaggatatcaaataacttatgtggattctttaccctgaaaaagactgagcacagccctccaacccttaactgtcagctgtgaatagtgacttttttccaaagggtacggtatggaaggcaggcaaagaaaataacttcacaatgcataaacctgacaaacactacctcagccaggagatcaagattcgcatcaacagtaataagtcatgttgacagtgtgtgcccttgatatgatgtgaagaagatattatttcrcctctgtagtctccctccacacaatatttaactccattctactagtaatcagacaataacaaattgatagatagtctacaaaatacctgatcaattctccttcaaactttttaggtcatcaaaaacaaagaaagtctgtaccagccaatttatctacagaaaaaaaaaaaaaaagtctgagaaacagtcacatccaagagtagcttaagacatgacaagtatactgtggtttaacagacggga

SEQ ID NO: 780212 - DNA, 555 bp, Homo sapiens
aaggaaagtaatgttgagatcttttaaattaagttcttagataaatgtatatatacttctaggagactcaagagaacaaagaaaagaatcaaggggaaaggattgattgaaaagctttagaaacttgcatgtgatatttaaagtgagtgaccggatctcattcacaaatgtaatacttaaaacatgctcagtttcccaaaaccacaacgagataccacttcatacccactaagatgtctgtaattaaaaaaaaaaaaaaaggaaaataacaagtgctagcaaggatgtggagaaattgaaaccctcatacactgctagtrggaatgtaaaatgttgcagctactgtggaaaacagtttgacagttcctcaaaatgttaaacctatagttaccatatgatcaagaaatgatattcctaaatctatttctaagagaagtgaaaacataggtttgtataaaaacttgtatataaatcttcacagaagcattattcataatagccaaacatggaactaacccaaatacccatctattgatgaacagataaagaaaatgc

SEQ ID NO: 780213 - DNA, 643 bp, Homo sapiens
gttttaaatttctctgtaagatatgaatagcaactttgcattaaaaatatgacagcagacatcttagttataagagacacacctaaaataagacataaaactggtaaaaatcagagaagaagcaaatatttgtcagtaaaactcaaacaaaaaaacccaaagtagaattcaggacaaaaagtactaaatgataaaaattccatttctattgatgggaagatgcaattgacatctaattgaaacattacacatcaaataacaagacttaaaaatacataaagcagaaattcttagaaagtcaatgcgaagttgattaaaaaccagcattgtgagaaatattaactcatcggtcaactttagctagaccaaggagacacaaagtaaataataacttaaagaattaaaaccataatttyagatgtttaatttatatattaggctcccttataaacatagaagatactttgatcttacgtatctgtagatcatttaaaagctgaccataaaacaagccttaataaattctcccaaaaaagaattcaaaaacacagtctcttccataatcggttacaattaaaaattaataatagagaacaaatttgtaaaaaccctccactaaatttaaaacatctccaaaataact

SEQ ID NO: 780214 - DNA, 643 bp, Homo sapiens
gttttaaatttctctgtaagatatgaatagcaactttgcattaaaaatatgacagcagacatcttagttataagagacacacctaaaataagacataaaactggtaaaaatcagagaagaagcaaatatttgtcagtaaaactcaaacaaaaaaacccaaagtagaattcaggacaaaaagtactaaatgataaaaattccatttctattgatgggaagatgcaattgacatctaattgaaacattacacatcaaataacaagacttaaaaatacataaagcagaaattcttagaaagtcaatgcgaagttgattaaaaaccagcattgtgagaaatattaactcatcggtcaactttagctagaccaaggagacacaaagtaaataataacttaaagaattaaaaccataatttcaratgtttaatttatatattaggctcccttataaacatagaagatactttgatcttacgtatctgtagatcatttaaaagctgaccataaaacaagccttaataaattctcccaaaaaagaattcaaaaacacagtctcttccataatcggttacaattaaaaattaataatagagaacaaatttgtaaaaaccctccactaaatttaaaacatctccaaaataact

SEQ ID NO: 780215 - DNA, 641 bp, Homo sapiens
ttatttgaacaaacaacactgggcaggtcattttttgcttgccaaggaccaaggtgttgggagatctaaggaaaaggaaaggccacgtgattgataaggaaggaccaacagtgcacaggagaccctctgcatggggcagagaagatacaaaaaggacaggagtgggaagtcaagtctctgttgaccctgatcttttctagatactctataaacaaaatgtcagagtgtttttgttccatttcaacaaatatgtttgagtgacccaatttatagcattgggagaaacaaaaattggtcttgaggccagggctatgaatgcatatgagagattaatatctcattgtaagttgggagggggtgtgtgtgtgtgtgtgtgtgtgtgtgtgtctgtgggtatgttgagaaaatggagagggtggagatgtagaagaaatgaagagaacatttagcagaagatagacagtggagagcagtctgatattagtggctgttgtgtaataaayattggtaaaaatattgtatttgcttcactagacagtccaagtgatcactagaagtaaaagccttataagtgaatcagtgttaaacagtaagaggcttcccatttagaaaagcacgcatattctgaggattttcccaag

SEQ ID NO: 780216 - DNA, 580 bp, Homo sapiens
gccaagtaattctaattatttcaatggatattggaactctatcaattacttaaataacttaggaatggaggtatgttggattaagaaccatcagcatgtgagttgatagtcgcaaataaaacaaatggtttgagacacacataatatccgggactctggtcctgagatacttctgaatctagtatcccatgaaaggtatgtctacaaatttggattttcagtttttgagtaatgggcaaaggttaggtggagagtgcatttggaaatcatactgtgaaaccagaagtttgactggggctcaacttggtgygatatcggattaggtatagagcttgatgcaatgacttcaaatctctggtgaatgcaggtgtctggaatcctgggcttaagtgggttgtactgaattccctcacctgctttttatcagcagctgtattgacaagattttcattacttcctaaatgtctgcactggcttgctttatttttccttttaaagtttatatatatatatataatatagatatgtattatatatatgtatatattatatacatttatatatatatatatataaatcc

SEQ ID NO: 780217 - DNA, 610 bp, Homo sapiens
taaatacaattacatattttacatataaaatatattatatatacaaatatttaaccataaatatatactgtataaatatgaaatgtttttcttattttaaaaattcttttacatctgtcacttctttctttttttagagccagggtctcactctctccccaagctggagttcagtggcacaatcatagctcactacagctcaaactcctgggctcaagcaatcatcctgccttggcctcctaaagtgctgggattacaggtgtgagcctgcacttggccttaaaattcttattcatgttattctttcatatcttgtatcattttcttaatgttcctagtcttgttttgaaattgtatrtaacagctcagatatttaaagtacatttttctggtatgcttttattttctagaaagaagccattttgctcatctttttaatatagtaaccgtggatgggatttgacattgatacttatcttttgcccatttttatatgaatttagtttgtctgaactttgagaaggagacttggttcagatagcttgtctaattcgcttttctaacttctttgttttcaggtggttttaaaacatatggcagcctgctttct

SEQ ID NO: 780218 - DNA, 619 bp, Homo sapiens
ctgtggactgataccggtccggtccgtggcctgttaggaaccaggccgcacagcaggaggtgggcagctgtgaacgagcattacagcctgagcctgtcagatcagctgcagcattaaattctcataggagtgtgaaccctattgtgaactgcatgtgcragggatctaggatgcgcgctccttacgagaatctaactaatgcctgatgatctgaggtgaaatagtttcatcctgaaaccatcccctcaactgtccatggaaaaattgtcttccacaaatctggtctgtggtgccaaaagggttggagaccactgatctagactcttgattctgttccgttgatctatatgtctgtccacattatcttggttattgtatctttgttgtaacttttgaaattgggaagtgtgaatcctccaacttttttcttctttttcaagatgactttggccattctgtgtccattgcaatttcgtacagattttaggataggctcattcacttctgataagaaaggcagttggaattttgataaggattcaactgaatctgtagatcactgtggggaatattgccattttaacagtattgtcttctaatccatgagcacaggatgtct

SEQ ID NO: 780219 - DNA, 636 bp, Homo sapiens
ctcccaactaaatgataagggaaggagcctccatccatatagaaggaagagaagtgccctgctgagttctgggcatttgagtttgtgggatgaccagggtgtggcctgatacctgagctagcagctggttgatctctccagaagtgagctgcctgttgtcagattagaggcatgagatcagggccagccctcacttttgcagggtcttactcaacccctgacaggaatggccttgtatgccagcacctgtagtcctgccctgtgcaaggggcctgcagtttagggaggcttgggagcaacaactcccacacagggctgggctccccacattggttttttttttttkttgttcattggctgtaagttccttttctgagatgaagccttcttcccttttttcaaagagagcttggtaagggaaagctaaagggattggtagccctgttcaacttgcaaccacatggaaccacatgtacatgttcctggaggcctctcccctctgtccctgtgtgtccctggtttctcttctgtctcccatctgggagtctcatggctggctgatctgatcctgggttcaacttttatagatgttgtttctccattggctaaaagaaaggtatgtcgcctggggtgctc

SEQ ID NO: 780220 - DNA, 642 bp, Homo sapiens
gtattcttccagcttccaccaaccaattccaaagtcacttccacatatttagttatttgttacagcagcatccaatttcagctcccccaatctatactagttttctatttttgccctaataaagcaccacaaatttattggcttagacaacaagcatttgtacttttatagttctctgagttagaagttcaacatggggtggctggcrggatggccgaataggaacagctccggtctgcagctccaagtgagattaacgcagaaggcaggtgatatctgcatttccaacggaggtacccggctcatctcactgggactggttagacagtgggtgcagccaatggagggtgagccaaagcagggtggggcgtcatctcacccaggaagcacaaggggttagggaactccctcccctaggcaagggaagtcatgagggactgtgccataaggaacggtgcactccagccagatactacacttttcccatggtctttgccacccacagaccaggagattcccttgggtgcctactccaccagggccctgggtttcaagcacaaaactgggcagccatttgggcagacactgagctagctgcaggagttttttttcataccccagtggcacctgggatgccagcaa

SEQ ID NO: 780221 - DNA, 642 bp, Homo sapiens
gtattcttccagcttccaccaaccaattccaaagtcacttccacatatttagttatttgttacagcagcatccaatttcagctcccccaatctatactagttttctatttttgccctaataaagcaccacaaatttattggcttagacaacaagcatttgtacttttatagttctctgagttagaagttcaacatggggtggctggcgggatggccgaataggaacagctccggtctgcagctccaagtgagattaacgcagaaggcaggtgatatctgcatttccaacggaggtacccggctcatctcactgggactggttagacagtgggtgcagccaatggagggtgagccaaagcagggtggggcrtcatctcacccaggaagcacaaggggttagggaactccctcccctaggcaagggaagtcatgagggactgtgccataaggaacggtgcactccagccagatactacacttttcccatggtctttgccacccacagaccaggagattcccttgggtgcctactccaccagggccctgggtttcaagcacaaaactgggcagccatttgggcagacactgagctagctgcaggagttttttttcataccccagtggcacctgggatgccagcaa

SEQ ID NO: 780222 - DNA, 534 bp, Homo sapiens
gcaatctaatgtccgtaatatgtgacgtttcgtagatgacaatgtaggaaagatatattttaatcacttttcatttaagtgaccttatgtaaaaagtaaagtaataatttagtagttccaagtctccagagggcattttcaaatgtacataaaagaaatggttacagagattttttttaasaagcatcttccatgtccacatcctcttgtaactgctgtaccattttctcttacaactgctttcctttgcctgcaagaggggctaggataagatggatgttttgcttgacttctttgaagtttctgtagcgctttatttttcttcaatctgttcactacaaatttagcttggcgtttctgtttgatctcttcaactctctttattgcctcaatagttttattccatagctctcactggtatttgataggttcatttctacgtttttcaaattcaaatgaattatccactgtaagctctttatcagctgctttccagaatgctttggtccacccaactttgcgaggattgcgctt

SEQ ID NO: 780223 - DNA, 534 bp, Homo sapiens
gcaatctaatgtccgtaatatgtgacgtttcgtagatgacaatgtaggaaagatatattttaatcacttttcatttaagtgaccttatgtaaaaagtaaagtaataatttagtagttccaagtctccagagggcattttcaaatgtacataaaagaaatggttacagagattttttttaagaagcatcttccatgtccacatcctcttgtaactgctgtaccattttctcttacaactgctttcctttgcctgcaagaggggytaggataagatggatgttttgcttgacttctttgaagtttctgtagcgctttatttttcttcaatctgttcactacaaatttagcttggcgtttctgtttgatctcttcaactctctttattgcctcaatagttttattccatagctctcactggtatttgataggttcatttctacgtttttcaaattcaaatgaattatccactgtaagctctttatcagctgctttccagaatgctttggtccacccaactttgcgaggattgcgctt

SEQ ID NO: 780224 - DNA, 618 bp, Homo sapiens
ttatttttcccctgctgtatttatctgataatttatcttccaaagaaatttgaaatcattcttttccttgttgagtaaccattttcttttttctgagatcttatttattcaaagatttgatgtctgtctatatttcaatttatgttttgttccttaagggcttagtatgatgccactagacaatttattctttaatttattatgaatctttgtggtttaactgcttctcttttgtcccctatagaagccttagaaaaatcaactatgatatattataattagactatctctccatatttttaagccaaaagagatctctataaagaatattgggtaaaatttgtcatttcactccataataaattcattgactcattcatcaaagttcatcaacatttaccaaaygctgggaatttttctacgcaataaaaaatagatgaaaaacagacagaagactttgacttcatggagagtccgtttttagtgagaatggacaatataaataaatgaataacatatatagcatccctggtggtcataaatactatggtgcaaagtagagaatgacaacatggcattagagagggtgtgggtgttactgctgttttcaggtaaagg

SEQ ID NO: 780225 - DNA, 622 bp, Homo sapiens
tttttactttgttgagcgtgttgagttttgttctgtggcttaacatgtggcttattctagagaatgtttcatgtactgatgagacaaatgtgtatgttgtaactattggaagaaatagtctgtaaatgcctattaggtcaacttggtctgtaatgcagattaaacccartgtttctttgttgatttcgtctacatgatctgtccaatgctgaattggggtgttgatgttttcagctattattgtattgggttctatctttctctttagctacagtaatatttagtttatacatctggtgctcttattttggttgcatatatatttacaattgttatatctttttgctgaaatggcccctttatagttgtaatataacctttgtcattttattattaatattattttatttaaattacattctatccaagtatagctatgcctgcatacttctggtttccacttgcatggattttttttttttcttcacttctttcagtctatctgtgtctttactggtaaagtgagttttcggttggcagcatatagttggatcttatatttttaattcattcatccagtctatattgtttagttggggaattaaaaatatttataattaat

SEQ ID NO: 780226 - DNA, 622 bp, Homo sapiens
atcagaagccaccctgggaaacccaaccttgcctctcgggatggcaggaggaaggggagacagggacaggagagcaatgatcaggactctaagatcagagacggagaccccaggacaaaggtgttagtgaacgggctgctctcttgccactctgggtccctttggtttggggaacagggagacatgaaccccttggcccatgagggtcatgcttagaggagagtggggggtctcaccttagcaccaacagcaccagggaagccaggaggaccagcggggccggtgggaccctgtgaatgaaatggagatgtcagcgagaaggaagagatggcagctgcaagtcacaccctgggacagaggaagtcctggggttcagaccaacataacctgctcccattgtcagccccaagagcagayactgagacccctccccactcccaggccctgaggctacaggccacactcacagggggcccggcagcaccagtagcaccatcatttccacgagcaccctgcaggagagaggggaagccccgttaagtccactgagcactggccagtccctagagttcctggggagccccttccagagctcagggatcccccaaggggccaggagtac

SEQ ID NO: 780227 - DNA, 605 bp, Homo sapiens
taggcgggcaccagtgcctgaagaggggcaggaggagggggaggaggctggcatactgctctctgggtctctggcatcaacctgacccagatctagggttgccggacaaaagacaggaggcccaggtaaatctaaatttcagataaacgatgaataatttcattttagtataattatgtcccatgcaatatatatatattttttgagaaccaagactgggaatggagtggtgtgagctcactgcacctccaccatcccagattccaagcaattctcatgcttcagcctcccaagtagctgggattacaggcatgtgccactatgtccagctaatwttttgtatttttagtagagacagggttttaccttgttggccaggctggtctccaactcctggcctcaagtgatatgcccaccttggcctcccaaagtgttgggattacaggcgtgagctactacacctgggcccatgcaatatttgagacatacttatgctaaaatttacttttctatctgaaattcacatttaatgggatgttctgtgtttttctttgttaaaactggcaaccaggccaggcacagtggctcacgcttataaccccagc

SEQ ID NO: 780228 - DNA, 583 bp, Homo sapiens
atcccatccaagatatcacatttatttagtcatcatatctcctcaggctcctcaagtctgtgacagtttctcagactatcctttttttaatgaccttgatggttttgaggagtattggtcaggcattttatagaacatccctcctttgggatttacctaatgtttttctcatggttaaactagggttatcggttttacgaaggaagactacaaaggtaaaagtgccattttcatcacatcaggtcaagaatacataccatcaggccgggcgcagtggctcacacctgtactcccagcactttgggaggccaaggcgygtagatcacttgaggtcaggagttcaggaccagcctggccaacatgatgaaactctgtctttactaaaaatataaaaaattagctgggcatgatggagtaggactgtagtcccagctacttgggaggctgaggcagaagaatcgtttgaacctgggaggcggaggttacagtgagccgagatcgcaccactgcagtccagcctagataacagagggagaccctgtctcaaaaaataaaataaaaaaaagtacatactgacaacctg

SEQ ID NO: 780229 - DNA, 507 bp, Homo sapiens
ggcaatcgtattgactgacatacctgccctctgcatctttttcttctttaacacaaggccctgtcttgtgtccatgtccaaggctgcttggtttgggcattgccaatggctgcaggctgggaggatgagtgtgggttgaaatctgactcacagattcctcctgagctctagaggaacatcttctttgtattagtaagaggcagtattgagtagacaagcctttcatcgcagtgggagtggtatttttcttctctgttttgtcctcctagaggagacagttgtttttaattcatataatggcctatgaactagcatgtattatcttatatwtttgtgtttggtttgcttatttattcatctgctctgtcttaacttatttatcatctgcttttacccagtagaatttacattccacaaggatatggaccaagtctctttggttcatctctgtaatcacagattttagaatattgcatggcacaaattagttgagaggattagatacca

SEQ ID NO: 780230 - DNA, 635 bp, Homo sapiens
attttatatgttattataactttgctaaccttattttctatgtcataattctagtgtataaaatatgccataattttattagtcatcctttccctgttggacacttagattggatgactaatagatctattttaacttcttcctatgaggacacaaagtatttttatttatttattcaatcttaatttatttttgcaatggcaaattaaagaagaaaagacaaattgtgttgagacatgcctaggtttttcactgtccacatgtctaaatctaaactcatcagcttattccagaaaaaaaaaaaaaaaaaaaaaaaaaaaaaccacattgtttctcttacacctcctcccttggttaaggttccctatttttcagactgccctggctcaraaaagcccagtcagcctgactttttgccccttgaacattaaaatctaatcagtctccaaggccattcagcccttctttcagagtacagtaacgttacatcccctgctcctccgattttccgagtgagtatctaaagtcgggctcctttatctcatgttttctttacttatgagccagggtcatgactgaaataactctatttgcatgtggtcaatgctggatgagtactggacacatgcttgctg

SEQ ID NO: 780231 - DNA, 627 bp, Homo sapiens
acagtacttttctgctagatgctggtgaattttcttttaataagacatccgtgagaaggagaaaacctccaaagctcatgatggtttggctacctactcagagaaacttggacataatcagtatgaggaactaatgagaacaggaaagkcttactgtgcttatatcacgtaacatctacgtgtcatcaaatccattgacagggctttttcagcataaactttgtcagtctcttaatcttggctcttctacatcaatttaatagggttgtcttaaaaacaaacaaatgacaacaacgaaaaagccacaacagatggtttatgaaattgcagaaggctggagcagaaagagagccatagaaacaatctgaccacattcatccattgtaaatgtcacctatagcttccctgtcaggattaccaaggatctctgttgattacttccagtgataagaagtcacttatgagacaggtcattttattttaattatcagttaaataatcattcaactgaaatctccttaattttccactctatggagctacctagaaagcatcaaattttactttctcttggcagttcccttatacttgaaaacggaattagggtccccattcagttttctttct

SEQ ID NO: 780232 - DNA, 587 bp, Homo sapiens
tgaaatataacttaaaattaattatttaccaatttaaataccactcttagtaagcaatagaaaaattaaaatcaaagataaactataagaatcatctcatggagaaactcacaaatgaatactctggaaagtcatcacagatggccataaagaattctacccctccttggacatacatcttactgttcttatcaagggtggagtcagtttcctcttttctcgagtcttgactggctgatgacttgttgtaactaatataaaaatggcagaaatgaccatgtggtcttccaggcttagccttttagagttatggaagatggttcttttgccttcttgacaaccagctgtcttgcaaagaaaatccaagccatcctgcagaagagaggttaygtgaagaaagctgtgaggatgagaaaccataaggggagagggttcacatggacaatagagatgccctagctgacagttagccccaaagccccagacagctgagagaaaccagccaccaaatgaatgcaaaaccacttgaatggccatagcagatgccactgtgtgctatgttgtaaatgtttgtgtttccctcaaaa

SEQ ID NO: 780233 - DNA, 554 bp, Homo sapiens
ttgagatggagtctcgctctgtcaccaggctggagtgcggtgacaactgcaagctctgcctccatgggttcacgccattctcctgcctcagcctcccaagtagctgggactgcaggcgtgtgccaccacacccagctaagttttgtatttttagtagagacggggtttcaccatgttgggcaggatggtctcaatctcctaaccttgtgatccgcccacctcgkcctcccaaagtgctgggattacaggtgtgagccaccgcgcacagccaaaattcttaccttactaaaaattcttagcttgtgaagaaaactaagaccaactagcttaagaaaaaaatgtgttgtctcatataattgaaaagcaaagttggctttagccataactagatcggggagcttaaaaactgtcattggtacttaatttctccatctttccaactcatggttctatctttttctttgttgattgtgcttccaggcagactttccccttatgatatcaagatggctcaccagcagctccaaactcacatctctgccagcatgacaact

SEQ ID NO: 780234 - DNA, 517 bp, Homo sapiens
agttgtagatttgtcatatatggcctttattatttgaggtatattccttctatgcttagttttttgagagtttttatcatgaagacatgttgaattttattaaatgctttttcaggaattttgtgtctatgttcttcaaggatcttgttttttttgttgtgtccttgtctggttttggtatcaggtgatgctagccttgtcaaatgaactagaaaatattccatccttttgattttttgtaatagtttcataaggattggtattagttctttgtacacttggtgtaattcgactataaatccatctggtacagggcttttctttkttgggaaatttttaaaattactgattcaatctcactactcatttttagtctgtttaggttttctatttcttcttgattcaatcttgacaggtcatatgtttctaggaatttatccatttcctctgtgttttccagtttgtcagtatatagtttttcataagtctctgatgatcttttgtatttatgtggtat

SEQ ID NO: 780235 - DNA, 687 bp, Homo sapiens
agatgaaagtactatgttgaatcctagcaccttgctgagttgtatagccccagaaatgtgcaagcttcctggttgcagtttccataacttcacctcctacctgccgctttactctagctggtccatccccaccttcttttctccaagactctggtttagggcagggaagactctctgggaaccagacaaacactctgtacactgttacactaacggatcaggccatggtcctgggaggaagaacacatccaagctgcaaacctgggtcagactacaccaggtctgggccaagccaattaagagggcccaagggctgttattaaaagacactctgtcccttcctcttagctctgcagtcccttaggattcaccaccacctggagcacctctctaggatcaagaaagtagcctgagtagaatctctagcacccagcctccccttacagcctgctattggtatacatctgacactataaatctggcaccatataaatgcccagcactttggtcattgagtccttctagagstgctggcactgagcctatgagagcaataggcatctttctagcagaatgttttctaaccttgtcttgtgatgtgaattctccagggctgttgatataaacatagatcccaggacctttctctaagcattcatatttatagtgggtctatttgggatccag

SEQ ID NO: 780236 - DNA, 621 bp, Homo sapiens
attaccattagattatagccccttttgcccaatgatacttttatgcactgtccactcttcactgagcctaagcataaacatatacagactaagttcccctgggtctttgggtcttcattacagaaagatcctgtgtcatataaaactgattaaataaatttattgtaatcttctcttattaatctatcttttttaatatcctagatttgtttttggttttttggatacattatatttgtacacatgtatggggtatgtgtgatattttgttacgtgcaaagaatgtgtaatgatgaagtcagggtatttaagggtattcatcacctgagtatcattgctatgtgttgggcacatttcaaatcctaactattttgaaaaatagttgttcaactattgttgttaaccccagttaccctacttagttatcaaacattagaacttattcyttctacctagctgtatatttgtgatctgtcttttgttataagaatgtcacccatgaaccttgcaataggtgaggaaaagatattactttttctctcctataatgccagttttcccatattcttgccactgacatattctttttactgttagtcaatgtattgggtttgaaaatgg

SEQ ID NO: 780237 - DNA, 590 bp, Homo sapiens; identical to SEQ ID NO: 747669

SEQ ID NO: 780238 - DNA, 630 bp, Homo sapiens
tccccagtgctgctagctatgaggagctgcgccttttcctcttggtttctctaatgctgcctgcccccacccacctttgtaagtagcctctttattaaattgccttcaattatctagtttcagggtaccatttccaattcctgctggaaaactgactggcacagtgattaagctagaattgtctggaatgcaccacagcacatggaccctggaagggagttgcacattaggtgattcacctgatctgaatgacctgattctaaccagtgccccaactacacctcatgtatttttcattgtttcttcaagacagaggactagttactccagccttgacatgaagatggccctggattggatgttgctacaggcatagggaacaaatgtctcctttccctacagcactctttccccaaagaacattgctctctctttctcctcgtctctgtctctttctctctctctctgtgtacgtgtgtgtgtgtatgtgtgtayagccacatatatgtgtgaatacagaattctttttttctgaaccaactggataagttaccttatggcactttacctttaaatacttcaatgtgtatttctaagaatagggatattttcttacataactatagtgca

SEQ ID NO: 780239 - DNA, 470 bp, Homo sapiens
aagcttttatgaggcactatattagaactttctgaagttttaacaaaatagcttatagtcccatccagagtttgacctttggtgtggtcctttcttaatttgaaaatcatttccaacctggaaacactggaaatgaaaatagtcttatcttcaagmccaacacgtccttagtccttgatatttattaacagtttttttcttattcctcaacttattcctttcatattttatcaaaggcttagaaaggaagccaggtgacaattgtaatattatgctagaaatctccttagctatatcattatattcaagaagcacatgaggtacatattctattttttttttcacattacagagggcaatggtgttgataaactctccatcattatgtaacaagggacacattcctgtatttgcagtagtttttttgttgtttctgtttttgtttttgtttttttttccatttaagcctt

SEQ ID NO: 780240 - DNA, 610 bp, Homo sapiens
gatattacaattgatactcccaaaatacaaaggatcataagaactgaacaattatacagcaactaattgaataacatagaagaaatgaataaatttctagacacacacaacctatcaagattaatcatgaagaaggagaaaacctgaacagaccaataataagtaagaagattgaatsagtaataaaaattctcccaccaaagaaaagcccagaattggatgactcctctactgaaatctaccaaatattaatgaagaactaataccaattctaagcttttctagaaaatcaaagtagacagaatacttccaaactaattttacaaagctagcaatacaaaagctagacaagcccaggcatggtggcttacgcctgtaatcccagcactttgggaggccaaggtgggagaatcacctaaggtcaggagtttgagaccagcctggccaacatggtgaaaccccgtctctactaaaaatacaaaaattagccgggcgtggtggcacttgcctgtaatcctagctacttgagaggctgaagcaggagaatctcttgaaccttggaggcataggttgcagtgagccgagattgcaccattgcactccagcctcg

SEQ ID NO: 780241 - DNA, 610 bp, Homo sapiens
gatattacaattgatactcccaaaatacaaaggatcataagaactgaacaattatacagcaactaattgaataacatagaagaaatgaataaatttctagacacacacaacctatcaagattaatcatgaagaaggagaaaacctgaacagaccaataataagtaagaagattgaatcagtaataaaaattctcccaccaaagaaaagcccagaattggatgactcctctactgaaatctaccaaatattaatgaagaactaataccaattctaagcttttctagaaaatsaaagtagacagaatacttccaaactaattttacaaagctagcaatacaaaagctagacaagcccaggcatggtggcttacgcctgtaatcccagcactttgggaggccaaggtgggagaatcacctaaggtcaggagtttgagaccagcctggccaacatggtgaaaccccgtctctactaaaaatacaaaaattagccgggcgtggtggcacttgcctgtaatcctagctacttgagaggctgaagcaggagaatctcttgaaccttggaggcataggttgcagtgagccgagattgcaccattgcactccagcctcg

SEQ ID NO: 780242 - DNA, 610 bp, Homo sapiens
gatattacaattgatactcccaaaatacaaaggatcataagaactgaacaattatacagcaactaattgaataacatagaagaaatgaataaatttctagacacacacaacctatcaagattaatcatgaagaaggagaaaacctgaacagaccaataataagtaagaagattgaatcagtaataaaaattctcccaccaaagaaaagcccagaattggatgactcctctactgaaatctaccaaatattaatgaagaactaataccaattctaagcttttctagaaaatcaaagtagacagaatacttccaaactaattttacaaagctagcaatacaaaagctagacaagcccaggcatggtggcttacgcctgtaatcccagcactttgggaggccaaggtgggagaatcacctaaggtcaggagtttgagaccagyctggccaacatggtgaaaccccgtctctactaaaaatacaaaaattagccgggcgtggtggcacttgcctgtaatcctagctacttgagaggctgaagcaggagaatctcttgaaccttggaggcataggttgcagtgagccgagattgcaccattgcactccagcctcg

SEQ ID NO: 780243 - DNA, 630 bp, Homo sapiens
ccctcagctacctcaggagtaaagttactttctatcagatctcactattgttaattagatactgcaaggggtgagggatgggacctgcgtttggttacagaactgttttccaaagcagtgggactaccaatgtttaagagtttccgttgttccacatctcaccagcacttgatattatcattctttccattttagccattttaggggcatataatggttttaatttgcattttcctaatgactaatgatttgagcatcttttcatgttatctgtcatttgcacatcttctttggtgaattatctattcaacttttaaaaattaaatttagtgatttgtcttattrctgagttgtaagaattctttatataatctggatataaattttgtattagatatgttttgtaaatattttctcctaatctctgtgcttttaaatttttaacagtttttttctacaaagaatatacatttttaattctgatgaagtctatttaaaacatttttcttttaaaatacatgtttttcataagaaattattgcttaacccgaaaaatcacaaagatttttctcgctgtgttttcttcgtctggttttatacttttaggctatttataataatttttatgca

SEQ ID NO: 780244 - DNA, 605 bp, Homo sapiens
aaacagaaaaatgattctgtctaaattgagaacagcatttatcgtgttacatttcatagattgtgtgtttatcatgtcctatataaactgtcatttctttggctatcacatattaaagtacatagtccaatgaactataggttttccaggtaacctgcataactagttaktattgactgttttgccttgaaactctctttgattttgtgaagaaacctacataaaaattatgtttaccatttatctttaacaattgtaattcaaaatcatgtgttttcagaattttcttaaatctgttttcaccaggtgcttctagagagaaaaatagaaaaattatagtcaatatcaagtttcaaaataataacaagaggcattatctgacttcatgtataggaaaacacttttttctttaaaagatctctaaaggttctatcatctcacaaggtaactaacattatagaaaaatggcatcacatttctgttcaaaggaaaccagcctgtactgtctgaaaccatttccactgctatcctaattgctatcctaattacttcacatcacgacatatgcgctcagtgcctactctctatagaaagttgatggaaga

SEQ ID NO: 780245 - DNA, 605 bp, Homo sapiens
aaacagaaaaatgattctgtctaaattgagaacagcatttatcgtgttacatttcatagattgtgtgtttatcatgtcctatataaactgtcatttctttggctatcacatattaaagtacatagtccaatgaactataggttttccaggtaacctgcataactagttattattgactrttttgccttgaaactctctttgattttgtgaagaaacctacataaaaattatgtttaccatttatctttaacaattgtaattcaaaatcatgtgttttcagaattttcttaaatctgttttcaccaggtgcttctagagagaaaaatagaaaaattatagtcaatatcaagtttcaaaataataacaagaggcattatctgacttcatgtataggaaaacacttttttctttaaaagatctctaaaggttctatcatctcacaaggtaactaacattatagaaaaatggcatcacatttctgttcaaaggaaaccagcctgtactgtctgaaaccatttccactgctatcctaattgctatcctaattacttcacatcacgacatatgcgctcagtgcctactctctatagaaagttgatggaaga

SEQ ID NO: 780246 - DNA, 657 bp, Homo sapiens
tggagggcagcgatgggatcagccaaggcagagaggaagtgatgctccttccatcgctcccagctgggtaccagtgagtatcctccacccattccttgtgagcacccagtgggactggagccctccggctccaccttagggctacttccagggaaagccccaaaatgtgagctttgtctcaattctgcccaagaccaacccttggtctacaccacgttcttatgcctaggatgggatgagaacaatacctcaagcagaacatggcacccaactcaaagaaaggctcttttttttgtttgtttttaagtgggggagggagcttagttattgagtcattgagtcaaccctgttctgacaataattctcttaaagcaaattattaactgttaaaactgttttccctgaccagaaacagactgcatattatagaaataacaaattcagggagtttcagtttcacctaacatacatgaatttgaaacctaaattggtttatatgagacartgaaaacaatctttgagaactttattgcatctaagatagattttactcctcacaacaggaagtggaacccgtgaactagtccgtttcaaaatgatcttgcatgtggtttttcgctaggtaagtaaaaaaaaaaaaaaagcaagcaaccagtt

SEQ ID NO: 780247 - DNA, 612 bp, Homo sapiens
ttcatattttcactatggcttaatttctccttaacttatttactttaggctgcctcatttctccttattgatttgatatggagataaaagcctatagagctaacacttagtggaggcaaaaaaaaaattgaaaaaataagaaagtatataaggtttttgtttttttgtttttactcagatttgaagacttgaataaaagaatgatacgaaaggcaaataaatttccataaatcttcccaggttggtgatccaagaaatcagtaggaatttatactctttcactagcacactgataagtgtttataccaaaatttattgtgaatattgtccagcaagaataacagaaagaaagcactaaaggagttgggaaatattataagacccatgtrctgttatgtcttttaattttccacctcattaacatcttagatggggatatgctgaatatgcagaagttgtactcctttattattaaatacttcactgcaagctatgtttttacattggcctcagggtgtgtgtgtgtgtgtgtgtgtgtgtgtgtgtgtaaatgttttacagtgaaccacatcatttattttttagaataaaatgtaactatatttcatggta

SEQ ID NO: 780248 - DNA, 617 bp, Homo sapiens
tttgtttgtttattaatagtcacctgaaaatgtgggtggtgatatctcaccatgactttgatttgaatttctccgatgattagcaatattgagcactttttcacatcctgttggccatttgtatgtcttcttttgaaaaacatctcttgagcccctttgctcatttttaaattgagttatttggggtgttttggctattgagttgtaagaactccttgtatattttggacgttaacccgttaaacagatacatggttctacagtctaasggtttgtatcccctgaaaattcatttgttgaaatcctaacccccaacgtgatggtacaaaaaggtagggcattttggaagtaactatgtggtaatgacaaatatacatgaataggattagagactttttaaaagaggccaaagagagactcttcacctcttctgtcacgtgaggttatagtgaaaatatggccatgtatgaactaggaagtatgtcctcaccagacactaaatttgtcagtccctaaattgtggacttcccagtcttcataactgtaagaaatacgtttctattgtttaaagttacccagtttattgtatcttgttataatgtcctcagtggactaag

SEQ ID NO: 780249 - DNA, 629 bp, Homo sapiens
ctgttttctgcctatggctagacagttttcccagcaccatttattaaatagggaatccttcccacatttcttgtttttgtcaggtttgccgaagatcaggtggttgtagatttgtgatgttatttctgaggtctctgttctgttccattgctctatatgtctgttttggaagcagtaccatactgttttgtttactgtagccttgtagtatagttwgaagtcaggtagcatgatgactccagctttgttctttttgcttaggattgtcttggctatatggggtcttctttaattccatatgaaatttaaagtagttttttttctaattctgtgaagaatgtcaatggtagtttgatgggaatagcattgaatctataaattactctgggcaatatggccattttcacgatattgattcttcctatccatgaggatgggatgtttttccactcatttgtgtcctatttccttgagcagtggtttgtagttctccttgaagaggtccttcacatcccttgtaaactgtatttctaggtattttattctctttgtagcaattgtgaatgggagttcattcataatttggctctctgagtgtctgtccttggtgtaaaggaatccttgtgatt

SEQ ID NO: 780250 - DNA, 609 bp, Homo sapiens; identical to SEQ ID NO: 744320

SEQ ID NO: 780251 - DNA, 645 bp, Homo sapiens
ggctacatgtatgccttctttttagaagtgtctgttatgtcctttgcccattttttaatggcattgtttggtttctgctcccatatttgttcaagttccttataggttctggatattagacctttgtcaggtgcataatttgcaaatattttctcccattttgcaggttgtttgtttactttgttgatagtttcttttgctgtgcagaagttctttagtttgattagttcccacttatctatgtttttgttgcaattgtttttgatgtctttgttacaaaatttttggcagggctgatgtccagaatgctattttctaggttttcttctaggatttttatagatataggttttacagttaagtatttaatccatcttgagttcattttgtatatggtgaaaggtaggggtccagtttcaacttctgcatatggctagccagttattccagcaccatttattgaatagggagtccttccctcratagttgttattcttggctttgtcatggatcagatggttgtaggtgtgcaggtgtgtagctttattctgggtcctctaacctgttccattggtctatgtgttgtttttatactagtatcatgttgttttagttactatagccttgcggtatagtttgaagttg

SEQ ID NO: 780252 - DNA, 646 bp, Homo sapiens
cctaatttcagataccatagtgtaagaatcccgagacctttttgtttttaaataaaagttggttgtacatgtgagaatctgatgaaactgagttcatagcatgggaatgcattctacttttttctttatttggtttttaatttgagcattttaatccataaacctcattaatgcatttatttaagaaaaggtatattgaatattatgtgtcaagatgtataataaaaagattaaaaatcacagcttctgatcataaggaaataattgcttactgagatgagagaatggtaagcagatacttataacagaattataaatgctagaggagcttatagaaagagcaggattaaggcagaggttaggactttgggaatatggttaggtatgtaggaggaagtcaaatcttagctagatttaaaaagctgaaattaactaggtcattaggtgttcaaatcktcaaatacagttctttgaagataaagccatctgtccaaaaagtatacaaaatatacgtagaagacggtgctttaaaaactacaaatacatctatatgtgtagattgtaaggatggatacaatgaaagggaaaaaagtatgcaatcataaataatttggaattaatgttgtagcctgtaggaaactactga

SEQ ID NO: 780253 - DNA, 623 bp, Homo sapiens
cttttcatatgaaaacaagtcttctgaatactacagatagctacagggatttaagctgtagttcaaataatccaaatatagtagccagaaaccatgaaggtggtataaaggaaacattaagagtccttcataaacatttttctttatttcctataaaagaaagtcttataataataatcagccaaaaatgtaagtatgcatcaatgtggtgatgtaaactgcaccattataaaaatacttattatttatttgtatgcatgragttttattttatttaaataaaatttaaaaataagttatttgtactaaatttaatatgaaattcaatttaacctcagagattctgtacaagtgagcaagtatgggtgtttgccttgtccatcttgtccacaatggaatatatttcttttgttaaaataatacaagcataattttcaaactaataatttgaagatatgtatctccactgatttaacacattcatgtcatgcaactaaaatgtaaaataaatcaggtgattattttacttgcctgttctacatacatttgaacaagtcacttgatcccatttggtttccaatttataaagtaaaaaatattatcaataataattagatatcttc

SEQ ID NO: 780254 - DNA, 620 bp, Homo sapiens
gaggatttcaaggaggtttctcagatgacaaataggaggatagtttggaagggatactcttggagtttttggttagggatctgattcggaaggccttctgtctgcctcgtcttcaggtgtgtttgtatatttggaaaggatctcagaaggggttgctgatggaagtccagcaggcctaactcagaaaaccctccttatttgtctgatcacattcagwgacccttaaagaaggttcaacaggcctgactctcagggtgatactctcctcttcaccttgctcagagacctcattatgaattactgttcgaaggttgtccctcccaagatggagtggaccaaagactacagggaacaatgggaaagtttcagctttgctgggttgatactgggtactgaacaatgtaactaatgtttcttttgttatgtgtattttcctgggatggaaaatgtttattcagttccccatgcagcctgttgggcagaatcttgcaaactaatcatcttgtgtgtggttccctaaaacaggaaaaggtgattttctcttgtaaagtgacttgagtcccacagctttggcccagtaggcagggtcttcagaaacctctccattcttctggaagctg

SEQ ID NO: 780255 - DNA, 529 bp, Homo sapiens
ctaggataatttgttttccaataagcattctttatgtgtgtcacttttagatttgttactctgttttttctttttttccatacataataaaacacaaaacactgaagtaattttcagttagtattgtgtcaagttttwcttactttatatttactataaattcacataaatattatgaaaatgtatgtaaatacctcagttctgcctcctcacacttctacatttttcttttaaaaaagtgattcactaatttatttgtcttatacttcgatagaagaaaaattaaaaatgttgttagcagtaaatatttcttagaccattgagatataattaagtcacccagatggcttaactatgctgtaatatgtacagtagagtcttaatattataatacgagcaaattgtggtaatttcaagatttttgtatgtaatgctattgtgaagttttgctgtacccgctatgaatgaactgaacaagtgatattatttctctttagttggctctttatttaatctatttattggaact

SEQ ID NO: 780256 - DNA, 629 bp, Homo sapiens
taggatggctgctggcagtgttcagagacaggcagtagtgggagggtgggggcaaccagcttctttgctctctgcttagtatcagaaatcaacaacaaaagccaaatcttacatgaagccatgtgcagaattgtttgcatatgaatggccagagctatttgtgtggctgcctctaggtgtaattgaaaaggaagtgtctggcaagggagaatggaaaaaaaccaccatttatgtcctgagtccagcaggcctgggaccaggattaggtgagtgaggaactcatcttgggtacactatttaaatggtgctgaaacactcagtaatcaagataaataatatactaatgcaatattttaaaaagctatmtgaatgcaaaaaaatcaagcaatgatgaacagcactctagattttaaataaagacaggatcagtacagtctcctgccgagccccatgggggctccagggtctttattcaaaatgttgatggtttgctcctcctggatttttgcattaatctagaccttgaaaaatattatattaaaatattatttatcttgattactgaaattttttgatcccctgaaattttacactccaaatgaggtacttactagccttgcccttgctcc

SEQ ID NO: 780257 - DNA, 620 bp, Homo sapiens
caaacaccttaagttagctacaagaatgagccaagaagcaaagcactgtgatcaggatttaatcatggttaatataatgggttaagttctataaaattttttaaaaatgaaatatagttgttaaaatatagtcataggttrtataaaatcttaaaatagaaagttcccttctccctaacgaagaatgaataaaagaatgagaaaatttaagttgtctggttctaaactaggtctctatttgtagaaaggagaagtgtgtttctgggattttctcccacttgtacaaatattgttattgtccgaacatccacaataaattaaaattggggattgatttttttcagtgaggacaaagaaaggcagaataaaacattgagaaggttttaaaaagcaaaactatattttaaatatctgttcctgaattaaacagttaaatatttttaatacaatcagaagaaagtaaagaatttttgttcatttttttactattcccattttatagatgaaaatgttttgttttattcctaagcactgattaaaatcattatcaagaaaaaatctgacatcactaaaataaacttatttaaatttaaaaggataaagcaaacaagcaaatgaaa

SEQ ID NO: 780258 - DNA, 620 bp, Homo sapiens
caaacaccttaagttagctacaagaatgagccaagaagcaaagcactgtgatcaggatttaatcatggttaatataatgggttaagttctataaaattttttaaaaatgaaatatagttgttaaaatatagtcataggttatataaaatcttaaaatagaaagttcccttctccctaacgaagaatgaataaaagaatgagaaaatttaagttgtctggttctaaactaggtctctatttgtagaaaggagaagtgtgtttctgggattttctcccacttgtacaaatattgttattgtccgaacatccacaataaattaaaattggggattgatttttttcagtgaggacaaagaaaggcagaataaaacattgagaaggttttaaaaagcaaaactrtattttaaatatctgttcctgaattaaacagttaaatatttttaatacaatcagaagaaagtaaagaatttttgttcatttttttactattcccattttatagatgaaaatgttttgttttattcctaagcactgattaaaatcattatcaagaaaaaatctgacatcactaaaataaacttatttaaatttaaaaggataaagcaaacaagcaaatgaaa

SEQ ID NO: 780259 - DNA, 633 bp, Homo sapiens
agtgcaaactgaatgagataggtgaaaaaaagcaattccacaaaggtaaaaatctggactgcaatgccatgagaatcacagacagaaatctggcctcatgctcaagtccctggaggaagacaaggaagtaaacaggagggtggattccaggtggcaggccaaggagcagggagggtggcatcaggagtgtgtggaggcagccagcatcggctagcagcagcatgtgccacgatgactacctgcaagatcactcacatgcaagagcatggagagctcaaaagaggcactccagacagctaacagatgggaaaagtagatgacacacagattgtagggaatgttaacatgagaaagagaygagacttcatccaaaggaaggcagagtcactgaaggttcagtgggatgtcaggatgagcaaactttgggagggtgaatatggcagctctgcagaggatgcacaagacaagaaggggagaagctggggtaaaaagccgccaccagagaactccaggtatgaggagaattgcagtgaaggatgaacctggcccttgccaagcaaaggacttgcctttgccaagttcctgggaagtcacctctaagaccttagaatgtcctgcctgatgagagacttt

SEQ ID NO: 780260 - DNA, 601 bp, Homo sapiens
acgacttccatacccagaaaaagaatcttttaaaagtaaaggagaagagccaggtgcgatggctcacgcctgataatcccagcactttgggaggccgaggcaggcagatcacgaggtcaggagactgagaccatcctggctaacatggcraaaccctgtctctactaaaaatacaaaaaattagccgtgcatggtggcgggggcatgtagtcccagctacttgggaggctgaggcgggagaatggtgtgaaccaggaaacggagcctgcagtgagcctagatcacgccactacactccagcccgggcttgagcaagacacgatgccacccgtctcaaaaaaataaaaacaaataaataaaataaaggagaaagactttctcaaacaaaaacaggaaatttattgccagcatacctaacccacataaaatgttgaagtatttcagaagctgggcatggctgcacgcctgtaatctcagcactttgggaggcccagacaggcggattgcctgagctcaggagtcgagatcagcctgggcaacatggtgaaaccccatctgtactaaaatacaaaaaaatcagccaggcgtggtggcatgcacc

SEQ ID NO: 780261 - DNA, 647 bp, Homo sapiens
gattctcttccaccgtctcgtcacctgacctgatctatgctttcttggggcataggcctctgacatctcacttggcaagtgtcgcggccaccttcgccctgaagcttgctgtgcactctgctgcctggcctgatcattcactcatgtctcttggtggaaggcctagtgctgcctttaacccaaggcctgggcagaggagcatggcacgcatttgtgtgtgggagaaagaggaagaggaagaagttagaggagtgtgagccaacagaggggagggatggcaggcctccttcccacaggcgggtcacgaacccaaaaggctggaagcttctattctccagaactttttcttgatttcattcagcttttcaatgcttccaatasgccaaaaggccagaattaatgacttaatgttgtttttgaagaaacactaaaaagataaaatttttaaatgtttctttttaattaatttaaaatgattaattcatgtcatttaaaaatgccatgcatgtaagtatttatttaccctcccccagctccacatttatttaaggcaggttagacataaacgtggatactacagaagaggctgcagtcctggaaagcacggttttgcttctgagcattagagatcctcagggctcccttct

SEQ ID NO: 780262 - DNA, 554 bp, Homo sapiens
ttttaattaatttaaaatgattaattcatgtcatttaaaaatgccatgcatgtaagtatttatttaccctcccccagctccacatttatttaaggcaggttagacataaacgtggatactacagaagaggctgcagtcctggaaagcacggttttgcttctgagcattagagaycctcagggctcccttctcagtcactttccactagatgctcttcttccgccaaccacatccatgaccgtcaatacacacgactcccagaagttggatttaggggtcaaatgtctacagtacaattgcctaattcacatatccccttggatatctcaaaggcactctgaactcaacatgtcccaagccaaatttatgtatggtggcatctgcagcagcagtgaacgagagcacaggacgcctgggcactgtctactgcaaagacaacacaaggtgagcaaatgcagcagccttggtgtgagacaggccggccctctcagtctctacctgtgctccactccccatgttccacagaagagacccctcgccccactcccgacgtt

SEQ ID NO: 780263 - DNA, 597 bp, Homo sapiens
aaaaaaaaggcagaccatgattgaagctcatgttgatgtctagactaccaatggttaaagaaaacctcagcaccaacaggtctaagatgatggaaatcatgacccaaggccgggcgcggtggctcacacctataatcccagcactttgggaggccgaggtgggcggatcacaaggtcaggagatcgagaccatcctggctaacacggtgaaaccccgtctctactaaaaatacaaaaaattagccgggtgtggtggcgggcacctgtagtcccagctactctggaggctgaggcaggagaatggtgtgaacccaggaggcggagctggcagtgagccaagatcgcaccactgyactccagcctgggcaacagagcgagactccatctcaaaaaaaaaaaaaaagagagatgcagacaaataacttgaaagaagtggtggagaaaattattccagacagcactggagaagacacagaaatgcctgcaaatctatttatccgctccacgatgtcttctctgtgaggaaagttaaaatgctaaaaacactcaggtttgcattgggaaaacgtagggagctttgtggtgaagacagcagtt

SEQ ID NO: 780264 - DNA, 597 bp, Homo sapiens
aaaaaaaaggcagaccatgattgaagctcatgttgatgtctagactaccaatggttaaagaaaacctcagcaccaacaggtctaagatgatggaaatcatgacccaaggccgggcgcggtggctcacacctataatcccagcactttgggaggccgaggtgggcggatcacaaggtcaggagatcgagaccatcctggctaacacggtgaaaccccgtctctactaaaaatacaaaaaattagccgggtgtggtggcgggcacctgtagtcccagctactctggaggctgaggcaggagaatggtgtgaacccaggaggcggagctggcagtgagccaagatcgcaccactgcactccagcytgggcaacagagcgagactccatctcaaaaaaaaaaaaaaagagagatgcagacaaataacttgaaagaagtggtggagaaaattattccagacagcactggagaagacacagaaatgcctgcaaatctatttatccgctccacgatgtcttctctgtgaggaaagttaaaatgctaaaaacactcaggtttgcattgggaaaacgtagggagctttgtggtgaagacagcagtt

SEQ ID NO: 780265 - DNA, 591 bp, Homo sapiens
taactaaatttctaatcaactgtgttgtacacaaaaagccacattcaagcaatcgttactaagatttattattctccaaataatcactcctcctttttcactggaatgcttctcgttttttccctttatactttggtcactacacctggtaacaacacacacctcactgtggggaatgctggcttagaatgtacatttgaaaatcagacgaaattggctggcctctgtctaaattcacatggcagaaaacttctacagacccaaatatgatgttaaaattatttatttatttttacagacagggtcttgctgctgcccaggctgaagtgcaatgacacaatcacagctcactgtagcctgmaactcctgggctcaggtgatcctccctcctcagcctcctgagcagctggtactacaggtgtgcaccaccatgtccagccactgacattaacatttttagacaattttttaaaatccctaattctgtatcttacttgattcagtcaagaaacacttactggctatgaacaacgtactaggccttaaaattgttctgcattcaataaacttccaatctttttgaaaaaaaat

SEQ ID NO: 780266 - DNA, 507 bp, Homo sapiens
ctatcccctttcctataggctctacttggttccttttctagcatgctgtctgaccaatttagaaaatttcaattgtctacaggcgttgtcagttaaaactatttttttaacctatcaacggtgaatacttttgagtagtaattgttttgtgcctaatgcgaagagtatttattagcatttcggtgttgatctagaaaatttttacttttaatcctgtagtcttagaagtatgttattcctttatctgtttctttatatcagtttttcccataattgggtaaactcctattttataaaatacraagtacatttctggttttttctacataggttactagacattttttcaatttgaaaaaacattttgaattaagaaactttttttttaaagtaaatacgaaatgtggttcttgagtatgcattgatcctgatttaccatgtacattgtcaatggtttggaccattttctttgctaacagttacatcatgtcatgtgatatgtgcagt

SEQ ID NO: 780267 - DNA, 587 bp, Homo sapiens
agggctttggtggcaccatgggaatgggatatgttgaagacatagtattataggtacagatggtaaatgtaatgtgagaagaaaaagagataattccagaaatgatgtagaggtaaattgaatgggacttaataactgtgatgtgtgggggcaatgacgggagggatcatcataggtgattgaagttttaagcctggctgactacagcaatagatggttaccagaagcatttcagtactcagtttgcaaaataatcttaakagctcatgagagtccaggttctttactagagtcttaaaaatgaaggtttctgtattccttacaagttccagcaagtgttaaaaatgaggaaatggctgggtgcagtagcttgagcctgtaatcccagctctcaggaagttgagacaggaagatgggttgagcctaggagttcaaggcttgggtaagctatgattgtgccactaaactccagcatgggcgacaaagtgagaccctgtgtctgaaaaaataaaaaacagtgaggaaataagcttccaaataatcttctataaatgggggaggagttgctctgtagagacctgaaaacc

SEQ ID NO: 780268 - DNA, 604 bp, Homo sapiens
tacctttttatcatctcactttcctactctgaacaagttcctcacactttttttttttttgagacaaagtctcgctcttgtcccccaggctggagtgcgatggcgcgatctccgctcactgcaacctccgcctcccaggttcaaacgattctcctaccacarcctcccgagcagctgggattaccggtgcctgccaccacacccagctaatttttttgtaattttagtagagatggggtttcaccacgttggccaggctggtttcgaactcctgacctcaggtgatccacccgcctcggcctcccaaagtgctggaattacaggcatgagccaccacacccagcccctcacacctttttaatgagttcaaattcttcaagatgaaacttaacgtcagggcaagcacatcaattgatacggacccagaactccccacagattcccaactccgtatctttgcctatgttgctacctctacctggaaggtccttcttctacttttttttttttgtccccaaacttactaatttttcaatacatagcatctccacaaaaacttcttagactcttccaattcatatcactttcttcctgcttgaattgt

SEQ ID NO: 780269 - DNA, 604 bp, Homo sapiens
tacctttttatcatctcactttcctactctgaacaagttcctcacactttttttttttttgagacaaagtctcgctcttgtcccccaggctggagtgcgatggcgcgatctccgctcactgcaacctccgcctcccaggttcaaacgattctcctaccacagcctcccgagcagctgggattaccggtgcctgccaccacasccagctaatttttttgtaattttagtagagatggggtttcaccacgttggccaggctggtttcgaactcctgacctcaggtgatccacccgcctcggcctcccaaagtgctggaattacaggcatgagccaccacacccagcccctcacacctttttaatgagttcaaattcttcaagatgaaacttaacgtcagggcaagcacatcaattgatacggacccagaactccccacagattcccaactccgtatctttgcctatgttgctacctctacctggaaggtccttcttctacttttttttttttgtccccaaacttactaatttttcaatacatagcatctccacaaaaacttcttagactcttccaattcatatcactttcttcctgcttgaattgt

SEQ ID NO: 780270 - DNA, 604 bp, Homo sapiens
tacctttttatcatctcactttcctactctgaacaagttcctcacactttttttttttttgagacaaagtctcgctcttgtcccccaggctggagtgcgatggcgcgatctccgctcactgcaacctccgcctcccaggttcaaacgattctcctaccacagcctcccgagcagctgggattaccggtgcctgccaccacacccagctaatttttttgtaattttagtagagatggggtttcaccacgttggccaggctggtttcgaactcctgacctcaggtgatcsacccgcctcggcctcccaaagtgctggaattacaggcatgagccaccacacccagcccctcacacctttttaatgagttcaaattcttcaagatgaaacttaacgtcagggcaagcacatcaattgatacggacccagaactccccacagattcccaactccgtatctttgcctatgttgctacctctacctggaaggtccttcttctacttttttttttttgtccccaaacttactaatttttcaatacatagcatctccacaaaaacttcttagactcttccaattcatatcactttcttcctgcttgaattgt

SEQ ID NO: 780271 - DNA, 592 bp, Homo sapiens
aagtcacatctttaatgctttgctgcttagaaagttcttctactagataccctaaatcatctccctcaagttcaaagttccataaatgtctagggtaggttcaaatgccaccattgtctttgctaaaatgtaacaagagtcacctttgctccakttcccaacaagttcctcatttccctctgagaccaactcagcctggaccttattattcatatcactatcagcatttttgtcaaagtcattcaacaagtctctaggaagttacaaactttcccacattttcctgtattcttctgagccctccaaattgttccaacctctgcctgttacccattttcaaagtcatttccacattttcaggtatcttttcagcaacaccccactctactcttactaatttactctattagtctgttttaacactgctgataaagacatatctgagactgggtaaattacaaaagaaagaggttaaacagagaacttacagttccacgtgactcgggaggcctcacaatcatggcagaaggcaaggaggagcaagtcacagcttctgtggatggcaacaggcaaagagagggcctattcaggg

SEQ ID NO: 780272 - DNA, 643 bp, Homo sapiens
cccactctactcttactaatttactctattagtctgttttaacactgctgataaagacatatctgagactgggtaaattacaaaagaaagaggttaaacagagaacttacagttccacgtgactcgggaggcctcacaatcatggcagaaggcaaggaggagcaagtcacagcttctgtggatggcaacaggcaaagagagggcctattcagggcaactcctgtttttaaaaccrtcagatctcatgagaccgattcactatcacgagaacagcattggaaaagacctgccccataatttaatcatctcccatctggtccctcccacaacacgtgggaattatgggagccactaggtgagatttgggtggggacacagatccaaacccatatcatatcctcatcacattatgtttaagcccaatgataattcctcaaggaggtgattcacctccattttagagataaggcacatagtaggcactcaaaaatatgtgtcaaataaataataatcatagtagtagcggtgttgtttagtagtgtctaacatttttgagagcttaacatgtgtcacggactttactgtaagttttatatccatcctctcacagcaacttaaaggccaccagaaactaatgtagctc

SEQ ID NO: 780273 - DNA, 604 bp, Homo sapiens
aggaagaactagtttccctttttctttgacagtggttaccacgcagcattccagaacaattaaggaaacatttggaatctaagcctgatttccttatctgtaaaatgatctatgtatctcataacatatgtgaaagaacaccataaactatcatctctaaaggtatgagttattactacttctrgttggtgagtgtcttatgtgttcagtgatttcaaagacaacaacaaaaaccaagaataaaaattagttacctttgggttaaaatatctacaagactgtggttgagagcctccaaatagggctatgcggtagtcatgtttctttcttctaggtcttgtgccatctacaagttcttctcggtcctctggagacagtagatggtacctcattccacctgtagtaaaatacatggcaacgcttcaagaacttcaggcactaaccagtgctttgaaaacgaaatacccagacataatagggcctttatttcagtaacttacttttatgatatctctatagcatttgaggaaagtgagggggaagaggcaggagaaatgcataaggatccgagtactaaccaattcatttattctcagcaatcacc

SEQ ID NO: 780274 - DNA, 604 bp, Homo sapiens
aggaagaactagtttccctttttctttgacagtggttaccacgcagcattccagaacaattaaggaaacatttggaatctaagcctgatttccttatctgtaaaatgatctatgtatctcataacatatgtgaaagaacaccataaactatcatctctaaaggtatgagttattactacttctagttggtgagtgtcttatgtgttcagtgatttcaaagacaacaacaaaaaccaagaataaaaattagttacctttgggttaaaatatctacaagactgtggttgagagcctccaaatagggctatgcggtagtcatgtttctttcttctaggtcttgtgccatctacaagttcttctcggtcctctggagacagtagatggtacctcattccacctgtagtaaaatacatggcaaygcttcaagaacttcaggcactaaccagtgctttgaaaacgaaatacccagacataatagggcctttatttcagtaacttacttttatgatatctctatagcatttgaggaaagtgagggggaagaggcaggagaaatgcataaggatccgagtactaaccaattcatttattctcagcaatcacc

SEQ ID NO: 780275 - DNA, 510 bp, Homo sapiens
tttgaggaaagtgagggggaagaggcaggagaaatgcataaggatccgagtactaaccaattcatttattctcagcaatcaccattattctaagactgccccacccagtaagcaactactatgtaccagtgaattatstggctcctcaagcaacagctgccaaaataataattattgaaatccagatctcctaacccagtggttcttgatctttacattagaatcacctagaaaatctctgaaactattgatacctgggacctaccacagactaattaaataaaaatctctaggtagtgtttaggaattggtattttaaagggcttcttaaatcttgccacttaaaatgtggttcaaagaccacctgcttcagcatttgggagtttgttagaaatgctgaatcccaggcccctatcccagacctactgaatcagcatctgcatatttaacaccccacggtaattaggatgtacataaaactttgagaagcactgtcttagatgactctaa

SEQ ID NO: 780276 - DNA, 612 bp, Homo sapiens
agacacggtttcaccgtgttagccaggatggtctctattttctgacctcgtgatccgcccgcgtccgcctcccaaagtgctgcgattacaggtgtgagccaccgcgtctggccgaaaccttgttctttcaagtccacataaacgttgctatttgaaattatatcagaacgagtgaaaagtcccatccttgcctggaggatctaagtctctttgacgcagagaagcagcctcaatttctatccaggtgtagagcttcagataaacggttctgaaaacaytctgtattttcttaactttgcagtttccaaggaaacatgccctacattcaattctcgtccagacctgatgttaatgcctttacacacagctatgctttgagatttcatttaaatttcacctaaacttcactctccccgccaaaacatacaataactaccttttattttgtacggtgagacacaccacagctcctctggtgtgcagtcttcttgattgcaataagtcaatagatctgactttgttggattacaggtttgtgctggtggttttaggattattgagctgggagtgagccatcattcttgctcatgtaatttgtttggattttgaaga

SEQ ID NO: 780277 - DNA, 658 bp, Homo sapiens
actcagccaagcaaagtaggttgtcaccaaaatactcccacccatttatgagagtagtattttttctgagtctagcaagtgtgcacatcataccacaggcttgggcctgttacttgttccatcaggagttcatgagtgtgtattgaagtgggattcagttagcttggaacatgatcttagaaactggactacattggctttatgcatacagttacatggaaagctgaaagtatcccgcctctkcttgcagttaacctgggttaggctctaatcaatagtagcttctctccttactctcgggacacagtgtttctatcctactagttacctaagactttataagtgaaacataaaaaataatgaaaagaagccttgctaagttgcttttatcagtttcacaacatggctgaagctgcctgcagtataatccctctccccatctctaaaatgacatttaacctataaaaaattcaacttccccaaaccacaatatctatttaacaataatctttaggaaaaaaaggttaatagccactccagcacatctcacatcaatggcactgaaaagtgagcttcagaaacaaggtcgaaatttaagaaactcctttaaattcttggtttttgagtagcggatccttttcctggtttcccgggaaga

SEQ ID NO: 780278 - DNA, 658 bp, Homo sapiens
ttctttatcgtggcttgtgttttggcaaaaccgatgaggtctatgatcttttttcaggagtaggctatttttcttttctatattattttcattgaatttggttggttattaaaatgataatatatttttactttaataattaggaatattactatttttattataaattacccaacagtcaatcccagaaatgaaacccttttatcatttgacagatatttattgaacatctgttaggtaccaatccagtgatgaatgctagaaaaacaaagttaaataagatacagtctgtaatacagattaacatcctcatatatcaaatatcaaaaaaaattaaaaatcttgactagaataagttgagtacctgaaggaagcagtttaaatgctgtatttttctgtttctacagtcatgatcatgcatttcaactagtacatgtattcaccgcccatccaaatataactaactacgtgctgccaggtayttgtgatactaaccagatgatacaaggagttgaacgggagagggaactggagctggaatatctttgacaaataggccaagtcaatgcaaattttgcaagtcatgggccataaaactgttacataaaccttttgtgattttggcaaagaagtatgtgaagtttttattgaagaaact

SEQ ID NO: 780279 - DNA, 614 bp, Homo sapiens
taggccacggagccgcgcgagtccgggcccgggtgaccgctctgttcccactggacgagacctgccgagtcctcaggacaacggacaaaggccttaacgggcttgggaggtgagcgaagtcccgaacgatgacgggtggaactagttagctggccttcgggcggttggtctcgttctaccagagcttgctgtcggaagagagaaatggtggaatgacaagccacgtctggcctcttggaaatgcccaccaccctttgggaagatttactggccgtttatggaaggcctgtgtatttaatatgaaacagctgctctcaacactacccaaaccttttmatagaaaacatttgccacatctagcccttctatgagctagatggaaagaggttgctgatgtatgataaagttagaaaatcacacatcttgtaaattctcatttgcttaaaagaaatcatagaaaataaatgtcttctggagacgacttttggaaatggagttgttaacacggcctctggaagcgagacgtccacgtttgttaagtggtttagaggacatggagctggaagacctgagaaggaagagaagaagcttctgtgccagactggtcatattta

SEQ ID NO: 780280 - DNA, 586 bp, Homo sapiens
tctgttaattctctttccccttgagaatggctagcattttcataggacttattatttcagataattttggattgtatccagacattgaattctgtgataatcttcaagagtgttttgttttgttttatcaggaaactcactttgttgaattcaaatgcaaattatgtgccatttagttaagcaacagttccagtgtcggttcagttctttcatcctgagctgagctgctttgagttttctccatgtcggttcccacacacataaagaaagagctccatgtatgtgaaattctcccacaaattcttctggagttgatacascaagtttgaggctccctctctccagcatgctccgtactgatatccgtaactcacttattagtcgctgttgttggatctgagctttatcctctggtttttcaggccagaaagattattgctcttttagaaacatttttttactccacatgtaattgattgtagcctgccttcaggttaataataaagccatacagtaggaaatgcatctcatgtctttcacatattggctctcttctgggatttacctacttttgtgcactccctcg

SEQ ID NO: 780281 - DNA, 613 bp, Homo sapiens
gtttataattagttatgccactttagtgtcctcaagttgttgccttccttttgtccaattcctctttcttctcagtttgctatcatatctctctttttttttgagaggcagtctcactgtgttgcccaggctggagtgcaatggtgcgatctcggctcactgcaacctctgtctccctggctcaagcgattatcttgcctcagcctccatagtagcctggattacaggcgcctaccactatgcctggctaagttttgtatttttagtagagatggggtttcaccatgttggtcaggctggtctcaaactcctgacctcaggtaatccacttgccttgacctcccaagtgccgggattacaggtgtgagccgctgcacycagccatcatcttttatgccttgactgataaaaaccatgtttgattttactgccttgagatggaaagaaaatcttcccatttaaagtgtctagacctaaacctaaaagtgttttttctttcctgtagtaatttctatttattcctctatctttctcatgctaagtttctctccttttatgttgtataatattttgatattcttttttgtggttgctgttgtttattcccgaataa

SEQ ID NO: 780282 - DNA, 639 bp, Homo sapiens
tcatacattaggatgctccgactcacacttagatgcacaatgtatttaaatcaattgctttttagtgaattgtttatgtgatgtctgcaatttgacaaggaagggagtgagggaaaattatcgccagttaatatattctggtagaaacacttataattcccagactacttaaaatgytcagcagcattcaactagatataatgaaagcaataaatgaagcaaatttggccttgaagttattgagtgactcctgattttacaataaatgatagcagaatgctctggatgactctcaaccagaaaagcaatctaaaaaggcgtatatgtatcaagagtgtcacaatctttttgggggtctatttgtcactttgtcacctagcacagctgtgaaaggtgggtaatgaatttcactttttccttaccattccagacatctggaagatgtagtttcagtagaaagtggcttcagctggagtagggttgtgtttaacatttttgctgagaaggcattttgaaaggtcctctggtcaaattaggctaagtgctaacattgaaagcaagttttaagtaattgcttatctttcagagctaagtgtctcccatattatatttgtggcaataggacaaatggtcacagat

SEQ ID NO: 780283 - DNA, 625 bp, Homo sapiens
gtagcagatttaacattttctgttgttccacaattagtcaacaaaaatcaaagttgaggaaaagagatgagaattactctaaattctatagagaattgcaaatgatttggattagacatcacttccaattaatagaatatggaaaatgtcacttccaagattaggttatgaaaaagtgctgactttgtttgcttactctctctcattatttctcttgcttaccttaagcgaaaccagctaccatgttgtgacctgcgtggacaggtccatgtaataaagaactaatgtctatagtcaacaactcaagagagatcttgaggcctgctattctgggttgaatttcatcccaccaccccctaaattcatatgttgaagacctaaytcctagtacctcagaatgtgactgaatttgggggctgagtatttactgaggtacagtcatatatggcttaatgatagagacacatctgagaaatgccttcatgcattgattttgtcattttgtaaatatcatagatctttctatgcatcatagatcaaatatttcagagatacattttacacaagctagatcacatttctcagttgtatcttacacaagctagatgatatagcctactacaca

SEQ ID NO: 780284 - DNA, 503 bp, Homo sapiens
tacaaaagaaagccatccactaaaattagtaccccaaaacactttatattagttaactagctacagattaacagttgttggtgtgcaaagttgcatacatacttgacttctcatctggtctaatttcttccttgaatcctgcatcccattttctaaatagatgagtgacgcgatgaagcatccagcaaagcttttgttgctgatcstttgtttaagacatcatcttgtttttgttgaagctgtctcacagctacctgataagatgttatttttgttactgattttacaaatcaccttattattaaaccattaataatatttaactctaaagcatacgctttgaaaaatatcaccacacagaccgattcaccttcttttcctcatgtgtacacattcccgtgtattactgaatccagttaaggatacagaaggtgttatcttcctgccaaactggtattgttattcacacaacatattcagcccactagtcattcctcccttga

SEQ ID NO: 780285 - DNA, 503 bp, Homo sapiens
tacaaaagaaagccatccactaaaattagtaccccaaaacactttatattagttaactagctacagattaacagttgttggtgtgcaaagttgcatacatacttgacttctcatctggtctaatttcttccttgaatcctgcatcccattttctaaatagatgagtgacgcgatgaagcatccagcaaagcttttgttgctgatcgtttgtttaagacatcatcttgtttttgttgaagctgtctcacagctacctgataagatgttatttttgttactgattttacaaatcaccttattattaaaccattaataatatttaactctaaagcatackctttgaaaaatatcaccacacagaccgattcaccttcttttcctcatgtgtacacattcccgtgtattactgaatccagttaaggatacagaaggtgttatcttcctgccaaactggtattgttattcacacaacatattcagcccactagtcattcctcccttga

SEQ ID NO: 780286 - DNA, 636 bp, Homo sapiens
tgactgagctccccacccaatctgtagacacatgagtggaaataaatagttgcttttttttttttgagacggagttttgctcttgttgccaaggctggagtgcaatggcgtgatctcggctcaccacaacctccgcctcctgggttcaagcagttctcctgcctcagcctccagagtagctgggattacaggcatgcactaccatgcccggctaattttgtattttagtagagatggggtttttccatgttggccaggctggtcttgaactcctgacctcargtgatctgcccaccttggcctcccaaagtgctgggattaccggtgcgagccactgcacccgacccatgtgaagcatttgtaacacagctagaggattttcctccccaaagcctattggaatctcacaggggccattttgttttctaagttagcaatttcctttcctctctgctattcatgatctcattcaatccctgtgtcttccttatccaatcaatatttgtgtgattgtcactctgcagaggagaaaacgggctcaaggatggaactcttcccaggccgtgcccaccggccacatggcacaagcaagataggaatctaggtatgcctgactcccgcaccgccctctcctcc

SEQ ID NO: 780287 - DNA, 636 bp, Homo sapiens
tgactgagctccccacccaatctgtagacacatgagtggaaataaatagttgcttttttttttttgagacggagttttgctcttgttgccaaggctggagtgcaatggcgtgatctcggctcaccacaacctccgcctcctgggttcaagcagttctcctgcctcagcctccagagtagctgggattacaggcatgcactaccatgcccggctaattttgtattttagtagagatggggtttttccatgttggccaggctggtcttgaactcctgacctcaggtgatctgcccaccttsgcctcccaaagtgctgggattaccggtgcgagccactgcacccgacccatgtgaagcatttgtaacacagctagaggattttcctccccaaagcctattggaatctcacaggggccattttgttttctaagttagcaatttcctttcctctctgctattcatgatctcattcaatccctgtgtcttccttatccaatcaatatttgtgtgattgtcactctgcagaggagaaaacgggctcaaggatggaactcttcccaggccgtgcccaccggccacatggcacaagcaagataggaatctaggtatgcctgactcccgcaccgccctctcctcc

SEQ ID NO: 780288 - DNA, 612 bp, Homo sapiens
tgagcggcctgtggccaccacaatagttaccacaaattgggtggcaaaagacaagagaaatgtattccccccagttctgggggccagaagtctgaagtcaagtcatccgcagagccctgctccctctgaagcctgcagcggggatccttgctgcctcttccaactgctggtggccccaggcgttccctggcttgtggatgcatcactcccatctctgcttscgttttcatgtggcctctcctctatgtgtgtctgtgtcttctcttctgcttcttatgaggacacctgtcatcggctttacaacccactcgtagttcaagacgatctcatctcaagatccttatcttaattatgtctatgaagattctatttccaaataagttcatattcgtgcggtctggaagattagaatgtggacacatctttttcagggacacaattcaccccactgcagtgaccacagccggatcagactcgttcacccacttcagtgaccacagatggatcagactcgttcgctccctgcagtgaccacggccggatcagacttgttccctacaaaggggatttctcatgagagccagtcacacgagggcagagactttggttatc

SEQ ID NO: 780289 - DNA, 619 bp, Homo sapiens; identical to SEQ ID NO: 772212

SEQ ID NO: 780290 - DNA, 562 bp, Homo sapiens
atattattggctctttaaaatattgattaattcaataactttggaattgtgtgaactcagagctctagcagctctttaagacttcagaggccaaaacgaggacaaagtgggggctaaaggcaatgggactgcagactgcttgccttctgttcaaccatagaaggcagagtaaaactcactttatggattgagatataggattgtctttgatagaaggattccataatcaaaaagtcagaacatataagaaattcccacattatattacattccaaaaggtatcaaattgtataacaacttgcccaaggtcacatagayggctagtgacagggagtgacccagtgtgtagattctagtcaaatacctagcccagtttcctttccatgtttaaaatacgtaaaggttagaatcacaggtactggtgtaaaatcacctgggttcaaattctagctccgtcacttcctagagttgtggaacttaggcaaattacttaatcatcctgtgcctcagtttcctctgctataacagggaaatgataataattgtaactcccagggttgtt

SEQ ID NO: 780291 - DNA, 477 bp, Homo sapiens
  misc_feature 1, 2, 3, 4, 5, 6, 7, 8, 9, 10, 11, 12, 13, 14, 15, 16, 17,18, 19, 20, 21, 22, 23, 24, 25, 26, 27, 28: n = A,T,C or G
nnnnnnnnnnnnnnnnnnnnnnnnnnnnagaggatgctgtccactctactgaatattactgaaactataatgaaaggtagttttgagaaggtaagatcaagctgaggttttttgtttttgttttttctttttctgagacagagtctcattctgttgccccggctagagtgcagtggcgccatctcaactcactgcaacctccccctcgggggttcaagcaattctyctgcctcagcctcctgagtagctgggattacaggcatatgccatcactgctggctaatttttgtatttttagtagagacagggtttcaccatgtttcccaggctggtcttaaactcatgagctcaagccatctgcctgccgtggcctctcaaagtgctgcgattacaggcatgagccactgtgaccagcttgagctgagttttggctgcatgttttctttttctctttccccctttagcctaaggagaact

SEQ ID NO: 780292 - DNA, 619 bp, Homo sapiens
aagacatctctgaacctttgagtcaaggggaaacaggtgtaatgtcctattctaatataaagttacaaattaacctggcacaagggactacatcacacgtgcgaatattttctgggtatgtaaatatgaggggaaaaaagataaagaaatactagcccatagcataaatgcctgaatcttcagtcagctttttaccagtatatttacaatcttcatccccactgctccacaaggccactcaacatttcataaaataggatccctactcattcgactctggttctcttcttatttccaacaatttgtctataattaagccaaactcatctataagtctctccaaattactcaagttagaattattcttttktgactccacaacctggtggaatcacacctctaatacaagttagactgtgataattaccctaatagagtcacttgtatcattccagtaattatgaatctcatgcaccagtcctaacatcatcaaacaaaatacactccataaaagtgtgctaatttagctgaattgaatgtgaaaacttactgtttttctcagttgcattactcaagggcacttggagtccagaaaagttgtagtctctttgctaactgg

SEQ ID NO: 780293 - DNA, 670 bp, Homo sapiens
ttaaatggagaaagaatagttgaacggatgcataaaagagtgaatgaatacacgcatgcataaattaatgaatgaataataacaactgggggtaggaaattatccactttctcatgccataattcctccacctctgtactcatttagtctttcataatatgttccttagtaccagcttagagacccaagtctttgcaacattacacctgatatgtgtccaacctgagattttactcctttgtagcctcattaagtgatgcaattataacctgtccattttcacactgaggttctaaggtccwtctccctccagaagccaatgttcacaaggaatggggtccccaaagtaagttttatgatttttcaatagaagagttaaaatgccaacatttgatattaacattctattaatttacccctttttaattactcatggtggcagggggagtagaaacataggcaatacatttttatttagccttaaaatgtagaaagaagcaataaaaccaccagacttatctgtgcacttttatgcgtctgtcctcctgctgagtttggccttctatttggtgataaagccctttgcaaaagggagagcccctcagaggagattccaaagctagtgttcctttcattactgcccctgggaaatgacccaaggttataccac

SEQ ID NO: 780294 - DNA, 626 bp, Homo sapiens
aaataaaacaaaatattaatatgtcaagtttgaatatgagtacctattatttcattttctgtatgtttagaatatctcaaaatacaaatcttacagaaagctaccactttggattctacagggaagagaatcgttaacataattttcaatgaaatacattcttacccaatttgtccagatcagcagatcagcaaatgctttttttatagctaccattatctgagatggttgatgtgtatttattttaggtaaagatgttaggtcttaatacacttaatgcattttggacaaacctaaaatatacaccatatgtagaaaaatgttactttyttatttacaaaacaaaaatgtgagagcttttaggttatacaataataaaatcactaaacatttaagagagttaaatgaaaatggtcattaggtcatgtatgtgaagaatatatactttcaaactattctatagtgtctgacccaaaaccgctttgctactccttaacattgttacccatggctataacaaaaatgagtaataatcatggtatgagtcgagttgtcaactccacaaaaccagatcatagatgcatccactaaaaaagaattactcattctagaaatacttagtccct

SEQ ID NO: 780295 - DNA, 634 bp, Homo sapiens
aagcatgctattaagttagttaagttggtttttaacaaagtcaattcatcaatcgtgtattaatattattctactgtgaagtcttgttaacaaagctctacatgtgttaattttaaaaaaaggtaaaaaggtttggtaccaattatgattcatttttttcattacaggtttctggagtgagattccacagcaaaatacaaacattattttgggaaatgagatactagaagtttgggaacatattaacagaattggacctgagtcactaaaaattcacgtattttaacttgtttaagcagctatcctcagtcaaaatagcttaatgaagccgtaagtgtaaaatttgttgaccatctttctctcatccacatcagtattcaatatttgtcatctatttctcaaaatcagtaatttttcacatcactatgtgcctctcccctgaatttatttctaccaaragaaacagaatcaaatattcagggtgaagtggttacaactcagagggattttaaacagtatgtgtctactttatttacaatatttacctatgtataacatgttgtctgggacagaattgcttatcaaggggtatcaagacaacccaacagctttaaaaatacaaatgtctaggcca

SEQ ID NO: 780296 - DNA, 634 bp, Homo sapiens
aagcatgctattaagttagttaagttggtttttaacaaagtcaattcatcaatcgtgtattaatattattctactgtgaagtcttgttaacaaagctctacatgtgttaattttaaaaaaaggtaaaaaggtttggtaccaattatgattcatttttttcattacaggtttctggagtgagattccacagcaaaatacaaacattattttgggaaatgagatactagaagtttgggaacatattaacagaattggacctgagtcactaaaaattcacgtattttaacttgtttaagcagctatcctcagtcaaaatagcttaatgaagccgtaagtgtaaaatttgttgaccatctttctctcatccacatcagtattcaatatttgtcatctatttctcaaaatcagtaatttttcacatcactatgtgcctctcccctgaatttatttctaccaagaraaacagaatcaaatattcagggtgaagtggttacaactcagagggattttaaacagtatgtgtctactttatttacaatatttacctatgtataacatgttgtctgggacagaattgcttatcaaggggtatcaagacaacccaacagctttaaaaatacaaatgtctaggcca

SEQ ID NO: 780297 - DNA, 678 bp, Homo sapiens
ttcccctattttgaaggagtcctcttctctgaatgattggctcactcaaatccatagcagggaaatggccaaagataaactcaggagtttggcaatagagctgccaattactataactaatatttatgagacatgaagataaacctcaggacaagaatcattcagtcaatacaaaaatggttgaaaataatttttagctactttgggatgcttgatatgactttatctactggttagtaagattactgtttattatgtgagtgaacagtaaagaataaagacacagtggtaaaggagaaaaggccttgaacctcaatgagtggcaaagtatcaatttatttcaactgtgcaaatctcttaaagtagactttttcatgaaaactacagagtcccaagatttggtggaaagaaaattggcttctgggagatggacatgggggtggtgagcggaaacctgccacaatccctagtcaacaytgcctgagaagcaccatttggcctccctgggtagggttgatttatcctcccactggattcccttattttttatcatccacataccagcctttctcactgggttgtaacccccttgaaaactaaggctgtatcttatttagaacagatgagcccttaattaaaatgtgttgaattgaattaatctcagttccatcacactga

SEQ ID NO: 780298 - DNA, 678 bp, Homo sapiens
ttcccctattttgaaggagtcctcttctctgaatgattggctcactcaaatccatagcagggaaatggccaaagataaactcaggagtttggcaatagagctgccaattactataactaatatttatgagacatgaagataaacctcaggacaagaatcattcagtcaatacaaaaatggttgaaaataatttttagctactttgggatgcttgatatgactttatctactggttagtaagattactgtttattatgtgagtgaacagtaaagaataaagacacagtggtaaaggagaaaaggccttgaacctcaatgagtggcaaagtatcaatttatttcaactgtgcaaatctcttaaagtagactttttcatgaaaactacagagtcccaagatttggtggaaagaaaattggcttctgggagatggacatgggggtggtgagcggaaacctgccacaatccctagtcaacactgcctgagaagcaccatttggcctccctgggtagrgttgatttatcctcccactggattcccttattttttatcatccacataccagcctttctcactgggttgtaacccccttgaaaactaaggctgtatcttatttagaacagatgagcccttaattaaaatgtgttgaattgaattaatctcagttccatcacactga

SEQ ID NO: 780299 - DNA, 457 bp, Homo sapiens
ataaagaatggaaacttgttctctccccttttagcaaagaacttccctagagacttatacagttctaacactccagtttttttcaatctatttttcagaactgttaactgatatgtatatatgtataaaagacaaaacatcaacactttttcactgctaaaatacttcctcctcttctctcctgcttcctctggtgactttctcaccatccacaaaacaaaactcttatctttctcctgtgcaggctttcaagcaataaaacaaaatcaggggccgggcgcggtggttcacgcctgtaatctcagcactttgggaggcygaggcgggcggatcacggggtcaggagatagagaccatcctggctaacatgggaaccccctctcttctaaaaaaaaaaaaaaattccccggttgggggggggccccttttatcccccgttcccggggggcttaggccg

SEQ ID NO: 780300 - DNA, 514 bp, Homo sapiens
catgtttctgagtcacatcctgaatatggagacagctagagccaacttgggacatgatgaagtagacaggcttcaggtccaagattccaggtcttgataagtgtgactttggggacttagatctaaggacttaagacagatggctggctattaatccatagctgtcataaccaaggaaagactggcactggcagcccagtggcattgcaggacacagtgacaaagactccacataccacctttgcacttattggtgccatgattataactggcttgaatccattgtctttttccaatttcaagtcttccagtagactgcataaatccagtcccattatctgtyaaacactgatacagcccagtatcttccatgataaccccactgactttcagtcaatttcctgcagttagatgtcatggggaaggatgaataggctgtgcaatataaaaccaagtatggttggcagctgggtttccatgaatatgacaggtaaaatgtgctgtggcacccaga

SEQ ID NO: 780301 - DNA, 597 bp, Homo sapiens
tatacaccaagaatatcctaaagtctcctccaaaagactcctagacttgataagttacctcagaaaagtttcaagatacaaaatcaatgtacaaaaatcagtagcatttctatacaccaataatgttcaagctgagaaccaaatcaagaactcaataccatttacaatagccacaaaaaattgaaatacctaggaatatatttaatcaaggaggtaaaagatctytacaaggagatctttaaaacattgctgaaagaaattgtattatataaaatggcttagtagaaaaaaattttttagtaaataaataaaaagaaattgtagataacacaaaaaatggaaaaacatttcaaatttcatgcatatgaattggaagaatcaatgtcaataaaatgaccatatggcacagagcaatctacagctttaatgcaattcttatcaaattacctgtgtcattttttaccgaactggatccaaacaatggggaaatgatatcccattcaataaatagtgccatgaattttggctagccatatgcagaagaatgaaattggacccctacctcttaccatatacaaaaattaactcaaggtgaat

SEQ ID NO: 780302 - DNA, 577 bp, Homo sapiens
tgtttggccgttttcagacagtgtaattattgtgatattcttcaatactgttgcataaattagtagagcatttccttttattgctgagtagtattcatggatatatcacagtttgtttatcccatcacctgttgatgttcccactttttggctattacaaataaagcttttgtgaatattcaygtacaggtctttgtatggacgtatacttttgtttctcttaggcaaatacctagcaaagcagtggaatggctgaatcatataataggtctacatttaatcttttaagaaactgcccaacttttccaaagaggttggaccattttatattctcatgagcattgtatgagagttccaattcctctgcgtttttgtgacagttggcacagccagtctttttcatttaagcattctaacagttatgcagtggtatgccattgtggtttcattttgcattgccttgatgactaatgatgtcgagcatcttttcatgtgcttatttgctatccatatctcttctttggagaagtttctgttaaaatatttccccatctttaagttggattgttttcttttt

SEQ ID NO: 780303 - DNA, 631 bp, Homo sapiens
ttcatgaggagagccctgggttcctggctcaggtttacttttggccttaggataggattcccttattagagataaatactgctgttctcttctagctcattcattcatttagcagtcaattgctcagtgccaggtgctaggaacagaggctcaatctctaccctcagaaaactcagtgtgacgagagagagcctgacagataaaatgaactatgaccctgtaagagggctcaggatcgtgaatcctgcaggcagagaaacatgagccatratctgtccctgcattttctagctgtggaatcttgggtcagctccttaactggtctgagctttggcttcagggtagtaaagggaggggtattaaaggtcctggttaaatgaaatcatcagtgtgtgtaaaacagcattggttctagctcatacatgataaccactcattaagtggtaattatgtttttattataagggctatgctgtaattcagacatgggcccaaaactacaggaaagataaattgtttttgctaaagtattgccaagaaacttcacagtttcttgggaggtgggccttgagcatgcaaagaacttcttcaggtaggcaaagaagagaggacactcttggcagaaagagtt

SEQ ID NO: 780304 - DNA, 679 bp, Homo sapiens
attcatcctatacttggaatcagttggatccttctggggttttcttttaggctttgttagggcaggtccagagcagcccttggcagagggctaagttggcctcactactaaagagtgctcttctgaggaccctccctgatctgatgttctgtgtattaggaggtctttctgctcggactggtrggaacacagagtatttccacccttctgtgaatttctgagattgctctgcttacttctctctgtggttcattccccagccttgggtcgttttctcacaagcatgtgcagatcagtactcagccagagataagggaagccctctacaggcctccgaacgacatttgtgcgttatctccctcccctccctccatccctccttctctttctcagtctcttgctctctcactctctagctcttccttctggaaaacctttccagggaataatcagggcacttgcagggttcactttgtttgttctctttcctcaggatcattgccttgcaccaccttttgtccaatgtctgaactgtcgtttcatctatttcaccggtttttaaatgttaaggcagaaatgtaaatctaggccctgttactccattgtgactgaaggcagaagtctctccttagttttaggctcaccattttaagtgcttactctacattcccaactggat

SEQ ID NO: 780305 - DNA, 614 bp, Homo sapiens
ttcatcagaaaagataaatgaccaataagcacatgaaaagatgttcaacaccattagttgttagaaataggtaaaaaacacaataaataccccttaacacccaaccaggctataatcaaaaagacagaaaatgacaaatgttggaaaggacgtggagaaactgaaaccctcatatactgctcatgggaatgtaaatagtgcagctacttcagaaaaaagtttagaagttcctcaacatgttaaacatggagttactrtatgtcccagtaattctactgttaggtatataaccaagagaaatgaaacacctaccctaacacataaacactatgttcatagcagcactattcacaatggccagagtggaaaatccaaatgtctaccaactaatgagtaaacaaagtatctatacaatgaaatgtaatttggcaataaaaagggatgaagtactgattcacattacaacataacatgaatgactcttgaaaacactatgctaagtaaaagaaggcagtcacaaaagatcatacattacaattctgtttatataaaatgtccagaattggcaaaaaagaattgggagagaaagtggactggtgtttgcctagggctag

SEQ ID NO: 780306 - DNA, 614 bp, Homo sapiens
ttcatcagaaaagataaatgaccaataagcacatgaaaagatgttcaacaccattagttgttagaaataggtaaaaaacacaataaataccccttaacacccaaccaggctataatcaaaaagacagaaaatgacaaatgttggaaaggacgtggagaaactgaaaccctcatatactgctcatgggaatgtaaatagtgcagctacttcagaaaaaagtttagaagttcctcaacatgttaaacatggagttactgtatgtcccagtaattctactgttaggtatataaccaagagaaatgaaacaccyaccctaacacataaacactatgttcatagcagcactattcacaatggccagagtggaaaatccaaatgtctaccaactaatgagtaaacaaagtatctatacaatgaaatgtaatttggcaataaaaagggatgaagtactgattcacattacaacataacatgaatgactcttgaaaacactatgctaagtaaaagaaggcagtcacaaaagatcatacattacaattctgtttatataaaatgtccagaattggcaaaaaagaattgggagagaaagtggactggtgtttgcctagggctag

SEQ ID NO: 780307 - DNA, 612 bp, Homo sapiens
tgaaaacacaaactgaaaagaaactgccagagagataggaagagaacacaaaaagagtggtattgtagaatgtaggtgtcttagtctattttgtgctgctgtaacagaataccacagactaggttatttagaaagaaaagagatttattttgctcactattgtagaggctgggaagtccragagtatagtgctagcacctggtgagggtcatcccaaagaggatggacggaaggcagaagcaagtgcatgaggcagagagaggaaattaggctgaactcattgttttatcagaaagccagtcccaagataactaactcactcctacaataatggcattaatccattcgtgaggttctggaagctgggaagcccaagatcaaggcaccagcagtttcagtgtctaacgagggcctgcttcctcatagacagccaccttctcactccactcttacatggcagaaggagtgaagggtgaagcctaaccatctcttaaaggtcccacctcttaatactgttacttttttatgtgtaagagatctgaatatattagtatgctgaggaaatagacccaaaggaaggaaagagattgaaggtagaaaacagggagaatt

SEQ ID NO: 780308 - DNA, 601 bp, Homo sapiens
tgctcgttaaaagtctattctactctgttggcatgtgcaaataatgaaaaccatagaaaaatgtccgtgttataacctgaaaggggccaactatcatgaagtaaaacagagggaatactttaaacatgcagcaccaattgagctggggttataatttcgttctttgtaggctactggcagcatgagacttcttggcagaatttctcacttccaatatagaatattrttattatcatcagtatttgttatgcaggcaggagctctgatggaaaaatcttagtatcatgaaatttcatcaaaattctccatttactctctgcttccccaattcagtttcttggtactagttacgtagttgctttggaaacaggatgtaggctcagctcacttaaggaatgatgagctttatgattaaagctcacagaaatggtgccaggaaaaattctgctccacagacaaaacagccaacatttagctggattagcagcagaacttcctgctgtgaagagtaggattggcccttagcatgctgtgtagcttggcacccagaatgattcccaggacaaaaggaaaatctataggtagatatatacagatatta

SEQ ID NO: 780309 - DNA, 601 bp, Homo sapiens
tgctcgttaaaagtctattctactctgttggcatgtgcaaataatgaaaaccatagaaaaatgtccgtgttataacctgaaaggggccaactatcatgaagtaaaacagagggaatactttaaacatgcagcaccaattgagctggggttataatttcgttctttgtaggctactggcagcatgagacttcttggcagaatttctcacttccaatatagaatattattattatcatcagtatttgttatgcaggcaggagctctgatggaaaaatcttagtatcatgaaatttcatcaaaattctccatttactctctgcttccccaattcagtttcttggtactagttacrtagttgctttggaaacaggatgtaggctcagctcacttaaggaatgatgagctttatgattaaagctcacagaaatggtgccaggaaaaattctgctccacagacaaaacagccaacatttagctggattagcagcagaacttcctgctgtgaagagtaggattggcccttagcatgctgtgtagcttggcacccagaatgattcccaggacaaaaggaaaatctataggtagatatatacagatatta

SEQ ID NO: 780310 - DNA, 658 bp, Homo sapiens
acaaacaaacaaacaaacagaatcttgacctaaatttcattcaaaatggatcagttagatataaaatgcaaaactcttaacctttacaaaaaatacaggagaaaatctttatctctagggctaggcaaagaatccttagacttgacaccaaaagcacaatcaataggagaaaaatggacatactggacttcataaaaattttaaaatttttctatgcaaaagaccctgtttaagagaatgaaaaggcaagctacagastgggaaaatatatttgcaagccatatatatgaaaagtaattagcatctataatatataaagaacaccctaagatccaaaattcataaaacaaacaattcaaatagaaatggagcaaaatacataaagacacgtttcacatacggacggcaaataagcacaaaaagatgtacatcatcattagccaacagggaaatgtaaattaaaaccataatgatatatcactacatatgtgtaagaatgagtaacataaaaaatagtgaccataccaaatgcaggtgaggatacagataaacctaattttggttgtgcttaggttgtatccattgactactgagtatgtagcacaaggaaatttgcatagtttcattcattcaacaaatatgatattgaatcaactcc

SEQ ID NO: 780311 - DNA, 658 bp, Homo sapiens
acaaacaaacaaacaaacagaatcttgacctaaatttcattcaaaatggatcagttagatataaaatgcaaaactcttaacctttacaaaaaatacaggagaaaatctttatctctagggctaggcaaagaatccttagacttgacaccaaaagcacaatcaataggagaaaaatggacatactggacttcataaaaattttaaaatttttctatgcaaaagaccctgtttaagagaatgaaaaggcaagctacagagtgggaaaatatatttgcaagccatatatatgaaaagtaattagcatctataatatataaagaacaccctaagatccaaaattcataaaacaaacaattcaaatagaaatggagcaaaatacataaagacacgtttcacatayggacggcaaataagcacaaaaagatgtacatcatcattagccaacagggaaatgtaaattaaaaccataatgatatatcactacatatgtgtaagaatgagtaacataaaaaatagtgaccataccaaatgcaggtgaggatacagataaacctaattttggttgtgcttaggttgtatccattgactactgagtatgtagcacaaggaaatttgcatagtttcattcattcaacaaatatgatattgaatcaactcc

SEQ ID NO: 780312 - DNA, 602 bp, Homo sapiens
ttatcttgactggtgatggttttacaggtgggccaaaactaatcaaactttacacttcatctatatgaccagctatcatatgtcaattatacctcaataaagctgtttaaaaacatttagggtatatctactggaaagtaaaactttttaattatagactctatcatcacgtgcatagaaaaatccaaaggattctacaaacaagctactagaaccactgactgcatcaagatgcaggtacaaagttaatattcaaaatcaactatatttctatacaagagcaacaaaaaatggaaaaataaaaaattttaaaataataccatttataataaaagartactggggaagaccatacattgaaaaatacaaaacattgctgagactaattaaaaataatcaacaaaatggagatctataccatgatcatggattagaaaattcagtatcatagagatgtcaattcttcccaaatgcatgtacaagtccaacataatcccaaccaaaatcccagcaggtttttttttgagaaattaataagctgaccctaacatttagatagaaatgcaattttaaaaaggaaaaacaaagttggagaactatct

SEQ ID NO: 780313 - DNA, 627 bp, Homo sapiens
tttgagaggctgagttgggtggatcacttgaggtcaggagttcgagatgagcctggccaacatggtgaaccccatctctacaaaaaaaaaaaaaaaaaaaaaatgagtcaggcacggtgcctgtaatcccagctacttaggagactgaggcaggagaatcacttgaacccgggaggcagagtttgcagtgagccaagatcgcgccactgcactccagccagatcaacagtgagaagctgcagaaaaaaaaaaaaaaaaagaatttttgtcatctgccaaacttatttgtgagaaaacactaaaagcagaaagaatgctagttatattcaaggtcactaaaagcgaacactggagaacaatttggaatgactcagcaktaggaatttaaaaattcattcatttcttcattcaacaggcatttattgcccaggaaacaaaaacaggtcttacaacattgtctaagaaaagtaactggcaccaagattaaatgcttaatatttatgtgacaattataatgctatgccctggattaatgtcaacttacagaaatactgcccaaataggaattccagagttcaatttacagatgaggaaactgaggccagaaataatagacaacttcctcga

SEQ ID NO: 780314 - DNA, 602 bp, Homo sapiens
taaaggaaggagctttacctaattctcaccggtctctaggattaacttagtaagagtactttttagggtgcagctcatgtgttctacctgtccagagctctggggtcgataggcacaatggagtttccattgaatgtttaatgycttgctaaccaactgagctatggacgaggtgaaggctggtccattatcagaccctatggcaacaggcagcccaggtcgagggatgatttcattgagtaaaagcctaactgccgtggtggcagtttcgtttttggtggcaaatgcctcagtccatcctgaaaaggtgtctactagcactaggaggtatttatactctgcctgctgtggtttcatttctgtaaagtcaacttcccacctttctcctggcaagccttcctggaggcggtggcctgggctgggcttgggaccttgtttggcatttacctgaccacaagccatacactggagagctagctgcttggttagttaagtcctgaaggtgggggatcttgaaatggctccttagaacctgggccagttttactcctcccaaatgggtggtagaatgcagacgactattaaagttttcctgagggttt

SEQ ID NO: 780315 - DNA, 605 bp, Homo sapiens
tctagtgcttctccaaactgaccacagatacatgcatctaaacatcattaaaagtgatgtttcaaaatgagatgcaacctgtcatcaacaggccatggccctggcaacttgggtgcctcattctgagtacacttcagagctcgtgagtgatgtgctttatcyactgacttacggggccctaggatgagatacatagagttaatgtaagtgattttttataatcagttggtattgggtagccagtaaaaactaaaaacttgcaactttttcctcctagtcagcacatagatgcaatttgccaagtgctctctcctatggactttataactttgtaaacactcatatcatgctccattgctagacggccctctccctaacatagttagcataaccaagaaaaacatattgggcctactagtgagcttaggattttcccagcgagaaaaggagtcactttttgaaaataaaagagtgacaatgaggagtcacaggggacatggcttattgactttctgatgaaggtggctatgttgatggcaaattccacacagtgggaaaaattcagagcttttgcaaatagggatccacaaagctaattacatgct

SEQ ID NO: 780316 - DNA, 614 bp, Homo sapiens
tgtcttataaatacgtattaattatagcttaataactttattttgtgtaggaaacttaaatatgagctaaatgggctccagtgactatttcactcatttcctacttttagactcataagaatgggtgccattatgacattctttatagttccggtgtgctgagccttatttytcttaatttttataattcctatttaataagtttcttccttatatttctgtgatattcttattatttggtggaagatgtgctctcctgaggagactgacttgagaatcaggaaatgtaggctccctgacacccccatacaccctctgtgcctctctacttacagagcaattcataacgttagaattttttaaaatttggataaactttttaaaagattctcatcactaagacaagttttagaaatagtattcaaattgatcataaatcttaatttgaaaatattatagtgttctccctttcccctaaggttagagcaggattcaggaataaacatttttcatgactttttaaaacattttatataaggagaattttaaacatacacaaaactagaaaaaatagtatacacactcctcttgtacacatcacccagcctcaacaa

SEQ ID NO: 780317 - DNA, 614 bp, Homo sapiens
tgtcttataaatacgtattaattatagcttaataactttattttgtgtaggaaacttaaatatgagctaaatgggctccagtgactatttcactcatttcctacttttagactcataagaatgggtgccattatgacattctttatagttccggtgtgctgagccttatttctyttaatttttataattcctatttaataagtttcttccttatatttctgtgatattcttattatttggtggaagatgtgctctcctgaggagactgacttgagaatcaggaaatgtaggctccctgacacccccatacaccctctgtgcctctctacttacagagcaattcataacgttagaattttttaaaatttggataaactttttaaaagattctcatcactaagacaagttttagaaatagtattcaaattgatcataaatcttaatttgaaaatattatagtgttctccctttcccctaaggttagagcaggattcaggaataaacatttttcatgactttttaaaacattttatataaggagaattttaaacatacacaaaactagaaaaaatagtatacacactcctcttgtacacatcacccagcctcaacaa

SEQ ID NO: 780318 - DNA, 616 bp, Homo sapiens
aaccttgatcttaacccactctgaaacacttacagcttccagggaatggtaagccccgtagttgaagttattactgctccgttcttgcccttcattgtgttgcatttcatcatcttcattgtctaaaagggcctgaaaacacacagcaatgttgtgaagtgatccattgcagacgcaggtttatgttttttctgccatatctttgcatatgggtcagccaagatggcrgccctttcagcatatcaagcagcacaaatgtcaaggtttaaaagggggttagatttctttcatatctttataaaattttatttcttggctgggcagggtggctcatgtctgtaatcccagcactttgggaggctgaggcgggcggatcacgaggtcaggagatcgagaccatcctggccaacatggtgagaccctgtctctactaaaaatacaaaaatttgctgggcgtggtggtgcgtgcctgtagtcccagctacttgggaggctgaggcaggagaatcgcttgaaccagggagtcagaggttgcagtgagccgagattgcaccattatactctagcctggcgaaagagagagactccatctcaaaaaaaaaaaaaaaaaaaaatt

SEQ ID NO: 780319 - DNA, 616 bp, Homo sapiens
aaccttgatcttaacccactctgaaacacttacagcttccagggaatggtaagccccgtagttgaagttattactgctccgttcttgcccttcattgtgttgcatttcatcatcttcattgtctaaaagggcctgaaaacacacagcaatgttgtgaagtgatccattgcagacgcaggtttatgttttttctgccatatctttgcatatgggtcagccaagatggcggccctttcagcatatcaagcagcacaaatgtcaaggtttaaaaggsggttagatttctttcatatctttataaaattttatttcttggctgggcagggtggctcatgtctgtaatcccagcactttgggaggctgaggcgggcggatcacgaggtcaggagatcgagaccatcctggccaacatggtgagaccctgtctctactaaaaatacaaaaatttgctgggcgtggtggtgcgtgcctgtagtcccagctacttgggaggctgaggcaggagaatcgcttgaaccagggagtcagaggttgcagtgagccgagattgcaccattatactctagcctggcgaaagagagagactccatctcaaaaaaaaaaaaaaaaaaaaatt

SEQ ID NO: 780320 - DNA, 621 bp, Homo sapiens
ctcagcactttttgcttcctgccccaggtcagtatgcagctctgggcagaacacctgcctcactccacccaagagatggctgtatggttgtagtgggtgagatatttcctgggcagcttcccatctggaaagggctttgaggagctgtgctacagtaggtgtttggttcagaagttgttctttttttaaaaaaaaatttttttttttttgaaacagagtcttgctctgtcactaggctggagtgcaatggggcgatcttggctcactgcaacctccacctcccgggttcaagcagttctcctgcctcagccccctgagtagccgggattacaggtgcatgccatcatgcctggctaatttttgtatttttagtagagatggggtttcaccatgttggccgggctggtcttgaactcctaacctcaggtgattcaccyaccttggcctccctaagtgctgagattataggaatgagccaccacacctggcccagaagttagttattctttgaattctttctcagagaggcataggggggcaaaacaaaaaccaaaaaacaaaacaaaacaaaaaaacccacatagcttgggtacagagccctgggtttgagttatagcactg

SEQ ID NO: 780321 - DNA, 583 bp, Homo sapiens
agcatttttttttttttttttggttaatataatgttttcaaggttcatccatggtgtagcatgtgtcactgcttcatcgtaagagtgtagcattttagggctagcaatggactttcaagttcatgtattcaataaatactcatgaagcaactgcactgtgccaggcctcgtgccaggtgctatacctggttccattgttgcctttggtttttcctttcctggtgtgctgctttatgaagacttgtggggcagggcatggtgactcaggcccrtgatctcagcactttggaaggctgaggtgggaggatcaggagtttgagatcagcctgagcaacacagtgagaccccgtctgtacaaaaacaaaacaaagcacccgtcatggtggcaaacatctttagtctcagctgcttgggaggctaagttgggaggatcactcgagcccaagagtttgagacttcagtgagctatggtcgcaccactgtactccagcctggtcgacagagtgaaactctgtctcaaaaaaaacaaacacacaaatggtggggaccaagccaatgacattcctttttcctggttgcccta

SEQ ID NO: 780322 - DNA, 646 bp, Homo sapiens
agtccaaaacctacagaccatctccatttgaataccctacaaggagctcagcctcaatatgtccacagctgaactcattatctttgcaacctcacccctctttcaccttcctggacttctccctcagtgagtggcaccaatgactttcagtgaggacctctccccatccaataaatgacaaagcttcttggctttatctcctaaatctcttccatcgtcactggacctgctgtagtttgggccattgtctctcacctgaactcctcctcctcttcctatgggatgtctctactgcagtccctcatcactccatycacactgctgctatgttttagctaaacacaatgcctcaattccctcaccgtcctgctgaaaaccaccccgatggcttttagaatcctctggattaaacctaaactccttaccacggcacacaaaaccctgaacttccccaactcccttttcttcctctttcatttcagcgatctcaacctacttgtagctcccagaacccatcacgcaattttatacttctatgcctttgcatatgctgttggctatgagaatgccccatcctttttctccttctctagctacctggcaaccagtctttacaaccctaccctcctcttacatgaagtttttc

SEQ ID NO: 780323 - DNA, 646 bp, Homo sapiens
agtccaaaacctacagaccatctccatttgaataccctacaaggagctcagcctcaatatgtccacagctgaactcattatctttgcaacctcacccctctttcaccttcctggacttctccctcagtgagtggcaccaatgactttcagtgaggacctctccccatccaataaatgacaaagcttcttggctttatctcctaaatctcttccatcgtcactggacctgctgtagtttgggccattgtctctcacctgaactcctcctcctcttcctatgggatgtctctactgcagtccctcatcactccatccacaytgctgctatgttttagctaaacacaatgcctcaattccctcaccgtcctgctgaaaaccaccccgatggcttttagaatcctctggattaaacctaaactccttaccacggcacacaaaaccctgaacttccccaactcccttttcttcctctttcatttcagcgatctcaacctacttgtagctcccagaacccatcacgcaattttatacttctatgcctttgcatatgctgttggctatgagaatgccccatcctttttctccttctctagctacctggcaaccagtctttacaaccctaccctcctcttacatgaagtttttc

SEQ ID NO: 780324 - DNA, 549 bp, Homo sapiens
aatagtcaagccagtggggtgtttgttttatagattttatcatataatttattttatttttatttatttattttgggacagactcttgctctgttgtccaggctaaagtgcagtagtttgatctcagctcattgcaacctccaccccctgcgttcaagcgattctcctgtctcagcctcccgagtagttrggattacaggcacgcactaccacgcctggctaatttttctgtttttaggagtgacagggttacaacatgttggccaggctggtctggaactcctgacttcaagtaatccacctgccttggcctcccaaagtgtcagaatattttatttttttatttttgagatagggtctcactttgtcaccgaggctagagtggagtgggccgatcatggcttactgcagcctcgacctctggggctcaggtgatcctcctgcctcagccaccccagtagctgggagtataggtatatgcaagccatgcctggctactttttgtattttttgtagagatggggtttccctggggttttgcccaagctg

SEQ ID NO: 780325 - DNA, 578 bp, Homo sapiens
ttggtctttttaatttatcagtttcagatattgttatggactgaatgcttatgtcccctcaaaattcaaatgttgaaatcctaactcacaatttgacagtattaagaggtgggacctttgggagataatgaggtcatgagggtgaaactcatgaatgggattagtgctcttacaggagacacaagataaatkatctctgctgtgagataaatgtgaggatacaacaagatggacacctgaaaaccaggaagtaggcactggatctttagggaccttgatcttgaacttcctagactccggaactgtaaaaatatgaatgtttatgtttaagccacctcgtctatggtaatctgttacagcagccagaactaagacagggagttaatgttaaaatatcccgctgtggctatagacttgttactttttctttgctgtcttgtcaggttttgttttgtgtatttagggactgcattagtaggtgtatagaagtttataatgaatgtattcttttggtaggttttctttattatgtagtatcattttattcttaatatttttgccttaagttctactttgtc

SEQ ID NO: 780326 - DNA, 606 bp, Homo sapiens
acaaaaaaaattaaaaaaccaatgcctcttcccctgcctctccaaaaaagaaagaagaaaaaaatattttgtgactagcaaaacatttttgaccagactagtatgaatcctttcactatgttgctcagtttttataccayataatttgctcctttccttaagttagcattgttacttaaaaaaaaaaaaaaaatccttctcctgtcttcattcatttgcccaatgaatggcttttatcaattgcattattgcagtagtcatcagcaaaattctacataggactaaactgccctgaatatgctatgcagattgcttgtgcctgtggtgacacctagaatgaataaagtgtatctttaattggacggttctgcatcttggtcccacctaccgtcagtagtatgctgcagttggcttgatccatttgccagagctaatgtaatttcttcccaaacctgaaaccagcaacgtcatggtggtagcttgaaatcatccatgacaggagtatttacaccacggaaattggcaaaagctaaaaatcaccccctcccccacaagagagccagttgttagtcattttccaacatacttcacactgttgttctctga

SEQ ID NO: 780327 - DNA, 515 bp, Homo sapiens
caataccttctggcttgtaaggtttctgctgagaagtctgctgttattcagataggttttcctttatagcttacctgatgcttttgtcttactgctcttagaattatttccttcatgttgagtttagatagcctgatgactatatgccttggtgaagatctttttgcaattaatttcccaggagttctttgagcttcttggatttggatatctagatctctagccacgccagaaaggttttcctcaattattccctgaaataagttttccagacttgttattttctcttctycctctggaacaccagttattcttaggtttggctgtttaacataatcccatatttcttgaagactttgttcatttctttttattcttttttctttatttttgtctgattgggttagtttaaaaaccttgtcttcaagctctgaaattctttcttctacttgttctagtctattgttaaagctttctgctgcattttgtattccctaagtgtgtctttcatttct

SEQ ID NO: 780328 - DNA, 515 bp, Homo sapiens
caataccttctggcttgtaaggtttctgctgagaagtctgctgttattcagataggttttcctttatagcttacctgatgcttttgtcttactgctcttagaattatttccttcatgttgagtttagatagcctgatgactatatgccttggtgaagatctttttgcaattaatttcccaggagttctttgagcttcttggatttggatatctagatctctagccacgccagaaaggttttcctcaattattccctgaaataagttttccagacttgttattttctcttcttcctctggaacaccagttattcttaggtttggctgtttaacataatcccatatttcttgaagactttgttcatttcttttkattcttttttctttatttttgtctgattgggttagtttaaaaaccttgtcttcaagctctgaaattctttcttctacttgttctagtctattgttaaagctttctgctgcattttgtattccctaagtgtgtctttcatttct

SEQ ID NO: 780329 - DNA, 624 bp, Homo sapiens
tttctaatttttttaatgtggtagtgtggaatttagctttgaaagagaattaaagttaatagaatattaacagtgggcttatagttgatagataacaatctgaatcataagccctctatattcatagctggattttgtacgtgtctggtatttattgccaccagctaaaaacattcccaaagccttaagcataagagaaaggagacagtgttattgttgttaatatcctatttaactttagctcttataaaaaagtgcaaaacaattaataaagtagaaaatctagaaaattagtaaataaacatagtgttatatctaaatagtaccatcggccaggcgcggtggctcacgcctgtaatcccagcactttgggaggccgaggtgggtggatcacgaggtcaggagatcaagaccaccctggctaacacagtgaaaccctgtctctactaaaaatatttttaaaaaattagccaggtgtgrtggcgggcccctgtagtcccagctactcgggaggctgaggcaggagaatggcctgaacccgggaggcggagcttgcggtgagccgagatcacgccactgcactccagcctgggcgacagagcgagattctgtctcaaaaaaaca

SEQ ID NO: 780330 - DNA, 616 bp, Homo sapiens
ctgtgtccatagcaacaaaataaacaaactttggcctgccatctcccaagggcaaacctcacaactcaggcccaagtcacaggaatctgaatggtggggtgaccttctcctctagtttaatttcattgcaatactgagaaacttcaactgttttgtctttagaagggaaattcatgtttgtgccaggccagcctttgtaaaagcctttrattggattcactagaagtctgtcttcccgcagtacatatactgtgaattttctccttcggcatttcaaccacttggaatggccactaaagtggcttttgatctaaagtaaactctgattctgtgttgatggggaaccatttctctctaacatggtggtttctttaagatgtttgacttgggccacatgagaataacagatctttgggcagtccaaggtaagctctttggaaaagatgttttatattattttttctactgattattaatactaaccagtaacttctctgaagcctctgccggctcactggtgactattgttagggcaagcctcaggtaaaatcatcaggtagaagtgcaggaaagggaaaaaagggggagaaaaaatccttacacacactcacacacc

SEQ ID NO: 780331 - DNA, 421 bp, Homo sapiens
ttattttaagttttctgagataggaaatattgaattggagattattcatattttaggaaagtagtgaatggagccaattaaaaataaaaatctttttttagcataaattcaagttagtgattagaaactcgagattttgcagcccattacctaatcatagactattactacttacaaaaaaattctcatgtgtaaatcrtcccttttcctttgtaaaagcttgatcaggtattttgcttatgtctcagactgtcatggggccaagaggggctggaagcagtggatgcttttatttcaattgattgctttttgaccctttcctaagtgacaggaggagtttcattctttccgcctcaattatcttctcactgattctttaaacaagtggaccatctcttggttaggtaaatctatagaaaat

SEQ ID NO: 780332 - DNA, 612 bp, Homo sapiens
atcaaatcaattaaagtagtggcatctggtgaacgggggaggaaatggatgttgaaaaagaaacaaaggcggcctcaaatgtattttaatgttttatatcttataaaatatatttcttatattttaaaatgttttgaagaaaataggaaaaataaaacaaaagaaatttaacatttaattaattaaaacacaaaatttacaattaatgtatccctatacagtatttcactcattatttgcttaacaaatgtcacatttaattagaatgttgaatttgccatatttactgaacaaaattatcatgaatttttagaagtattttctcaatcattatattccaagacatcarttgcttatgttttcagctctgtatattgtcatgattaatttgataaaatgatagcctaccttctaaatacaatgtattactagaaacaaattttttaaaaccgataaacttactgccttttttctaaatttaaagataggtttgttcatataaattgaaatgttcctcctaagtttttctctgtaaagtttgactctttgcctaaagataaaaaagcagtttctgaaaagtcatctctctaatcgggcatttatattaatcta

SEQ ID NO: 780333 - DNA, 638 bp, Homo sapiens
atttgcatccagaatacataaagcactctaacaatttgctaataaggaaacaaacaacccacttatatattgagaagactttggaaaatacattttcgataccaaactttggtgaggataagaagcaaatggaatgcaaaattgattttgccactttggaaaatattttcatagtttctgtttttttttttgagatggagtctccctctgtcaccaggctggagtgtgcaatggcgcaatctcggctcactgcaacctccacctcccaggttcaagctattctcctgcctcagcctccctagtagctaggactacaggtgtgcgccaccacactcagctaatttttgtacttttagtagagctggggtttcaccatgttggccagaatggtcttgatcttctgaccttgtgatccgcctkcttcggccgcccaaagtgctgggattacaggcgtgagccaccccgcccagccatagtttgttttcaatttaaatatacacttaactatatgacccagcagtaccattcctgttgttaccccaggaaaataaaaatgtatgcttctagaaaaacatgcgtgaatgtttctagcagctttgtttatagtcactaaaaactaggaacaacccagatgttct

SEQ ID NO: 780334 - DNA, 635 bp, Homo sapiens
aaccatcatagcgtagcctagtttacgttaaacatcttcagaacacttacattagcctacagttaggcaaaatcatctaacacaaagcctattttataataaagtgctgaatacctcatgtaatctattgactatcgtactgaaaatkaaattcagagtggttgtatgagtactggaagtatggtccctactgaatgcatatagcctttgcaccatcataaagtcaaaaaattgtaaggtgaactcataaactgaggactgtctgtaactgctttttggtaaaatatttagatagttttagggaacgcattgaatttattttccaccattttccttagtacactctttgctccagccaaattggctggctgtttgcttgaattctcttgcctgcagaggttcccttaaaattctcttctctttctgccattgatgtaagtcctttgccccctttggagtctaatataccttacattactttcctgaggctagtattgacagcctagatagaatgaagaattatagagtctataatttagttacacttgggttgtgctactttgtatttattattggtctttctagtcaccatttattcattcaataaatatttattgagtgactactttttgcca

SEQ ID NO: 780335 - DNA, 665 bp, Homo sapiens
taataggtagaattacattatttatgaaagaactcagaagaagcaataaaaacaaataactgaatcatgtgaaagcatagtacacaggtgataaaacagattataaaatatatagtggattcagtcaatcattgacagatttttggaaagatattgcacttgcgagcatgtgtgcgcacacacacacacacacacacacatttccttttcagagtagaaatattgcccttgtatttagtatccagttttatcccattgtttttgaagaccaggatgtgattcactctaaaaatagcttcccccagtataaagtgtctgaacaaaaatagtttgttgttgtactgttcaggaaagtctaaagatctttgtgtgtgtgtgtgtgtttgtgtgtgtgtgtgtgtgtgtatgtgtgtgtaacggttaacagcctcataacatttctaaataattactatataattgagcacgatatgctgaagaattgtttaatggcttcagatattaggaacataaaagaataagttaattmttatatacaatggttaagtatcaatcttttgtatttataattaaatgcatttttcttctttatgtaatttattttaattgtaataacctggtcatatttttaagtaaacacttaaaattttataattttctctttt

SEQ ID NO: 780336 - DNA, 553 bp, Homo sapiens
taaaaccataaaaaccctagaagaaaagcgaggcaataccattcaggacataggcatgggcaaagacttcatgactaaaacactaaaagcaatggcaacaaaagccaaaattgacaaacgggatctaattaaactaaagagcttctgcacagcaaaacaatcaccagagtgaacaggctacctacagaatgggagaaattttttgcaatctacccatctgacaaagggctaatatccagaatctacaaagaacttaaacaaatttacaagaaataaacaatcaacgccatcaaaaagtgggcaaatgatatgaacaggcacttctcaaaagaagacatttatgcagccaacaaacatatgaaaaaaagctaatcatgactggtcattagagaaatgcaaatcaaaaccrcaatgagataccatctcacaccagttagaatggtgatcattaaaatgtcaggaaacaacagatgctggagaggatgtggagaaataagaacacttttacaatgttggtgggagtgtaaattagttcaaccattgtggaagacag

SEQ ID NO: 780337 - DNA, 620 bp, Homo sapiens
tgctccccttcctccccctccttttttttccctcaagctgagtttgtcttggaaattctaacctagcaaattaattttattaaaataagctaggcaaatatctctggcaatcaaggagggcttcgttctactagaagagcagccaatttttttttttttttttttaaagagagaaaaggatagttacagaggaaatacagataaaacttgattattgagagcctgcctggtggtccagtttcctgggtcaacagtttggcccaaacattcaaggctggctgaagtataaaaagatacagaggcaatttgctcattcactggagagaatgcttcctagctttagaccaaagctctaagtgatattaacaaccccttactcaaaaacagaatacaaatayggtctgacaaatgtggacaataaggcactttatcagaaataacacatacacatacttggggatcttcatgtctatatgccttttcttctctagttttaagacctttcctactgaaatcttcctcaaccttaaaacccaactactacctcctccattccattttgtgaaatccacaaagtggaattcttttctaaaatgatgggaacttaacatctctatagt

SEQ ID NO: 780338 - DNA, 695 bp, Homo sapiens
tgggggaattttggccaggcctggatcctattccctcctctgtttaatggggagtgacaagatgtatatgaaccacatgaaatggatttcccaaagggaaagaggaattacattacagaataagaaggagggaaagccaggtaggccagaataataaatgtccactacataaacaataatattcagaaagacaggggtttgacacacaggaagcctttacatgtgtgaaaacaaacggattctttgtttgtgagggatgcccagaggtggtaaagataccagtggggaatggacacgatgctgttatgatatgcatttttttcccagaatatgtgtcagtaaaaaggagaaattgartaacaccaaactaaaagataaaagatgaattctctaccaccatttttttttgtcttctacgtgagcagcaggtaaaaaattgctcccctgaaatggatcattaatttaaaactagctaaatgtaagttgtcagagaaatgtcaagagttatggatctagtaaagttagtgaaaatataaagtgtgtaattgcttacaaatgaaaataaaacccaaatgttttctatcattgaaaatagtagccatttacctgtggccctattttaagttataattataaaaattcattattgtttacattatctttatttccattttttactttttgcaattgactat

SEQ ID NO: 780339 - DNA, 436 bp, Homo sapiens
tattagtcagaagctatctttggagaacagtaaggcgatagtgattaagtggggctggaagcggggtacctgggtgctgacaagattctttcttctgaaatgagtgttgatttcatagtatgaatactttgttatagctcattgggccaaatgttttctgtatgtctgccattctttaatgaaaaagggaaaaggaaagaatgtaataatacagtgttttacttaaagttgatgtcttaggttcattaccactcaacttgtgcagaaaccaaaattwgaaaataacattttttgagaaaccaggttaattttcaagcaatctgaaagttgttatgctctccaaaataatataagtagaccaaaagaaaaataaagtcaatccattaggcatttacaaatattttaaattatattacaccacatttaatgtataaaa

SEQ ID NO: 780340 - DNA, 618 bp, Homo sapiens; identical to SEQ ID NO: 762962

SEQ ID NO: 780341 - DNA, 648 bp, Homo sapiens
gtcccttgagaagccacgaaaaataataatacaaagaaacatagctaaaagtcaaatagaagaattaaaatataatgctaaaaatatatagttaacccagtagaaggcaagaaagaaagcaagaacagaggaactaaaaatgagataggacatatagaaaacaaagaaaaaatagtacatccaaagtcaagtaaattaatactaagtttaaatctaaatgaagtaaatactccatttaaaagtcagaggttgtcagacaagattaaagrcctgattataggttgttcacaagagacgtactttgttgtccaccagccacagtttaaatacaatacaaataattcacaagtaagaatagaaaaagatatatgatgcaaaccacgaataaaagaacatgtgttatattaataacagacaaaaaagccttaatacaagaagtgtccccaaagataaaagggatagtttataatgatcaaaggatcagttaattaggaaaatataacaatcacaatacgcatgtttttggtaaaaactttttttttaactgaaactacatgaagcaaacctggacagaactgaaagaaaaaaacccacaatcgtagttaaatattttatcatttccttctcaataactgttagaacgattag

SEQ ID NO: 780342 - DNA, 623 bp, Homo sapiens
gggacattggctaattggacatttctgtgggaagtaaccagtttctctaatgtgcagtcactttggtgggctaggatattgttctttgaccaggcctaccagatatagaggacctctgagaagctgggttagtttcaagtaaattcagagaagctctagaaaataagactgagactccttaaatcttccttccaatgatgtctacaaaaggtacttaaaaatgaaatcctcaagattcttccaaagaagccatcccrgtaaaaaccagtacctttaaattagttaggggtttccaagtactgtgaagcccagatttgtcacaacagggaggcacctgcatctatgttttgcataaaaatgttccataataaagtattgctaagatttttcctttccaattaagagagcagttatcaaacactgcctgggcctgggcttgaggctacacatttgcttctgagcttttgaggatgtgattggtgcttcgaactggaagatatttagtgactggttcaatactgtaatgattaatacaatagcataaaaagcaagtcaacagccttttgattctgtctatgttaatgactttttaagcacacattgaaaatttgatatattaaata

SEQ ID NO: 780343 - DNA, 450 bp, Homo sapiens
agggattttcagaggctatttataaggcagcatgttcccagaagtggagttgggaggtccttcagtcggaaattctgaacgtcttaattataaggggtcttagacaaagtgctcatctagcatggaatcctctgaccctgataagtccatgaaggagtcaggattatgggtctttgctcttctattttcctagctggtattgcttgttagcaattgacacccagtagcttagcatcaccattctaggttaragatttctagccagtgatttctatttcaatgtctgcatgacacctttgtctggcttgagagtggtggttctcaaagcgtgatccctgggccagcagcatcagcatcagccttacccaagtgaacttgttagaagtgcagattctcaggttccaccccagacacactgaatcagaaactctgagcatggggcagctcacc

SEQ ID NO: 780344 - DNA, 528 bp, Homo sapiens
gctatgcctatgctaagcgtaagcatatattttatttatatgcttatgttgagaatgtgatagctacagcaattattttggccacgaatcactttgcgggggatttctttaaacaatataaatttgtaacatgaaccccctggtttctggataggcaaaaatcacatcccaccctgaagaggcagaatgacaagcttctgtcttgtcattcacttgtcattgctatcctttgatagcatcccacaagtctcatttaggcagccaggctggttggtggaagatacaattttgttgggtrtggaaacaaatgatacagtatgaaaggaatttgagtttttgagtgtggaatctggtttatgagctcttttcaataatgttacatgaaaataaagtggaatagaattatagttagttgcacataataaccattacgtaaactttcaagatattaaaaagactttttaaaatgagacttaaagcaattaaataattgagtaggaaaaatgagtacctcatatatgactgaat

SEQ ID NO: 780345 - DNA, 488 bp, Homo sapiens
ttacatgtaaatcttaatccatcttgagttaatttttgtatagggtataaggaagaggtccagtttcagttttctgcatatggcttgccagttttcccaacaccatttattaaatagggaatcctttccccatttcttgtttttatcaggtttgtcaaagatcagatggttgtagatgtgtggtgttatttctgaggtgtctgttctgttctattggtctactttatcygttttggcaccagtaccatgctgttttggttactgtagccttatagtatagtttgaagtcaggcagcgtgacacctccagctttgttctttttgcttagcattgtcttggctatatgggctctttttggttccacatgaaatttaaagtagttttttctaattctgtgaagaaagtcaatggtagctggatgggataacattgaatctataaattactttgagcagtatggccaatttcatgatattgattcttcctat

SEQ ID NO: 780346 - DNA, 488 bp, Homo sapiens
ttacatgtaaatcttaatccatcttgagttaatttttgtatagggtataaggaagaggtccagtttcagttttctgcatatggcttgccagttttcccaacaccatttattaaatagggaatcctttccccatttcttgtttttatcaggtttgtcaaagatcagatggttgtagatgtgtggtgttatttctgaggtgtctgttctgttctattggtctactttatctgttytggcaccagtaccatgctgttttggttactgtagccttatagtatagtttgaagtcaggcagcgtgacacctccagctttgttctttttgcttagcattgtcttggctatatgggctctttttggttccacatgaaatttaaagtagttttttctaattctgtgaagaaagtcaatggtagctggatgggataacattgaatctataaattactttgagcagtatggccaatttcatgatattgattcttcctat

SEQ ID NO: 780347 - DNA, 625 bp, Homo sapiens
aagacaaataaatgcccttttctgaagaatctaaattttcttacttgggatctgattatgaaattccaattataaataaactcccaaccccttacccaaaaaaggaatgtctccaagtttagactgaggtaggataaatactcmacattctattccaaataccaagaacaaggtaggtattttccctgctgcttccttaccctgaaatttgacgttcattttaatgatgcttactttattacttgtcagaaaagtgaaatggcctgtcaattttatggagtttctcctacctttcaaatgattatattacattttgaaataagtgtatagctcccacctcctttttttaacctaaatggttcatgtgtgggtttggtacttggctacgagtggaatgaaatcataatttcaggagtccaaaagaatagatcaaaatcatgccaacactttcatggatggatatatgctgctaaatggatgtttacctagaaaagtcatcatctggcatgcaacagagtgaatgtttctaagcagctaactcatgtatactaaacaaatttggcttggctgctgtgagagctgccctttggaaattctcaacatacatttgtttgattgagccgtc

SEQ ID NO: 780348 - DNA, 627 bp, Homo sapiens
tacatgtccagtagctagatgtagtaacaggtttaatgggtttaacatgaaaagattttagttccaggcccttccacacttaatagttgcataccttatactgtgtcactaatccctcttagtctccatgtcattattggccaaatagagtcaatgatattaccacttctctacgtcagtgtattgttgtgaagatcaaataagatattgtgcataaaaaatcctcaacaacaaagcaagaggaatggcataaatgcagaatcaggtagtctctgtgttgcagagtcccactgtctctcctacagctgaaagttcaaagatatagcttgacttgtactttgcagaaggcacttaactctaaaagaagaaaataaactttgaaaaagattaagaatggcgtgagtttagagaagttagaagtagaatgttcattgatgcctyccctggtaagattctactttgaacagtaagtctattccattcatagaactagctaaaggtaatttgtttttcaataaatcctcatttccaatattctggatggcctctggcagaaaatgttatatagctataaaatgcaatctttcatcagggccattttaagacttttgcctgtcctagctactt

SEQ ID NO: 780349 - DNA, 591 bp, Homo sapiens
ccattgttagaattctgtttttcttgagaaatataaattgtaaaacattgtgtactctataaatgtgtccatgtaagcgggaggaaaccaaaaggcaccaaaataaatagaacaatattcctcccgtaattatctattaaagatcagtaaaatttcccctacttcctcaaagtgtcaaatcagtcatactttcagtttcatgaaagtgatctttaaaaaaggatagaggccgggtgtggtggctccagcctgtaaccctagcactttgggaggctgaggcaggtggattgcctgagctcaagcgttcragaccagcctgggcaacatgacgaaaccccatctctactaaaaatacaaaaaattagccgggcatagtggtgcatgcctgtagtcccagccattctggaggctgaggcacaagaattgcttgagcccgggagacagaggttgcagtgagccgagatcacactattgcactccagcctgggcaacagagtaagaccctgtctcaaaaaaaaaaaaaaaaaaaagcatagagacaagcccatctgtgccctcccactggcatagcttatcccatgacctctgaat

SEQ ID NO: 780350 - DNA, 463 bp, Homo sapiens
atcatcttatgaccatcctttagaataaaagctacaagttttattccaggacagacccttatgggaacgttctgatcgcatgcaacactaaggcattgcttcatattcttcttgacaactctgtgtgtttttttttaattctagcatttaatcggagtctatcctatacatgctactcaatactttttgtaaaattaaataatacagttagaatagaggtctctgtgtgtttttgaacttttctcctatgcttttgtacagaacwacagtgctgattttaattctccaactccctttttgtttggttgggttttttcatgctttttgttttatttatttgtttatttatttatttatttttgagacagggtctcactctgtcacccaggctggagcacaatggcaatatctcagcttgctgcaacctcaagttcctgggctcaagcaatcctcccacctcagc

SEQ ID NO: 780351 - DNA, 603 bp, Homo sapiens
ccaatgaatatgcctttgggaacattagccaaatatatacattttccaaaacaatgaaacttacaaatttatcagcagaccagatctaagggaaatactcaatttttaaaaaccaatggaaagtagtgccagattgaggcccagaaatggttgaaaatttcagcacagttgaatgcatgagcaatatgggttttataaaaccatattaataacgtcttacttatgtatatgtgtgtaaaggaagttaaaacagtaaaagaagatgagagataataaattatcatacagtatccttgtaagttaattgcattttctggaaagtgatgtggtaaacatgctaatttttgttagacttgtagaaggcattgtttctttgtgtatcttccagagtaactacaaaaagtagtgtgaataaaatttaaaaraagtaaaaatgatttaataaatacaaaaatgcataataataaataatttcttcacaaaatgtaaatgtgcctttatatcataaatacaagttgtccaaagagtacaattaaagggaattctcatactgagtaaaaataaaatccaaagatatgctgcttccatgacacaaacacaaag

SEQ ID NO: 780352 - DNA, 424 bp, Homo sapiens
aattttatctatttttgtgttagttatgtataacaaaaggtaagttagtgtgtgtgtgtatctgtctgtttgtgagtcattctcaaatgggcgcaatttctgcctgtcccctaggcatttgacagtatctggtgacttttggggttgtcctaatttgtgggtggtagttgctcctcagatctagtgggtggagaccagggatgctgctcaacrtcctacattgcacaggacagtacaccatgtcaaataatcatctggccctaaatgtcaatagtaatgagacaggagagttcactggccctccttgcagggcatgcaacaggggtgcagctctctctttgactgctgtgagctcaaacacctacgggagggggagcacacagacaagcaggtgcaggagctggggcaagcgctttgggctctg

SEQ ID NO: 780353 - DNA, 675 bp, Homo sapiens
agtactttgggaggccacgtcaggtggatccctggaggtcagaagttcgaaaccagcctggccaacatggtgaaacccatctctattaaaaatacaaaaaaattagttgggcgcggtggcacgcacctgtagtcccagctactcgagaggcttgaggcaggagaactggttgaacttgggagatagaggttgcagtgagccaagactgtgccgctgcactctagcctgggtgacagagcaagactccatctcaaaaaaaaaaaaaaaaagaaagaaagaaaagagttcatgtgagatgtgattgtttaaaagggcctggtaccttcccccatctcttgctttccctcttgccatgtaacatgctggttcccgtttaccttctgccatgattggaagcttcctggggcttgcccggaagccaagcagatgccagggccatgcttcctgtacagcctgctgaaccctgagccaaataaacctcttttcattacaaactaccyaggctcagatagtcctttatagcaatgcaaatggactaacacaccccatgatctccatccacaaaccactggaggaacccaacacagcaacggaaaagttctcagagcaccaatcaggaatatgcatattaatatgaacactataacaggaaattacaggaaaagcatagagcgt

SEQ ID NO: 780354 - DNA, 620 bp, Homo sapiens
attgcccctcacagccatttctctggcttctgcaattgacttccacgcccaccctgcccctgaaactgctctgactcaaggtcactcaatgacagcccaactgccaggtacaatgagagctctcagtgcttccctccaagaggaatttgcagccctgacatttgcactcctggaagcctcttgtctcccagcatccaggacaccacgatcccctggcttccctcctaccgtccagccccactttgtctgtgttcctcatcagtggatcttctgtggactgctcctaaaacccrcaggtgagcacagaacaggaaagagcgtagcctctcagccagccagacccgaggtttggtcccagaatcccagttaacagccgtgtaaccatcagcaaacgggtcaccctctcagagcccatttttctcttccgtgtaattggggttgtacatcagaagttatttagaagattaaatgagatcctgtgcttagtatgtttaataggatgcctgccccaaagcagggatcccggatcactgctgagggtccctgtcagacttgagctccaatccatcaatctgtcctgtgcaccagattaatatttcattgtctgcagaatcagatca

SEQ ID NO: 780355 - DNA, 658 bp, Homo sapiens
tgtttctcttggaaagtgctagaagtcacaaatcaaatggttttcacattatatatttatttagagacagagtcttactctgtcacccaggctggagtacagtggcttgattgtggctcactgcagcttcaacctctggggctcaagcaatcctcctttctcagcctcctgagtggctgggactataggcatgcactaccacatctggctaattttttgatttttttgtagagacaaggtctccctrtgttacccaggctggttcgtgaactcctgggctcaaacgatcctccagcctccacctcccaaagtgctggagtcataggcatgagcctggcctcataatacttctatcgctatgattcatccttcacttcttcctcctagtaacccactgacagctttaaaacagtgcttctccttccctctgctcatagaggtgagacatacatcctttcaggagtgtagctggaaatagactcctcccttccctacagatgggacagtaaagtcaatgttaaggtcattaatactaagatcagctgagaggttggttgaccagttttccctgatgagaaactctcattcagtgctgccaggttctgggcttttcctccagctctgcctcttctctcttgctgtcctcaggtttctctct

SEQ ID NO: 780356 - DNA, 623 bp, Homo sapiens
tcaaatcgagttggaaatgaaaatgccacctcccagtctccttcccctcaaccctccacccagccttgggcaccactcttagctgtttggaaaaaggcatgtgacctaggctcaatcaattagatgctcttgagtagacctttgattcttgagagagagagatgccaagttgctggaagagtcagagatattcttggccccccatagcagaggccagaggctagtggccagcagtacactggtgtgttgccagaagcagcacttgaaatggcagcaggaatagtgactgatcctcaacagcctgcttcaatggtgtgagctcagctggatcctcagctgtttactgtcccttgatttccaatctctttctaaatctgatctctagtcctctcaccaatttgtaagaaactcaatatccttccaacaaatwatttttctgcctatgttggacagaggttttctgttagttgcaactaagaacccagacttgtaccttgagtcatgaagtaaaacttgccagtctcattgggacaccgtctccagctttccaaatgacctctaattaccactttcttctatgttaattaagatactattaggttgcctatttcagtgtaaatgga

SEQ ID NO: 780357 - DNA, 520 bp, Homo sapiens
ttctctgcttcttttccagagaggtgtccatgaaaccacctttgagaagtaggatctgcacagttcagaggatttttaagctcaataacatctccattcttctcttttaattgcccatgatgttccatgtaatactggaccaactcagccaaagtggcaaacttctcccctccatacaggtcatagcaatcaccagtgttctgaatcttggtgtgggtgacagctccatttcttctaacagaaagtgtgacgtctccagggttacttttactaggccttgccgaaaaactgccatcaactcctcttgtcaacagtaggttttctgcctccacaccagtgatatttgggtgaaaccatttccrtgatgtcatgttcctcctgccctctggctccgcgatggacctgcttcttgctcagggtctgctgggctcagtcacatcgggctggcccaagggaggcctgctcaggactggccgtggggcagagccagctggccatgcacggaccccactccaggcct

SEQ ID NO: 780358 - DNA, 633 bp, Homo sapiens
ataagccataagtattatttttaaaagtatactactcatgctaattaactactagcatagaagtgaacattaatagtagaattaaactgcattctaaaaaagggctttttacaacaaatgtctgtactattctcctmaactcatctctttattttggtcagggaagagataaaaatgaagagtggggagagcatcctcgaacaaaatatatttgcacatctttttttttcttaactcttttaaaagaatggaaaaaaataaaaaataaaactaaaagaattactgaccaggaagtagctctatgtacagactcttgttgccagtcaaatgggagacgtggcaggtcacggtagacacattgtggacctcccagtggcatgtactcttaacagtcactgtgccattgctccagtattcttgcttagtggcacaatcgccctctgggatccaggagatatgcgcagctggcttccctgcaactgccttgcatactgcagttctattcctgttttgaaacagggtcacttcaggtgtaactgcagagaggaaagagggaaaaaaatgcttcggttttcacataaagcatatggaattcagagagacatttgtttccgtcacaaatctggtgatgtg

SEQ ID NO: 780359 - DNA, 645 bp, Homo sapiens
actatttgaatacgctttatttttctctcttgcctgattgctctggccagaacttccaatattatgttgaataagagtggtgagagagggcacccttgtcttgtgccagttaaggggaacgcttccaccttttgcccattcagtatgttattggctatgggtttgtcgtaaatggctcttattattttgaggtatgttccttcaatacctagtttattgagagtttttgacataaagagatgttgaattttattgaaggtcttttctgcatcttttgagataatcatgtggtttttgtctttagttctgtttaggtgatgaattacatttattgatttgcatatgttgaaccagcctcgcatcctgggaatgaagccaacgtccttttttcagtggtgcagtggagcgaattcagtggagcgaattcttaattygctctaagaattatcacaaagtcacaagactctcttttcaaataacaagacttccttaaagtcttgctatttcaagtgtgcttggcagatcatcagtagcagcaacagcatcacgtggaagcttgttagaaatgcagaacactaggcccccacccaatgactattctaaacttcttagccacgaaaacaagaaagagaaggataaaattga

SEQ ID NO: 780360 - DNA, 602 bp, Homo sapiens
taatgcatgagacaattcaagatccaaaaatgtaaaacctatatggacatcaagcactcccctactagaattattgttaaaagatgcacattacctaaagcatgattctccttgctagtttgcagcattaatgagttgtttggttgagcagcaccctccgcttctgaattttgaaaaagacatagggggtagagagagaaatatgcattaatagatctgactcctagttaaaatcatattttttcacattyttcagactatttttgtattgcagttgccaatgaatatctaaattatgacagccaagcaaaagtcttggcaaaatttgtcccagtataaacttttgactttctcttcctgactctggcatagtcctgctttaagcccagagtgcccatcacccccctcttgctttatattcaagtcttcttccaggcttttagtctatctctgagtgtggaagaaattattttactaggcttttcaagcaccaatgaggaggtaaaaaaagtttagtggggactattgattggctgctggtatggaataaaaggattttcctaagcattgttgaagtcacatcatagaatctatgatgggaa

SEQ ID NO: 780361 - DNA, 585 bp, Homo sapiens
acaaaccttatattttaattgaatttggggtgtaaataccacctacatgaaggaaacatattactaatttagaagtccacctcatcctgactcttcatggagttctctaccatctttccaaaagaaaccaccatcctgatatttaacaccaaagtgcagtctggtgttcarttggactggctttgaattttatgtagatgaaattgtatggtgtggtgtctttgtctttagtttcctctgttcaacattatgttggtgacattaatttttgatgtagagtgtagcaatagattactcattttcttggtttagagatttccttatatgaatagccacacttgattccacttttactggatatctgggtagtttccaatttttagcaattccatgtagagattctacgaagattattaatataattacgtgtgtctgtgtgcatgcatccgtgtgtgtggacatatgaatagacaccttttggtttatgctgggtgaaggtgtctattcagctttggtggatatcctcagataattttccaaaagtgttgtacgatcagcagtatttggaagatccatttgctctag

SEQ ID NO: 780362 - DNA, 610 bp, Homo sapiens
gttttttgtttttccagaaatccctctatttaatcctcattgatgaagatataattctagctgtcttccattgttgccatcttctaattctccttttttgttgttgttttgagacagagtcttgctctgttgcccaggccggagtgcaatggtgcaatstcagcttactgcaacctccacctcccaggttcaagccatcctcctgcctcagcctcctgagtagctgggagccatcacgcccagctagccatcttctaattttcattccttcaaaggtaatctgttttttctctctaggattttaaagatcttctttggtgttctatagtttcactatgatgtgtttcaatgtaaatttatttttattcatctggcttggagtggcaggattccagaatctttatatctttaatcagttctggaaattttcagcctttatcttctcaaatatgcctcaattctcttctttttctggaacccagattagattgttatagctctctgccttttttaaacttttttttatctcttgtccattgtggataatttcctcagatcgaccttctattcactaattttatcttcgggtgtgtctaatctattattaacc

SEQ ID NO: 780363 - DNA, 610 bp, Homo sapiens
gttttttgtttttccagaaatccctctatttaatcctcattgatgaagatataattctagctgtcttccattgttgccatcttctaattctccttttttgttgttgttttgagacagagtcttgctctgttgcccaggccggagtgcaatggtgcaatctcagcttactgcaacctccacctcccaggttcaagccatcctcctgcctcagcctcctgagtagctgggagccatcacgcccagctagccatcttctaattttcattccttcaaaggtaatctgttttttctctctaggattttaaagatcwtctttggtgttctatagtttcactatgatgtgtttcaatgtaaatttatttttattcatctggcttggagtggcaggattccagaatctttatatctttaatcagttctggaaattttcagcctttatcttctcaaatatgcctcaattctcttctttttctggaacccagattagattgttatagctctctgccttttttaaacttttttttatctcttgtccattgtggataatttcctcagatcgaccttctattcactaattttatcttcgggtgtgtctaatctattattaacc

SEQ ID NO: 780364 - DNA, 612 bp, Homo sapiens
cattctgttgttgtaagtgtcacttagtcctgtgtgaggacagatttgccctatgtgtaacagctacatttaagaaagttaagaaattgtccttagtttcacaatggaatatttcaaaaacaaaattctccaatcgaacaatgtatgcaaagattattatggttttttcttctccctgcaacaagcgttaaggatcattatgtttgttatgttgttaaagtcctggaacatagagataagaggtaagtgagcatcccctggtggagaaagggagtcttttyccagaatcagtgttttccctcgccttgtgtccattggcaatcactcaacacaaactggtggccattcggtacaatcaaacaagcaagcaaacaaaatcatcaatatgcttgtgcagctacacttgataatttatgtacagtaaaggaataaggaaggagaaagtgaagaatagagaaggggatactggaccaatcagacgtggtggaaccatattgcagttttccacatgagaatgtctgtaggaacagagttctggggtaaagccgtgagtgtgttctcagtagacactccagtctgcttctggaacacatcaactgaatctttgtcctc

SEQ ID NO: 780365 - DNA, 612 bp, Homo sapiens
cattctgttgttgtaagtgtcacttagtcctgtgtgaggacagatttgccctatgtgtaacagctacatttaagaaagttaagaaattgtccttagtttcacaatggaatatttcaaaaacaaaattctccaatcgaacaatgtatgcaaagattattatggttttttcttctccctgcaacaagcgttaaggatcattatgtttgttatgttgttaaagtcctggaacatagagataagaggtaagtgagcatcccctggtggagaaagggagtcttttcccagaatcagtgttttccctcgccttgtgtccattggcaatcactcaacacaaactggtggccattcggtacaatcaaacaagcaagcaaacaaaatcatcaatatgcttgtgcagctacacttgwtaatttatgtacagtaaaggaataaggaaggagaaagtgaagaatagagaaggggatactggaccaatcagacgtggtggaaccatattgcagttttccacatgagaatgtctgtaggaacagagttctggggtaaagccgtgagtgtgttctcagtagacactccagtctgcttctggaacacatcaactgaatctttgtcctc

SEQ ID NO: 780366 - DNA, 584 bp, Homo sapiens
agtaggcctgagaatctcaacattcccctcatcctcttgcccaaatgcccatgaatgtgcagaaggtgcgtgccacttctctgcccctccagcacctaaatctgtagctccaaatgttgaacccaggtcctggggttctccaggatgtgtgagagcagaattcctgmggggctgtctcctctagttttcttcacagcaacacccaagaatgcagagccaggttgattccacctggagtctgcacataaaggctggtctccacctgggatccacaagacagggccagactttggactgaggatgtatagaaaatccaggggacattttctgcattatgagagattgacatagaccttgtaaagccctactttttgtgtggggtcttttaagttttccagatcttgtccagtgagctgctgcagttctgtgagggccttctggtctaagcagaacatggtggcagaatctgtaagtgtaaagcagcaccttagcagagggagggcagggccacaactgtccagagccgtgagtgaagctacacctacctgtgagctgtgttactggagtagggtaatcttgtcctt

SEQ ID NO: 780367 - DNA, 613 bp, Homo sapiens
agtgaactgggtaggccacctaccctgcctgcccacatccctgcctcctggaatcctggaccctgagaaccaggcggatgtggtggggaacaggcaagtcttgtgcagaaagccaagatgccacccaaatccactctgcagtctaggtgggtgatattctgctctgcaccgcaccagtgcatgaggggatggaggatggagtctagasaagccaaatgtaaagatattgcccaagtattttgtgctttgtctgtgttacaatgctatgcccagcccagcatggtggctcacacctgtgatctcagcaccttgggaggccgaggcaggcagatcacctcaggtcaggagtttgagaccagcctggccaacgtggtgaaacctcatatctaccaaaaatacaaaaattagccggctgtggtggtggggacctgtaatcccagctactccggaggctgaggcaggagaatcacttgagcccaggaggtggaggttgcagtgagcggagatcatgccactgcactccagcctgggcaacagagtaagactccatcttaaaaaaaaataaaaataaataaatgctatgcccagcattttccatgtactgtcttattat

SEQ ID NO: 780368 - DNA, 572 bp, Homo sapiens
tcatttctgttcttcccagcaacaaatggggagtcttccccagggcctggaggaaccactctctaggtgaatctttttttttttttttttttttttttagatggaatcttgctctgtcacccaggctgcagtgcagtggagagatcttggctcattgcagcctccacctgccaggttcaagcaatactagatactcctttgcctcagcctcctggttagctgggattacaggcgcctgccaccatgcctggctaatttttgtatttttgtagagacagggtttcaccatactggccaggctggtctcgaactcctgacctcaagtgatccaccaacctcggcctcccaaagtactgggattaagggtgtaagccaccatgcccaaccaaggtgaatctttcatayggctgaagagttgatgccggtgtcagctgaaagcttagccagggctgtgcaccagagggccttggttcctctccacaggggtcttgcctcgggctgcttgggcttcctcacagcatggtggctatgtgccaagaatgagagaaccatgagaaagttgcacagcgtct

SEQ ID NO: 780369 - DNA, 652 bp, Homo sapiens
aaaaaattgatgtcaatatgttgaagggatctctacattcctatgttcactgcagcactattcacaatacccaagatatagaatcaacctaagtgtccatcagtggatgaaaggataaagaaaatgtactatatacacacaacrgaatactattaacccttaaaaaagaaagaaatcctgtcattttcaacaacatagacgaacttgaaagacactgtgttaagtgaaataagccaggcacagaaagacaaatactgcatgattttacttacatgtggaatctaaagaagttgaactcacagaaatagagagtaggacagtggttatcaggggctggggcgcaggaaaggtaggggataggagacactggtcaaagggtacaaagtttccaataggaagaataagttttgaacaagttaaactcctctgaaagctcagttcctcactgtagagcagggacacatcatcgaccttctaaggacgttgctgtgagagtaagagatgatgttcagcacaatacctaacgcgcagtcaggtctccttaagcttgaacctgcgtcgccatgacctctacatctcaggacagaaaggctcacagccagtgtctcagttcccagtgaaaagtggatcccagaccaggctgaacagcagg

SEQ ID NO: 780370 - DNA, 633 bp, Homo sapiens
ataccaattttataatgctttaaaacacacaaacatatgtacactgtttgcagatgtataaataaaggtgggggaatgataaacaccaattgcagaagagtagttacctcttgggtcaggggcagtggaggggaagctaaacagggtccaggcgcagcacacagaggcttcagctccactggtaaaattttattttcttggctgggtcatgggtgcatggatatttattttactattattatgttttttggtggtcaagacattccataataaatacaaaaaccaaggcctattcagagatgsagatttgaaatccggtcctcccactgaaaagctgagtacaggcgagtgacttaacttctctgaggctgtagttttgttcgtaagaggcagaaactcaaaccaactccagtgactctagaagaacttaaaaatcaaattgaaagaccacctgaaaggaagtctgttctctttcctccagggcttcatgatgtctcctgattctatttctgtgcgtgtatctgtcttattctccttgtcccgcaaacgaacttcccctgtttcctcgtccgctagtatatttggctgttcataccctctccagtctacagcatgaccttcctgcttcaagtt

SEQ ID NO: 780371 - DNA, 633 bp, Homo sapiens
ataccaattttataatgctttaaaacacacaaacatatgtacactgtttgcagatgtataaataaaggtgggggaatgataaacaccaattgcagaagagtagttacctcttgggtcaggggcagtggaggggaagctaaacagggtccaggcgcagcacacagaggcttcagctccactggtaaaattttattttcttggctgggtcatgggtgcatggatatttattttactattattatgttttttggtggtcaagacattccataataaatacaaaaaccaaggcctattcagagatgcagatttgaaatccggtcctcccactgaaaagctgagtacaggcgagtgacttaacttctctgaggctgtagttttgttcgtaagaggcagaaactcaaaccaacwccagtgactctagaagaacttaaaaatcaaattgaaagaccacctgaaaggaagtctgttctctttcctccagggcttcatgatgtctcctgattctatttctgtgcgtgtatctgtcttattctccttgtcccgcaaacgaacttcccctgtttcctcgtccgctagtatatttggctgttcataccctctccagtctacagcatgaccttcctgcttcaagtt

SEQ ID NO: 780372 - DNA, 623 bp, Homo sapiens
cagtcacttatgcattcatcttgcactcagcaaatctgcattttacatacaataaagtaaacatagagtagaggaagaagtcaaatatgcatttgaggtaagtggagctatgatttctattcttcctttccagcattattgtaacaacagataatacccattccatcctaagcatttctccaagcaccgaccaaagataatcatgcctatcatgtgtgttgagggagggaggttgatgattaaataatagaaaacattaaagtgcttatctattaatacatgctagctccttttgtgtttagccacctggctacagatcaaatgcatcatttccaggatcatttgtgaaggaratgtgtcacctggctggatcctcactctccaggggaaccttagcctggatacctatgtcacaacaacagctccttccagaagcaagcgatgccatacatcgatactcaccacccacattcttgaatctgaagatttccaggtggttaagctagtagtcatcaaggaagagcacccatttttctaatctttttatccaccatggtgcatttttttttctgtcagtggcctttagaacttctgctcaataaccctaggtaaactggaattac

SEQ ID NO: 780373 - DNA, 623 bp, Homo sapiens
cagtcacttatgcattcatcttgcactcagcaaatctgcattttacatacaataaagtaaacatagagtagaggaagaagtcaaatatgcatttgaggtaagtggagctatgatttctattcttcctttccagcattattgtaacaacagataatacccattccatcctaagcatttctccaagcaccgaccaaagataatcatgcctatcatgtgtgttgagggagggaggttgatgattaaataatagaaaacattaaagtgcttatctattaatacatgctagctccttttgtgtttagccacctggctacagatcaaatgcatcatttccaggatcatttgtgaaggagatgtgtcacctggctggatcctcactctccaggggaaccttagcctggatacctatgtcacaacaacagctccttccaraagcaagcgatgccatacatcgatactcaccacccacattcttgaatctgaagatttccaggtggttaagctagtagtcatcaaggaagagcacccatttttctaatctttttatccaccatggtgcatttttttttctgtcagtggcctttagaacttctgctcaataaccctaggtaaactggaattac

SEQ ID NO: 780374 - DNA, 618 bp, Homo sapiens
agcctgggcagcatggcgaaatcccatctctaccaaaacttagccgggcatggtggcacatgcctgtgatcccagctacgcaggaagctgaggcgggagaataaagttgagcctgggaggcagaggttgcagtgagctgagatcgcaccactgcactccagcctgggcagcacagggagactttgtctaaaacaaacaaacaaataaaaaaagaagaaactatcatgaaactagagacccagtctaggtgatgaggagggggaaataataacttgcaaatagctcacagacccaaactccrcatcctgtattggggggagacagagtcatggtgtggatttagaatcggatcctctttagtagctgtatgcagcttgtggctttggacaagttactaaacctccctgagcatagtttccttttatgtatagtggggcccaaaactaccaccctcaatggtcccatgtgagaataaaaagacacagaacaagaaaggggcttagtacaggcacagaatacagtttcaatgcagtctggctaaaaacacgcaaaattccatgattaaaaaaaatcttactacagactagaaatcttgcttgggtgttacagttgttatct

SEQ ID NO: 780375 - DNA, 618 bp, Homo sapiens
cctggcaagtggaggagctgggtttggatccaggtttgctggatctaaataaggcccatgtgcccagccacttaaccaaggatgtgggacttgagttgcaccttgggggatgggaagacttaggcagagaaggacatttgagatgagggaacatcccgagtgatgacagaggctttgggagagcagggaaccagggtactccccattcactgcagcctccactttctgggctcaggtgatcctcccacctcagcctcctgagtagctgggacaacaggtgtgtgccaccctgcccagttttgttttttttttttgtagagacagggtttcaccccagtctactttctataacccctcatgtatcttcaccaatctctctggcagagcaagatcaggtaacaccatgcttatcatggaatggcwtctgatgctggtccccccacaggacaggagcttggatgaacaagtgcccagcttgccccagagtggggagccatgggaaaaggaatacataggcattgaagacctactcagtgctggagaccataccagacactttcctatgcattaccttgccctcaactgccttgtaagttggcatggtgttcacattctacc

SEQ ID NO: 780376 - DNA, 643 bp, Homo sapiens
acccaacaatcccactgctaggtatatactcaaaagaaaggaaatcagtgtataaaagagatatctgcacttccatgtttattgcggtactattcacaatagccaagatttgtaagtaacctaagtgtccatcgacagacaaataaagatatggtacatatacataatggagtactattcagccacaaaaaagaatgagatcctttaatttgcactaacatggaygaaacaggaatattatgttgagtgaaataagccggacacagaatgacaaacttatgttctcactcattttggggagctaaaatttaaaacatttgaactcatggagatagtagcatggtggttaccagaggctaggaagggtaacagcaggtgagggagtgaagatgatttgtgggtacaaaaatatagttagatagaatgaataagatctagtatgtgataacattacagggtgactacagtcaacaataatttcctgtgcattttaaaataactgtaagagtataattggaatgtttgtaatgcaaaaatatgataaattcttaagagatgatggatgctccatttaccctgatgtgattattaaggactgtatgcctgaatcaaaatacctcatgtaccccataaatatatacac

SEQ ID NO: 780377 - DNA, 477 bp, Homo sapiens
actcaaacttctcaaccactgatgtcctctttcctgtttgtccttcgaggattttttggtttgtttttgtgttgttgttgttttgagacgagtctcgctctgtctcccaggctggagtgctgtggcgcaatcttggctcaccgtaatctctgcctcccaaattcaagccattctcctgcctctgcctccctagtagtgggattacaygcgtgcaccaccacggccagctaatttttgtatttttagcagaggcggggtttcgccatgttggccaggctaatctcgaactcctggccttaagagatccaccagcctcgccctcccaaagtgctgggattacaggtgtgagccactgtgccggcccttcgagtatttttgttgttgttgtttaccatcattttagagtggtttcaggaaggcaataaatgttcatggtcaatccatcatgtttaaatgacttttatgttaagaacaagc

SEQ ID NO: 780378 - DNA, 477 bp, Homo sapiens
actcaaacttctcaaccactgatgtcctctttcctgtttgtccttcgaggattttttggtttgtttttgtgttgttgttgttttgagacgagtctcgctctgtctcccaggctggagtgctgtggcgcaatcttggctcaccgtaatctctgcctcccaaattcaagccattctcctgcctctgcctccctagtagtgggattacatgcgtgcaccaccacggccagctaatttttgtatttttagcagaggcggggtttcgccatgttggccaggctaatctcgaactcctggccttaagagatccaccagcctcgscctcccaaagtgctgggattacaggtgtgagccactgtgccggcccttcgagtatttttgttgttgttgtttaccatcattttagagtggtttcaggaaggcaataaatgttcatggtcaatccatcatgtttaaatgacttttatgttaagaacaagc

SEQ ID NO: 780379 - DNA, 616 bp, Homo sapiens
gggctcaagcaattctcctgcctcatcctcccaagtaatgggactacaggcaagtgccaccaaactcggctcatttttttatttttagtagaaatgggatttcaccacgttggccaggctggtcttgaactcctgacctcaggtgatccacctgccttggcctcccaagtgctgggattgcaggctgagccaccatgcccagcctgtaagagcacttaaggcagcttcactactctgaggaataggaagtagaagagatttatgcaggagtattcacaaacccctccagttgtgctaagagggctcatgagtacctgacatggttctrgaagcaagaaaggagagaacagattttccttgagactgctttcctttcccagaagaggaggaatgttctccaaggaagactggagaaagaggctcctcccaggacgtcagggaaccagcttcttgggaaagcaggaccaaagtgcaggcccgtgttggtgcctgccagcctggcaggactttggcacaggaacacaggtccagagccttgcctagggtcactggtcctcctttctatagagctccataaggtccagagactgttgcctcatcagatagctacatctgt

SEQ ID NO: 780380 - DNA, 585 bp, Homo sapiens
tggccatcttgccacaggtttgagtttataatccaatataaacatgcttgaatattttaaagtaatcctacccccagagttggtcaactcttttccccctacaaatgttttcttccctgattcagttatttattgctgtgtaacaaactaccacaatacttagtaaatttttttaagtatgttatttctcaagtttctgtgggtttgttggtctaagctgggcagttatgctccatgtggtactgtctggagttactcatgtgatatactcaggtaggagcttagctggagctagaacatgcaacacgactttactcatatagctggtgccttggggaagtggwtgggatggtgtggatggagagagagagctaggcctctctctgcatgtagtttctcattattcagtagttgtctgagtttcctatatggtgactagatcctgaagctagtgaaaatggaagctgcaaggtctcttagggtctaagcccataagtcacataagatctcctccatgcattctatgggtcagaataagtcccggggccagcctaggttcaagagaagaggacatagattgacctc

SEQ ID NO: 780381 - DNA, 695 bp, Homo sapiens
gtggatcctgaatcagtggtatcaacatcacttgggaaccaattatatcagcaaattcacacacccccaatccaggcctgatgattcaaattctccaagggcggagcatgacaagacgtgttttgacaaaccctgcaggtaattttacatgtatatatatatatacacacacacacacacacatatatacacatacatgcattatatcaatgaataattgatatacacacatatcaatatacacacattgatatcaatgaataatgtgtgtgtayatatatttatatataaatgaataacgtgtgtgtgtatatatataaatacacgttattcattgatatcaatattttatgtcaaatgaggaagaattttaaacattttttctaatgtgttcatataatttgctcatcttcattttgtgggttatcaaatactacaagagtcttatttgttacttctcataaatttatctctttcctaatgaattactgtttttcatgtaatttgaatttttaggttacaagtcactttcaatgacagattaatttcccttgttttcattattcatctttatgaactttgcttatatctcactaatttttagtttttctcatttatttaataaataaataagtgtgaacatgttacctcatacatattagaaaatagggaatacgttatttctaactggtttt

SEQ ID NO: 780382 - DNA, 614 bp, Homo sapiens
tttgaatatatagaaacagagggtagaaaggtagctattgggtggtggaggggtgaaggaaatggaagtcaaagcttacaaagttgtggttatgtaagatgaataagtagagatgcagtgtacagcatgaggactrtagttcataatactgtattgtatactggaaatttgctgaaagagtagattttaggtacttttaccacgtacacacaaaaaaggtaaccatgtgtgatgatgggtatattaattggcttgactttagtaattatttcactgtgtgtatatcaaaacatcaaatatatttaagggatacaacatgatgtttttacatatatatgatatatgtgtttttacatatataattatacatattaaggagagcagcctctaactttatatatatatatatatatatatatgtatatggtatatgtatatgggtatatatgtatacatatatgtatacatatatatgggtattttatatatgtacacacacccatatgtaaaattatttaaaggctgctgtcttgagtttttgtggagataaacaagttaacattaattaaaattatgtttcttggaaacataattaaatgtgatgcagatggtta

SEQ ID NO: 780383 - DNA, 614 bp, Homo sapiens
tttgaatatatagaaacagagggtagaaaggtagctattgggtggtggaggggtgaaggaaatggaagtcaaagcttacaaagttgtggttatgtaagatgaataagtagagatgcagtgtacagcatgaggactatagttcataatactgtattgtatactggaaatttgctraaagagtagattttaggtacttttaccacgtacacacaaaaaaggtaaccatgtgtgatgatgggtatattaattggcttgactttagtaattatttcactgtgtgtatatcaaaacatcaaatatatttaagggatacaacatgatgtttttacatatatatgatatatgtgtttttacatatataattatacatattaaggagagcagcctctaactttatatatatatatatatatatatatgtatatggtatatgtatatgggtatatatgtatacatatatgtatacatatatatgggtattttatatatgtacacacacccatatgtaaaattatttaaaggctgctgtcttgagtttttgtggagataaacaagttaacattaattaaaattatgtttcttggaaacataattaaatgtgatgcagatggtta

SEQ ID NO: 780384 - DNA, 632 bp, Homo sapiens
aggcttaaattagcttctagtgttgtatgctttgtgctttcaatgtcatgacatttctaagaattcttttaattcttcatccttttcatcacaaccactttgctcatttatgctgatgaattcacctttactgagtccctctggctgtctatttagagcttctagagctgtggcaggtgtaggagcccagggaatatttccccttcaccctctgatggtttgctggaaaatcaactgacaaaaggcaggttaattggagaaaaggcatacaaatttattaatgtgcacatgggggacaaccacagagtgattaccccaaaccctcgtaggggctcagagcatggccaaaagcagattatggtggtaaatccggtygcattggcaagacaggttatagaagtggggagacgaggaaggctggctagcaaaggtggtcttgttacgtaagtgaaatctcagagatagaaaccctcagagataacagatggtaatgttttttcagaccttttaaggtatcagactctaggttcatctttcctaggtccagacaagggaaagcttctaagaaaacctggctgcatcaatgcacattctctacaaatgcaaatgtccccattaagagacagctttgc

SEQ ID NO: 780385 - DNA, 608 bp, Homo sapiens
tttttcattgtgcttacttatttatttctctggctctttcttcctcatacttgcaaccagctattgtctaggaatccctctggtcctcctactgaaaacaaggcattctagtttatctgtattgaatgaaagcacaaattactcagattacacctccatagagatggcttccaaagaaatctttcctttttaattgactttctagatgtgaggccaaatgtctccagtcctagagatcgcttatcctgctgttccacagtcacgctaaatattctgcaggagcgtaaccaaatgtggtggtgacagccttccacccaggggaaccacagtatatagagaatttacaaaacagaaattagtaaaagcaactaaaaattggtctgctttatattatcaccatatgccagcaattctacacgataatagtggtggggccgtgcatgtgktgtggaggtgggatgactgccatctgcagcccctacctctggtaagccctcctcttgagtcctgacatcgtctatagatcccggggaaaggcaattttttttccttgatgattcctagaagctcctttttggtgtccagccaaccctttcaaccttccattg

SEQ ID NO: 780386 - DNA, 600 bp, Homo sapiens
acctgttgtggcaaatgacaaccttattctcttttaattgccaactgaagccttatttttgtctctccttcctccatggaaatcatcttttgttatttaaaaataccttaaaccagagtttctcaaaccttagtcattcatgtaccaccttcataaatttttctgtatctaattaccacttatattcacytaataattattaaaatcatggctcattatatcagtaactttaggaagcctagttgtaaacatacagtatcaataacagaaatctttccactaaagaaaaggaaggctgctccttttcagtgcaatatcattttgtacataaatcatttttctagatgaaaggcactataactatattaattttgttattaacatacttactattgacattcattaatgccttttttgaaaatcaagagtgaagtctgtgaatttaggaactaattgtaaaaaataggacactaaatcagtaactagtcatggtatggagcccttctaatttctctaccttttttaaaacacaaaatttctaggaaattgagagatttgaggcatctaatcagcagatcgaattattaatcaaattatctg

SEQ ID NO: 780387 - DNA, 587 bp, Homo sapiens
tgtggaaaggtataagaaagctgtagctttcaataaccactgcaaacagtaggaaattgagtttttccagtgtttagtaactcgagcaatgatcaaacactgaaatatcccgttctagttattttgctcttcagaattcaattaatgtctttcaaagacattggaaagcttttgagataaaatgactagaaaatgaaaagcttttgagataaaatgactagattccccaaactgtgttgtttctcatcactctcatgagaaagggtaatacaaactcttggaatcaaaacaaaagaggaaacaaacagtgacttgaatgtcttttcgtctgcatggtgagataatacacaggaactcctgrgttaacgtgggtttcttaagctacagcctctcaacattgagaaagcaaaatcactccactattcttattgtttaattgtgccctcattgcctgaacattgtcaaggttagattcaaaatctcttacacttcttgggatgcagaataatcttattatttggacttgggccctaatctgagtctaataaagtaagggatatttgtgtttaatgagtaaaaatgtcatg

SEQ ID NO: 780388 - DNA, 594 bp, Homo sapiens
gctgtatgagctggctcctgcagggcctcctctggcgccctcaagtctctttatgtgggaagtggggggactgcattagggagccctttctgggggagtatatgtgtggtatgcaaatgaagcctgcttcccatgttttggtgccttgtacagaggagcaagggggcgtcgagggacctggcagtagatcttgtctgcaaaggactacctctggaatttggggagatggtagcgaggcctaatgaggggtccaggagggagggaaagtggcctcccagaggggtcaggctttctgtccagtgggacaggcacttctcccgtctttctggttctaagtctgtctgtgctgtctgcagacctgcacatactgatgccttaaagctctcatttcatttckctgttgaatcttgctttaagaaggatggggccacacccaccttgagcccacattccctccttgtagtcatcctccatcttcccccatttccccccggcccaatccatgccatttgtgtctgtgagcctttgcatgtgctgttccctcagcttgtgatgtctgcagctctgccccatggtgaatccatgcggtaccct

SEQ ID NO: 780389 - DNA, 703 bp, Homo sapiens
  misc_feature 149, 150, 151: n = A,T,C or G
cccagtggctccctgtgtgagtgttagtcacctctggctgcaaccaccatgggattgcttcttctgccagctgcttctcagtggggactgtggtggtggttgcatccgtgtagacatttgtcagagctcttcataaggtacacctattnnnttttttttttttttttttttttttttgagatggattcttgctctgttgcccaggctggagtgyagtggcatgatctcagctcactgcaacctccacctcctgggttcaagcaattctcctgtgtcggctgagtagctgggatgatagacacctgccaccatgcccggctaatttttgtatttttagtagagatggggtttcgccatgttgggcaggctcttctcaaacgcctgacctcaggtgatccgcccgcctcagcctcccacagtgctgagattacagatgcgagcaaccgcgcccagcctgggtgtgtgttattatatgtagattataccccagcaaagctgattaaaaccatgctttggtgtgagcatgctttgggtgtgcatgagggtgagggttggcttctgaaaggtgctgactggaactcccctagtgcatatgcttgtcctgtggtgagttttgggtaagaattagatgggatggtgcgctggtatggatgtctctctgaacatcctcttgcctgggatccacacagtgagatcacctgaa

SEQ ID NO: 780390 - DNA, 596 bp, Homo sapiens
gaaaactctgtgattgctcttctctgtatgccagatcttacagtgggaaccacagtcactcaactacaaaatgtaaatgcaatgggaagaattggatcccagggtgactggagccaagttatagcactcaaccatcaaagcaaaggtgggtatagttactgtaatggatgcagaggcaaagcagcaatcagaataatctgactcacatggaattctggagttggttaattaatcatggtgttcttagaagtgaaattgataaaargcctactacattcttacataatttgtataagcagaaaacttccatgctgagtggacaaaagacttatttgaattataaatagagactcacagctccccaatcaatttccagacttgaaccagtttacagacccagaatgcctgagcaaagagaagatgggtccccttgagggaggacctactatgctaccgaaaatttatactgttaatctttctctcattcttccccaaggagacctccagccttttaccagagtaactgtgcactggggaaagagaaataattagatttttaggggactattggacactggatctgagctgatgttggt

SEQ ID NO: 780391 - DNA, 643 bp, Homo sapiens
tctataaactgacttacagtctccagttctatattttgatggtttaagttaggctttgttcattagaactatatatattttttcatatatactgaaaaatggaacttctgtgagcttatttaggttgatctcaggaaccagcaaatgtgtccacatgtcaaacaattctgattaccactccagctttgccatctattttagtaccagcacctaccttgcgttgacagttaagtgctactatttgacatcatccctgkaccccagaaaccttatgggagtcatttcaacaacaatgtcttccacctttaactgtggcctacacactggacatccaccatggtgcttttcaagaatgcaatagtctcaccaatgtaattattaatgactatgtgaagtcttatgtagcttctgtagggacaaaattaagggttgtttgtgtgtgttgttcattataaatttattctgaaaactttatgtcactaaaacgttggactttaaaaaaaattgaggtacttcagtttcatttacaataagcctccccaaaagtatcagccaaccatccaaacaaaagacagaatcctacttcttgaggttgtatattgaatgtagtctagaagcagcctgcctctctcaggcttttgaa

SEQ ID NO: 780392 - DNA, 633 bp, Homo sapiens
ccacagtttatgtgtctattcatctattaaaggaaatcttggctgctttcaagttttggtaattacaaataaaagtgctataagcatgcaagttttcgggtgaaagttttcagctcatttgagtaaataccaaggaacacaatggctggattattggtaaaagtttagttttgtcaacacctgaaaactgtcctccaaagtggctgtaccattttggattctcaccagcaatgaatgagacttcctgttgctgtacatcctcattagcatttggttttgtcagtgtttgaattttcaccactctaatgatatgtagtagtatctcttggttactttaatctgcactaccctaatgacagatgatattgagcatcttttcatatgcttatttgctatctatatattttctttggtaaggtgtctgtttggattctttttccatttttaaagcaggttgtttgtttcataytgttgagttttaagagttctttgtatattttaaatgagaatcctttatcagatattatttctgcaaatatttctttccagtctgtggcttgtcttctttttctcctaacaatggcttatcagagtggaaggttttaatttcaatgaagttcagcttgtccatta

SEQ ID NO: 780393 - DNA, 603 bp, Homo sapiens
atcacagtgtagagaatgctatgcaacaaaaatgactaagttgtgattaaataccatgacatggaggaatcttaccaacaaatttgagggaaaacagaaggttacaaaagaaaacaaatgaatgattatattaagttaaaatataaatacagttataagtaactataaaataattattacaaatatcaagatggcagttacctttagggggatgggaggaaggcaaagggatgctagccattttatttcttgatataggtgtttattaaataaataagccaaaatacatcaagttttcaccatgctccttctatgaaagtattccaagaactaggaaaggattaaaggtaaggagaacttggttggtgataggttcctgaaatagggttttgtggctgcaacattttctatctgatgaaatttctaggcatgttyagcaatcttaggatggaaatgatctattagccatttccaggcaagatcccaaaaaagcaaaatctctatcagcttctcatgtttaacatggtagaaaaataaataaattattgagtaaaaataggcctaggaaagtcttgaagcatttcttatgaccttagcatgaga

SEQ ID NO: 780394 - DNA, 648 bp, Homo sapiens
ctttacaaataacatgtaaatatatacaatttttatttgtcaattatacctcaataaggctgggaaaagaatattaaaatttttttcaatctgtaaagtaacatcttaaaaatgtttctacccctacctttattgaggtatagttgacaaataaaaattatatatatttaaggtgtacaaagggatattttgatacacagttgacccttaaacaacataggtttgaactgcaaggtttactyatatgcaccttttcttccacctctgccacccagagacagcaaaacccaacccctactcttagactactcaaagtgaagacgattaggatgaagagttttatgacgatctacttcacttaatgaacagttaatatatcttccccttattttctctagctttattatatgaatacagcatataatacatataatatatatgtaatgtgtgttaatctactgtttatgttaccagcaaggtttccaatcaacagtaggcctttagtaattaagtttggggggagtcaaagttttatattttgtagagatggggtttcaccatggtgccccggctggtctctgcaggggttggcgcctctaacccccaaattgttcaaggatcaactgtatgtttcatcatgaaatgatt

SEQ ID NO: 780395 - DNA, 582 bp, Homo sapiens
taagcccctacaagtttgagaaggtaagaaaagatgaaggagacatatattaggtcagctcttacttttgaaaatgttttatttgaagaaacacctgtagcattgaggtgactgaatgcctccacttatttcaggaaaacgtatccaaaaaaagttgaaatatttggacaactttttttttaagtgccatcgatttccctagcagcattctaaaagatagcaagtaaaatgatgtttgttatcctaaatgctttagttttaggtcatttattaattttcttacaggtgcactttctagtacatgaagtatcctttgtaattaatgtgtrccatatgtttattcccatttagtataactataaattatattttaaattatatatttttaggatagttatattttttttgggttctacgacattgaagttggactagtgatttatttgaatgctgaatcctagtataggggaatataatcttatattttaacaggggtcctctatgggaaaataggatgaactttgtttcccagaaattgttaagtgatgaaaaacttcaaaataattttcctgcattttctgc

SEQ ID NO: 780396 - DNA, 493 bp, Homo sapiens
atttttattagagacggggtttcaccatgttggccaggctggtctcgaactcccgatctcaggtgatctgcccacctcggcctcccaaagtgctgggattataggcgtgagccactgtgcccagccccattgttatacttttaaaactaaaggcattcccccatagctagagcttttatgggcatctgtccagctggttcctctcatttttttggtttaaatttttttkttctcattacatttccaaggtttcccaccctgtggtttctttttttttagagtcatttgttaagatacaatttacacatagtaatgtttaccattttagtgcataattataagagttttgacacatgtatacagtcatgtaaccactatcacactcaacacatagactaggcggggtgccttagctcacacctgtaatcccagcactttgggaagctgaggtgggtggattgcctgagtccaggagtttgagactaggttgggc

SEQ ID NO: 780397 - DNA, 619 bp, Homo sapiens
aaattggagtctctgtaaccattgtgagagctgacggtggagaagacatcttaactccaagcacattgctgtcctgtggaagtcctaaattcagatttccttcttctttggaatttagtcttattgccattattttatgcctctcctaactaatagttggggaaaagaaagtagatttgaggggaagaaaagagaaggtttggactggtattttggaatttaactgttagcacttgtcaagatggatatatggtttcagytgagagctggcacaggtctattctttagattggtaagcactgatattacatgatcatgtgtttgaaaccatttcttcattgaaaagtttataaactctatactgtctgtcctcaaagcctatttgcttataaaatgtagataattgatctctcagggtttgaggttcaaccagggaagcagaaccaccatgagagatacagagcaagatatttattataggaattagatcttacacaagtgtgtagggctgctgtggtctgtgtaaggctatcaccttggattctgtgaggccctgaagtcactgtaggtcagcagagtctacagtggaaaagctggatgtaaaatgggggagatcaag

SEQ ID NO: 780398 - DNA, 647 bp, Homo sapiens
gtgaatgggttgaataaacatgcatgtacacatatatatttatgtatatctaaatgggtagatagaaaatagatagataaatgacagatagataatagacagataaatcatagatagataatagatgatagatagatgatagatagatagatagatagatagatagatagatagatagatagatagtgatatggtttagctgcatccccattcaaatctcgacttgaattgtatctcccagaattcccacatgttgtaggagggacccagagggasgtagttgaataatgagggccggtctttcccatgctattctcatgatagtgaataagtctcacaaaatctgatgggtttatcaggggtttccactttctcttcttcctcattctctcttgctgctgccatataagaagtgcctttcaccctccaccatgattatgagacctctccagccatgtggaactgtaagtccaattaaacctctttttcctcccagtctcaggtatatttttatcagtagcatgaaaacggactaatacagacagatgcacagagaaatagacagacagatggatgatagatgattgctagctagctagctagatgatagatagatagatagatagatagatagatagatagataga

SEQ ID NO: 780399 - DNA, 555 bp, Homo sapiens
gaaactttctcaataaattaagggaccttcttttcgtacatctgcatttgtgaaagatgaaatttctcgaaacctcagctctttggtaaccccatatgcagtggtgacccatggcgatttttgattgatcttgtcaaaagacttaggttgttcatcacagtacttcagatgaccacaattataaagctgagtgcacacaattaccaaccatagtgacatttgtttatacatttccctttttgacctatttctttaccatacagtttacctactcatacctgttatatctgtgtgactrtcattagcatacctgagtatttatgcttgcaaaaatatgtgtgttattattgtccattttattgcttaaagtggcccatgaaatgttcagatgtgtttttatgtgtttcttaaataaatccccttttaaaaatataaataagtgtattttaaataattttaaaaattagtttttccagaccttttggaatttcaacatttgggattgtggcgttcaggattacgattggctaggatatgctggatcccttcatatcc

SEQ ID NO: 780400 - DNA, 613 bp, Homo sapiens
cccagtgcccactgccttctaaagaagaacaaagtgatcggtggaatcagacatcaactttcaggaaagggactctgccctttgggctgagaaattttaaagctgcattaataaagaaatgccaagccctcctctggagtaagtagaggtcacagtacagtataaggataatataaggttctggcatggcagctcagggattgtggctggaggaacatgagctcctcccattgcataaccagaaagctaggtctatgcctggccattgctgctgtgtactgtggcaacttcrcagtgtgaaggaaaaatatcttgggctccctaaatcactaagctaaagggaaaagtcaagctggaaactgcttagggcaaacctgcctcccattctattcaaagttatccctctgctcactgagataaatgcatatctgattgcctcctttggagaggctaatcagaaactcaaaagaatgcaaccatttgtctcatatctacctatgacctggaaactcgctccctgttttgagttgtcccacctttccagaccaaaccaatgttcatcttacatatgctgattgatgtctcatgtctctctaaaatgcataaaaccaaa

SEQ ID NO: 780401 - DNA, 613 bp, Homo sapiens
cccagtgcccactgccttctaaagaagaacaaagtgatcggtggaatcagacatcaactttcaggaaagggactctgccctttgggctgagaaattttaaagctgcattaataaagaaatgccaagccctcctctggagtaagtagaggtcacagtacagtataaggataatataaggttctggcatggcagctcagggattgtggctggaggaacatgagctcctcccattgcataaccagaaagctaggtctatgcctggccattgctgctgtgtactgtggcaacttcacagtgtgaaggaaaaatatcttgggctccctraatcactaagctaaagggaaaagtcaagctggaaactgcttagggcaaacctgcctcccattctattcaaagttatccctctgctcactgagataaatgcatatctgattgcctcctttggagaggctaatcagaaactcaaaagaatgcaaccatttgtctcatatctacctatgacctggaaactcgctccctgttttgagttgtcccacctttccagaccaaaccaatgttcatcttacatatgctgattgatgtctcatgtctctctaaaatgcataaaaccaaa

SEQ ID NO: 780402 - DNA, 609 bp, Homo sapiens
tttcacgtggtttcaagacaagtgtcaaactttacatttgacttagaaaagccacaactcatattcagactccttctgcagtggcagaagactgctgggctctaagccccaggaagacggggactgtgtgtctttttccttgctactatattgctggggtctaatgtagcatctgacagagtaaggcactaaataaatgtttgttgattgaatgactaagtgattaaaaagtccctttaaagcactttttttttggtgttttttgttttttgtttttgagatggagtctcgctctcttgcccaggctggagtgcagtggcacgatcttggctcattagaacctctgcctccgaggttcaagtgattctcctgcctcagcctaccgagtagctggtattacaggcgcctgccaccacatctggctaatttttgtattttttagtagagacggggttttcccrtgttggccaggctggtcttgaactcctgacctcaggtgatctgcccgcctcagcctctcaaagtgcagggattacaggcgtgagccaccgtgcccagcccaagcacttttaaaaactgttttgttactccatcttacatgtgttacac

SEQ ID NO: 780403 - DNA, 600 bp, Homo sapiens
gaagcagaagtgtacaatgaacatagtgtatctggattgcaagaaggtattagactctttcgtgatagtatggagcaagttggagaaatgctgattgaattactagagagttaatctgtaaccttttaaaaggtggaacctaaaacattatcaattaatgattggaagacgatttctagatgcatacggttgcatactgtagatttttaatcttgaatggtcatgttcaatatttatgtcaatgacttggctgcagagatttattaagaaatgtatgatactgagtttgatgtcagcattaggacataaaatgatttcagcaaggtgaatagtgaactgattttagcaaggtagagtgtcatggrtatataaagttttgcatttaggctttaaacatgaactgtccaatagagagagagagacatgaggcccaacagcagtccacacacaagcgacctaggagtttaattgacaagtagctctgtgagagccaacagtatgttctgggctacgagaaaactaaatttaaacctcagatcgttgttggaagatttagtatcccatagccagaaagcaattaacgatagtttaaaaagtagg

SEQ ID NO: 780404 - DNA, 609 bp, Homo sapiens
gatgaatgtacttaccctgtctaactgatggactcaaacttgaacccatccttcagtgcccagcaagagttgaccctcctgtgctaaactttgtgtgcttttgtcgacacatgttcccacttcctgggctcccaaaacatcctgtgtaagtatgctgtggatattgccttatatatctctctccccagttagatcaccaactcctgaagaacaggaacgatggtgtctttcatcttcagagctgtggtkcctggcacacagtggggagtcagcaaatgtttccaggtatgtttaaatagacttcttcccacctctttctcacccttccattttgcctacatttctgctaattgacccagagcatttcctttatcttcatcacggcccactgagataatgatgcctaccaagcctctttgagagtttgagggataagaaaagaatattaaacaggctgtatgcgagtgtgctggatgtttttacaaagtgtgtacatagatggtagtatttttattgttttgcaaattggctgctcataagctttttcctagcccagaattggaatcgcaaactcatattatccttaagcaatttacttaatgaatgcat

SEQ ID NO: 780405 - DNA, 632 bp, Homo sapiens
ggctaaataatattccattacatgtatatactatgttttctttatctgttcatctgttgatggacatttgtgttcccactttttggctatggtgagtaatgttgttataaacgttagtgtaaaagtatttttttgaatccctactttcaacttttttaggtatataactagaagtagaattgctggatcatgctataattctttgtgtyactttttgaggaagcaccaaattattttccacagtggctacaccaatttatattcccaccaccagcaagatggcacaaggttctaatttctcaccaacaactgttattttcctttgttctcttttttctttttttctttccttcttttcttatctctttcttttctcctcttcctttttttcctcctccttctccttcccctcctccttctccttctatttttaaataatagccaacttaatgagtataaagtggcatttcattgtggttttgatttatagttccctaatagctagtgatgttgaacatatttttatgtgctactggccatttgtgtatcttctttggagaaatgtctatttaaatcctttgcccatttttgaattggtttatctgttattttgttgttgacttataagtttt

SEQ ID NO: 780406 - DNA, 516 bp, Homo sapiens
cttttttaaaaaaccttttagtaagttttttataaataatattttaacacattactaggattacacaggcacatggtgtactttgcaagctgttgttgccctttcaaatgtctcctcggtggagaagcagcatttggcattcattcatgtatgattcaggatcttttgagtttatatttgtggtggccatagtgacttaggttttagcaaaggccaaactatttcaattgatatcttttttatctttgtctgtttagcttctattccaattaaggtagactgttttgaaaaccaacagtttatacagtttgtttcttctcaggaaggggcaaatatgtgactaagtaaaagaaattcatcagtattggtatttacatgwtcaaagctgaaattttctcagaaaagaagttctttcttaatgtatatatttctatctggaaaattgctttttcatcaaaaatttctttaagaaatgaatgaccatgtatttagattcacaaatattataattgtaca

SEQ ID NO: 780407 - DNA, 579 bp, Homo sapiens
tcaacacaatctctaacatcatgtaataaatggggaaaataagaaccataaagggaaagaaacctgcccaaggttacatggttagttaacagtagcactgtggtttgaagccaagtttcctgacttccagtttagtattcaaaaatggggtgtagtagctcaaataaagtggaaaaatgcagaaaatcctcaacactttgaaaatgttatttttaaagtagaaagcatacaaactgtttttgtatagaactgagttcttaccatgctttattctttccttccaargtccttctcagaaaagcctcattttcttagccaaattcccacttaggcaattacatcctgctcacataaactgtctttatatctcaattggactttgcccacttccgtctaatttgtcttgttcccctaattggctttgcagaattgctatgtgagcttcaaattgctgagcttcctctctgcactccagcgtatccttagagggtcattgaataaattacttttttttccagtgttctaaatagtgccctagtgccctgaaagagttaattcacctcagagaggtgagctgtt

SEQ ID NO: 780408 - DNA, 623 bp, Homo sapiens
tcatcttgcagaagcaggatggacttccccacccaaactttggatcaaatttctagacccatattgccacacacactaagaggttatgaaaggtttattactcacataatgagattttctggggaaagcaaggaagtttcccaagctggttaaaatgtagcttaagagtctagggaaagaagactggagtttctatggtggtaaactcctagccacatgagataacctttaacccacgtggggagtgagtgttcctatgtacacactaaggctaggatttttgtgccaaagaagtaagcacctggcttttttatcagcttgccaagatgtggggcagaagggtaagaaagagtggtggggcctgaaaattgtcagcagtgaaacatcaaaaatgagtcagrctctttactataaatgaaatgtttaaaaattatggaatgtatacatatattaacatgaataaacctcaaaaacaaaggtaagaactaaaagttgtttgaggaataatacacacatcgataaatttagtgtttccagcaaaatatacatttcaaacataaaaaattatatgatgtattatttataaagacatacatttatagtaaaaatgaaaacatgagtag

SEQ ID NO: 780409 - DNA, 620 bp, Homo sapiens; identical to SEQ ID NO: 738597

SEQ ID NO: 780410 - DNA, 643 bp, Homo sapiens
ggcagacaacaacattaagcaggaggcaatgtagtaataaccaacagttagcaagaaggatgaagaagaagggacttgtggcagaggtattaagaggcagacagtaatttggatttgatgagaaaataagagggaggagtctaagaatattstacactgggttcagggatttttttcctacagtgggcagctagtattttagactttgtgggccatgtatagtctggtgttttttggtaatctttcttctgtttttttgttgtaatctttcaaaaatgcaaaagccattcttagtttgaggcatggttatggtccttacgccctagtttgccaactcatgttctagattaagacatcccaaggggatatctttagtcagataagagaaggagagaaggttcaggcaggctgtaaagaaaactgaaaagcattgcccaattcttctaacttgttcagttttatcacaaatagaaatgctctctctcgataaagctgaaattttgatacaatggtcaaattgccctttattgtacaatctgattttacaacatattctttgttttaggaaataaacctttgactcatgatcttgtagtgtttttattctaagtcctacatgcccagtacatgcttttgttttgca

SEQ ID NO: 780411 - DNA, 513 bp, Homo sapiens
taaatgtttggtattaagaatataagtttctattacaaagccataactcattatatatttttaatggtggttgctttttggtttgatgtataatatgtgctcaatgttattatttgagtcaattaatgacaatgatagatatccattgaaaagtaaattcatgttcatttaaaaatcaaacagctttagaagacttaaatggtcccaactttgggtgtatattgaacaatgggtagagatgctcttcaatactatttgtatttttacatttggattaaaaaatgaggctaagacatatttctgttatattctaaacaatttctagggcttcaatataaaaaactgcttctttgktttctgattatgtattaaaatgcacttacagggatgcatgcaattaattcctgatcatctgaaggtggattaacctgttttcagatggaggtagttaaggtacagcagggatttggaatcgggtatcttcccctacaagggcatgcaatcaagccgtga

SEQ ID NO: 780412 - DNA, 645 bp, Homo sapiens
gtctttgggctgtcattggcaagcccaattctacgcatttaaaatggcgtttttttctgcaattgttctggggctgaaatacagtatatacaatcaaataaaatgctaaatcattaaaaaaccctatatttccaagtatgtatatgttaagtatagtcgtttagggaaaggtttaagaaggtacctacttctcacttaaaatagcaccagttcttcaaattcttgtggtagtttttagagactgggcackaatatcccaaagggttctgctaaaatagaagttttataggactctctataaacagatactttctgtgacagatactagaaaattcatttcccctgcctttattctagtcctagtagacaaaaaaatcatgaatcaacttagaagtgcttttgcagaaaagattaagctttcatccaataattagaggtatataaattcactttagaggaactattcctgatgcaaataggaattgcatgtggaagagagttggattttttttttcttttatcttttttgggggacagagttttacttttgttgctcaggctagagtgcaatggtgcgatctcagctcactgcaaactccgcctcccgggttcaagccattctcctgctcatcctcccgagtagct

SEQ ID NO: 780413 - DNA, 628 bp, Homo sapiens
ttttttaagaagacaagttgtttttttgtagaatatccctaaatttctatttgcttgtttcctcatgcttagatttttgacaagagtactaactaggtgatgtttagttgctcccctttaaatgacatgtttttaagtcaataaaataaaacaagtaataccacaatcctatctcctccatcttagagacccatcctagcatttcatcatagtcaytcagtaaaatattcttctcttagggtcggctttgagcatgtggtagaccttgatgaactctccctggttcaatggagctccagaaccaggaaatataactagaaatgttattagagataaaaatgcctaagttgatagacttttctatttttagaccacaaagagacttctgacatagtattttacagtgaataccaggctactgagctcctctgtctactgtctaaattatttttgtttttaattggaaaaattaacacatacatataagaaaacaagtaaaacaatccaatgcatacaataaaattaaatcttcatcttaatccaaatcctcccatttccacaacccagagaaccaatgctagcggtttcttgtgtatctgttaaaatactgtttacaagcatgttacat

SEQ ID NO: 780414 - DNA, 620 bp, Homo sapiens
tcattctgtttccttgccctattatttcctttcttcctttttccacctgtcatattcccactcatctttcaaagcagctcagataaaaccaccttgtctaggatgatctctcgtatgcctccaggaagacttaagttttccttttttgttcccattggactttgtttataccactgctacaccctttactatagtctgactatcattaaattaacctttatgcctcccctaactcatccctgcccttgcctgaatcttcacaggagtaaatgtttatccaatccccaactggtagactaccaagcagttcattgacaaaatcttttcccattgtttctttttttagttgtggtaaaatataygtaacataaaatttaccatttaatcatttttaaatgtgcagtttaataatactaagtatgttgacattgttgtgcaaccaatctccacaactctatttatcttgtaagactaaaactctacatccataaagagcaattcttcacttttccctcatcccaacctctgacagctcccattctactttctctccctacaaatttgactactcaagatagctcatgtaagtagaatcacacagcatttgtctttctgtgact

SEQ ID NO: 780415 - DNA, 551 bp, Homo sapiens
cattaaaaagtgggcaaaggatgtgaacagacacttttcaaaacaagatatacatacagtcaacaatcatggacaaaagctcaacatctctgattgttagagaaatgcaaatcaaaaccacaatgagataccatctcacaccagtcagaatggttattactaaaaagtcataacagatgctggtgaggttgtggaataaaaggaakgcttatacacggttggttggagtgtaaattagttcaaccattgtggaagacagtgtgacaattcctagaagacctaaaaacagaactaccattcgacccagtaatcccattactgggtacatacgcaaaggaatataaatagttgtaccctaaagacacatgcacatggatgtttattgcggaactattcagaacagcaaagacgtgaaatcaacctaaatgtctaccaatggtagcttgtataaagcaaatgtggtgcatgtataccatggaataatatgtggccataaaaacaagatcatgtcctttgcagcaacagggatggaactggaggtcattattctg

SEQ ID NO: 780416 - DNA, 551 bp, Homo sapiens
cattaaaaagtgggcaaaggatgtgaacagacacttttcaaaacaagatatacatacagtcaacaatcatggacaaaagctcaacatctctgattgttagagaaatgcaaatcaaaaccacaatgagataccatctcacaccagtcagaatggttattactaaaaagtcataacagatgctggtgaggttgtggaataaaaggaaggcttatacacggttggttggagtgtaaattagttcaaccattgtggaagacagtgtgacaattcctagaagacctaaaaacagaactaccattcgacccagtaatcccattactgggtacatacgcaaaggaatataaatagttgtaccctaaagacacatgcacatggatgtttattgcrgaactattcagaacagcaaagacgtgaaatcaacctaaatgtctaccaatggtagcttgtataaagcaaatgtggtgcatgtataccatggaataatatgtggccataaaaacaagatcatgtcctttgcagcaacagggatggaactggaggtcattattctg

SEQ ID NO: 780417 - DNA, 551 bp, Homo sapiens
cattaaaaagtgggcaaaggatgtgaacagacacttttcaaaacaagatatacatacagtcaacaatcatggacaaaagctcaacatctctgattgttagagaaatgcaaatcaaaaccacaatgagataccatctcacaccagtcagaatggttattactaaaaagtcataacagatgctggtgaggttgtggaataaaaggaaggcttatacacggttggttggagtgtaaattagttcaaccattgtggaagacagtgtgacaattcctagaagacctaaaaacagaactaccattcgacccagtaatcccattactgggtacatacgcaaaggaatataaatagttgtaccctaaagacacatgcacatggatgtttattgcggaactattcagaacagcaaagacrtgaaatcaacctaaatgtctaccaatggtagcttgtataaagcaaatgtggtgcatgtataccatggaataatatgtggccataaaaacaagatcatgtcctttgcagcaacagggatggaactggaggtcattattctg

SEQ ID NO: 780418 - DNA, 614 bp, Homo sapiens
ttgaatatatattaaataatttataactaacttattgattctctttataaacattccttactatattatgataaaatatagtgatgctcccaaaggcaactgctgaatgatcctgttatacttttagacttttgtttcctgccttagcaatcaactgtgacttgacattgtcttggtattttgaatctcctccttctatgtggaaagagaatatcgaaattttctgggtgaaggactaaagattgttkaacttcttcgaagaaaaaattcatgggctttgtgacagtaactggttgctcagggacttttttctttttacgtgaaccaatcctattcatgctctactttctcaccataagccttgactatttaataaggaaaaatgaagtaaaatatatgtatttgaacgttagtaagtcatttgtaaaatgtctcacaagaagaaaaaatacgtgctagatagcattaaaataagataggcctataaggactccaggtttttgtctaaaggctggtggccaatggatacgacatatccaagttatctatattcgatatgacttattcaacatatcaacaatttaggttgtgatagagaaacaacctagtagaaa

SEQ ID NO: 780419 - DNA, 613 bp, Homo sapiens
gggagaaggctattttgaaattagatgactaattcatagcagaaagccaaatacaagttctcattaaaataattaccaaagccaaaacttaccttccctccagcttggccccgaactgcaaaacaaaataacgttgattcttctgcatttccttccatcttaaactgtgcaaagctagctgcatgtccttcaatgggctgagacactttcctatctacagaatatagctgcatagctcccaccacacgattttgctataaaggatcaaagagaataacgtttgaagacccataaatcaaaaactctcagattcatcaagtaatgaaataattagaatgctttgtcatctttagcaggatttataattatttgtyacttcatctctcactgtagatttgatacttcttaacttaaaatcagccccaaacattatcttgttaaagcctaacataaatgtttaaaatatgcctcatatacgtcttaaacaaaaaggtatagaagcattcattctgcagtaaatactccataataaatcccaaatcattcttacagaaactcaatttctactcaatctccacagaagagctaaaaacgcttggtaagagcattctga

SEQ ID NO: 780420 - DNA, 528 bp, Homo sapiens
tttaaaaatgtttcccttaaatgtagaagaaaaaagtatattttaaaaatgtataaacatttcatttaaaaatgtcttgccacattgatggcttcattctatcattaatttctcaaagacacaaagatatttgcccagagagggcaagcttcattattaactatatttgtgatcgcttctagtttggggagtagacttcttgtcagatctgattagatagtctcagctgttaggttgggactgagagctcatactaggagcattaattttgctattttctgttggttatttgtgcttgaattattgtctayattcatcttcactgtagggaattcagagttttctaacccacttgtccattttgcaaaaaatagtttttggattacataatccaaaaatcaatttatcaggcaccacaaaaaaataatgtctcgcttaaatcaaaagagggaggatgccagaggcagctgtcctgcctgtgagctctcactcctctcctcttctagagcacctctcataaagtctgtg

SEQ ID NO: 780421 - DNA, 583 bp, Homo sapiens
tgattggtaaaatagtaggtagcagtctgtttagacatccagttagattacagttcactatgtatgaagaacctttaggctgaacttataaggaggcaactaactttaggctaaatttaatttaacacttgattgcttgtgtttcttagaacaccattgtcttctttctacatttgaagcaagttctggaggaccctctaggctgtcagtgtaccctcactcactcagtggtagacataaagtgcttactgtgtactctgagtctcggtgaactctcacactttctgtgttcatgggacattgtggacacattacccaaatgggcctcaaggaactgtggacaarcatattgcgtgcatctccttgcttaagcccatactccattgttacatcagacttcatttaacacaagttcaaagataaagttaagaatttcaatcagtgagaaaaaaacaaacaatcgtatcaaaaaatgggctaaggacatgaatagacaattcttaaaagacgatatacaagtggacaacaagcatgtgaaaaaatgttcaacatcactaattatcagggaaatgcaaatcaaaac

SEQ ID NO: 780422 - DNA, 642 bp, Homo sapiens
caaactctgccaagaatgacatccaaaggttaaaatattatataaaatgggttagtttctgatattaaatttgtaaaaccaaaattaaggacttctcattaatttttgttcacattacatactcctctaagttttaaattcctggaaatacttagccaatatattttctaacacaagaaaaatatatgcaaaagcacatttcatttctaataataaaaagctcaaggttctcaattgcatggcagtggacgtttttctgctagttaacataatcgcagggcctaaaatgaataaagaaaaagagtgataaatttgaacacattaaagaaagaatgaaaaatgaaaggaaatttacaaatgatgaaaaatctatttgtattacatgacaaatataaagagctctcacaaacaaacaatagctcamaaaaagggcaaaacatatgactagttaacaaaaaaatacaaataaacaacacataaaaatatggcaaacttcactcatatttaaaaaaataaaaatcaaagagtctgtttctcaactacacatatggcaaagatttaaaaagttcaataatactatcagcaagaagtaggagaaaagtcattccaatgcaatataaaagtctaaattggttaatactg

SEQ ID NO: 780423 - DNA, 558 bp, Homo sapiens
acaaatatagctactgctttcagctcttaaaaaaaaaaaaacctatgaaataaaatgcaatccataccacaatactgcctgttaaatctgcatatcttaccccttctatcaattttaagaaatgtgagatcatagtcacagctaataactgatgttctaaaaatacagttctgttctttgaactctctggatcttaacttattaggttaaaaaatgataaaatacccagcaaatgtagactttgtatcccgtagatgttctttttttggagggtcatctctcaagacttcatcttgtgatttttctcttgggtcttctggaacatgttggtrttcatcagtactggtttccgatggcttttgatttgaatgtttcttgtctcctctcccatcagagcgactccatgatgttaatctttcttcactgttcttggtgggttttctaaaaccactacacaaagagccctgagctaccaatgctgaagatgaactaagtggttcaaattttctgcccttgctgtgaaatgacagttcttcatcatcagagggtctcaagaat

SEQ ID NO: 780424 - DNA, 605 bp, Homo sapiens
gagctatgatcgcgccacttgcactgtggcctgggtgacagagcaagaccctgtctcaaaacgaaaaaacagcaacagaaaaccccccaaattataaatgtttatcatgtacaacatgatgttttaaaatacatatatattgtggaatggctcaattgagctaattaacatgtattattacctcacatacttatacttttttgtgatgagaacacttaaaaatttattctcggctgggtgcggtggctcacacctgtaatcccagcactttgggaggccaaggtgggcagattatctgaggtcaggagttcragaccagcctggccaacatggtgaaacctgtctctaccaaaaatacaaaaattggccaggcatggtggcacacgcctgtaatcccagctactcgggaggctgaggcaggagaatcacttgaacccaggaggcggaggttgcagtgagccgatatcatgccactgcactctagcctggccaacagagtgagactctgtctcaaaaaaaaaaaaaaaaagaatttattctcatagtgattttcaagaatacaatatattattattaactatagtcacatgttttacactagatcc

SEQ ID NO: 780425 - DNA, 714 bp, Homo sapiens
gcacagttcacaataggtttcaggatcctatgagaatctattgctgccgctgatctgacagaagacggagctcaggcgggaatgcctgcctcctgctgtgaggcccagttactaacgggttggggaccccttacatcatagagtgtggtcaattactatactggctaactataggagttattctaaaatagatacagatatgtttaaatattgactagtacatgacaagaagtttattttaaactctataaaatttgaataacatgaacataaaaatcttttgatttatcatgtaatattatatgtgtatccttgctacagggaagttatggagaggggaaaacactcagggtttgaaattagatgtcctgatgtcaaaccatcagatccttaggctatgtggccaaacttacttcyccatcagttggacatgtctaagttccagaaaaatgactgtctccatactttataaattctctgtttcctcaaacacgcttgctgcattaagtgtggatttcactcatacttatagaaggtgaagtcagcttttccagtccatgccacaggttactgacagcaataaaataggaattattcagatttaatcactttcctccccatctctccgcccccgctcctctgtgctatcttggttttgtgtttttagacacgtcatttaatgtctctaaacttaagtttccttttgaaaattca

SEQ ID NO: 780426 - DNA, 599 bp, Homo sapiens
gtattatctagtcaggttgtgcttctgtgttatcaagtgagcaactaccaaattccttcaatttactttccatcccattcccacaccatgatctgtgtcagatgctcagtgtgtccctgttattaaggagtgactatgggatccaactgcaggaccacaggacactaaggacccatagtgctaccatcacttattcattcatcaatatattgagagctgactccattccatacatggaatagatactggagtgtgaagtagagagggcaggaatactaggatgtagccccctccaaaaatgtgtatagtttcattaaaaataaaagttcttatcaccttatttccacatctctggttcaccaggattgtgatctaggaataaattctatgtattcttacctcttagaatctagcttggcatttttcaygcttacaaaatatggatacatgtagacacataggggaaaaaaatgatttaatactttgtcacaaattatttgttttaagcaattattttaacttttcagattgtatattcagaggatttgtttgctttatttctgggtttgtttttctaaccatatggacagggagaaatc

SEQ ID NO: 780427 - DNA, 597 bp, Homo sapiens
cagggagaaatcagggtgaggtgatgcaacttcagcatggtgcttggtagagaatatggttttcaatagaatatatgcaagtcaaatgttaataagcccttgctcagctgtatgtattctctagaggaaaagctcgcattctcaccaggactaaagcattgggagctaagggaaataatggcaagtgatgtcacttcctgaaatcacactttttgcacaaggaaacaatcatcccagcagctcctttactctcatattcatctggcacctacacagaaaataagatggaaagagctgtktaagtactacctgggtagaaatgttggaaggggatttaaaggccattctatctttcggccacaaccaaataaattacactggattaaaatagtacaggtcatttggagaaacacagcccaaggacctctacatttctaaggcagaccaaattttgaattaatcccttcttgcttcggaatgatgaccaagattaaatatagaaacaaaggatttaatttcaattttgcaaagactctttcaatagtttcaaaaatatgtctttctctttgagtcttggcaaaaaaaaaaaaaaaaaaa

SEQ ID NO: 780428 - DNA, 597 bp, Homo sapiens
cagggagaaatcagggtgaggtgatgcaacttcagcatggtgcttggtagagaatatggttttcaatagaatatatgcaagtcaaatgttaataagcccttgctcagctgtatgtattctctagaggaaaagctcgcattctcaccaggactaaagcattgggagctaagggaaataatggcaagtgatgtcacttcctgaaatcacactttttgcacaaggaaacaatcatcccagcagctcctttactctcatattcatctggcacctacacagaaaataagatggaaagagctgttwaagtactacctgggtagaaatgttggaaggggatttaaaggccattctatctttcggccacaaccaaataaattacactggattaaaatagtacaggtcatttggagaaacacagcccaaggacctctacatttctaaggcagaccaaattttgaattaatcccttcttgcttcggaatgatgaccaagattaaatatagaaacaaaggatttaatttcaattttgcaaagactctttcaatagtttcaaaaatatgtctttctctttgagtcttggcaaaaaaaaaaaaaaaaaaa

SEQ ID NO: 780429 - DNA, 444 bp, Homo sapiens
aaaagcttctaaagattatatcaagaggaataataataatacaaacaataacaaacaccataacaacaaagaaaagaagaagcaggaggaagaatggcagtcacaggctcctattttaggccaagcacactcctaagcatcaaagccaaaaaaaaggcagaaaaatgttaaggtgacaaaggcaagagcccacgctacacaaagcatttcttggctcgccaatttcaaagcaactcctgagatagagcctcacaatctggctttgctrttgatttgaagttaatatcaaattaacagaataccaaaatatatagtcatatatagaagcattccaaagctaaataaaactgtgtttgatttcctactagttgggattgtccctatcatcttaatgcagataattgtgagtctagtttatatccatattttacttttccatctgca

SEQ ID NO: 780430 - DNA, 585 bp, Homo sapiens
gtgatggcaaataaaattcttgaattgattaatatccacttgttctttttttttttttgagatggagtttcattcttgtcacccaggctggaatgcagtggcgtgatatgggctcattgcaacctctgcctcctgggttcaagcaattctcctgcctcagcctcccgagtagctgggattccaggtgtgagccaccatgcctggcctattaaatagatttttataaactgtgctgcatactccattctgtgaatattgatccacttaaccttccttgttgatcacacactgcaatcatcccatttgtttataggttcctcctttaagatttcccttctgttaaargtattttcttaatgttcacttaaatctcatttaattgggataaaagttattccagaattggtttttgatgtgtgggaaatgcggagagtaaagagacatggagaggacatatacaatattgaatcctagagacctcttctagggatgattttcacagggttcaacctcatgaacatcagttttatgcttggcagcagtacagtgatgccttagagaacactcaagcaagtttagggacat

SEQ ID NO: 780431 - DNA, 615 bp, Homo sapiens
gttcagcaaccccaattaaagcacttcttttttctctgttgatacctctagccagccattatgtcagctttcaagcacataagaaaataaaactgaggattatagaagaaaaaaggattagcaaaaatccatcactaaccctgtataataacttaatttgtatactgcattgtagtgggtgtctggtgttatcaatattgcattgtcattaytttaaatataattgattttttaaaaataagattaaaaagttacttagcatgaaatactttgcttacttagaacttgaaccactacatttggaattgggaaaaaagaatgaaggttttaccttattacacaagccacttcttcataaatcataaaattaacccctttcccatttagaaaaaaaaaagtgcagcttgctgccagcgctcatttaattttacataagcatgctgtttgaggttgaggcaaatctgacagattttcagtgtgaaaataaaatataaaaactgttcctggagttatttctaagcagaattcaacttaacagaaatatgtatgatgttacattaggattagagacaatattctcagggcatttggggaaatgggttaagctattgtgaa

SEQ ID NO: 780432 - DNA, 613 bp, Homo sapiens
tgcacattctgcgtttttgtttgtttgttttaagaaaaagaattttctttaataaataaaagatttatttccttttccaatcaactttaaatctttaaatcttttaaactcaaacgtgtttctgtgtatgtagatatatatatatatatatatggacatatatttgtgtctgtgtatgtgtttgattatggagcagtgtgtagttatatttaaaaaaaaaataaaatcttgcctgtaatcccagcactttgggaggccaaggtgggtggatcacctgaggtcaggagttcaagaccagcctggccaacatggtgaaaccccgtctctagtaaaaatatgaaaaactagccaggtgtggtggcaggtgcctgtaatcccagctacttgggaggctgaggcaggagaattgcttgaacctgggaggcggaggttgcaatgagccaagatcacaccattgcactccagactgggcgacaaagcgagactctgtctcaacaaaacaaaacgaagaaatccagtatttaattattattgtttyagtctgtttgggtggctattaaggaatacctaagactgagtaatttataaagaaaaaaaggcctgtttggctcat

SEQ ID NO: 780433 - DNA, 584 bp, Homo sapiens
aatatctgactctattgatggtgcagggaaaatgcaaggtgatcttggaacatgttttggaaccagaaagtaaggaagtgctcacagaataatggggacatatctcataatataactaatttgaataggttgccaactctgaggaaaactgaacattaaaataaaatgttagctctcgattttaaattctgtaagcataattggaaaccatgagcccatactgctayagatgaataatgaacacctaaataacttcagtagagtgaaagctctcactcacagtaccttcacataaaacaactataagtcattgattaatgaatataaaatacatatttaatttccagtacaaaaacttgactgatatcatcttatccaagtaataaaatgtaatgtcaccagtaatgaaacatagcaacatcatttgccctctgatatgatgtggagtaaataatgttatatctttagttttcctgccaaaacaataatctactcataaggaaaatagacaaaccccaaatgagagactttctacgaaattacaaacttgtattcaataaaaatatggaacttaggaaagagac

SEQ ID NO: 780434 - DNA, 605 bp, Homo sapiens
ctttagcgtttatcactatctaatgatctaatgtacttgctgttttacttattttttcttgttggttatctgttaccctccactaaaatgtaagcttcatgagagcaggttttttttttttttttttttttggtctgctttgttcttaaatgtatcccatttggcacgtaatagacatcaaaaaatatttactggctaaaaggatgaatgaatatcatcaatgctccaaaaaagggtacttgattaatgaagcrttgtaagagagagcaaccagcttggggtagggggcagagcgcctagctctcctcgtggcaggtaacactagtggggttttcaaggaaggacagaaaacatctcctaagaaaaggaaggacattctacacatcagctggcctgtaattaaaagtgtcagtgtcatgaaagatgaaggaagaatgaagaatgcttctagaatgaaggagactggaaagatatgacagctgggtatgagtgatcctgaaccggatccttttgctataaaggacgttactgggataactggagaaaactgaagggattttatcagtgaaggtttataggagttcttattttagtatttttgccat

SEQ ID NO: 780435 - DNA, 558 bp, Homo sapiens
tgtgggataggctgggcatggtggctcacgcctgtaattccagcactttgggaggctgaggcaggcagatcacttgaggccaggagatcgagactagcctgggcaacatggaaaaaccccatctgtactaaaaatacaaagaaattagctgggcatggtggcatgcctataatcccagctactcaggaggctgaggcatgagaattgcttgaacccaggagggggagggtgcagtgagccgagatcatgccactacactccagcctgggtgacagagcaagactctgtctcaaaaaaaaaaaaaaaaaaaragagagagagagagagagaaggaaaatgggggttaaatcaggaaactaaactttatgccacactttcttgggtgcctgtgaagcaaatcacctcacccatctgggtcttggttatcctgttgggatatgcaggggatacgttaaggtcatctctacctctaaaagcctagactctaattttagagagatatggagagtatttcagaagtctttatgtgttatggtgggttttattaagggattatct

SEQ ID NO: 780436 - DNA, 494 bp, Homo sapiens
cagcccattgctcatgatgcgatggctgctttccctctgaggcctcgatgtcactgcggcttgggaaggagcttttcctcccaaaacaaaacaagaaaaggaagagacagaaaaaaaaagttcccaggcagggctcccttcatgggaacyattccaaagaatgtcagagcagccctgagtggggtgggaaccgggatcagaactgctcccgagccctagcttgggactacggggagtggtgccatgcacccgagcgtgcagccccatctgcagagggacacgctccccagatgtcatgtaccctccatgtgttcacagaacacacacatgcagtgtgcaagtgcacatggataccctggtgtgggacacatcccaagcctccaagcaggccactcagcctatgtggtctcccccatcaccactgccaaaagccctgtgccctgcccctccccacctcccaggccagcctagttgtctgatgcatttgaaaggag

SEQ ID NO: 780437 - DNA, 494 bp, Homo sapiens
cagcccattgctcatgatgcgatggctgctttccctctgaggcctcgatgtcactgcggcttgggaaggagcttttcctcccaaaacaaaacaagaaaaggaagagacagaaaaaaaaagttcccaggcagggctcccttcatgggaaccattccaaagaatgtcagagcagccctgagtggggtgggaaccgggatyagaactgctcccgagccctagcttgggactacggggagtggtgccatgcacccgagcgtgcagccccatctgcagagggacacgctccccagatgtcatgtaccctccatgtgttcacagaacacacacatgcagtgtgcaagtgcacatggataccctggtgtgggacacatcccaagcctccaagcaggccactcagcctatgtggtctcccccatcaccactgccaaaagccctgtgccctgcccctccccacctcccaggccagcctagttgtctgatgcatttgaaaggag

SEQ ID NO: 780438 - DNA, 559 bp, Homo sapiens
gcacgtgggccagggagacggctggtgaaagcggacaggagcagacgtttcctaatcatgccactctcagtccccctttccccagcctccaccaggctggcctggctggattcccaccccgcctccccaccattccactgaattcctagtcacgacttcctccccctttcatcattccgtgtggctccattcattttcttgtcttccagaaacgcgctgaagtttcttattcaccgggtaagaactttctcccctttcctgtctgcctcctccccsggaaaaccatatcagccttttgaataggtctccaggcaccacgtggaggcccgagctccacggccggacggccctggacagacagtctacgaagaaagcccaggcgtgatctccgatgataggctgcttgggcctttctgggttccctttatagatgttccagacagttctattcatcctaaacttcctcgaaggtttaataacaatcactcaacctggggccatttgggaagtattgagtcatctttacaagcgggggagttgaggtggtggttgaatcaag

SEQ ID NO: 780439 - DNA, 578 bp, Homo sapiens
ggggctacaatgagcaggtatatactcataaattggataatctagaagaaactgatgaatttctaaatacatacaacctaccagattgaaccaagcataaagtcagaacctgaacagaccagtaagaagtaaccagattgaagccataataagtctctcagtaaagaaagcctgggacctgatggcttcacttctgaattacatgaaatatttaaagaagaactaatgccaatcctgcgcaaactacttcaaaaaatagaggagaagggaatacttccaaactcattctgtgaggccatattatcctgataccaaaatgagataaagacataccaaaaaaaagaaagctacaggccaatatctctgataaatattaaataaaaatcctcaacaaaatactagcaaataaaattcaacaatgcatkaaagaacactcatcatgaccaagtgaaatatatcctggggatgcaaggaaggtttaacatatgcaaatcaattaatgtgattgtattcatctgttcttgagctgctaataaagacatacccaaaactgggtaactaataaaggaaagaggttt

SEQ ID NO: 780440 - DNA, 643 bp, Homo sapiens
tccaaaaaatggaagtagtgggaatatttcctaactcattcttctaggccatcattaccctaatccagaaccagacaaatcagttacaagacaaaaacattatagaccaatatctctcaggaacatagatgcataaatcctaaaagaaagcacattaaatccaacaatgtatataaagaattatacaccatgatcaaatggaatttatgacaggtgtgcaaggctgattcaatattcaaaaatcaattactataatccctcacatcaacgggctaaataagagaaattatattattattttaatagatgcagcaaaagcatctaaaaaaaccaattctcattcataattcataagtaaaaccatcagcaatctaagattaaataggaactttctcaatttgataaaaaatctataaacwcttacagctaacatcatacttaacagtgaaaaactatatgcttttcctgctaatatcaggaacaaggcaaggaagtctgttcttacacttctactcaacatcatactgggagtaccagccaatgaaataagaacaacaaaaaaggaaataaaaagtagacagattgggaaggaagaaataaaactgtctttttaaggtggtgacatgattattaatgtagaaaa

SEQ ID NO: 780441 - DNA, 545 bp, Homo sapiens
aacctgaatgactgcagttagctctgaatgttgagctgaaaccccagaggtcgttattgttttgggaccttttggaatcacaaatactggagaattccaggggctaactgacttttctttttttttttgagacagtctcgctctgtcgcccacgctggagtaaagctctgtctcccgggttcatgccattctcctgcctcagcctcccaagtagctgggactacaggcgcctgcmaccatgcccagctatttttgtgtatttttagtggagacggggtttcactggttagccaggatggtctcgatctcctgacctcgtgatcctcccgcttgggcctcccaaagtgctgggattacaggcgtgagccaacggcccggtctgctaactgacttggctatatgtcctgtgttcaatgctcttttaccaacagatgaagttcatctagcttctttgtgataggggccatgatccacccacacagggttgtcactgagccattctaatggtaaggcagtgggcaaaggagaaatatcaaatatcaatg

SEQ ID NO: 780442 - DNA, 627 bp, Homo sapiens
tcggctccctgcatatcccccttttgtttatgtattaattgaaagaatgtaaggccaggctgagcagctctcattgtccgattggcggtccatctgattttacagaaaacatagcattagaactgtgttgtgactctgttaggccttctctctctcttgcacccaggctcagctggctcatggctcgtactggagggaccgggcccatggttggccaccctgggttcctcccgtctcccgttcatggtcgcacacaccttgagggcacccaaacggtgtgyccatctcctgtagaaacacaagcatgctctcttccccatgtcagtaaatccaccggacttttccattgtccttcttccagggatttccataacactttcagataaactttcctcttttcctctaacacttgtcaatgtctttctgctggagtcttaccatccggaccaggagccaaaaaaatttaaagtaaataaaaataataaaaagttctgattgaggtggtaagtggcctcctataccccctttttgttttttcaacatgtgttgtaatgtttgatgtgcctgctctataatgccttgtcctctaggattataaggaatttctattttatgggttatagccca

SEQ ID NO: 780443 - DNA, 627 bp, Homo sapiens
tcggctccctgcatatcccccttttgtttatgtattaattgaaagaatgtaaggccaggctgagcagctctcattgtccgattggcggtccatctgattttacagaaaacatagcattagaactgtgttgtgactctgttaggccttctctctctcttgcacccaggctcagctggctcatggctcgtactggagggaccgggcccatggttggccaccctgggttcctcccgtctcccgttcatggtcgcacacaccttgagggcacccaaacggtgtgcccatctcctgtagaaacacaagcmtgctctcttccccatgtcagtaaatccaccggacttttccattgtccttcttccagggatttccataacactttcagataaactttcctcttttcctctaacacttgtcaatgtctttctgctggagtcttaccatccggaccaggagccaaaaaaatttaaagtaaataaaaataataaaaagttctgattgaggtggtaagtggcctcctataccccctttttgttttttcaacatgtgttgtaatgtttgatgtgcctgctctataatgccttgtcctctaggattataaggaatttctattttatgggttatagccca

SEQ ID NO: 780444 - DNA, 548 bp, Homo sapiens
tgaatgactgcagttagctctgaatgttgagctgaaaccccagaggtcgttattgttttgggacctttttggaatcacaaatactggagaattccaggggctaactgacttttctttttttttttgagacagtctcgctctgtcgcccacgctggagtaaagctctgtctcccgggttcatgccattctcctgcctcagcctcccaagtagctgggactacaggcgcctgcmaccatgcccagctattttttttgtatttttagtggagacggggtttcactgtgttagccaggatggtctcgatctcctgacctcgtgatcctcccgcttgggcctcccaaagtgctgggattacaggcgtgagccaccgcgcccggcctgctaactgacttttctatatgtcctgtgttcaattgctcttttaccaacagatgaagttcatctagcttcttttgtgataggggccattgatccacccacacaggtttgtcactgagccattctaatggtaaggcagtgggcaaaggagaaatatcaaatatcaatg

SEQ ID NO: 780445 - DNA, 631 bp, Homo sapiens
agttagaagaaggttgtggtcttagtttttgttgctgtaaaacaaaaataccacaaacctagcagctgtgaaaacaatgctcatcgattagctcatagttttctaagtcagaagctgggcttgactgggttctttgctcgggggtctcataagattgaaatcaagttgtcagccaagctggctgatttcttatctggaggctccaggggaagaatccactttcaagctcatccaggttattggctgaatctagttgtaggtgtgaggtctgcatttccttgctagctgtcggtaggaggttactcctcattcctagaggctgctctccaggcyttgcacgtgactcccctgcagcttcaaagccagagtggcctgctgaatccctcttgttctttgaatatctctgacttccccttctgccaccagccagaggaaactgcttttaaagggctcatctggttgggtctggtccacccacataatatctgtatcttcaaatcaattgacttgagactttaattacacttgcaaaatccctacactgcagtacctagattagtgtttgattgaatagccaaggaacagtaattgtgggggatcgccttaagaatgctgccctaccaccatcatt

SEQ ID NO: 780446 - DNA, 565 bp, Homo sapiens
ctagcaagaagtaaactgaaattaattaatcttttctcccagtctcagctctgctaaactccatgataggatatggataaaaatatctttcccaagcttttgcactgaagaaagggaaggttctctctaggaaaaataaaacaaaaataaagaatctagtccctattggtctctcatttaaaatgtcacacacacacacacacacacacacacacacacacsatgagacatgtaaagaagaatgaaaatatgacccataatcaaaaaaagaaaacagtcaatagaggcaggcccactgatgactggatattgcagtcagtaggtctctaaaataaatatcttaaatatgttacagaatttagaaataaagttggacacaataggtgaacagagaagaattttattggagaaactgaagctctaaagaagacccaaagagaaattatagaatagaagaatttttctgaaacaaagaatgcagggaataaacttgagaacagactggaagcaaaagaaggattagaaacatgaaggatgaggaactcaataaaaaataaccaaagtt

SEQ ID NO: 780447 - DNA, 630 bp, Homo sapiens
aattagttaagaaactcctcagaccaattcctggtacaaacgaagcaccatgtctatttgctattattattcgtatcaataatattcggttattaaatagagtccagctccttaaaaagctcatccgggcctgccacactctgactccttcstgccttccagcctaatcctttactaccctactcccacacaccagcatttgcccggctagattattcagctgtaatttcctgcctcctggcctttgcttacattttgttacctgggatgcccttatcctcatttctagctatggaaattctgtgaattcttcaagtccaaatcagaggcacacttattcttgaccactttactgatgcccaaacttggaactagtttctccctcctaggtgacatatttgcccttactttttacatttgacaattgtgctttgtattacagcaggcatttgtggcctcctctttctcctacctccccacaaccccagatggtccaggaaactgtgagttcctaaaggacgggttcttgtcttgtccacattttaaatgcatttaagttttcccatttatactttatgaccttgtgcttagcaaatgcctgaaataaaggaagttttgcaaagtttgttg

SEQ ID NO: 780448 - DNA, 675 bp, Homo sapiens
gctgatctcagaggtgagggcagggatccgagcctgactgcttcactgctcatccgtggcttccttttatcttcctttccagtgcagagctccaaagagtttttcaaagcccattagactgcccgatgacattcttaasagaagaaggaacagtgtttgtttagttgaattaggggaagtctcctgtggccagtgaagttttattgagccatttctagaagaactaaaaaaatcaagtgggcttctttgttttgtgctttattgtttatttacatttgcttgaaaaggtaatctgcacaggtttgatgtcagctgggaagtgggacaccattcgtaagacagacaggaggactctgggggagaaaatatttggatagacagaccacttggttgaaatggaaagagggagtcagagaatttcattatgtcagtaatgggctttagtggcactttctgagtgtataatgtgttgggtagtgaaggtttgctggggggtcgaagaagcaattgccagcaaaagcaagatgtgccagatggaaaaaaaaaaaaaacatagggagaagattagttagctttatcaataaggaaaagttgggatagaacaaaagcacaatagcactgtatcacatagccaaaattatcatagaggtatagatgtgtgtgtgcacatgtgtg

SEQ ID NO: 780449 - DNA, 675 bp, Homo sapiens
gctgatctcagaggtgagggcagggatccgagcctgactgcttcactgctcatccgtggcttccttttatcttcctttccagtgcagagctccaaagagtttttcaaagcccattagactgcccgatgacattcttaacagaagaaggaasagtgtttgtttagttgaattaggggaagtctcctgtggccagtgaagttttattgagccatttctagaagaactaaaaaaatcaagtgggcttctttgttttgtgctttattgtttatttacatttgcttgaaaaggtaatctgcacaggtttgatgtcagctgggaagtgggacaccattcgtaagacagacaggaggactctgggggagaaaatatttggatagacagaccacttggttgaaatggaaagagggagtcagagaatttcattatgtcagtaatgggctttagtggcactttctgagtgtataatgtgttgggtagtgaaggtttgctggggggtcgaagaagcaattgccagcaaaagcaagatgtgccagatggaaaaaaaaaaaaaacatagggagaagattagttagctttatcaataaggaaaagttgggatagaacaaaagcacaatagcactgtatcacatagccaaaattatcatagaggtatagatgtgtgtgtgcacatgtgtg

SEQ ID NO: 780450 - DNA, 476 bp, Homo sapiens
aaactttggtttgttttacaagacaataaattaaagcaatttttctgagtagctcaggcagtaaaacagttcatctgaattagtcaaagtggaaatgtgagtttctgtctgaagaacatagtttaaccataaattcatgattctatactttctctctagccagtccaraaaaaaagtctatctctttctggtgaagagatttgaagcattatcttctttgtagcatctgattctgtgaaaagttaaggaaaggcattctttggatttctaaaaattatgcactcagtgtaatcaggatagactaggttatactgagataacacctccaaaactgcagtagataagtgcaacaaatgtatatttattgatcatattacgtgttcatcccaggacagctgggaactcagctctacatcttctcactccaggttgatgaagcttctatcatctggaatgctgctggttgccttgacagt

SEQ ID NO: 780451 - DNA, 624 bp, Homo sapiens
ctgctcactgtaaccttgaattctccagatctagtgactctcccacctcagcctcctaagtagctagaagtacaggtgtgcaccaccacatccagccaatatttaaattttttgtggagacagggtctcattatgttgcccaggctagtctcaaattcctagtttcaagtgactctcccaccttggcctccccaaacactgggattacaggcatgagccatggcgtccaaccctcccccagaagattaactgaggtagcaagtccttgtattttcataggatttatttctcaccygctagcacatatgggtctaagatatctagatcaacatctgtgataccggttacttcttatttcccaggccttatatgtgtgctatattcaatgtagaccagccttgtgtcttgtgggttggtgagatggtcaagatccctaccggacggactcaatatatccctgaggcagcatggtaaaagtatatatttctactaggtgaaagctaactatttctggaataccctttatcagaatgggtaagaaaatacacttgctagatcagttgctggtgccagggcctgtgttaatatgctccaaacgggagactatgtcttggcctgtcactg

SEQ ID NO: 780452 - DNA, 621 bp, Homo sapiens
attgctcagacaccagtgttttttaaactcacccgggagattttgatgtgcagccagtttgagatccactgctccctttttaaacattttctctgagacagggtcttgctctgtcaccaggctggagtgcagtggtgcaatcacagctcactgcaatctccccttcctgggctcaagcaattctcctgcctcagcctcccgagtagctgggattacaagcacgtgccaccatgaccagctaatttttgtagagacggggttccaccatattgcccaggcctggtctcaaattcctggcctcaagtgatctgcctgccytggcctcccaaagtgctgggattacaggcatgagccactacgcacagcctgagatccactgctctctgtcatgccaagctatttctggcctttccctattatcgcgagtggaccagcagtggatccatggctacatcagccaactgcagcaaacttagaacaattattaaggtattatcaacgtaatgagatttcaggtgatttaattttctttcttatacctttctaacttgttttaatgaacattgttttaaattattttgaaggcaattttcacaaacagaaatgatcttcctgtcttct

SEQ ID NO: 780453 - DNA, 495 bp, Homo sapiens
ttaaatggggagggtcatcaaaggatggaggatgacatctaaacttctggcttgaacaaattctgagttgggatggtatattcgtcttatcagatatataagtggacctcttgagagcagggaatattttcttgtgtcttccgtacaccccctgtcccctcaagtgccttggacaacatattccactgatgcttactggttaattgaaggtggaattgaggaaagaggactatcaggaaagtgaawttttttttaatttttaatttttataaatttagggggtacaagtgcaggtttcttacatgcatatattgcatagtggtgaagtctgggcttttaatgtgcccatcacctgaatagtgaacgttgtacccaatgggtaatttttcaactctcacccccttcacacactgtcccaccttttggagtctccagtgtctgttattccactctgcatgtctgtgtgtacccactgcttagctcccacttataagt

SEQ ID NO: 780454 - DNA, 579 bp, Homo sapiens
cacgccccctcatcactcagatattcggaaatggtgagtccttcagaagggatccagcatagtgactgggctggaaagggtgtttctagttaggaagttttcctacatgttatagctccttggtcaccaaaaggtagaaagctcccccagatgtccagtgactttcagccccacaggaccgaccattccaaaaccttctaggtctgtgtgtgtgtgtgtgtgcatgcactgtgagtaggctggaggaatactgaaattctgtaaactttcatcagagtggacyccaggcccactgctcactgcctgtctcaaagggattgcgtgctcaccccgaagttacctgccacctgccaccagggccactggctgcggactggacatgcagctagtccaaggctcctcctagattctggctgaacttctctcccaggcatgtgaaggagcccacaggtgttttcatgattttcccctctctttttctttcttttcccttttctttacattaagtttgctctctgggtgtctcacagcctaattattattacaagaaaaactagcttcttgcacctaagagagatg

SEQ ID NO: 780455 - DNA, 557 bp, Homo sapiens
ccactcccacaatagcaatattagtccattcatgagcatggagataaacttcttacagcttccacctcccagtaccatcacaatgacagatttcaacatgagtttcagtgggacctcaaacactcaaactccagcagaggcccattactgaaagaggggttagagtcataccaaaattagcctgtggctgggcttctgcactcagctcctctactcaactgctatttgacctagtgatgctcacccaatctctctgaacgtcagaacatgctgtttaaaaaaggaaaatgattcttatttaaacactctgccagaatgtttgcactgttcagatgggatggtgagagtcaggatgctttgtcactctacagcagtrgttctcaactggggttaatgttgcccaccccacccttccccaagggatatttggaaatatctggaaacatgttttggttgtcacaactagaggaagtctctactggcatctagtgagtagaggccagggatgctgcttaaatgtcctgcaatgcatcggacagccgctccctccccaccca

SEQ ID NO: 780456 - DNA, 614 bp, Homo sapiens; identical to SEQ ID NO: 734776

SEQ ID NO: 780457 - DNA, 473 bp, Homo sapiens
aaaaacatagttatgtgcacacaactgtatgggcttctgaaagtattcatatgctagtatttcgactgaactacatcaccatattctccccacccaaaagttcccaggctaaaaggcaagaaactacactaaaaaccaggaattcaatgcgygggacaaacctggaaattaatgaagaattatagtgggaaagctgaaaagcatcaagggtcaaagaggaaaacgtacagaaccaaaacttatgattggcatgcttatctttctcctggtcttttacaatctttattgtaaggttatcagcaacagtgcaggggaaaacaatgaaaataaggaaagaaaaatcattcaaaaatagaaacacttgcataactttagtatgtataaggcatgaaaataaacccacggggctaatttcatcagtcatataaaagacaaatgtgttaaattatactcatgtctactatatgatttag

SEQ ID NO: 780458 - DNA, 563 bp, Homo sapiens
tgcgcccagccgtatgttcgagaatattcttaacagcagtgttgaaattataaagaattagaacaaatttaatcatttggggactgattaaattgtggcacattcattagaatataattcacacttttaaaataatgaagtagatgtacaagtagtggaaggatatctgtgatatgttactgaataaaaaagcaagttgcagcataatgtattagttatgatacaatatggttaacaaaaataacgtatgtctgtattttacaatgaaaggtatagcagggtagaaactgaattgttaaaaatggtcacatcttgctgggtgtggtggctcactcktgtaatcctagcactttgggaggctgaggtgggatgatcacttgagctcaggagttcaggaccagcctgggcaacatagtgagaccctgtctctatttttaaaataaaacaaaccaaaaaaattaaagaaaaagaaaaaaaaggttacatctaaggagggaaagttgcagggaaaagtaaagaaacatcataattttggtaaaatttagtaattttcaactattttc

SEQ ID NO: 780459 - DNA, 680 bp, Homo sapiens
agtatttcataaaaagttaatcatttagctcttatcatgaatcacacactgtattaaatgtttttgcacgagttatctaatttaatttcataataaatataaaaattattactgaaattgatattactatattcattttacagatgagggtactgaggcagagaaatattgaataatttgtttaatactgagataagggccagtgcagtggctcacatctgttgtaatcccaggcctwtgggaggccgaggcaggaggactgcttgagtctaggaatttgagaccagcctggacaacatagcaagaccctatctctacagaaaaataaattaaataaataaaattatagaaaaaatactgaggttataagcagtaaatcaagggttaaaatcaagacaatctgattccaaaggggatagctcttaactactatagtaaattggacttgaaatatggagatagctgcatattttaattgctatcagaagaaaataaaaaacacaaaattaacattttattgtatttcaacctcacatatggtcacaaagtactatataatagaagagaaaaaaattgaattcatttatatcaacctctttcttttataaataacctaagtgacactgagaggaatgaagtactttgatcaatattacatatttatttaacagacaacatga

SEQ ID NO: 780460 - DNA, 680 bp, Homo sapiens
agtatttcataaaaagttaatcatttagctcttatcatgaatcacacactgtattaaatgtttttgcacgagttatctaatttaatttcataataaatataaaaattattactgaaattgatattactatattcattttacagatgagggtactgaggcagagaaatattgaataatttgtttaatactgagataagggccagtgcagtggctcacatctgttgtaatcccaggcctatgggaggccgaggcaggaggactgcttgagtctaggaatttgagaccagcctggacaacatagcaagaccctatctctacagaaaaataaattaaataaataaaattatagaaaaaatactgaggttataagcagtaaatcaagggttaaaatcaagacaatctgattccaaaggggatagctcttaactactatagtaaattggacttgaaatatggagatagctgcatattttaattgctatcagaagaaaataaaaaacacaaaattaacattttattgtatttcaacctcacatrtggtcacaaagtactatataatagaagagaaaaaaattgaattcatttatatcaacctctttcttttataaataacctaagtgacactgagaggaatgaagtactttgatcaatattacatatttatttaacagacaacatga

SEQ ID NO: 780461 - DNA, 552 bp, Homo sapiens
cagccttgaccacccgggctcaagtgatactcttgcatcaccctcctgagtatctaggactataggcaggtgccaccgcgccttgctaatttttgctttttttttttcgtagagactgtgtttcgccatgttctcaggctggtcttgaactcctgggctcaagcgaccggcctatctcactctcccaaagtgctgggattacaggcataagtcaccatgcccggcctgacagaaacatttttagaagtgagaaaaktacattcctaaatgtgttgcatggatagaaattgatttgagaaaaatctcaagaagatcaagttaaggagacagagttgcaaaacatgtagtccaattgtctcacagttaaaattcttcccatctgaagatgctatcttctgtttacctgattttctcattgaaattattgaactgtaatttatatataataaatttcaatcagttttaagtatacaataagtttttacaaatgacagaaacaccactatacatttagttttaaggcttctgtgtcactcttgctaaggatctgat

SEQ ID NO: 780462 - DNA, 658 bp, Homo sapiens
tgttccacaaagacagacatattgcgacctttcaaaaagaattcaaaataggtgttttgagaaatctcaaagaaattcaagataacacagagaagacatagagaaggaattcaaaatcctatcagataaatataacagagactaaaataagtaaaagaaatgaagcwgaaattctggagctcaaaaatgcaactgacatactgaagacagcagagccatttaacatcagaactgatcaagcagaattagtgagctttgaagacaggctatttgaaaatacacaatcagaggagacaaaggaaaaaagaataaaaaacaatgaagcacacctacaagatctagaaaacagcctcaaaagagcaaatctgagagttattagccttagggagtaggtagagagagaaataggcatagaaagtttattcaaaggttgtgcaggatctgcattttatgccaaagaaaaaaaaagtttattcaaagggataataacatagaacttcccaaacccagggataataacatagaacttcccaaacccaaacttagagaaagatgtcaatatccaagtacaagaaggctacagaacacccagcagaattaacccaaagaagaactacctcaaagcatttaataatcaaactcccgaaggtcaaggata

SEQ ID NO: 780463 - DNA, 479 bp, Homo sapiens
ggtgtttcacgcctgtagttacccagttaaattttgtattttttgtagacagggttttgccatattggctaggctggtctcgaacttctgggctcaagtgttctgcccgtctcggcctcccaaagtgtggggattacagatgtaagccatggcacctggcctaggaaatgacattataaacatctatttcatttgaccttttttccccaagcagcctgtattacttttgcaactttttgtattaaaaaaatcactttaagacaaaaagagtaagatggaaagtcacagctatttcaagggaatcatttgccagatsttgactttatcttcatgtgaactctttcccaagagatctttaccatggctcatctccctcattacaaaagaaaggcaaatttctcaatcatcctgaactttactataatgcttcaagtataaacacctccagcgtacaaaacgaagggaaaaactgaagtagt

SEQ ID NO: 780464 - DNA, 536 bp, Homo sapiens
agtgacttttcctgtggtaataataggtaagttattgtattttatcttttaaaattatagttaatgacccttaatacttttataaatctacagttagtacaagttcttaagattttattgaaaagtattcttaggtggtttgatatgctaaaaaactaataaccaaatctttggagagtamttggtttatctgattttagcatctgtgttaaaatgcagtatctttttagtgaagaactgatattactacattattttaaaatatctcctacatttgtgttaattatatgacagtgtcatggtaatgtgataatattattagagctctgaagagtattctatgtatattattggataataccttacaactctgcagacttctgatgttggtagggcggatacagacagagaaactgacacagatgttgagtaacgtgcaagttagtaaccggtgctgtattagcaatgacattatagtactctaaggtaatgtttacagttaccttaaccacaacactactattttatatcctttg

SEQ ID NO: 780465 - DNA, 623 bp, Homo sapiens
tctgaatcatggacaatgtacgtttgtattcagaattgtttctgaagcatatatctagttgagaattgattttctaaacagagaaacacaggacagtgaccccaaatgggtgctgagacaaggggagctactgacttagacctaatcaccgtttttatatgtttgttgtaattaaagtctaaaattactgatactgatcttttttctgtaagagaacagaaatctatcaacaaaataatatctacagcacctgctagttctaaaagtygagcatatttctagtagacaaggaagcagtagtttctccaagaatatggctctctttggcatccacatttaaaaagttcccttgccaagagcctgaagagttggtctttagctttttactttatggatgaattctgggaatttggtgaaaatattaatcatatcacgattccaccaaaataagtgatttggttatatttaaaacttcacaagaacttacgactgtgtgtatttgaaggttacctatgtacagacacaaacatatgtagtatactcaatgggacagggtagagatgtcagctgaataaacattcttatccaaataataaaatactagcctgtcaaattttatcaga

SEQ ID NO: 780466 - DNA, 585 bp, Homo sapiens
aggcatatgagagggggcttttgttaatccttgcaaatatggctttaaaaattggatatgtggcttactagaaactgcattcccatcattattatagcaatgtctgtgttagaagagaacattcctcagcatttcattaacatgaatcgggcctctgtcaccaggaattgtaggtgaacatcccagcataggcaatgccgcgtccaaaatgacccattctttcaggcccgtggaggggcacagctggcctgttattgcagcctcttattactgttgtcatcaccatcagcatctcaaattgactaattattcaaagtgtgtgaggcacaaagtaatgttcctgcctggaagcttgtgatataacagcaccactgrcagaagtgtgttttcagggccgacttttctggatgatagaaatatctcatgaaggcaagaaaatgtgtcgtggttattaaaggggttcctagtgattcatctcctgaaggtccccaataacttttgagaccctgatatttttgcaaattagcagctgtggccttttctgagctagtgcccagcatgaagctttcaataccgttacaatgc

SEQ ID NO: 780467 - DNA, 631 bp, Homo sapiens
gcttcagagtccagattattctaaagatagagacaagagaattgtctggggtgttgcatggaggtgggatgtgagtgagagaggagagtcaggttgaccaaagctttctgacttggctacctggaaggaaaatgttatcaataactgaggtaataaagacttcaaaataagcaggttttggggtgtggacaatggagatggggagtgtrtattggaatctgttgtggtgcccattagatagccaagaggagatgctgattaggcagttgtaaacatgagtctcaaagactccttgatgagatttaaatttggagtcatcagtatagagacactaaatcatgaacctggatgagatcactacagtagtggataaaaagtaaaaagaggacaaactattaaatttttcactgcttcaatattaaaagatccaagaagagagaacagagcagaaaaggagattttgaaagagcctcccacgaggtaggagaacaaggaaagtgtagtgttctggcacttggtgatgatagtgcttctggaaagaattcagtaaattttagttatccctattatgacaaacactgacaggaaataaaagcacaagtgaatattcttctgttctaggaatctatca

SEQ ID NO: 780468 - DNA, 625 bp, Homo sapiens
actcttcattcctgcaatagcctgtgagctgataatatcctctgacaccagggttaaagttaccttcctgaccaggtagaaaattttatctacctttatatgtttgcacatacaactgtctttctaggattatcttaagttttacagtatctgatatcgtttggctgtgtccccacccaaatctcatcttgaattcccatgtgttgttggagggacctggtgggaggtaattgaatcatggggcaggtatctcctgtgcttttcttgtgatagtgaataagtctcatgagatctgatagttttataagggggaatttccctgtacaagctctctctttctgcctgctgccttccaygtaagacatgatttgctcctcctttccttctgccatgattgtgatgcctcactagccacatggaactgtaagtgcattaaatccctctttcttttgtaaattgcccagtcttggatatgtctttatcagccacatgaaaacaggctaatacagtaaattggtaccagtagagtggggcactgctgaaaagatacctgaaaatgtagaagtgatgttggaactgggtaacaggcaaaggttggaaaagtttggagggctcggaagaagac

SEQ ID NO: 780469 - DNA, 625 bp, Homo sapiens
actcttcattcctgcaatagcctgtgagctgataatatcctctgacaccagggttaaagttaccttcctgaccaggtagaaaattttatctacctttatatgtttgcacatacaactgtctttctaggattatcttaagttttacagtatctgatatcgtttggctgtgtccccacccaaatctcatcttgaattcccatgtgttgttggagggacctggtgggaggtaattgaatcatggggcaggtatctcctgtgcttttcttgtgatagtgaataagtctcatgagatctgatagttttataagggggaatttccctgtacaagctctctctttctgcctgctgccttccatgtaagacatgatttgctcctcctttccttctgccatgattgtgatgcctcactagccacatggaactgtaagtgcattaaatccctctttcttttgtaaattgcccagtctyggatatgtctttatcagccacatgaaaacaggctaatacagtaaattggtaccagtagagtggggcactgctgaaaagatacctgaaaatgtagaagtgatgttggaactgggtaacaggcaaaggttggaaaagtttggagggctcggaagaagac

SEQ ID NO: 780470 - DNA, 608 bp, Homo sapiens
tggcatcatttacctgtaaaacatcagtggtgagtaacatggttagacttacattttagaataataactcctcacagtggtttgtctccagggcactaaaagaagaaagtctatgttcaaattctgactatatcactttctgcatgacgatggacaatatatttaatatctctgtgcctcagttctttcatgtgttcaaaacattaacagcactacctcattgtgaagattaaaacagaaaatgtgttttaattaagacttagcmtacagccttattgatagtaagaatcaataaatgttagtggcaatatgcttgttattctatttttcaatatttacttcaagtaaatagctggaaactttttatgcataattcttttgtgagtaaagaaagctcatggcagcaccatttataattgcaagaaaaaaagaggacaaaggaaaatgacagagaaattaattttaaaaaatcatgttttggtccagttattactaaaacacatacaaaaaaatggctgccaaatttggaaagtatatttggaatggcctgacaaaatatagtcaatataggatgcataacattccctttgaaaagcaaatcaggatgg

SEQ ID NO: 780471 - DNA, 602 bp, Homo sapiens
cagccttaatgagagaagactgtctgcttggaagcctggaagagatactggactttgttttaattttactttttgtaaacagacagataaaattttatttatttatcctgtacaacatatcattttgaaacatatacacatgatggaatgaccaactcatttcacgcacttaacatttttgtgatacgaacactttacactcagcatttttcaagaatatattattgttaacaatagtcaacatgttatacaatagatttcttgaacttattccycctatctaactgaaattttatattctttgatcaacatctccccaaggccactcacccaccctccccaacttctggtaaccaccattttactctctatttctatgagattaacttttttagattctacatatgagtgagctcatgcagtatttgtccttctgtgcctggcttttttcacttaatgtaatgtctttcaggttcaaccatgctgttgtaaatgacaggatttctttttttttttaatgactgaagagtatttcattgtgtatatatacattttccttattcattcattcattgatatacagttgagtccataacctagct

SEQ ID NO: 780472 - DNA, 530 bp, Homo sapiens
tctaggagaaattacttgcaaatcatatatcatcatctatctgataaaggacttctatatagaaaatataaagaacccttacaagtcaataagaaaacacccagttaaaaaacaggcaaaaggtctacataaacatttcaccaaataagatatacaagtatttaataaacacatgaaaggatattaaacatcattagtcatagggaaatgcaaattaaaaccataatgagacaccactgctctctcaccagaatgtctataatgcaaaagactgatgatactaaagatatgaaaacaccaaaccctcatacatttytagtgagaatttaaaataatacaatgactttgaaaaccaattttgcagtttcttaaaaagttaaacagatccttaccatgcaatccagaaatttcactcctggttatctatacaatagaaataaaacttaggtccaccaaaaaaatgtatacaaatgtttacagcagctttattcataaaatctcagactggaaataatgcaaatatgcattat

SEQ ID NO: 780473 - DNA, 595 bp, Homo sapiens
agttatctgttgctgcataacatgttaatgcaaaacttagcaacttgaaatgatgcatatttaatatctcacagtttttgtaggtcaagaattcaggcacagttcatctaggtgggtcctctgcctcagagtcttcatgagactgttattacggtgtcagcccaggctgcagtcatctyaacattcaactgaagtagcatccacttccaatttcactccatggttgctagcatgatacagtttctcacaagctactggactgagaacctcactttgttgctggctgtttgcaagaggctttcctggtaggtctttccatcaaagcaagcacaggagatgacccagggagagagaatatcagcaaggcagaagtcacagtctttataacctagtcacggaaataacaccccatcacttttgtgagaagcaagtcacaaagttcagctacactcaagaagagaatattacaaaggctttaaacaccaggaagtggggaccactaaaatatatatcagaagctgcctgccacaactacatatacaacaactacatatacactttgcacctgttttttccacataagaataaatcacat

SEQ ID NO: 780474 - DNA, 589 bp, Homo sapiens
gtgcttaataaggcatgattatttgttgtgttaaaagagttcagagccaagtaagacgtagagtcacagaacaaagtgattctcagctctattattccagtgagaacattgtaacctttttgttaacgacaattatgttgaggtcattactttatcagagttgatttctttgcctaagaaaaatatggaatgcaaacatattagattacrtggaactggtaatgtcactgatgagtctgcactgattacaaacaaggagaaagaggttaaggtcagcagaaagagccctgaatgggtgattagataaatgtgtttcactttggcttttaagtgaaaagattgtgtaaaactggcagaagttttcaaggcaccaccaggatttacccagaagagagagtgagagcaagagcaagaatgaatgagagtgagagaggaagacagagaaagaaagaacttttcacaacaaatctaattaattttgactgcaggtagtttgagttaattagaacttctttaagcataagaagcataacatcagggatttaaaatactgtttagcagacccatttccttcttttttttccccaca

SEQ ID NO: 780475 - DNA, 643 bp, Homo sapiens
ttgggtgtaattcctggtaaaacaaccacagttgatgttaaacaagtctctgagaattaaataaaaaaaaaaaagaaacttaaaaaaacccagcaagatttagaaagcaagccatgtggcagagatcatatatttttgttgaatcttcgaagccaaaaacttagaaaggtcattatcagtagcagcatcaggctaagagcatcttgagttttggaacacataggagtagcaagtttaatctcctcttragaaatttgggttggtaatgtttggagagggaagggggacagtgtagaagtccctaatttagccttaaaccataacaaatgtactagcagttcttctgttcttctgttataagaaagtattgcattgcagattattgaatgttgattctgatatcaattatcataaataccttcattccaaattttctctgcattcctattttttaattcttttgggaagtttggatgatttgcagtgcttgattcaggcagtttgggaagctttatgaaatcttatcatcatagctgcaaaaccttgaatctccaagaaaatctttaaagaataagaaaacacgaatggaataatggaattaattgacctcacagacaaataaacatcttctagagacctcaga

SEQ ID NO: 780476 - DNA, 592 bp, Homo sapiens
aaagcatagcaaggttgacctttactcgagttcccactaagttcctcatctccatctgaaaccacctcagcctgaactgcattgttcatatcactatcacaacaatttaaaaagtctctaggaagtttgaaactttccctatcttcctgtcttcttctgagtcckccaagctgttccaacctcttcccattaaccacttccaaagttgcttctacatgttcaggtatctttatatcaatgtcccacttctcagtactaatttcatgtattagtcttttcttatattgctataaagaactacctgagattgggtaagtttataaaagaaaagaggttttattgactcacagttctgcaccttgtacaggaagcatgactgtgaacgcctcaggaaacttacagtcatggcagaggacaaagaggaaggaggcacgtcttacatggccagaacaggaggaagagagagaatgggaaggtgctatacccttttaaacaaccacatctgatgagaactcactatcacaagaacagcaagggggaagtccacctccatgatccaatccccagccaccaggcccctccttcaatactg

SEQ ID NO: 780477 - DNA, 540 bp, Homo sapiens
cttttttctactaaattttggggtgacttggtttagggctattttaaactcctcatctgttctatgattaggaaatattttcaccactaatgcagaatttttctgatatacattatgatttaaaatctttctgcatattcttatatatacattagaatgtcatgccctgtttctccagcaaaactcttaggatccttaagaacaggagctgtgtatgtattttctttctttttgtcctctctataccagtgtggtaactttcatgtagtaagtaatggttaytgattgatatatacacaagtatacaaagtccatgttcaatacttaggttttatttgttgtagagtttgagaaaagaacattgcttcattatccagtgtttattttttatttttatttttacatttagagacagaattttgctctgttacccaggctggagtgcagtggcatgatcgtagctcactgcagcctctaactcctaggcttaagtgaccctcccacctcaacttcctcagtagctgggactacaggtgcaca

SEQ ID NO: 780478 - DNA, 589 bp, Homo sapiens
tattgaatactctactgaaaacatattgcttttgcatcaggctcatgtcaaacaattctaagtcaaatcattgtaaattggggaccctctttacttattgctgaaatccatccttattttattttattttacttcaagttctggggtacatgtgcagaacttgcaggtttgttacataggtataaatgtgccatggtggttttctgtacgcatcaacccatcatctaggttttaagcccctcaggccttaggtatttgtcctaacacttaccatagaatactatgcagcctcaaaaaagattgagttcatggtctttgcagggacatcgatgaaactggaaaccatcattctcagcaaactaacacaggaacagaaaacgaaacaccgcatgttctcactcatatgtgggagcygaacaatgagaacacatagacacagggaggggaaatccatccttcttaatcccagaaagctgctgaagtttctagatctcagcagcaaactgaactttacaaaacctttctggccaggcaccattcattccttgtcattggatctcctcctcaccaccactcccataaaagtttg

SEQ ID NO: 780479 - DNA, 560 bp, Homo sapiens
gaatgcattttcaagaggatctggctcttgagaaggtaccattatagagccacagtttttattttctccttttatgatatacttcctcagtagtgaacatgctttcaaatgcccaatattaccttctggtctgtacattacatttactcattcaataattattgagtgagtgcctactgtgtgccatgcattgtgctggatagtggagctacaataggcttcctcaaggagctcacagttaaacaggaaacacactaatgcacagccaactctaactcaggaaagcctggagtgggacagcaccattctttctgagggaattagctgaaggtgttayacaatgggtgctcaaaaaatatttattggatatttaaggacagatggatctttcctgatgtagaatgccaaggaaataactctccaagcaaaaaaaaaaaaaagtcattgtgagccaaggcgtgaaggtgcaaaagtccaccgcatgtttgaggactagcagttggctccaattgtcaaaggtacatggacttacatgttcagagctgaggagcagaggctgg

SEQ ID NO: 780480 - DNA, 628 bp, Homo sapiens
aagtatctgtgactagtcactgatagtaatatttttatatgcagcaggcccctagtgcacatgacaagttgtagtctgccatggagggcttgcagttgacttttggaggcatttgcatgatcagaaccttcaaagaaatgtgacaaggacagtaatygaggtttgaccagagagtgaaataaagtggggtggaggggtggctatatcagacagaaagcagggattgtaagaaagaattcacagaggaaatgtggggctgaggttatgaggtttagggagcataaactggaaagaaaaaagccttaaataaaagctttagaaacgttaaaaggaaaatatgatatggatagatgatatggatagattagacatggtatttgataacatatagtcaaagaaaatgtcttttctcctcccaggcaagaatatagattgtcatttgattgtctgatggaaataatttagaagaacatactaggatatgctatttatcagagcagacagctttttgagatctgatgcatgcattctgactttttttttctctttcttttgtctgaaacattactgacagttactgctatagtccagcactctcgaagttgacatatgctgagtgacagatcta

SEQ ID NO: 780481 - DNA, 623 bp, Homo sapiens
aaatacacagtaaatgcttaaaatgactgatgatggtttaaaaaaaaagtttagtaatatggcctctagttcctttaattccagtataggtatgacctactgttggtgtccaagattttcatcccaactgataaatcattcttcaccagccctcacttaagtctaaatgaratcaaggatcagcttcaatgactcctctcttccaagaggtccctaatcacagcaggaagatctctgtccctcctctagcatcagaagcagtttgtccctgttgctctctctctcctatattttgatccctaaattgaagtcataccatacaagtttcatttcatcacaaaaacgtgtgttcccaagggtccatcctggactggtcgtctgtgcctaactcctttcctcaacatccagagcaaggcccaagcatagactcggggctctggcttccctcttttctggtttcctttgaatattggcaatatagagggccatgaacactgagaagtcacagtggctccgatatataaaactgccttggcatgaggatccagggtttcatttctctgctttgggatagagataatgggagtcactgattccaaaaccattcactgttgtggtctggg

SEQ ID NO: 780482 - DNA, 623 bp, Homo sapiens
aaatacacagtaaatgcttaaaatgactgatgatggtttaaaaaaaaagtttagtaatatggcctctagttcctttaattccagtataggtatgacctactgttggtgtccaagattttcatcccaactgataaatcattcttcaccagccctcacttaagtctaaatgagatcaaggatcagcttcaatgactcctctyttccaagaggtccctaatcacagcaggaagatctctgtccctcctctagcatcagaagcagtttgtccctgttgctctctctctcctatattttgatccctaaattgaagtcataccatacaagtttcatttcatcacaaaaacgtgtgttcccaagggtccatcctggactggtcgtctgtgcctaactcctttcctcaacatccagagcaaggcccaagcatagactcggggctctggcttccctcttttctggtttcctttgaatattggcaatatagagggccatgaacactgagaagtcacagtggctccgatatataaaactgccttggcatgaggatccagggtttcatttctctgctttgggatagagataatgggagtcactgattccaaaaccattcactgttgtggtctggg

SEQ ID NO: 780483 - DNA, 623 bp, Homo sapiens
aaatacacagtaaatgcttaaaatgactgatgatggtttaaaaaaaaagtttagtaatatggcctctagttcctttaattccagtataggtatgacctactgttggtgtccaagattttcatcccaactgataaatcattcttcaccagccctcacttaagtctaaatgagatcaaggatcagcttcaatgactcctctcttccaaraggtccctaatcacagcaggaagatctctgtccctcctctagcatcagaagcagtttgtccctgttgctctctctctcctatattttgatccctaaattgaagtcataccatacaagtttcatttcatcacaaaaacgtgtgttcccaagggtccatcctggactggtcgtctgtgcctaactcctttcctcaacatccagagcaaggcccaagcatagactcggggctctggcttccctcttttctggtttcctttgaatattggcaatatagagggccatgaacactgagaagtcacagtggctccgatatataaaactgccttggcatgaggatccagggtttcatttctctgctttgggatagagataatgggagtcactgattccaaaaccattcactgttgtggtctggg

SEQ ID NO: 780484 - DNA, 536 bp, Homo sapiens
agcagctggctcctccgtagtgctgagcactatttcacgggatggaagcaccacagtgtgtttaaccaaccacctgctgaaggaagcttgagcagctttcagttttggcttttataaataaagctgctatgagcattcatgggtaggtttttgagtgaacatgtgttttcatttgtcttggataaatggccagggctgtatgttggttgcatgtgtagtttttggagaaattaccagctygttttgcagattggctgtaccattacgtgtccaccagcaagctgagtgactttttcagcatacttgccagcatctggtgttgtcatattttgtatttcagccgttctgatagctgtgtagtgggaagtttctttcaatgctcttcttatgatgaccttaagcaatcctcgctacaattcgccctggtttcctaactcaggcctgtaatcctagcacttggggaggatgaggctggaggatcctttgaggccaggctgggcaacatggagagaccctgtctttacaaaaaattaaaa

SEQ ID NO: 780485 - DNA, 536 bp, Homo sapiens
agcagctggctcctccgtagtgctgagcactatttcacgggatggaagcaccacagtgtgtttaaccaaccacctgctgaaggaagcttgagcagctttcagttttggcttttataaataaagctgctatgagcattcatgggtaggtttttgagtgaacatgtgttttcatttgtcttggataaatggccagggctgtatgttggttgcatgtgtagtttttggagaaattaccagcttgttttgcagattggctgtaccattaygtgtccaccagcaagctgagtgactttttcagcatacttgccagcatctggtgttgtcatattttgtatttcagccgttctgatagctgtgtagtgggaagtttctttcaatgctcttcttatgatgaccttaagcaatcctcgctacaattcgccctggtttcctaactcaggcctgtaatcctagcacttggggaggatgaggctggaggatcctttgaggccaggctgggcaacatggagagaccctgtctttacaaaaaattaaaa

SEQ ID NO: 780486 - DNA, 617 bp, Homo sapiens
agctatgtactcactgtgggaagtcagggtcgtacagggtgggctgcaggatgcccgcggggaacactacaagaagggggtgctcagtgggaaacccatccactttcggaccctgccccgcccggcgtagggacacatccccttacccatctggttcttgttgggtagatagtaggcattgagcgcctgtggggggagcagccacctgtggagggatgctggggtgaatggggggaacacactccctcccccgctaccctcacatcacagcttcctcgtcagccatctcctgacagtctgggggtcaccctgccggcccccaccccatgccctgtgctggcgtgtgtgccccccatatctgcatggctgtgagacgatttgccctaccagctcctgccctttccccacaacccttccctgacccccagctctgggccaggcacccacgtggacttgtccacctcctgccgaatcttyttaactgagagctggatgctgaagcggatgctgttcaagatgttcttgaagtaggtcttctcatggacctcaaactgcaggaggcacgggcgacactcagcggcaggccagggcagggctacctgcagactgggcaacaa

SEQ ID NO: 780487 - DNA, 616 bp, Homo sapiens
caattacagtgatgagcgaggcataaacaaggcgctttgcctgccgcagccaaccctcccctgcacacacgtgcgcatgcacacacacgggaacacacacacacacacatacacacgcacacatgctggagtcagcccatttgcagggtaatggctttgcgacagcagaaattatctgcagcattagaggcagcctggccaggcagggcaagctgggggyggggcctcaggatgaacctgggggatactaagagaggaagcaggtgcccgcaggctagggtctgggcccctggaaacactgcagggctggggggagtgggtgcaggctgcaaagggcttggtgagggccagaccaagtggagggtccctgcccacccctgcccacagctctttccctttcgacttccaaggcctgtaagtgggcagataactgggagcagcggtgtctcaggacctgaaatcatagctgagcagccacttgctcctgtcctggcctgaaagccacgtccttttccctagccccagggaggccacacttggtggcctagagagaggggcatggggtgattaaggaatgaaagggagcccccgaaaggaggatgcgtgttgcgggggt

SEQ ID NO: 780488 - DNA, 607 bp, Homo sapiens
ctaataccagggcctccctcagaaggttgttgaggggctcagctcaggccacccagccaaagcagctgctagggtgctgggcacacagggggctgtcccagatgacaaaggtgtgctcagcatctatgacatgcccatgctgcactgagaactggggcacagtccctgccctcatggagctaatagcctggtggtagacaaatggtaaaraagtaataatagtaaggactggccgggtgtggtggctcacgcctgtaattccagcactttgggaggctgaggcgggtggatcacgaggtcaggagatcgagaccatcctggctaacatggcgaaaccccatttctactaaaaatacaaaacatttagccaggctactcgggaggctgaggcaggagaatggcgtgaacccgggaggcggagcttgcagtgagtcaagattgcaccactgcactccagcctgggtgacagagcaagactctgtctcaaaaaaaaaaaaaaaccaccaaaaaaaaaagtaaggactacgtaagtcatctcaaatgcacacggcgctgtgtaggagaagccttgagtgctggggacaggggaaggggcttgcttacactc

SEQ ID NO: 780489 - DNA, 589 bp, Homo sapiens
agagttgacaatgcctacacaaatacctacccacagtacacacactcttattctccttttaatttttattttctcttaaatgagacagggcctcattctgtcacctaggctggagtgcaatagcgtggccacggctcactgtagccttgacctcctgggctcaagtgatcctccttcctcagcctcctgagtagctgggaccacaggcgtttgccaccatatccagctaagttttaaaattttttatagagaagaggtctagctgtgttgyccaggctggtcttgaactcctgagctcaagaatcctcatgcctcggcctcccaaagtgtcatgccatcgcacctggtctcacgcattcttattctttagtactcccacttcagagcattttgtcctacagatatgtagaaaaacacagttataaaatgacagatgtacaaagatgttcactgcaacattgacagaaagaacaaaaaagaaaagtagcaacaactcaggtagtgatggaggaaggactcagttgaataaaccgtgtacgagactgggaatgatgactcatgcccgtcatcccagcattttgggaggctg

SEQ ID NO: 780490 - DNA, 418 bp, Homo sapiens
tgagtagtttgtaaaggcctgctattgatgctgatgtgcagccagggttgacaaaaattgtataattgtggtggaggtctaaactttatttttgtactcaatatatacacctgaattgaatttaagctgatgcgtgctttgacctctgtaaaatactttctggtccacaggctacactacacataatccttrtagttactgaaatgatttacaagtactgaggcatgctggtggcttgtgctccagaactgtgcaaaaggagacatacaaagaattaatccaatagtctaaattgtctcttttacctttattttagcatttattctgtatggtaatctcaccaacaatataatgaatttactaaaggcatgatcagtgggttattcctattgcctagaacagtgtctggcacatatta

SEQ ID NO: 780491 - DNA, 694 bp, Homo sapiens
gacaaaacaaagttgctagcacaaggtccaggaagaaacacagagcaaacattttcaatgcaccatatataatgaatttacagcagcaaatgtccataggttaagaatgtggtgtgtgtgtgtgtgtgtgtgtgtgtgtgtgtgtgtgtgtgtgtgtgtrtgtgtcttggggagggtgctcacaagaaatgctggcatgacaaacagggtaaaaacacatcaaaagatgaagcaaggcaactaaggcgctcactactgggggtaggataaagtaaggagctgacatgtaatttgaaaaggatggcataattctatgtgctcaaaagtgagcaaacctaaagacagagacaaatctggaaattgtgacagagctgggagatgatggttttaggcctcaatctcatcagtgtggagaggcttatagacatgagatttttgtgacattcaaaaaaggatagttacaggtcacggttgagagaaaaaagcacatatttatgtgtgatcattctaaatgaacatgtgatactttactatctcttgtacaattacatcttttatgataccaacataacaaattcatgacatattttccaaatgaggaatctgggacaaagggagatttactaaataaaagatagatgacaggtgtttccagagctgcgtttaagtccttgggcttttactaagaacttca

SEQ ID NO: 780492 - DNA, 635 bp, Homo sapiens
aatgaatttacagcagcaaatgtccataggttaagaatgtggtgtgtgtgtgtgtgtgtgtgtgtgtgtgtgtgtgtgtgtgtgtgtgtatgtgtcttggggagggtgctcacaagaaatgctggcatgacaaacagkgtaaaaacacatcaaaagatgaagcaaggcaactaaggcgctcactactgggggtaggataaagtaaggagctgacatgtaatttgaaaaggatggcataattctatgtgctcaaaagtgagcaaacctaaagacagagacaaatctggaaattgtgacagagctgggagatgatggttttaggcctcaatctcatcagtgtggagaggcttatagacatgagatttttgtgacattcaaaaaaggatagttacaggtcacggttgagagaaaaaagcacatatttatgtgtgatcattctaaatgaacatgtgatactttactatctcttgtacaattacatcttttatgataccaacataacaaattcatgacatattttccaaatgaggaatctgggacaaagggagatttactaaataaaagatagatgacaggtgtttccagagctgcgtttaagtccttgggcttttactaagaacttcaaatatgcattt

SEQ ID NO: 780493 - DNA, 650 bp, Homo sapiens
tgggagcttctggtttgggttttggatcctctaggaacaaacgtggcacacagtagtcactcaacacatattgagggaaggcagccaagcccgatggaatcaaggagggagacgaccccagctagggcagttatttcagtgtaagttccatacagaagatcactagagttttaaatgtgaaagtgtgcttattttatatgtgcttaaatataatgtctcataattatgatgagtaagcaacaaaaatcacaaatgcactcattattttaccttcgatggaaattaatttgttcccatttaataytacagaaatgttaactcatttttcagtttgtatctttccatgtcttcatgtatgatttcacatgttttcatcagttttaacaatggaatacaaatgatttctttgtaccaaaggataagaaaaacttagagaaaattacactcaaatcgagtagtacttcaattaacatatacaagtaatagttaaattaacaagtcctttaggaaggaggcatgtaaaccaaagccaacgtaatgagaaacgctatttccttctgcatcaattttctgcatttcctagctcccaactcccacatagaggctctggtccttcacatcccataatcttatcaaaaagtggagaatga

SEQ ID NO: 780494 - DNA, 650 bp, Homo sapiens
tgggagcttctggtttgggttttggatcctctaggaacaaacgtggcacacagtagtcactcaacacatattgagggaaggcagccaagcccgatggaatcaaggagggagacgaccccagctagggcagttatttcagtgtaagttccatacagaagatcactagagttttaaatgtgaaagtgtgcttattttatatgtgcttaaatataatgtctcataattatgatgagtaagcaacaaaaatcacaaatgcactcattattttaccttcgatggaaattaatttgttcccatttaatactacagmaatgttaactcatttttcagtttgtatctttccatgtcttcatgtatgatttcacatgttttcatcagttttaacaatggaatacaaatgatttctttgtaccaaaggataagaaaaacttagagaaaattacactcaaatcgagtagtacttcaattaacatatacaagtaatagttaaattaacaagtcctttaggaaggaggcatgtaaaccaaagccaacgtaatgagaaacgctatttccttctgcatcaattttctgcatttcctagctcccaactcccacatagaggctctggtccttcacatcccataatcttatcaaaaagtggagaatga

SEQ ID NO: 780495 - DNA, 679 bp, Homo sapiens
actggttccttactgttctgggatcccagctaaggctcctggaaacttcagggaataaaagagtatatgttacattttctgaagtgagcctgtatcaccacagcaaagggttgtctgccagcagttccctcgctctaagcttgtccccagtgggttttccattcccaattataaactagccccaaccttcacctccattaaccttagttgcctgagctttgcttaagacaaagatayttttctcactatttaaaatttgttatatattcttgcttatgtggaacacatccttctgctttcctggattatttctgcctgtagttatgaagtctctaaaaaataattatgttgttggaacgcattaatctcattaatagagctattactgccaccagtgaataatgttgatgataggcttttaaaatcaacttttaaaactacttttaagagttttgtttacttacgtactgtctctacttccaaaaaaggatttgagatgccttagaacacaaagaccaaaacccattaacattgcatataaaatcaaagtcaaatagcaacaacgaaatggcatcccaaaacccagactgagcaaaacgacctcatttgagcacaacatttaattctggtagctcctattgctcaattacaggaacgtaataggtcatttcgggtgata

SEQ ID NO: 780496 - DNA, 529 bp, Homo sapiens
gcagaagacttattgtagaggcaaaacaataggtagacaaaactgttgcttctaaaatatctttcatgtcatcaatagcaagttcacatctacccttaagaatgtcactatttatacaagagataagttgtaaaaataatgaatacatttgtaatatttaccggatttcatgaaggacctacctttttgactatgaaataatatttataccaacacaattagagcaaakaagtgaccagtatattaaatacttgaatgttagagtgaaaatgacacccagtatcaagtatttaaatcaaatattgatttgaaattttagtcagtaatttttacaaaattcaattagatttggtaaaagaataatcaattcacactttgtataatatcaggaattttccaataataaattatgtaatatcaaattattacccttgtgtttatttaaatattgaaattgatcactgtgttgatcaatatgttgactacattgtgatcaatttgtgcatattttatcactgcactgaatctg

SEQ ID NO: 780497 - DNA, 626 bp, Homo sapiens
ttctcttcttcctcaggaacgtcattattcttaggtttggtcatttaacagaatcccagacttcttggaggctttgttcatatttacttactcttttttctttgtatttgttggattgggttaattcaaagaccttgtctttgagctctgaatttcttttttctacttgttcaagtctattgctgagactttccagagcatttcacatttctaaaagtgtgtgcaaagtttcctgaatttttttgtttttcctttcagctacctatttccttgaatatttctcccttcgcttcttgtatcattttttggatttctttgcattggtctttgcctttctctggtgcctccctgattaacttagtaaataaccttctgatttctttttaggcaaatcagggatttctttttggtttggagccattgctggtgaactagcgtgacttattgggtgtgttaaatagcyttgttttgtcatattaccagaattggttttctggttccttctcatttgggtaggctctgtcagagggaaggtctagggctgaaggctgttattcagattattttgtcccgggggtattcccttgatgtagtactctccctccctttcctatggatgtggcttc

SEQ ID NO: 780498 - DNA, 649 bp, Homo sapiens
tctttgcattggtctttgcctttctctggtgcctccctgattaacttagtaaataaccttctgatttctttttaggcaaatcagggatttctttttggtttggagccattgctggtgaactagcgtgacttattgggtgtgttaaatagccttgttttgtcatattaccagaattggttttctggttccttctcatttgggtaggctctktcagagggaaggtctagggctgaaggctgttattcagattattttgtcccgggggtattcccttgatgtagtactctccctccctttcctatggatgtggcttcatgtaagccaaactgcagtgattgttgtctctcttctgggtctagccatccagtgagtctacctggctccaggctggtactggtggttgtctgcagagtcttgtgatgtgaaccatctatgggactctcagctgtggataccagtgcagtatttggagtgtctcccaggtcctgcaggagtagtccacttccttcaaagttcctctctggattgctggtttgttgttgcagtcaatctagacctaaaattcactatgtgagcctccacacgctgctctgtctggagctgcaacctagtcctgcctcccattcgccatgatgatccggatcccagt

SEQ ID NO: 780499 - DNA, 649 bp, Homo sapiens
tctttgcattggtctttgcctttctctggtgcctccctgattaacttagtaaataaccttctgatttctttttaggcaaatcagggatttctttttggtttggagccattgctggtgaactagcgtgacttattgggtgtgttaaatagccttgttttgtcatattaccagaattggttttctggttccttctcatttgggtaggctctgtcagagggaargtctagggctgaaggctgttattcagattattttgtcccgggggtattcccttgatgtagtactctccctccctttcctatggatgtggcttcatgtaagccaaactgcagtgattgttgtctctcttctgggtctagccatccagtgagtctacctggctccaggctggtactggtggttgtctgcagagtcttgtgatgtgaaccatctatgggactctcagctgtggataccagtgcagtatttggagtgtctcccaggtcctgcaggagtagtccacttccttcaaagttcctctctggattgctggtttgttgttgcagtcaatctagacctaaaattcactatgtgagcctccacacgctgctctgtctggagctgcaacctagtcctgcctcccattcgccatgatgatccggatcccagt

SEQ ID NO: 780500 - DNA, 586 bp, Homo sapiens
aaagaagacaaccaaaggtcatgtgaaatagtgatggctcactaataaatccaggacgaagttatcactactcaagcataagctttcctaagactgctacaaagatgtttgatataaaggcttgggttgagaatgttgtggaatgaactgcaagggacccctgtggcttctttatagyaattctttggcccttgttctactactgctcaaacaagtccatactgtcctggaaattggccaggatgattgaggccagaggaaaggaacaaaagaagaaaaaacgttgagaaaatatatattacataagggaaacaaccgaaaaaaggattaaaggaatgaacaggctgtgtaaaattatgtagctttagaaggacccactaaagcttcttccttggatattatgacagtattatttaataaaagcagtctaaccataatgaagaatcatgctagttcttacctcagtattgtattaacttccagtctttgcagtagaaaagtttattgatgtctgttgacagttattttaaattagcatttattatgctatcagttttttataaatgaagtagtcatttgccatttt

SEQ ID NO: 780501 - DNA, 586 bp, Homo sapiens
aaagaagacaaccaaaggtcatgtgaaatagtgatggctcactaataaatccaggacgaagttatcactactcaagcataagctttcctaagactgctacaaagatgtttgatataaaggcttgggttgagaatgttgtggaatgaactgcaagggacccctgtggcttctttatagtaattctttggcccttgttctactactgctcaaacaagtccatactgtcctggaaattggccaggatgattgaggccagaggaaaggaacaaaagaagaaaaaacgttgagaaaatatatattacataagggaaacaaccgaaaaaaggattaaaggaatgaacaggctgtgtaaaattatgtagctttagaaggacccactaaagcttcttccttgratattatgacagtattatttaataaaagcagtctaaccataatgaagaatcatgctagttcttacctcagtattgtattaacttccagtctttgcagtagaaaagtttattgatgtctgttgacagttattttaaattagcatttattatgctatcagttttttataaatgaagtagtcatttgccatttt

SEQ ID NO: 780502 - DNA, 671 bp, Homo sapiens
caaacaaaaaacaaaaacaaatcccttggtgtgtttgtgaaatggcaggcagtttaggtgtcctggttcaaggtatagagagtgtgtgggaggggtcagcaggtgaggaatttagaaaatagaagagctggagggaggtcagaacagctgagcagacctgagttagcatatggggtatcaagtcaaagccagtgcacaaygtggagctcaaacaataaaaaccaatggaaagctattaatgggttcaatggaggcagactggtctcccttaaggttttctttttttttttttaattaaagaaaaaatcaccctggaatagaatggaggaagaattataggggtaaaaactagagtgggaaggaaagttaagagaatattgagagaaacaatgggggtttctgaagcaggaacaacggacaagggagaatggatgacaaaaagaacaaggcagatattgatatactcgtgctataggtaaacagattgaagctctaaaaaggtgattcgcccatgatcacacatgggtccctattgacttcaaagccaagatgggcttccagctgtattcccttgggtggggccacattcacctagagcaggaggaccacttgcctagtcacccagtggcatttagtagcttggaaggtgtgctcaaagacaacagtctcaa

SEQ ID NO: 780503 - DNA, 671 bp, Homo sapiens
caaacaaaaaacaaaaacaaatcccttggtgtgtttgtgaaatggcaggcagtttaggtgtcctggttcaaggtatagagagtgtgtgggaggggtcagcaggtgaggaatttagaaaatagaagagctggagggaggtcagaacagctgagcagacctgagttagcatatggggtatcaagtcaaagccagtgcacaacgtggagctcaaacaayaaaaaccaatggaaagctattaatgggttcaatggaggcagactggtctcccttaaggttttctttttttttttttaattaaagaaaaaatcaccctggaatagaatggaggaagaattataggggtaaaaactagagtgggaaggaaagttaagagaatattgagagaaacaatgggggtttctgaagcaggaacaacggacaagggagaatggatgacaaaaagaacaaggcagatattgatatactcgtgctataggtaaacagattgaagctctaaaaaggtgattcgcccatgatcacacatgggtccctattgacttcaaagccaagatgggcttccagctgtattcccttgggtggggccacattcacctagagcaggaggaccacttgcctagtcacccagtggcatttagtagcttggaaggtgtgctcaaagacaacagtctcaa

SEQ ID NO: 780504 - DNA, 606 bp, Homo sapiens
cctttggaggaggagagctgctctgatttttagagtttccagtttttctgctctgttttttctgctggtgaggtacagatggggttttgttgtggatgtcctttctgtttgttagttttccttctaacagtcagaacactcagctgcaggtctgttggagtttgctggaggtctattccagaccctgtttgcctgggtatcagcagcagaggctgcagaacagcggatattggtgaacagcaaatgttgctgcctgatcgttcgtctggaagttttgtctccgaggagtacccagccgtgtgaggtgtcagtctgcccctactggtgggtgcstcccagttaggctactcgggggtcagggacccacttgaggaggcagtctgtccattctcagaactccagctgcatgctgggagaaccattactctcttcaaagctgtcagacagggacatttaagtctgcagaggtttctgctgccttttgtttggctatgcccttcccccagaggtggagtctacagaggcaggcaggcctccttgagctgcggtgggctccaccaaattcggacttcctggctgctttatttacctactcaggccttggca

SEQ ID NO: 780505 - DNA, 445 bp, Homo sapiens
aatctttctgccatccttccccaaggagacctttggcctttcacctgggtaactgtgtaatggagaaaaggaaatgatcagacatttcagaaactactggacactggctctgaactgacattgattccaggggacccaaaacgtcattttgatcctccaattaaagtaggggcttatgraagccagctaattaatggagttttagctcaggtctgacttacagtgggtccagtgtgtccctggactcatcctgttgtcattttcccagtgccagaatgcataattggcatagacatgcttagcagctggcagaacccccacattggctccctgactggtagggtgagggctattatggtgggaaaggccaaatggaagccattagagctgcctctacctagaaaaatagtaaatcaaaaacaatattgcatccctgaaggtattg

SEQ ID NO: 780506 - DNA, 445 bp, Homo sapiens
aatctttctgccatccttccccaaggagacctttggcctttcacctgggtaactgtgtaatggagaaaaggaaatgatcagacatttcagaaactactggacactggctctgaactgacattgattccaggggacccaaaacgtcattttgatcctccaattaaagtaggggcttatgaaagycagctaattaatggagttttagctcaggtctgacttacagtgggtccagtgtgtccctggactcatcctgttgtcattttcccagtgccagaatgcataattggcatagacatgcttagcagctggcagaacccccacattggctccctgactggtagggtgagggctattatggtgggaaaggccaaatggaagccattagagctgcctctacctagaaaaatagtaaatcaaaaacaatattgcatccctgaaggtattg

SEQ ID NO: 780507 - DNA, 456 bp, Homo sapiens
ggtttggcaggagaagacctggaggagttaggcaccctctgccatagctcaccattgctcagttgggtgtatgggacccctcttgctagattgacttctttcttttttttagtagataccagatatatgaaatttcatgttraacttgcagatctgaagtcttatcaaattgttttcacgaagcatcacgactccagcaaaactcacaagatatggcactcggccctccagtttgtctcaaatcaatgacttggtcatgttttgttaagagatttaaagaatcagggagccagttggtcctcattttcagtaattatcttcgcttgagctgtgggcatacaacactttttctagatttgtagaatagtgttatgtcatggccctttattgaacactgatttgatcactgagtttctgtggctctctgtttcccatttgcaaagaaaaacaatcata

SEQ ID NO: 780508 - DNA, 506 bp, Homo sapiens
ctgtaaagatgctaatcctcattctgtctctatgagctaaatgtatagatggtatttattcagtgaacacaaaactcctttgtgattgtccatctgccaaactaacttgcaaggtgtgaacatatatttttacagaagactgacttatgcagcatcttagaaaaatcacatacattggcctaactattcagaaatggaagggggattttgttatcttacttgacttagcaatccctggccttttgatttttgggatgtttcacgtgagcctgaatgaaaatgattacagattaaatcgggagtataattatttaggcwaaatttttattgagactgcatttctctgtgatgagtaattaaagtcacagataatttagagactgtggagttcagttttcttcattgcttatattactttgcattttcaggaaatatgctgtccgatgggttagcaatattagggaccactagaggacatttatttaatcgtcgaaagcaaccatgac

SEQ ID NO: 780509 - DNA, 596 bp, Homo sapiens
aaatatatcccaaacagaaaattttaagtaatgacaaaatatgaagtaaatattttttaaatgtgtgacattattaaaatagggcacaaaagttttgagatcacagaaacattagttattaataaccctagccagagaaatgtgatttaatatgcaatagtacttttgactattttggtttacttggtgataaaggagttcaaggctctgtttttaaattatgtttatcactatagtactaggttgtaatggcttttagagtggaaaaagacattgtaaggaatctatgagaccaaaagaactacatttctgggtgcacttattaagtaatttaatcattgttcagttccatccacgtttttcaggtttttttgttagtttcatttaataaattttcatcttcactgatgtcactaagttgttctaaaaaaraatcagaagatactgaaatttatatttttaacaaacagttggaaaaccattgaaaattttgttatttggaaaacattaaagtacatttataatattatgtttctaagttttctaagggaatatgggaatttataggaaacaaagagtatttggaacaaaaaaat

SEQ ID NO: 780510 - DNA, 586 bp, Homo sapiens
gtatacctatatttatacaggtacctatatttaggtctacatatgtatacatatatgtatacaggtatatattttatatatgtatacatatgtatacctatatttatacaggcatacatatatatttatattatacatgtattatatattatattacatgtaacatatattatgtataccatatgtatacctatatttatacaggtatacatatatatgtatacatgtatacatgtatacatatatatktatacatgtatacatgtatacatatatatttatacatgtatacatgtatacatatatttacataggcactctatctgtataagtgcctataatttgctggccgttgctataggcaggggataagacagacaaagtttttcccctcatggagcttccatttgagtagatatgtttgaaataaattgcagccctgaggttatcttttgagaagccttcatgtcacggctgtagataagaatatgatggcaaacacagtatggatgggagctctttttagctgcacgtgctgtagagccttggttaggtgtaacatatggtcattctacccaccactaaa

SEQ ID NO: 780511 - DNA, 656 bp, Homo sapiens
gtctatattcagagttgaggtttttcttctacccccagctaataaaatcgggggctgcaacgaggctgagcggcacgagtttgatgtccgcagcaggatacagggagtcagaagtggcgctgtaaatccaatgcggggcttccacgctgtgtgaagtgtggcctgagtcacagagattttcctttgatgcaagttcagtatattaatgggaaaagcattcacttttatttgtctatactgtctgcgacacaaggctgcctcatttagcctgggccaacatgaaaatacacagagaagcaatctgttgcaaattagcacaaccctcctttcatttactagctagtaattggaaggggttaagaaagtgtaacttatcagatcatgtgagcatatctgcctgtgtggacagcaagctttccccgaatttccctacgatccctgaggcaaaaagtccttcccckatgaccacttcatccgaaagaaaacatcgacaggtgtgaaatagacacactttgataggtttaagagtgcagtttcctaggctcctgaaggaggcattaaaatctttttttgaaccttacctttctttagatatgtttttactctcccgtttccaaattgtcttgaagtcactgcagaactcataccacaccata

SEQ ID NO: 780512 - DNA, 616 bp, Homo sapiens
tctgttcagacacagtggttttttttttgtgtgtggccatcctgaatactgattttctaatggaactctattcaatggcgattgtaaaaccctgaagctccgttactattatggagcatactttcatctcattctcggttattgggcaatatgtatctcataagattttatcacatttcacagatgaactgttaattgattccatgggtacgattaggcgagatccaagctggagctgcagctctgagtcccataaattctttgtgcttctgtaaagaataaatctgtttttaatgcaaattaaaactactggtcagggaattttggctcccagttattaaaagactggaartgtgtaagtggagaaaggcaataactgcagtaatctcttaagggactctattataattccaaacatacataatgttgagaaaaaccgggaagggaagaatgtggcaatgtccactcttgccccagacataacccttatttccatggcagtccaaacactggtaaaaccaaatgtacactctatagcatgtaactttatttcactcaaatgaaaattattttgactatagcatgggaatacataagtagagagttatataaccta

SEQ ID NO: 780513 - DNA, 629 bp, Homo sapiens
tttctgaatctttgtatatcccatcagtagctgtaaagatttttggtcttcccaagaaatccattctcacagaatttgtcttttaattggggtatataatttatttacttttaacataattacaaatatgagtttaaatctaccatcctactataagttgagtttttcttatccaaaatacttgggactacaagtttttcagatttcaaatgtttttggattttggaatatttgcacatatataatgagatatcttggggatgagacccaagtctaaatgtgaaattcatttgttttatatataccttaaacacatagcctgaaggtaattgtatatattttaataattttgtgcatgaaacaaagtttatttacactgaaccatcagaaagcacaggtgccattatttcagccacctgtatggacaatctgtcattgtttggcatcaccatctttactgactgaatttatatgcaacygagaagcaatcattttcttacacttactcacacaagtacccaacagtaaaaactaggaggtaccatgaatccagtgaaaaaataatgttcagggtaactaagcagcacagtagcgtcaccagaatacctgtatcagtttttaaacaatag

SEQ ID NO: 780514 - DNA, 628 bp, Homo sapiens
tttcttgctgattcttttattagttggggtcttttcttattaatttatgagttctttatacattctgatgacagttctttatcagaaccatgtagcaaatagcttctcccagtctttaccttaataggagagaagytcttacttttaatgtagtaaaatttatccaattttatggttggtaactttttgtgtcctaattaaaaatattttcctttcacaaatcatgaatacagtctttaaaaaacttgattcctttgctttcacatgtagacctacaaagcacctggaaactgatacttgcacgtacatattagctagaggtcaagttttttcttatataaatgtaccattatcccagaactattcattgcaacagcttttctgcatttctctagagtggcatttgtgtaatagatcgtatagttatatataggtctgtttggggagtctttattgtattctatttgtctatccttgtaccaaattcacactgttatagtagttatatagtttcaaaaaaatcatgatatctggtagaacacatttctgacaaacttgttctcttcttcaagatcatcttggctactcttgacactttgcaattacattcagatattagaatcagctt

SEQ ID NO: 780515 - DNA, 686 bp, Homo sapiens
atagacatgtctggatccagttcttttatctttgcatttccaactgctctgttttccttctttcttcccatcaaattcttatattttgacagttttaagaccagctcttccttgatcctttccttcctataatatattgaattgaagtgagcccatttcccttagtgagccttctctccaaacacaaaatactctgaagttcagattctccttctgtgagtgggttaacatcacacaaagtttgtggtttcatccatcataaacaagagtgttttacatgaactctgtttcttgtctcccaagaatcacagaaaggttggggcaaagtgaaataaattttcagaaagaaaagttacttattaaaaatagcagtgataaaaatatgtagattgatttagtaggaagaattcgtaaattgttttaacttaaaaggaaacactcttgcaggcattcacaatgaatcaggaggaaaacactttggcttcttcaaaaagctatttactctctttggtgttcacaaaacatatccaacaaaagccttttctcttaygatgcgagggaagaaggcaaattgcatttgggagcatctgatcatacttcactcaggaatgttatgggttttggttgtgtgcccagctgatctgagcatattagcaaacatagtaatagtattagctgctgacagt

SEQ ID NO: 780516 - DNA, 646 bp, Homo sapiens
tcctagatacaatgggggtacagatattgggtaaatacagccgttccaggccaggcgtggtggttcacacctgtaatcccagcccttttggaggctgaggcaggcagatcacgaagtcaggagatcgagaccatcctggctaacatgatgaaaccccgtctccactaaaaaatagaaaaaattagctgggcgtggtggcgggcgcctgtagtcccagctactcaggaggctgagrcaggagaatggcgtgaacccgggaggcggagcttgcagtgggccgagatcgcgccactgcactccagcctgggagacagagcgagactctgtctcaaaaaaaaaaaaaaaaaaaaaagagtgcctctattccagagaggcaagacaaacatgtctgtgctccaatatgcagattgagggagggaagatttggggaaaagtaggaaaaaatttgaaaaagaaatctaaaacctagatttaggacaaaaattagaacaagggaaggaggagaaagactagagagaaaaaacagggcaagctgctgtaacagattgtattttccaaagatggtctcaccaatatacatcccatcttacatgctcttacaatgtggcattgacattcttccatcaagaggcagagtctagttccc

SEQ ID NO: 780517 - DNA, 646 bp, Homo sapiens
tcctagatacaatgggggtacagatattgggtaaatacagccgttccaggccaggcgtggtggttcacacctgtaatcccagcccttttggaggctgaggcaggcagatcacgaagtcaggagatcgagaccatcctggctaacatgatgaaaccccgtctccactaaaaaatagaaaaaattagctgggcgtggtggcgggcgcctgtagtcccagctactcaggaggctgaggcaggmgaatggcgtgaacccgggaggcggagcttgcagtgggccgagatcgcgccactgcactccagcctgggagacagagcgagactctgtctcaaaaaaaaaaaaaaaaaaaaaagagtgcctctattccagagaggcaagacaaacatgtctgtgctccaatatgcagattgagggagggaagatttggggaaaagtaggaaaaaatttgaaaaagaaatctaaaacctagatttaggacaaaaattagaacaagggaaggaggagaaagactagagagaaaaaacagggcaagctgctgtaacagattgtattttccaaagatggtctcaccaatatacatcccatcttacatgctcttacaatgtggcattgacattcttccatcaagaggcagagtctagttccc

SEQ ID NO: 780518 - DNA, 609 bp, Homo sapiens
atgtttcactttggaccactcaagacgcccatgtggagaggaactgaggcttccagcttagagccagcaccaacttgccagctgagtcagctaactagaatgggcatcttccagtcccactcaagccatacagttttcagatgatgacagrctcatattaataattttttagatgacagatatgttaatgaacatatcactacaaccttatgagacactccaagtgataacagcccagctgagcctttctcaaattcttgatcaacaaaagccaagagaagtaatattgttgctttaatacactaaattttggggtattttgttatacagcaattaataactaatatattttctcctacaatttatcattgcacaatgatgggcatgaagcaaacattaccttcagaagatttggattcagtggcatctaatgtgcatgaagggccagtggagaactttaaagtcttttatttccataatgacaatcacagcaaggtgaaagtgggcagccgatctgggggagaatatttagcctcagggatttataacctgtgctatggtttgaatgtttgtcccttctaaaactcatgttaaagtttaattgccgtt

SEQ ID NO: 780519 - DNA, 609 bp, Homo sapiens
atgtttcactttggaccactcaagacgcccatgtggagaggaactgaggcttccagcttagagccagcaccaacttgccagctgagtcagctaactagaatgggcatcttccagtcccactcaagccatacagttttcagatgatgacaggctcatattaataattttttagatgacagatatgttaatgaacatatcrctacaaccttatgagacactccaagtgataacagcccagctgagcctttctcaaattcttgatcaacaaaagccaagagaagtaatattgttgctttaatacactaaattttggggtattttgttatacagcaattaataactaatatattttctcctacaatttatcattgcacaatgatgggcatgaagcaaacattaccttcagaagatttggattcagtggcatctaatgtgcatgaagggccagtggagaactttaaagtcttttatttccataatgacaatcacagcaaggtgaaagtgggcagccgatctgggggagaatatttagcctcagggatttataacctgtgctatggtttgaatgtttgtcccttctaaaactcatgttaaagtttaattgccgtt

SEQ ID NO: 780520 - DNA, 586 bp, Homo sapiens
tcccgatatagattaaaatgtaatagatgtgtttttaacttattgaacaaataatatattcacattgttaaaaaaattcaaggtctctttgattattgccattttagccagtggaacgagacaaagaacagatggctagagctaaagattccctcttaaattagcaaagcagaagttgcacacattacttctgttttgtactgcagtggcaagagcttagtcccatatcaacgaytactgcagagacttagggacatgtttttcctgggtgggcagccatagctagacacaattctattactatgaaagtaaagaagaccgacactgatggacatgtagtagtcttcaaccatcagagaatggtaattcctcagagtatctggagcctccatgactctcgctatgactctaaagtccacactccttatattacattaaagagcctggcttcatatccaaaagtgatgacaaaacaactgttttgttctgttatcttttatatgtgtgtgtgtgtgtgtgtgtgtgtgtgtgtgtgtgtgtgtgtatattctccattgcccttcactaacagaatttaaagaaaaaa

SEQ ID NO: 780521 - DNA, 642 bp, Homo sapiens
cgctcggctgggtcttgtgtgtctttcttaccacttattcaagacaattcaaaagtttggtggaaggatgtataatcaagaaagatagttgctgaattattttaatgtttttaatcggtgaaaaaaaattcagttctgtgttaaatgttgtatttgtaaaggggcaaaaccagagatattaaattgactggaagttcatgattttctttctttttttttttttgacagagctcgctctgtcgctcaggctggagtgcagtggcgcgatctcggctcactgcaaactccgcctcccgggttcccgccattctcctgcctcagcctcccgagtagctgggactacagactcccgccaccacgcctggctaattttttgtatttttagtagtgacggggtttcaccacgttagccaggatggtctctatctcctgacctygtgatccactcgccttagcctcccaaagttctgggattacaggcgtgagccactgcgcccggccgaagtccacaattttcttaccctgagtgtggaatcaaaaccttgcttagagtctaaataactctagctatcagcacaataacaaattgaaactcatttttaaaaccacttgacatctgaactttaaataaccttctatatt

SEQ ID NO: 780522 - DNA, 542 bp, Homo sapiens
atatatttttttcgagatagagtatccctctgtcacctaagctagagtgcagttatgcaatcctggctcactgcagcctctgtctcctgggttcaagcaattctcctgcctcagactcccaagtagtgcatgcgccaccatgctcggctaatttttgtatttttagtaaagacagggtttcaccatgttggycaagctggtgttgaactcctgacctcaagtgataggcccacctaagcctcccaaagcgctgggattacaagtgtgaggtaccattcctgatcctgatttttttttttttaagatctattctcctttgctttgttctgtgacttgctctccaccctttccaatgcaggcataattctagacttcctctccaatgactgccatctgttcttcctgaggtaccacacaaaggccaggactccagggaaggcagaaggcctatcctataggacagacatttcctttggtctgatgggtatggggccagagtatgtggctacttgagcatatttattttagttaaagtgaaacca

SEQ ID NO: 780523 - DNA, 542 bp, Homo sapiens
atatatttttttcgagatagagtatccctctgtcacctaagctagagtgcagttatgcaatcctggctcactgcagcctctgtctcctgggttcaagcaattctcctgcctcagactcccaagtagtgcatgcgccaccatgctcggctaatttttgtatttttagtaaagacagggtttcaccatgttggtcargctggtgttgaactcctgacctcaagtgataggcccacctaagcctcccaaagcgctgggattacaagtgtgaggtaccattcctgatcctgatttttttttttttaagatctattctcctttgctttgttctgtgacttgctctccaccctttccaatgcaggcataattctagacttcctctccaatgactgccatctgttcttcctgaggtaccacacaaaggccaggactccagggaaggcagaaggcctatcctataggacagacatttcctttggtctgatgggtatggggccagagtatgtggctacttgagcatatttattttagttaaagtgaaacca

SEQ ID NO: 780524 - DNA, 507 bp, Homo sapiens
gaaatggtcaattgatataactcccatctctgatgcatagcgtcaatatgtagtgcctaattaggtattctcaatgaaattatttctataaagtgtattttatagaatgcacagtgaaatttttgaagcctccgtggattatttcagattacccttggacttcttgttgcaagccaaatttccaagcaagaatcatgaaatgctgaatgctttagcaaaatgaactttgccccatgaaagatggtgttacgtatgctataattcttacagagataccgcatttgagagcatttcrggagataatgaagaaagtatgccttgggatacaacatttattccttttccagtagtgacctttatagtgtattttaggcatgaccactgccttttgatactgctcagtgttgcatacagatacctttccctgcaccgtattctgaacagggagatgtaaggaatattcaatgttagctcataaacatggactatatggtgtaaaacatggtg

SEQ ID NO: 780525 - DNA, 692 bp, Homo sapiens
ccttaccttgttctcaatcttacacaaatataattactatttccacattaattatgaggttagccagaggttttccatactagcaatttaacaaattgagaaaatgtctgtttccagtttgataagaagtttaatcattagttttttattaaaaaatttttttttgcaaatattgataagatctcatgatttttcttcttttttatggtaaactgaaaaattatccttctccatgtttatggggtataaactgatactatgttttaagaatacaatgtagataacttaaataaaaaaataatgaacgtaggcattagctcaaatatttatatttttgtggtgggaacttttgaaatttactaccagcaattttgaaatgtgcagtacactattaktgactgtattcactatgctgtgtaatacatcttaaaaaaaaaccctactaatttagtattcttgtataagactttgtattctttggtcatcatcttccaactctctccacccacaagcctctgggaaccaccattgtattctctgctgctatgatttcaattgttttagagtccacgtacaaatgataacattcagtatttatcgttctgtgactaggttatttcacttagcataatgttctagaatgttgttgcaaatgacaaattgctttcttgtgtaagactgaatagttttcc

SEQ ID NO: 780526 - DNA, 608 bp, Homo sapiens
catctgtttcttggtttgacattttatgaaagtgtcaattaccttctttagaagatctcagggggccttgccctactcacaactgaataattagaactaaatattaagatactgtactctctatataaatatctgtacatgggtgatgtgagtatataggagaaagacacaatttaataaactctgagaatatcataggcaccaggctgaaaactacctatagttttttgggtttaaatacattatcttttttttattttttgttattatactttaagttctagggtacatgtgcacaacgtgcaggcttgttacatatgtatacctgtgccatgttggtgtgctgcacccattaacatgtcatttacattagatacatctcctaatgttatccctcccccttccctcaaccgcacgacaggccccggtgtgtgatgttcccttcctctgtccaagagtyctcattgttaaattcccacctatgagtgagaacatgccgtgtttggttttccatccttgagatagtttgctgagaatgatggtttccagcttcattcatgtccctacaaaggacgtgaactcatccttttttatggctgcatagtatt

SEQ ID NO: 780527 - DNA, 608 bp, Homo sapiens
catctgtttcttggtttgacattttatgaaagtgtcaattaccttctttagaagatctcagggggccttgccctactcacaactgaataattagaactaaatattaagatactgtactctctatataaatatctgtacatgggtgatgtgagtatataggagaaagacacaatttaataaactctgagaatatcataggcaccaggctgaaaactacctatagttttttgggtttaaatacattatcttttttttattttttgttattatactttaagttctagggtacatgtgcacaacgtgcaggcttgttacatatgtatacctgtgccatgttggtgtgctgcacccattaacatgtcatttacattagatacatctcctaatgttatccctcccccttccctcaaccgcacgacaggccccggtgtgtgatgttcccttcctctgtccaagagttctcattgttwaattcccacctatgagtgagaacatgccgtgtttggttttccatccttgagatagtttgctgagaatgatggtttccagcttcattcatgtccctacaaaggacgtgaactcatccttttttatggctgcatagtatt

SEQ ID NO: 780528 - DNA, 651 bp, Homo sapiens
atctgccagggatcctggagccaatccctttcagataccaaggaacaagtgttttgcatatttctaaatgactgagttaatttcaaatgtacttaccacaaaaaataataaatatttgaagtgatggatttgttaattagcttgacttaagaattctacattgtattcattaataatgacatcrctttttaacccattagtatattcaactatatattttcaatttacaataaaaaatgatcagaaatcaatggaatcgaaaacaagaaattaatagataaatgaaacaaaaatggttctttgaatatatcagtgaaggtactaaatctatagctaggcaatacaagaaaaagagaagaaacaaattaccaataaccaaaataagagagtggtcatcacttctgatcctgcagacataaggtgataataatataaagagtctaggcccacaatcttcataacttacatgtatttccttccccacatacactaccccattgtaaaaattaaaaaaattaagaaaaattttaattgatgggcatttgatacaatatctgattagtactccactaaacttacaaagtatcaaaaataaggcccatataagaaagtctcatagccaagagaagcttaaaaagacatgagcactaa

SEQ ID NO: 780529 - DNA, 651 bp, Homo sapiens
atctgccagggatcctggagccaatccctttcagataccaaggaacaagtgttttgcatatttctaaatgactgagttaatttcaaatgtacttaccacaaaaaataataaatatttgaagtgatggatttgttaattagcttgacttaagaattctacattgtattcattaataatgacatcactttttaacccattagtatattcaactatatattttcaatttacartaaaaaatgatcagaaatcaatggaatcgaaaacaagaaattaatagataaatgaaacaaaaatggttctttgaatatatcagtgaaggtactaaatctatagctaggcaatacaagaaaaagagaagaaacaaattaccaataaccaaaataagagagtggtcatcacttctgatcctgcagacataaggtgataataatataaagagtctaggcccacaatcttcataacttacatgtatttccttccccacatacactaccccattgtaaaaattaaaaaaattaagaaaaattttaattgatgggcatttgatacaatatctgattagtactccactaaacttacaaagtatcaaaaataaggcccatataagaaagtctcatagccaagagaagcttaaaaagacatgagcactaa

SEQ ID NO: 780530 - DNA, 603 bp, Homo sapiens
taggagcaatggacattaaaaattggttttaattatgtggttttttttaaatacaaagttttggtctccattactttggacttgtacctggctgagtgttccatcttatttttacaaaccaagttcaaaagcccatttacacttaaacatgctttctggaaagtgagaaataagtcatgaaactagagagtgttcagagaaaagccactgaaatgatgaaagacttgaaaggtgctttctgaaggcagatcaactaaaagacaacttcagtctagaacgatgaaggctctacaaatgggtgacatcttgatccaagttcaaaagttgtaatgtaacattttttgggataatatggacagattccctaagcytcagcactccctctaagggactttttaaaagattttatatataacatatacttctccacaacatatctgctcctccaggacaattgcagacacttttgtgggctccttgtccacctttgtatttctactggtttttgcattgtactattcactaggtaaattcttagtaaatttttatttagttgaactgaattataattttcagatagatacaaagcatggttttgcgaag

SEQ ID NO: 780531 - DNA, 640 bp, Homo sapiens
tgctgtagaagcaccaaatcacaggagctttggtgtcaatcacactggcagcaaataaaaagtctccacctgccagggtggccttattttcctccttcagtcagggtgacagaaattctctctctctaattgaatatccagtggccctttagtctgcttttaactgcttatttaacaaagcacttgaagaaattgttgtaagaactagtccccttttagattattttagtggcagaacttttttcaaagccacaaatgcagtatcagcattcatagtgtgtattcataataaaaatgaaacwccctttccactccataatgacagggtcatgcaaaaataaatacctgagttatttgcttatttcctccttgccttgagtcagaaaccacagactccaatgcccactaggaccaggcaatttacataaataaatgaagccagctgggtgtaagacagaatgtggagagatggggacttaggatagcagatagcgtacacctgtccaaaaattacagccgttttccaatctttaaaatctggcgctgccaaagaaaacatctccaggctgaattcagcacacagggtagatgtagcaggccattttatcacttttatgttaattaagttaaagttaatcag

SEQ ID NO: 780532 - DNA, 532 bp, Homo sapiens
tcaagatctcttgttgtctcacttctatatctgatcttgctctctttccccacacaggcagggcttcctgcctcccacttcacactagtgattcctcacctacctgtgacttcaccatcaccattgctgcatatgtgtacttgactttttttttcaagtaggatgacaatctcagtcccttcacatgtctttagaagcagtagtgcagagttttagaatttctttytaaatcccgtttgatctatctttcctcattcctttccagaagttgttaccagaaaggggtcccaattcagatcccaagagagggttctcgaatcttgtgcaagaaagaattcagggcgagtccatagagtaaggtgaaagcaagttaattaagaaagtaaaggaataaaagaatggctactccataggtaaagcagccctgagggctgctggtttactatttttatggctatttattgattatatgctacacaaggggtggattattcatgagttttccgggaaaggggtgggccattcccggaac

SEQ ID NO: 780533 - DNA, 603 bp, Homo sapiens
tgcatttgattgactccacacagggagaggtaatggggagaggatgtcagaatgctcagaaggggagaaatggagctgggcaaggtggctcacacctgtaatcccagcactttgggaggccgaggtaggtggatcacttgaggtcaggagttcgagttcaagaccagcttagcaacatggtgaaaccctgtctctactgaaaatacaaaaattagctgggtstggtggcaggcgcctgtaatcccagctacttgggaggctgaggcaggagaattgcttgaacctgggaggcagaggttgcaatgtgctgagattgcgccactgcactccagcctgggcgacagagtgagattgcatctcaaataaataaataaataaataaataaataaatagtttttaaaaaataaagggagactgaggcagttcacatggggacgagtccaggctccagggctctacttgcaggcactgctgtctctgtttccagtaccagagtgggattacatcaaacttagaaaactttaaggaagacactccaaagcacaaggctctgcttgagacaagggccctgcttgtccaggtctaaagcagatactgctctg

SEQ ID NO: 780534 - DNA, 601 bp, Homo sapiens
gttggtgtgccaggaatgttcctataatgttctcacttaatgctcacagcaaccttgtagggtaggtagctcatattcccattttatagacagaaaaattaaggaccaaaacatggagagtaacccatccgaagtcacaatgcaattaackggtgcagctggtatgtgaatctggtctcttaattccaaagctatgttctggtgtatcacaataaattctgcatgctgcacatctcctaacactcaaggtatagctgggtcagcaactttccccctctcccctccagccaacatacacgcacactccaggctcattttaaacaagctatccattttcaaagtactgatcaatctgcatctaatgcaaaagcaacactgaagcccaagcagtatattcccacccactaaaaaaaatttttaggcaggttttttttttaatgtgcttagcatagaaactgaaggtagggggaagcacaagaatcatttgctatgaaaacaaagttcaccaattccatgtactttctgacaatcacccatgagatttataggatcctgtctttaaaacttaaaagggtcagacagaaattgagtaagtatcact

SEQ ID NO: 780535 - DNA, 630 bp, Homo sapiens
ggcaatcattagcctcactttacctgtaaaagcatccccccagccgggcgtgcgtggctcacgcctgtaatcccagcactttgggaggccaaggcgggcggattacgaggtcaggagatggagaccatcctggctaacatggtgaaaacccgtctctactaaaaatacaaaaaattagccaggcgtggtggcgggcacctgtagtcccagctactcaggaggctgaggcaggagaatggtgtgaacccgggaggcggagcttgcagtgagatgagatagcrccactgcactccagcctgcgcgacagagtgagactctacctcaaaaacaaaaaaacaaaaaaacaaaaaacaaaaacaaaagcatccccctatctcggtcttcatctctacatggctttttccctctgtgtgtgcctgtatccaaatctccctttttaaataaggacatcagtcatattggctcagggccactctaatgccctcattttaacttgatgacctctgtagagacctcatctccaaggctgcattatgaggttcttgggggtaggacttctacatagaaacttttggggatacagtgcagtccataacacctacctggagactggttttggggtgacaaatc

SEQ ID NO: 780536 - DNA, 635 bp, Homo sapiens
gttattccatgtctttgctactgtaaatagtgctgcaatgaacattcgtttgcatgtgtctttatgctagaatgctttatgctcctctcggtaaatatccagtaatggaattgctgggttaaatggtagttctgcttttagctctttgaggacttgccataccgctttccccaatggttgaactaatttacattcccaccaacagtgtataagtgttcccttttctccacaacttcatcaacatctgttattttttgacatttcaataacagccattctgattggtgtgagattatatttcattgtggttttgatttgcatttctctaatgatcggtgatattgagatttttttcatatgcttgttgactgcatgyatgtcttcttttgagaaatgtctgttcatgcctttgccacattttaatggggacttgtcttggatgagactgagactttttttcttgaaaatttgtttaagttccttatagatgttggatattagacctttgtcagatacatagtttgcaaatattttctcccattctgtaggttttctgtttactctgttgatagtttcttttgctgtgcagaagctattgagtttatttagattctacttgccaatttttgcctttg

SEQ ID NO: 780537 - DNA, 635 bp, Homo sapiens
gttattccatgtctttgctactgtaaatagtgctgcaatgaacattcgtttgcatgtgtctttatgctagaatgctttatgctcctctcggtaaatatccagtaatggaattgctgggttaaatggtagttctgcttttagctctttgaggacttgccataccgctttccccaatggttgaactaatttacattcccaccaacagtgtataagtgttcccttttctccacaacttcatcaacatctgttattttttgacatttcaataacagccattctgattggtgtgagattatatttcattgtggttttgatttgcatttctctaatgatcggtgatattgagatttttttcatatgcttgttgactgcatgcatgtcttcttttgagaaatgtctgttcatgcctttgccacattttaatggggacttgtctyggatgagactgagactttttttcttgaaaatttgtttaagttccttatagatgttggatattagacctttgtcagatacatagtttgcaaatattttctcccattctgtaggttttctgtttactctgttgatagtttcttttgctgtgcagaagctattgagtttatttagattctacttgccaatttttgcctttg

SEQ ID NO: 780538 - DNA, 635 bp, Homo sapiens
gttattccatgtctttgctactgtaaatagtgctgcaatgaacattcgtttgcatgtgtctttatgctagaatgctttatgctcctctcggtaaatatccagtaatggaattgctgggttaaatggtagttctgcttttagctctttgaggacttgccataccgctttccccaatggttgaactaatttacattcccaccaacagtgtataagtgttcccttttctccacaacttcatcaacatctgttattttttgacatttcaataacagccattctgattggtgtgagattatatttcattgtggttttgatttgcatttctctaatgatcggtgatattgagatttttttcatatgcttgttgactgcatgcatgtcttcttttgagaaatgtctgttcatgcctttgccacattttaatggggacttgtcttggatgagactgagactttttttcttgwaaatttgtttaagttccttatagatgttggatattagacctttgtcagatacatagtttgcaaatattttctcccattctgtaggttttctgtttactctgttgatagtttcttttgctgtgcagaagctattgagtttatttagattctacttgccaatttttgcctttg

SEQ ID NO: 780539 - DNA, 667 bp, Homo sapiens
gcttagagcctgaaacagagctgctggctgctacgaaaggttaggagatcaaactccacggaagcccgtccactctctgcttttattaaatgtattctctaagttcaactttaaatggaaccaatgctgtcacttctgttgttgtcaactgcatgtaggagtggacaaaaagctccacattatgtagaagaaaaggcatgggaaaactggttcaaattctgactgtgacactcattggtagggtgatcttggacaagttatccaattttggaaagtgtccttttccttctctcccacatcaaccagaacacccactaagtctgacctgtgcgtggctgtcatgaaacggactggagactccgcactggaggaggatgctgcctgctgtagtcatctctctcatctcccccaccaaccaacccagccacttggtgcagcgcctggcagaaaaagggccaatatatgtccatttgcagaactgagtttcataatccaaaaatactsatgtaggtttctacatgagtagaactgctaatagaactaggtccctcttcctggagacctcagcccctagaacttcctgtgtcacttatgtcacaacctcagaatggtcacccctgatctcccacctacagtcaggccatacctcctccacccaccctgcaaa

SEQ ID NO: 780540 - DNA, 493 bp, Homo sapiens
tagggccttaaaaaaaagactatatattattttctactaaactcataattccttggttatgtccacctctaatgcttatataccatggaactaagaggccactgaccagctcagagttcaaagcagagtttctaaatatcgctagtaacacataagagtcttgaaaagcacttttttgtttatttctttagacattttaaagagtttctgaaaatgtttaattcccttaatatttcaagagtccaatctggtaactaaattacagtttaactttaggccagtktgaagaagagcaattagagaaaatgtcagtgttcctgccaccagctgcaaccttcatcaccattgctcttctgtgagactgcagcttgaaagggaagggcttggcaatatctatataaatatagggaagtaaatattaactgaagataattgtttttttagggcacactgtgaggaggctacatatctttggaaactgagattgtggata

SEQ ID NO: 780541 - DNA, 607 bp, Homo sapiens
aagtttttttctctttcttcagatgagaaaattcttgtcataagtatgacaagaaaattcttgtcataaccaagtgttcaatttaatttatagaaagcatgtaggcaaatacccgggaattgaaaacatgtaaagtaacatcaattatgttaattattttaactactttagaagaactttttaaaagtattccagaaggctttattctgcatttaccttatactctactgtccttattttattctmtttccattgagttttatcatttcttctagctacaattcacattttaaaaatttccaccagtgacatcatgaaagcttttgcctaaattgagaaattaattggtatagcaaaggaaactgctttttcccttttttcaaacttaaatccagatgtaaatcctatattttactttatatagtaactacgcagtaatttttttagtcattaataagatgatataatgggttatctatccattttcccatgtaaactttagttttatatatatatatataaatatagttatgtataactttatatattttataaacttacatatattttataaatataattagttacatatgtaagactgaagttt

SEQ ID NO: 780542 - DNA, 609 bp, Homo sapiens
gattcaaatctggagaataaggcaaggactgaatgaaattgtgttaatttctgtccaatttagttaaattttcttaaggtgtgattgatttccttaggaccttggtatatggtccagtgctgcttagccaatgggttaagtatctccagattcccagatatttttctacccttatctatatcccgtcactgcatgaagaccctgaggacttagaagttaaggtcttaatttgatcttgaagatgatttaaacttctggagtctcatctgtaaggccaggacagttgcacagaatgtttgttaagatttccatgcagaaacctaacctaataagactcagtgaacagggrtatggaaattaccagtgggctgcagcctcactatttaaacatgtcttagtggccggacgtggtcgctcacgcctgtaatcccggcaattggggagtctgaagcgggcggatcacgagatcaagagatggagaccatcctggccaacatggtgaaaccccatctctactaaaaatacaaaaattagccaggcatggtggcacacgcctgtagtcccagcaacttaggaggctgaggcaggagaatcacctgaacccggagg

SEQ ID NO: 780543 - DNA, 584 bp, Homo sapiens
acacaggaggcccaagcaagtctgaacacctcctggagctgttttctaggccatcccaagtcctcatggacaaatgaggcttaaccatggggaactgagcttcatgggtagggctagcacctctgacctcagaaacactggaagatgagtgtggtcaaggctgttgggagccccatgaatcactgcttgaaggggcttgacatgtgatggctggcactgcagacaggagatgacaagtcgagagccaacagaggagtctgtttgctggaccctcctgctggcagcaaaaatgccaacccaaacccccaagtctattcataaaatggctgcaaagacatcaatcctgatttttaaaaagagaaagacttcagcctgagytgagggaggccgattcctcctcctttgcggttgcgggatagctgcaaaaaattgtgagattattcaaaatttgacaggctgtgaacacaaaaagaaaaaagtctcaataaatgcataaaaacaatttttaaaagtaacatttactcctaatagcaatgttttatataagaatagaaggataccttgggtgatgggggcaccaaagt

SEQ ID NO: 780544 - DNA, 609 bp, Homo sapiens
aatacacacacacacacacacacacacacacacacacacacacagtcaagagactcctagattagagacagacttttaatggctaatagaaaagcttgcattagtctcttcatgcctagattccgcatgagacaacaccatgaatgcaggtatcagcagtgtgtacattgatgtttgtagcataaaaaaggaattgcaaaattaggaatcgcagaatttatgtaggtcagctgacaaatctactacttccgtctgaagagaaagagaacaacccttaatctgaatgtaaagaaaccttcccaaggtagggaactagtctccaggtttggaaaccctagaatataaacaawtggcttcagggaattaggaagtgactattaattagaagcagatttcttttgggagtgacacaaatgttctaaaattgaaatttggttatgattatgtagctctgtgataacactaaaaccattgaattgtacactttaatatggtgcattaaattatctcaataaaattgttaaaagtaaaagctatgtcctccagtaggaatttctcaactcagggtcacagattactattggtgtggagtgaaatataacaaagaat

SEQ ID NO: 780545 - DNA, 572 bp, Homo sapiens
atgaacattttatgcactaaaggtctattctaagtactatgagttgatgcacttctgctctttctattttggaatgatcatggttaaacaggaaaacacatggggaaaggagaagagatagagaaaagtttttttytactaccctctcccaaaaagaaaatggctaacacctcctgctgtgtagaacagagcttgctgaattctgacaattcacagaagagctttctgtaaacagaagcttaacatttaactgctaacataagaaatttagagtaaattgaattttctatggcctctcaggtccagcaatggaaatcaacaagctgaagaagccatgcttagctgttgctaagttacagtgaatacctattgtaatgtgcgtggatgtacattaattccaagtactgtcattatgcaccgtggtagtacaaagaagaacaaatagatttaaaatgatttttaaattctttaaattaaatatcagtcaaatgtttttgttctttttttttccctttgtcttcaaggttttttgttgttgtttttattaaaacttaacagtaagagaaagaagg

SEQ ID NO: 780546 - DNA, 573 bp, Homo sapiens
ttgtcttctttttctataaatggttcaattttctttccggaatttatcagctacatcaggatttgtacctgtaagtaaaaatagaaaatctgtatcttaactttactcctccaggggaaggaacttacagcataggggatagggtgagggaggtacagtatatgtcagaaaaacagagcgccttgggggtagcaatttatgttcattcactccttgccttcckcacacctaacaaggctacagtatcctgcaaaaaacctccccagaactcttcacagctactaatgttttagatggttgcctctctctgttgtaattcactaccttactgagttggggatgaatgggaggttgggttgatatagagttgaggctcctgttctgatggtgtgaaccatgacaattataccaattgggaaaatgtgttacctgttggtgagcagatgctgttttgagtctcctatctaccccagtcactcagaatctccctcattatccatcaagcagagaaatactggctggcacagaagggatgtccatgaccaactacaccatttggattattcaggagtg

SEQ ID NO: 780547 - DNA, 648 bp, Homo sapiens
tggtgtattatgtttctttgtggatgtttggtttggagctaggaataaaagcttgcatgtcataaatatgggctgaattcttggactttcagtgagtgtggtaagcatgaacctttaattagagaataatgtgagtgatcggtgagttcctgcttcttatactttatgttgtcttcttattcatttactgaggctcttgtctagatccaaatataagtgtggcaatgcacattcaatttttttcatggtgatactcattcaactttttggcactctgtaaagaaataagcaagaagaaatggtcaatagagaaagtatgtggtatctttttgtacttaataataatgattagcaaattctaaccagggtctacaataatttcattttaaaacaacaaattgatgatatgaggaggtaacaaaagtatccaaactgaaacatagcttagagaaaaaaattacagaggtagataaattaccacttgaatarccattaaattataaaggctgggcatggtggctcacaaatataattccagcactttgggagactgaggtgggcagatggcttgagcccaggagttcaagaccagtctgggcaacatggcaaagccctgtctctacgaaaaatacaaaaataattagctgg

SEQ ID NO: 780548 - DNA, 520 bp, Homo sapiens
attatatatttatttaatgaacatctgagttcattaaccaccgcattaactaccacacaacataggaaataaaatattacaaatataattgaggcccttggtttattcttccctaattgcatttccctcccttccaacaggtatccatcatcccgaatttggtgtttatatgtttttacaattaataatgtatattatatatccattatatattgcatatatatttttraagcatgcaaaatatatatggcattattttgcatgctttaaaactataataaaatcattatgtatattcatatatggtgaatgaaacacatgcatgagtatgttcatcacagcactattcacaatagcaaatataaaacaattttttgctcattttatatgtgagctttcttaatggtgaaaaactgtagctatgctctataatattccattttgttaaaatttggtcatgtgtatctccatttttatggtgattaaaacataaagtttccaatttttttattgttataca

SEQ ID NO: 780549 - DNA, 555 bp, Homo sapiens
tttctaaatgaaagttttattatcatatttttttcaccatgatctttcattatagattttaagttaatttatctcaccattatacatatgtcagaagacatagagtcagttctttaaagaactgatccaggcctaaamaaaattaggaagggggcaagaaaactcaacatacagtcagctcaaagtgataaaatagattaacggattaccagtaattttactgtactcagtcttaagacttaaaaaaacacccaaaaacctttataggtataaattgaaaaaaaaaatccaaaaccaaacaacaaaaccttcaacaacaaaattactactaaaatacaactattaaaaatggaaatcaggttttttgtttttttcagtttaccttttgagtagccaatttttttgttttgagataaccctttgaaagaaaggtgttttggaggaatatacattttacgtattataataccctagaaagatctgggataacacctcacaatcagagcctttcatatttctacagtgaagcctctggctattcacactaagatgaac

SEQ ID NO: 780550 - DNA, 620 bp, Homo sapiens
atttgtcctgttgccaaggaaaataagcacctatacttgtagccaaagctttaagaatttagtcagcaaatatttgagcgtgtactatgtgtttggcgctgctctcacagctgtgtgggatataaaagtataagatgcacttcctgtccccagggaccttgcaatgtagttaaggaagagagatatgcacacatggaatgttaattaacaaagcaaggccatctagggtaaatagcaaattaatggaatgaacaataggaaaatggtgcttagggaattcagaggagggagtgttgatggtgatagtaataaagaaatttagtatcattttattgagcatttattgtatcccagacacatggcattaagtgctctatgtgtattaccattttacagctgaggaaactgaggcttagggaagttgaatgacatgcacaagkccacacagccagtgggtgatgacaggagagtgatcttggggtatctcacacaagaaggagctcttaatttcttgacattctttatatttaaaaaattatttttaatttttgtgggtacatagtaggtgtatatatctatggggtacatgagatgctttgatacaggcatacaatgtgtaa

SEQ ID NO: 780551 - DNA, 613 bp, Homo sapiens
ataggatctttccattgcgccaaagtgaaacacaagccttttaaccatcggactcgttcatttgttcagctagtctttgttgaacacctgccaggtgcactatactaaacacatcgatgaacaaaatgcattgtggtatttacattctagcaaggggaggcagaaaacaagcagtaaataagttaaataagtaaagtccctagcttactaagagatgaaaaatataggccaggcrtggtggctcatgcatgtaatcccagcactttgggaagtggaggcaggtggatcacaagttcaagaccagtctggccaacatgatgaaaccccatctctactaaaaatacaaaaaattagtcgggtgtgatggtgtgcacctgtaataccagctacttgggaggctgaggcaggagaattgcgtgaacctgggaggcggaggttgcagtgagccgagactgcgccattgcactccagcccaggtgacagtgctagagtttgtctcaaaaaaaaggatgaaaaatacaatgtagtgtggggcagcgtggggcatcttgaagcatgaattaggattccggggtgagaaggtgagatgatgcacaatccacaatcctgatgg

SEQ ID NO: 780552 - DNA, 600 bp, Homo sapiens
tgcttgggccaggccctggtcatcacagggttcaaacagtgtcctcctagaaagagtgggagagcagctcacttctctctctgttctgcctccactctggtctccagagttttcccatcccccagaggcgagccaggccagagctctgcccaaggcagctggtagcgagcagctgaggccacagccacaaggagctttccatgcccctgtgtcacttagcctcacctccttcctccagagtggctctctgcagccctctgttcctgctacgtaggattctttgctggagtcaggatgttctcggtcaccctcctggctctgccctgtcccagtccrccccaccccagggggagcagcagcttcaccttgtgcttcccagtgctctccaggctcactctcatgggcgggctccagtgactaaagcattccccacccttggaatgtctcatcttctacctctcttcttattcattttggttttgtggggagaggggaaggatcagggggccaggccagcagctcaagggccacagggagatgggtaatgtgcctgtttttttaacacaacaaaaaagcctacctccaaaatcccctttttgt

SEQ ID NO: 780553 - DNA, 564 bp, Homo sapiens
cattaataacataaagatgaggtgacgctggtaaactattaatatgtctgttactactactaacaacagctaacatctaagtgcatgcttgaagccaggcacagctggaagcactgggaggaactcatttaatccacacaaccacactatggaraggtactattatgatgctcattttacaaactaactgattaaataagtacttgctcaagggtaaaactagtgggtcttggggctggaactggaatccagtcactctattaccattatgccctttctggcaccacacactgccaccttattatacactgactatagcaatgtaaacggaggcaatcctttcagaaagcaatctggcaatagaccagaagccacagaaatattcttccgatgttcttcttactgctctctggttatctatcatccatgctcaaagattcaccacagctttatttaaacaaaaaaggaaaagtggaacaaaacttaaatgcctaataacaaggaaatggtacaatagccaagatttggaagcaatttaagtgttggataactaaggttatccaa

SEQ ID NO: 780554 - DNA, 633 bp, Homo sapiens
gcagagtacccagatcagagttggaatttaatttttctggtttaggcttagattggaaacagtcataagacagcaacttcagaacattctgctgcccacaccacacagggacacggaaagtaatagaatttaacgtttggcaaagtcttttctctctctctctttctttctctctctctctctttgtgagatggagtctcattttgttgcccaggctggagtgcagtggcatgatctcggctcactgcaacctccacctcccgggttcaagcgattctcctgcctcagcctcccgagtagctgggattacaggtgcctgccaacacgctcctgtaatttttgtatttttagtagagacggggtttcaccaygttggccaggctggtctcgaactcctggcctcacgtgatcttcccgccttggcctcccaaagtgctaggattataggcatgagccaccacaccccgccatagcaaagccatttcttaaagacagtgcaaacatcttgagtcaaaaaaaaaaaaaaaagaaaaaaagaaaagaaaaccaaatatgtcttactgagaatagttgctctttgaattcaaaaaaaagtcaaccctatttgcatgtattgcttcctatcaccctttt

SEQ ID NO: 780555 - DNA, 617 bp, Homo sapiens
tgctcttacattattttacattgtttcttgtggcaacatttccctccgtgtatgttaagaatttagaaatgttatatggtgactgctagggactaaattgtattcctctcccctaaatttatatgttgaagtcctaacctccaatgtgatggtttttggagakgaggcctttggtaggcgattaggtgtagatgagttctaagggtggagcctgcatgttgagactagagcccttagaagaggaagaagagagatcagagctttctgtctctgccacctgaggacacagcaagaaggtggccgtctgcaagccaggaagagagccctcatcaggaatggaatctgctggcatcttgatcttggacttccagcctgcagcacagtgagaaataaatgtctgttggttaagccactcagtctatggtattttgttattgcagccccagctcatgatgacagtgacaattcatctgtctatcccttacattggtgataatcagtgaagaattaaaaaaaaaaaatagaaggtactacgtaaataaagacaggcaatggtctttaagatcaatgtcagtacatgtattatggcaagtattaaatgatcttatacagccaga

SEQ ID NO: 780556 - DNA, 617 bp, Homo sapiens
tgctcttacattattttacattgtttcttgtggcaacatttccctccgtgtatgttaagaatttagaaatgttatatggtgactgctagggactaaattgtattcctctcccctaaatttatatgttgaagtcctaacctccaatgtgatggtttttggagaggaggcctttggtaggcgattaggtgtagatgagttctaagggtggagcctrcatgttgagactagagcccttagaagaggaagaagagagatcagagctttctgtctctgccacctgaggacacagcaagaaggtggccgtctgcaagccaggaagagagccctcatcaggaatggaatctgctggcatcttgatcttggacttccagcctgcagcacagtgagaaataaatgtctgttggttaagccactcagtctatggtattttgttattgcagccccagctcatgatgacagtgacaattcatctgtctatcccttacattggtgataatcagtgaagaattaaaaaaaaaaaatagaaggtactacgtaaataaagacaggcaatggtctttaagatcaatgtcagtacatgtattatggcaagtattaaatgatcttatacagccaga

SEQ ID NO: 780557 - DNA, 611 bp, Homo sapiens
ctccagcctgggtgacagagttagaatctgtctcaaaaaaaaaaaaaattaaaaattagccaggcatggtggtgcacagttgtagtcccaactactgaggaggctgaggcaggaggatcacttgagcccaggagttcaagactgcagtgagytattattgcaccactgcactccagccctggtgacagagtgagacctcgtctcaacaacaaaactaattaaaatcaagaagtagcttgtgagccagggggtggggtgggaatggaagatcccgttatcagaagctatagcctataactaaccaacttttaagctattcagcagaaacagtcaaacacacccaagttgaattaatgattgtcataatctatttaaattttaatttgaatctcctgtcataaattttaagaattgcttgttaaatgctgtaaataagtatcttttgtgattgattttttgggggtttttttttaagaaaaaaaaagccttttaaaagtgtttagaaatatgaggaagaaagaaaagaaacttggttagccattactccaaatttaaaagacaagtatagttagaatttattttcacataccaattaataatatgggctgggc

SEQ ID NO: 780558 - DNA, 577 bp, Homo sapiens
tagacttgactttaagtgacttttggcatttgaaaaaaaaaatcaaatccattctcgagcacaggaagatttatcaccagtgaaaacgcgttgacaaatctgacacaagcctcaagggcaaacccaaaagattatcaaaaatgtttcaagaaatagcaagcatcagagaaatacagtgactactttgaaagcggtagcaatcatttggacaggtaaattatatcacagactgtccctaacctatgatggtctgacttatgatttttctactttacactggtgcaaaagcartgtacttttagtagaaactgtacttccaattttgaatgttgatcttttcccaggctagcagtacgcggtacaatacgctctggcagcgctgctcagccatacagtcacaagagtaaacaactgatagtctacagtgtactgaattcaataaagtacatgagccattcaacactctatgataaaacaggcttgacattagatgattttgcccaactgtaggccagtggcagtgtttagagcacctttaaggtaggctaggctaagctgtgatgtttggtgggtaagg

SEQ ID NO: 780559 - DNA, 608 bp, Homo sapiens; identical to SEQ ID NO: 768940

SEQ ID NO: 780560 - DNA, 568 bp, Homo sapiens
acggacctcagtacattgaccctagtgacagcctttcttgcttctcatctccagatgagagatgtgtggaagaatacaaaaccaaccagagggatgcctcttcttcctatccagctgagaaattaggaagggatttctgttaaaaagaattcttcatatttataaaggtggaaaataccaagaaaattgtaggtttttattagctagtaatagaggctagacgatggaaatcagataaaatacaaattcaaaagaggattatttaaggaatytagaacaatttgggtaatgattgtttaaaatgtctgttgttgttgctgtgtgacttttaaacaatgtattttaacggaaaatacatgcatctgggaaaatttcacaagatattttatcgaatgttagtatactctacacgctgtcctgcaccttgctttttttactctatgcgtcttgcagatcattttatataatacatagagaggtgactcattctttttaaaggttacattaagtttgtagtatgtcagaatggcaatactataattgttttaaccagtgacgtttaagttgt

SEQ ID NO: 780561 - DNA, 568 bp, Homo sapiens
acggacctcagtacattgaccctagtgacagcctttcttgcttctcatctccagatgagagatgtgtggaagaatacaaaaccaaccagagggatgcctcttcttcctatccagctgagaaattaggaagggatttctgttaaaaagaattcttcatatttataaaggtggaaaataccaagaaaattgtaggtttttattagctagtaatagaggctagacgatggaaatcagataaaatacaaattcaaaagaggattatttaaggaatctagaacaatttgggtaatgattgtttaaaatgtctgttgttgttgctgtgtgacttttaaacaatgtattttaacggaaaatacatgcatctgggaaaatttcacaagatattttatcgaatgttagtatactytacacgctgtcctgcaccttgctttttttactctatgcgtcttgcagatcattttatataatacatagagaggtgactcattctttttaaaggttacattaagtttgtagtatgtcagaatggcaatactataattgttttaaccagtgacgtttaagttgt

SEQ ID NO: 780562 - DNA, 651 bp, Homo sapiens
aaaagattttgacatcatttttatgacaaactgtacccatatctttggaatttttgcaaatttagcatcaatcatgcatttttccagtcattttcattgaaatttcattctatttatcttgttggcaaagtgaaaagcaatttttgtttgctaacgctgccttttccctcgctgcattaaaaagtgatgatggtaaaaaaaaggggggtttttcttttcttcttcagggaagcccccagtgtgctcatttgtatgtacagtctatcawtgctattttagcctattttcattttatttatagctttgaatcatttattatttgcttggaaagattttgcctagaactcttaattggtacacatagcaattaaaactttattacttaaatatttttcagaacaggaaagaaaaggtacccaaatcagcataatcaatttagccataaaaccctaagtctgactttttattttatttatgatacgcattttgttctaatgctttgtaagtagcatagctcttctttctagttctacataaatgagattcatgcctaatgtgcctccaattttcaaaaacaatccctcaaatacagttttaacttgccattaagactgtgtctacccatcataaaatgaatgtttgggaaggaat

SEQ ID NO: 780563 - DNA, 619 bp, Homo sapiens
ccccagtatttctaattgagagcccctccaggcaccctcatcaaggctaggacctcagcccagcattaggattgcatctacacacctgccttagccacaacttgtgcctgcccagggatacttcccctattggcctgaagctgaatcatcaactcagtaaacaaaacattggggacaaattaaataaataaagtgtacaccacaagagaatgagataagcttcatgagatccctgccatccaactccataggagacaatgaactcattcacacactaagaatataactattaccatcaccattggggaatgccaaggcacaaagactgtctataacaaaggatctcatacagagtcttcacacatactgacaccgagaatcaaattaggctaaaatgaactttaaagtctgatcttaagagggaaaaaaagaaatttaaatttaaaaaaacamaattcaatcaaaaataaattcaagaagaatttgaagaaatagtctactcaaatgagaaagaaccagaaaagtaattctgataatatgacaaaacagtgttctgtaacacccccaaagatcacactagctctccagcaatggatccaaaccaagaagaaaactctga

SEQ ID NO: 780564 - DNA, 564 bp, Homo sapiens
atgtgttgtctgttctgggtttttttttctttttttttgttttgagacagagtctctctctgttgcccaggctggagtgcagtggcgccatctcggctcactgaaagctccgcctcctgggttcacaccattctcctgcctcagcctcctgagtagctgggactacaggcacccgccaccacgcccggstaatttttttgtatttttagtagagacggggtttcaccatgttagccaagatggtctcgatctccagacctcgtgatccgcccgcctcagactcccaaagtgctgggattacaggcgtgagccactgcgcccggcctgttctgggtcttaatgagtgccagcaacctgccatttgcccagaaggagttgagaagatccttgtattgttttaaaaaaaaaaaaaaaaaagaaaaaaaaactgtggtacataatagttacatatatttatggggtgcatgggatatttggatacaggcatgcaaggagaaataagcacatcatggggaatggggtttccatcccctcaagcatttttcctttgagttacaaacaatc

SEQ ID NO: 780565 - DNA, 614 bp, Homo sapiens
ggatccaaaaaatatgtggattataagaataggtcagtatttatcaagaattttcaagtagaatcactattttcatcgggatttgctaatcacaaaatagatacattttataatgaggcaataataacgccaaagattttctacttactgggaaaaggatcccatcatatatttactgttttttttctttttcatattttctcagaaaatttttaaaattaatamttcagtttcccaggattcattatatgagaatgtcagacaatagcattctgtgacagaggcacaaaatgtaaattctgtgtaaccaaatgtaaccaatgtaaatcaaccaattagtattctaggttataattcattttcttgagtgttggttctcagatcctggtgtcctaggaatgaactgataaaatgtaggtttagattcaggtgtggttgttcacacctgtaatcctagcaactcaggatgctgaggcagaaggattgcctggggacaggagtttgggaccaacctgggcaacatagcaagatcccatctgtaaaaaaaaaataaaagtcgggtatggcagtggacacctgtagtcctagctacttgggaggctgaggcaggagga

SEQ ID NO: 780566 - DNA, 653 bp, Homo sapiens
tatgtacaaagaagatctggtgtcatttctactgaaactaattttaaaaattgagaaggagggactcctcccaactcattcaatgaggccggcatcattctgataccaaaacctggcagagacacaacaaaaacagaaaacttcaggccaatattcttgatgaatattaatgcaaaaatccttaacaaactacttgcaaaccaaatccagcagtgcatcaaaaagttaatccacaatgatcaagtaggctttttccctggaatgcaagattggttcaacatacacaaataaataaatgtaatccatcgcataagtataactaaagacaaaaaccacatgattacctcaatagatgcagaaaaggcttttgataaaattcaatgtctttttatgttaagaactctcagtaaactaggtattgaagggacaaacatcaaaataataagtcatctatggcaaacccacagctaacatcatactgaatgyggaaaagttggaaacattccccttgaaaactgatacaagacaaggatgtcttctctcaccactcctattcaacatagtattggaagtccaggccagaacaatcaggcaagagatagaaataaaggcatccaaataggaatagagaaagtcaaactgtccctatttgc

SEQ ID NO: 780567 - DNA, 628 bp, Homo sapiens
ctttcttaaaacataaggtatccaaaaagttgtactgagggaggaaagaagggggaaaatacagagcagagctttgaagcataagaagaggtaagaggagacatttcctcagaatgtgaataaaacagtgtcagtggatcctgagggtagcagtgcctcatcccctggcagcctcttggaaggataacaaggaggtattagtacaactagcagtcatagacatgggagcttccagtcttagaaaaggcatccaaggctcagggttccatataatttattatcyaaacagggccactgttgaaagtgaaaggagatgctattaataattatgcccaaataataggtgtcaataggaactgtctggaacaagctggcacatatggtcaccccgcctatgatctttttgactcagaaataatggagtccctgccttgaacgtccctgccttgagtcccttgagtgtccaggcgtctttgaacaatgagaatttcagattctactgtgtttgcttttctttttagaaaatattttagaaaatgattctgaaatttatatgaaaatgctaagtatatcaaacaaatctttgaaaaacaggaacaaagatggaagacacattatttgattttaa

SEQ ID NO: 780568 - DNA, 601 bp, Homo sapiens
ctataacaagcggagttgtaaaccaaccgtagcccacaactatgccaatcactgggttttggttaatcaaatgcacccaactactcaaatcctggtcaaataaggcaactggagaactttatccaatccacttgtttctctacttcacctcctttttctgtacctcactttccttttgctgtccataaatctcccaccatgtgcctgtgctggagtctctctgaatctgctgtgattctgggggctgcccaattcgtgaatcrttcattgctcaattaaactccttgaaatttgattaggcacccgggggcagtggctcacacctataatcccagcactttgggaggccaaggtgggtggaccacctgtggtcaggagttcgagaccagcctgatcaacctggtgaaaccctctctctactaaaaatacaaaaattagacaggtgtggtggtgggcgcctgtagtctcagctcctcgggaggctgaggcagaagaatcgcttgaacccaggaggcggaggttgcagtgagccaagatggcaccaccgcattccctcctgggaaacagagcgagactgccgaaaaaaaaaattggttgaagt

SEQ ID NO: 780569 - DNA, 488 bp, Homo sapiens
cgtggtggtgggagcctataatcccagctacttgggaggctgaggcaggagaatagcttgaacccagagggcagaggttgcagtgagctgagatcgtgccattgccctcccgcctcggtgacacgagcgaaactccatctccaaaaaaaaaaaaaaagaaaaagaaaaagacaaaattaattaatgccaaatcaagaatcttgtsttatgactttgccaagtaactttgagtgaaactatgtgtacagagattattttcaatgtaaactttcttgaacatctgtgagtgagaaaacatgttagcttcttggaatataaagtaagacacagtcacctccagtaaaacactggtaacacagtgttggtggaagcaacaaatgttcacaatatttaattaaaggggagcaaaactgtcttctttcctctctgatggagacttaatttgatgttaacttagagtgctgatttataaataaacagtttactct

SEQ ID NO: 780570 - DNA, 627 bp, Homo sapiens
ctgcttcctatgccctaagtcaaggtcagatgtagagcagcaagtaatattctgaccagtgaagtttagccaaatgatccaaacagacagtttggtttaaagctgctttagggattcaaatccaaatatcagaaggatcaacaattcttgatcgttttgaatctaaacaaacactaccagtatccttcttgatttttggttgtgcaaaatgattgtctttaaaaactttccagagcagtcaaataaacttctggargtgttagagttatgtcaaatactttaacaactccctttttctgatgaaattatgatcattttgtactgaaaacagaagcatacatttctcataaatcaaaatcactttaagaaaagtagagcaatttgaaacactccaggggaaaggaataacattctactctcatgaataaaaattactggggcctgtctcagcagaaaaagtaattcctgggaagagaagtatctcttatgaaaggcttttccccaaaactggatggttgtgtgggagaggagttggagggtgcagaggaggcacagaaaggaagaaataagcataataggatgagtgagaaccccaaacagagccccactcaaggctgctgtccagga

SEQ ID NO: 780571 - DNA, 602 bp, Homo sapiens
tttatattgaaagctccagagttaggtgcacatgtatttagaattgtgatattttcctgttggactagttcttttgtcattatgtaacatccctctgtcttttttaactgctgttgctttaaaatttgtctaagaaagctactcctgctcacttttggtgtccatttggatggaatatctttttctacctgtttactttgtttttgtgagtccttatgtgttagttgagtttcctgaagatagcaaaaacttggtttgtgaactcttatccattctgccattccgtatcttttaagtggagcatttaggacattttcattcaatgttagtattgagatatgaggtattattctattcattgygctatttgttgcctgaataccttgttttcttttcattatgttattgttattaaggtcctgtgagatttatgttttaaggatgttctattttggtgtattttgaggatttatttcaagatttagatctccttttagcagttctggtgggcatttgtttttctgggaaagactgtatttttccttcatttatgaagcctagtttggttggatacaaaatttttggctgataattattttgtt

SEQ ID NO: 780572 - DNA, 560 bp, Homo sapiens
gagatggatcctgtgatttctgtctgcatgggacttgtctgtgctttgattactgctctaggatttctgtgggattcttctgtctcttattgactcacacagccttgtaataaatctccattacttgagacagcctgaataagtcaytattgctaacatactcatattgtcattcattaggacctccaatttctgtggaaccttacattactctaaatctgcagtatttctcaaagtgttgtgtgaattccctacctcatacaataatttagagttccagtcatctctgaattattgaatccaggggtggagcacaagaatacacatacttttaaatcaataaactttatttttttaattttaaattaatttttttttaagagacaggttttcactatgttgcccaggctggcctcaaactcttgggctcaagagatcctcccacctcagcctcccaagtagctgggatgataggtgggcaccactatgcctggctagtaaatgttattatttattattattttttgagatggagtctcactctgtcacctaggctgtaa

SEQ ID NO: 780573 - DNA, 521 bp, Homo sapiens
ctgtttgaaggaaaactaacaaacagaaaggaacaccatcatcaacaaaaagtacatccacaccaaaaccccatctctaggtcaccatgatcaaagaccaaaggtagataaaaccacaaagatggtgagaaaccagagcagaaaagctgaaaattctaaaaaccagagcacctcttctcctccaaaggattgcagctcctcaccagcaayggaacaaagctggacagagaatgactttgacaagttggcagaagtaggcttcagaaggtcggtaataacaaacttctctgagctaaaggaggatgttcgaacccattacaaggaagctaaaaaccttgaaaaaagatgagacggatcactagagtaaatggtgtagagaagaccttaaaggacctgatggagctgaaaaccatggcatgagaacgacgtgacgcatgcacaagcttcagtagctgattcggtcaagtggaagaaagggtatcagtgattgaagatcaaatgaatgatatgaagcgagaaga

SEQ ID NO: 780574 - DNA, 624 bp, Homo sapiens
ttgtcagtttcttataagactaaacatacaactacaatacaaccaagcaatttcactccagggcatgtagtccagagatataaagacaggttcacacaaaaactagaacaggaatgtttacagtagctttatttgtaatagccaaaaactggaaacagcctagctatctctcaatagataagtggttaaacaaaccatggcacatccatatgatgaaatatgacttagctacaaaaaaggaacatacaactgaacaggttgtggtggttcacacctgtaaygcctgaactttaagaggccaaggtgggaggaccacttgaggccagaagttcaagacagccttcaaaatatattgagacctcatatctacaaaaaaatttaaaaattaattgagagcggtagcatacttgtagtcctagctactcaggaggctgaggcggaggatggcttgagccttggagttggcggctacagtgagctatgatcaccccactgctcttcagcttgggtgacagagtgagagcctatctcaaaaaggaaaaaaaggaaataaagtaatgggctattattgatgcacacaacctggatgaatcttgggcatttaggctgagtgaaaaaaaaaaa

SEQ ID NO: 780575 - DNA, 591 bp, Homo sapiens
ttatagtggtagaaatcaaaatagtggttaactcttggtgagaaaggatacaggtttgactagaatgaagcagaagagaaattcctggaatgtgaaaatgttctattctgattggggtgttagctatatggatgcatacctttatcaaagatcataaaactatatatacatataatatatgtgcatgtgataygtatatgtatgcatatgtataatatatgtatacacaaaactgtatacccatgtaatacaggtatacattacagaatacacacacacacactcacacacacacacacgaaaaacaacacgacagcatttatcaaaatgactgattccaggtttgggttaggaaatgtacaagatgagccaagagtatcttgtcatgaaatgaaagcaaggatgctatctaagactactagggtttttgtgaagtgaactgtgtccccctaaaattccatgttaaagacctaacccccaaggtaactgtctttggagataaggccttttaggagacaatttaggttaaatgaggtaataagggtaggccttaacctgatgggacaggtgtccttgtaagtagaggaaaag

SEQ ID NO: 780576 - DNA, 614 bp, Homo sapiens
aaaaaaaaacctgcccaccaacctgcaaagataagggataagaaagaaagaataaaaaaaaaaggtatacaaaaaagctcagaaaacaattaacaaaatgacaaaagcaaacgctcacatataaataataatattgaatgcaaatagatagttcttctaatttaaaaatatagactagctgaatggattaaaaaaacaaatcccaactatatgtggcctgccataaactcmcctcatctgtaaagacacacatagactaaaagtgaagagatggaaaatgttagtctatgcaaacaaaaactaaaagtaaaaaaaaaggagttataattatatcaaatagtatttaaatcaaaatggtaaaataaacaattaagttcattttataacaataaagaaatcaactcagcaagaggatgtagagattataaatatatatgcacctaacactggagcactcagatatatagagcaaatattactagagctaagaagagagactccaacacaatcatagttggagagttcaacaccctactgtcaacactagatagaccatttagcaaaaaaataaagaaatataggacttaactgcattttagaggatagggacccaa

SEQ ID NO: 780577 - DNA, 623 bp, Homo sapiens
tcccagcaactttgggaggccgaggtgggaggttcatgaggtcaggagatggagaccatcctggctaacacggtgaaaccccgtctctactaaaaatacaaaaaaattagccaggcatggtggcaggcacctgtagtcccagctacctgggaggctgaggcaggagaatgacgtgaactgggaggcagagcttgcagtgagtcgagatcgtgccrctgcactccagcctgggcaacagagtgagactccatctcaaaaaaaaaaaaaaaaaaaaaaacagaaaaaaaagaaagctctgaagacaacctaggcaataccattctgaacagaggcatgggccaagatttcatgatgaagatgccaaaagcaatcacaaccaaactaaaaactgacaaatggtatgtaattaaacttacgggcttctgcacagcaaaagaaactaccaacagagtaaacagacaacctacagatgggagaaaatatttgcaaactatgcatctgacaaagctctaataccctgtatctataaagaacttaaatttacacgaaaagaaatgaaacaacccactaaaaggtgagcaaaggacatgaacaggcacttttcaaaaaaaaacacatacatg

SEQ ID NO: 780578 - DNA, 623 bp, Homo sapiens
tcccagcaactttgggaggccgaggtgggaggttcatgaggtcaggagatggagaccatcctggctaacacggtgaaaccccgtctctactaaaaatacaaaaaaattagccaggcatggtggcaggcacctgtagtcccagctacctgggaggctgaggcaggagaatgacgtgaactgggaggcagagcttgcagtgagtcgagatcgtgccgctgcactccagcctgggcaacasagtgagactccatctcaaaaaaaaaaaaaaaaaaaaaaacagaaaaaaaagaaagctctgaagacaacctaggcaataccattctgaacagaggcatgggccaagatttcatgatgaagatgccaaaagcaatcacaaccaaactaaaaactgacaaatggtatgtaattaaacttacgggcttctgcacagcaaaagaaactaccaacagagtaaacagacaacctacagatgggagaaaatatttgcaaactatgcatctgacaaagctctaataccctgtatctataaagaacttaaatttacacgaaaagaaatgaaacaacccactaaaaggtgagcaaaggacatgaacaggcacttttcaaaaaaaaacacatacatg

SEQ ID NO: 780579 - DNA, 630 bp, Homo sapiens
tgaccccagtgtttataccattggaccaacctcccatccacgtatttttgaaagctgcaatgcttttaactggataacaaaagactgctgagtaaatgaggatacacacatagctagcaactaaaatatgccctcataagcctatgtatgaatcattacataatatatgtcttaagactgagtctgaccagaccagaaatttctgagcaaaccaagataaaagaaattagttgctttaattctcattgatgcagcttcctgcartgggagaaatctatgccgtttgtcttaggcttaggttccagagccttccttaaatgctctttagaatctaactttttccagctgattaactttccttccactttgtctgttggccttatcctgactcctactcatgagctcatctgcctcaatcctgacagatgtatcacttgttcttaagccctctgtgagatgcatgtcatcttgaccacatcctgtctgactctgtcttctgcccaagactgatgaacccaatccactttatctacttgggacaaacgttgttgcaatgaacagaccttcctacctctattctaagctgacttgtattggctaagcttggggtcacaattttcattactgttc

SEQ ID NO: 780580 - DNA, 630 bp, Homo sapiens
tgaccccagtgtttataccattggaccaacctcccatccacgtatttttgaaagctgcaatgcttttaactggataacaaaagactgctgagtaaatgaggatacacacatagctagcaactaaaatatgccctcataagcctatgtatgaatcattacataatatatgtcttaagactgagtctgaccagaccagaaatttctgagcaaaccaagataaaagaaattagttgctttaattctcattgatgcagcttcctgcagtgggagaaatctatgccgtttgtsttaggcttaggttccagagccttccttaaatgctctttagaatctaactttttccagctgattaactttccttccactttgtctgttggccttatcctgactcctactcatgagctcatctgcctcaatcctgacagatgtatcacttgttcttaagccctctgtgagatgcatgtcatcttgaccacatcctgtctgactctgtcttctgcccaagactgatgaacccaatccactttatctacttgggacaaacgttgttgcaatgaacagaccttcctacctctattctaagctgacttgtattggctaagcttggggtcacaattttcattactgttc

SEQ ID NO: 780581 - DNA, 622 bp, Homo sapiens
caattagtactataattctcatgttaaattttatgtgcagtgttaggtaaagttcatgtttatttttttcccatatgcatataaagttcttcaaacactatttgttgaaaacattttacttcctctttgaattatcttggtacctttgttaaaattcagttgactatatatatatatatayatataaaataaatatattatatatatttttaatatttgaattaaatataattatttaaataaatttttaattaattacataaatatttaaatatatttatatataaataaatttatatataaatatatatataaaaagaaaatatggaagaaaaaatagggtcctatatatacatacatatatgaagaatttttattttaacaatgactttgtaagttagtttttattttatcaaaattttacatgtgcttatttttaaaagtcaaatagttatacaagaattgtaataatactgctgcactctgcataaaacctctcactcctaatcttctcttcagaagcgataactttacaatagtttcatagctaattcttttgctatttgcctctatatatcattcagtaatttgtcaaagacataaaaattagaattataaaaat

SEQ ID NO: 780582 - DNA, 731 bp, Homo sapiens
tagccacatgtaggagaataaaactggatcctcatctcttaccctatacaaaaatcaactcaagatggattaagaacttaaacctaagacctgaaactataaaaattctagaagataacattggaaaaacccttctagacattggcttaggcaaggattccacgaccaagaacccaaaagcaaatgcaataaaaacaaaggtaaatagctgggacctaattaaactaaagagcttttgcatagcaaaaggaacagtcagcagagtaaacagacaacccactgagtgggagaaaatctttataatctatatatctgacaaaggactaatatccagactctacaatgaacttaaacaagtcagttaagaaaaaaacaagcctgggtgcggtggctcacacctgtaatcccagcactttgggaggccaaggtgggtgaatcacctgaggtcaggagttcragaccagcctgatcaacatggagaaaccccgtctctactaaaaatacaaaattagctgggcgtggtggcacatgcctgtaatcccagctactcaggagggaggcaggagaattgcttgaacccaggaggcagtggttgcagtgagccaagatcacgccattgcactccagcctgggaaacaagagcaaaactccatatcaaaaaaaaaaaaaaaaaaagaaaagaaaagaaaaaaaaaaaaaacaatcccatcaaaaaatgggctaaggacatg

SEQ ID NO: 780583 - DNA, 597 bp, Homo sapiens
tttttctccccaataaagtattctcaaaaatgttcttttctatgtaaaagaaaagtatgtgagcacaattctctcattaatttatatatccaacaattaaaaggagagataaatcattatcatagcccagaaagtaatttaatataaaaratgaatagagcaaaagttagcaaagttgcacccagatagcatgggagttggtaataggttcacatttcccaacaacaaataaattgaatcttgtgtcctcaaatcactcaaaatccatctagtccaaaatgatagatgcaaacaaaaaatgcggtggctcgtatgtaacaattattagccttatatacacctttttgagtttatgttgccagcaaaaagttgtaggaggacacaatgtattagggttctccagagggacagaatgaagaatgaataggagatatatatatatatatatatatataaattcccctctctctctctctctgtatatatactacttaatatatatattaagtagtattaactgagaagatcacaagttcccacaataggccgtctacaagctgaggagcaaggaagccagtccgagtcccaaagctgaag

SEQ ID NO: 780584 - DNA, 633 bp, Homo sapiens
tatggcagtgaggttcatacacatattttgtatatgtgtatactaatactatagtttatacctgtaaaactaagatgattatttcttatgtggtatgataaggtatggtatggtaaggtaaggcataaaataaatataatgktatttatctgttatctatttttcacactaagctatgagcacctggaaggtaaggaccatgtatttttaacttggtactcaaaaaccatggtatggtacattatacatgtacacaataaaaaattatgtgatctggtttaaggtgacagactagatgcagctgggatgtgccttttccatgcacagaaaccaaaatatcaagtgatatggtttggctgtgtcctcacctaaatctcatcttgaattcccatgtgttgggggagggacccagggagaggtaattgaatcatgcgggggcaggtctttaccgctgttctcacggtagtgaataaatcacatgagatcttatggttttaaaaagagaagttaccctgcacaactctctctttgcctgttgccatccatgtaagacgtgacttactcctccttgccttctgccctgaatgtgaggcctccccagccatgtggaactgtaattccattaaacctcca

SEQ ID NO: 780585 - DNA, 633 bp, Homo sapiens
tatggcagtgaggttcatacacatattttgtatatgtgtatactaatactatagtttatacctgtaaaactaagatgattatttcttatgtggtatgataaggtatggtatggtaaggtaaggcataaaataaatataatgttatttatctgttatctatttttcacactaagctatgagcacctggaaggtaaggaccatgtatttttaacttggtactcaaaaaccatggtatggtacattatacatgtacacaataaaaaattatgtgatctggtttaaggtgacagactagatgcagctgggatgtgccttttccatgcacagaaaccaaaatatcaagtgatatggtttggctgtgtcctcacctaaatctcatcttgaattcccatgtgttgggrgagggacccagggagaggtaattgaatcatgcgggggcaggtctttaccgctgttctcacggtagtgaataaatcacatgagatcttatggttttaaaaagagaagttaccctgcacaactctctctttgcctgttgccatccatgtaagacgtgacttactcctccttgccttctgccctgaatgtgaggcctccccagccatgtggaactgtaattccattaaacctcca

SEQ ID NO: 780586 - DNA, 633 bp, Homo sapiens
tatggcagtgaggttcatacacatattttgtatatgtgtatactaatactatagtttatacctgtaaaactaagatgattatttcttatgtggtatgataaggtatggtatggtaaggtaaggcataaaataaatataatgttatttatctgttatctatttttcacactaagctatgagcacctggaaggtaaggaccatgtatttttaacttggtactcaaaaaccatggtatggtacattatacatgtacacaataaaaaattatgtgatctggtttaaggtgacagactagatgcagctgggatgtgccttttccatgcacagaaaccaaaatatcaagtgatatggtttggctgtgtcctcacctaaatctcatcttgaattcccatgtgttgggggagggacccagggagaggtaattgaatcatgcgggggcaggtctttaccgcygttctcacggtagtgaataaatcacatgagatcttatggttttaaaaagagaagttaccctgcacaactctctctttgcctgttgccatccatgtaagacgtgacttactcctccttgccttctgccctgaatgtgaggcctccccagccatgtggaactgtaattccattaaacctcca

SEQ ID NO: 780587 - DNA, 590 bp, Homo sapiens
aaacaacagaaatgtgtagtctcccagttctggaggctggaagtccaacatcaaggtgtccttagggttggctctgtctgagactgtgaggaagaatctgttcatgccactctcctaacttctggtggtttgtggcaatctttggccttccttggcttgtaggtgtatcatcccaatctctgtattcatggttgcaggacattctccatgttggtgtgtttgcatcgaaatttcccaccccccttttgagacggagtcttgctctgtcgctcaggctggagtgcagtgtcacgatctcggctcactgcaagctctacctcctgggttcatgccattctcctgcctcagcctcccaactagctgggactacagatgcctgccaccatgcccggctaattttttgtatttttagtagagayggggtttcaccatgttagccaggatggtctcgatcttctgacctcgtgatccgccctccttggcctcccaaagtgctgggattacaggcgtgcagccgtgcctggccccaaatttcccatttttatgacaccaccagtcacactggattaaagacccatcctatccccatg

SEQ ID NO: 780588 - DNA, 581 bp, Homo sapiens
gactttctaagagcccaagttcttaacgttaatgaagttcagttttttttctcatatgagaatgctttttgagtcctatctaaaaaatctttgcctactccaaggtaatgaagattttcttttagaagttttatagttttacattttactctgacgttcaggtgtgtataacccatttytttttttttttttttttcatttttttaaaaaaatcaattttactgaggaaaaattactgtcaaatgcacacattttaagttacagaagatgacttttgacattcacatacactgtgtaaccaccacaccaatcagtcaagatattataggacatttccattaccccaaacagtcccatcatgctcctttgagtcagcctttctctcagcttccactccaggcactcactgatctcatttctgtcacaattgataaatgttacctgctctagaactttacattaagaaaacattaaagtctgtactttttgtatctggctattttaattcaacatattttagatacatctattaccaatagtttgttcttatgcatatctcaaaaatttattcctttctaatt

SEQ ID NO: 780589 - DNA, 630 bp, Homo sapiens
  misc_feature 615, 616, 617, 618, 619, 620, 621, 622, 623, 624, 625, 626,627, 628, 629, 630: n = A,T,C or G
gttccaagggtagaatcagtaccacgtgacaacaaacatcaatgccctttaaaatacatgtgctggcacaccaagcattgctacttctggaaatatatcaaaaggaaatcattgtaaatgtagaaagactcatataaccaaaaatattcgtcacacaattatttagaatagggaaaaaatagaaacaaccaattgcctaccatcagataccttagtttggtatactgtagcatatacactcactggattcaaaaacaccattaaaatgtcatttacaaagaatagcaccwtactaaaatgtttatgttgtgttgttacatgaaaaaagacgcgccaaatcatataaacagcatgataatatgctgtttataatgataaacagcaatgataataaaaccacgaaaataaaaattttagtattcaaaagtctactggaggcaaatagatccttcccaaaaagtgttcaaggtgagtgcattttggagggaataatttatttcactcttctgtatcttctaacttcttttttaaaaattatctatttcttcaaattcggaaaagaacaatgtaaagtcaaaagaatagtggaagacccaccattacagcataaatatnnnnnnnnnnnnnnnn

SEQ ID NO: 780590 - DNA, 558 bp, Homo sapiens
ccattgtactaagcccaatcttaagtgttggtttaaaatattagccttgtgaaagcactttagaagtagtcaatagaaacaagagacagcctgaaatatttatatttataactgtgttgttcatatttatgaatgtagacaaaccctttggtaaagttctagaatgggaagcttgtattgataacagggaagactgctttttaaaagatcaattttaatgaggaataacttatatgcaataaaatgcatccattttaagtatacagtttgagatttaacaaatgtattcatgcatgtaaatgccaccaccatcaagatttagaacatttttattacccaaactttcctcatgcccctttatactcagcccctcagtcccaggagacctctcatctactttctgtcaccrtagataaattttatgtataagtggaatcatacagtatttaatctttagtgtctggcttctttcccttagcacaatcttttttagatttgtccatgttcttgtgtatatcagtaattctttgttattgctgactactttccattgtatag

SEQ ID NO: 780591 - DNA, 644 bp, Homo sapiens
tgaagcaccactctgtcatatttctctactttaacctaaaataataaatcccttaaaagcaaggatcaactcttttgtctctatttccaccaccagaaatatagatgactttttttaaaaaaaatctttgttaaaatcaccgtaaatagctgtatgtaaggcactcagacttggaaaatcttccataatcattttgaaaactgaaaatcgctttctacttctggtttgtgagagctgtatttactattcttagcttaacataaaataaagaccttgaaggtaaaactacacaatttacatcagtgaaaatactattagtaaacaaacactgtgaaaaatgctcatccatgctagtaatcaagaaatgcaaattaaagcaatgttgagaaacattttgcacattagactagccaaaaatatttaatgacaaaaagctarggttgattagagtgaaactgttacatctttgactatttctggcattgcaaattgttacaacctttttggaaagcaattaggcaatatttatttagaattcatgaagatattcataccttttgacctagtaattgaactcttgggatttagcctactcaatacaaattttttaaattctacaaaatgctacaaaatattcaatggtg

SEQ ID NO: 780592 - DNA, 639 bp, Homo sapiens
gttaaattttcagtattattatgtataatcttaatgtagcaaaataaaattataaactttccattttggaaaataaaaagaagtagatccatgcgatgggattgaatttggatatattttgcctgtaggacttttcctgcatttcctttttgtccttttcccttgatagccatcactttaatatcattcactgtctcagaggtcattcattaattggaggacaccaaagagaaaaaaaagagrggaaaaactcttggctttgaacttcaaaatagactgtgtgcatccctaacagaggaaaaggcttgaaagccaaggctattgatttgccagatcatgcatttggaatttactgaagtaagctgagcttagaattcacgcaatccataataactggtaatgacagtagttgcagagcctgacgatacttgaaagaaccctaatttctcttgtatatccaaaaggggtacaaaacaggacaggtagagccttctaattaggagtaaggaaacataaagtgagctatatggacataactcatggcccgggcagactccagcatatcagcagatgcagcaatgcagagaccagcaattaaagataaaacggatgagttacacctcagcagatgccatagga

SEQ ID NO: 780593 - DNA, 543 bp, Homo sapiens
ttcacatcagtggtattattattattatcgagacagagtcttgctctgtcgcccaggctggagtgcagcagtgcaatctcggctcactgcaacctctgcctcctaggttcaagcaattctcctgcctcagcctcctgagtagctgggattacaggcacccaccatcacacctggctaatttttgtatttttagtagagacagggtttcaccatgttggctaggttggtcttgaactcctgacttcaggtgatccatccaccttggcctcccaaagtgytgggattacaggcgtgacgactgcacctggcgtaagagccaaaaagacacaacccaaatgttcatcaactgttcaatggaaaaacaaaatgtggtattaccacacagtagaatattatttggccataatagaaggaagtcctgatacatactataacttgagtgagactcgaaaacatgttaagtgaaagatgtcactgagaaaagatcacatattacattattccattgatataaaatatctagaataggcaaatccatggaaa

SEQ ID NO: 780594 - DNA, 612 bp, Homo sapiens
ttctctcctgcaagtcagctgtttctcagtcagtgcatttctgtttattcctccatatcttctatctccacatcttttggcccccttttcctacagggtttaaagtgaggggaagcacactcacactcagaaccccagagaaagggactaatmgagctgttacaactcagcagtgagaccatcaggcatcttagaatgtagaaaataaagggaaatccagttcatttttgagtcactgcttttaatcatgaaataaatatttctcaatggcatgaaagaagtgggtatcttgtatatgtgagtgaagtttcatgtatcattacttctaaggtgtcactttggtgaaggttaaaggggttgtaccttagtagctaggctaagtcaatagatatttatgaacaggcatttctccttcctaattattggggagagtgaacagacaggatgatgtagaaaaaaactctaagcaatgaaatataataaaactttatgaacagtagtctacaaaacaataaaaaaacttactacaatgcaaaagagtgttcacagagcttctcatgcttcaaactttgcagtggagttgtctgtccattaaagtaaaggaagttgctg

SEQ ID NO: 780595 - DNA, 603 bp, Homo sapiens
acaattagggcaaaaataaagtagtattggattataattcaagggatagaataaatatccataaaaccatattgatatgcatgaatgattcaatgcataataaatgcaggagaacagacaaatctcccacacaaaaagttccaaagggagtagagcagaaccctctactttctacaattcttacaatgtgggctgtgcacagtgacttccttcccaggaggacagtatgaaaaggctgaggaatcaccttacagtggagaaacctggaaaatactgccttagccaggtgatcacttcaacatcagcagtgatgaatcatgcgattagtatgcacctttgatataatgtgatgaaaacagcagcttacctmtgttgtcttgctgcccagaacacatgactccactgtaaccatgagaaaaacatcaaatggcgatagaagaacattttacaaaataccagactagcacaagtcaaaactgtcaagatcatcaaaaacaaggaagccctgagaaactgtcacagcccagaggcgtctaagaagagatggtgactaaatgtaatgtgctatcctggatgggattctggacattatgttaagaaaat

SEQ ID NO: 780596 - DNA, 646 bp, Homo sapiens
ggtgggacactggaacatagcatcctttgataatttattttacacagttgtattctgtttcgctattttacacggggatggctattctatgaaaatgtggaagtatttgatccaaatcttatagaatacttttgtgctcaaacctctataaataggcctgcagtggtcttgtctgctttgtgaggcattgcctgtgtcctcagaatctgtttgaagagtttccatgttaacttcagggcctcacatgaggtatccctggatcctgatcctggggaggctgcagcggggcttagcgccacaagaggtgacccttcatcacatgccgctcaaaatcacagaaatcacaacatctcaagtgccaaagcaaaaataaggccaaataaggaagagagcatcaatctctccttcctgatgtttctcttgtaagctttaaggccacatgggggatgtaaggagggtgattccaattatatttcctctaaactggactgcatawttgagaataaagtgagctgattttttaaattgcagtggagcaacagagataaactggccatttcccaggtgtacaaactgatgtacacatggtcacactggaaatagaaaaatcaacaaatacataaacataatgaccacaagctctgac

SEQ ID NO: 780597 - DNA, 598 bp, Homo sapiens
gtggaactttgaacttgggagagatgatttagggtgtctggtagaaaaaatttctaagcagcaaagcattcaagaagtgacttgggtgctgttaaaggcattcagttttacaagggaggcagagcataagtttggaaaatttgcagcttgacagcgtgatagaaaagaaaatccccttttctgaggagaaattcaagctggctacagaaatttgcataggtaatgaggagctgaatatgaatccccaagacaatggggaaaatgtctgcagggcgtgtcggaggtcttcatggcagcccctcccatcacaggcgtggaagccttggaggaaaaagtggttttgtgagccagacccaatgtccctgtgctatgtgcagcctagggacttggtacccwgcattccagctgctccagccgtggctgaaaggggccagcgtagagcttgggctgtggcttcagagggtgcaagccccaagccttggtgttgatgctgcaatgtggtgttgatgctgcaagtgcacagaagtcaagaattggggtttgggaacctccacctgcatttcagaagatgtatggaaatgcttggatgcccaggcag

SEQ ID NO: 780598 - DNA, 449 bp, Homo sapiens
agagacttgttagttttggtctctgcacagcaggtcctgccttatttagcacagtgaagctagacactctgaggtagtcaattttactccaaagggcatttctcatgcttctctttattaacaaatctctctctctttggactaccaaaacagtcttctggcagatctccctgacttggcttttctcctacccaaaccagaattatctttgcaaacatatatctccctggaataaagttatttaatgacttccaacattttcattatttcagaaagcttgatagaaatcccsctttaactcatgagagtgcttttaaaagtaactaaaaaactgctttagtttgtgctagaattataccagcatggttactacaattaataaattttgaggacacaaattaattattttccagacgcatagtttgtgttgcaatgaggtcttacaccca

SEQ ID NO: 780599 - DNA, 596 bp, Homo sapiens
atttaaaacaaagtaatatgtttactgcatctgtatgggggaaattgtgtgtgtgtgtgtgtgtgtgtctgtgtgtgtgtgttcctgcacatctctccacattcaatgaaggcatattgatagcttgaaattagacatggtgagatggtgggaatggtaatatcacagaaataagtaaacactacaagtccaaaattttcccctgcagtaacattcctcctggttgctaaatgcttaccagcatatcactagctataacccacctaaataaaagttctttgggttcctcattaatagttaagtgcttgagagctgccaatcaaagataatcatttcagcatttgtcttttatagctggtyccctccctagcctattgagaatgtaataatatgctatttatagatccttcatcaaatcatcctacctgacccttcccagaacctaaagataataataacaatactactactaataaataatttttaacatttgttgtgtgatatgtaccagattctgtgctaagaattttacggtcattattttacttaaaaaaaacaacaaccctttaaaataggaacattgataatttccattt

SEQ ID NO: 780600 - DNA, 536 bp, Homo sapiens
  misc_feature 446: n = A,T,C or G
caaaaagtcaccaacttactttgtaacattttaataatgacttaagggtcaagatttttttcttctgaaaattatgttctgagttaggcagaacatagccatggccctgggccaccctgtgctatctgaaatgacctcaatacactaatgccaacctcagygtcatgccagaatgcacagggcagcccagggagatcacacctttggcaaagtccagacaaggcccactgcagttcctatggagccagtcaccagctcctagacagcacttgggtaccccattggggtcttggagaggaagacatgtgaacataacggctccctgaaattgctcctacccatccatatttctggtcatgctttcagtctgacaaaaatggatgatactgctgtttttggtaacaaacagtgaatattcataagaacaaaagtaaaggaaaaaaagnccccgtagaaactggcatcccctaaagcagggcttcttagccttggatttattgacatttttaaatggataattctttttttttttttct

SEQ ID NO: 780601 - DNA, 622 bp, Homo sapiens
tgctttgagcacctgctattttgcttgtgctgcactgctgtcctcctttcccctggaggaagcacctccagtcttttggtaactgttcctttccctgctctcatcatggggatgcaagaagaatacctgcttttttagacacaattgattggctgatgggtgggcacttcgaacctagtttgtccaatcagatcactttcttggggtttttcttactaaaactgtgatgagttacatcatgctggagatagaagctatgggatgaagagtttctgactggtggtttccatgttttcttccatctggagaaagttagtgtgtgctgagagagaatgaagcccacacagagagaggcagaaatgacagctggagrgagaggtttggcattgtttgaggttctggttctggtttcatttattcctgagaaccagtgatatccctgacctttccataattttcatttttccacatttccttatattttttgtgctaataatttcctcatttatcaagttaattcaagttaggctcctgtcataccaaacaccgtccacagtttgttatgtatttaagacatatatttctaatttctctttcaatgccggagatcctgaaatatctc

SEQ ID NO: 780602 - DNA, 602 bp, Homo sapiens
tgttcctgagtcacactcaggatgtggagtacactcgtgatgaggctgctaatttaactcacgctgcatgcagatgtacaaagaaaatgcagcttctttattgttctatagctgatttaacatttctcttgatctttcaatcttttgggtaagaacaaggatgttagttttcaatatctgcaatgctgcatgatacattaccccagagtttagcagcttaaaagaataaacatttattatcccacaatttctgtaggtcggaaatctgagtgtggccttactaggttctytggctcagggtctctcccaagggcacattcaaggggccatctacaggtcagtctgtggtgaccaactgtctggggttgctcaagactgagtggtttcttgggatgtggggcttctggtgctaaaactggagacatcctgggcaaactgtgctgaactggttatcttatctgggttttatctgaaccctagacagagggacagtcctcttctaagctcataccttgtcatgtggcaggactctgttctacgtgggttgctggactgttcttctctggctgttggccagaatcctccctcagttgcttgccaat

SEQ ID NO: 780603 - DNA, 626 bp, Homo sapiens
cagaagccacgtgctccaggacacagttaaaatgttgtggaataaggccaggcgtggtggctcacgcctgtaatcccagcactttgggagacgaaggtgggtggatctcgaggtcaggagatcaagaccatcctggctagcacagtgaaactccatctctactaaaaatacaaaaaattagctgggtgtggtggcgggcrcctgtagtcccagctactcgggaggctgaggcaggagaatggcgtgaacccgggaggcagagcttgtggtgagcccagatggtgccactgcactccagcctgggagacggagcaagactccttctcaaaaaaaaaaaaaaaaaatgttgcggaataagcagtcaactaagagaaacactgtatttcttaacaacatgtacgtacatgtctttctcctcctcctgctccacactactttagaatgtaaagcaaattgcacacatgtattagttagggttctctagagggacagaactaataggagatatatatgtatgggaatatatgtatgggaatttattacgtattaacttgcatgatcacaaggtcccacaataggctgtctgcaggctgaggagcaaggagagccagtccaagtcccaaaac

SEQ ID NO: 780604 - DNA, 626 bp, Homo sapiens
cagaagccacgtgctccaggacacagttaaaatgttgtggaataaggccaggcgtggtggctcacgcctgtaatcccagcactttgggagacgaaggtgggtggatctcgaggtcaggagatcaagaccatcctggctagcacagtgaaactccatctctactaaaaatacaaaaaattagctgggtgtggtggcgggcgcctgtagtcccagctactcgggaggctgaggcaggagaatggcgtgaacccgggaggcagagcttgtggtgagcccagatggtgccactgcactccagcctgggagacrgagcaagactccttctcaaaaaaaaaaaaaaaaaatgttgcggaataagcagtcaactaagagaaacactgtatttcttaacaacatgtacgtacatgtctttctcctcctcctgctccacactactttagaatgtaaagcaaattgcacacatgtattagttagggttctctagagggacagaactaataggagatatatatgtatgggaatatatgtatgggaatttattacgtattaacttgcatgatcacaaggtcccacaataggctgtctgcaggctgaggagcaaggagagccagtccaagtcccaaaac

SEQ ID NO: 780605 - DNA, 611 bp, Homo sapiens
gtgtgtgtgtgtgtgtgtttctttgcagccttagccatggtggagctcagtgttaggcagaagagcaaagaatataagcacgtgctttacagtgacagaacagtcccagatgggttgccacataaaatgcaggatgcttagttaaatttgaatttcaaataaacaataaaaaaaatttagtataaatatgccccaaatattgcatagggcatccttatactgaaaatgatttgttatttacctgaaatttaaatttaactgggcatcttttaattttatttgctcattctggcagccctgagtcccagggttagctgctcataaagaaatagagtgtatacacagttattttatacaatgggcagagagagatgaatctcaccacttaggatttcatgtacaattagccccttgtatagacacttaacttgcacctctggaagcayaagctttatgtggtaacttgtcaaggtcagagcatccctggaccagcatttgaagaagacgtgtgcctaagtaggaaaatcgtttttcttctctgctcatgcagacagcatagttagtaattgagtaaatgtctttgacattaagctgacctggattcaaatccc

SEQ ID NO: 780606 - DNA, 619 bp, Homo sapiens
agtgaggaagatgctggactgcttctggatttcggcctaaaaacaatgagaagtcactggtaagctgtatgtagacaagtcatacgatcacatttacagtttagtaaatatccagaccataatgtgaacaccaaatcagaaggattcgccataaaattcagaggagacattagggaacttagtgggaatgaggttggaaggcagtggacataaccggttgatattgaggaggtagaaatgacaagacttgctaattgcttggatgtggyagacaagtctaaaagaagagccaaacctgactcccaggtttctgccttggtcacccaggtagagaatgatgtcattcattaacactgtgaacacatcaggagggacaagcctgaggcagaaatccaggtttacatttgtgttaacaggatgcccagggagggagaattttaaaataattatgccagccttttaccatctggaaagaggtctccttggggaagattttgttattcttgttgttcttgaaagagtagtttggctgttttgtaaaaattaaagttaaaaagcaccccttgccctggggaaaggtgcatttaaaaacctcatccttccagagacttaggaaaag

SEQ ID NO: 780607 - DNA, 557 bp, Homo sapiens
cactccaactgttgctgatctgttggaatttcctgtttcctcttccatggaaatgttttctcttttctgttgaaataatagattggaaccagtgaggcaggctaggacatgacaactcgggacaacaaatggcatctgaaacaattgtccatggtatacaatgaatgcagtaaaatccatctatctggactcaatagaaccagagtttttcttagagattcacaataayaactagaagttaaaatcataagactttgatcatgatatgaaacaaattaactgatgcccagtttagttttggtgttaaatgacatctttaagacttgtttgactgtgaatgagatgaagggcagccttctgtcaaccaaaataacatttccaaacattctagatcaatagatgggtcttctggggatctttttttcttccccctctttgttcctcctgctctcccatttgctttcctttccttctccgagattgctttcctgtcattgcttcttgcaccccagacactctggagggacaccttgattgtcgctgaaaacccacctaaa

SEQ ID NO: 780608 - DNA, 593 bp, Homo sapiens
gagaaaaagatccaaataagctaaattagaaatgaaacaggagatatcacaactaatagcacagaaatacacgattcaaggctactatgaacacctataagtgcctaaactagaaaacctagagaagatggataaattcctggaaatatacaatcttcctagattaaactaggaaaatatagaaactgaacaggccaataacaagcagcaagattgaaattgtaataaaaaaaaattgccaacaaaaaaagtccaggaccagatggagtcacagctgaattctatcagatatttaaaaaattggtatgaatcctattgacactattccaaaagakagagaaagagggaatcccccctaaatcatctatgaagccagcatcatcctaataccaaaaccagggaaggatataacaaaaaaaaagaaaatacagaccaatattcctgatgaacatagatgcaaaaatcctcaacaaaatactagcaaactgaatccaacagcatatcaaaaagataatccaacatgatcaaatggatttcgtaccaggattgcagggatgctttaatatatgtaagtcaataaatgtgatatacca

SEQ ID NO: 780609 - DNA, 631 bp, Homo sapiens
gactttttaaaagttataattaagcaagacaaaacaagagtgtagtttctccaaatgcccttcatgacagttctggcctataatcattatttaagcgaagaaatcttaacttgcaaacgaatttttactttaatccttgtcaatttcctgttgtgtagacaacaatagaagcagagaaaaattgctcggctatcttatatacacacttartatacttggagacgcttgttaaatgatcctcttgccttctttgctataaaatttaaaaagttaattttgctcccgggaattaattgtcatctgttaaagtgagtctgttattattgtttaaaaaaatttttggtgaaccttctaatgtaatgtctccaaagtgtagggagaaagctacctctatcatctagggaagaaatacctagtgttcttaaaaactaagattcgcgggcaccctcatctatccaatcagaatgtctgtggctaaggcccagactctgcattttagcaggaatcctgaaagacccttatgcatatgtttgagcatcagcactctagtttctctttaattaaatcacccagctatcttttctgcaaggcacagaaaatatattatctctagcagtaaacttcaatttca

SEQ ID NO: 780610 - DNA, 604 bp, Homo sapiens
aaaccccatctcatctaggaagtatcttatactttggaaactgtaactttcaatagataatgggagggtgaattggacgaataaaccataatataagaggttatagaaaagttgtggatagacatgaggaagaggtagaataaaaccaaaagagatttataactaattttgatttttatttttaaagcatagattgttttcattgctgcattaaaaatataaataatggcaatgtatagaatggcaatataaattatttttaagctggcattggtaacaaaattatataaatgtttgcacttcttttgtgcttgcaaatttaataatattgtttctaaatatattaaaaagagtttcaaatatgttaaataatttcaagggacawccacattttgaataatgtatgtaacttaggtaggtgacacaaagcatagccatcagtaacatgcttttcttttttctttttttattattttttattattatactttaagttctggggtacatgtacagaatgtggaggtttgttacgtaggtatacatgtgctgtggcagtttgctgcacccatcaaccggtcgtctgcattaggtatttctcctaatg

SEQ ID NO: 780611 - DNA, 646 bp, Homo sapiens
catcctgatcatataatttatttaatgattttatattgatagacatttttattatttttttctattttaagtaatatgctataaacattatatatagattagtatgtctcactgattatctttacaatgacaaattcctagtagtataattactgaatcaaaaaatctgattattattacatactttaactttcacttctgaattaacatatcaatttattctccaattaacattgcctaagagtttctgtttcccttgttctaacacaggcagttaaaattatttaacaattcgaaaggccaagacatgacagttttaattttgtttctttgattgctagaatatgcgaaagcctctaaagacactgagaatacattatagattttctaaagttttcttctgtttcctgaagtasaacaaaaactactattcagggaagcattagttttgcctcttaaattggccctgttcttgtgtctgggtttgtctgtttgctcatactaaataggggaagtgagacctctgttcagaaacgaagttaaaatcagttggctccaagaatgtgaagtccctgttcaaatgtgtccatgataagggagaagagaaatttaagatttgcttgctggagtcttgatttaccacatt

SEQ ID NO: 780612 - DNA, 384 bp, Homo sapiens
agttaatctattccttgattcttgaccagtggaaaccctgaaatgactgtgctttgttttcaactactaagtttgtgataagttgttacacagcaatagataacggatacaacatgtagttcacagaactggaaggacatatggccaaaacaaatatatgtaatcttattagtcatcagtraaatgcaaatcaataccacagtgaaataccttctgtttatccaatatgttggaaaaaaatctaaaatttagtttgaaaataacaagagctgatgtggtagtgaataaaataaaactcatttcaatttctttgaaagtgtacattggttcactgctttgttaaacagtttggaattatctcggaaatatgatcagcagagttgc

SEQ ID NO: 780613 - DNA, 617 bp, Homo sapiens
tcaataaaatctagcaaaccaaattccacagcaattgaaaggattatacaccatgatcaagtgggatttctccctgagatgcaaggatggttcagatgtttggtttgcaaataacaattggtatggtataccacattagcagaaggaaacataaaaaccacatgatcatctcaataaatatagaaaaagcatgtgacaaatttcaacatccattcgtaataaaaaataaactctcaataaaataggtatagaaggtacttatctcaacacaataaagacatatatgaaaagcccacagmaaacatcataatcaatggggaaaaactggaagctttccctctaagatccagtacaaggaaagaatgcctattcttactaattctagtcaacatacactagtcatagccagagcaattagacaaaaaaaaaaaaaaaaaagaaagaaagaaaggaagaaagaaaaagaaaatacatccaaacaggaaaggcagaagaaaaattatcactgtttgtagatgacagtatcatatatgtagaaaacattaaagactaaacaaaaaactgttagaacaaacttaaataagttgtgggatataaaattaacatacaaaaattag

SEQ ID NO: 780614 - DNA, 617 bp, Homo sapiens
tcaataaaatctagcaaaccaaattccacagcaattgaaaggattatacaccatgatcaagtgggatttctccctgagatgcaaggatggttcagatgtttggtttgcaaataacaattggtatggtataccacattagcagaaggaaacataaaaaccacatgatcatctcaataaatatagaaaaagcatgtgacaaatttcaacatccattcgtaataaaaaataaactctcaataaaataggtatagaaggtacttatctcaacacaataaagacatatatgaaaagcccacagaaaacatcataatcaatgggraaaaactggaagctttccctctaagatccagtacaaggaaagaatgcctattcttactaattctagtcaacatacactagtcatagccagagcaattagacaaaaaaaaaaaaaaaaaagaaagaaagaaaggaagaaagaaaaagaaaatacatccaaacaggaaaggcagaagaaaaattatcactgtttgtagatgacagtatcatatatgtagaaaacattaaagactaaacaaaaaactgttagaacaaacttaaataagttgtgggatataaaattaacatacaaaaattag

SEQ ID NO: 780615 - DNA, 617 bp, Homo sapiens
tcaataaaatctagcaaaccaaattccacagcaattgaaaggattatacaccatgatcaagtgggatttctccctgagatgcaaggatggttcagatgtttggtttgcaaataacaattggtatggtataccacattagcagaaggaaacataaaaaccacatgatcatctcaataaatatagaaaaagcatgtgacaaatttcaacatccattcgtaataaaaaataaactctcaataaaataggtatagaaggtacttatctcaacacaataaagacatatatgaaaagcccacagaaaacatcataatcaatggggaaaaactggaagctttccctctaagatccagtacaaggaaagaatgcytattcttactaattctagtcaacatacactagtcatagccagagcaattagacaaaaaaaaaaaaaaaaaagaaagaaagaaaggaagaaagaaaaagaaaatacatccaaacaggaaaggcagaagaaaaattatcactgtttgtagatgacagtatcatatatgtagaaaacattaaagactaaacaaaaaactgttagaacaaacttaaataagttgtgggatataaaattaacatacaaaaattag

SEQ ID NO: 780616 - DNA, 451 bp, Homo sapiens
gtgaaataagcatctcagtcttttgccttcatatatacttatagcaaaaacaagatgtgaagtaaggcttgtgtaaaagagatgtgcacaaggaaaatgacagaacattttttagcttttttttccaaattcaatcatattattaaatttaattccggcttttgtaagccttaattactttatctaaatcagaattctcaacagactaattaaaccagaattcatgcaatagtttttttctcaacactcagtttcytctacacaaaaaactagaacaattatatcagaatctctgggtaagcttaggcattgggatttgtggggaaaagttctccaggtgattctgttgtataggtaagcattaagaatcacttatctatgagaacacatggacacaggaaggggaacatcacacacctggacctgtcgtggggtgggggtagggggtagg

SEQ ID NO: 780617 - DNA, 623 bp, Homo sapiens
atgttcatatattttcatgttgttaggtagcattcatttgtttcaagttgaaaaactccctttagcaattgggctttatttttttttgtctgaaaaagttattatctcatctttatttctgaaggatatcttgctgagcatagtattctttgttggtggttttatcctttcagcactttgaatgtatcactcactctcttctagcctgaaataataccgctgagawatctactgatagtctaattgggcttctcttgcatataacaaattgctttcctcttgctcccatcaaaattctgggtttgtctttgactttttgagcattttaatataacgtgtcttagtgcagatttccatatacttaatgtatttagggttctttgggattcatggatttggatgtttattcccttcttcagatttgagaatttttttcatcattatttttctaaataagctttctgtctcattcttttttgctgacacttctggatcttccataatgtatatattggttcacttaatgatgtcccataattttcatagactttattccctctttttcattctttttgccttctgtttctctgattgggtgatctccaatgcaatgacttttcttc

SEQ ID NO: 780618 - DNA, 559 bp, Homo sapiens
cacataaaagtacttactatatgactacattataggaaaacctagaaaaagcaaagctttaatgacagaaagcagatcaatggatggcaggggttaggggatgcagatttgtgaaaggggacaaaagagtattttgaggtgatttaaatgttttacatcttgattgtgatggttactagactgtatatacatttatcaaaattcactgaacttaaaatggaattttattgtatatgtgaataatacttcaataaatckaatactaggaaaaatataggcatataggaacaaatgttcagatcaacctcagtttagcttttaaaaaatagaaaatcactacatagtgatgatataatgctaaaatgctagcctatttagttgtgtttaaagctgtggcgggtaaatgaagataaaatttttctgtgcatttgttttcagttcttcaataaccacgtatttctactatggattagactatgtctgaaaagaattgcacaactactggaaaacagattatcctactgttattcaaagtgaatttctctttcaatttcttact

SEQ ID NO: 780619 - DNA, 622 bp, Homo sapiens
attaactatatatgtattacgtgtacatatatatgtatacatgtattatatgtatgtacatacatatttgtagataggcaaatgtggtgagttgttaaaagtgtccagctgttaacaactatttaacaattgtttaaatgtttagttggttgaaaaaccaaaaatgggtattaattrtataattctctgggcttttcagtaggttttaattttttctaaataaattcaagggaaaatgttattgatccatctctctcttgaatttctgtgctatctgcctgcccatttcacaggttaacttctggaaaagttttcttctcatgctacactttttaatgttatgtatactgtgacttagtggttaagcatcaaaattctggaggcaagcagcctgggtttgattcctgagctccacctttgtatttctgcggacaaattgtaaaatctttctgtaccttaatttttaaaagtgtttttttagaaattaaaatgtagttgagtaaaaagcttaatagatatgctaaatagtaaaatagatgcctctgataagtcactaaatgtttcaaagtatgagacttttattgaggaaaagcataaaaaataatgcctagctaattggtag

SEQ ID NO: 780620 - DNA, 595 bp, Homo sapiens
gactttatacttttcacaaaaattaattaaaaatggatcatagacctaaatataaaatacaaaatcataaaacttctaaaaggtaacatagaagaaaatctatataaacttaggtttagtgatgacatcttaggtacaacactaaaagcacaatttatgamaaaagaaattggtaagttgtagttcattaaaagtaaaaacttctgctctgcaaaaaacactactaagaaaatgaaaagacaaaccacacactgcaagaaaatatttccattatatatatgataaaggattgatattcaacatatagaaactcttaaaactcaacaataagaaagcaaacaacctaactgaaaaatgggcaaaaaacctgagcagacatgtcaccacagaaagccaccacttcttacctattactatggccaaaatccaaaacattgacaacatcgaatactggtgagcatgtagaataacagcaatgctcaatcattgttggttggaatgcaaaatggtatagctactttggaaggccatttgacataacaaaaactagatattctcttaccataggatccagccatcatgctccctgctattt

SEQ ID NO: 780621 - DNA, 606 bp, Homo sapiens
cttgggtgtctgtgaatttgttttccctgacttcattattgaaagactgacaagtgtataagatttggatgcttgcttatatattagatatatgggtctttttcagtggttttaaaatcattgtaacttatctattgtaaaattatgtaatgagttgtttagaattaattaccctttaatatctttaaatttaagccattaaaatatctgtactgatagtcaaccttttcttataggagaaattataggtctgtttttttggataagagtaaaataacattatgtaaataaatttmccgaaaagtgattaatttggatatcagataagtgaaagaaataattaatgtaatgaaatgaaaaatatagcctttatgcattttatattaagtaaaaattctagtttagtgtaacagagcttttgaaaggagtatcagatcattttataaaatgcttaacaaaaatatgattcatgaagtatttaaaataatgagtgccatttattgagcatctactatgtggtaagtaatttatatacattttcacatattttaaataattgatccatgtttcctagccaagcaaaatatttggagtttaagaaaatta

SEQ ID NO: 780622 - DNA, 496 bp, Homo sapiens
ttatatgtgttttaaataaattaagggaaataagcagtttttgatacttacccatttatttactttctattagtcttcatttcctcctaaagagccatgctttcatctgttgtcattccttttcagcctgaagaactttctttagtatttattgkaatgcaagtcttctgttgatatttgtttacttttcctttgtctcaaaaatgttcttattttactttcatttttgagggatgtttttgctgggtataaaattctaggttgaccttttgttttctttcaccatgttaagaatttcattccactgtcttctgatttccattatttttgataagaggtcagtagcaataatttgtatcattgttcccctgtatgtaatgtgttgttttttcctctgaatactttcaagatttctctttacctttagtttttatcaatttgactgtagtatttctaatcatggtcttcttaatatttatcttacttggtttgttga

SEQ ID NO: 780623 - DNA, 577 bp, Homo sapiens
ttttagaatatgcttagctatatattgctatactagagcatcataaacaatgtgtataaatagatttaattccaaaccacttttgggtgtgggaccgtattaatattacatttactctaaatattttagcaatatttataccaagaataatattatgatatcagctcagaaaattaaaatttaaagggcactgctagtataaaaacatttaaggggatagttctagacaaactttcaagcaatgtaatttcatttttgcccttccaattttaatcttgaaggaggggagaactaaaatatgtagactttctatatatttttcttatgaatgtattttaatttctgaatttttaattgtgaaattttatgtatatgaaactaatataacagatctycacatactcacctaccagatttaacagatgtgctattttttgttttagtagaatcttttaatttaataatagtaaataagggttttgattaaaacatagctttatatttccaaatgcctaaatatttcggctaaaatttctgagaaccacagacatttttatgttttagctaaaatgcttta

SEQ ID NO: 780624 - DNA, 581 bp, Homo sapiens
ttggggtttggtttggtcttctattttcttttgctttatgatgtatcgctggcttgttaaagcttttctgctttttttgatgtagattcttattcctgtaaactttcctcttcatactacttttgctgtatcccatagatttttggtgtgttgtgtttccatttttatttgtttcttgaaatttttttatttttctccttaatttcttcatcgagccactcatcattcagaagcatatcatctaatttccrtggtttgtatagtttacaaaattcctcttctttttgatttttaattttattccactgtagtaagagaagatacttgatatcattctaatgtctttgaagtttttacaacttgttttatggcttcatatatggtgtgtccttgagataatccatgagctgaggagaagagtgttctgcagccattagattaaattttctgtgaatatcaattaggtccgtttcctggatagtgcacataagttcaaattttctttgttgattttctctctacataatctgtccagtgctgaaattggggtgttaaaatctccggctattgtactgaaatct

SEQ ID NO: 780625 - DNA, 623 bp, Homo sapiens
ctgaagaaaatacgtgtgaaaaaaatagtaaatgcaaaaacaaagagaggaaaaaaattattaaaggctgttaaaaacaaccatgaaaccaagcacagattgaaataaactaagctgctaacttcttagttgtcataagaattgattttacacaattttgaataaaactcacatcctggacatatgaacaactccatttactttattaactaactttacttacaaatttgaatggtcctcaagaagaaagtacaagttcagagtaaagagatttcctacccagaccaaacaaacaaaaagccaaagaaactatattaaaatttaagatgttatttgtccctcattccttaaataagtatatttctgataaatcactctagaagtctctagagtaccaaagccaatatggagatctattataagcaaagaaacatttgataaaaaatgtggcactctagaacacccaatatataagcaataaatggayagcaagatgtcctattataccagataaatgctttcaatatctacagaataagaaaagtccctgcaacatctctacataaaatgaattactgacttaaaaaaacaatttgtcaagtttcttaattggctaataagtt

SEQ ID NO: 780626 - DNA, 644 bp, Homo sapiens
cctcttaagtagctagtactgcaagtgttcaccacgaaacttggctaatttttttattctttattttttcttgagataaagtctcactatgttgaccaggctggcctcaaactcctggtctcaagcaatcctctggctttggccttccaaagcactaggattacaggagtgagccactgtgccaggccctagatcattacaatttttataagggataatgtctttgcattatgaaaacagatttttcttaatagcagagttgttaagttgaaattggatacaacattattttgttaaactgttattgagagtcaacaatcagaaataggaaacttgtcatggcatctcataattgcaatttgatttgatgatggtgaatgttatacatcctatctaagtcttctgtggattaacatattattggaccttctttacctacatcttgatccaaactscctaacatatagttgactggtataaaacctctttaaatatgtctttgaaaaattagttgtgaacaaatatgtaagtagccactagtgatgttctactactcattcttaaatcacagtgccatccttaaaaggggaatttggatgggattgatttaaatcaccagctaggaaaatttggtttcaggcagt

SEQ ID NO: 780627 - DNA, 639 bp, Homo sapiens
cttgtacagggacttcactaaccctttggtgattacagacctaaagccctactcacgacattactttcctgtgagactcccagtggcacaggctccgcccaggaagccacgcagcagtgccttcaactctgtggttcttcgcaagaaacatatttggctcttkgtgggtccacatcaactgccatcaccaccaccatccacatcccacccaccgtaaaccaagggcagtttaattgaacaatagccgacctctcctgtatcccctcaggcccctattcctgcagtctgtccaatcttgaattctgaactttgggaaataaaaaagtttccatcatcctttattttcccagtaatccatggaaaatactacatctttagtatactacatcttccaggatttgctttttatttccaaaaccagctcttggagtttcaagaactccctttttctatctgtgagagataattgtaattaaaaaaaggttcagtattagtatcttgtatctgctatgaaattacaaaatctatttgacgctcactaccaagatttcactgactgtcctcagccagctccctctgaggagaactagtggagaatgctgtctctcctgtcttatggagtgggcaatgagtgctaaa

SEQ ID NO: 780628 - DNA, 499 bp, Homo sapiens
cactgacacccatggtctcaaaaacaggagagactggcccatgcttccaccactggggcctgaagactgggcagcacagcttccactaacaaccacagcctacaacacaaaggaaatcacagacacaactgacactgtttacagcctaataaatcatacggagaataaactactgcacacaccacaaatcaaagctaaagtgttccacccaaccaaaactatagatacatcttcatgaaaaaaatcttccgcaaaaaaagcyaatccaaaaaagtgggagaagccactgttataccagatgtccaggcatcaatgtaaggacacagacacacatacacacagacacacagacacacacatgaaaaaataagaaaatatgacacctctaaaggaacacaataatttcccagcaatagattccaatgaaacagaaatttatgggaagccagaaaaagaatgcaaaataatattaaagaagctcagtgagatgcaacagagc

SEQ ID NO: 780629 - DNA, 549 bp, Homo sapiens
cgaacagttttgatggcttcatttacaatttaagtagctatatcatattccctaggaactaagatgccacaatgtgtaccatatttgttatttgaaacaaagctaaagacttagtcaatagctttcgaataggcccaatttataatgtaaatgatgcatgcagatgctgtaaaaagtaataataatttaaaacccctatatcctgtcgtatattttgatagcagctacaaggaaactgctagcataattctcttgatggctttctgtgaatgtattraaccaatccattaagcctcgataataagccaattaattgtttagaaacattaccccagctcttgtgtgtggttttcctcacacagagacaggtgcctatttatctcacaggagaaatgaccaagttagatatcaatactctccatgagcgagttctctaaaatggatttgctatcgatctgtccattcgctattgttagcaaacttgctctacaccatgaggcctctgaattttttacccctacttagtaccatgaatcattcttcttctaa

SEQ ID NO: 780630 - DNA, 621 bp, Homo sapiens
agcaaatttaaaatataagcactatttgaaaacttttctcctacttgctcaaatcagaaagtcagtagatctgggaggaatgagtagtctgctgcgattgaagaaagttttgaaccgatgacagcattcaggcaccagcatcctccaactgccgttgtaggaagcaggacctccagggggcatggtcaccgctctcaggtcagtcgcatgagkaggccattatacaaaaattgagaggagtcctggaagaaagataccccactctctcacgtcttcacaaattaaccactgaaaaactcttcaaaacccacccatcacttcaaaaagcattagggaggagggacgccatgcaagacagagcttacataaccagcatctgattagatgtgtggaataagaaatgaagaaacagggaatcaactccaagcaaacatttcttcttcctctgattcaaacgtattgatgtttagtttttcagatgtgtgcagtataaagtcgtggtgatatacacatctgtacatctcaaggaaaacaataaattctcaaaataaattgcaagagatacttttctctcttaaattttcaataatttatcaaataattcacaagactatgaatttg

SEQ ID NO: 780631 - DNA, 621 bp, Homo sapiens
agcaaatttaaaatataagcactatttgaaaacttttctcctacttgctcaaatcagaaagtcagtagatctgggaggaatgagtagtctgctgcgattgaagaaagttttgaaccgatgacagcattcaggcaccagcatcctccaactgccgttgtaggaagcaggacctccagggggcatggtcaccgctctcaggtcagtcgcatgaggaggccattatacaaaaattgagaggagtcctggaagaaagataccccactctctcacgtcttcacaaattaaccactgaaaaactcttcaaaacccacccatcacttcaaaaagcattagggaggagggacgccatgcaagacagagcttacataaccagcayctgattagatgtgtggaataagaaatgaagaaacagggaatcaactccaagcaaacatttcttcttcctctgattcaaacgtattgatgtttagtttttcagatgtgtgcagtataaagtcgtggtgatatacacatctgtacatctcaaggaaaacaataaattctcaaaataaattgcaagagatacttttctctcttaaattttcaataatttatcaaataattcacaagactatgaatttg

SEQ ID NO: 780632 - DNA, 696 bp, Homo sapiens
caacgaaaacttctccaatgtgacctaaaagtgttgcacagtctgcttcagaatttttgaaaatttatactgctttcctcagagagtatcctgacaagtggtaaagcatgaattaatatttttatttgtatatgatatttatgtgacttttctttttgctgtaacactgagacaaagaggagaaattgctctgttgtaacagctgatatgcagtgttaccactcgccactcctcacatcagcccaattttccaaaactgatggactgcattatatagtatttctaacaataaccaagagctaggcaagacattttctggtgaaaaataacttgaaatatcatttcatagttaaaatattatgatgcagaagagaaaataygcaataattttcaagattaggaacagacttgaagaatcttgacagtttgaacacgtgactgatgatattaggttgttttcatcagtgggccctgccacccacacctctgctcccaatcttggaggtctactttcctttgctgtagggtacattatgggaaagatggagaagcaatgttttaaatcaactcatcattggcctgaaaattgctccaacctcctcctcttttccttctatttttccttcctattcttcccttctctgtttctggaaaaagagtgactctacaggtgaggattaaactaaggatcctaac

SEQ ID NO: 780633 - DNA, 528 bp, Homo sapiens
cacaagatgatttggagtctatatatatgcaagaccagtattaccaaattcttccagtttctcaggagaagctgaaaattcatatttttaatgtaaaatattcttatttttaaaggttggcaggcaattcaagaattttttaatattgcaatccaaacaaaagattatgtgttaaagttatatttttatattccagtgcagaaataatttaaggtttagttatatcatagataatatgatttgctggaatttaataaacactattccaaaactttatttcataaagttgaaatagaattctcactgtccagaaacttgtggtcttgtcmgttgaaattatttttgttttgtttttaatgctccttgagctaggttgattggaataatttgttgttgctaagaaaatcttatttaatttaattttgactgacaaggctttattaaaagtaccagcatgtagtcttttgacttgttttcattggggagtgtgtctttgtgtatgtatttgtgtgtatgtgtgcatggtgg

SEQ ID NO: 780634 - DNA, 512 bp, Homo sapiens; identical to SEQ ID NO: 748108

SEQ ID NO: 780635 - DNA, 481 bp, Homo sapiens
aaaattcccccaagaaaacgaccaccttgtagtaatctcaatgcaggtaaactgctttgagagtctttcttcagagatgccagaggcatggaaaggatagcaacatctgcacactttaccatcaaacatccagacatattagaaagagaaatcaaatattctgattggctaatawgtctgagcagggacaaatggaccataattctctgttcagaatttatgaagattcatcatcatttaattaacaatataaatattaaaaaaacattttataataaaattttataattgtaataagacaccctagtgcatgaattatggggtactaattcccacccagttttgttgaaactggacatgaatgaatacattaaaatgcatactatgtcatgtcttagcagttaaaaaataaagtggcaaaaaagtgtttcaaaattcaaagtcctattcccttagaatataagcaaagaaattcaatgaa

SEQ ID NO: 780636 - DNA, 548 bp, Homo sapiens
agtgacatctctgcattgttcagagaagaaaggtcaacaaagagtagaaatagaacactcaacccaccctgcattctttccctagaacattctctgtgtgtcccttatcatttaagcttttcatatgtagttttcttgaaactgaccatatgctcttttggggtgaggggaggagacggaagaaggagatggagaaggtctgagatgatttttttcgacagcagcgtccacttakgcccttggggaggccgggtcacggggcctccttgcaccagtggtctacaacgtcttgcctgcggtttacaaccgctcttttaaaataatttccctttgggacggccccggcttcttcctgccacccccatccccaccccgcccccatcctcatccttagaggccccaggcaaacgcttcggattcccggttaggtctcagagtaaacagcacgcttggaggattacaatcgacccgaggccaattcgaccctttccctttgccgccctcaattgacccttgaagcagcccctgctctcccttcaaatggaaaa

SEQ ID NO: 780637 - DNA, 759 bp, Homo sapiens
aagagcccttgattcataatgtaattcctccaactccattagaggatcatgattggggtgcctggctctttatcctatgctcctggagggcagcagccatgtctcaggtatctctaggtccccacgcagcacccagcccactgctcagcatgtgcacagcacgccatcaccaaaatccccccatgatggagtgacagaaagagcagcagccccacaagagcatcacgtggcacatagccccatgacctccctatgcctgcttgagccaagccatccacctaatactttcttattccctacatttgtacacatcaaatagagaaagagcgaaatttgttgcagtgtacacatactctttttatactaaagccggtatatttcaaatccgccatcatcagatatttatggaccagtagccaatttttaatgtatttttaaaatatcttttgcaytaataaagtgcattattgtttggaaaagatggcttggagaagaaaaacgaaatcaagtttggaaaaatgccagtgtcccaaattttgaaatgtttcttccacaagttatacaatccttccctcctaaaaaagggcaaattatgactactgttaacattcatgcctatcattttatcttatcctcaccgatacaggcgaagatccttatacccattgtcaagataggggaaatggagtcaccgtgtgactgtgtaatatgcttgagttactgctaatggctctgggatcccagtgagttagccactgc

SEQ ID NO: 780638 - DNA, 759 bp, Homo sapiens
aagagcccttgattcataatgtaattcctccaactccattagaggatcatgattggggtgcctggctctttatcctatgctcctggagggcagcagccatgtctcaggtatctctaggtccccacgcagcacccagcccactgctcagcatgtgcacagcacgccatcaccaaaatccccccatgatggagtgacagaaagagcagcagccccacaagagcatcacgtggcacatagccccatgacctccctatgcctgcttgagccaagccatccacctaatactttcttattccctacatttgtacacatcaaatagagaaagagcgaaatttgttgcagtgtacacatactctttttatactaaagccggtatatttcaaatccgccatcatcagatatttatggaccagtagccaatttttaatgtatttttaaaatatcttttgcattaataaagtgcattattgtttggaaaagatggcttggagaagaaaaacgaaatcaagtttggaaaaatgccagtgtcccarattttgaaatgtttcttccacaagttatacaatccttccctcctaaaaaagggcaaattatgactactgttaacattcatgcctatcattttatcttatcctcaccgatacaggcgaagatccttatacccattgtcaagataggggaaatggagtcaccgtgtgactgtgtaatatgcttgagttactgctaatggctctgggatcccagtgagttagccactgc

SEQ ID NO: 780639 - DNA, 587 bp, Homo sapiens
cgagataaacaagacaaaatccctttacatcagtcgttagatcatttttttttgcatgacaaacattttaagagtctgatagaaaaatgttcatattgtataacataataaattttggcatatgatttcagcatgtttatggactcctaccccaagtagcccatggsgtgtagataagaagccttgcattaaactaaaatcatgtttatagtgaaaatatgctggcacaatgaacattcacatacatttaacaaatataaacggccaggcatggtggctcaagcctgtaatctcagcactttgggaggccgaggcgggcagatcacgaggtcaggagatcaagaccatcctggctaacacagtgaaaccccgtctctactaaaaatacaaaaaaaaaaaaaaaaattagccgggcatggtggcgggtgcctgtagtcccagctacttgggaggctgaggcaggagaatggcgtgaacccgggaggcggagcttgcagtgagccgagatcgcaccactgcactccagcctgggggaaagagcaagactccgtctaaaaaaaaaaaaaaaaaaagagatatatatatat

SEQ ID NO: 780640 - DNA, 587 bp, Homo sapiens
cgagataaacaagacaaaatccctttacatcagtcgttagatcatttttttttgcatgacaaacattttaagagtctgatagaaaaatgttcatattgtataacataataaattttggcatatgatttcagcatgtttatggactcctaccccaagtagcccatggcstgtagataagaagccttgcattaaactaaaatcatgtttatagtgaaaatatgctggcacaatgaacattcacatacatttaacaaatataaacggccaggcatggtggctcaagcctgtaatctcagcactttgggaggccgaggcgggcagatcacgaggtcaggagatcaagaccatcctggctaacacagtgaaaccccgtctctactaaaaatacaaaaaaaaaaaaaaaaattagccgggcatggtggcgggtgcctgtagtcccagctacttgggaggctgaggcaggagaatggcgtgaacccgggaggcggagcttgcagtgagccgagatcgcaccactgcactccagcctgggggaaagagcaagactccgtctaaaaaaaaaaaaaaaaaaagagatatatatatat

SEQ ID NO: 780641 - DNA, 638 bp, Homo sapiens
gccataatgtactgattgtataaccataagtttcctcttctgtaaaatgactgtaatcacaagatctctctctctctctcttgatgaagtcttactctgtcacctgagctgaagtgcagtggtgtgatcatggcccactgcagcctgaaactcctgggtcaagrgtctgtttgcctcagccccctgagtagctgggaccacaggcatatgcatgaccacacttggctaattttcaaatttgttgtagagatagggtctcattgtattgcccaggcttgttttgaactcttggtctcaagagatcctctcaccttggcctcttaaagcactgggattataggaatgagccaccacaactggccttgatcacaagatttttatatgtaatctgtaggaaacacatgcaaatataatggaagaattatcaaaagcaaaatgaatgtgatgttctcaagtcaagcatagctctttgatgtggaccaataaggtggcaccatgatacaagattaccttggggaatttgacactcttgaaatttccatctttttgaaatacgttaccttgaccaacaggacatcattccactgtttacagtattatctccttgaggagcctttgctgggcttttaggacatcct

SEQ ID NO: 780642 - DNA, 623 bp, Homo sapiens
tttcttgacttatctttctaacctaacactataaaattagattccagtaaaatcagagctttaaaattcttccaattttcttattttctaatttttgctcttcgtctctaaaacgatctataaaagaataaagtcatacttcagttgcggttttctttaatctatcagcattcaggcgtatctctaatgacattatccacagagtcatgagaaaaaagactttgaagtattaaatttggcctccattttaatatgataacattttcaaaggtgaaataggtcttccttgaaactagcaagtgatttcatgctgtaagttccttattttattcaaatttgwtattaaatggaagagcacacaagtatatcagatatagactgcctaattttgttaaagtcaggcatattagagatcagaagacctttctgctcattactgatagaaagatgacaatgtgtcataacatttattctttatttttattgaacattattgtctaacacactatctataatttctcaataggaataaaattgtagtatgtttaaaaacaggtcttagatatggaaaacttcattttataattgatggcagtttctaatcaaatgattttaggaaaact

SEQ ID NO: 780643 - DNA, 623 bp, Homo sapiens
tttcttgacttatctttctaacctaacactataaaattagattccagtaaaatcagagctttaaaattcttccaattttcttattttctaatttttgctcttcgtctctaaaacgatctataaaagaataaagtcatacttcagttgcggttttctttaatctatcagcattcaggcgtatctctaatgacattatccacagagtcatgagaaaaaagactttgaagtattaaatttggcctccattttaatatgataacattttcaaaggtgaaataggtcttccttgaaactagcaagtgatttcatgctgtaagttccttattttattcaaatttgatattaaatggaagagcacacaagtatatcagatatagactgcctaattttgttaaagtcaggcatattagagatcagaagacctttctgctcattactgatagaaagatgacaatgtgtcataacatttaytctttatttttattgaacattattgtctaacacactatctataatttctcaataggaataaaattgtagtatgtttaaaaacaggtcttagatatggaaaacttcattttataattgatggcagtttctaatcaaatgattttaggaaaact

SEQ ID NO: 780644 - DNA, 632 bp, Homo sapiens
aggtatatggatacatatataggtatataaatgttatatctatatatggatacatatataggtatataaatgttatatctatatatggatacatatataggtatataaatgttatacctatatatgaacacatatatagatacaaatatatgtcatwtctatatagagacacatatatcctacatagagatatatactctacagcaagtactcaatgagtagtatctctgtaggtatttgttaataaaatatcatatatgttatatatctatatatagatacatacatctgtatacatacatatgtgtatatataatgtatatataatgtacctatctatataatgtgtatatatacataaacacatatgtatacatatccttatttacatatgtacataactttatatacttaagtatatatatctaaataaataatgtatacatatatacctgatttgtataatatattttatgaatatatagtatatataatgtacatataatctattatatgtatttttaatttcatgaaatcatagacatgtatttctcttattaataaaccaaaatagcatcatagtgataatattttagtgatctagggagtgatgagtaagaagcaatggctag

SEQ ID NO: 780645 - DNA, 632 bp, Homo sapiens
aggtatatggatacatatataggtatataaatgttatatctatatatggatacatatataggtatataaatgttatatctatatatggatacatatataggtatataaatgttatacctatatatgaacacatatatagatacaaatatatgtcatatctatatagagacacatatatcctacatagagatatatactctacagcaagtactcaatgagtagtatctctgtaggtatttgttaataaaatatcatatatgttatatatctatatatagatacatacatctgtatacatacatatgtgtatatataatgtatatataatgtacctatctatataatgtgtatatatacataaacacatatgtatacatatccttatktacatatgtacataactttatatacttaagtatatatatctaaataaataatgtatacatatatacctgatttgtataatatattttatgaatatatagtatatataatgtacatataatctattatatgtatttttaatttcatgaaatcatagacatgtatttctcttattaataaaccaaaatagcatcatagtgataatattttagtgatctagggagtgatgagtaagaagcaatggctag

SEQ ID NO: 780646 - DNA, 632 bp, Homo sapiens
aggtatatggatacatatataggtatataaatgttatatctatatatggatacatatataggtatataaatgttatatctatatatggatacatatataggtatataaatgttatacctatatatgaacacatatatagatacaaatatatgtcatatctatatagagacacatatatcctacatagagatatatactctacagcaagtactcaatgagtagtatctctgtaggtatttgttaataaaatatcatatatgttatatatctatatatagatacatacatctgtatacatacatatgtgtatatataatgtatatataatgtacctatctatataatgtgtatatatacataaacacatatgtatacatatccttatttacatatgtacataactttatatacttaagtatatatatctaaataaataatgtatacatatatacctgatttgtatmatatattttatgaatatatagtatatataatgtacatataatctattatatgtatttttaatttcatgaaatcatagacatgtatttctcttattaataaaccaaaatagcatcatagtgataatattttagtgatctagggagtgatgagtaagaagcaatggctag

SEQ ID NO: 780647 - DNA, 512 bp, Homo sapiens
acttatggagacataaaaatacatgagcaataggataaaactaaaaataagtaaggaaatttggcaatggaaaatttagataggataagtatgaagataatagagacccccaaaaatatgtaattccagacaaactacaaatttggccccataccttttcaacagtcaatacaaagaaggacatatgagcccttaatctgattcttactatttataacatcacttgatataatgatataataataagacatcccttgatagaatgcaatgaaaaattgtcttaaagwagccaccttgcagtaggaaaataccagtttcatagggctgtttcttatagcagccttcaaactaagtcagtggtataaaattaaggcctaaatgactaaattatatttctttggttttttttttttttttttttttttttttttgagatggagtctcgctctgtcaccctggctggaatgcagtggcatggcctgggctcactgaaaactccgctttctgggttc

SEQ ID NO: 780648 - DNA, 587 bp, Homo sapiens
aagctctgttctaatttaagctcaatgtttttgtcttttttatttatctcttctttttttacagctgtctcttaggaaatgaccttctttaaagatgatcattttgtttcctctcacttttctcctgccataagaaccttgctccctttacttcatttagcttcattgtatgccactgttggaatttcatgtctacttttgtgtatactcaaataytcatcactttcattgatcagtagtatagtttgctgaggagtcaatttgattagtagtcaagagcctgatcttagaagccaaatagacctggattttactcctctcccctcttaaattatctttagttatagcctgtctttttgctttttcaactgtttaaagaaaaatttcttagttgattattgctttaaacttaatgtctctggcttacagacatgtgtgtctaaatattcatatttaatttctgtgatgacaccaaacctatccagtagtatcgataatcttcttatacatgacctccataaggttgtttcagtattcccacacatcttctccctgactgggagggttggaaccaacctcatttcttt

SEQ ID NO: 780649 - DNA, 306 bp, Homo sapiens
tctttaagtgagtaccctgcctagttcgctgaagctttttcttattttctggattcttttattttccttctatgacattttaatactttcttgatttctttttacttctcttctgcttttcttatgatcttctattatagttttcrggaacggcagctaaatattccccatttttctatagacaaaatcagaggtgcatagaatttcagaatgttaagaaatcctagagactaaacaaaatatcctctagtacttgaatccttgcttaacatcctgatcaagtggttgttcaggtggagaacctga

SEQ ID NO: 780650 - DNA, 555 bp, Homo sapiens
ataccagtttggcaggaagataacaccttctgtatccttaactggattcagtaatacacaggaatgtgtacacatgaggaaaagaaggtgaatcgatctgtgtggtgatatttttcaaagtgtatgctttagagttaaatattattaatggtttaataataaggtgatttgtaaaatcagtaacaaaaataacatcaggtagctgtgagacagcttcaatgaaaacaagatgatgtcttaaacaatcagcaacaaaagctttgctggatgcttcatcgcgtcaytgcatctatttagaaaatgagatgcaggattcaaggaagaaattagaccagatgagaagtcaagtatgtatgaaactttgcatgccaacaactgttaatctgtagctagttaactaatataaagtgttttggggtactaattttagtggatggctttcttttgtatttttattataattaattttattaaaattttatagtggatggctttcttttgtattttccttattattaattttattaaaattttattataatgcacctatatctt

SEQ ID NO: 780651 - DNA, 579 bp, Homo sapiens
acatgggggtgcagtgtctctctgatataataatttcctttccttggataaattctcagtagtaggattgctggatcatatggtagttctatttgtagctttttgagggacctcatactgttctccatagtggttataactagtttgcattcccaccaaaagtatatgagttcccttttttctgcatcctygccagcatttttttttttttttttgataatagccagcctccctggggtgagatgatacctcattgtggttttgatttgcatttccttgatgattaatagtgatgagcagtttttcatgtatttgttgaccatgcatatgacttcctttgagaaatgtgatttgggatcatttgcccatttaaaaatcagttttgttttgttttgttttttgctgttgagatatttcagctccttgtatattttagatattaatcttctgttggatggttagtttccagatattttctcccattctgtaagttgtcttttactctgttgattgctttctttgctgtgcagaagtttttagtttgatacaatcccatttgtttatttttgcttttgttgc

SEQ ID NO: 780652 - DNA, 619 bp, Homo sapiens
ggaaggtgggttaaagcaagaggaccccaaaggaaaagcagctctgcagctgacggcggatgctttgccgagtgttaccaccaggtggtgctgtccccctgccgaacataattcagaacagcagcatcggatcagggctctccaggacctgaccatgtgrcacgagaccattctgcaattttgtctgaatatggagatatggtgggcggaatcatgcctcccaaagataacatcctaattctcaggacctgagagcgcgtcaccttccttggcaagaggggctttacagatgtgattaagataataggggaattctcctggattccctgggtgggtctcaggtccccaccagggtctttataggagggaggcaagagggtcgcagtggagagaagatgtgacaacggaagcagaagttagagtgacgtgaggaagggcccaaggaacgcaggagactcttagaagctgagaaaggcaaggaaacagattctcctctcagagcctgcgtaaggcaccagctttctgattgacttcagccgtttgcgctgactttgcacttctggcctctggaactgtgagatagtaaatgcatgttgttttaagtccttaagtttgtggc

SEQ ID NO: 780653 - DNA, 472 bp, Homo sapiens
atgttgctattattatccttagggttaatcatagtgattcctgacttacagaatccaaataaaggaaatccacttcatgcatcagccgccagctgctttttttttttttttttttttttttttttttttgagacggagtcttgctctgtcgcccaggctggagtgcagtggtgcgatctcggctcrctacaagctccgcctcccaggttcacgccattctcctgcctcagcctccggagtaagcccccagctgctctttgtggacactcattgcccagacccccactatggtcgatcagtattaattgcattaacagatttaattataaaattatttcaactgcctgtttttttctgtcttccattctgtgttataatagtttgccaggttagctccaaacacttaatgtctgttacttactcaatataatcccacccagtacatcacctttactgggaaagaagcttgtta

SEQ ID NO: 780654 - DNA, 666 bp, Homo sapiens
tcttggccatgggggctgtcctgtgcatggtaagatgttgagcagcatccctggcctctacccactagatgccagcagcactctcctcccctagttgtgaccaaaaatgtctccagagtttgttaaccattccctgaaggcaaaattgccctgagtggaggagctcttacccaggaaaggagcacagagtgagaggagagaggcacaaaactctctgtccctctgtggctgagtgagacagtgcagttgcagggcwgagagcagcctatctccaccacttattagcagcgtgtctacaagcaggtgatctcatctacctgtgcctcagtttcctcatctagatatgaggaagacactagtagccccttagctagcttccatgaggattgtagtactttaaatggtgcatggcgcttagttagtgctgtataaggcagacacagatgcatgtcttgtatggggaggctgtgactttttatgattatttccatggttcccctttgcttccacaataatatccacggcgtgcactcaaggtcctcaagacctagtcatgcccttttctccagtgttacctctcaccacggccccccacacctgggtgaaccgtgcacaggtcacaggagacacagtgttgtctgtcacagctatggctttgctcttggt

SEQ ID NO: 780655 - DNA, 564 bp, Homo sapiens
cgtctgggaagtgaggagtgtctctgcctggccgcccgtcctctgagatgtggggagcgcctctgccccgccgccccatctgggatgtgaggaccccctctgccccccaccccccgccccgtctgggatgtgaggagcgcctctgcccggccgcgaccccrtctgggaactgaggagtgtctctgcctgaccgccaccccgtctgggaggtgaggagcgtctctgccctgctgccccgtctgagaagtgaggagcccctccgcccagcagctgccccgtccgggagggaggtggggggcagcccctgcccggccagccgccccggcggggagggaggtgggcagcccccgcccggcagccgccctgtccgggaggtggggggcgcctctgcccgaccaccccatctgggaagtgaggagcccctctgcccagccgccaccccgtctgggaggtgtacccaacagctcattgagaacaggccatgatgacgatggtggttttgtcgaatagaaaaagggggaaaagtggggaaaagaaagagaaatcagattgttacagtgtctg

SEQ ID NO: 780656 - DNA, 602 bp, Homo sapiens
tttcacatcccctcaggtaattttaatttgtagccaaaaatgaaagccagtgccctaagaaatttggcgtattttctgtttttttaaaacctcagagcaactggacagaacatcttgctctccattagcttttgtgctttcattctttattcttactttcattattggttctttttttccaatgttttgcccacctcccacatcttacacatatgctaaattgtcctctctccatccacacccactgccttagcttgggctgccatcacaaaatatcataaactaggtggcttaagtgacagaaatttattttctcaaaattctaaaggctggaagtctgagataggagtttgccagtatgggcaggttctggtgaagtcacctttctcagcttgcagacagtcaccttcttgctgtgtcctcacatggcacagtgagagggagagggagrgagagagagagagagagagagagaaagagagagagagagagagagagagagcgagctctctggtgtctcttcttatgaggatggtaattccaccatgtgggccccaccctcctgaccttgtccaaccctaatcacctcccaaaggccccac

SEQ ID NO: 780657 - DNA, 685 bp, Homo sapiens
aaagagagagagagatttcagacactgcaatttatcagacactgattataaaacaatcttttttatttattttttcagagacaggatctcactctattgcccaggctggagtgcagtggcacaatctcacctcaccgyagcctaaaactcccaggcttagatgatcctcccacctcagcctcccaagtagctaggaccacaggcgcacaccaccatacccagctaatttttgtatttttttgtagagacagagtttcaccatgttgcccaggctggtctcaaactcctgggttcaagcgatctgcccacctaggcctcccaaagttctgggattacaggtgtgagccaccaagcccagccaaaatgatctttttattttatttaagtaaatgaaagacaactttgaaaatatctacagggaacagcaaactacaacaattacctcccaaatgtgacagataaacaaataaaatgtctagaaattttaagaatacaataattgagcaaatttgctgaatttgggcatgtgaacagtaaccctaatggagttgtgtaatatggttacccaaatggagtctggcatgaagttcatgacttcagtccagctccacagaacactctggccttttgccagatcatctcctccagtcacaatgttaggatccaagggcatactgtaagtggt

SEQ ID NO: 780658 - DNA, 541 bp, Homo sapiens
atatatgaatatcattaatcattagtttgtagcaattactttttattccaatattatgataatcctcactctataatcatagtctaggaaaaaccaggccatacagagataggagctgaggggacatagtgaggtgtgaccagaagacaagagtgcaagccttctgttatgcccggacagggccaccagagggctccttggtctggcagtgacgccagcgtctgggaagacgcccgttaccaggcggatcgtggtccagcagtagcaaaaggtgtcaaggaacaacacccgctccttagcagactgggaagcaggggggagggtctccctttccccgggggagtttagagaagactttgctcctccacctcttgtggagggcctgacatcagtcaggctctcccrcagttatccggaggcctaaccgtctccctgtgatgctgtgcttcagtggtcccactcctagtctgccttcatgttccatcctgtacacctggctctgccttccagatagcagtagtaaattagtgaaaatactgat

SEQ ID NO: 780659 - DNA, 573 bp, Homo sapiens
atacagagggccagctgtaactcatatgttttcaagaggatcttctcaatataacaatgtgtagcttatggccaggcacagtggcacacgcctgtaatcccagcactttgagatgccaaggctggcagatcacttgagctcaggagtttgagaccagcctgcaaaacacagtgaaaccctgcctctataaaaaatacaaaaattaggtgggcatggtagtctgtgaatgtagttccagctacttgggaggttgaggtggaaggatcacttgaccccaggaggtcaaggctgcagtgagtcatgagtgtgccactgcactccagcctgtgcgacagagtgagactccgtctcaagaaaagaaaagaaaaaggaaactgcaacratgaacagatcagaataggtgacatgcactgaacaaggtaaaaaagatagaaaattatctggagaggtggccggaggacacatcaagaagcgccttgtacattggtaaggattgtggattttatggtgattaaaatttgctgtggggttttttgagtacaggaatgacttaaccggtataatgtttgtaaa

SEQ ID NO: 780660 - DNA, 573 bp, Homo sapiens
atacagagggccagctgtaactcatatgttttcaagaggatcttctcaatataacaatgtgtagcttatggccaggcacagtggcacacgcctgtaatcccagcactttgagatgccaaggctggcagatcacttgagctcaggagtttgagaccagcctgcaaaacacagtgaaaccctgcctctataaaaaatacaaaaattaggtgggcatggtagtctgtgaatgtagttccagctacttgggaggttgaggtggaaggatcacttgaccccaggaggtcaaggctgcagtgagtcatgagtgtgccactgcactccagcctgtgcgacagagtgagactccgtctcaagaaaagaaaagaaaaaggaaactgcaacaatgaacagatcagaataggtgacatgcactgaacaaggtaaaaaagayagaaaattatctggagaggtggccggaggacacatcaagaagcgccttgtacattggtaaggattgtggattttatggtgattaaaatttgctgtggggttttttgagtacaggaatgacttaaccggtataatgtttgtaaa

SEQ ID NO: 780661 - DNA, 607 bp, Homo sapiens
acagttttcattgacgaggttcttattctgtctttgtagcacgcatttaaagaagtctttaagtgttttcaaaacgtattcataaattcaaaaatcatcccataaccaaaaaatcagtgtttgtttcctacaagaaattttcagtttatactgatttctttcatgtctttttggttttgccaacattttagcatacctcttattattctgccaatttctcaaattggggcactatattctaggaatttcctttatcaatctaacttttctaacaacttaattcatayttacttgtgatgttgttgatcctgtagcttccagtttatcagtttaccagtcttttcagtatttttaggattttttaagccattaaaacaaaacccttttatgacagttttggatttacacttggtgaatatcaaacttgaggcattggtcatgaaaataattataatacaatcttctgggcacccttacttcctttttgcttccttggcttgttttatctcaaatttgttcttgtgagaaattttaaatgtccataatttcttacagaatagtttggagatataactaattttttcaggtgcttttgagttcaaatttt

SEQ ID NO: 780662 - DNA, 603 bp, Homo sapiens
ggtgcagagctgagttcaattcctggatatccttgttaactttctatctcattgatctgtctaatgttgacagtgggctattaaagtctcccattattattgtgtgggagtctaagtctctttgtaggtctgtaaggacttgctttatgaatctgggagctcctgtattgggtgcatatatatttaggatagttagctcttcttgttgaattgatccctttaccattatgtaatggcctcctttgtctcttttgatctckgttggtttaaagtctgttttatcagagactaggattgcaatccttgctttttttttttgttttccatttgcttggtagatcttcctccgtccctttattttgagcctatgtgtgtcattgcacatgagatgggtctcctgaatacagcacactgatgggtcttgactctttatccaatttgccatctgtgtcttttaattggagcatttagcccatttacatttaaggttaatattgttatgtgtgaatttgatcctgtcatgatgttagctggttattttgctcattagttgatccagtttcttcctagcattgatggtctttacaatttggcatgcttttg

SEQ ID NO: 780663 - DNA, 598 bp, Homo sapiens
gagaagacatgtcactgggggggcagatatggcatcaacttcaatgttttccccagaaaacacttccaacaacgtcattcccttgggtttttcctcagaacattcctgtgttgaggtattcagttgttgttatttgggaaatggagcatattatctgaattcctwcaacaaaagaaaattgtgggtatgtgttctttttttctcttttgccatgttttctgatctagtttccactaattaagcagtaatttagtctcttacactttgaagtttcactcattacctggcttctgtaagtcaaccaaaggcaacatctaaagctcttagtattggaccatcactttggggactgctaattgaatgtaattactttattttgggccagggctcatacttgcaacattgccttgtaataatttaaattgtctgcatactgcagggggactgtttgacgccagagtggagacggtcaggcagccactcgggccttggaagcaaagtcaaaagtaaggagacattgtcatttggctacctactcattagctgccctctacggctgtctgttgttatgagtgaacaggatgtgtcgtgactgaat

SEQ ID NO: 780664 - DNA, 598 bp, Homo sapiens
gagaagacatgtcactgggggggcagatatggcatcaacttcaatgttttccccagaaaacacttccaacaacgtcattcccttgggtttttcctcagaacattcctgtgttgaggtattcagttgttgttatttgggaaatggagcatattatctgaattccttcaacaaaagaaaattgtgggtatgtgttctttttttctcttttgccatgttttctgatctagtttccactaattaagcagtaatttagtctcttacactttgaagtttcactcattacctggcttctgtaagtcaacmaaaggcaacatctaaagctcttagtattggaccatcactttggggactgctaattgaatgtaattactttattttgggccagggctcatacttgcaacattgccttgtaataatttaaattgtctgcatactgcagggggactgtttgacgccagagtggagacggtcaggcagccactcgggccttggaagcaaagtcaaaagtaaggagacattgtcatttggctacctactcattagctgccctctacggctgtctgttgttatgagtgaacaggatgtgtcgtgactgaat

SEQ ID NO: 780665 - DNA, 597 bp, Homo sapiens
ccagtatcattctttatggtttgggaacttggcaattaagaccatagattattttcttggtatccatcagtttgataaatcttagacagctacatgagttctttaaaggaaataataaatctaataaatataccttggtaaccatttcagtctatatttatgccttgaaatctaaagctttcattaagctttctcaagtgttcttgtagagagttagaacgtagcttcaaatgatattttctaagttttatgtgattccttactgagaaagagtcaaactttcttttttcttttactgaatgagattagataacacccctttaggaaacagaatgtttcattcttacgggttttaatttttttttaatcctattatttctttataactccctgggcaatttaaccaggtttgttagrgtaagtatgctcaagtaaaatgaaattaaaacttctccaattggttattacctcaattcacaggaaaatacttctcacctacttaaagcaatttttccactaataaaaattaattttctataccactttaagccatgaagcttttggtgcaaatttataatttttatatttgacataaca

SEQ ID NO: 780666 - DNA, 554 bp, Homo sapiens
  misc_feature 541, 542, 543, 544, 545, 546, 547, 548, 549, 550, 551, 552,553, 554: n = A,T,C or G
cttcacaacaagcctatgtggtacatatgatgataattatgcaaatgaggagatgaagcctaagagaagttgggaactttggtgagggctccctattaatgggtggccaaagcaaagggatagcagccataggttgagaggtagccagaaaaaaaggacaattttgagctaggcatggacttgaaactatttctaacacccactagcygcacagccatgacaaattatttagcctcttagaggatctgggtaagttgatgattatacccatctcttagtgctgtgagaacgaaaaaggattgagtatctgaagtatagtaggtgttacataaatgtttattcaatatattattgaataattgattagtgacaagttgcagcatggttttaatgaggataaatagatcaatatgtatgactgcttggcacatataagtactaataagtgtcacgtaatactaaataataataatgattattaaagtctccaaataagcataactattattattcttaacttaccaaacttgagttgcagttnnnnnnnnnnnnnn

SEQ ID NO: 780667 - DNA, 554 bp, Homo sapiens
  misc_feature 541, 542, 543, 544, 545, 546, 547, 548, 549, 550, 551, 552,553, 554: n = A,T,C or G
cttcacaacaagcctatgtggtacatatgatgataattatgcaaatgaggagatgaagcctaagagaagttgggaactttggtgagggctccctattaatgggtggccaaagcaaagggatagcagccataggttgagaggtagccagaaaaaaaggacaattttgagctaggcatggacttgaaactatttctaacacccactagctgcacagccatgacaaattatttagcctcttagaggatctgggtaagttgatgattatacccatctcttagtgctgtgagaacgaaaaaggattgagtatctgaagtatagtaggtgttacataaatgtttattcaatatattattgaataattgattagtgacaagttgcagcatggttttaatgagsataaatagatcaatatgtatgactgcttggcacatataagtactaataagtgtcacgtaatactaaataataataatgattattaaagtctccaaataagcataactattattattcttaacttaccaaacttgagttgcagttnnnnnnnnnnnnnn

SEQ ID NO: 780668 - DNA, 623 bp, Homo sapiens
aattacataaaaagactgagaaaaaaatatagccagaactggattcttttaagattaaaaggatattccatgttttctttttaaatcatgcctacatattttatacatcataaattcattgtatttttaattctgtaaaaatgtaagtttcttaacttttcagtattatgggagttatacaattcagagattcttcagagaaagtaattttggtgaagtttcaatctccctcttttttttctatattaagaagmtcaggaaagaagttaattttaaatatgaatacccttttaactttaattttatatttatctgcacattctctctttctctcttactctcttttcttgagatgtaatttactcaccatcaaattgaccctttgtgtgtgtactttatgtatattaacaaatgtatgcaatcatatcaccaccaccacaatcaaaatagagaatatttctatcattccaaaaagttctgttatgtctcacttatagtcaatatctcccctctaccttgcagcccttgacaaccctgatgtaaaaatataaatgcctttttgtttctaaagcacatttggggaaattttacttaagatgtaagtatccctgttaagtcaagaa

SEQ ID NO: 780669 - DNA, 605 bp, Homo sapiens
gatcttttagagaatagttttctctacacacacatctctatcatgatactcactttttgaaaagtccagaccaattttctcataaaatgtttcatattctgaatttgttttattgcttcctcattgcatagtttaacatgttgcccaatctcttgtatttcccataaatgaagctgtagatataaaggcttgcttagattcggaattaacatttgtgacaagaacacatcataggtggtattttattccttgtatttyaagtgtttcatattgcattgcatcaggactgacacaacttcaggttttaccaccattttatcctttggttaaggtagttaccaagtggggatctctccactttacagacacattttcagctttacaatgagtaagtcatctatgagattattttagacaccatctaactccattccttcttcttctactgctttggtttctaaccagttacttatcttgaggaagatatttcttcttcctaaagcttcctttttgttctattcattcactaagaaaaaatacaatgttgttgtaatgattcagtgaagtaatgcatgtaaaatagttttataaatcgcaaatgttgt

SEQ ID NO: 780670 - DNA, 605 bp, Homo sapiens
gatcttttagagaatagttttctctacacacacatctctatcatgatactcactttttgaaaagtccagaccaattttctcataaaatgtttcatattctgaatttgttttattgcttcctcattgcatagtttaacatgttgcccaatctcttgtatttcccataaatgaagctgtagatataaaggcttgcttagattcggaattaacatttgtgacaagaacacatcataggtggtattttattccttgtattttaagtgtttcatattgcattgcatcaggactgacacaacttcaggttttaccaccattttatcctttggttaaggtagttaccaagtggggatctctccactttacagacacattttcagctttacaatgagtaagtcatctatgagattattttagacaccrtctaactccattccttcttcttctactgctttggtttctaaccagttacttatcttgaggaagatatttcttcttcctaaagcttcctttttgttctattcattcactaagaaaaaatacaatgttgttgtaatgattcagtgaagtaatgcatgtaaaatagttttataaatcgcaaatgttgt

SEQ ID NO: 780671 - DNA, 549 bp, Homo sapiens
tgcctgtagtcccagctacttgggaggctgaggcatgagaatcacttgaacccaggaggcagaggttgcagtgagctgagatcacaccactgcactccagcctgggtgacagagtgagaccctgtctcaaaatggaaaaaaaaagaaaaaggtacgctgcaaaaacatcaaacagaaaagaaggcattaatcaagagacctaggaaagaaggcattaatcaagagacctaggaacaaaaaagataagccatgtagaaaacagatcacaaagtgaaagaagcaaggccgttttaaaatcaggaattaatttaaatgcaaatagattaagctctccagttaaaaggcaaaaatggacagartggataaaacagcatgatccaactatatgctgtctataagagacttatttgcaatccaaagacaaaaaatgttgagtgaaaaaatggaagaaaattattccatgcaggatgtaaaaaaagagaactgaagtaattgtattaatattagacaaaatcgacttaggtaaaaaacttgacaagagacaaacaa

SEQ ID NO: 780672 - DNA, 618 bp, Homo sapiens
atattttcattcctgtattgacctgaagctattaaaatggcggcaggtatctgtaatgacaggataaagaaaaaatatgggctttggaagatcatagactattgcctttgtagcataatgaaatctatacatttttatgagtgagtgtgtatgtacatgcataagataatatgtaaaggatacttttttttttttagcaattttctcttgcaatgagcattttgtggtatttttcyattttataattccataaattacattttaatttcttattgaacatcagtattaccaaagcagtaaattatgtacattagaattttaaaaagtgctatatgataatcccttcaaaatatgattgttctatattgttatatggcacataagatcataattaatagattctggaagccaattttaaaaacaaaaaaattctctgaatatgtggataaatggatgagtgtgaacaattgtatctttgcaattaatgtctgctacacttcttttttttttttgagatggagtctttctctgttgcccaggctggagtgcagtggtgcaatcttgaatcactgcaacctccgcctcgcgaattcaaatgattatcctgcctcagcctcc

SEQ ID NO: 780673 - DNA, 608 bp, Homo sapiens
aaacaatacaatataatgactatttgcatggtattgacataatattaggaattataaatagcccagagatgatttaaagtatatgagaggatgtgcataggttatatgcaaatattgtgccattttatgtaagggacttgagtatccatggattttggtatccacagagtgtcctggaactaatcccctgtgaatactgaggaacaactgtcattgttgtatcttcctagtgagttgaacttttaatcattatatgatatccttctttgtctcttgtgacagtttttgtcttaagtctattttgtctgatataaatgtcaatctaaatagaagagacagagtctctctaaaataaaattacatttattcaggaatgagcatttcaatgggaatacagtgggtatattcarggaggtaaatgaagacaagagttttataaggaaaaatgaaaagggccacataagttgttttgaaacaatttttcttgaccacagggttcagtaacaacggtggtatcagtccaaggttggacagccagttgctgggtagatgtcttcatggaagtagttttgtttgtgtaaggtcatgacatttgagcaacaatggag

SEQ ID NO: 780674 - DNA, 542 bp, Homo sapiens
tggacttgcatggggcctgtagcccctttcttttggccaatttcccccttttggaacgagagtatttacccaatgcctgtaccccattgtatcttggaagtaactaactcgtttttgattttacaggctcataaatagaagggacttgccttatctcagactagacttcggactttcgagataatgctggaataagttaaaacttcgggagactcttgaaaaggaattattttattttgcaacatgagaaggacatgagatttggaggggcccggggtgcaataatatggtttggacctgtgttcccaccaaatctcatgttgaattgtaatyctcagtgttggaggtggggcctggtggaagatgattgatcatggggttagagttctcatgaataggctagcaccatcccctattcttgtgacagtgagtgagttattgtgagatctggttgtttaaaagtgtgtagcatgtcccctgcctcccccaccccgaccccacaccacccctgctccttctctggccatgtgaagtgctgctcc

SEQ ID NO: 780675 - DNA, 385 bp, Homo sapiens
taaaaactaaaattgttcactatcaagagatctgcagcaaataaaatttcaaaggctatatatcaggaagaaagaatttaacccaaaagctgatctcagagtcaacttggaattccataaatatcactaaactgatgataatagtaatactttctgacatgggggggatcctgaaaagaagtgaacttttacttttgtttagaatttagaaagytatagaaaaatgctcttgccctgaccaagagaataagctggataatctatagatcatagatttcattttaaaagacagagctgaggtctcaaaaaaagctaattaacttaaattcagagtaatgaaagcctactgaaaaaagaacggatccacagatgatttgtgtgtacc

SEQ ID NO: 780676 - DNA, 550 bp, Homo sapiens
gtatggcacccataaaatttctattcattggaaaaaaattttattatcattaggaacacagttgaattttctacaaaggtgaaacatatattccacatttctgagataaagtaaattggatcacagtccttgataccctcataaaaaatataatcattttagatgctaaaatctgaacagtaaccaaaattttccctggctacaaaatacatctttcaaactacttaccaaaacttttgaaattcccgagyaatgcactcatctttgtagattagaatatatcacacataacaaacggtgtgtaaatgttgaaggaatggagatgcaggtattcagagaaagggcagagtgaatatgtacttggaaggaaaactaaggaaaataacaaagaagaaaagtgggggggggaggggaaatgaaaattttccctggggaaattggagaggaaagaccaacacttgttctccagtttctgagaaaacgtgaaatgcaaacacacagcagctgggattattatccatagatgcaaaccaaggatccagaaaactgg

SEQ ID NO: 780677 - DNA, 576 bp, Homo sapiens
tataataaacaaataatttgacaagcaataaaccaataaccccattaaaatatgagcaaaagacatgaacagacacttctcaaaaggagtcatacaagcagccaacaaacatatgaaaaaatgctccacatcactaattatcagagaactgcaaatcaaaccacaatgagataccatctctcaccagtcagaatggctattattaaaaattcaggctgggcrtggtggctcacgcctgtaatcccagcactttgggaggccgaggcaggtggatcacaatgtcaggagttcgagaccagcctggccaatatggtgaaaccccatctctactaaaaacacaaaaattagctgggtgttgtcgcaggtgcctgtaatcccagctactcaggagtctgaggcagaagaatcacttgaacctgagaggcagaggttgcagtgagccgagatcatattactgcactccagcctaagtgacagagcaagactccgtctcaaaaaaaaaaaaaaaaaatcaaacaatagatgctgtccaggctgttgagaaaagggaatgcttacacactattggtgggaatg

SEQ ID NO: 780678 - DNA, 671 bp, Homo sapiens
atataaacatgtaaatggcatgtggatcctagcattcctctgtcatataaccattcacactgtcttagttcatttttggctgctataatagaatattagattggtgatttataaggaacagacatttatttatctatttatttatttatttatttttatttatttttgagacagagtctcactctgtcacccaggctggagtgcagtggtgtgatctcggctcactgcagcctctgcctcccaggttcaagcgattctcctgcctcagcctcctgagtaggtgggactacaggtgtgcgccaccacacctggctaatttttgtatttttagtagagatgggatttcaccatgttggccaggatggtctcaatcttctgacctcttgatttgcccgccttagcctctcaaagtgctggcattayagacgtgagccaccgtgcctggccaaggaacagaaatttattgactcacagttatggaagctgggaagcccaagattgaggggccagtgtctggcaaaggccttcttgctgcttcaactcatggtagaaggtggaagggcaaagagagggcaagacagagaaagtgaaccaaactcacccttctatagtgaccccacttctgtgatcattaatccacttccatgataataacactaattcattaatga

SEQ ID NO: 780679 - DNA, 548 bp, Homo sapiens
agcccaggagttccagacctgcctgggcaatatagtgtgacctcatctctacaaaaaattcaaagattagctgagtgtggtggtgcatgcctgtagccccacctactctgggggttgaggcaagaggattgcttgagcccaggaagtggaggttgcagtggrtcaagatagcatcattgcactccagcttggatggcagagcaagaccccgtttcaaaacaaaatctaaaaacaaaaaaaaaagttcaatctatcttcttaaatttaactttaaaggagttattttttcttaataaactggcaaaaaaaaatctattagactttataaatatgccagctttttaaaaaagaaaacattaagttaggtgatagatatgatacttagcttgattgcggtaatcatttcacatcatatacgtatatcaaaactccatgtagtacaccttacatttatataatttttatcaattatatgtcaaaaaagcctggagaaaaaggagacaatgtgtcaaatgaactcatgttgtcaaactgacaaggtacatata

SEQ ID NO: 780680 - DNA, 548 bp, Homo sapiens
agcccaggagttccagacctgcctgggcaatatagtgtgacctcatctctacaaaaaattcaaagattagctgagtgtggtggtgcatgcctgtagccccacctactctgggggttgaggcaagaggattgcttgagcccaggaagtggaggttgcagtgggycaagatagcatcattgcactccagcttggatggcagagcaagaccccgtttcaaaacaaaatctaaaaacaaaaaaaaaagttcaatctatcttcttaaatttaactttaaaggagttattttttcttaataaactggcaaaaaaaaatctattagactttataaatatgccagctttttaaaaaagaaaacattaagttaggtgatagatatgatacttagcttgattgcggtaatcatttcacatcatatacgtatatcaaaactccatgtagtacaccttacatttatataatttttatcaattatatgtcaaaaaagcctggagaaaaaggagacaatgtgtcaaatgaactcatgttgtcaaactgacaaggtacatata

SEQ ID NO: 780681 - DNA, 669 bp, Homo sapiens
gaatggtacaaaaagagaaaagcaaggacggcagagacaagattttgcaagccttgatgtaggcagttctaaagatgtttaccctttattttaattgcaatgggaagcctttgacaagttttaggatgggagtggcaatatcaaatttcaagtttactaaggtcattctaattggattctgggaaatagttgcagagagaatgttaaaagcatggaaagatgtgagaaatccattgtaatatccttcacaagcaaaggtgatgttttcaactagagtaatatcggtagaaaaagagagaagcagatggattcagttacttagaggccaaagaacaaaatttgataggaaggcataggaagataccttatcccaggttcttcygaaaacagtctgaggaggactaaattgttgatgctttatttcagaagtacatttgcaggacaataaaaaagggaatgaggttaggaaatacccactttgcagtggccacactattaattacctttcaagatgatctctcaagagacacaggaatttgccctgtagatatattcactgatctaataaaacttctccaaaggggttccaaaaagaaactgcttaagacttttttcacaagagtgaggggaaagggaatttgcctaattttcccccattcttgtttcaca

SEQ ID NO: 780682 - DNA, 551 bp, Homo sapiens
taatagatttaagtactttgttatttaaggatctagagtcacagatgtatattttagtgagtatatatgtgttgaaattatgtctaaaattattttactacaaatattagatatttaaaaccacagtactctatacctactcaatattcgttaagtgtttactatgccaaggtggtttcctaaagcaaggaagagagccactgaggaactatataccaagtattataacataaggtgagactttggtgatcattacattcttcttcttaagtataattgctatgaactattattttaattgtgacagtaagkgcagtatactcaaagactcaaaggaactggaccctagtaacaaaccaacttccactgcttagtagctctgtgatcttgaacaaagtgcttcacatctctgagcttgtattcttattcaataaaatatgataattctatagggcttacaggcttttaaaaaattttaatgagtgtgtgaatagacttaaaaggctaaatccatatttgactagggagatattccatcaatgtatcagtgt

SEQ ID NO: 780683 - DNA, 529 bp, Homo sapiens
ttttgtcctttattctatcaatgtcgtgtatcacttttgcttctctgtatacgtggaaacatttttgcatccctggggtgatcccacttgatcatgatgaatgatcttttgaatgtgttgttaaactcagtttgctagtattttgttgaagatttttgcatccgtgttcattagtaatttgcctgtagttttattttcttagtctttgtctggttttgaaatcaggggaatgctttccttgatagaacgagtttgaaagtattccctccttgatttattgaaatagtttgaatagaattaatatctattctcactgatatatatatatatatatwtttttcagaacgcagcagtgaagccatcaggtcaggtcccagctatcctttgaagggagactattattgcctctatctcattagttgttattggtccattgatgctttaactttcttcatgtttcaatcatcataggttgtatgtgtctaggaatatacttatttattttaaattttccagcttattggcatat

SEQ ID NO: 780684 - DNA, 626 bp, Homo sapiens
tatcagattttaaatcgtcaagggaatgaacaaaacggaatacatgttactttattttcactttttattgttctatagccatatgacacaagatattggctcacttggtctctgttcactatacttcaggggaggacagtaaagataattagcaaaagtactgttcattaccaattataccttctatcttaatcasatttgatttttctctcccaccacaaaaattctgatgagttgtgtacctatatatatgcatgtgttggattcacctacataacctccttttgtctacccagagatcatccctcgtttgaacctttacaatttctgtagattgacagcccaataattatctggtccatatgttttcacttaacattggtgctgctgacatatctgtattgtttctgaaatagtgtaatatttcaatattaataatacagagatcctgtgtaccttttttcccagttttctccagtggtaatatcttgcaaaaatataccagaatatcaaaatcagaatactgatattgatataacccacctattttattgagattttcctggttttacttgtgtgtgtgtgcatatgtgtatttagttctatacaatgttaacatatgtgta

SEQ ID NO: 780685 - DNA, 586 bp, Homo sapiens
cagcaaactaatgtaggaacagaaaacgaaacactgcatgttctcacttagaagtgggagctgaacattaggaaaaatagctaatgcatgctgggcttaatacctaggtgacaggttgattggtgcagcaaaccaccacggcccatgtttcctatgtaacaaacctgcacatcctgcacatgtacaccagaactaaaaataaaataaaataaaataaaaaagaatacaggaattcctcagagatactgcaggtttggtatcagaccaccacaataaagcaaatatcacaataaaaaaataataagtgggaggtgaacaawgaaaacacatggacacagggagggatacaacactcactgaggcgttttggtgtagattgttggggaaagagagcgtcaggataaatagctaatgcatgctgggtttaatacctaggtgatgggttgacaggagcagcaaaccaccatggcacacgtgtacctatgtaacaaacctgcacatcctgcacatgtatcctggaacttaaattaaattaaattaaatttaaaaaagaaattcaaataataaattgagatgtttcagtttt

SEQ ID NO: 780686 - DNA, 556 bp, Homo sapiens
taaatctacagggtacatatatattgcattaaaaataaaacaaaataggtaaggtatctaagaaaataaatacacatttaaattctgtggccctactatcaacaagatatacctattatttatagaataaaataaataataaaaatataaatgakaattaataaaaccagaaaggaattaaataaggagaattttaactcacatttggtgcattagaaaaaattttacaaacttatgaaatatacaaacctgcagcaaaataaaccacaaaacccagagaaaatatattacaatagataattaatgaaaatagtttaaaagttgataaaactacagatataaacaataatatagaaaggcttaaagtactataagcaaataaatgaaataaatgttaaaatgtagtaaacatctttttttctaaaaaaattaacaaaattataggaaagttagaaaaaataaaatttaatatatagaataagtaagataataataattaaggacattatttgaatgaaatgcagcaaatatttacatacaggcagaaaacatttga

SEQ ID NO: 780687 - DNA, 492 bp, Homo sapiens
gggaggttatcctgggcatgtgctaatcaagtgtgcactttaaaggcaccacttttttccagctggttataggaaattatttgattagcctggaaaatgacaaacatcatgttgttcattgcttaagggagtcaagtcgtaagaaattgtggtggcctcraagtgctgagggttttctcagccaatagtagaaacacagtgtacctagccctgaatccccgtggaatgaattctgccaaaaaaaaaaaaaattcaagactggtaaaaggatcttgaacctccagtaggaactgcagccccagtggatacctttatttcagcccagtgagactctgaacagagaatccaatcaccctgaggaggaattctgaccacgatatacggtggacccttgaacaacaccagtttaaactgcatgggatcacatacacacaaatttcttttcaacaaatatattaaaatacttttttagggaatatgtgacaatttgaa

SEQ ID NO: 780688 - DNA, 615 bp, Homo sapiens
gtatttttcagctttattaatgtaagtatattcctatcaggagctgaatccctagtagagaattagaaggtcttccctgagatatccattgtgcctatcactaacactgcaaatccagggagaaaactcacaagcttgagttggctttgcgttctcttctatagcaaagtggaagcaaaccaatactctaaagtgtgacacgggttaaataaggaaagcttcaaaccacctaaataatcaagttattgcaaatgggaaaatgtcttttgaaaacaagatgataagcgctaagaatagatttacatttatgaagtgctcagttaatatttgttaagttyaactgatagattaaattgatccagtgtcagaatgttaataaaaatttaagaaccggggtggagaggtggagggcagaaaaagcccttaatttgtagtgctgcagatttctgtgatgaaaatacttgcaccacggttaatgcttccaacataacgtctgaacagggaattgggaagagatgctaactaacagctctcactggctggttgtatggctggttccagtactccactgtgaacaagacaaaaaaaagacactcaaaaaatatgtcttaagtg

SEQ ID NO: 780689 - DNA, 569 bp, Homo sapiens
gtgtctgtgagggtgtttctgcaagagattagcatttgaatcagcagattcaactgagtaaaggagattgtcttcaccaatgtggatggccatccaatccactgagggctccaatagaaccaaaagataaaaggagggcaaattctctctctcttattgagctgggacattcatcttctcctgccctcagacgtagatgctcctggttctcaggcttttgcrctcaaaccgagacttagacttctgcactcccaaccccttagttctcaggccttcagaattggaccaagacttatgccatttgctccctggttctcaggcttttggactcagactgaattacaccaccagctttcctggttccccagcttgcagacggcagactgtgggacttctcagcccccataatagcattgagtgaattcccacttcagacacataaatattatattggttctgtttctctggaagaccttgactaacacattcagatcctccagtttattccctaatgtcatttttctgtgccagaacccaatccaggatcctacatttagtcatcgtgtctc

SEQ ID NO: 780690 - DNA, 598 bp, Homo sapiens
ttctgcagtattctttccccaaactcatagccccagtctaatcatgagaaaacatcagacaaaccccaactgagggacattctacaactccacttcatcaagagttggtgcctttccattgccatatatcccataaaaagccccattctgctatattaacaacaggaacccagtttttgtgatcaaacctcaacacctgatattacactgagtacattattcttttcctactttcattgtatagtgagacttatttataggaactctattttgttgaagtttcatgtgtagtcaacactgaggtccatcctggcttccctctcctctcatgtccttgagaatatcccaaagacacaagctttttgctctgaccttaagaacttgtgaccaacaagaatgarttcaccaaaaacttctggactgactatgattctcacatttagtatgtccatattttgcacacactgagcatttttagtgagcctgcagagaaatgttgccaccatcactgtggcaagttacataaggaagtttgtggcttcctgccttctctggtccagccttcagaggactgactaagaacagctgagctttatgc

SEQ ID NO: 780691 - DNA, 612 bp, Homo sapiens
gtttggaatacaaatgatcctgtcaccgagatagtgagcacagtacccaacagttattttttcaaccctggctctcctcccaccctccccgctctaattagtccccagtgcttattgttgccagtaggtgtaagtttctatgcactatgatggtaccacataccactatgaatcaaagacatcctttgattattctagyggtggtgatgagcttcactgcccattcacatttatctattgatgtgctggtaaatattcagtaactggcccttgagggtggaggatagagaagccctgatttgtagcattttaatcgtgtaaatactcccttcatggcaaatttcaagccaccagcaaagggtgacatcagtgaacaacgatcgggaagcaccgcacatgactggctcctgggctccggctccagcacactgctactccatttatcagacagctctgggtaccagcagcacggaattgctcggtgtgactacagattgtcctctctgagaagaaactaagtatttcacagggataaaattagtccatgcttatattacacatgaagtcgctgaataaagtacctgacaactatgtctaaggctcatcttggag

SEQ ID NO: 780692 - DNA, 612 bp, Homo sapiens
gtttggaatacaaatgatcctgtcaccgagatagtgagcacagtacccaacagttattttttcaaccctggctctcctcccaccctccccgctctaattagtccccagtgcttattgttgccagtaggtgtaagtttctatgcactatgatggtaccacataccactatgaatcaaagacatcctttgattattctagcggtggtgatgagcttcactgcccattcacatttatctattgatgtgctggtaaatattcagtaactggcccttgagggtggaggatagagaagccctgatttgtagcattttaatcgtgtaaatactcccttcatggcaaatttcaagccaccagcaaagggtgacatcagtgwacaacgatcgggaagcaccgcacatgactggctcctgggctccggctccagcacactgctactccatttatcagacagctctgggtaccagcagcacggaattgctcggtgtgactacagattgtcctctctgagaagaaactaagtatttcacagggataaaattagtccatgcttatattacacatgaagtcgctgaataaagtacctgacaactatgtctaaggctcatcttggag

SEQ ID NO: 780693 - DNA, 611 bp, Homo sapiens
acactcaatgaatgtagacacagaccttaaatccttcacagaaagctcaaaattgattataaacctaaatgttcaacacaagactgtaaaactcaactactggaagataacataggagtaaatctagatgttatagaatatggcaatgactttttagatataacaccaaaggcacaatccatgaacaaaacaattgataagctagacttcattaaaattgaaaacatctgttctacaaaagacattattarcagaatgagatgacaagccacagactagaagaaaatatttgccaaaatatttatcctttacctgatatagaactattacccaaaatatacaaagaacatttaaaactcaccgataagaaaacaaagtaacatgattttaaaatgggcaattgtgcatggattgcttgagcaatcatctgtctgcctgggtgagagtgagaccctgtctcaaaaaaaaaggtggggaggcaaaacatctgaacagacacctcaccaaaaaaagacatacagatggctaataagcatatgaaaacatgctcaacttcattgatattagggaactgcaaattaaaacaacaatgagacactactatataccta

SEQ ID NO: 780694 - DNA, 628 bp, Homo sapiens
tttgaaaggcctttatggttttgttttaaaagctagcttatttattaaagattttactctcctaggaccttgtctttctttttgagcaaaagtttttctctttcttttcatttgactgaattgttttcacctgattttttttttttttttttgactaaaatagttactgcaacagagggtactctcttggtttttaagaaatttatgtttaatttggctgaaagaaaaataaaagcgtctccctctagcaccaccagaccttttctctctgtaccttaagtgaggtaaaatttgctatttgattttcacaaactgagttgtttaatgtgcaaatttagggctatttagctgacaactgcctagggttgtgaaagaggttatcaagaatctgaaagtctaagctagagaaaaaaaaagggaggtgactttataaatctataaaaygtacttccgtcagcatgcctaatacatctttatatgtatttatgtgttgtatacaaaatatttcactactaaaaatatataaaagagctctaactggtttcaagaaaaataaaagcacctaaatcagatactaaaaaagactagtcacatgcttttttcatgtttatgcaacaagtaaaatctt

SEQ ID NO: 780695 - DNA, 596 bp, Homo sapiens
tctcagctacttgggaggctgaggcaggagaattgcttgaacccgggaggcagaggttgcagtgagctgagatcgtggcattgcactcgagcctgggcaacaagaatgaaactccatctcaaaagaaaaaaaaaaaaaaattaagtgcttacagaaaaactcctaccctgccctcaaattctaatagggaatcaccaycttttacttgctgttttgtcttggaccatagataaacatttatctgatagcagatgctataacttgaatttttatgtccctcaaaaattcatgttgaaattcaatctccagacaagcacagtggcttagccgggtaatcacagtgctttgggagccgaggtgggaggactgcttgaggccaggagttcaagaccagcctgggcaacacagcgataccctatctctacaaaaaattagacagacatggtggcatgtgcctgtagtcccagctactcaggaggctgaagcaggaggatggcttgagctcaggagtttgaggtcgcagtgagctataacctgggcgacagagcaagacacacatacatacatatatataaagaaatttaatctccaatgta

SEQ ID NO: 780696 - DNA, 587 bp, Homo sapiens
gtagcatcccgggcaatatattttgctaatgcagcaaaatacaattgttagttgactcactctagctctaagtctatctatctatctatataatatacatggttttttttggtctctttcaattttcttatgctgatcaagacgatcagaagactggttttyagactattggtaactactacaagtttgaaatatttaatttgagttaattcatataccattatgagaaagtttgagagaaacctaatgctcaattaacaaataatttaaatattatttccaatttattacttgattccccaagtctttcagtggctgccttggataataggtatgctttggaatgtacatgtgagctttcaaaagcaaaacaaaatgaattatgacattcttttatgaagtagaatttctgagagtaattcagtgtaagtaaaatcaatataaacatctatattatccctgattgatgggaaaaggataatatactatcaaaactaccttgaaagtaatcgtaaagtggattttccactcaggataccttttcacagttttattccctaggagagaatgttaggtgctattaaacc

SEQ ID NO: 780697 - DNA, 571 bp, Homo sapiens
ataaaatattattcagcaatagaaagaaatgaagttctgatgcatgctaaaacttggattaaccttgaaaacattatgctgagtgaaatgagccagacacaaaagtattaatattgtatgattccacctatataaaatatatattatagggacataaaatagaggagaggctaccataggctggggtgaaggcaaatgaagggaaacgttgaaaaataaaagaaaaaattgaaagaactcacactacccaattgctacaaagccaggtaatcaaatcagtatgatcctggcacatggataaacatacaggccaatggaataaaattgagagttcagaaataaacctatacatctatggaaaatcgatttttaacaagggcactcaccttgcttaatgagtttctatctgagtttggaatttctcccygggatgataaaaagttttgcaaataatgatgatggttgcatagcattgcaaatgtaaccgacaccactaaacgatatatgtaaaataattaagatatcaaattttattttatgtgcattataccccaaggaaaaaaaataaaaa

SEQ ID NO: 780698 - DNA, 671 bp, Homo sapiens
cagaatactactcacaaagttttctaagccatatcaaacatatcaatgtttgtgaaatcaaagcacaaaaatgcaaatttctgatatttaatatataaagtgtatctatacaatttataatttgataaattttacatgcttattctttctctgaatgtattacataattacatgagatatattaactcatatgctataatacttcatttaagaatagtgtcctcttcaaaatcgatttgggaatacttacagcttgatttggctcaactgaataaatgaaaatcttagaagtttcattgttgctagakccaatgagaaaaactatccagtatggtacctttgcctgctattattcttctctatttatctttattagtattctagagttattaagaatagattataattgaaatatgagaagtcctgggaaaacttcatgggcagccacctaaccactttttttatattctaccggaactggctttaaggaagaacaatcagagtacatactttaattacaagcagaagaacagagtaactttaactttatgatattcaattttttttaattctaatctttatgtgaccctgcaaatttgaattcaggctgggtgtggtggctcacgcctgtaatcccagcactttaggaagcccaggtgggtggatcccct

SEQ ID NO: 780699 - DNA, 608 bp, Homo sapiens
caggagagagaggcaagagcagggcccactagtggaatcatctcagccttattccccaggggaaaacacattctttttcactttcctgagctgccttatctgataaaaatgattcttacatctcccagcaatgccttctgattgtaatgtagtttatgccactggtttgcctatttctcaaatataaacctacacgcatgtacacacatttggccttagcctttctaattccactctcatcaggacagattgcacacctgtaaacattcttagatcaactccagtaatcaatccacattcatgtaacccctgcagaataaagatcattggagaccttcaagattgacttcccatttaaaccgtaagaaaacaagaccccaatgtgtcagctgcagaaccacaataaggacctragtcccatgtcttattgttcagtggtttttctaagtcactgtaaaatttttctacattcctggcctgagaacagaagtaccttttgcttatctattcaattaaattcagtagttggtaaatgtgaataaaggaaatcaaaacactattgaagattatttagatatggctgagaagtggggtgaacaaacctgacc

SEQ ID NO: 780700 - DNA, 568 bp, Homo sapiens
agctatatcaagacccccatacatgctttgaagttcatcctaagtgttatggattatgaaaaatttgctgtaataaatgttcagtggatgaacatctagtaccttttacccaagtgtgattatatttggcctcagaataaataatacagtcttttccaacctctcaacagttgccaaagtgcaggaaaggataagattatggcgtgaaataattcacgtgaagcagttcattaggaaatacatactgagcttcaaaaacactttgtgtrtgcgtgtgtttgtgtgtgaaaaagaaaaataagacaagaataaaattgtgtaaggtgattgaagaaaaagcacactaatgttcctttaggtatcgtgcatatatacacaagatatagagaaaagggagggttagaagcattatggcatttttcaaagaactagatatcagtttctttgaaatttttattacattttactctgctctcttgtctagaatacattcaagtgcacgtgtttgctgctgctagaagtttgcctatgaaattcagatttatggttaccctggaataaattataa

SEQ ID NO: 780701 - DNA, 581 bp, Homo sapiens
gatttggggttgtaactacaacctccatgaggtaagttagtcaatgaatgcacaaaatcgataaacagaggctgggatatacaccttgggcatgtttggaactatatgttgctgcatttcaattctcagttacttaacacactaatttaaatatagtagggcaaacaaatctaaatgttttgatataacagcaaatgaatactttctggtgctgttccttttttaatcggaaataaatccayacgctcttgtagaaaaaaaaattctgattaggatttcatccctttactttccacagtagtttttaaagagtacagaattaagggctttcccacttcaccattgttccagatttttttgagtaaagcagagagggtacaagagacagagatctaggttctaaccaccaggatagatgttaacaaaaagcagcagtgttggccagaaggtgaaaagccagaatctcctcatctccatcaggaatggtctgagagggtgaagaacctgcttctgcactgttcacggatgccaaggggattgttttggcggcaacagaagacacacagttggcccggccagct

SEQ ID NO: 780702 - DNA, 602 bp, Homo sapiens
tcctgtttgcatgatggagatcatttgagaatctctcatctagtgtgacatcaggaacagagctgggtcttgaaccagattgcctgacttttggtacagcatctctattccatctattcctccaaagtcaaataatatagtttgcagagtatgaggcttggagtatgctagaaataactaagacatagcctccaaatcattttggatcttttgtttgtcaaacatttaaacaattccagatgttctctaaggtgagattattttctctttaaatgcaagtgttccctttaagtgtaaacttctttaaatatcctttaaatttaaactgcagagtttataggaatttttgtagttaatagccattgatacatcagccaaaattacagacagcattgcctcagtcaacaccttcaacttgccaaatgcacttatttgtatgtaygttatacccccaatttagagaataattcagaaacaagaagctagtgtaggtgcagtgcgtttttatagtgactacaaatagtttcttcaggctactttcatcatttgtgaaagcacatttattgtttggtggaaagaatgaaatgtttgccatagcaacc

SEQ ID NO: 780703 - DNA, 567 bp, Homo sapiens
aaggatctgagattttcagcgagacaactggttggttagaggtgccacagctgagaggatgcagaagctgagaggtggagagtgtgtggagttcagttttgacactctgattctgatatgcctattagatgtgaatgtcagttgtggatatcagcaggaagccactggcaccatcagacgcatggtttggggggaatagagttaagatactgtcctcagggcatggggagcatggaaagaaacccccacaggacagtgaakcaccctagacagccacagtgggcagtacttgatcgggcaaagaagtgccagggctgcagggggcactggtgtgaaggtcaggacaggcaggagctacagcattctccagggagaagaggccaactgtggtagcagagagcaagaatggaatgtacaacgaacattctgacccactcttcccaagcccttgtctgcccttgtgcatcccatggacggagccccacagacaccagagagaaagaaaaacaactgagaaagtctaggatcccagggccagagcaggggaaaaatggagcatgtggatct

SEQ ID NO: 780704 - DNA, 598 bp, Homo sapiens
acctctcaggaggatgggggaagggagagcatcaggataaatagctaatgcgtgtggggcttaattcctaggcgatgggttgataggtacagcaaaccaccatggctcacatttacctatgtaacaaacctgcacatcctgcacatgtatcctggaacttaagattaaattaaaattttaaaaaagaaaaaagaaccaaaaagagagcatcttgtgttctcaagaaactaaaaggcccgggcaggtcttaatagagactaaactcacagcattcagtgatgtactggaaaagaatgaatgtttgaaacagtgtcatcaagctttacacacctataaaattgttatrcctgcttctaaggtggagtgtgtgctgggcagaagcagtaggctatccccaagaacacatgagtcagtggggaatgagagaaatgacactcccaagggaaaggcctgtgtgaaccagggagttcacccagggtattctgagacagggtcttgctttgtcacccaggctggagtgcaatggcatgatcatagctcactgcagcctcaatctcctcggctcaagcagtcctcccacctcagccttctcagtaca

SEQ ID NO: 780705 - DNA, 665 bp, Homo sapiens
attctttcagattaagatgttctttccaaaaatctgacacacaatcagcaattttagttttaactgcatggaattgtgaatgaaataaaatcgagactagaattaaagataagaaaaaacagaagaggtgtggaggatgggtgcctatgggacagcagatgcttttctggggagtcatgggtgtccagtggcatctaaagagagggagatcaccaacatgaaaatcactggtttaccacttacactactatgctcttggctggtcctagattggaaattcttctgaagtacttacagggctcttsctgtttgaaagcaccttcatgctttagaatgcttttactgtacatcctataggaatctataggcacaggtgaaagactccagtgaagtctacggttcacaaagaacactcattctttcattgaaaaacattaaatctcatattaatatcaatttaaggaaaaccattttattttggacttgggaaggttagatagggacttcacctactctttttcaatgtgtacagattttttggtaccttgaattctaaaacactgtttaactttcaatagaaagaaatctaaaagttgctaattagcagtgtattttaatttgtgaattaaatacacaaccaacattggaagacatctttcttctaa

SEQ ID NO: 780706 - DNA, 527 bp, Homo sapiens
aatgatggagagaatggaaccaagttggaaaacagtgttcaggatattatccaggagaacttccccaatctagcaagactggccaacattcaaattcagaaaatacagagaacaccacaaagataatccttgagaagagcaacctcaagacacataattgtcagattcactgaggttgaaatgaaggaaaaaatgttaagggcagccagagagaaargttggattacccacaaagggaaccgcccatcagacttgtaaatgggctaaatgccccaaataaaagacacagactggcaacttggataaagagtcaagacctttgaatgtgctgtattcaggagacccatctcacatacaaagatacacaaaggctaaaaataaagaaatggaggaatatttaccaagcaaatggaaagaaaaaaaaaatagcaacaacaaaaaaaaaccaggggttgcaatcctagtctctcataaaacacactttaaaccaacaaagatcaagaaagacaaagaagggtatttacata

SEQ ID NO: 780707 - DNA, 640 bp, Homo sapiens
taaaaataaagaaatggaggaatatttaccaagcaaatggaaagaaaaaaaaaatagcaacaacaaaaaaaaaccaggggttgcaatcctagtctctcataaaacacactttaaaccaacaaagatcaagaaagacaaagaagggtatttacataatggtaaagggatcaattcaacaagaagagctaactatcctaaayatatatgcacccaatacaggagcacccagattcataaagcaagttcttagagacctacaaagagacttagactcccacacaataatcacaataatagtgggagactttaatgccccactgtcaatattagacagaacgacaagacagaaaattaacaaggatattcaggacttgaactcagctctggaccaagcagacctaatagacatctacagaactctccacctcaaatgaacagaatatacattcttctcagcaccacatcacaattattctaaaattgatcacataattggaagtaaaacactcctcaccaaatgcaaaagaatggaaatcataacaaacggtttctcagaccacagtgcaatcaaattagaactcaggattaagaaattcattcaaaaccacacaactacatggaaactgaacaacctgctcct

SEQ ID NO: 780708 - DNA, 640 bp, Homo sapiens
taaaaataaagaaatggaggaatatttaccaagcaaatggaaagaaaaaaaaaatagcaacaacaaaaaaaaaccaggggttgcaatcctagtctctcataaaacacactttaaaccaacaaagatcaagaaagacaaagaagggtatttacataatggtaaagggatcaattcaacaagaagagctaactatcctaaatatatatgcacccaatacaggagcacccagattcataaagcaagttcttagagacctacaaagagacttagactcccacacaataatcacaataatagtgggagactttaatgccccactgtcaatattagacagaacgacaagacagaaaattaacaaggatattcaggacttgaactcagctctggaccaagcagacctaatagacatctacagaactctccacctcaratgaacagaatatacattcttctcagcaccacatcacaattattctaaaattgatcacataattggaagtaaaacactcctcaccaaatgcaaaagaatggaaatcataacaaacggtttctcagaccacagtgcaatcaaattagaactcaggattaagaaattcattcaaaaccacacaactacatggaaactgaacaacctgctcct

SEQ ID NO: 780709 - DNA, 595 bp, Homo sapiens
tgattcacttgtctttgtaagaagattcaaaaagaaatattttgcaaattatgcatctgacaaaggactaatatccagaatctacaaggaactcaagcaaatcagcaagaaaaaacaaataatcctatcaaaaagtgggcaaatgacatgaatagacatttctcaaaagaagatatacaaatgaccaacaaacaaattttttaaatgtttaacatcactaataatcagggaaatgcaaattaaaaccacaatgagattctaccctaccccagccagaatggccaytattataaagtcaaaaaacaatagatgttggcgtggatgtggtaaaaagggaatgcttatccactgctggtgggaatgtaaattagtataacctctatagaaaacagtatggagatttttcaaaaaaacaaaagtagatctaaaattcaatccagcaatcccactactgggtatctacccaaaggaaaagaagtcattatatcaaaaagacatgcacatgtgtatgtttatcgcagctcaattcacaattgcaaggatctgtaaccaacctaagtgcccataaaccgatgagaggataaagtaaatgggt

SEQ ID NO: 780710 - DNA, 646 bp, Homo sapiens
actctccacatttctcagctgtgcatgctgtggtgatgcatgaccctcacagtgtgcagcatgggaggaaacccatacatgaagtagagggttcacagagcaggtttgggatgatccaggttttctgtcctgtgagaagccatcaaagcctatggttgctgcaagaggaataaaagaaaagatggagcctagaaaattctgacatattcggctgaaaagggacctggcatcgaaagacaagtggtgtccaatatggcatgttagcattttcctcttcatttactataacttaaatccaagtaagatgggacttccctctatttagaaaggtcttctttcactttctttcaggatttactgcctcaagatggttatgttggaggattccaatagttctactggatgtggagccagaaattgtgtggaatgyctggtgtttctttcagttcttggatgccaatctgaggtacaaatcacatttcaagtgtatttccttgggttctggagaggatgtcttcattttctgttaagcatttagggagcagttgggtgagcacatgaccaatcagcctgagcatttaaggcagttggaggagagtgtgagttatggtcatcattctcctctgtgccaaacaggggctgatgg

SEQ ID NO: 780711 - DNA, 559 bp, Homo sapiens
gatggtcagggcaaagcacagtgctgtcctcatggttctgggagggtctgcgttgtctgctatccccacataaactgatgaggacctgcactcctgtcctgagttgacacccagccttgaggtcaagaagatgacagatatttggggtaacgggtcccagagggtcctactgccacttcctcattgctttctctggaggttctaccaacttgactactgagcttaaacaaagccatgaactggcagatgaaaattacagtgcatycaaactccagagatttttaattagtcttttcaagaggttagggaaagtttttagtattcagattgaagtttttcttcagatcttgaatgtttgaaaatttttttattttagcttttagtggacatataataattgaacatatttctggggtaaacagtgatgtttggaagcacataatgtatagtgatcagataagtgtgattagaatatccatcatctcaaacatttatcgtttcttcgtgctgggaacattcaatatcctccttctagctgtttgaaaatacagaatatatt

SEQ ID NO: 780712 - DNA, 607 bp, Homo sapiens; identical to SEQ ID NO: 742081

SEQ ID NO: 780713 - DNA, 607 bp, Homo sapiens; identical to SEQ ID NO: 742082

SEQ ID NO: 780714 - DNA, 607 bp, Homo sapiens; identical to SEQ ID NO: 742083

SEQ ID NO: 780715 - DNA, 600 bp, Homo sapiens
ttgatgatctagattagaaatttaacaaagaaatagatatcataaaagagagccaaactgaaatcttggagctaagtagttcaatggataaatttaaaaatacaattgagaacttcaacaacaaactatatcaagcaaaagaaagagttcctgaacttgaagacagatcttttgaaatgatccagtcagaaggggtaaaaagaaataagaataaaaaagggaaaaaagaaataagaagtaaaaataataaaaagaataaaaaagagaatatgggatatcattaagcaagcaaatattcacattacygaaatgttagagagagaagagatggagaacttcacagaagaactatttaataaaataatagctgaaaactttccaagtcttggaagaaatatacacatccagattcaggaagctcaaagcttccccattcaaccccaaaatgtctttttgtgtgtgtggcacattacacctaaactgtcaaaacagaatttttaaatgatcaagagaaaaacttcaatttacatataaagaaattccaatagaccaaatagtcctagcagtcatttacagaacactctattttacagctacaga

SEQ ID NO: 780716 - DNA, 488 bp, Homo sapiens
tgggattacaggcacacatcaccatgcccggctaatttttgtatttttagtagagacggggtttcaccatcttggcaaggctggtcttgaactcctgaccttgtgatccaactgtcttgcctcccaaagagctcggagctcggattacaggcgggagccaccgcgcccggccctttactggtcttttatagtcactttctctctaatcctttttaatctctttcctctttctttccatttgctcactttttccttttttacatgattttcgtggtgtctstgctctcgtattacctgtaacttcatttcttcatttctgaaatggttttgtctttttcttcagtttccttcctgaattctgtcatttcctaccacagactccgctgccgtttggccacctcttccctgcgttcttattctgtgcttattctcctctgttcttattctgtgctgtagtctcccttcggagctgaagttcttgttggaat

SEQ ID NO: 780717 - DNA, 605 bp, Homo sapiens
atgccgtgggtgcctgagtcatctcctcctcctcctcttccttctcctcctcctcctcttcctcccccttcctcatctccccctttcctccttctcttcctcttcctcccttcctcccacccgtctccctctcctgagccccagctctgctctgccaccaggccttgtcccttttagggtccaaaagagcaggtcctgccctggggccagtcagcatgaaaagggatgaccatctcttcctccagaggacagggactctatgccccaggcactccaaggtcaaacctggctcccactcagactatgaagacagcatccactgggtcagagtcatgaagccacgggtcccaggggacagctcaggtggccrcagggccagactggcaggctgccctctgcctcctgttagcacaaacacccctcccctcaggcctgaactctgacatgagccagtgggcaccgggccctgtcaggaacaggaggaggccacagccatcctcaggagagaacaaaggacacacaggcctccggggagagcagtgggtggcagtgacaggaggggctactcagaattcatgagcgagggccaggcagcttggccacct

SEQ ID NO: 780718 - DNA, 605 bp, Homo sapiens
atgccgtgggtgcctgagtcatctcctcctcctcctcttccttctcctcctcctcctcttcctcccccttcctcatctccccctttcctccttctcttcctcttcctcccttcctcccacccgtctccctctcctgagccccagctctgctctgccaccaggccttgtcccttttagggtccaaaagagcaggtcctgccctggggccagtcagcatgaaaagggatgaccatctcttcctccagaggacagggactctatgccccaggcactccaaggtcaaacctggctcccactcagactatgaagacagcatccactgggtcagagtcatgaagccacgggtcccaggggacagctcaggtggccgcagggccagactggcaggctgccctctgcctcctgttagcacaaacacccctcccctcaggcstgaactctgacatgagccagtgggcaccgggccctgtcaggaacaggaggaggccacagccatcctcaggagagaacaaaggacacacaggcctccggggagagcagtgggtggcagtgacaggaggggctactcagaattcatgagcgagggccaggcagcttggccacct

SEQ ID NO: 780719 - DNA, 620 bp, Homo sapiens
  misc_feature 241, 242, 243, 244, 245, 246, 247, 248, 249, 250, 251, 252,253, 254, 255, 256, 257, 258, 259, 260, 261, 262, 263, 264,265, 266, 267, 268: n = A,T,C or G
agctagatccatgttgctgcatatataaatagtttatttatttgtattgctgatagtgaattgtattattcactattaacgaatatgaatatgccacaattgctttatcagatttatctgttaatgaacagatgattgtttctagtgttggctattacaaattaagctgctgtggacataagtgtacatgtatttgcatggatatttgctttatttttctctcaggtatatccctagaagnnnnnnnnnnnnnnnnnnnnnnnnnnnnataattagcttttaaagaaactgccagattgtttctcaaggaaattgcactatttaaattcccaacaagtgtattgagagttacagtttctctatattctcaacacttcatagggtcagacttttaattttagacatttctaatatatyctaatacaattctaataattgtaatattattttaatgtggttttaattagtatttcctaaggaattatgcggggcatctttggaggtgtgtatttgccacacaatcactttcttttttagttaagctcatgctcaaatttttaccccccaaaattgagtttattttttgttgttgttattgggcttagagatttctttatgta

SEQ ID NO: 780720 - DNA, 641 bp, Homo sapiens
cttaaaattaagcctgttgtagaaaattttaataacaggaagggtgtggcctcaaaaacctcctgaaacaaaagcacgcacttatcaagcataggcatccaaaaatctggtaccttactgttgaggtcaaatggttccactattttctgcaggttcaccctcttgatgaataaagcccttagaagagcagactgtagacatcccttgaaaaacaaaaaactggcaggaatccctaaaataagactattacaaaactgaaattattgattcatttttagtgtcttcaagtaagccctttagcagaaaagagattattatattttagcatttgcatgaaaaactgtctcaattcaattcaataactgtgtagattgstcattttgtagtttatattgtccttcataccgtgggagaatatgaagaggtgtaagaccccattctgaacttccaggccccgatcaatgaatacatctgaaggctatgaatactataacaaaaagcaggagatgacatatgacctaagatgtgtgccaaatgtttggggaacttagacattgggacaatcccatctaactgaaggattcataataaaattcacaaaaggagatcttaactgaattgtgtgttgaaggttgagctga

SEQ ID NO: 780721 - DNA, 550 bp, Homo sapiens
ttcaagtggtaaggatttttaagtatcagatgtgtggggagagagtaggaggagggggcaagaggaggaaaactgcacacacaaatggaggggaaatggagaagcaagaactgctccaatctcacttgatcttacatttcggctttttagtcacaagcattgttgggtttgctattttacaaaataactggattatataaagaattgtttaaagacatataaaaaacaacttttgagtcactgctattaactagaagtcactagctacctttttgtgtcaacttcactgaggcataatccatagacagtaaacggccccattttaagtgtacagtttgatgggttttgacaaatgtaaatacctgtgtaayaaccaacctagtcaggatataggtcaattccaccactccagaaatttttatatttcactttgctgtccacctctcccaacccaacatggaaaactactgatctgttttctgtcactatagattagtttgcattttctataatttcatacaaatgggataatacagtgtatactcttgta

SEQ ID NO: 780722 - DNA, 621 bp, Homo sapiens
tgctccatcatgcgttagttgtgttgtgtcccaatatagagtggactggacctaacaacaatctcttgtaagatgaaaatggaatatgtggatatgatcaagtgaaaagaacccaagattctgttcacaaacaggtggaacagatatgagtgcctctctcttggctcactattatggttgtctgttgggggagaatcacttggattatagatccatcggctcagtatgtaagatgaagataaaaattaactgctactataggtcttcaccctggagtggacawgaaagtcagccataggggaaactccttgtactggtcagaaatttgtatagtaggccatccatattgcctgggggaaaatatagtctcaaggcagtggtgaatgatttgactattgggccatagacatgaaaagagaaaaattggaaaacttggaggtctggtaaaaaaaggaatgtagataggtctaagagaatttttgtagatctttgtattgtatgttgacactcatgcaggaacatccaccatagaagtggcactgataacatagaaatcagaacaactctgccatttgacatcagccagtctctatcattggccatttcggtgctctgggctca

SEQ ID NO: 780723 - DNA, 398 bp, Homo sapiens
gacagaaccacccccacctcttaactgtttcactgttcttttattaacagaaaattctggaattcaggtctcagtcctggaagttttcccagcccttcacaatagaaaaacaattagtactttattcacctgctacaaaaattaacatcatattttgtgcaaaaaaaaaagaaataaaaagttacttccatccgtgggagtagctcgatgattttgcctgaaatagaagtgatarcaacacctagttccaagttcaacaagcatagagtatgaaaaatctaaaactaatctgaattttttttaggaaaatatatcttttaactagaactgaatggaaatgtggaaatatttctaactttatatgagggtgtatccaaaccctgtattaatgaattcta

SEQ ID NO: 780724 - DNA, 497 bp, Homo sapiens
acaggctggtctcaaacccccaggctcaagcaatcctcctgcctcagcctctcgagcagctgggactacaggcctgagccaccatgcctgtcttcaagtatttttaaatcattatttggattttcccatcatgttaacaactttccctacctagccaatttcacctctgatcttcccagggcctttatctagaacactcctgcgtcctctcttcccatggttccctcttcctcatcctttaggcctcaacttcaatgtcctgttccaccctacctaaaggaaatgacctgtcattctctatgtcaaggttcttgccttcttagaagttaatacaattcattactattactrttttctttatgcccatcaacttgtctttccgggtgtctccctcattagaatgtggaccctgtatgggtagagaccatgtacatcttgttcacattctatctctgagcctagcatagtgcctggtacaaaacaggtactcaataata

SEQ ID NO: 780725 - DNA, 561 bp, Homo sapiens
cacggagctatcatctttgataacaattccttcttttggaataccttccgaagacctgtctggggctgttttacagttaaccttttttccttaatgagtagaaagaatacacyctaagacaacaataggccaggtgcggtggctcacgcctgtaatcccaccacttggggaggctgaggtggggggatcagttgaggtcaggagttcgagaccagcctgaccaatatggtgaaacactgtctctactaaaaaataacaaaagttagctgggtgtggtggcatgggcctgtaatcgcagctacttgggagactgaggcaggagaatcgcttgaacccaggaggtggtggttgcagtgagccgagatcatgtcactgcactccagccttggcaacagagcaaggctctgtctcaaaaaaaaaaaattaaatagaattaaaacaacaataaaacatatagtatattggccaggtgcagtggctcacacctgtaatctcagccctttgggaggccgaggtgggcggatcacttgaggttaggacattgagaccagcctgaccaac

SEQ ID NO: 780726 - DNA, 561 bp, Homo sapiens
cacggagctatcatctttgataacaattccttcttttggaataccttccgaagacctgtctggggctgttttacagttaaccttttttccttaatgagtagaaagaatacactctaagacaacaataggccaggtgcggtggctcacgcctgtaatcccaccacttggggaggctgaggtggggggatcagttgaggtcaggagttcgagaccagcctgrccaatatggtgaaacactgtctctactaaaaaataacaaaagttagctgggtgtggtggcatgggcctgtaatcgcagctacttgggagactgaggcaggagaatcgcttgaacccaggaggtggtggttgcagtgagccgagatcatgtcactgcactccagccttggcaacagagcaaggctctgtctcaaaaaaaaaaaattaaatagaattaaaacaacaataaaacatatagtatattggccaggtgcagtggctcacacctgtaatctcagccctttgggaggccgaggtgggcggatcacttgaggttaggacattgagaccagcctgaccaac

SEQ ID NO: 780727 - DNA, 561 bp, Homo sapiens
cacggagctatcatctttgataacaattccttcttttggaataccttccgaagacctgtctggggctgttttacagttaaccttttttccttaatgagtagaaagaatacactctaagacaacaataggccaggtgcggtggctcacgcctgtaatcccaccacttggggaggctgaggtggggggatcagttgaggtcaggagttcgagaccagcctgaccaayatggtgaaacactgtctctactaaaaaataacaaaagttagctgggtgtggtggcatgggcctgtaatcgcagctacttgggagactgaggcaggagaatcgcttgaacccaggaggtggtggttgcagtgagccgagatcatgtcactgcactccagccttggcaacagagcaaggctctgtctcaaaaaaaaaaaattaaatagaattaaaacaacaataaaacatatagtatattggccaggtgcagtggctcacacctgtaatctcagccctttgggaggccgaggtgggcggatcacttgaggttaggacattgagaccagcctgaccaac

SEQ ID NO: 780728 - DNA, 629 bp, Homo sapiens
aatgtaatatagcatcctggatgggatcctgggacagaaaaatcacattaggtgaaaactaaggaaacctgaatacaatatggactttagttaataataatgtagcaatattgattcattgattgtgacaaatacactaaactaatatgctaataatggtagaaactgctgggtatcataaattcatttaatgtaattgctgtctcagcacccatttttaagcccaacataagttttttgaaacccagttgtacctcatcacctttggcctaattaaaacttccccttcccatgtttttttttgtttgttttttgttttttgttttttgtttttgtaatataacccactgttcctcatcctactgaccaaaaactcggcacaccctaaagmtgctgagcagtgcgaaaatttaagagtcaatacaagaacgtaaataagttccttcttggtatgtgtatctattaaactagccaatccacaaccctcaagggaaaacctaagggataacactcatggactttaataaaggtgtagtcccacagatgccttctctcttattctcactcctcactactggttgagttttgaacttcctcttggtctcttgttggcccccctaacctctctg

SEQ ID NO: 780729 - DNA, 724 bp, Homo sapiens
agataaagaaaatgaggcatacggatcccaacaaggaaaaaaaaaatcaagtggaagtaaactacaatcatagcttttaggagaaaattcatgttcatatgcctcctattcttaattctaacattaatagaatagcagcttaaatttcaggaacccatgatagttcagcaatcaagatattttgctctttatttcatacttttaaaagtaaaatctataaaatataaaatttttytaattaaggattcaatacttatttctcagcctttgaaaaatttcccataactatgacaacaaaacagttcctgcttttagtgatttgcacgttgtttctgtctgttcagacctgcagttcaaaacccaccatcttgatccactcattcaaaaatttctgttaatgtctgaataggtgacaaaacagcacaggtgtagtctagtacttatggaatgcagagtcaatttcctcatggtaaccccatttaagacacagtctgtaggaatgcatagaaataacaaccctaaaccatcttgaattgcctaattttttcttccaccagattgggattgctccctacagtgtggtgttacatctctgtttagcttttttattttttaaaggcttaagcagattctgcatgtataaaaagatcagatctcaggttattaatatttgagcaattgcaaaaaaattaaactaaaattccagacagcatcactcattcat

SEQ ID NO: 780730 - DNA, 533 bp, Homo sapiens
tgaattgcctaattttttcttccaccagattgggattgctccctacagtgtggtgttacatctctgtttagcttttttattttttaaaggcttaagcagattctgcatgtataaaaagatcagatctcaggttattaatatttgagcaattgcaaaaaaattaaactaaaattccagacagcatcactcattcattttcatctattgcctttgttgtttcacacattggggaatatttgrctagaatatgtttaatttgggagaattatttaaaagtgtttttattgcctataacaattttcaataataggtcagcaaacgaagggatttaaatacatgttttattgaaagcttaaaaatattttagattcaaagggatgctgtaatataaaactgtaaggttttgcaaaagtagtaatttcttagttgtgaaaatttaagcaaggtggaggataattaaatcttgcttatatatttgatattcttattgtagattgtaaccagaaaacatgttatctatttttttcattcca

SEQ ID NO: 780731 - DNA, 541 bp, Homo sapiens
tattgtagattgtaaccagaaaacatgttatctatttttttcattccatcctctatgctactttttccccaataccatggcctccatactatcctgatgtacttccatttaaataagtgttgttaatataatacaaaagaagatgttatatggtttttaatatatagttaatacatagagtagccccctgccccttatccatgggagatacattgcaagcaccctagtggatacctgaaactgaggatagtaccaaacccccatatacactacrtttttttcctatacctacatacctatcataaagtttaatttataaattagacagagtaagagattaataacaacaactaataataaaatgaaacaactataaaaatatgacagcatcactatttttgtgctttggggccattattaagtaaaataagggttacttgaacacaagcactgaaataccaggatggtcgatcctgcaactatgcaggctactaagtgactaatgggtgggttgtatagacagtgtggacatgctggacaa

SEQ ID NO: 780732 - DNA, 582 bp, Homo sapiens
tttatttattttttagatacagagtcttgctatgttgcccagcctagacttgaactcctgggcccaagtgatccttttgcctcagactcctaaatagctggtactaggcgtgcgcatcactgtaccttacctccatacgcagctttttagaggcagaaactatttcactgacttctatcccttaaacccagaaattgccagacataggttaataagtgcctaaagtaaacttcagtcttttgttgctgtttcccacctcctatatttgaggaattctctgcaatatgtatctttaacagaagctccaaaggccatgtgctctatatcccatctttctcttcaactacagcacagtaacgtaacttaggctcacctgatcagctgtacccagttgaactttcrctgggagctggtgatgcaaaagagtagcaatggtggagaatctattctgatagtggcagcagtatagatagcaacaacctgttccagggcagtagtggaaatgaaactagtggtggcatacggtggctggtgcctgaggtgatggctgtacatgtggtggcatccagtgttcagccatgg

SEQ ID NO: 780733 - DNA, 498 bp, Homo sapiens
accaagcttttaagtgatacttagtggatattttcattactcactgaccactcttccatgtatatatatatcacctccatcacagaatataccaccttgttaatttaactctaaaatacttctatttccctggaaaatgtcaaagtttttcctgaggtttaaaacaagttatataagatctgagcattcaggccaggtgtggtggctcacagctgtaatcctagcattttsggaggctgaggtgagaggattgcttgagcccatttattcacaatcagccaaggcaaaatagatccaatctctaaaaaattaaatttaaaaaaaggtctgagcaggcaatattcactttcaagaaaattcatgtaaggttatgtggcatgttcactgggcaaagttacttatgttttcccttttccattatgcctgtgttctagcccttctctttgtttcaaatgtatccctgccttagttctctacataaggctttacctgggtttt

SEQ ID NO: 780734 - DNA, 644 bp, Homo sapiens
ttagatagggtgggcacgtacaagaaagtggagaggaaggctggacgcggtggctcacgcctgtaatcccagcactttgggaggccgaggcgggcagaacacgaggtcaggagattgagaccaccctggctaacacggtgaaacctcgtctctactaaaaatacaaaaaaattagtcgggcgcctgtagtcccagctactagggaggcggaggcaggagaatgacgtgaacccaggaggcggagcttgcagcgagccaagattgcgccactgcactctagcctgggggacagagggagactccgtctaaaaaaaaaaaaaaaaaaaaaaaaaaaaaaaaaaaggaagtggagaggaaggggaagggttgtctgcaatgagctagaaagttagtcttttttttttttttaaataaggaaaggaatgcgaggtggtactgataatgcctggtactgtagcgtgcctgggcattaaaggagaaaaacggaaaaacggaaaaacgrcgggggtactatgaattaaagaataaaagattgatcagattatttgaagagaaaccgcatcatatcccacacctgtcactacataatgaggttatgcttcatttttatatgtatataattatgaaaaaagactctgtctgtt

SEQ ID NO: 780735 - DNA, 585 bp, Homo sapiens
tcatcacgtagcccaggctggtgtggaactgctgggctcaagcgattggcccacctcagcctccccaagtgctggaattacaggcacaagctactgcacctgaccaaaaaggatcattttacaaagaatagtatacatggggttgttccacctgcttaccctctcttcaggatggtatcaccatcctcacctgcgttgtcatcatacaggacacagccaagcacctccaggatacctctttgaaagcgtcatagatgcttctacccatcataagaagacttatccgattttcccaaacctactcttcttcctactcaccttgtcttggtgaaatttattcctctcttcccaagggatcaagcaaaaacaattagagtgctcctaatctcctctgttctgccctccccgctcacatcctycaaaaagtttctctcttaaatgtctcaggctctgaccctctctccattgccgctactgtctcggtcacaccttatccctgctgggcctacttcacaattgctcctgtcactggttttctgccctgtgcccccacattccaaatccacctctgaactgctgtcagag

SEQ ID NO: 780736 - DNA, 588 bp, Homo sapiens
gaccattgacatctaaattcactagagcagggtccccaacccggtactagtccatggcgtgttaggaaccggccgcacagcaggaggtgagtagcaggcgagcaagcaaagcttcatctgtaaatatttacagatgtaaacatgggctgtatttatarctgctccccatcgctcgcattaccgcctgagctgtgcctcctcctgtcagatctgcagtggtattagattctcacaggagcacgaactctactgtgaactgcacatgtgagggatctagattatgagctccttatgaggctctaatgcctgatgatctgtcactgtctcccatcacccccagataggaccatctatttgcaggaaaataagctcaaggcgcccagtgactctacattatggttagttgtataattatttcattatatatcacaatgtaataataatataaataaagtgcacactaaatgtgatgtgcttgaatcatcccaaaaccaccctcaacccatccgtggaaaaattgtcttccatgaaaccagtccctggtgccacaaaggttggggactgctgcactagggtgcttattaaatg

SEQ ID NO: 780737 - DNA, 639 bp, Homo sapiens
gaataaatgtgatggatgtgatggctgcttccaggcaattatggattgggaagaaatccagcaaacagtgatggacccaagaaatctaggatgtgatggacccaggaagaataggatgtggcagacccaggaagtctaggatgtggatgacaggagttgggaggaggagaaatggttttcctggctggaggtgggggagggtcggggaagactacctgtaaaagacgcaatgtgagatagcttttgaaggaggaggaaaacttgcccttggagagtcaatcttattattgaagggatgtgtaattagaggccacatgatgccatcccatccctgcaacgggcaagacagtttaatgtgtggagtgtctagataaagcaaggatggttagaccccagggaggargagctatagcacagaccccctcagaatgctctcccaggctttctgttaaaagcttctgcagcagagtggtcatggtggatcagagggcaaagtgaagaagtgaggacaactgattcagcctgctaagcattcttggggcctcaggagcccccactgtcctttctgaggcttttgtcttctgcatcctggcaaggagcaggcaagcagagaaaaaggcaggagagaccagggctcgt

SEQ ID NO: 780738 - DNA, 616 bp, Homo sapiens
cttcatcatgttggccatgctggtcttgaacacctgacctcaagtgatccgtctgcctcagcctcccaaagtgttgggattacaggagtgagccaccacgcctagcctgatcccaaaatttttgagagttcccgaccagaggtcagccttcttccccagggtccccctgcacagtcaccctggcccttctttaatcctcctgggttcccagtgctgtgctgagtcctggacagaatggagtgcaacagtaggaaccttggattacagaggtaatggggcccaggtgttagggtcatgggctgtgcactcagacctgggtttgagtcccagctctgtcctgtactatggctgcaatcttcaataagttacaaaatcgaaggyggattttggctcaataactaagaaagctccttgccttggagcgggatccactctggaggctggacgccttcttgtctaagatgcaggagagaggctttaagcatcaggcaaagggacttggtttagacccaatcagctcagagatccctcatagtcccaggttctaaggttctgtgcattgtttaattatccactccctccggtcaactgctctgccccaagaactggcattgag

SEQ ID NO: 780739 - DNA, 623 bp, Homo sapiens
ttaatataatagctttgaaaagatttgagccctgtcgttcatgtcagacatttctatccatttacgaaagcattgttctgtatccagctcagccgccagcaggcagggcagaatgcaaaacagtgataggaccccagagctgttcttgattgacccaatgtcttcaaaaataaaataatccagctctattaggtttcatttcctgcaaaacatgaaagctgatatgttctgggctctcttgctattataaggaaacagtcaaattgaatagtctctttagccaacaacagaacaatccagtaatttctgttccagaaacctgccacttagaggtaaaagtctcccttctcagcaaagggtagtctctttctggtggctttccagcatggcaccaggtgcttgatctccagcattctgaacagggaactcctccttggtttttagggaggtggatagcagcatgctagcatsgtctttattcagcttattgatcttttaaaggtctctagggaagttcctttggtagctcaaaaacttaatgttcagtttaatcagttaagagggtctcaaagccatgattaatctttaaagggaattcacatggtaactggtctcacattctc

SEQ ID NO: 780740 - DNA, 623 bp, Homo sapiens
ttaatataatagctttgaaaagatttgagccctgtcgttcatgtcagacatttctatccatttacgaaagcattgttctgtatccagctcagccgccagcaggcagggcagaatgcaaaacagtgataggaccccagagctgttcttgattgacccaatgtcttcaaaaataaaataatccagctctattaggtttcatttcctgcaaaacatgaaagctgatatgttctgggctctcttgctattataaggaaacagtcaaattgaatagtctctttagccaacaacagaacaatccagtaatttctgttccagaaacctgccacttagaggtaaaagtctcccttctcagcaaagggtagtctctttctggtggctttccagcatggcaccaggtgcttgatctccagcattctgaacagggaactcctccttggtttttagggaggtggatagcagcatgctagcatcstctttattcagcttattgatcttttaaaggtctctagggaagttcctttggtagctcaaaaacttaatgttcagtttaatcagttaagagggtctcaaagccatgattaatctttaaagggaattcacatggtaactggtctcacattctc

SEQ ID NO: 780741 - DNA, 629 bp, Homo sapiens
agtagcaggaccccttccatacaaaagctggaaggacaccaaatagatggtccagaaaagaagagaaaaagtattttctgcccaccaccctattacttcctaggagccacatttataagctactgacatgtacagaagaaaaatgcaaatggaagaaaaaacctggtgaacaaatgattttaggacctaaaaacacagggtaaacactctttgtcagaatttcaaccatgttaggctccaatacattggctatttcacccatctggtcttattgtttgactattagcaccagcaataacccatgattctgtgatcatctccccatggaaaaacaaaaattaagagatttttctgtggaaytggtatttgtttgtatgaattaggactgaatttgtactttacctcttcttcttgagaccttttcttatgagccatcttgtataacttatgcagttttcgagcatcaaattctgtaaacttggaaacaaaaatccataggttcctaaaaagaaaaatgaacagttctggtgaattatagaattagaaaagcaattttttatgatcttcatggatggcaagctattaaattttgctgtggtatactccctaagcatagaaattaagctaca

SEQ ID NO: 780742 - DNA, 600 bp, Homo sapiens
aaggtagttctcactgagactggctatttagttcagctaagacccagaaccaacacacccatagtcagtctctctctctctctttctttctttctctctgtctctctctctctcacacacacacacacacacacacaaacacacagagcttatttactttgtgccagtcactgctctaagaattttacatgtattacctcaattaatcctcaaaataacactttgagtcagaagataatcaatatcctaccttacatataaagaaactgaggcacggagagattaagcaactkgcccggtacctcacagctaacaattacccagtccaggattgaactaagacaatctgatccctgaccctatagccataaccactacacagcacggcctctatagagcatatctgtgaataaagatcaaagaactcgtgacagtgaaagaaaacacataattaagaccaaactatggatattcagctttagatagaaaggggtatacatcttctaaaggaagcagcttgactctaaacagagatgtgaaaaaagtgggggagtggtcgcaagaaagaactgtgactccaagggtcagggatgcatggcc

SEQ ID NO: 780743 - DNA, 578 bp, Homo sapiens
attagatgttaatatactagtaaaacttatttatattaagagttgcatatttcattgtatatatttgcaatgttttatttaataacctcactattgatattaggttatttatcaatttacaagtattgcttctgcttaaaatatatgtacatgtatatatttatgcatatgggaatatttctgtaggatatgttcttagaattgaaattgctgcatcaaaaggtatgcacattttattttttgaggccrggcacagtggctcatgcctgtaatcccagcactttgggagactgaggagggaggatcacttgagcccaggaattcaataccagcctaagcaatatagaccccatctctaccaaccaacaacaacaaaattagccaggcatggtggcttgcacctgtagttccagctactctggaggctgaggtcggaggctgttttcagctcaggagtccgaggctgcagtgagctgtgattgcgtcactgtactccagcctgggcaacagagtgaaaccctgtctctgaaaaatcaaaacaaaactaacaatttagtttttgaagagacatgaccaaa

SEQ ID NO: 780744 - DNA, 544 bp, Homo sapiens
attcttcttctttcaacatggtccagggaagccaaaagattggacacccctgaaagtatacacaatgcctgaatgttacatttgcaactgggttatatttaatttttttttttagtctctcctttcacttttgccaaccctttggtaaatttaatccattgagttaagtaagatgttctttgtatcatgtagaatgaaagaaactatgggggagaaaaagaaaayaaaagtgtctttcaagtattcagattatagtagacattccagattcagtcaaaggatggttaaaaaaactatgcattcattcatttattcatttgtatttattcattaatttgtccacacagtaagtatttactgtcaggattacaaaagtgagagcaccttttccttgttcacaaggagtgtgttaacaacccagtcctgtaaaagaaatcagggtttcaacccatgtggcaactgtccttaaagaatctgagtgtcttcaccaagctctcctttcttcttgactctccatctagctttcaaagaaattcatacttgt

SEQ ID NO: 780745 - DNA, 519 bp, Homo sapiens
acaatgcctgaatgttacatttgcaactgggttatatttaatttttttttttagtctctcctttcacttttgccaaccctttggtaaatttaatccattgagttaagtaagatgttctttgtatcatgtagaatgaaagaaactatgggggagaaaaagaaaataaaagtgtctttcaagtattcagattatagtagacattccagattcagtcaaaggatggttaaaaaaactatgcattcattcatttattcatttgtatttattsattaatttgtccacacagtaagtatttactgtcaggattacaaaagtgagagcaccttttccttgttcacaaggagtgtgttaacaacccagtcctgtaaaagaaatcagggtttcaacccatgtggcaactgtccttaaagaatctgagtgtcttcaccaagctctcctttcttcttgactctccatctagctttcaaagaaattcatacttgtgcatagtggattttttttctttgtataatcatttgg

SEQ ID NO: 780746 - DNA, 581 bp, Homo sapiens
tgtagttactttccctttctgtgtagttttgtttatttttcctggatgtcatcattgtttttgcttagttgtctatgtacttttcattgaaatgacaccaaacctctgccaatcttctaagtcttctccaaaggcatttagaagtgagaagtttcctgtacatttccttttcctagcaaaatttctcttggagccttctaacattctctaaccaggactgggttgccctctgagcctggtatatgttaccaccttgggatctcctttsatgaccatctcagattcttctcaccactctcttgggtcttgcattttctgttttcatgtctctccatttactccccttcttttggtggagcacatcctctggtagctttctgataaaggctgcatggagataaatgtttttacaacttacatatctgaaaatgtctttttctcctctcatacttgactgataatttacctatttatttattttttgtagagatagggtcccactatgttgcctaggctggtcttgatctcctgggcttaagtaattctcctgcctcagcctcccaaagtgctgggataacatg

SEQ ID NO: 780747 - DNA, 588 bp, Homo sapiens
taggtatacacatgtcatggtggtttgctgcacccatcaacctgtcatctacattagatatttctcttcatgctatccctcccctagacccccaccccccaacaggccccagtgtgtgatgttcccctccctgtgtccatgtgttctcattgttcaactcccacttatgactgagaaccattatttgaattttgaattttctagccaggtagcatttttttttagatttcattttatttttattcatgtgatacttttcagaaaatttcaatagaggttatatgggtagtaggatatgggtcatttggagttatgtcatattyttctatatttaaaaaagtgagtgaatattattttcaaaagggaaacaatgtcactgggtgcagcccctcggttagctccccgtgccctggccatcccccatcctcatttgtgcctggagagtcttgcacttgtgacaaagttgttacctgccaccaccagaccctgagtgggaaatgtggcttccgtgtggtgactggggagggttagtccaagcaaagatgatgagagggaaccttcccccaccttcccctgaaagtgtcttgg

SEQ ID NO: 780748 - DNA, 622 bp, Homo sapiens
aacttcttgtcattctctttagaacatgcagataacttgtgacccctgccctaagcttttgttcttggcagaaattctgtgatggcataaaaattcccactcagcattttaccacctagtttataagataaagttgccaaggagactgaaaactatttctctacatttgcctcttattatttttattcacagaaagttgtatcctcttctataatactatgctcttctacattaagtgatggtttgcttaatattttttattatactatgacaacatgtactttcttttattttatgaaacagggtctcactctgtagcccgggctggagtgcaatgacgcaatatcggtatcttagcttactgcaacgtccgccttctgggctcaagtgaacctctcacgtcagcttccccagtagctgggactacaggtgtgcacaatcatgcctggcgaattttgaaattttttakagagacacggtctccctatattccccaggctggtctcaaactcctgagctaaagtgatccttctgcctctgcctcgtgaaatgctgggattataggtgtgagccaccccacctggcctgtattttcaatattagcaacaacaaagtttcaata

SEQ ID NO: 780749 - DNA, 605 bp, Homo sapiens
agatctcatgagtatgaaatcagtggatccaccactaactagctgagttatcttataaaagttagctaacttcaccaaatctccatttattaaactgtaacatatagaaaaacccaacttcatagtattattataagaataatagagtatttggtaaactgtaaacctacaatttagtttctactacatcttggggtttttgggttataagataggctggcagacatcagagccttgagatatggaatatgaaacaagaaattgtatggatacgaaggatgagctgctgcgagaaagagtaaagaaaaataaattatagagacactttacccattctcttcgcttggtggcacatatgctyaaacagggccctgcccttgattcttactgactccagccatataactgcacctgagtcctcagtgaacacaacattcttttcaaactgtgggtgatgaccctttagtgaactgtcatcagtttaataaggcatggccagcattttaataaatgaaatagaattgaagagatgaagaaagaaaacatcaaagcacattgagtatagcaagggtacatactatcttaggaagattttgtcttttgtt

SEQ ID NO: 780750 - DNA, 625 bp, Homo sapiens
gaggaaaatcttaaaaaagaggctaaaacttttaaattgtaagtgattttaaattatacatgcctatgcacttataacaggcataccaatatattttgtgcaagtgtttaaattattgatcaaactcattttcaaaaatagctacttttggggcacgtataaaagcttctacagatagtaataaaaataacaatggtagcatacattctttttaaaatgttatctgatgtttctttgtcacagatatactccagtccataaagaattgaagttttatttgaattggacttaaatgccataaaaaagatctgaagagtcttgtttgcagtatgttaatgtaggcggctgacgtggttgtttatgattcagcatattacctcatggtgttgaaagtgytctcagaaaccaccacctgagctgaataatttaagatgtaatgtagaaggtatttccctaataatttagccatgggaggaagtcaatgtttatctgttgaattattttttaaatgtcctaattaattacaatagaatagttatattatctaactcactttattcaaattgatgttatttaattagacactatgaaaatgaattttaataagcatacctcctaaaaatgg

SEQ ID NO: 780751 - DNA, 414 bp, Homo sapiens
atttttttaaaacaatttaattcaggaaaaaactggatcatactggccttcagagtttcatatactttataactgtgaaacacttttcacacaactacattgagcctcaatcagcactgcaatctactggcattttgctgtttttattccttcaacttttctttattctttttattatgtcttcatttgtgaggtctcaaattattttaagaaaggaataatatagctatttttcaacaaagataatagtcttactaayaaatacttcaggactttccaaagtactgccaatttctcactttcagtttctcacatacttaaaaaattaaaaagtatgtgtgaacagaacatgaaacaaaatgaaacattttattaaatagcatttttaaaattcccattacatgcaaattattt

SEQ ID NO: 780752 - DNA, 645 bp, Homo sapiens
ctactggggtaggaggcaggagtggcatgcagggaggattgctcgagccaggaaggtcgagactgcagggagccgagacgacatcattgcactctagcctgggcaacagagtgagatcctgtctcaaaaattaaattaaattaaattaaaatgcaatatgtttatgaagtctttataattcatccttaaaagaatatactacgttatataygttttactacaacaaaataatatgcttgatgaacattttttccaatgttcgtgttccaatgttcatgttccaatgtttccattttttccaattcaacaacttagacttttaaccattcatagcacttgaaattccagatattaaaaaaatgtaaccatacgaacactctttggagaatttttactttttataagtacaagttctggaaaataatcaactatacttttagtggagattttccttgtcagttatctttccaactgtaattcagtggtctcagataaccctcacctccttcagcagacccactatataacctccttaaccttttcttaaaagaaaaattgcaaatgatgtttttcttcttgctattattcattctttggcagaaattattcctaacccatgctttccccatactccaacatagtttt

SEQ ID NO: 780753 - DNA, 625 bp, Homo sapiens
gccaggaaggtcgagactgcagggagccgagacgacatcattgcactctagcctgggcaacagagtgagatcctgtctcaaaaattaaattaaattaaattaaaatgcaatatgtttatgaagtctttataattcatccttaaaagaatatactacgttatatacgttttactacaacaaaataatatgcttgatgaacattttttccaatgttcgtgttccaatgttcatgttccratgtttccattttttccaattcaacaacttagacttttaaccattcatagcacttgaaattccagatattaaaaaaatgtaaccatacgaacactctttggagaatttttactttttataagtacaagttctggaaaataatcaactatacttttagtggagattttccttgtcagttatctttccaactgtaattcagtggtctcagataaccctcacctccttcagcagacccactatataacctccttaaccttttcttaaaagaaaaattgcaaatgatgtttttcttcttgctattattcattctttggcagaaattattcctaacccatgctttccccatactccaacatagttttgtagcactgacctacttggattcttg

SEQ ID NO: 780754 - DNA, 578 bp, Homo sapiens
agcacatctccacatctctcttcctcctgatccggctgtgaaagacatgcctacttccccttcaccttccaccatgattgtgaattttgtgagcccttcccagaagctgccatgtttcctgtacagcctgcagaaccatgagccgattaaacctcttttctttataaattaccgagtctcaggtatttctttatagcagtgcgagaacggactaatacaaatgtcatttgccctcttcactctttttctttcacatgtgtataaggtattttcctgaagccacatgatgtctaataattccattgttctgatggttaatgaaatatgtgtttctgtgttctgggttttccagaactttgtaaggttgtaggtttaggatataaacacatatgcttccagaggttagctcagtttgttctcrggatttctactgagattttgccagctacttccatttataccatctataatctgatatgtgttatctccttctgtccaataagctgttactttaaaatccccaagttttcctcatacctatgcagaagcacaagaaaaaggtgaatatactttctgta

SEQ ID NO: 780755 - DNA, 527 bp, Homo sapiens
gcttccacaaaacctaaatcccacaagagaatgcgtaattaagagaccttcagatcgtcaatcaaaacacaggtactcatgttttagatacattattacctggctttgcacaccacgtagaaacagcaaattaggtttctaaaaggagggaggagtgctaataatgctagcatttactgacattacagggtgaccttttagaaygagcagaggaaaggaaggagagtaatcaattatcttttaagtattttatattcattgttctataaatcccaacaacaactctcatataccagatgaggaaactggaacttaagagatgtttaatgactcactcaaggtcatatttctgaaagaactagagattctaacttgagcctctttaatttccaaagctaattttctctttattatggcagcatttcccaaaatgactgcatggaacaagacttctttggaatgatgatagggattctgtgtaaaaggtcaatgaagttacagaatgcttctaacacagctcttctgtt

SEQ ID NO: 780756 - DNA, 681 bp, Homo sapiens; identical to SEQ ID NO: 759828

SEQ ID NO: 780757 - DNA, 681 bp, Homo sapiens; identical to SEQ ID NO: 759829

SEQ ID NO: 780758 - DNA, 616 bp, Homo sapiens
ttataaaattttataaaatctccatatagctaaatgttggtaactgattcaagcaaaacgaaacagaaaaccccactgtaaagcccccccacaataaaaagtaactgagctaccagtttataatgtttcataaaaagacgtttcagcactcgcctcctggaacgtttttaaaaggacaactggcaaatattttatttgtaccacataaaattgttataattgatagaaatgaactgatttgtcaaaggctaagaaacttgaccaaaaaataaaaaagctaaaatggcctacattatatgaaataagatttaagagrtaaaaattgtaccatgtgtagatagaacataccttcttttctagtgatcagggaatatttataaaagttaaccatatattaaagtgcttaaaagtcactaaactgcaaaaatcaaaagtagtctagaccagaggtcagcaaactatgaaccacagacaaaattcacccctttgtctgcttttgcaattaaagtttaattggaacatcaccatttgaggcataacttattaacagactgtctaatgctgttttcctgctacaatggctgagttgaacagtttcagcagagactatccacct

SEQ ID NO: 780759 - DNA, 504 bp, Homo sapiens
gatttcctaacccataaatagctctttatttccatttgtatatatctacatatccaagtattactatacaaagcatgggctctggagacacactgtctggggtccaggacaagctctgacactttttgtcctgcttagaaaggcctaaccccaagactatatgaatattaactcctatttttttttttccagatactttttggtcccattttctacttatctgcattttgaaagctgtattagtggctgtgctggttgttctgtttgctccatcaraaccatttccgctcctttcccagtctgctcggtgccatgggggggttgcaagaatgttctgcctcaatgggctgccttgcctgctggcttttggttgggtccaagaaatgcatggcagagaaagaaaaggaggagtctggaacactagattgtagagagcagcagcatgtgctgagctgaagggtccggatttaattctgtgctcggtgggcaactgtgaagagtttt

SEQ ID NO: 780760 - DNA, 500 bp, Homo sapiens
cgtaccatcatactctccctttcttttcaagacactcatggaactgcttgcacaaaatctgatgtattccaataccatctctgtgaatcatagacctttaaagccagaatgacagtcctctaatttgataggtgaagaaactaaggccctagaatttagagaattttctggaagttaccagactagttagtgacacagtgggatctcattatcttgtttctggttggttgccccttagaccatacattggtattaatgattaacatgaagtacagacctaactcyaaccaggttatgagtcagattctttaatatggagttggtggcacccactcaaccaggtccctgtaatctccacgccaacatactcagcgatcccatcaagtctcattcccaggtacctgaggtctcctcaaatccctgtttcatcacctgtgccagcagcccaggcaaacctggggttcacggaaggtacttgacaaggtgcttctttctgtccc

SEQ ID NO: 780761 - DNA, 565 bp, Homo sapiens
cacactctacacacactgctgcaggctgctttttccactcaacaacatatcaaagacaccgcccacatcagcacatacatttgtagctcaacttttaaacaacaatgtagtgttccactttagaggtgtcctttggctcatttatccattcycttattaatatattcgtaagctgtctcagatttttcatgatttacaatgccgcatatactgaacatacatacttatgcacttgctcaactgtttcactaatatagagtcctagaagtggagttgctgggtcagtaactgatcgttaaatatccttaatccattaattcggcaaggataaataaatattcttacttaagatttaaataatgtaacattacattaacatatatgctcatgatgtttaagttcatttctttaaaaaagttggctgggcttggcagctcatgcctataatcccagcattttaggaggttgagatgaaaggatcacttgagccaaggagctcaagaccaacctgggcaacatagcaagacctgcctctattttaaaaatacaaaaattagccaggcgt

SEQ ID NO: 780762 - DNA, 618 bp, Homo sapiens
ctcaggttctgttgatcaaattatagagccggcaagcatattgacttcttgaaagtcactttatccagcaagccaatagttgttttaaaacttctttcatggccccaatccaagccctgagcttcaaacaatcacatcagtaccacatckcacaacaacttgccttaaccccataaaagctaagttccaggtattactgtctgcttccagacttggagcatattatgtttctgattcatttccagtgtatgaaggagttgtcacattttaaactctttagggtttgcattttgtattttatctctcatatccatgtatttgaagtagaggagaaattgggaacccatcttgagcaaaaatcttcactctcttcttatgtaaatatgtcatcagtagagtaggtacaatgataaaattgttcagtgtcactgagctcaacttctgggagaaaataaagattggtgaaaacagtggtaaatgaaagaggaccagcctctatctattgcctcattagatttagctgattattgctttcaatgaatatcatgaaatgacaaatcttctatttttctcaaaagaatctagagacaccaattttatcatgaaatcgcctagttt

SEQ ID NO: 780763 - DNA, 656 bp, Homo sapiens
cacacacactcacacgtgcacacacatttgagaaagaagaaacaaactgtaattacatacaaatgacattactgtatatgtaggaaattcaaaagaattataagaaattttaaagtagcttgatacaaaatcaatataaaaatatattatatttttaaagcagtaacaaacmattaaaatgaaacttgaaaaaacgctaccatacacaacaggatttaattctcaaatgcttaggaataattataacaaagattatacaaaagctctaaagagacaattaaaaatttattgagagactatggtaaataaatagatacacaatgtgtggtatgccaagttcttggactgaaaaacataatattacaaagattcaatctccttaaattgattattagatttaatacaatcccaatcaatatcgcagcagggtgtgtggatgtgtgcagaactcaacaaactaatcttaaaattcaagggaccaaggctagctcaaactctattaaaagagaaagagtacaacgtgggaggatttgatccttcagatatcaaaacacactatatagtgctaataaacagaacagtgtggtatttatacacagatagaccaaaaaacaaacagaatagaaagaaaattagtgtatatttgcttttattag

SEQ ID NO: 780764 - DNA, 656 bp, Homo sapiens
cacacacactcacacgtgcacacacatttgagaaagaagaaacaaactgtaattacatacaaatgacattactgtatatgtaggaaattcaaaagaattataagaaattttaaagtagcttgatacaaaatcaatataaaaatatattatatttttaaagcagtaacaaacaattaaaatgaaacttgaaaaaacgctaccatacacaacaggatttaattctcaaatgcttaggaataattataacaaagattatacaaaarctctaaagagacaattaaaaatttattgagagactatggtaaataaatagatacacaatgtgtggtatgccaagttcttggactgaaaaacataatattacaaagattcaatctccttaaattgattattagatttaatacaatcccaatcaatatcgcagcagggtgtgtggatgtgtgcagaactcaacaaactaatcttaaaattcaagggaccaaggctagctcaaactctattaaaagagaaagagtacaacgtgggaggatttgatccttcagatatcaaaacacactatatagtgctaataaacagaacagtgtggtatttatacacagatagaccaaaaaacaaacagaatagaaagaaaattagtgtatatttgcttttattag

SEQ ID NO: 780765 - DNA, 657 bp, Homo sapiens
attatctttatttaggattttaaaaactgatttcctttggatgtacaatactgtcaagttattaatttctttttcaattattattagggtgtctgacaaagttggtaaatttttatattttataacacactaaaactatgatctaccaaaaagtcaaatttttactaaaggtgtaaatatttaaacttttagcaaggagacatggttgtttcaaagctatcaggttaaccatttcagcagattaatattggaaaaagaggtaatttctacatatatatttaacatttatggcatatacaatgcaaaggatacattgattatttttaagtatacaagtgataataaagaatgacatgtcagggttaactaacagaatgtacctcaaactaaaggaggagtcatttagaatttgaacaagttatagacaatcacgaggttcaccttgatcagaagaagaaagcaggtaaatgaagtgggttagagcaatatttaacagtaaatatggggggcagatagtmaagctttgataggcattagtatagttggccaaggtcagttatttttatgaatattaggacttttaccacatgagggcccttttagacagagcttgccaaggctttcatcagtttgggtaagattactatggaaatgaag

SEQ ID NO: 780766 - DNA, 610 bp, Homo sapiens
taccaaattacaaacttctgctcttcaaaaggcattgttaacagaatacaagagaagccaccgactggaagaaaatttttgcaaatcctgtatctgatgatttatattcagaatacctgaagaaccctcaaaagtcaataataagaaaatttctaaaaatgagtgaagaatttgaacagatatttcactaaagaagatatatggatagcaaataagcacataaaaagatgctaacattgttagtcataagaaaaaaacaatccaagtaaaacmagaagaaaacccatctattaaaatagcaaaaattttaaaaaatcaaatacaataagcattgacaaagatgtggagaaatagaaattttcatatactgctaatagaaatggaatagtacaaccactttgaaaaagtttggcagattcagaaggaatggtaccagctccttcttgtacctctcgtagaatttggctgttaatctgtctggtcctggactttttttggttggtaagctattaattattgcctcaatttcagagcctgttattggtctattcagagattcaacttcttcctggtttagtcttgggagggtgtatgtgtcgaggaatttatc

SEQ ID NO: 780767 - DNA, 610 bp, Homo sapiens
taccaaattacaaacttctgctcttcaaaaggcattgttaacagaatacaagagaagccaccgactggaagaaaatttttgcaaatcctgtatctgatgatttatattcagaatacctgaagaaccctcaaaagtcaataataagaaaatttctaaaaatgagtgaagaatttgaacagatatttcactaaagaagatatatggatagcaaataagcacataaaaagatgctaacattgttagtcataagaaaaaaacaatccaagtaaaaccagaagaaaacccatctattaaaatagcaaaaattttaaaaaatcaaatacaataagcattgacaaagatgtggagaaatagaaattttcatatactgctaatagaaatggaatagtacaaccactttgaaaaagtttggcagattcagaaggaatggtaccagctcctycttgtacctctcgtagaatttggctgttaatctgtctggtcctggactttttttggttggtaagctattaattattgcctcaatttcagagcctgttattggtctattcagagattcaacttcttcctggtttagtcttgggagggtgtatgtgtcgaggaatttatc

SEQ ID NO: 780768 - DNA, 616 bp, Homo sapiens
ccatatgctctaatcagagagttatccatctccacagaaatgcacagaagcgcgacaataaatgtgacacacattgcatgtctttataggtgcaaattgataattggacatcaaaacaataaggttatctcattgccgaggtgcaaattggcagattgcagacatcagcaagagagaagacaaagggaagggagtacatgtaaaatcctatattgttgctgacttttagagagcctatatttccagaaagagagaaacactacagaaaacaacaacaacaacaggacatttaagggatcacattctctctgactgctctggatgaaaaagctttttataaattcctatcmgcattgtatgaattgaaactttatctaaacttgttatttttatttttaatggtcccgaataacaaccaagaattaaatagataaaaaggataatgtagtgataatattgtgcaagcacttgtgctaaaccctttacaattaacgaggtttgtagattagttttggtaattgtcacaagaatgggtgtctgttttggaactagatcttgaaagtcgtgatgcctcactatagtgtttatattacaaggatgcgtacaagtaagaatg

SEQ ID NO: 780769 - DNA, 610 bp, Homo sapiens
cccataattgaatgaagtaagtaactaagtaaatagatgactcaagtcctgctgttatgtaataagaggacttcagtggtataatagatgttacttaaaacaaattaacagtgttcaaactcccaggatgaaagaactttctgagcttatgggtaacattttagaaatattgctgcataaaaacattctttctttctcaatttaaatggctattataagacttcacatttaaggtaaatgcctgtccgcatcaatctctggatcacacttttaactgctcgtcagttcctgatcaggctgtttacctggacccctacatacaaataagcaacactttcctctcttgtaaacagctgayttcattttgggaaatttgatctagtatttaaaaaataaaactcctgtttataatgtgccccctgggtagtaagtgaacttagaaggattctaacctgaggaggtgggcagcagtctgtctacattttgaggaaaatggtttgctttcctcaaattcttccggcaattctttcaactttcacatttaggaagagtgacttactatatttgcttgaaatctttgtttgaggtttgttggctcctactgcaggtc

SEQ ID NO: 780770 - DNA, 559 bp, Homo sapiens
ttattttcccatctttttaaaattaaatcaggttaggagctatcatgagtgttattagttgccaaaaaatcaactatttccactcttttcctcttatcgtgccttttctccaatacaattcacaatcagtcaagtcacaggacgtaaaggccaccaagcaaaagaaatctgacaatggcttctcgggagctctgcagtctacctggccagataacgttaacacacatgatcaaaggtgtccatccctagtttcacattagcacaatgtcaggtgcaaaactccttgacttttgmcactgaaatttatatctctgagttacctgttgaatcaactgctccgaagataacaaagacatcacctcagtcatcttgcaatgctagtggctactaacatcttaaaagccttctttgtctttaatgataatgataaagtattgttttgggccattctattgcccttattatttttcatttttatggatatttgtatgaaatacacctttcaatatttttaaaacagagttcttatttagattgtttcagacccatcacttaatgg

SEQ ID NO: 780771 - DNA, 559 bp, Homo sapiens
ttattttcccatctttttaaaattaaatcaggttaggagctatcatgagtgttattagttgccaaaaaatcaactatttccactcttttcctcttatcgtgccttttctccaatacaattcacaatcagtcaagtcacaggacgtaaaggccaccaagcaaaagaaatctgacaatggcttctcgggagctctgcagtctacctggccagataacgttaacacacatgatcaaaggtgtccatccctagtttcacattagcacaatgtcaggtgcaaaactccttgacttttgccactgaaatttatatctctgagttacctgttgaatcaactgctccgaagataacaaagacatcacctcagtcatcttgcaatgctagtggctactaacatmttaaaagccttctttgtctttaatgataatgataaagtattgttttgggccattctattgcccttattatttttcatttttatggatatttgtatgaaatacacctttcaatatttttaaaacagagttcttatttagattgtttcagacccatcacttaatgg

SEQ ID NO: 780772 - DNA, 587 bp, Homo sapiens
ggtgagatgcctttcatattggcataagacactgagcggatgcctcctcttatcttatcaaacagaaacccggcgagtgaatctacccagagctgaagcttcctttgcaacttgggaacaccagggccacagtgactttgtggcttggctttagataaatttgaccatggctgtagaacccagcagctcagaatccattaaaaggagagctgggaggaggtgagtgatagagacaaggggattttgatgttacaattgttgaggggactgtggctggcgggcaacttgctgtgggggcagtgattgaaaacatggattattagctggttacaaatcttcatttgtacagatgagctgttgatttcatataagaggtggragtaaattctgctttatgtgccctgtaaaaagcttctttgaatttaccttcagtgtcatgccttcagaaaaaaattccaagtttctggcataaagctgcacgttttctgcgcactggcatgcaggcaactgtttgtttctaattacggagctgaagcctgctggcaaaggaaaccatatttgtcacaagttgtggcattgtgtttagt

SEQ ID NO: 780773 - DNA, 617 bp, Homo sapiens
gaagatcaagttgcaatacatataattctaaagtaaatctgcctgtgataagtagtgcaaacaatagatatgataggagttcttattagaaaattttcattttccaagcctcccatagaataatagctttatttcccttaagaaaaacacaagaacttgccaattggatacatygtctagtgtttcatagtatctttttttagaatttgagattgaaaaatgtcaccttagtgatgacagaataattgagtttaaagatttgactagtcaataagaatattcggaagacatgtgcaaagagcactgaagatttgcaaaaagacacaaaagaagtaaaataaaaagaaaaatgacaataagctcatgcatttttaccttcaaccttctggtcccccattagctgacagacacgcaacatctgagctgactgaaggctgatgtcagcctctcattcctggctttgaccaggtgtcgtcttgcagtacacaaaaaagtgtgagtctacacagcagccctgcaaaggaatctatagcacagttgcagaatgaaaagaagaatgtaattgaccctcttttataaaaggattataagtttatctacaaaattattttacccct

SEQ ID NO: 780774 - DNA, 617 bp, Homo sapiens
gaagatcaagttgcaatacatataattctaaagtaaatctgcctgtgataagtagtgcaaacaatagatatgataggagttcttattagaaaattttcattttccaagcctcccatagaataatagctttatttcccttaagaaaaacacaagaacttgccaattggatacattgtctagtgtttcatagtatctttttttagaatttgagattgaaaaatgtcaccttagtgatgacagaataattgagtttaaagatttgactagtcaataagaatattcggaagacatgtgcaaagarcactgaagatttgcaaaaagacacaaaagaagtaaaataaaaagaaaaatgacaataagctcatgcatttttaccttcaaccttctggtcccccattagctgacagacacgcaacatctgagctgactgaaggctgatgtcagcctctcattcctggctttgaccaggtgtcgtcttgcagtacacaaaaaagtgtgagtctacacagcagccctgcaaaggaatctatagcacagttgcagaatgaaaagaagaatgtaattgaccctcttttataaaaggattataagtttatctacaaaattattttacccct

SEQ ID NO: 780775 - DNA, 609 bp, Homo sapiens
tttaactgagtacagcatgccacctcttttacaggatgatggctatgcctcagcattacgcatcacacagacacacacacacacactcaatcacaccaatagcattttattggaacacaggcatgcttattcatttatgtatttatgtatttcacacacaagcacacacactcactcctgcacaccaatagcgttttattggaacacaggcatgcttattcatttatatatttatgtatttatctgcggttgctttcactacaatggcagaaytgagtagttgcaatagagattgcaagtaccacaaagcctaaaatatttattatgtggccctcttcagaaaatgtttaccaacctcagttcccttaggtaaaaggaacctcagttcccttaggttagggaaatttgtagttttggagagttgcaattctggttttaatatgtgttgggaaattagttttaggatgagaactgctctatcttctaccaaagtgaacattaatagggactttgggacatttgttttttacagatgaaaaaattcaagctcagagaggattggcagcttgcccatattatgcaattattctaatggcagagctggggctg

SEQ ID NO: 780776 - DNA, 623 bp, Homo sapiens
acctacttgggaggccaaggcaggagaatcacttgagcctgagaggtggaggctgcagtgagccgagattatgccactgcactccagcctgggtgacagagctagactccgtctcaaaaaaaaaaaaaaaaaaaaaaaattaaaaaaaaatagaaaaaaaaatccaacagaaccaaagaggggtctggggtaaaagatgcctcatgtgggctagtggctcatgtcagctaagccccaggccctaagtaaaatgactcccataccaccccaaggttttctttctaatcctcctctctccaccaaaagtaagacccagaatgagagactaaagggaccaaggggccagtggctgccttattcttctctgaatccaaaagaccaaagggaccctcctgactcttacgtggcccagcttaaytcaacagaacaggagactcaagagagattttggtcagtggttcaccttgtgatagtggctacttgcagggtcttccagacattacgtgtcccctggggactcatcaaggacagtgaaagaacaaaagtcctgtactcttctcatcagaagtatagctaacgatagccacatgacatatcttgtctcccttacagctgctaagtcc

SEQ ID NO: 780777 - DNA, 550 bp, Homo sapiens
  misc_feature 455: n = A,T,C or G
ggaaccaaacacaatacaaagtgcacagtaagattctcaacaaatgttagttcttttcagtttcccttgtgtctgcaggcagatgaaccccatgccaatttcattcagttattggaatggatacagcaaccatgcttttaagatcttgaagtttgaaaaccaaagagctctgaagatctcccagcttcccaaagagrgggggcaatgttattagtgggttagcagggtgacgtgcatgaattgtggttgggctggtaccaggcctaaaggggttggcctgggagggttccattgttgtagggcttgggggtgagttgttctgtccaactgggagtaatgcagaggaggggacaaggaagatcccaagtgaaaggggatgggaaggaagtcccattcctcctgggagcacttttgtagctgcttggtctggctagtcacagctggagggagagcanttcagtcaatttgacattaattcacatctacccagcctattgggagggaacatttattaagaccaatttgtcctggtctcaatcacaggaaatta

SEQ ID NO: 780778 - DNA, 550 bp, Homo sapiens
  misc_feature 455: n = A,T,C or G
ggaaccaaacacaatacaaagtgcacagtaagattctcaacaaatgttagttcttttcagtttcccttgtgtctgcaggcagatgaaccccatgccaatttcattcagttattggaatggatacagcaaccatgcttttaagatcttgaagtttgaaaaccaaagagctctgaagatctcccagcttcccaaagagggggggcartgttattagtgggttagcagggtgacgtgcatgaattgtggttgggctggtaccaggcctaaaggggttggcctgggagggttccattgttgtagggcttgggggtgagttgttctgtccaactgggagtaatgcagaggaggggacaaggaagatcccaagtgaaaggggatgggaaggaagtcccattcctcctgggagcacttttgtagctgcttggtctggctagtcacagctggagggagagcanttcagtcaatttgacattaattcacatctacccagcctattgggagggaacatttattaagaccaatttgtcctggtctcaatcacaggaaatta

SEQ ID NO: 780779 - DNA, 550 bp, Homo sapiens
  misc_feature 455: n = A,T,C or G
ggaaccaaacacaatacaaagtgcacagtaagattctcaacaaatgttagttcttttcagtttcccttgtgtctgcaggcagatgaaccccatgccaatttcattcagttattggaatggatacagcaaccatgcttttaagatcttgaagtttgaaaaccaaagagctctgaagatctcccagcttcccaaagagggggggcaatgttattagtgggttagcagggtgacgtgcatgaattgtggttgggctggtaccaggcctaaaggggttggcctgggagggttccattgttgtagggcttgggggtgagttgttcygtccaactgggagtaatgcagaggaggggacaaggaagatcccaagtgaaaggggatgggaaggaagtcccattcctcctgggagcacttttgtagctgcttggtctggctagtcacagctggagggagagcanttcagtcaatttgacattaattcacatctacccagcctattgggagggaacatttattaagaccaatttgtcctggtctcaatcacaggaaatta

SEQ ID NO: 780780 - DNA, 550 bp, Homo sapiens
  misc_feature 455: n = A,T,C or G
ggaaccaaacacaatacaaagtgcacagtaagattctcaacaaatgttagttcttttcagtttcccttgtgtctgcaggcagatgaaccccatgccaatttcattcagttattggaatggatacagcaaccatgcttttaagatcttgaagtttgaaaaccaaagagctctgaagatctcccagcttcccaaagagggggggcaatgttattagtgggttagcagggtgacgtgcatgaattgtggttgggctggtaccaggcctaaaggggttggcctgggagggttccattgttgtagggcttgggggtgagttgttctgtccaactgggagtaatgcagaggaggggrcaaggaagatcccaagtgaaaggggatgggaaggaagtcccattcctcctgggagcacttttgtagctgcttggtctggctagtcacagctggagggagagcanttcagtcaatttgacattaattcacatctacccagcctattgggagggaacatttattaagaccaatttgtcctggtctcaatcacaggaaatta

SEQ ID NO: 780781 - DNA, 547 bp, Homo sapiens
ttttttataaaactactattcttttttcaagtcttcttacatgtaaataatttcaaacttaaagtcacaagaaaattacaaagtacattcacataatgtcacctacatttttcagttgtaaacatttccctctttctaatcttttaccactaaattctttagtgcatatttcctatgaacagggatgtattcttacataaagatcatacagtaatcaacttcattataatgtgagatagataaaatagtttaatcagctgtttgtattccaattttgttagttaacccaataattgcttcataacttttttcttctgcattataagatccagtatggtaaagtattgaatttagttgtctgcacgttttagcctttttwaaaaaaatctagaacatcttcataattttccatagtgcttcagtaagccaatatatttgaaggttaatagaatgttcctcatttagtgtttgcctgagaagttccttgagattcagaatatgcattcttgtccagaataatccacgggggatggtgtatccatctcag

SEQ ID NO: 780782 - DNA, 614 bp, Homo sapiens
attctaaaccacctcacacatattactgtctgatccaagatttaggctgcttcaagttgaaagagtcaaaacccacttaacgatgctcacattgggaagttatttcttgagaccaacttaagctaaccagcaactgtaagcccatttcttcttgttcttagctcagtgatttaagactactctccaacagtaaccatttagagatgccaaagttatcttttaagtctctttcatccttgtctggctttatgcataaatkccctgtgctgttgttgcttactttgtttttgtttttgtttttggtttattttactttaagttttagggtacatgtgcacaatgtgcaggttagttacatatgtatacatgtggttttttgtttgtttgtttgtttgtttgtttgtttgttttattttgatttctgctttgggcctgggcttgtggagaccaacctaagaaatgcatccttggtgctaggcatggtggttcaagcctgtaatcccagcactttgagaggccaaggcaggggatcacttgagcccaggagttcaagaccagcctgggcaacatggtgaaaccctgtctccactaaaaatacaaaaattagctgggca

SEQ ID NO: 780783 - DNA, 585 bp, Homo sapiens
  misc_feature 163: n = A,T,C or G
aagcatgccaacgtataaatccccaagtcaaaaggtcaaactgcgcacttgtctttcaagttgcctgcttggccctcttccaagtgtatttccttccttttgtttctgctctagagttttttgtttgttttgttttgagatgaagtcttgctcttgtcccccnaggctggagtgcgatggtgcgatctcagctcaccgcaacctctgcctcccaggttcaagcaattctcctgcctcagcctcccgagtagctgagattacaggcgcctgccaccatgcccggctaatttttgtatttttagtagagatggggtttctccatgttggccaggctggtctcgaaatcctgacctcmgttgatccgccggcttcagcttcccaaagtgctgggatttcaggcgtgagccaccgcacccggtctctgctctagagtttttaaataaactttcactcctgttctaaaacttgcctccgtctcttctgctttatgcccttcagttgaattctttcttctgaggaggcaagaattgaggttgcttcagaccccctacagatttgccaccagtaacaaataatgtgagtgac

SEQ ID NO: 780784 - DNA, 585 bp, Homo sapiens
  misc_feature 163: n = A,T,C or G
aagcatgccaacgtataaatccccaagtcaaaaggtcaaactgcgcacttgtctttcaagttgcctgcttggccctcttccaagtgtatttccttccttttgtttctgctctagagttttttgtttgttttgttttgagatgaagtcttgctcttgtcccccnaggctggagtgcgatggtgcgatctcagctcaccgcaacctctgcctcccaggttcaagcaattctcctgcctcagcctcccgagtagctgagattacaggcgcctgccaccatgcccggctaatttttgtatttttagtagagatggggtttctccatgttggccaggctggtctcgaaatcctgacctcagttgatccgccggcttcagcttcccaaagtgctgggatttcaggcgtgagccaccgcrcccggtctctgctctagagtttttaaataaactttcactcctgttctaaaacttgcctccgtctcttctgctttatgcccttcagttgaattctttcttctgaggaggcaagaattgaggttgcttcagaccccctacagatttgccaccagtaacaaataatgtgagtgac

SEQ ID NO: 780785 - DNA, 625 bp, Homo sapiens
ggcattgaatctataaattaccttgggcagtatggccattttcatgatattgattcttcctgtatatgagcatggaatcttcttccatttgtttgtgtcctcttttgtttcattgagcagtggtttgtagttctccttgaagaggtccttcacatcccttgtaagttggattcctaggtattttattctgtttgtagcaattgtgaatgggagttcactcatgatttggctctctgtttgtctgttaytgacgtataggaatgcttgtgatttttgcatatgggttttgtatcctgagactttgctgaagttgcttatcagcttaaggagattttgggctaagacgatggggttttctaaatagacaatcatgtcatctgcaaacagaaactatttgacttcccttttcctaattgaataaccctttatttctttctcttgcgtgattaccctggccagaacttccaacactatgttgaataggagtggtgagagagggcatccttgtcttgtgctggttatcaaagggaatgcttccagtttttgcccattcagtatgatattcgctgtgggtttgtcataaatagctcttactgttttgagatatgttccatcaatacctagt

SEQ ID NO: 780786 - DNA, 475 bp, Homo sapiens
caatattcatcagaaatattggtgtatagttttatttttttgatgtgtctttgtctagttttagtatcaagataatactggcctcatagaatgagtttggaagtattccctcctttctttgtgtttttgaatagtttgagtaggattggtatagtttttttttatttatttgtttatttgtttgagacacggtgtcactctgtcacccaggctggagtacagtggtgtgatcttggcttaccatagcctctgcctcgcctcccaggctcaagcrattctctaataatatttgctttatatatctgggtgctccagtgtttggtgcatatatatttatcaaattgttatatcctcttgctgaattgacccctttatcattatatagtgaccttcttgttctcttcttatagtttttgtcttgaaatctatttgtctgatttatccaatttatttatctgactcctgctcttttttt

SEQ ID NO: 780787 - DNA, 638 bp, Homo sapiens
aaacatttacagatataggtttccttttagatacttccgtagctacattcacaaattttaaaatattgtgctttgtttttttaagagtcaaagtattttctattttaccttgtgatttgtgtttcatggactatttaggaatattatgtttaattttctaaactatgggaatttttcagatatacttttggttaggtttttaatctaattctgatgtgatcagagtatactctatatgatttcaatccttttaaatttagcaatgcttgttttatggtcaaaatggtttaccttggtgactgttccatatatacttgaaaataacatgtgttctgcaatcaccgcaggtaacgttctatgaaggaagactcaatcaakttagttagttatgttgttcaagccttctaaatctttagtggtattatgacaacttgttctatcaattcctgagagaacagagtttaaaatctattctaatggtgagtttgtctatttctctttatagttatggcacttctgctccatgtatttcgatgttctgtaatttgccaattatttactattattattgttatttccttttgatcatctgaaccttttatcattatgaaatgtccctctttatctgtcttactatt

SEQ ID NO: 780788 - DNA, 620 bp, Homo sapiens
  misc_feature 23, 69, 117, 155, 189, 196: n = A,T,C or G
gatgaaattgctagaggacctanatgaccaacctaggatgtgtcttcctagctgaaggcagggccatanatagaataatttcaggagggctaaaatgtttattcttccccttagctnttgagaacaagagactaaggtttctgggactctgactntatatgactaaggtgctcctctcacatgaagtanagcatanagaccaagtataatgtaaacctaatgtctagattttctataatattgtttaaatttcagttgtaattatctgtccaaatggactccacactttgttttgcctcgttctattctggaatcatatgatggcctgcagaatttaacttaaccagccacatgctccttgcctcattcagcctacccattttttctgtatgaaaaggtttcacagtaaagcaaagaaacttttacacctggcatctatcccttgacctttaactttctggagtsaccttacttgaaggaaggaaataccacctagaaactgcccctggatttttcccagcctgttgcacagaggtcttccaaacctgggttatgctaactgatggcagaggagaagagtcccagccctagcttcccaaatttttgtgatattttcacct

SEQ ID NO: 780789 - DNA, 627 bp, Homo sapiens
ataccgtaaggaggactagggctgattcttaacttccccctttcctcaccactatgaaaattaccttcactccacctccatccccaggtccccaggcccacaaacttggagctaatctttaaacttccccctaatctttgccatacacagttacaccactaccaagtcctcattcctccatcgtagtatttcttaragtttattcttctttcttggcctggtttccctaagaattaaagccagaagtaaaaatttatgtgataatactttattgaggaatgcagtcccagggaatccgtgaaagctgctttcacgggatccccttgttatgcggtagctatcgctgttcatcatatccaaattaaagctcttccactgggccttaattcatcgctcgcacagctccctctcctcaccactcccacccaccaccacacctccatctaatggctttctaaatggaatctcttctctggtttatgtactctacttcctctctttcatacatgacatcctcatgcaaaacctcaggccttcatgccaaaaatgttcacctcctctgcagtaactcaatttctctccttataaaaataataatagctgagatttcctgaatacttattatgt

SEQ ID NO: 780790 - DNA, 701 bp, Homo sapiens
tacaagtctttgtgggaacatatgtgttcatttatcttgggtaaaaacctaggaagccaattgctggatttttacaacaagtgtatgtttaacttaacaagaaactgctaaactattttccaaagtgattgtaccattttccattcccatcagaagtgtatgagagtttcagttgctccatattttcatcgacatgtgttattgtcagtctttttattttgagccattctagtggtgtgtagtggtatctcagtgtgactttaatttgcatttccctgatgactaaaggtagtgagcaactttttatgcatttattaaacatttgcatatcttttttgtgaagcctgttcacagcctctgtccatctttaaattagtttgccttgttattgwtgacttgtaagaagagttctttgtctgtgcaaaggactacacatgtcccttgtcagagacatatgtatatataactgggtgtggcaggtggctgtaattccagctactcgggaggctgaggagaatggcatagatagatagatagatagatagataggtagatagatagatagacagattttttgtcatggtcttgtgttgtcttttcctttgcttaaaagtctctttcaaagagcagaagttcttaatttcaaaatcaaattcatactttaaaaatttcatggatcctgctttttgtgtcctatctca

SEQ ID NO: 780791 - DNA, 586 bp, Homo sapiens
ttgttatattgtttttttaatttttttcccctgaatatttttcatctgcacttggttgaaaatctgtgaatggggaagctgcagatatggagggtgggctgactatattccgggtactagaatatactagaatgttttctctctatatattcatatataaaccaggatacatatcgtatcagatatatgatttgcaaatattttctcacatgctgtaggttttctcttcactttcttgatggtgttctttgatacacaaaagttttacattttgatgaagtacaatttatctatttttaaaaactttgttgctgtgcttttggtatcatatctaatactattgacaatgcaaggtcatgaagatttacctttttttctctaagagttttacagtttcagctyttatatttaggtcaaggaaacatttttagttaatttttgtatacgatatgtggtaggagtccacctcatttttttgcatgtggatatacagaatcatctgttgaagagactattctccttctattaaatggtcttatagccctttttgaaatcaaatgtatggtttgtgtattagttccttctc

SEQ ID NO: 780792 - DNA, 434 bp, Homo sapiens
ttttaaatggcaaatttaaaaaaaaaactactttgagtttttgtttatttacttaatctacaaaaactggttgggcacctactaggcaccagacctaggaaaggcagtgagagcaaaacagtcatggtgcttgccgttgtagagctcccagcaaacctgccaactccaraaacaattccatcagtgcaactgtgatcaatgctaaaagtgaaaattttaagattctgagagggcatcataaaggagctgacccagtttatggttgtcaggaaaggcttccctgaggaagtcatcataactgaggacctgaagggagcctaagcattacccagaacacgaggcagaggggacttgcatgtgcacaggactaagagaggactgatgcttttgaggaccttaatgaaggacaaagtggctggcatgtgaggagcaaa

SEQ ID NO: 780793 - DNA, 633 bp, Homo sapiens
acttgcaaggaccaacctgtcaacccctttacaaatgttaaaagattcctggtcttctttatggaataaactccccactaagtagatttgcctagtattcaaggtgaggttgagtcatatgtataaataaagacttttagttcatcttcaataagacagaatgttctttaaaccaacggtactggaagcaaataatttcattaaaaaaagtttggtcaaaatattgaatggtgtttttcacctgccacagcaattaaaatgcctgtaacaaaataccattgagataaattatagtcctttgttcagagctcatcagaaaagatctaatttatagcattgactataacttgtgaaaaagtctctgtctgaaagctaataccatgataaattttaatcatgtrgatagaactagcttcaaagccgtattaattatacatttaagctctacatacaaactcatacatcacagtacacccagaacatgtaaaatacagtctgaaccaaattaaaatatgccaatttcctcagcagttatttgcttttgatatactgtagttatttcagtccagtctttataaacattaaattactgctgtgttttcttagccattttgcttcctcagagagaactct

SEQ ID NO: 780794 - DNA, 598 bp, Homo sapiens
cactcacaagacataaaaaactaattttaaaatgaactctgcagacaatgacgcaggaacaatgtttctcaaactggggtcataggtttctttcaagaatatttttgattttataaatgtatgagattcacatttgaggaatttatctctggtttcatgtttgtatgtatttagtcaacaatataattaaaataatttaatattagggaatcctcagaaatattgtccttttaatagaaaattatkcaatggcatatgaattctgtttgaattctgtttcaaacaaattgaaaaatagtttaaaaattatatttgaataagagtaatttaattactgaatagttactcttaagacaataattgataatttaaagaaattattattattattttgagacaaggtctcacgctgtcacccagactgaagtgaagtggtgcgatctcgtctcactgcaacctccacctcctgggctcaagggatcctctcgcctcagccctccaagtagctgggcctacaggcatgcatcatcacacctggctaagttttgtattttttatagagatgggggtctcaccaagttgcccaggctggtcttga

SEQ ID NO: 780795 - DNA, 598 bp, Homo sapiens
cactcacaagacataaaaaactaattttaaaatgaactctgcagacaatgacgcaggaacaatgtttctcaaactggggtcataggtttctttcaagaatatttttgattttataaatgtatgagattcacatttgaggaatttatctctggtttcatgtttgtatgtatttagtcaacaatataattaaaataatttaatattagggaatcctcagaaatattgtccttttaatagaaaattattcaatggcatatgaattctgtttgaattctgtttcaaacaaattgaaaaatagtttaaaaattatatttgaataagagtaatttaattactgaatagttactcttaagacaataattgataatttaaagaaattattattattattttgagacaaggtctcacgctgtcacccagactgaagtgaagtggtgcgatctcgkctcactgcaacctccacctcctgggctcaagggatcctctcgcctcagccctccaagtagctgggcctacaggcatgcatcatcacacctggctaagttttgtattttttatagagatgggggtctcaccaagttgcccaggctggtcttga

SEQ ID NO: 780796 - DNA, 650 bp, Homo sapiens
attatttttaaaccaagcctgtatatgtcggccattcgtgttgttatgttggattgctctatattttagaaggatttttctattatacagtatttatgctgctaaaggcaaatggatatgaaataagacattataattataacatttaatcatgtaaaaatatcactaaaccacacttgaaagtatcttaaataagatactattttatttaatctgtctgaaatatcttaaataaaatactattttatttaatctatctgaaagatggtagaaagaataactaaatcccagaggatatttttagtctgtctttgagagtacagagcagaagatacagtggagtttacaagtgcctgaggcagcataggaatcagtgaggatgaaaggtatcataatgattgatgtttaatacttctggaaagtctaattacagttttaagtgtccattttcaggtaagactgctaaattccttagaaagttttttacatcgctcattaygtgtagcacacatttccctcaaaatacaccagagttcagtctcacgaaacttaattttcagatttaatttgatgtaggtgtacatttcagatgatttcacaatcctttgggtcattttattaatctgatcaaccaaatatgaaaactatta

SEQ ID NO: 780797 - DNA, 532 bp, Homo sapiens
cttttaattggggcatttagcccatttacatttaaggtgaatactgttatgtgtgaatttgatcctgtcattatgatgcttgctggttattttgcccattagttgatgcagtttcttcatagtgtcgacggtctttacaatttggtacgttttgcagtggctggtaccrgtttttccttttgatatttagttcttccttcaggagctcttgtaaggcaggcctggtggtgacaaaatgtctctcagctttgtttttctgtaaaggattttatttctccttcgcttatgaagcttagtttggctggatatgaaattctgggttgaaaattccttttttaagaatgttgaatattggcctctcttctggcttgtagggtttctgcggagagatctgctgttagtctgatgagcttccctttgtgggtaacccgacctttttctttggctgcctttgacattttttccttcatttcaaccttggtgaatctgatgattatgtgtcttggggttgctcttctcgaggagtatcttt

SEQ ID NO: 780798 - DNA, 536 bp, Homo sapiens
ttttcctcatctttgtggatttatctacctttggtctttgatgttggtgacctgcagatggggtttttgtgtgggcatcctttttgttgatgttgatgttattgctttctgtttgttaatttttcttctaacagtcaggcctctctgcttcaggtctgctggagtttgccgaaggtccactccagaccctgtttgcctgggtatccccagcgaaggctgtagaatagcaaagattactgcctgttcctgcctctggaagcttcatcccagaggggcactcactggatgccagctggagctctcctgtatgagatgtctgtcaacccctgctgrgaggtgtctcctagtcaggaggcacgagggtcagggacccacttgagttggcagtctgtcccttagcagagctcgagcactgtgctgggagatccactgctctcttcagagctggcaggcaggaacattaaaatatgctgaagctgtgcccacagccgccccttcccccaggtgctctgtcccagggagataggagttttatc

SEQ ID NO: 780799 - DNA, 593 bp, Homo sapiens; identical to SEQ ID NO: 776566

SEQ ID NO: 780800 - DNA, 451 bp, Homo sapiens; identical to SEQ ID NO: 776564

SEQ ID NO: 780801 - DNA, 697 bp, Homo sapiens; identical to SEQ ID NO: 776565

SEQ ID NO: 780802 - DNA, 635 bp, Homo sapiens
ctgaggtccataaaagccccaggctcatccagagtgaggcagagggcagaagactgagagatgatgggatgaccagctgtatagaggagctgctgtctctgctgagagcttcagatacctgcagagacctctgaatgacctacctgcagagagcagccaccctccccarggcgtcctctctgctgagagctgaacacttgatgggacaacctgcctacagcaaaaagatacccactacaggtatcctccgagctgttctaacactaaataaagctcctcttcatcttcttcacccttcacttgtctgctacttcattcttcctggatgcaggacaagaactcatgcaaaggcaccactggccacagaggtttctgggaagaaaatcgacaccccaaagatcccataacactatgattagatgtttaatcttttccgagagccagtagcaagccagaaagtatttctcaaaaaagagaatgattatctgcagaagagggcatagatgtattttaaaaatctgagatgtctgcattgtgattattctatgggtgcttgccagaggctgtaaacacattattttccacagacacttagaaaatcattggatccactggataataaggtaagtggaaga

SEQ ID NO: 780803 - DNA, 635 bp, Homo sapiens
ctgaggtccataaaagccccaggctcatccagagtgaggcagagggcagaagactgagagatgatgggatgaccagctgtatagaggagctgctgtctctgctgagagcttcagatacctgcagagacctctgaatgacctacctgcagagagcagccaccctccccaaggcgtcctctctgctgagagctgaacacttgatgggacaacctgcctacagcaaaaagatacccactacaggtatcctccgagctgttctaacactaaataaagctcctcttcatcttcttcacccttcacttgtctgctacttcattcttcctggatgcaggacaagaactcakgcaaaggcaccactggccacagaggtttctgggaagaaaatcgacaccccaaagatcccataacactatgattagatgtttaatcttttccgagagccagtagcaagccagaaagtatttctcaaaaaagagaatgattatctgcagaagagggcatagatgtattttaaaaatctgagatgtctgcattgtgattattctatgggtgcttgccagaggctgtaaacacattattttccacagacacttagaaaatcattggatccactggataataaggtaagtggaaga

SEQ ID NO: 780804 - DNA, 581 bp, Homo sapiens
gagcacaagaggtagaatttgatcactgtctagcacaaagtaggcatttagttatagacaatgctgatttgttccagtcttttatgaaatccagggcatttctgaaaaaggaccaatgtttactttgtctaccccaaaccttaccttttcccctttcatctatggtaaggtaccagtagctcaatgacagagaaagagtttcaagtatctttcaaacayccaaatatttccagtggaaatgggcccaataaacatcttcaaaatcttctggtgttactttagttcctatctgttagtgctctagaggtctctcaaactttaacagttctcatctctagtggaagctgtgataccactcctctctacaaacagagggcatcttctgattgttgtgctacccatacttgcactctgggtgctagagatgctaagcatcctgcaatgcatgaatgatcccacctacaacgccaataattctccagatgagaaaccttgagtcatgtaatgaaataacctccagtatgtttcaaaggttcttgacacatagcctttatccaaaagtattggtaaaccactgtatc

SEQ ID NO: 780805 - DNA, 645 bp, Homo sapiens
acagatatgggttggaatccaagctgagccattttctacatgtgtgaccctgagaaagttactaggttgaaccacatcagataactgccacttttgtacttttctcaatggtcacatacaagtaatttcatatagttcttcatggtttggtttcctcatttgtaaaacaaaggcaccaatgcctacaactcatagaagtgctatgaggttyaaataacaatatactttacaaagcacttataccaataataagagctcagtaagagttgactttctcaaactttcacttttgcctcaaattatctgggggcttatttttatttatctattctcctagaagttgctatctgaggcaaacagcttttcctgcatataggaagcaggttaggactatacccaaggtcttctccagtgatccattcagaatgtatggtttcaacatgacccaggttgttagctaattggctcaaactcagtcaggtatggacccttcatagaagaagcaagtatccccctgcagtcttgaccatacctcagaaatccatcttaaaaaacactactcagggaaaggtattaaaacatatatgatgtttcctaatggatgcaaaagattaatctaggaaaacttcctttctaggcgattca

SEQ ID NO: 780806 - DNA, 629 bp, Homo sapiens
  misc_feature 355: n = A,T,C or G
tcacctggtgggggaaaaaagtaaaaatagtgggtggcttgagataaggaagtaggaaagaaggagttaccagccaggcgcagtggctcatgcctgtaatcccagcaccttgggaagccgagcctggcggatcacctaaggtcaggagttcaagaccagcctggccaacacagtgaaaccccgtctctactaaaaatacaaaaattagccgggcgtggtggtgtgcacctgtaatccctgctactcaggagggtgagatgggagaaccacttgaacctgggaggcggaggttgcagkgagccgagatctcgccactgtactccagcctgggtgacagagagagactctgtctcanaaaaaaaaaaaaaaaaaaggaaggcgttaccatgaattcctagtatccagctcttttgggctaaggtgaggccgcctgtaatgacttccaaagccagaagatgatctgcactttttgggtggtggcaggagaagagaagtatgaacttgggggagtctaaatgtatcttctgtaaccaccatcctctgttcctgcccactatacctatttccctacttgtatatgagacaggatactagtcgatccttcggaggggaaaatgcagagcggtcac

SEQ ID NO: 780807 - DNA, 618 bp, Homo sapiens
caagatatcctgccaatgagccaggtaggatgtcctttgaacaggacagggcctagggtagggcatggagtcgcactctcagtgttgtgcaagctcaggcttagtgcctgcaggccctgaagctgggtgcctcttaagtgttcaccctggatgcttctcttgcctctccctagtcctagccctgcctctgagtaagaataatctctaatggacaccattatcctcttgcactcattttagtcgttgtatgtctgcttctaggttctaacctggaagttttaattagttttagttgaacagctattttttaaagccataatccygagaacacattgagagaggaagagattttcattctttcatacccaggcatttaatattttacaatggtaactctaaataactgagtacctaggtttgaggcactgtactcatattgcataggtgtgttgtttatataatgtgcaaaactcactaagaaattctgcaacctaggcattcatagcccaaccgagagatgaaatgccaggcccaggccccacagaggagagggccactctccaacataagactatcttgctccacgtcgacttgctgcctgtttgactcccctccctt

SEQ ID NO: 780808 - DNA, 578 bp, Homo sapiens
ctccttgttgtggtgttagggctaagtttccctttcatgggactccaagctagaagttggtctcagcactaatgaaagatgcacagtatgtccattgctcagtcagccgttctgatccactgctgaggttgcaggtgttccttgtctccaggttgctgcttgattcrtgggaaccacccccaatccccctcccactttccactcaggttctgttctacaagtctcagggatctctgcaccacaggagactcagagacaacaggatatgggtatggtcataaccttccactgtcagcatgtagaacataggatgattcagctccaccatgaaatgagaagatagagggagggaaaccatccactgtctgcaacctgagagactgttcacctcccccctcagcagcggtagggtagaagtggcactaaccgatctaatattcaggtagtcagggttctaattctagctcgggcactttctttgcctcaatttttacatttagacctaacaacttttttttcctggtaatgactgtccatcagccacatgttcctagattttagtataatatttttactgg

SEQ ID NO: 780809 - DNA, 561 bp, Homo sapiens
tttttttattacccatcttctgaagcctgcttctgtcaatctgtccatctcatcctccatccagttctgtgcccttgctggagaggcattgcgatcatttggaggagaagaggcactttgggtcttcagcattttttaattgattctttctcatcttcatgagtttgtctagttttgatctttgaggcttctgacccttggttggagtttttgtggggactttttttgttgttgatgctgttgttgctttctgtttgtttttctttcaatggtcaggtccttcttctatagggctgctgtggtttgctgggggttcatttcgggccctattcatctggttggctcctgtgcctggaratgtcactcaaggaggctggaaagcagcaaagatgggtgcctgcttcttcttctgggatctctgacctcgagaggcaccaacctaatgccagtaggatcactcctgtgtagggtgtctgacaactcctgttggagggtctcagccagttgggtggcatggggaagaggacttgtttaatgaagcactttgactgtccttggaga

SEQ ID NO: 780810 - DNA, 689 bp, Homo sapiens
ggcagaatggatccctgatgagaatcactcctcagcaggaagaagtcagcagtaaattataaacaggtaagtgttctaacagggcttctgaaactcatgcgtatgagtcacttcatagctcgtcacagtggttttttcaagcattactctgacttagttggtataacaaggagccaagggatctggaaagtgattgatgcagggtgtttcttggaccgtacttttaggggaagtagccacaaagrgctgaacctcacaccctttcatgtaaacttcctgcttagcaacagaatagagtaccttcatggttattaaaatgcttttctccttgtctttttattttttcttagatctgctggcctatcttgctagtgattaagtttacagttcagctaatcatttgctccaggtttccgagcttgtaaaatcgcatgctgtgcatataaatgtataggattttgaccttagaaactgaggagcaattatccacatgtcttaagacagagtaggccaccttttgactttgaaagtatcaccaggagggcattttatttttgaaagtcaagttttgtgtttcgaaatatgtttgttgggcttcttggtagcagtttaagttttattgtgattaggggctgaaacaagtgataaaaaatgaagtttcctatttagtgatgtgatgtcacctgttg

SEQ ID NO: 780811 - DNA, 606 bp, Homo sapiens
ttatttatatgagtacagagtccagtctgaaggtaactttatacctgcattttctacgagagagaaggattgaaaaggagagatgagtgtcttaacactcaagtgtacaaatgagggccaaactgaaaaatctttcacaattagccaaaggaaaaacctgcctttattgcctccatgatttgtaatgcctctcatctagttttctgttgcctttaattttttttccctttttcatgtttacagtcttttatgggctaagaagaaagttgtatttaggatattgcccacaatagcaaaacatgctaactcgatsaaggtgctttttttgtgaataaatgctctgcttattttaggaaacatttaaaaattgtcagaaatatggacaaccctaatagcccttctacacaactctcttaacctgattaaagataaagttagcaaatgtttgattgtaaatcaagaagcaaaactaacttaagtaacatcttttctgaaatcttcttgtcacatcaggccaatggctttgattcatagttttcagtacattcacctctttggattggggacatgttgagagatgcagtgctcagcttcctaagatttatt

SEQ ID NO: 780812 - DNA, 566 bp, Homo sapiens
tctccaggtcaattatatatctaccactaagtgtgtgtcagatggggtctgcaggtgtgggaccaactagctcctttctgaagccaatggtttggtaaagctttgtgacctgagagctgcatctttggattggatattacatagattcttgtaatgcagcactgcatggaattatcccaatgtgggcatcggtgttgaacacaacagaccataaaattccatttcatttctgttgcataaacataggatcacaaatagtgtgattatttctrgcagcctcaggcgtcttagccagggggaacatgtaggagactatgaatacttaaatatattataagcttccccacatgagctgaccaagtacctttgacactagcctttaaaagggtcgaatataaaaacctctaatacggtcacttgctgagttcttactgtgtgcaaggcgctgttttcatgctttcatttgcattatcacagcaagtcttcaagctagcattgtagtgcattatattctcacttcacagctgagggcatggaagcccagagaggtcatgacacttggcaga

SEQ ID NO: 780813 - DNA, 621 bp, Homo sapiens
tacttcaactgtccttcactcagatatggccaggtaagtacttccatgatgataagcctacttctattcgcttcagagttcaaacccaccttggccaacatggtgaaacccaatctctactaaaaatacaaaaaaattagccggacawggttggcagatgcctgtaatccagctacttaggaggctgaggtaggagaatcacttgaacccaggaggcagaggatgcagttggctgagattgcaccactgcactccagcctgggtgacagcgacattccgtttcagaaaaaaagacatgaagtcctccctgatactactaccatcactaatattcaaaccacactggggcatcaatgaaatattgacagaatagagaataaataagcaatattacactcttaaattcaggattttagacagtttcagaaataagtggcaggtataactttccatatatggactcacttggttcataaactcaggattttagatggtgtcaggaataagtggcaggtataagttcccatttatgaactcatttggttcaaattcctttattgggtgattctttcctaacctaccactgcagatgtaccaagttcaaagccaagaagaattaaa

SEQ ID NO: 780814 - DNA, 621 bp, Homo sapiens
tacttcaactgtccttcactcagatatggccaggtaagtacttccatgatgataagcctacttctattcgcttcagagttcaaacccaccttggccaacatggtgaaacccaatctctactaaaaatacaaaaaaattagccggacatggttggcagatgcctgtaatccagctacttaggaggctgaggtaggagaatcacttgaacccaggaggcagaggatgcagttggctgagattgcaccactgcactccagcctgggtgacagcgacattccgtttcagaaaaaaagacatgaagtcctccctgatactactaccatcactaatattcaaaccacactggggcatcaatgaaatattgacagaatagagaataaataagcaatattacactcttaaattcaggattttagacagtttcagaaataagtggcaggtrtaactttccatatatggactcacttggttcataaactcaggattttagatggtgtcaggaataagtggcaggtataagttcccatttatgaactcatttggttcaaattcctttattgggtgattctttcctaacctaccactgcagatgtaccaagttcaaagccaagaagaattaaa

SEQ ID NO: 780815 - DNA, 645 bp, Homo sapiens
tgaaataggtcagcatgtggagagatattaaagagatgttatctgccctctgaatcatgttattaagtgctttattttcccctagaaattgaggaaagcaagacctcagtaaagcaaatcaggcccaaatttacaagcatgttttgactctcttgcaatgcgttcagccttgaactcagatgtagattacgaggataacagaaatgggcaaagggaaatccgaatgcacccgccatcttctgtttggtaataattttcctatacctcggatatctgtgtcttcactgttcataatacttgggtaagtgttgcttggaatacattaaaacttgagttccaggaactactttgaaggatcttacagtcaggaaagagcaagaagaagtgctaataatgtctacatttaatttgaagaaatagrcaaagtatagtcatgtacgtatctgattcagcctatgacctcaggtactgtacgtgaacaatatcatttaagtctggcaaaaatctagtgagatgattatatgctcaattccattttgcaggtgaagcagctagagttaagtaatgagctcgaggtcacacggtttttgtccccagtctctccaaactctatgggctttgtatgtaactgccagagaaaaatta

SEQ ID NO: 780816 - DNA, 607 bp, Homo sapiens
  misc_feature 483: n = A,T,C or G
ccttttttctttattcttataactgatcatttctttgtacccaccccacaccccagacattttgttctaaagcattcttcaagcagaatgcgtacaattggttgggttctaagtactgcccttgctggttccctgagatttctcttaagttcaccttgattggtttcttaggcatccttaagytcttggctcacacatttataaatgatttttttactttacttccaaagatgactaattacatcaattgtgtgtggattttagtggtttaactcttatttaaactgtatttacaagtcttagaacttatcttactgtggcctttatgcccttcaatgtcttcttaactaatctgttgatagaagcaaaccttccaatgtcccagcccctgaatggcagagacagacgctgaactatgcattccagctattatccttcctccgaactgaacattagccttcactccttctatgaagccagctntaaacattcttcccacactgcacatggggagctgtggggatagttagctgaactttcccacaccaacttgttgaagcagaggaatcaaataaatgatgaaagcagcagcaaatgagcttttgtg

SEQ ID NO: 780817 - DNA, 610 bp, Homo sapiens
ccacagaatgagtctggggaccccctggacccactgtaagtcggacctgagctaaaactctattaattacctaacctccataagcacctactttaactggagggccacaatgacattttaggtaccctggaatcaacatcagctcagagccagcatccagtagtccccaaaatgtctgatcattttcctttccccattgttcagttaccctggtaaaaaaggctggaggtttccttggggaaggaagggaaaaagattaacagsataaattgtcagtagtttagtggggtccttcttcaaggggacccagtctccccttcactcaaggcattctgggtctgtacactggctcaagtctggaaattgattgaggggccatagttctctgtttttataattcaaattagtctcttgtccattggacctaggagttttctgcttatataaattaagtaggaatgcagtaggcttcctatcaatttcatttctaggaagaccatgattaattagccaatgccagagctctacatgagtcagactatcctgattgccactttgcctctgctgtccattacagtagctacacccaccttgcctttcatgggtgagt

SEQ ID NO: 780818 - DNA, 598 bp, Homo sapiens
gaacaggtgctagtatccacagctaagagacccatagatggttcacatcacaggactctgtgcagatataccccagtaccaacccagggcctggcagacatgcagggtagctagacctagaagagagataacaatcactacagctgatttttccttcctcaggaagccacgttcataggaaaagtggggaagtactacatcaagagaacaccccatgggacaaaaggatctgaacaacagctttcagccctagaccttccctctaacagagcctaccraaaagagaaggaaccagaaaatcaactctgctaatatgacaaaataaggatttttaacaccctccccaaaaaaatcacactacctcaccagcaatagatccaaaccaagaagaaatccctgatttacctgaaaaagaattcagaaggttaatcattaagctaatcagggaggcaccagcgaaaggcaaagcccaatgcaaggaaatccaaaaaacaatacaagaagtgaagggagaactattcaaggaaatagatagcataaataaaaaacaatcaaaactttaggaaacattggacatacttatggaaatgcaaaatgc

SEQ ID NO: 780819 - DNA, 658 bp, Homo sapiens
atcacagctcaatgcagctgtgacctcccaggctcaagtgatcctcccccctctcagcctctcaagtagctgggactacaggcacacacacccatgcctggctaatttttttttttttacttttgtaaaggcagggtttcatcatgttgcccggatggtcttgaactcctgggctcaagtgatcctcttgcctcagcttcccaaagtgctgggattacaggcatgagccaccgtgcctggctgaaaaaacactttattttaattgtcttaaaaaytccactgaagaaatatgttgctgagaaactgaggcacagagaaataaagtggttttttcatggccacatggttatttattgttagagctacaaagcatctccagagctctcgccactgcaccacactggttttataatagtcaatttcaaaatttatctgctaacccaaatagcaagctaatgaattttaaccactcaacaaatgatggaaggagcaaacataccttcaactaaaaaagtataaattctgacccaattctgaatgtatatttataagcatgccaattatcagtctaataggggttggcaataatgtttaaatacatacatatcttagcaggaaaaaaactgtcatataacagtcattagatttagtccaagaa

SEQ ID NO: 780820 - DNA, 654 bp, Homo sapiens
ttctctaaacatgtgctctgtctctcataccaaacttggatagacagaacacaaatatgccctattaacaggttcagtgagcatttgggaaactaaactgaaccgtttagcatttgggaactaaactaaactgaaccgttttagtaaagatgtctctctgaaaggaaattcttcacgacggtaagatgagtgtcttcgtctgtgaatgctgaggttggggatgcatgaagatatgttattgctaaccttcaactaaactagggcagagccgggccagcttcatgggcatgtgatctgtgtagtcacacagggccccatacttagaagagctgtgcttagarcagtttgcttggtttggttcctgctctgttttcaatcagtcagtccctggatatttctaagggtgaggactccagaggggaagggtgaattcctatcaatcatattcctgtaattattaattttttaaaaaaataaaaggtatacaattctgcagagggagtgaacgtctgttttacaactcaggtgctcatagaatcctttttggctttttccccaacctctttctatgtacatgaaagttcactatcacccatcttaaaagagctgtgcttagaagagttgacttggttgggttcctgctccgttttcact

SEQ ID NO: 780821 - DNA, 507 bp, Homo sapiens
tatgaccatttgttatacaagggaatatggagctgtgtaaagtttgtaacaattttttttttttttgagacagagtctcactctgtcgcccaggctggagtgcagtggcactatctcggctcactgcaagctctgcctcccgggttcacgccagtctcctgcctcagcctcccaagtagctgtgactataggtgccygccaccacgcccggctaatttttttgtattttttagtagagacggggtttcaccgtgttagccaggatggtcttgatctcctgatgtcgtgatctacccacctcggcctcccaaagtgctgggattacaggcgtgagccaccgagcccagctgtgataaaattttaattcctttttattgtttgacatcttggtgagagaggcaattataatttttagaatctgtgtcccctggaaggtcggagggcatggtctcaggcatttactttgcccatcagtagtagtaacaatagaagcatctcaaaattctc

SEQ ID NO: 780822 - DNA, 507 bp, Homo sapiens
tatgaccatttgttatacaagggaatatggagctgtgtaaagtttgtaacaattttttttttttttgagacagagtctcactctgtcgcccaggctggagtgcagtggcactatctcggctcactgcaagctctgcctcccgggttcacgccagtctcctgcctcagcctcccaagtagctgtgactataggtgcctgccaccacgcccggytaatttttttgtattttttagtagagacggggtttcaccgtgttagccaggatggtcttgatctcctgatgtcgtgatctacccacctcggcctcccaaagtgctgggattacaggcgtgagccaccgagcccagctgtgataaaattttaattcctttttattgtttgacatcttggtgagagaggcaattataatttttagaatctgtgtcccctggaaggtcggagggcatggtctcaggcatttactttgcccatcagtagtagtaacaatagaagcatctcaaaattctc

SEQ ID NO: 780823 - DNA, 629 bp, Homo sapiens
taaaacacattggtatcaggggacaaagacagcacctgctttcaaggtcttttgtgttttagtcagaaatgtattctaaaactctgggtatatgggctgaatccagagtttagattgtgggattttattgtacatttgcattattttaaatatcaacatccctggagaagctatttttactcctacaaaacctaaacacttccttatttagcaatgctctcatagagaagggattttccaaaagctgtatttcactaagggtcaatatgaaaaaattacaatgtcattaaaatcacagattttttgtagattcacagaagcaggctcagtgttttctttcaataaatatcttttttttagttcaatacattactaattaattttaatttcacaaatagtgaaattatctgagcaagaatcattctcatttaaaattgtsaaataagtcagaaaaagatcaatatctcccctgcttcaaaaatgacactcccaattttcacaggtaaccactgttaacatttagtaaatacctttcagaaccttttacaagcatatataaagtacatcatttttgtagtataatgtgttttctttaaaaaaataactgggaccatactgtattttctaca

SEQ ID NO: 780824 - DNA, 613 bp, Homo sapiens
cccaaatattacaaaagtaaaatgcaaaaaaattttgtatacaaatgtaatacaatctttacatggtaaggattatttaaaaacacacagaacacttcctaagtgtggatgtgcttgggagctgaactcatcacacacctctgctctgaccattgcacagacctagcaggtggcagagcgggtgcayggcccctggcatcaagtctcagtgttggcaggttttaagctccccccgtacccattcatacttgcatcatctcttgtgctggagaagcttgctcaggcatatggggtgtcacaggagctgcggcacctgccttccaggagcctgtatataacctatatcctcgtgttactgctttaaaatcaggccctggagctgggaggactctcaagagacgaccctgtcctctgggccagtcctgacccactctggcagtgagtctaccgcagcctgctggagcactatttcaccctggcagtcagagggttccactgcagccatttctgccaaaaacctctcccaggatgggcccagatcccgaacagaaaaggactttgttctttcacttcttgatgccctcttcaaaggagtcagaggcatcaagtgtca

SEQ ID NO: 780825 - DNA, 620 bp, Homo sapiens
acacaaatgagtgcactgttgattgtaccaatgtcaatcttctggttttgttattgtgctatagttataaaagaggtcagcgttgagggaggctgagtagtgcctggacctacctgaacatttctttggaacttcctgtgaatctataattatttcacagtaaaagttttaaaagtaggctggctgggtgcagtggctcacgcatgtaatcccagcactttgggaggccaaggcgggcagatcacttgaggtcaggagttcgagaccagcctggccaacatggtgaaaccccatctctacaaaaaaaatataaaagttagccaggcrtggtggcatgcacctgtagtcctagctactcgggaggctgaggcatgagaattgttggaacctgggaaatggaggttgcagtgacccaatattgcaccactgcatgccagcctgggcaacagagtgagatcctgtcttaaaataaataaataaataaaagtaggcaaatagtataaagaacccctgcgtactcatcaccttattctagttatcaatgtacggccaatcttgtttcacttgtattcctacccactttcccctccccctcccatattatttagaagcaattccaa

SEQ ID NO: 780826 - DNA, 645 bp, Homo sapiens
agaatgatgggatggggtgctatttagatgggggtggaggaaagaagtcttcgatttggaggcatttgagcagcaatctgaataaaatcagctttgctgaatgaatgaataaagcgagccacttaggtatttgtgcaaatagctttccaggcaaagrgactgtacatgcaaaggctttagatacgactgagcctagagtgcttgagagagagtcaggaagtcagggatgctaaagcaggatgggagacatggagaggaaggggtagtggaagacaagtcagagaggtcgctggggccagattggcatcttttccacagttgtaatagcttacagattcctcctgagtttatgtggagctgtgatcctacttctagaacatattattatattgctcaattcccacattgctacatgatgctcatatgcataattttcatggttgcataatattccatcacattcatatgtcttaattactcagtgagttccttgtttgtccttcggtgagtatctttggctttctttctttcccattccctgtttcaccatatttcagctatttttaaagtataaatttccagaacagggattgcaaattcaagggttatgaaaataaatattgtcaaatctctctctaaagttat

SEQ ID NO: 780827 - DNA, 573 bp, Homo sapiens
aatatataaaaatggaaagccaaacaacaagttttgagtctattggttaaagtgaattcttgaaaaagtttccctgtgcttaccattttattccgtcattattcgacatgacactaggcccttctggtgtgtaaatacttaaacatcgtaagtattaagttagaaacatctaaaaactgcagtaagtcattaatttaaccacttgttaaatttctgtaaagtgtactttcagggaatatgaagttaaacaaggcatagttctggtactcaaagcacttacaacctggtgtgcgagaccagaaacctaaataaataattaaataaactaaataaatagggaaaatgtagggcataatcgacacaaaagtgctaaagaagatactatgtttttctgaggtaagtactaaaaaaaacttaattttaacttgaaggatggagaagagttcaaagatggagatgggaagagaggattcattccgggcagagaacaytgtagagagtcagtgggacaagaaggaaaccttagctagttgaagtgaagagtagtttgggaagaatacagataattacaat

SEQ ID NO: 780828 - DNA, 596 bp, Homo sapiens
taaatcccttctacctaggagcctataaaaacaaaagcaagttagttacttcaaaaatacagtcattggataaatgcttccattccaaatgggagacattggccaaaacaaaggggatacaggccccatgcaagaccaaaatccagtggggaagtcattaaatcttaaagctctgaaatgatccctttgactccatgtctcacatccggggcatgctgatgcaagaggtgggctcccatggtcttgggcagctctgcccctrtggctttgcagggtacagcctcactcccagctgctttcacaggctggtgttgagtgtctgtggcttctccaggcacactgtgcaagctgtcagtggatctaccattctggggtctggaggatggtggcactcttctcacagctccactaggcagtgccctagtggggactctgtgtgggggctccaaccccacattttccttccacattgccctaacagaggttctccatgagggctccacccttgcagccaacttctgcttgtacatccaggcatttccatagatcctctgaaatctaggtggaggttcccaaacctcaatttttgacttctg

SEQ ID NO: 780829 - DNA, 645 bp, Homo sapiens
cacatccatcaggtcttcctgttgtctctgcatcttgatgggatcctcaggtccttggcctatttttcagcttaactgagtaatcagattattttatcagactttgaggaatccataagaaattgcattataaactgtratgtccctagatacaacaaacactgaggttaacactgggggatatccctctctagggccctctttctccccagcttcaaggtggttggggaatagaattagtcatagcttgtttgggaagcttggaatgagagaaagaaagacagaacttggtggttttcagatgttttttttccaggctgcggtggagctgggagaatgagagattccatacatcttgtgaccagatgtggtatcttcagctgggactaggctgtatcaacaaaacagagtcaattttcaaccttccctctttatttacctgtttattttactattacattctgtgtgtgtatctttaattataaaaataatgcccacttctcccccctcaacaccttactaagaaaatgttcaaacgtgtagcaaaaatacctaattaagaaaatcagacctactggaagggaaccacaaagaaagtgaaagtttctgataaccctatcttctggagagaacattgtcattact

SEQ ID NO: 780830 - DNA, 538 bp, Homo sapiens
gggagttgaacgatgagaacacatggacacagggaggggaacatcacacaccagggcctgtcggggggtggggggctgggggagggatagcattaggagaaatacctaatgtagatgacgggttgacgggtgcagcaacgcatcayggcacgtgtatacctatgtaacaaacctgcatgttctgcacatgtgtcccagaatttaaagtataataaaaaaaattttaaaaacaaaaaactttttgctgaaggaaaagtaagaacgtggggagacttcagtgcccactggctatagaaagggctaattaaccttgctttggtgctgctgaaatgacaagctgttcctctgtagaatagcagatgcccccgatgtttattcaagagcagcttattgattggtggactcaaattgagtagatttcaataactggaaataaacatccaccttagaccgcctaaggacacagcatgattattcctggggtcagtcgtacatggcagggtttggggagggcgggagttgacctgctcaagctggt

SEQ ID NO: 780831 - DNA, 632 bp, Homo sapiens
ggttatttcttttgcttgaaatagtcttcccttctcatgcctccctcaacttatttaactcctactcaaatgtcacatttttagggaagtaagcctcttcagacttatttgcattccccatcatgcaaatttatatgattacactttttcacagaacttttacagtcgtaattttctgtgcatttgtaagcatatttgattcaagtatggccacaaggctcatgacaggatggacaacgtctattttgctcacaattgtctcttatggcttatgaggggatttaataaatattggttgaataaaatgaataaatgaatgaatgaaatataatttgtaaggtaaggataaaaggcytgttcttagagcctggaattctcttcattgtttaagtctgatgacataacatgaattgggaaatgtattaagaatttccggaattttttttttttgagacggtgtttcactcttgttgcccaggctggagtgcagtggcgcgatctcagctcatggcaacctccgcctcccgggttcaagcaattctcctgcctcagcctcccaagtagctgggattacaggtgcccgacaacacgcccagctatttttttgtatttttagtagagatgaagtttca

SEQ ID NO: 780832 - DNA, 490 bp, Homo sapiens
caggaagcttcctgtatgctcgatgttctgtgtacagacaatgatgtatgaagacgtgccttatatcttggtgttgtccgcttactactggaaggcatacctagaacacttccttattcacaaaatacatcatttatgttttagttactctaattttttctctgcagtatcgatttgtgcctgatgcctcctatatattgtgaagctacaactcctaggagacctatcaggcattataattgacatgttgtatatgcaggccatgayaaaagctatgaaatgctaaagagaagatgtgccaaatcaaagaaattcttaactgtaacccagagtctattcagtcaaaatattttcagacacacattcttacaaaattaacatcaaagaacttcaaagtttttccaagacacatgatacagaaaaacagaaaaatgtcactaaaatagaatgtctaatgacttaagcccttctacagtttaggcaacaattt

SEQ ID NO: 780833 - DNA, 611 bp, Homo sapiens
taccagtcattttatagtgttagagaacaaggtctagacaggttaaataacttaccccaaatcatacaaccagctaatggcaaaggctggactacaacccagaccttcaaactctaattcccaagagtcttctaacttcctcactctaacattatttcccacactaatctgactacgttcccttacacttaagattttccagtggatactctacacctagatattttatccaaagtcaatccatccttaaaatcaaaggtcacgtgcaatcttttccactcaaacttccttttcgcagctttaactcactgattttcctctttcccaaatttactttttttatttttagactagtcgagtgcaatagtgaaaaggggggsaacagaatagaacaagttcgatctgttactgactacataatcaattgagttaactcactaccttcggaccagctcaaatttacagtattttaatcactatcacatagtgtagcatctttgtacttcatgttgtctcatttactcctaacaacttgaaaagacaggaatttactggtcatattttatacatggccctaaaatgttaaccaatttgcttaaatttatacaatt

SEQ ID NO: 780834 - DNA, 602 bp, Homo sapiens
ctgccagagaaaaacatttctttaattatataatctagatacggtatttaattgttgttaaagtatttcatgtttaaatcccaggtacagaagagaatgaagacattctctgcttcaaaacttgtcagttttgcctacttgtgagtgccactaaaggcctatgaaacccttccactgtgtgacactaatgttgtatgggggccttatatccaaagttcaacaactgacagtgattgctctggaccaggatctacatcaccccacctcatgcatgccaaaagtattctcacagactcacacaactaagaatgaaggtagagtggtggactgggaagaacatcaaattcatagtcttacaatgatttattagaagtaaaaaagaaaaactttaaaatatgattagaaggttttatatggccattcctctaaatcctttactgtctaaaacgaagtgtgtgkgtatgatccaaacaatatcattgtttcgaatgatcagattcttaaatacttgaatgttcctttctattattaatcccttcccactatgaaatatttgccaataaaaagatcaacaaggaaaagagccagaaaagagcacaggc

SEQ ID NO: 780835 - DNA, 610 bp, Homo sapiens
tctaactattaactatttcttacgtgctatagggctaaataaacaaactcctcagctttaaatgaaaatcttcagctactggaaggcctttctcccattctctcattctcatttaaaaaatgtgtgacctatcaatttcaaaaacctattccagtttctccttaaagactcctaaaagggaacacagygcttaactcacggcatctttttcttcaatacttaataagtttattctcttaattgacaatgcaatgagaatagtaaaactcaaaatctcaactgctagtaagatctagaaagtctagataaaaattcataaaaatctgtcactgtaactgaggctgacaaatggtgttacgacaactgaacagctaaatgcaaaagaaatgaatttagaaccctacttcacaccatataaaaaattatcacaaactgggttatagaactaagagctaaaactctgaaacacttagaagaaaacatacaggtcaatctttatgaccttggattaggcaatggtttcatagatatgccaccaagagtacaagaaacaaaagaaaaaaacaataaactgagatcatagaaatgtaaaacattttcatttcaaaag

SEQ ID NO: 780836 - DNA, 588 bp, Homo sapiens
caaaaaaacagtgataagggttgacaaggatatgagaaagatgagaaactgaaaccctcattcactgctggtggaaatgcaaaatgctgcagtcctttggaaaacagtctggccgttcctcaattattagcatttaattagaaataatgaattaacaggattttaaaaaacatttagtataaaactgacaagtgycttttttatttcacaagaatgaaaaatatacatcaggacatgtttcatatatgaatatatatataaccaacgactacaataactcatttttaaattctaggaggcaataaaacagccagtatacttgacgtgccatggagaagtgctggcaattttctttatgattcactaagacaattaaaatagctcatttatttattcaatttccaagttttcaaatttccaagtaaaaaaattaccctccaaactgacaaagattttatatttcaaatagtaagctaaggaatgacttttaatcaaattatggaatgggctattaatcattattagccaatacagttgatacagataccacatttcttttgtttttaattttttggagtacacagtagg

SEQ ID NO: 780837 - DNA, 631 bp, Homo sapiens
aatccactaagtacagtgtcaagagcaggttggaaagtaacctccttgcaagtcagaagtaaattagacaatgggctttgaaattctccattacagttctcccttgatagatcattaataagagccacttggacataaaattrgtggtaaatattagttaggtttatgtagttataattatttactcatttaaaacacaataacttttcacatctttttttttttttacagatttagggggtacaagtgcagttttattacatggatataatgtatagcagttaagtctgggcttttgtgtagccatgacccaaataatgtacattgcacccattaagtaatttctcatacctcaaccgcctcccactctcctacccttccaagtctccaatgtctattattcccacattctatgtcaatgtgtatacattatgtagctcccaatcgtaagtgagagaatatgtggtatttcactttctgtttctgagttatttcacttaagataatggcctccagtcccatccatgttgctgcagaagacataatttcattctgtattctcgctgggtagtattccatggtgtgtgcatatatacatacatatatatgtatatgcgtctgtgtgtatata

SEQ ID NO: 780838 - DNA, 532 bp, Homo sapiens
  misc_feature 5: n = A,T,C or G
tattnattggatactcttgagatggctctggtgtttctgttttacaagtcctgaccagcatgtgtaggacataatgacatgtcagtgcgtatcaagtgtcagtgtaaagtattggttttgaatttacccaggcatctcattaaaatgaaaaacacagtgtaaaatttcaaatgaacctaagcctctgtctggtttgctcataattcaggaaaagtcataaacagaaagatacttgtctctatccayagccagggccccaactaagtactgcattgtgaaatgagtcatatccctgtaagcaatgatttgaaatgtgctataattgctatgctgcccatgtcacccaaggagaaaacaaaacatctaagtaacatcactatgccttacaaactgtcaaacgttcatcgatgatttcatctcatactggtgatgacccttcagtggtttcttttacattatcagacctgccagcttggtctatgagaagaggaaactcacagaaagcagagcgtggggctcataattattttca

SEQ ID NO: 780839 - DNA, 644 bp, Homo sapiens
gaaataggtcagcatgtggagagatattaaagagatgttatctgccctctgaatcatgttattaagtgctttattttcccctagaaattgaggaaagcaagacctcattaaagcaaatcaggcccaaatttacaagcatgttttgactctcttgcaatgcgttcagccttgaactcagatttagattacgaggataacagaaatgggcaaagggaaatccgaatgcacccgccatcttctgtttggtaataattttcctatacctcggatatctgtgtcttcactgttcataatacttgggtaagtgttgcttggaatacattaaaacttgagttccaggaactactttgaaggatcttacagtcaggaaagagcaagaagaagtgctaataatgtctacatttaatttgaagaaatagrcaaagtatagtcatgtacgtatctgattcagcctatgacctcaggtactgtacgtgaactatctcatttaagtctgacaaaaatctagtgagatgattatatgctcaattccattttgcaggtgaagcagctagagttaagtaatgagctcgaggtcacacggtttttgtccccagtctctccaaactttatgggctttgtatgtaactgccagagaaacctta

SEQ ID NO: 780840 - DNA, 574 bp, Homo sapiens
gaagatagagagttctgtgcttttctgcatgaaatttgtattatgtacaaattataccatggtttcattgtcagtgttcttgttggtctatggcagatgctgcttgttaaccaatccccattctcccattttttttttcttacaagagtctctatttttgcttggagtggcaatatgcctagcttaagtacttaccttcccaaaattctttgcagatagrgtggccttactacacaattctggccaggagacagaaatcaatgtctgctagagatttctgggaaagattttattttcctgattcaggcagctttcttaccctcctctttgttctttctctcctttctttcctggcaggaggcatgcagctggagtagagctgctacctggcacccatgagtgactagcttgtggaaggaagtcatatattaatgatggtggagcacaaagatatttggagccagagcctgaatggctctgagttgcccacctctggacctaacatttgggaggaaaattactctatttagttaagcctctgtaaatgcgtttttgttttttatttgaatgtagc

SEQ ID NO: 780841 - DNA, 536 bp, Homo sapiens
cacattgagatacatgttgctgctcactcactgatttctcttctaaacatggaaattccaggaatgtgaggggttcttttaatctcatactgcatagtgttgaccagaggtttcaacatgtgtgttttccttgattcaaccaattttaaagaagttaagctaaaatttaaaatcaggagattttacctaaaaatctgtttccatcttcctttgaaaaattgaaagataggggaacaatggattgacctactgctgtgcaataatggtgcacttggctgagaagcagctgttctcattagacaggacgtgagctttctaggacaccacaaattkgatcgctcgctttgtctctctaacactgaggctaacagttgccaatcatcatcgcaccagcacaaccagttcgttgttttccttttagtattgcaaatatttatctgctgctcatgtctctatcaatcgtggggtaacaaatgtcatgtgatgccaacacagccacatgtttcaagaacaatgaagagcgtatttgttcatgg

SEQ ID NO: 780842 - DNA, 536 bp, Homo sapiens
cacattgagatacatgttgctgctcactcactgatttctcttctaaacatggaaattccaggaatgtgaggggttcttttaatctcatactgcatagtgttgaccagaggtttcaacatgtgtgttttccttgattcaaccaattttaaagaagttaagctaaaatttaaaatcaggagattttacctaaaaatctgtttccatcttcctttgaaaaattgaaagataggggaacaatggattgacctactgctgtgcaataatggtgcacttggctgagaagcagctgttctcattagacaggacgtgagctttctaggacaccacaaattggatcgctcgctttgtctctctaacaytgaggctaacagttgccaatcatcatcgcaccagcacaaccagttcgttgttttccttttagtattgcaaatatttatctgctgctcatgtctctatcaatcgtggggtaacaaatgtcatgtgatgccaacacagccacatgtttcaagaacaatgaagagcgtatttgttcatgg

SEQ ID NO: 780843 - DNA, 547 bp, Homo sapiens
gccaccaaaaacttcccctctcttacaacctgtcaaagtattaatacaactcagtaaaggcccttatatactactgccacctcgtgctcatgtttttttcttgatcagtcgtcaaatcctctatcttataactgctcaattcaattgatataagtgagtagctagtattcagatagcttttcataaattattcaatttagttcttaagataagcctgtagattaagttctattattcctactcaaaagctaattggcttatccaaggtytgaaggccaaatccaaacccttcctccataccatatgtaagactcttattcaatcccccgaaccctctcattttccctatccatccattgttgtctagtgcacaatatttactatactttacaatataatatcggaaaggggggcattagagtgctattctcagaagttcatccgatggccagaggttagcagattcatgaaaaaaaaaaaaaaaaaaaaaaaaaaaaaagcaacctaaagactttttggatcttctgtttttagtaaagttatataa

SEQ ID NO: 780844 - DNA, 619 bp, Homo sapiens
ctactacaccatcttcagcatgtctgttcctttcttggccaaaatgcccctctctctctacttgcccccaccaccaattcaaatgtgggtatattcttatggtcttttatttttacacaagctccgcctcccaggttcacaccattctcctgcctcagcctcccgagtagctgggactacaggcrcccaccaccacacccaactcattttttttttcttttttgtatttttagtagagacggggtttcaccgtgttagccaggatggtctccatctcctgaccttgtgatccacccgcctcagcctcccaaagtgctgggattacaggcgtgagatactgcgcccggcaaaagtagatattttcaattacatcaaatctatagctatttctgtatctacaactatatgcatgtatgatgtggcagtgactcaatttcagtttctatattatttttttattttcactaggaaatcccgatgttgtttgccttctcatttagatactcacatctttaccccaacttaccatcttttccatgggggaaagagaaccctaaaacactgctttcatgcttcaattcagtcttttgtgtacggaacctttggactaagttttttt

SEQ ID NO: 780845 - DNA, 619 bp, Homo sapiens
ctactacaccatcttcagcatgtctgttcctttcttggccaaaatgcccctctctctctacttgcccccaccaccaattcaaatgtgggtatattcttatggtcttttatttttacacaagctccgcctcccaggttcacaccattctcctgcctcagcctcccgagtagctgggactacaggcacccrccaccacacccaactcattttttttttcttttttgtatttttagtagagacggggtttcaccgtgttagccaggatggtctccatctcctgaccttgtgatccacccgcctcagcctcccaaagtgctgggattacaggcgtgagatactgcgcccggcaaaagtagatattttcaattacatcaaatctatagctatttctgtatctacaactatatgcatgtatgatgtggcagtgactcaatttcagtttctatattatttttttattttcactaggaaatcccgatgttgtttgccttctcatttagatactcacatctttaccccaacttaccatcttttccatgggggaaagagaaccctaaaacactgctttcatgcttcaattcagtcttttgtgtacggaacctttggactaagttttttt

SEQ ID NO: 780846 - DNA, 603 bp, Homo sapiens
agatgagaagtctgagttttgtcatgcttcacatgaagacgtcactgtaagcattttggctgacttccccagctgagatcccagccaagagctagcattaactgccacatatctaagtgaagatgcagccagatattaccagttaccaaccactgagccattcaaagccacagagtaactcccaggcttgagtgatgaacttccagatatcatgaagcagaaacaagctgtctccactgtctgcccaaattcctgacccagmgtctagagtataacaacatggttactttacagttaaaagctgacgggtagaacatacagcatgactagaaagtttgcaaggcattgggaacagagcaaggattagagaatttgccagttctagctctgtcactcaattatccctatcattctgttaaaacgtgtgtgactttgggtaatttagtctgcaggctctcagaagacaagttttctaaaatgtaaaatagagggaaaagcatatcttaagattgtaataaagattaaaagtggcactgtggatgaatgtgcctgacatgttgcctgttacatatgagaataaattctcacagtgaaaatttaata

SEQ ID NO: 780847 - DNA, 617 bp, Homo sapiens
  misc_feature 568: n = A,T,C or G
ctctcccacatgacagagaaaagggtggtttttcagccagcacacatccatttgctattcccccagccttggagtgtgtggtctaaatgaaagtgtaggtatgtgccacagatctcctcctcagcttaatgcagagtgagtcaragataaactccagctctcagcttctccctgaagatagaaagtactagcacacacatctaacacctcaacttttccagctgcatcacaaggaactgacttctatcttgcctgtctttgggcattgataatacttgtcacaccctagtctcttgagggggcaataagaataaagacagttatttagacaaacacaaaagtttgagaggcacctagaatctctggccagggtgattggcgatgtctaccttccatacaggaccagtgtgaaaaacctgggggatgaggttttcttttctaatgagtagaagccaacacaaagaactaaggataataaagaaatgaatttttttccaaataaaagagcactataaacctccacaaccaatcctcatgaaatgaagatatctgacttacatgactgaanattaaaaaaaaaaaaaatggccacaaagatgatcactgaaggacaggag

SEQ ID NO: 780848 - DNA, 646 bp, Homo sapiens
tataggtagaaaaaggaaagtgacattcagaaaacagaagtgaggcacagaaataggcggattggttacagctcagcgtttgccttatttgaaactggttccacaagttggttacctttggctgaaactcagtgattgggacaagagtagrttacacatccaattaagttacaactcactgtgtatcaagaaacctttaaaatatgcaaagaggcagctttaggctaaacttagtttatttggcaagagtaatcaagattgggtgtgaaggttgtatatttcttgatgtatagaattacagcagaaagacaaaaacatttagaagtggaagcactgggataaaagtcccaattatgtgagaaaatcacctaacccacctgagtcctagggctcttgagattcatctgtttacctccaatgaatacagtatagattaactggaggagtgaagattggactggacctactaagttaagaactctgaactctagagaggaagaataaattagtcctgaaaagaaaaggttacaggcttgaaattaagcaaatttgtccattgatgtgggaagttagaggagaaaaagacagaagattaaaaaaatagatctgaatgagtgcctcatttctgacaggatgactgggaggg

SEQ ID NO: 780849 - DNA, 511 bp, Homo sapiens
gccaggccaagattttgtttgtttggttggttttgttttgttttgtttttgaggacccaaagcatcagaattgtacaaactattctctttcctattgcattttcccttgagaacatgaactgacaaggaacaaggtgaaggagtttgactggactttagggataatataactcccttraaagaagtgttaaaatgaaggagagattttacaaatggcaagtagcataaaaaatgggaattgtaaagaattagtatagatgatttttgactggggaaacttaaacactaattactttcagaaagaatttgagatgattttctttagtaggggtgatagtggtaaagcccttctatgaagtatgtgatggattggactacttctgagagccctttcttctcttaaaatcttacggtaaaagtttttgaagaatcatatttcaagaacttttttcttcttccacattagcatcttcagataataagaaacagatacctaatgaagcttctgcta

SEQ ID NO: 780850 - DNA, 550 bp, Homo sapiens
ataatatcttaactttgaatgtttcagtgatgaccatcaaggccaacacttcagtgtctatttattaatacactttgcaaaatattggagtacatatcaggtgcttctgcagcactgcaatgcgaatgtgccctgagagagtgttacagctgcataagttatagacattgtgtaagatatgacctgcaaggatctacacaaatttttaaagaaactggaaagcaattaaatagttggagcatagctaaaatatacrtatctggagcctgtagaggcatgatagctagtgagatgcactcatttaggattctttgtctagaggtcattatcctgtagctactacgatataagatggggttgctgggtttaagatctaatatcatctttagtcttgacctaaggaattcctattaccagcataaatttttaaaaccaaaagtgagtaaataataaaataatgaacagcaaatactgctaacatttattgaatgttttatatatgccagactattgtcctcgatatgtgtcacctctttatatcttcacaaca

SEQ ID NO: 780851 - DNA, 634 bp, Homo sapiens
atcaataggtgaatggataaacaaatagtgctatatccatacagtagaatactactcaacaataaaagggtaagaactattgatacatgcaacagcatggatgaatcccaaaattactatgttgagtgaagccaggctraaagagtatatattccataattccatttatataaaattctagaatatgcaaactataaataagtgcttatctgggaggagagagttatgaaaagggctatgaggaaactttaggggtgatgaatatgttttttgaaaaatttttagctttgagggtacacgtgaaggtttgttacataggtaaacacgtgtcacaggaggtttgttatacatgttattacatcacccaggtattaagcccagtacacaatagttatcttttctgcttttctccctcctaccaccttcccctccctcctaccatccagaccccagtgtctgttgtttccttctttgtgttaataagttcttatcatttagctcccacttataagtgagaatgtggtatttgcttttgtttctgcgttagtttactaaggatgatagcctccagttcccttcatgttcttgcaaaaaaacatgatctcattcttttttatggctgctgatggatatc

SEQ ID NO: 780852 - DNA, 628 bp, Homo sapiens
ggctttggggtcaggcccgggttcgagtcccagccttcgccgctgcgtcgagtgacttaacctctcctagcttcagtcacctgcagattgagagtctactactttttactgctcagaacttcctattccttagctgcaaaataggcagaaataagcataaaatcctgyctcaaagaattgagaaggttaaataagagaacccggtaaaaacatcgatcacacagttgttgtagacatacaacaaaatttagttccctttaaaacacgtagtttgccaccatcttaatgataacagcagccaacatttagataggacttatgtggcagatgctactgtaagtgcttttatgtattacatagaataactcatttaatagtcacgatatccttatgaggtaagtactattatccctattttatatatgaggaaatcgagggctggaggattcaaataacttggcagttacacagctgtggaaacaagattcagactcacaaaactgatgccagagtccattcttcttttaaacattttacctagtagatgtatgactttgaacaaaccacttttctgaaatttaggttcccacctcacaaataataactcacagggtatggattaagtgaa

SEQ ID NO: 780853 - DNA, 640 bp, Homo sapiens
tcctgaatggtgatgccacattctagccatgatacccatctacctacctacctcatattagagctccagcatctgcaactaggaaattaccatgtactttatttcccttcttcatgtggggcttccatttctcatacgcaattttgggatattaataagtacttgagcagtagtgytatagtgagaaacaaatgagatggagtacatggaaacagcaaacactgggactgacctagagtaaggcattcagtaagtgtttgttgaaactgaaatctatgaatgatggcaccatttttttcataatgcctgtattacttaagatggagctgtaccagaaaaccatcctgctggcttttcctctcatcacaatgctgccctacagctgctgtttaaaaacctcaattggaaaaatcaaaatgatcatctttaggagcctctgggaaggcatttaacctcaagttattgcacaacctgttgatccaccttttatcaaagctcactccagacacttcaaatgtccatgaagattaagcaactaagacttcttaaaggcacaaggggatttacccactcagcactgcagtcagaccagtgttccccagtcaccaaacagcatcagcgcacataactcttttgtttc

SEQ ID NO: 780854 - DNA, 640 bp, Homo sapiens
gtcaagatatttcaaacatcagaaagctgctttttcacctgcccagattccacaagtcccagttgatgaaatgacatacagagaatatgtgaatgcagattctgctaatgataaccatagccaaaccacatgcctgtgcagtaatttttcttactttatcttattgcaaaccctttagttggtggctagggacggtaaccttcaagatcacacagcccaaaagcttcattctattataagtggagaagaccaaagccttactagagaatgtctcatggcaaattattggtggaaacatgatgacctttgcccacatccttaatgtccagtgttttttgatttatgccactaaatcagtaaagatcccaacaggacacggatgtcccactctgaataggtgggtttattttcaaaaagaataaatataagtgtgtaagtgaattgtaggggwagaaaaagagatggtatttaaactgagtctagcagtgacagtgccccatcccaaggcccagtgaagcaagaaatgaaagaaataaatctacaaaaagagacacccacagaaagggctgctgaaaaagagcaggttgccctctgtgaaggggcacagccagcctgaaacttcacaggagttggggaccag

SEQ ID NO: 780855 - DNA, 606 bp, Homo sapiens
aaattcactacgaggactttcaaaggacctggaatgcaacagattagcaaggactagaaatctagatgcaatggctacttattctacatggaatagatgatgaagctctgtggtcagagggcgcaagttttgaagcccaactcccacttacccacttttgggtattcggaggctgaattccgtcatctgaaaattgtcattacaatatctacttcactatgctatcataacaatcaaacaaagcaaatgtgtaaaccacttgcataaggyctgacaaatagtagaaacccaggaaataaatccgcatttccatattgtctgaagcgtagaggtaaaaatacttcacaacctccccttttgttagagggcaatggccccaacactcctgataatcttctagtttttgcaacttagctgagaatattggacaggcaggaaaaaatcatgcttgatgctagttctgccatgctctttgcctgaaattttcttattactgtgcagttatcagagcttttcaacgagggggtgactctggaaaaatctatgcttttgtctcaatactaatttacaagggcgtttttttttttcatgataaaacaaaaacaa

SEQ ID NO: 780856 - DNA, 448 bp, Homo sapiens
tcaatgagcattagaaataatttaaaaattttaaattacacaaaaagttcactgacaagcatttatcccatttacctttactcagttcttttgtttttagcagtttatctacattccttctgaaaactgagatatttaacagagctagttatcatttcaggttatttccttagtaaccatcattttatagcctgtgaatatgaatattaggggttaacttaagaaccttaaagttaaacacatgggcgttttgccaaaaactcagaaaattcagctgtttttattaaaccaatgacatttarttagtcataattgtcaaaaaaattacataaagattattttgttttggctgggtttatagttttataaccttccatgtcaaaccttgagaccctaaaatatctgacacagacaaatataaaaaccagaaaaatatgtcctgacaatt

SEQ ID NO: 780857 - DNA, 676 bp, Homo sapiens
tctttcaccattattctgcactgaacatttctactcaaaagtaatacaggtatcactcctgcctctgtgatctaatggccttttctatatagtgccagggttccctttacctcattgaccccaaaccataattttacttcctaaaatttacttctagactagaactcttggggagagtgaatcattggatctctggagtctccatttctgaattatgcaagaatggtttataaatgatactaatgagcrcttacatccatcaaaaatcatgatagggacttcatttaatatgctatttaatttaatgattacaaaatcttatgcttcagatgcttttattatttccattatacagatgaggaaactcaggattagcagataattagcctgtcagtttcatgcacctattaagtggcaaggttgagatataagccctggatcaccttattttgtggctcaaactcttaataattataaagacattgcctaaaggattcatcatatctaatgaatattagataactatgtgcaaggtactgtagtaagtgctttatatgtatctgttcatttaggcttcacagctctgagataaatatcattattatctccattgtacagatgagaaaatatgcacagcacaaaacatatgttgcccaaggcttatgtcagtatgtgg

SEQ ID NO: 780858 - DNA, 676 bp, Homo sapiens
tctttcaccattattctgcactgaacatttctactcaaaagtaatacaggtatcactcctgcctctgtgatctaatggccttttctatatagtgccagggttccctttacctcattgaccccaaaccataattttacttcctaaaatttacttctagactagaactcttggggagagtgaatcattggatctctggagtctccatttctgaattatgcaagaatggtttataaatgatactaatgagcgcytacatccatcaaaaatcatgatagggacttcatttaatatgctatttaatttaatgattacaaaatcttatgcttcagatgcttttattatttccattatacagatgaggaaactcaggattagcagataattagcctgtcagtttcatgcacctattaagtggcaaggttgagatataagccctggatcaccttattttgtggctcaaactcttaataattataaagacattgcctaaaggattcatcatatctaatgaatattagataactatgtgcaaggtactgtagtaagtgctttatatgtatctgttcatttaggcttcacagctctgagataaatatcattattatctccattgtacagatgagaaaatatgcacagcacaaaacatatgttgcccaaggcttatgtcagtatgtgg

SEQ ID NO: 780859 - DNA, 614 bp, Homo sapiens
tgtttgtttgtttaatacataatttccataaagtaaaatgtacagctagataaattttagcatgtataaaacctgtatatctaccactgagatcaatatatagaatatttccattcccatgaatattctcctatgctcttttccagtcactaatcaccattttgacttttattaccaaagatttttgtctattygtctattcttgaacttcatacaaatagattcactcagcatgtactttttggtctgccttctttcaacataatgtttttatatttactcatgttattgaattaatctgtagcctattcttctctactgctatgatattatattatattatattatataaatataccacaagttagttacccattttctacttatggatatttgggttgttttcagtttttgatattattaataaagttgttatgaaaatccctttacaagtctttttgaacttatatacacatttctcttaggtagaaagagagaaattgccaagtcacaataggcataggtttaatttcattaaaaactcccagttttcaaactgattttacactccaaccagcaaggtatgagtcacagatgcttcatatcttccctca

SEQ ID NO: 780860 - DNA, 658 bp, Homo sapiens
cccactgcgtacctattgattagtctttcctgtatgtagctctgaaggaagcctcacttctttcctggcatagggagttccttaaacaagagtcagggactctggatgcccatttcctcttaacatatctattattctgggatagcaaacagaggaaagatttttaatagaagttgtttactaacttcaggaaattgccccttcaggrtttgaacaatctttctaatgttagagaaggcttttcaccctcaaagtaacacgtgaataaaagtaaacacaccacacacacacacacacacacacaaacacatactcaggcagagaaacatatgagaggtggggaagaacttaacggtttgaaacaaaaatctatccattttcctctagcaaatgaagaaaataggctacaggttcaaattagaaaagacagtaaaggaagagtcttgtcttttttctgattttccaacttaaggaagggtagttttaaatacttattcccttttgttgctgttatcatctgtttgtatatgttacacacacatgcacatgcacacacacacaaacatgactacaggagaacaagttacccacattttctcaaactactccctttgtgaaagagatacaaatcacccccaagttttcttatttaaaaagc

SEQ ID NO: 780861 - DNA, 587 bp, Homo sapiens
tgttgtattttcgaggagttctttatatattctgttttatgtcatttgacatatttgtatattgcaattatattttcccagtttgtggcttgctttttcattttcacagtggtgtcttgaggagcagtttttaatttaaatgtaatctgttttatcaataatatttgtttagaagtaaacttattttgtgcactgtctgataaatgtgtagtttccatggttataaatatattcttttgtattattctgaaaatrttgtagtcttactatttatgtttaggtttatgacccatcagaaataaatattttttgtatttggtataaagtaggattttcaggtaatatatactcattgttatctagttgttacagcaatagttgtcaaaaatattttcttcattgaattttcttgtcatttttattgaaaattaattgaccaattatgtgtgactttttttctggattatcttgttaaaagaaaaacttgaaatgaattaaattgacagactttatttgaaacaagagcaattcatgaattgagcaacacttagaaccagaggaggttcaaagacctttgcccaacagag

SEQ ID NO: 780862 - DNA, 587 bp, Homo sapiens
tgttgtattttcgaggagttctttatatattctgttttatgtcatttgacatatttgtatattgcaattatattttcccagtttgtggcttgctttttcattttcacagtggtgtcttgaggagcagtttttaatttaaatgtaatctgttttatcaataatatttgtttagaagtaaacttattttgtgcactgtctgataaatgtgtagtttccatggttataaatatattcttttgtattattctgaaaatgttgtagtcttactatttatgtttaggtttatgacccatcagaaataaatattttttgtatttggtataaagtaggattttcaggtaatatatactcattgttatctagttgttacagcaatakttgtcaaaaatattttcttcattgaattttcttgtcatttttattgaaaattaattgaccaattatgtgtgactttttttctggattatcttgttaaaagaaaaacttgaaatgaattaaattgacagactttatttgaaacaagagcaattcatgaattgagcaacacttagaaccagaggaggttcaaagacctttgcccaacagag

SEQ ID NO: 780863 - DNA, 624 bp, Homo sapiens
tatacacccaattctcaatatgtagttcatagaccaacagcatcaacatttcctgggaacttatatatgcaaagacccagaaatggtaaatcggaaactaatgttgcactccaacaatctatgtttaataagctgtggtgtctttttaatatgtaaacttgaataggttgaactaatttcccagaatctctttcctgtaaatttataattagggaggactataacacagactcttgtatgagatttccagggtgggattgaaacagtacccattttgcagatcacacatctygacaccgacctactggctcacctcgtggggacagtcccttttcatgatctccagtttgtgtttgaggtatctagcttgttcttgctctctccagctttacataaaactcataaaacttcctttcagattgtctgccctgcgaacttcaagtttcagccgcagacacagagaaaacagtctcgcagagtgcttagccaacttccacaattatgtaaggtcaagttcctgcaataaatccctgcttctctaattgaaccctgaacaatacacaagtattcctggtgattctgatccatgctaaagtttgagaaccattgctatagagacattgc

SEQ ID NO: 780864 - DNA, 624 bp, Homo sapiens
tatacacccaattctcaatatgtagttcatagaccaacagcatcaacatttcctgggaacttatatatgcaaagacccagaaatggtaaatcggaaactaatgttgcactccaacaatctatgtttaataagctgtggtgtctttttaatatgtaaacttgaataggttgaactaatttcccagaatctctttcctgtaaatttataattagggaggactataacacagactcttgtatgagatttccagggtgggattgaaacagtacccattttgcagatcacacatctcgacaccgacctactggctcacctcgtggggayagtcccttttcatgatctccagtttgtgtttgaggtatctagcttgttcttgctctctccagctttacataaaactcataaaacttcctttcagattgtctgccctgcgaacttcaagtttcagccgcagacacagagaaaacagtctcgcagagtgcttagccaacttccacaattatgtaaggtcaagttcctgcaataaatccctgcttctctaattgaaccctgaacaatacacaagtattcctggtgattctgatccatgctaaagtttgagaaccattgctatagagacattgc

SEQ ID NO: 780865 - DNA, 624 bp, Homo sapiens
tatacacccaattctcaatatgtagttcatagaccaacagcatcaacatttcctgggaacttatatatgcaaagacccagaaatggtaaatcggaaactaatgttgcactccaacaatctatgtttaataagctgtggtgtctttttaatatgtaaacttgaataggttgaactaatttcccagaatctctttcctgtaaatttataattagggaggactataacacagactcttgtatgagatttccagggtgggattgaaacagtacccattttgcagatcacacatctcgacaccgacctactggctcacctcgtggggacagtcccttttcatgatctccagtttgtgtttgaggwatctagcttgttcttgctctctccagctttacataaaactcataaaacttcctttcagattgtctgccctgcgaacttcaagtttcagccgcagacacagagaaaacagtctcgcagagtgcttagccaacttccacaattatgtaaggtcaagttcctgcaataaatccctgcttctctaattgaaccctgaacaatacacaagtattcctggtgattctgatccatgctaaagtttgagaaccattgctatagagacattgc

SEQ ID NO: 780866 - DNA, 607 bp, Homo sapiens
ttgtattttttttttaattttattgatctccattaattgtgcatgttctcctacaaagaggtttcattctttctaaaatacagctcaatttggttgtaatggaattgtgaatcctctaacattacatggcaatatttcacttttctagacaaacatgaatatttttctaataccggaaagtaaacaaaggttcaaaatattcattaaagtargagagctacagggtccagaaaatgccatgagacatctgcccacacaatcacataaggcagtatgtagactattacacaacacaaatagtcatatttcccaccttattttaatcctgaattttactttatttggataacatttaaaaaatagatttgaagcacagacccttaacacatctatgatattctctctaccttgtgaatttcagtgaaagaaagatttaaaaccaggctgcaaaccattgacacttggaattgtatgagaatgaaaacacatacacacacacacacaaacaactctgtataatccattatatgtgagtattttattcatgcatgcctgtttattacaagaacaaaaaacttgctctccaagaccagaaagtaggacaaaa

SEQ ID NO: 780867 - DNA, 638 bp, Homo sapiens
tttcaactatgttcttttcaaagaacccctattttttattataacttttgttttaggttaaggggtgcagatgcagagatttgttctatagatcaactccatgttgtgtgggtttggcctgcagatttttctgtacaccaaaaaagccttgaattgatatcctctatgtacacattccaatgtgcataataccttcttcaagaactggagagatgatagatttgacattttcttgagattattcatcatttttgagtgccttcaggctagaaaggaggatgtctttagtccctaagtagaaaaggaagaggttatatgtatatgaaatgatgtatatgtatataaaatataaatataaacttatttcatatacatataacctctctctcgatatatatatatatatatacacacacacacacacacacatatatataaaagtgtatctatgtatatataaattgcaagggcatgattttaaagggcagtrtgtaagtactcactagtaaatcttattatattattatattctggttgtttgcttcactgtggcacaattctagcccatttgggaccttatgtttcaggtagtaagcatagtaccttatagatagatatcttttctgatcctctccctc

SEQ ID NO: 780868 - DNA, 625 bp, Homo sapiens
gctcatacagcacaaaaggacaaaccattttttgtatagtaacaactactagaaaaatattccttccatattttattgacttggagctagtctctatttggtaaagtatttatattattcacttttatttcagtagattttacctgaaattatatgaataaaattccaggaaaacactgctctagaagcaaataagtggtcaataatttgtatataatcttataataagcttgtaataccaagtaataccgtggacctgggttgggaaggtatttaatgaggacatcactctagtccagcgctgagccatgattttataattggttgaaagactccttgaaaactacatwtccagccatattttcatggttgattcacctgttttctaacacatataagatttaattcagggcttttagttaaaaggagataactagggttttccaggtatgagatattaccatcagcaaacagtgaaaatttgacttcctcttttctaatttggatacgttttatttctttctcttgtccaatttctctgagtaggacttccagtattatgttgaataagactggtgaaaattggtgtctttgccttatttcagtttcttgggggaatgcattc

SEQ ID NO: 780869 - DNA, 510 bp, Homo sapiens
gtattgaagctttagtctcccttaaattttatttaaacatttagtaactttgctttatctggataagctctatctggagcagttctcctaagtgctgctcactgccgtcaagtcatttataacccatcaacattgcacttagttttatctactcatgttttatcttcttaaaggtaaggatgctattgggttgaattcagtaagacatagaagtgaattttcactgccatcataaaattctgcctggttcttactgtgtcatggcaaacatttgtgagattcttagtttatgytactagttcaatgtgtactcaaagtctaactaaatcacaaagaatgaagtttcaattctctccccagaataacagctatgttgggaaactcacagtcacctgattggaacacaaagtctatattcaatggcaaaagaaaccaaatcacttaagtcaggataataaacaatcacaatgtagaaaaaattaggttgtgttacatatagttttttttaac

SEQ ID NO: 780870 - DNA, 611 bp, Homo sapiens
gtgatatctgggatcccacctataaagactcccagacaagattgtctgttttcatgtagagagctaaccccgagagaggtccatctcggctgccctggttatttttaacagtggttagaaaggcaactcctgaaataaaatgtaggctgggacaattataaattattctaaaactcattgttggtctcaccatcttttacctcaattcaaatccaagctgaatctagatggttctttattgcgggatctggccagcagcccgcaatgcaatggcgctgtctctttgttcccaggcagatcggcaggtcgagaaataatagacacacacaagatagtgaaagctgggtacaggggsgtcactgctttctggtcccatggtgccaataatgcactggatataccagcatttattattaagtttaatgagggcgggggtaggttagtgagggatttagggtcatttgattatgaggtgagatggtcacatgaagatgaagtaattctttaacataacatctgtatgtagaagtactgtacagcatttcatcttttattccgtagcaatagtttcagggggtctccctacagttcttcattctgaaactttaata

SEQ ID NO: 780871 - DNA, 619 bp, Homo sapiens
cagccttgctttttttctagacatccaaatataagaagctcaaagaacaactgggaaactcatcacaggaagatcatcaccttggcacacagtcttcaggttatctaaagtcaggacaaagaaaaggatctttagagctgtgaggtaaaagcatcaggtaacccatgaaagaaaaactattacagtaacaacagatttatcagtagaaactctacaagccagacaggattggtgtcctatttttagcctcctttaacaaaataattttcagccaagaattttgtatctggcgaaactaagcttcataaatgaaggaaagacacagtcttttccagacaaacaaattctgagaaaactcggcactaccaagccggcattatgagaactgctaaaaagagctctaaatcaaaacaaatccttgaaayacaccaaaatagaacctttttaatgcataaatttcacaggatctatataacaataatacaatgaaaaaagaaacaaggcattcaggcaacaaatagcaagatgaatagaatagtaccttcacatctcaatactaacgttgaatgtgaaatggcctaaaggcaccacttaaaagacaaagaatggcagaatgaat

SEQ ID NO: 780872 - DNA, 607 bp, Homo sapiens
tatttgcgaaataaacaaaagcaaatttccacaaagccaccttgtagataaactaaagatcaccaaagaaaaagcgataatattaaaatcaatcaaacaaaattaagacagaatacttaaaaagaaatatcaattcagtttatgtgtcatcagcaacaatatagaccagaagacagtggaggattatcttcaatgtgatgaaattaaacaaattttctacagttctataaccaactatattattttacataattagttcaactgagcctatgtgtttgtatgtgaatagatatagaaaaaattttaaactatagtcatacctagaacatagaaagtttgaaacaaacaaaagcaccygggaaatttgaattaaaagtaagatgtaataaaaaacaaaatagactttcatcaacagaatataataaatctgaagtgaaatgtagccaaatgaaaactttaaattatatccaaatacatttgaccaggttaataaaaaaacactgacaaatataaacatagtggaaaatttaatgtaccttcacttaaaacttgtagatgcagaatacaaaaaaaaaaaaaagtaaggtgatgatatagagtattttat

SEQ ID NO: 780873 - DNA, 600 bp, Homo sapiens
tgggctaccatttgaagcagacacattatatgctctctaggagggtacaagctcagacactaaggcatcataggaatatagaaaggaagacattaaaggaatatatttagtcaagttgaagcctgaagtgaggattgtgggatttgcacattgaagggagttactgatgtttttccttaagttggggagaacttaagaaggtaagaactgctctgctaagtcagataaatgaacttctaagctgaggcttctctttctaaatagtaatatcacagggattctgtaacaaatgagatttccacagttgtttgaaatatcaaatatagaatacttatttgcaaaaaaaaatgggggcaggcacattggataraaagaacatgaagaatgtagcttaaaggaaataggagttggataaataaacaataaatatttggaaataaagtggtcttaggaacagtgacagtggttggtgaacaggaagagatctattagggtggagctatcatataaagaacttagaggtggttgagaatcttagcctttatttgctgtgagattgcaaatttcttaaggtcaactgaggatgttaatttagtaaat

SEQ ID NO: 780874 - DNA, 600 bp, Homo sapiens
tgggctaccatttgaagcagacacattatatgctctctaggagggtacaagctcagacactaaggcatcataggaatatagaaaggaagacattaaaggaatatatttagtcaagttgaagcctgaagtgaggattgtgggatttgcacattgaagggagttactgatgtttttccttaagttggggagaacttaagaaggtaagaactgctctgctaagtcagataaatgaacttctaagctgaggcttctctttctaaatagtaatatcacagggattctgtaacaaatgagatttccacagttgtttgaaatatcaaatatagaatacttatttgcaaaaaaaaatgggggcaggcacattggataaaaagaacrtgaagaatgtagcttaaaggaaataggagttggataaataaacaataaatatttggaaataaagtggtcttaggaacagtgacagtggttggtgaacaggaagagatctattagggtggagctatcatataaagaacttagaggtggttgagaatcttagcctttatttgctgtgagattgcaaatttcttaaggtcaactgaggatgttaatttagtaaat

SEQ ID NO: 780875 - DNA, 516 bp, Homo sapiens
taatcccagctacttgggaggctgaggtaggagaattgcttgaacccgggaggcggaggatgcagtgagccgagatcgtgccattgcacttcagcctgggcagtaagagcaaaactctgttgaaagaaagaaagagagagagggagggagggagggagaaaggaaggaaggaaggasagagagaaaagaagagaaaagaggagaggagaggaaaagagaagagaaaaggagaggaaaagagaagaggaaaggaaaagaaaagaaaagaaaagactgcctattggatactatgcttattacctgggtgatgaaataatcagtacaaccaaacacctgtgacatgcaatttactcgtattacaaacctgcacatatacccctgaacctaaaattgaaaataaaataaaataaatttggaatatatttggcaacacttgatgactggtatgtgaatatgtaatggatgtgaggacatactctatgaagcagtctgaaacttcattgcacataaagaaca

SEQ ID NO: 780876 - DNA, 609 bp, Homo sapiens
tatcctccatgcatgggcatggtgatacagcccaatcagatgtggtgagaggcatggtaggtggtggtggtggtaagcaaattgtgttcatcttcacttccttcaggtctttactcaaatgtcaccttaccagggaggatttctatgtcacaccattgaagattgcagcagcccctgcccctaarttccaacacctccagtattctccttccttccttttctccatagcactatcacctatcaccatcagatatattgtggatttttgtttatcttctttattaattacctcctggtctggaatctaagcttcataaagggacagtttttgtttttttgttatgttatcttaattatttatattcactgctctatccccagcatctaggaggcaaatagatattaaacaaacattcgttgaatgtataaatcgttagtaatttttaggcagcaaggtataagtagaaggaattcaaggatattattgctatttccataatctattttatttgttcttcttgaaagacaatgtgactctgtgaaataggggcacttactccaaataattacaacatttttttcctgaggaattggactagaaattgtgga

SEQ ID NO: 780877 - DNA, 556 bp, Homo sapiens
ctctcacacacagggctaatcttgcaaatgattatattttttaatactctttctatcacatttctaggatatactggaaatcactttctttggaattagacccgggtttgaagaccaattctgtcatctgtgattatctttatgacttgggaaatttacttaatctctctgagactcagtttactcatctgcaaataagactaacactgaccagcttakgttgttttattaagtgagatgatgcctttaaagtgctgacatgaagtaggtattttccaagtgaactccccaggagtttttcttcattctgcttttgaggcacctcgcccagtttgggcatagtgctgaggttcattatgaaagaaactttgcctcctgtgttcttaaaactaaaagtcattcctcgtatttaccatttggagcatgagattgttcacttttattttaatcaacgggattatgactatgcttttttattcagattctgaataaccacttaaataactgccactttatagacacaaaccagactgctgcacattttcttatccattgt

SEQ ID NO: 780878 - DNA, 615 bp, Homo sapiens
tctctgtatggcagatgcacctgagaggttttgtaaggtagataatctggtaggggcaacccagagattcatcccttatctatgataaacatctgagccccatcccatcccatggaacatgggccatacaggagattgaagccctgagttttcagttaaatgaagaatgccaggtggaggtcgttggrgggggtgttaagtgaaaatgctataaactgcatgatgtttacaggcagttgcagttttcctgaccagcctgttgccactggaccctctcccctatatgttagcatctgataaagccgcatgtctcgtttactagctctgggtctcttctttggcctcttgagcctggtggcttccctattgaggttaggggtttgatacaatatcacccttcaggttaggatatgaatgagaattcagaggtgggattagctttctgacagcagaggtccagctgggaaggcaaggagtgacatactgctagtctgcctagaagtttgtaccttccccacacacagtttactcaacctagataatgactggatttgaatcataatctagcctttatttgcattgtcattttggacacctcatttaatctgaatctca

SEQ ID NO: 780879 - DNA, 629 bp, Homo sapiens
ataattctccctaaaaggaaccagcgctcccttggataaatggttgattctagggctgggacaagaagtataaaatatgaacctggagcatcttgtagcaccagaaattaaggaattgctcaaaaaacaaaacaaggattacatgtcaaaaggacacaggagccaacaggaagagcttctaaaggcccagctggaataatttgacaacaaaatggataccattgtattagattataacccaaagcatactataaatatccatgagtcgataatcatatgaataaataattgaatatagaataaatatgaggaaaacaaamaaatctgtgcaaaagaatgccaaataacttattgatatccctttctcaaagaggtagagcataactcttccctccttaagtatggcctgcacatgataacttccttccagagccaattgtgtaaaggagggaaaaaagtagctttacagtggagaaatctgtaaaacactacctcaaccagtgaatcaaggttaacatctacagtgacaagtcatgatgacgggatgatgtgataaaagtggcactgtaactctatggtcttcccccctcaaacccataaaccatgtttaatcatgagaaaaacttaag

SEQ ID NO: 780880 - DNA, 627 bp, Homo sapiens
tcagagatgctgagagcagtacagtgacacgtggctgcagggccacgtataagtacaaagtattgattaaaattacatcaagtgcagctgctttctgcggcaatttaacggccaaagtgggagaacattagctctgtgccaagtggcagcacaattctgacagccatgtagatgtcctcaggtcacccacctacagacaacttggggctaaatgaaaaggctgaaatcagatctagtygtgatcttcatttctttttttcctggaagggtcagtaagagctttcaattttacattttttcaacttttagtcgaccctaattagatatctacataccttacaaattataatttggctgtaacagaaccatgtctcaaaatggacattccaaagtggaaggaaaagcttgtcatcaccaccatgattttgtttgcttcactgataagattttgaagcatatcccccttccaggcaaatatttcaaatcatcctttctggacaatatagtaacatatcacattactttaaaagaattaggggagaaaagcctaaacatttagtctcttttaattcaggataggctactgaagtttatttttattttttgatttttttttctggagacgat

SEQ ID NO: 780881 - DNA, 474 bp, Homo sapiens
cccaaacagtgaatgtgaaaaggtggaatttgtgaacctggtgctgctcttctgcgagttcatccgccatgatgtcttctcccatgacgcatacatgtgtaccctcatatctcgaggagatttgtcagtcactgcctcaactcggccgcggtcaccagtaggggaaaatgcagatgaacactattcaaaggaccatgatgtgaaaatggaggtatggccctggatatgatgccccactcccccagaaactaaactctactgggaaccatgttcaaatgggtcatgtagtggtagaagagtgatggctttttgttgtattcttttgccccagtggttrtttatctctccttctcgagcaggaaagatatttacactgtagcttcttatgtcttccagaatttccctttggatactataaaactgtaatgaaaataatctgacaggccataacatttttcataggattggaattat

SEQ ID NO: 780882 - DNA, 644 bp, Homo sapiens
atctttacttttatattcctttaattaaatgaataaaaatgtcaggtgccaaagatgcaaaattaagacactgccctgggtcgtcaacagctcacccaatctagttgggagaaacaactggcagacaattaaaaatcagtatttatgccagaagttgcaattattttctatgaaaaatcagatcttagcgatgaccatgagcaataggatatgaataactcccatgagcttagtgtyccaataatggaacacaaggtataaacaagttaagcactactcctggttgtacctcccacagtatttaatacagaaggttactaataaattattagttgggtgactggataaacagatggatagaaagatgaatgaatggagatattaatagtactttttggtaacacaggaaggtgagtttatcctgcatagggagggaggggatgggtggtccaggaataacctcccataggaaagggtgggccaactgcatctgaaagtagtatgtttccacagggataaacacacaggttaaatagaactcagacaaattacacagttatgtaataatttcaaggtatgttaaaagaatcaaaatctgtgacttcaaagctatttttacttaggatgagggtaaacatttaatt

SEQ ID NO: 780883 - DNA, 467 bp, Homo sapiens
tatagagctcagtgggaaggattggaacatggggtgaagtgtaatgggaaatgagattagaaagggaggaaaagttcagatgatacaaagccctatgtttcaactaatttgtatggacttgatcctgtaagcaattgagattcattaagtttccagtgtcattttgtttaaagctatctgatagtaatgtgctgcaattcagcatccagcatctggctttcctcctggtttgagctacattgcatgcagctgcacacaaatatctcacaaagrtctcttttcatatagacaagagagaacagagactcctagaagcaggcagagagaaaaagacaagtgatcatgaaaattattaataattattaatataagttctgagatatttattatgagtaaaaccatacattagatggtatgaattctatacaaataaaacttacacaaatcatctattaaactaattcaat

SEQ ID NO: 780884 - DNA, 518 bp, Homo sapiens
tccggaacacaacatcacattcagttgtaatgtctcctttgtctcctccagtttttgattatttcttagtcttcccttgttttccttcactttgaaacttctgaatagtactgctcacatattctttgtagaagatctagaatgtccctcagtttgggcttgttgatgttttctcatagttaggctgaggttatggatttgggaataccaccgaggtactttcacttwtcacatgatattagggagtaaatgatactaacttatcactagtgatattaaccttgatcacttgattaaggtagtgcttgccaggtttctcatgcttgccaggtttctcgtgcttgccaggtttctgtaaagctactattttccctttccatactttattctttgcaaaggagtctttaaatccagcctacactcaaggagaggataattatatacttctcaggagtggagaataactatacatattgtttcttccattcatacttaattatgggaaacaagaggtagta

SEQ ID NO: 780885 - DNA, 619 bp, Homo sapiens
tcccccccctgctggggctgagtcctggagggggtggaagagccccccatgtagcagctacaaatttcagttcagaagtccatgagatgtggcttgttgtcttttctcatgatcctgacacatctggatcctatcccagggtgtgtctcactccagggcccattcaccatcttggcatctgtagaagcatcccctgccctcccctcggccacggagtcatgcagggagctgggcttgatctgcctgcaggcctgcttcgagtcagcctcattgggcttcttctatgccataccagttgcaggaaacactgtgtggccacctgcagccacagcccctggatacctcagcatccctttcttcctgggactccagsagggaaagctgctccacgcccctctgctctcagatcctttccttcccaggcataactccaggaggcaggcgggaaggaagcccccaggataggagtccattctgtatttaacaggtattgattgagtgcctcccttggggaaaataaaaccaaaaggtccctgcccttacatagcatagagtctagtgatgggcaggccgattgtaaataccatagaaagtaaaactgcagagtatcttggcagag

SEQ ID NO: 780886 - DNA, 605 bp, Homo sapiens
ctagactaaacccctggtgtttgaataacattggaagcatattaaaaataaactctatctttcacagatatatacttaatttgttttaaataaattgaggtgaatagctgatttgaaataatcaatagtggaattaggagcttggaatggttggatactcattttaaaaaaggtaaattgtgaggtgataatgcttaagtcagattgatgggtccatgagaaatttaaatggaatttagtatgttttaaaaaagcagaataagaactattcttatttatattaycctttagaaagtaatttatctgccaagtataactgccacaaatgcttagtatgtcaaaaagaatattctttatgtttgatttatttataaggcaacttcaccattccatggatctattttccagtatagagaataaatgttatttcaccaattaacccactggtcttatcaatttcatgatttttgtcctttatttttcatgatctcaactactaacagaatacattgtaccagctgcatttctaagaggcacctagtcaaaagtcactggcctgttgctacataagtgtctaccactctcagatgtttatagatcaagaa

SEQ ID NO: 780887 - DNA, 619 bp, Homo sapiens
  misc_feature 88, 89: n = A,T,C or G
taattagatttcttaagtagatgaatagataattagatacatgttggatggacataaatacaggtaaaatattttaattaaggctcannatattattttatcaataacatttctataatatatctcaagctgctagaaatagtcaaaaagttggtatgtttaagtcactatgaagtcttaaataattagaactaacagcgttaatcactgttatatataaatgttttaaatcattaaagattcaaaagatcatcactaaaattgaaagagagcaaaatggggaaaacttgaacaaattttgacattgttcttttttctgagtttattttactttcacttataaaggtggcaaaagtttgcaaaagcttgctacacttaagataaaatttgccatacttgagaacactgatayttaaatttcttttatatttgcttgttatgatatataattaaattacacatttaatgaccaagaagcttaggttcaaacctaactggtagttctgtaacttcgaataacatttgagtaaaattccccaggataatatgttgctaagtagttacaggctagaaatgctgccatttattcactttttatgtctcttccttatgaaaacct

SEQ ID NO: 780888 - DNA, 619 bp, Homo sapiens
  misc_feature 88, 89: n = A,T,C or G
taattagatttcttaagtagatgaatagataattagatacatgttggatggacataaatacaggtaaaatattttaattaaggctcannatattattttatcaataacatttctataatatatctcaagctgctagaaatagtcaaaaagttggtatgtttaagtcactatgaagtcttaaataattagaactaacagcgttaatcactgttatatataaatgttttaaatcattaaagattcaaaagatcatcactaaaattgaaagagagcaaaatggggaaaacttgaacaaattttgacattgttcttttttctgagtttattttactttcacttataaaggtggcaaaagtttgcaaaagcttgctacacttaagataaaatttgccatacttgagaacactgatatttaaatttcttttatatttgcwtgttatgatatataattaaattacacatttaatgaccaagaagcttaggttcaaacctaactggtagttctgtaacttcgaataacatttgagtaaaattccccaggataatatgttgctaagtagttacaggctagaaatgctgccatttattcactttttatgtctcttccttatgaaaacct

SEQ ID NO: 780889 - DNA, 643 bp, Homo sapiens
tgaacaaattttgacattgttcttttttctgagtttattttactttcacttataaaggtggcaaaagtttgcaaaagcttgctacacttaagataaaatttgccatacttgagaacactgatatttaaatttcttttatatttgcttgttatgatatataattaaattacacatttaatgaccaagaagcttaggttcaaacctaactggtagttctgtaacttcgaataacatttgagtaaaattccccaggataatatgttgctaagtagttacaggctagaaatgctgccatttattcactttttatgtctcttccttatgaaaacctttattaatatcagcytattgattttcattcatctttaaaatatacatgaatgctcaaaatttactctctaaattagttaaacatgcaaaataataaaacaataattttttaaagactctttaaacaaaatctttcaggtttataggagaaaattaacactctctcactgtagcctcagattgatgaagccaactcttcaatatgacgaaaactatgagaaatgtttgggggaaaaatagaacaactcagagggtcattttatattaattattttactgcatagtttgagttatatgataaaccatcagagag

SEQ ID NO: 780890 - DNA, 607 bp, Homo sapiens
tgtctggggcagaccaggaagtctttttccccatggaaggctcttaagacctaaaaggttgctgagacttagaagtactcctatatttaaaaacaactctggccgggccgcgatggctcacatctgtaatcccagcactttgggaggctgaggcggatagatcrcttgagctcaggagttagagaccagattgggcaacatagtgagacctctgtctctacaagtaatttaaaaattaaccgggtggggcatggtggcacacgcctgtgatcccaaatactaaggaggctgatgcaggagcatcactggagctcaggacttccaggctgcagtgagccatgatttgcaccattccactccagcctgggcaacagagcgagactctgtctctagtcataatattgatgatgatgatgatgatgataaaaaataaaaataaataaaaagaacaactccaatgttctcctgcagttgaaaatatgtcatttgtaaaataataacaataatttgtgaacattttgctaaacaaatacgtttttcgtcatttgtcttttttcgttgaatatataaagaatcaattctgcatcttttaaaggtgaatagtggc

SEQ ID NO: 780891 - DNA, 661 bp, Homo sapiens
tagcattacctgagtgtaacaaaggatcctgagagaaacgacagtgctgaagaggcttggcagtgagacgagtttcacttacatccttgggaaggaaggagtttgccctggactctccaaggcccgtgatcctcaggagtgctgacttagattctgctcacctcaaaactcttttgaaccttcctagctgcacccmaaaatcacatgccaaagcctggcaaacacctgtacccaaggaacgatctactggccacccacattggcttgacttatcattttgattgattccaactggctacttggaaagaaggcaggggctgtcccatagctgagttgtgcccactgcccacacctcattcattttagttgccatgaaggaggatttgatactggaggctgacagctgccttcatggtaacagagaatacagattcaaacaccactggaactgatgcattacctgagatggacaattgcatatcaactgcatgactggaacaaagtctcagcctgcactgaatgtgaaagagctgtttcacttctccattgatgcccttgtctaatgcagtagtgagaatgtgttggctgcatctgcctaggtccaaggttaatgtgttatggcccatacatgcctttccacctaccacttccttcactcatg

SEQ ID NO: 780892 - DNA, 610 bp, Homo sapiens
agcaggaagcaacgtggcagatgagagaggtgctatggatgctgcagactgttctacaaatggtgcctggtcctaaggtgcccagggtgtagggaacagcccatcgttcatccccaggacaacatgttactgtggtaggtccttagggagcccctctcctcttagaccagccyttagcaagaagtatttcaggaaatgctgcacctcaaagaaaccaacctaagtcagccaaagcctgcaggagaacacaggatgagaagaaaacaggtacaagagttagggctggggctgggcgtggtggcttatgcctgtaatcccagtattttgggaggctgaggcgggcagatcacctgaggtcaagagttcgagatcagcctggccaacatggtgaaccccacctctactaaaaatacaaaaattagccgagcgtggtggtgggtgcctgtagccccagctacttgagaggctgaggcaggagaatcgtttgaactcaggaggcagaggttgtagtgagccgagatcgcactgctgcactccaacctggagcgacagagtgagacttcgtctccaaaaaaaaaaaaaaaaaaaaaaagtgagggctggaagatgc

SEQ ID NO: 780893 - DNA, 643 bp, Homo sapiens
caaaaatacacactctcctcctctctgcttgtcctcccatatttacttctcagtataaacaattccttcacagagaatgagccaaaagtcaacacagcacatactaccccagggagaggcaggctgtcttctggagatgcaacgaaagttcttgcagtttgttctttccaggcactaagctcagtcttttcacacaatgagggagactgcagaaaagaccttgataaactccccacccagttccccactccccatcctagatagttttcagtaaggcaggaattgccggctgtcactagactgtctacgtatttgagtctggaacatgaaggacactggtgcatccatgagcatgcatgggtaaatatgcataaacktatgtggatgcatgagcatgtgtgtgtgaatatgcatgaatgcatgtacatatgtgtgtgtgtgtgtgtgtgtgtgtgtggacttgtgtgttgggctagaggaaatagtaggcaaaggacacccaaccattctaggtgtacagctaagctgccctaatctgcaaactaatctatattttcctaatctttaatcctcaacaagaaacaagcaggatggtacttcagaatgtacattgatacgtattgatactggtatttattgatcc

SEQ ID NO: 780894 - DNA, 511 bp, Homo sapiens
  misc_feature 429: n = A,T,C or G
gtttctatggcaactttcaaacatagtctacacttaaaatgctcaaataaattcttttgaaagaggtcaaagcctaggtttgtggaactccaactggagagatagacaactcttccatgaccccagttgctgagagaaatcagtggtcacaatgggccctgtgaacacctttgcttggtcactcygtgctcctggagtttgctggaggtctacttccagtcccacttctaatgaccaactgttaaaggaaaaactgtagacaaattaaattcaagacagtttattcaagcaaagaacaatttatgaattgggcagcactcagaaccagtagaggttcagagagctccacctggcagtacagcctaccagtgagcaggcaatattgtagagagaaaaaggaagtgtcatacagaaacagcttgattgctntgttacagcttgtgctataccttatttcgacatggtgtgataaagtatttgccttatgtaaatatgagctgatcagttggca

SEQ ID NO: 780895 - DNA, 512 bp, Homo sapiens
aactaagcttcataagcaaaggaaaaataaaatcctttacagacaagcaaatgtggagagactttgtcaccacctgccctgccttacaagagctcctggaggaagcactaaatatggaaatgaacgaccggtaccagccactgcaaaaacatgccaaattgtaaagaccaccaatgctatgaagaaactgcttcaaataacgagcaaaataaccaactaacatcataatgtcaggattgaattcacacataaccatattaaccttaaatataaatgggctaaatrccccaattaaaagacacagactggcaaattggataaagagtcaagaaccatcagtttgctgttttcaggagacccatctcacatgcagagacacacataggctgaaaataaagggatggaggaagatctaccaagcaaatggaaagaaaaaaaaaaaagaagcaggggttgcaatcctagtctctgataaaacagactttaaaccaacaaagatcaaaagagacaat

SEQ ID NO: 780896 - DNA, 636 bp, Homo sapiens
tggtgaaaccctgtctctactaaaaatacaaaaaattgccaggtatggtagctcatgcctgtaatcccagctactggggaggctgaggcaggagaatcgctggaagccaggaggtgaaggttgcagtgagccaagatastaccactctactccagcctaggcgacagagtgagactctgtttcaaaaataataattattataattattttaaaaaatgaaaaaattacaaacctcccttgtaaagaagacatacaactaacattcattaagagattatatcattccggacacactctctcacttaagggtcacaacagccctatgagttaggttccataactattttccccattttacaaaagaggtaaagaaattatagagacgttaagtgatttgttaattaagtagtaaagctgagatttaaaccccgcattctgagcctaaagttctgcactagacctttaccctttcactgtagtattcaagctctataaaaatgcagtcagtgcttggaagggcaactttgaaagctggtcattatgtcacaattgtgtttgtgacaacaggtgttaagaggaagagaggagcaagcatatatatatggcactccaggaagatgaaggtgggattataca

SEQ ID NO: 780897 - DNA, 630 bp, Homo sapiens
cgcaggaggattgcctgagtctaggagttcaagacaagcctgggcaacatagtgagaccctgtttctaaaaaaaaaaaaaaaaaaaaaaatttaaaaattagccaggtgtagtggcccgtgcctgtatacccagttactggagaggctgtaattgtgtggtgaagaaagtgttaattaatttgattgtggtaattattatacaatgtatgtgtatctcaaattatcatgttgtatacattaatataattttcatttgtcaattataccttaataaagctgaggaggaaaaattttaatgtaatcctgtcaagaccattttccactatgactggctttccttcatactttcccttagaatggccttgggcattacgactttgaaacaaggggaagttgtgttgaagatattccattttaattgtaatttaraaaaacagtttggaaaatttcaataaaacgatagagaaattatagattcttgatgtagatacatgtgaaggatattcttttgccattttaaaatgtatttactatataaccaaaagaattcaaattaatgaaatatgaaaagaaaaaccacaagaataaataatacaatcaatagaaattactctgatatcaagaagtaa

SEQ ID NO: 780898 - DNA, 670 bp, Homo sapiens
agaaccatttgttgtgtagtatatcagattgtgaggataaatttagacgttggaaattttgagtatttaagattatctagtatttacggtattctaaaatattaggtaattttacaaccagcatatgtttcatgcattgwtcgaaaactaaaacactgtatctgtgaacacagtgatgcagtgtttgtaattatatccttctagggttatttatgtccaaatgaatttattgctactcaaggtccactaccaggaacagttggagatttttggaaaatggtgtgggaaaccagagcaaaaacattagtaatgctaacacagtgttttgaaaaaggacgggtaagttatttgaaaatgttttacaaatgttgttttacgattgtgttaacatatgtgtgaatatttcatctaatactgtgagtcatcaataacctggacatctataaagtaattttaacttagtcgtaataactgtggtatacatatatatcaatataacaatgacgcttatgactgatgattttctctgaatgcagatcagatgccatcagtattggccagaggacaacaagccagttactgtctttggagatatagtgattacaaagctaatggaggatgttcaaatagattggactatcagggatctgaaaattgaaagggtaaaaaa

SEQ ID NO: 780899 - DNA, 670 bp, Homo sapiens
agaaccatttgttgtgtagtatatcagattgtgaggataaatttagacgttggaaattttgagtatttaagattatctagtatttacggtattctaaaatattaggtaattttacaaccagcatatgtttcatgcattgttcgaaaactaaaacactgtatctgtgaacacagtgatgcagtgtttgtaattatatccttctagggttatttatgtccaaatgaatttattgctactcaaggtccactaccaggaacagttggagatttttggaraatggtgtgggaaaccagagcaaaaacattagtaatgctaacacagtgttttgaaaaaggacgggtaagttatttgaaaatgttttacaaatgttgttttacgattgtgttaacatatgtgtgaatatttcatctaatactgtgagtcatcaataacctggacatctataaagtaattttaacttagtcgtaataactgtggtatacatatatatcaatataacaatgacgcttatgactgatgattttctctgaatgcagatcagatgccatcagtattggccagaggacaacaagccagttactgtctttggagatatagtgattacaaagctaatggaggatgttcaaatagattggactatcagggatctgaaaattgaaagggtaaaaaa

SEQ ID NO: 780900 - DNA, 653 bp, Homo sapiens
gatatgcaactggcttcagggtttttcctgtgccctttcagaaagagatactcttgagtgccttttaacaaatatatttcccaaatgttccttctttagaaggctactctaaatttagtcagaattcaacttcttctgcatctgcttagaatcaatgggcctaaaatacaacgactcatcagtgtgtagagaacatactaggaattacgtgaaggataagaatcaacaaaacaggactgcccttgaggaacttagggttctgtagggtgagaaacaatcytaccctgaagaatcaagaaagaaataataagcgaaacctatttcaggtataagttacttagggcactcctcacacatttggagatgttaactaaagtttccagtaagtttattcacagtttggtgctttctggggaacaaatgttcttgaggaaatcagaacaacatgaaaatatacattctgaacatatattttcttgaagagtacaaaattggaatgttgattccacaatttctatgcgtaacagaaacgaatttttaaagtagttcatctgtttttagatgttcccttattttcagacttcccagattaatttagcagagtatgcatgagatagccctaaagctcagcatgcatcaatctggtgaaaaac

SEQ ID NO: 780901 - DNA, 553 bp, Homo sapiens
tgtaatgttcccatttacaagaggaacaaaaagtaaaaaaacacctaagaataaagctaataaaattattcctgacatttttggagaaaattataaaaagaaattcaggaatatctaaaaaaaaaataaagctatactgtctccgcaaataraaaaatgtgaggctgggcgcggtggctcatgcttataatcccagcactttgggaggctgaggctggcggatcacttgagatcaggagttcgagaccagcctcaccgacatggcaaaaccttgtctccaataaaaatacaaaaattagctggacatggtggcaggcacctgtaatctcagctactcgggaggctgaggcatgagaatcacttgaatccggaaggtggaggttgcagtgaaccaagatcatgccattaccctccagcctgagcaacagaataagactctgttcttactgtttttttcttttttcattttttaatcacatttactctatacattcaatacaacttcactagtgaatatgatgaaccaactctaacatttacaggaaatagtaga

SEQ ID NO: 780902 - DNA, 609 bp, Homo sapiens
caacccccaggtgtaaaaatctctagggtgccgaataatgaaacaacttaaaatactggtaaatacataaggaaagtgaataactttattaatatatatgtatttttattaggaaagtgaataacttctatctagctttgtcatgtsagaaggtttctaataatttgcttttatttaatttaacagaggactgaatcaaggtatttgctaatagttcattaaaatgttttatcataaatcactaagtgattttgacatttaactcagaaacagttcaatgaattgaatgatattaatccaaaaatcttcttccattcatatgtacttaggaatgtgaataagatttgttagtgcttatttttatgggaaaaaagtagaattgatctagaccttgtcttattctagctgtaagtaatagtcatccttggatacatgaattgtctaaggaggcctccccttttccccctgaaaaaccctgtgtattttattgagatatttccaatataaattttactctctaaatttaagaattatcaaaatgtgcaatacattagttgttttgatcaattatatattactattaactgtaaaaccataacttaattctga

SEQ ID NO: 780903 - DNA, 618 bp, Homo sapiens
ctgtcaaaaactttagtgttggcaagaaagcagagaaatgggaatgctatatgttaccgtagaaatataaatggatagaaccattttggagatttgtctcataagtcaatgtttgtctcataaaacttttaaaagcagttctaaatataggcatatatcctagcatggtttttgcattcatgctcaagaaaactatagaaagttaatcattacaacagtgcttaaaaataacaaaatagaagggacaaatgaaggtaayctaaatgagcatcgaaagtagacaattgatgtgacttattcataatatggaattctatacagcagttaaaagaaatgatttttttgcagctataattgcatatgtataaatacataccttcaacacgaaaacttatctgtgaaaaaataatttgcatatcaggagtaatatttttcatgtacattttctaaaaaggacaaataaaaatttattgaccaacatcttcaagtaataataattggatcattaaggtaattaagaaattaataattaaattatcattggattaattagtacaattaggacatatctgcaaaatagtaaatattgcttaattagaataattaattaggaaaata

SEQ ID NO: 780904 - DNA, 645 bp, Homo sapiens
ccttgcaacacttgggatatgagtttctaacaggctattttggagaacagaactctgagatgatttttatatccttcacactttctggtctattttcatctctgtggcttctccttaaacaattataagtgcctgttggggtagacccagctagtaaaamgaatgtaagattttgaaagttttcacttgccagtcaatttcttttctgggttcagtgtttactgacacagacactaaagaaatttttttttaaagaaactaactggtgtcatcttgtcttcacatagacttctacagctatagctgagtttccgtgattttgctttttattttttgctcattcatacatgcataggcagagttcagcttttatgctggtaagaggaattaaacttacatgtttactgagaattaaactttaagagaataacaaaagctcttgaaaaaaattgaatataacagatgaaacagtttcatatttatatttcaacataagacttttagttattgtcagaaagtaatgggaatccttcccattgttcacttatttagccttatataatattcatttaactaagcccaatatccaatatccagagatttacattttatttttaagggaagacagtatcatagtgagattat

SEQ ID NO: 780905 - DNA, 622 bp, Homo sapiens
taatctacattttgtacaagagccttttgagggctgagaagacaactcgagttaagcttggttgagaagactcttctaacctgcactgaagataagtgcaaccattatcaaatattctttgctgtgaaaactacttagaacttgtgacgttaatgttctttcctgaatctaagtcactgtgatcgatcatagagtcagaccacaaagaacaatgtctacatgcattgtaagcactttgaaaacaaaacaaaacgaaaaacttggagttcttggtggtgacaasagaatgtgaagcaatctaacaccaactccagcctgctgtgtcctgtcagttcggctcctctggaatcaggcccgtggctggctggcgctctggagaacagttacgcaggacagcggcccggagagacctgtgctcctgggggttctgcgccggccggcagctcccttgaagaaattccacagtgtgtgtacagcctaaggtcaggctctcttgttaggactcactccacgatcagggccacatttatgtgggacaaatctatcatatgcctgtgaaaatttaaagaaacgatcgacactaaccctgcacatcggcaatcaacctaccaaggtgggagga

SEQ ID NO: 780906 - DNA, 506 bp, Homo sapiens
ggaaaaaaaaaaaaaaaaaaaggtatcagctgcttttaaacacaagtcaaactgcttaaaataggcccaatttataaatcatgagagatgtaaattcttgagccccaccctagagcagagtctgacactagagcgggtgggggaggcactccctggcaggaagggccgagagcccctgcagagcctcagtgagcctgctaagcatttctgtatggaacggtgtgcaggactggcccatgggsgtcccctctacacacaggtcattgtgtgaccaacctcctgttggaaatagggcgcctgaagcctgcacacgattccagcggtgggctgagtggtaaagaaaggttcacaacagtgctctgggcaactccagcccgcaccgagttttctgccccatttcaagttttcatctattatcataacatgctgggtcttcctggacaccaattctggcacttcccctgaatttcaacgtttgggctctcctgcacatcccgggcgcgttg

SEQ ID NO: 780907 - DNA, 506 bp, Homo sapiens
ggaaaaaaaaaaaaaaaaaaaggtatcagctgcttttaaacacaagtcaaactgcttaaaataggcccaatttataaatcatgagagatgtaaattcttgagccccaccctagagcagagtctgacactagagcgggtgggggaggcactccctggcaggaagggccgagagcccctgcagagcctcagtgagcctgctaagcatttctgtatggaacggtgtgcaggactggcccatgggcstcccctctacacacaggtcattgtgtgaccaacctcctgttggaaatagggcgcctgaagcctgcacacgattccagcggtgggctgagtggtaaagaaaggttcacaacagtgctctgggcaactccagcccgcaccgagttttctgccccatttcaagttttcatctattatcataacatgctgggtcttcctggacaccaattctggcacttcccctgaatttcaacgtttgggctctcctgcacatcccgggcgcgttg

SEQ ID NO: 780908 - DNA, 614 bp, Homo sapiens
ttacatatggagagtttgtagtggaccaaactggcaggcacccttgcagtatctgtgtcattcacacatcttctgtaatctcctcccttttgtccatatgggacagggactgtggaactatgggcatttattgagtgctgactgtattcctggccctgtgctgggggggttaaattattgtgtttcatcttcagttaatgatctgtacattatttctactttcccaataagaaagcagtctcagagtattgccaaaagccacacttagtaagtttcaagggtggcatttgaaagtagttatttctaactccatgaatgatgaaagtgaaagacaaaaaattagaacacaggcttttagggtcttctcagggaggcatattggctccaaccactgagttacatttcactggagccctgggaagctaaaakagccagggtgggtccaagagggagcttgaagctagaaattctatctggcactaaactctaaaatctagaaatgtgaactaaagccctttagcattctacccagattcttccatttagtttatcagatcataacatcagagaagaatatcaaagatggtatgtcataggacaataagcatgtgttt

SEQ ID NO: 780909 - DNA, 650 bp, Homo sapiens
aaataacaatcatatattgaaggctttaatataatgatacaatgatgtttccacaaacttttatatatttgttccataaatatcattaagcacatactaattaccaggcacttgcaaaatacttagagtacaaagattaagttaaaaactaggtcttgtcctcagtaacactataaaaactcgaattgtctctgacagtttccattatcacaaaaaaacaaatattttctatctccttatgctggaattaacttacaacttaacccaaagccaagcgtattagtctgttctcacactggtataaagaaatacccgagactgcataatttataaagaaatgaggtttaattagctcacggttccttaggctctataggaagtatggctgggtaaggcctcaggaaacttaaatcacggtgaaggccacggggaaggacgtacgtcttccacggccagagcaggaggaagagagaggagggggaggtgctacacacttttaagcaaccmggtctcaaaataagtcactcactctcaggagaacagcaaggtggaaatctgcccccatgatgcactcacttcccactaggctcctcttccaacattgggtattacagctggacgtgagatttgggcagggacacaaatccaaa

SEQ ID NO: 780910 - DNA, 602 bp, Homo sapiens
cccagttgccaacaaccttgccaacacttgatctttttggtctttttaggcattctggtgcatttgctttaatagctccctctgtttttaatttgcatttacctgccaagcacctttttatgtgagttggttatatggatatcttcttytatgaagcaactgtccaatgttttggcaatttaaaaagtgaattatcttttttgtattcattggtaggtgatatttatgtgttctagatatgtattccttctcaaatataagaattatgacattttctccattgtgttgcctattatttatcctaatggcatcttttgatgaacagaaattcttaattttaatgaagtcttgtcatttttttcctttgatggctaatgcacttttatattcttcaagaacactctattcaccccaagttcatgaagatactctctgaagctttcctctagaagtctgcacatgtcaacttcatatttagataatgattcacctctaattatttttaaaatatgtattgggtaggaatccaggttaactttttattttaaaaagaccattcagtttctagagcgccatttacagaaaaggccagtctctctcca

SEQ ID NO: 780911 - DNA, 602 bp, Homo sapiens
cccagttgccaacaaccttgccaacacttgatctttttggtctttttaggcattctggtgcatttgctttaatagctccctctgtttttaatttgcatttacctgccaagcacctttttatgtgagttggttatatggatatcttcttctatgaagcaactgtccaatgttttggcaatttaaaaagtgaattatcttttttgtattcattggtaggtgatatttatgtgttctagatatgtattccttctcaaatataagaattatgacattttctccattgtgttgcctatyatttatcctaatggcatcttttgatgaacagaaattcttaattttaatgaagtcttgtcatttttttcctttgatggctaatgcacttttatattcttcaagaacactctattcaccccaagttcatgaagatactctctgaagctttcctctagaagtctgcacatgtcaacttcatatttagataatgattcacctctaattatttttaaaatatgtattgggtaggaatccaggttaactttttattttaaaaagaccattcagtttctagagcgccatttacagaaaaggccagtctctctcca

SEQ ID NO: 780912 - DNA, 602 bp, Homo sapiens
cccagttgccaacaaccttgccaacacttgatctttttggtctttttaggcattctggtgcatttgctttaatagctccctctgtttttaatttgcatttacctgccaagcacctttttatgtgagttggttatatggatatcttcttctatgaagcaactgtccaatgttttggcaatttaaaaagtgaattatcttttttgtattcattggtaggtgatatttatgtgttctagatatgtattccttctcaaatataagaattatgacattttctccattgtgttgcctattatttatcctaatggcatcttttgatgaacagaaattcttaattttaatgaagtcttgtcatttttttcctttgatggctaatgcacttttatattcttcaagaacactctattcaccccaagttcatgaagataytctctgaagctttcctctagaagtctgcacatgtcaacttcatatttagataatgattcacctctaattatttttaaaatatgtattgggtaggaatccaggttaactttttattttaaaaagaccattcagtttctagagcgccatttacagaaaaggccagtctctctcca

SEQ ID NO: 780913 - DNA, 570 bp, Homo sapiens
aaggtcaattttgtctgattttaacatagccacgatctcttttaattattgttttaatgtatgatttatttatttatttattttacttttaagtttatttctgcctttggacctaaatcgtgtttctaaattgaacccaggaggtggctcactgcaacctccatctcctgggttcaagtgattcttgtgtctcagattcctgagtagctgggactacagatgtgtgctaygatgccaggctaattttagtatttttagtagagatggggtttcaccatattgaccaggctggtcttgaactcctgacctcaagtgatctactcacttcagccatccaaagtgcttggattacaggcatgagccattgtggccagcccaattttaaatccctgtcttttgctggagtatttggtccatttacatttaatgtaattaatgacataacaacgtttgtatctaattttttgctatttgtttattctatgacatgtcatttttgatctgctattttttcattgttgccttcttttaggctaaaactttttaatatgccattttaatctccttgtg

SEQ ID NO: 780914 - DNA, 643 bp, Homo sapiens
attcccacgtgttgtgggagggaccaggtgggaggtaattgaatcatgggggcaggtcttccccatggtgttcttgtgatagtgagtaagtctcctgagatctgatggttttataaaggggagtttccctgcacaagttctctcttgcctgcaaacaagaaagatgtacctttactttctgccaggatgataaggcctccccagctacttggaactgagaatccattaaagctctttttctttataaattacccagtytggggtgtgtctttatcagcagcatcaaaacagactaatacagtccctagcagaaggcatcagtcagggaaaaggcagaagtatttattaccatctgactggggcccagaaagttttgattcccagagtctctgagaatggtcaaaatgaagcatcagaaaaagtaaaaaacatttgatgacaagaagtcatgaaatagaactgatgatgtgagtttaaatggcaaaagttatagtaagcaaatattttagaatgagttccctctttttttctgatgtttcccgtgttgtttgacattgtgaaagctcctaagagccggtgagaatttcttttgttgtcccgttagtcttatgttgtgctaataaatgatcaaaactaagaaata

SEQ ID NO: 780915 - DNA, 443 bp, Homo sapiens
gtagaataaatacattcgtaattattatctgattcagccattatttaaattagtaagtcaagcatgttcattttatgtgcttagtaattcaccttttagtttatgaagtgtaaaagtaattattattttttgtcctggtttctttattgtttaaagtagagagtgatgaatgaggaatatgtcctaaacatttaraaaaattgtgaatcagaattgactctgcactatgaaaatgcctaatggcaaggtctctcatttgttgaattattcctatgtattttattaacattctaccataatattgtaagctgggcattattaccttcattttacactcaagaattctaggttttgatacataatttgtccaagaccatgcagagacagagaggtagagttaaaagtggaacacagtcctgctagatgctaaagcaaatttttct

SEQ ID NO: 780916 - DNA, 632 bp, Homo sapiens
ctgaacatagtgacagagtccagttgtctgcttttacaagcatcagaaaatcctgccacgaattttcttggggcaaaatatcattatatatctgcttgctaggtctcactccacagggagtcaaaatgttacttgctctttgtccagacacgtcaacgatggggtctttttttttctcaatcagcccaacaggcctgatgcagataaggtatggggcaaagaccacatgaggatttatggccaaggactcagccagcctccctstgcaccagaccagcttgccacaaaaacaaaagaaccaaaaatgactgcagagaaaggcaatgtcactatttcagcaacaagagcagcaaaatcatctctgggtagtggaattattttcattgctaatcgtaagtctcctggacagatccgtaagtacacttctgcacaaaggagtatcctcaaattgctgtcgttttttagcgacagcaaaaaacccacaaagcagatcagccttttttttccagtctttacattggtaacaaagagataaatttagattttcctaaaatatgctagtggatgttgtgtctcacattgatcttatatctcagggaatttggcacttatctccacttaaagattatgta

SEQ ID NO: 780917 - DNA, 632 bp, Homo sapiens
ctgaacatagtgacagagtccagttgtctgcttttacaagcatcagaaaatcctgccacgaattttcttggggcaaaatatcattatatatctgcttgctaggtctcactccacagggagtcaaaatgttacttgctctttgtccagacacgtcaacgatggggtctttttttttctcaatcagcccaacaggcctgatgcagataaggtatggggcaaagaccacatgaggatttatggccaaggactcagccagcctccctgtgcaccagaccagcttgccayaaaaacaaaagaaccaaaaatgactgcagagaaaggcaatgtcactatttcagcaacaagagcagcaaaatcatctctgggtagtggaattattttcattgctaatcgtaagtctcctggacagatccgtaagtacacttctgcacaaaggagtatcctcaaattgctgtcgttttttagcgacagcaaaaaacccacaaagcagatcagccttttttttccagtctttacattggtaacaaagagataaatttagattttcctaaaatatgctagtggatgttgtgtctcacattgatcttatatctcagggaatttggcacttatctccacttaaagattatgta

SEQ ID NO: 780918 - DNA, 625 bp, Homo sapiens
tcttatgtcataatttatttttccttagaaaggtttttataattcagtcctgtacagaaagcgtcagggacagaaataaatcagggaacagatgcatgttaggactgcaagccctaaagccctcagttgcagctcattttactcatttaacaatcatagattaggcccctagtgttgccaggctctgtggtagaaaccgggagaaatgaagaggcaatagccactayccctagaccctagaagagccatgcttcatatgagagagagacaaggaagcagttacagcaccacgagtcatgagtcctctgagacacacgcatgcccagagtgccttggagcacgctcgggggacacccaggccagactatcctgataatggagttaagagttcgccatatgaaaaagcaggggaaaaaacttaaccatgaagtcacatgttcaaagaccaggaagtgagagagaataggaattagtaaagggagtgaaaacacttctgtatgtctggagtcttgagtgagaagtgagcttggaacagaaggcccagacatttaaggttcaacaatgtactccctaaagcaagcactcactctaagccccgtctgtcttgggtgctgggctaggcacc

SEQ ID NO: 780919 - DNA, 625 bp, Homo sapiens
tcttatgtcataatttatttttccttagaaaggtttttataattcagtcctgtacagaaagcgtcagggacagaaataaatcagggaacagatgcatgttaggactgcaagccctaaagccctcagttgcagctcattttactcatttaacaatcatagattaggcccctagtgttgccaggctctgtggtagaaaccgggagaaatgaagaggcaatagccactatccctagaccctagaagagccatgcttcatatgagagagagacaaggaagcagttacagcaccacgartcatgagtcctctgagacacacgcatgcccagagtgccttggagcacgctcgggggacacccaggccagactatcctgataatggagttaagagttcgccatatgaaaaagcaggggaaaaaacttaaccatgaagtcacatgttcaaagaccaggaagtgagagagaataggaattagtaaagggagtgaaaacacttctgtatgtctggagtcttgagtgagaagtgagcttggaacagaaggcccagacatttaaggttcaacaatgtactccctaaagcaagcactcactctaagccccgtctgtcttgggtgctgggctaggcacc

SEQ ID NO: 780920 - DNA, 625 bp, Homo sapiens
tcttatgtcataatttatttttccttagaaaggtttttataattcagtcctgtacagaaagcgtcagggacagaaataaatcagggaacagatgcatgttaggactgcaagccctaaagccctcagttgcagctcattttactcatttaacaatcatagattaggcccctagtgttgccaggctctgtggtagaaaccgggagaaatgaagaggcaatagccactatccctagaccctagaagagccatgcttcatatgagagagagacaaggaagcagttacagcaccacgagtcatgagtcctctgagacacacgcatgcccagagtgccttsgagcacgctcgggggacacccaggccagactatcctgataatggagttaagagttcgccatatgaaaaagcaggggaaaaaacttaaccatgaagtcacatgttcaaagaccaggaagtgagagagaataggaattagtaaagggagtgaaaacacttctgtatgtctggagtcttgagtgagaagtgagcttggaacagaaggcccagacatttaaggttcaacaatgtactccctaaagcaagcactcactctaagccccgtctgtcttgggtgctgggctaggcacc

SEQ ID NO: 780921 - DNA, 640 bp, Homo sapiens
atttccagtctgacaagcgaatatcctcaaatcattctctacatgcagttagagtgaatttccaaatgtgaatttgatccctttactcattgattagtttactgtttgaaattcatcaatggctttagttattatgataaagccgatatccttaaaatgacctatgagatcctgcatgatcttgacttctcacctcatcttgtccactcagtttggtctgcgtgtcttttacttccttgaaggagatactactttcagcctcaagaccttcgaatactctgttctttctccttagatcactttctttgaatccttttatttaaataattctctgattggaatgtcagctctgtgagggggagaggtcatctctgtattttccatattctgatgcagtaagcattcgcasatatttcttgagtgataggaatcattcaagagtaaatgcccactgaatgagttcctgttcttatttttcacacttgctgcccctcctgtgttccttgcttttttttgaatagtctcatggatccagtctttcaggctagaaattgaatatcctctctctctttcttttctttttttttttttgagatggagtcttgctctttcatttctactgttaatcaagcaccttcct

SEQ ID NO: 780922 - DNA, 646 bp, Homo sapiens
taagtatttgtatatctaaacatatctaaatgtaagttatcccagcaagaaagagatggaacatttaaattaggataatctgagaaggaattaaaaaggaactatttctgaaagcaagggcagaatgtcggaaaccataagagaagcacagggcctcagagctgttatcactagtaggtctactagcgtaagaggtatgaccatacctggaaggaaagaattgcttayggagggccaacttgagtgcagcactgagctatgcttaagggacacagcctgccccaggtgaacctgaggggagtgaggcagggacacagggatcttatttttactcactttgttccttccctgccatcactttctgggatctgcttttggcccattgatgtaatccatacaggtcaacctcctgagacaaggggcagagtggaaagcaatgatgacaaacaaaaagaggacaaacaaaaatatttggcacagagccaaatatgaattcaaattctagccccactacttatcagatctttatctttgaaccagacctaacttctttaatattgttttctacctctcaggatttctgggagaattaaatgtgcaatgcaaatggtaaaatgtctgctgtatcactggacacatgaatgcc

SEQ ID NO: 780923 - DNA, 570 bp, Homo sapiens
tttgataaatacagtagttgactagaaataaaaactgctatttagtcctagaataaagccctggacacatagaactctaaggcttatacagctatattttatcaactttattgggctattagctttatttttcagagcatattgatttatgtaaaagaatcagcaattttacctatttcttgggagaaatgaacaattattatatattaaaacttaacaagaaagtacacagttcatttaaattcayggcacctgcctcggtaattttcattatactaatttgcaaatataataactcatccctgaaatctcctcgtctgacattttcttcttcttagcaaaatctaatagagcggaatttcactgcatttcatgttataatgataatcttttttctttccttagttgaggaaaatttttttcttaacctacgttaagtcaggaaaacgagggattaaagcacatctagtggtgcactgtccttagttttgtagcgtaagttgctttctaaagttatgtgcaaaatattcactgcaaatttattgtgaggagagttatgagtcaaaattg

SEQ ID NO: 780924 - DNA, 596 bp, Homo sapiens
aaaatcaggcaaagagattgatgactgaggtggacttatatttaagcattaactgatttaaaaaaaaaaaaagtcaatgggaatgggagtgattactggccctactgctgcaaggacttggctcactagacctgatgaaggggtgttcctgcaggagtttctgcacaggccactgcttgggatgttcttgagccagaggttgtagtttcagctcctgtacagcttagcataacattggcttcagaggcttaggcttcaacacctgacacaatgttgactgtctcagaggtgaggtgttaagaataccacagattgaatacatgaggtgttaaggacctcagaggttgggtattagttagttcagtcccagagagtagggcaattggcactcctagaagatgcgtctctatacctgarcagcctgcggtacgctggtcccagcagtctgcaagtgatacatgcgattttccaatctttttgaatcaacagcatgttctcatcagtctgtaattgtagatcagaggatactttatcaaatataatcattgagctctataattcatgaactctgcttgtaacacatcttcaatttttaa

SEQ ID NO: 780925 - DNA, 648 bp, Homo sapiens
atttaagggaagtcttaatctgctttatatttaactcttatctccacactgtgaattaaaaatagaatgctggactgtagcctcacctcctggactctctgagggctcaggttactccagcataaggctgggctgcgagctgctccaggtctctggcttggtgcccctcccggactttccaaacagctgcctctttctaaatttttatccaagagccacacattaacctgtctaaagtgagcagtccttattctgtgattcttaaataacatttagcattttcctcaggtaattttcatttttcgtgaaactcagtgagttctgaatccttccagaagctagtttcaaaaactgagtcctgtagtcgagttctcctaagtccatgcgtgaggtggagtgaaagctaaagagcctttcctctttttttctcttcatctggtaaaaatttgctctggagtacgtcccytgatttcccttctcctctctcccactcttctcccttccttttcccatttccgcaccttttcctaatcctctttcccattccctgtgtgtatctcttccttccccaagcctgtgtctgagacagctggaaaggacaggaagagtttgggtgtggggaggagccggagccagggccgctccttc

SEQ ID NO: 780926 - DNA, 626 bp, Homo sapiens
cctgctgaaaccattccaaaaaattgaggagaagggctccaccctatcttgttctatgaggccaacatcattctgataccaaaacacaacaaaatgacacaacaaaagagaacacttcaggccaatatccttcaggatcatagatacaaaaatcctcaacaaaatactagcaaaccaatctgagccacacatgaagaagctgatmcactataatcaagtagggttatccagagggatgcaaggttggtttacatacgcaaattaatgcaagtgagtatcacataaacagaactatccaagctgagtgccaaatcaagaatgctgttctattcactacagttacaaaaaataaataaataaaatacctagcaatacagctaaccagggaggtgaaaggtctctacaatgagaattacaaaacactcttcaaagagattagagatgacacaaacaaatggaaaaacattccatgctcatagactggaagaatcaatattgttaaaatgcccatattgcccaaagcaatctccagatgcaatgttattcctggtccagaagtaaagccacacactaacaatcatttgatatttcgcaaaaacaagcagtaaggaaaggactccctattc

SEQ ID NO: 780927 - DNA, 586 bp, Homo sapiens
ttgtatagacttctctcagctgcagggtctccatctctaaaccaacagagatccaccaatgtcactgagtattaaaaaccaaccacctacatcttggagggatctagcaagaggctagacctttggtaacgtcagcaacattgccctcccttccttgatcaaaagaagtgctggacacacaagcaccatgaaaccccactgcgaaaccattagtgtggcgggcgcgtggctcacacctgtcagcccagcgctttgggaggtcaaaaggcaggaggatcgcttaagtcctggaatccaaaaccaccctaggcaacagtgaaaccccgtttctttttwaaaatatgaaataaaccgctagttaataaagaggaggagaagcttgcttctgctttcctatgaagaccagctacagcagggtacagcctgacttcagcagcgctaactgtagcagggaccttttaatgaatgctaggcactgtttgaaacaatacgtggtcactcatttcaccctgaggtgacacaggcgctaccactgcttaaacctgacaagaataaacagtcaccaaccgggccctgatgtctccca

SEQ ID NO: 780928 - DNA, 586 bp, Homo sapiens
ttgtatagacttctctcagctgcagggtctccatctctaaaccaacagagatccaccaatgtcactgagtattaaaaaccaaccacctacatcttggagggatctagcaagaggctagacctttggtaacgtcagcaacattgccctcccttccttgatcaaaagaagtgctggacacacaagcaccatgaaaccccactgcgaaaccattagtgtggcgggcgcgtggctcacacctgtcagcccagcgctttgggaggtcaaaaggcaggaggatcgcttaagtcctggaatccaaaaccaccctaggcaacagtgaaaccccgtttctttttaaaaatatgaaataaaccgctagttaataaagaggaggagaagcttgcttctgctttcctatgaagaccagctacascagggtacagcctgacttcagcagcgctaactgtagcagggaccttttaatgaatgctaggcactgtttgaaacaatacgtggtcactcatttcaccctgaggtgacacaggcgctaccactgcttaaacctgacaagaataaacagtcaccaaccgggccctgatgtctccca

SEQ ID NO: 780929 - DNA, 614 bp, Homo sapiens
gccagacaagcccagcgctccttgaaacaccgccccatgctgttacccctttcgtttggaaagcagccccgtggggtcgatcggttttccaccccattttacagacagggaagctgagcccgggagaagctgtgtaggccccggcctccttgtccaggcctggcctcctgatgaatgtaagtgcgcctgacaaacccgtgctatggccgcgccagaggctggcgcctgcttcccagaggctggcgttccgtcctgtgggccctggctgcactctccttccctgagaaggtcaggctgaagcagggtcctttcccgcccccgtgagccgagtgtgtgtgtgactcaccagagcccgggagcaaggacacaggcagctttcatyttcccgagcccagagttagctttctccgcagagctcgggggcaggagctactaggtttggaggccccagatgttctaagaagtcattccgctctccactgaagggggcgtttacataaagtctgcgtgacccctggtgcctcaaccagcttcctgagcactgcacccagtgctcctgctcagtaagaaccaggcccacaacctctgctcagaacgtcctatgtgggacccag

SEQ ID NO: 780930 - DNA, 615 bp, Homo sapiens
ggattataggcatgcgccaccatgcccggctaatttttgtatttttagtagacatgggatttcaccacgttggccaggatggtcttgatctcctgaccttgtgatccacctgcctcaacctcccaaagtgctgggattacaggcgtgagccaccgtgcccggccgagtaccgacttttgtagagaccaaaagaagcttaagaaatggactcctaaaggacaaaatttaaacctgcttattaaaaggcattgtcaccctaggggcttgcagaaatgttttaacttatgttaacacttctgcctccattagcaaaacttttctgtyttctaaactgagcgctgctttaacctcaccctggctgagtttggcagggtgcacgcagttaccagccaggagtgacacactgccactcagggccgccaaaacaagcacgaagcaaagacgggacgaaaaagtagagcggctagtagctcccctaaagagagtttggaccttggtatggaaaccctaaaaggaaagccagaattggtatgtaacctgcggccccactacacagtgccagccccacactccctcccagagagccggcacacacctcacagtgggaactctgcc

SEQ ID NO: 780931 - DNA, 608 bp, Homo sapiens
cctctccctctcccctttgcacagtctccctctgatgcccagccgaggctggactgtattgcagctatctcgactcactgcaaactccctgcctgattctcctgcctcagcctgccgaatgcctgggattgcaggcgtgcgcctccacgcctgactggttttcatattttttggtggagacagggtttcgccgtgttggccgggctggtctccagctcctgaccgcgagtgatctgccagcctcagcctcccgaggtgccaggattgcagagggagtctcgctcactcagtgttcaatgttgcccaggctggagtgcagtggcgtgatctcggctcgctacaacctccacctsccagccgcctgccttggcctcccaaagtgccgagattgcagcctctgcccggccgccaccctgtctagaaagtgaggagtgtctctgcctggccgcccatcgtctgggatgtgaggagcccctctgcctggccacccagtctgggaagtgaggagcgcctcttcccagcagtcatcccgtctaggaagtgaggagcgtctctgcccagccgcccatcgtctgggatgtggggagcacctctgccccgccgccccg

SEQ ID NO: 780932 - DNA, 619 bp, Homo sapiens
agtcccattatttttaatcactatcagaaactggtatctggtgggctgattaatgggcagcttctttctctacctgccaggatgattagggcactcccatttccaatggtcctcttgtttataatatgcacattgtggcctcaagagtgtacggccattttggccagcagtggggtccctaagggtcttacccatggccatttgtttttcctagcatgctccatcttgtgcctcgactggtkgtggccaagagccacagcaagcagcatagcttgttgtctcatgtcgcattgcttttgcccttcctggacttgaataagatgattaaatgccttaaaagcaatctcgactactggagatattgatattcccaacaccttttctactttttgtagttttcctcttatgccaggggcactgtgactgataaaactctcaggttacctggatgttcggggttaatgtcagtgtattgcctgaaggctttaaggaccacaagaaaggaagaagcattttctttggccactgttgtacctttatggcttgtgctgctggagtcctgctacaattaacattccccattttgcttggaagtttatctcagatggctagagcaagg

SEQ ID NO: 780933 - DNA, 622 bp, Homo sapiens
aaaagtaagacccaactatatggtgcctacaacaaatccactttaaatataaagcgaaatgatggaaaacatttacaatgaaaacactaatttaaaaaatgctgaaacgactatactaatatagacaaagtctatttcagaaaaaggaaattttgagagatatatagggagaatgattaaggaatcaatttcttaagaagatatagcaatcctaaatgtggattcatcttataataaagcttcaaaattcatgaaaaccaatagaactgaaagggaaaatagacaaatctacaattaaggtgtagtatgcaaacattcctcttttaataactgatagaataatcagagaaaacaaatcagtarggatatagaatttgtaagcgacactgtgaacctccttcactgaactaaaatttatggaactcttgaatcaacattcatagtggcattgcaattatgaaatacatatgaataaatttaacagcaaatgtggaaaatctgtacattaaaaattataattattgttgagagaaattaaagaagacttaagtaaattgaaagatgtaccttgcttaatggttagaaaattcaatattgttacttttccccaaactgatctaca

SEQ ID NO: 780934 - DNA, 560 bp, Homo sapiens
ctaggaagttccaaactttcccacattttcctgtcttcttctgagcccttcaaactgttccaacatctgcctgttacccagttccaaagttgcttgcacattttcaggtatctttacagtagcaccccactcctggtaccaatttactgtgtttgttctcacactgctaataaagacatacctgagactgggtaatttataaagaaaaagaggtttaatggactcaccgttccacgtggctggggaggccttaatcatggcggaaggcaaaagtcatgtcttacatagtggcagacaagagagaatgagaaccaagygaaagatgtttccctttataaaaccatcagatctcataagacttattcactaccacaagaacagcagggaggaaactcccccatgattcaattctctcccaccagttctctcctatgtcatgtgggaattatgggagctacaattcaagatgagatttgggtggggacacagccaaaccatatcactaatgaattcttgcagttcatttgggactcaatttctcttctcccttaagaaacctg

SEQ ID NO: 780935 - DNA, 616 bp, Homo sapiens
atacaatcatgtcgtctgcaaacagggacaatttgacttcctcgtttcctaattgaataccctttatttccttctcctgcctgattgtcctggccagaacttccaacactatgttgagcagaagtggtgagagagggcatccctgtcttgtgccagttttcaaagagaatgcttcaagtttttgcccattcagtatgatattggctgtgggtatatggatattaggtagagtagattttagagagaaaaattacttgtgacaaatgaaaacattatgtaatgataaaaggatcaattcaccagtgggacataacaatcctaaatgagtgcaaaccaaaccacacagcctcaaaatacgtaatacgtaaaacaaaaactagtagagcgggaaagagaaatgsagaaacataaaattcgagttatagtccccaatttactccactctcagcatattatagaactaccagacagaatgggacaaatatttgcaaactatgcatccgacaggttaagtcacatgcagaatctacaaggaattcaaacaactcaacaacagcaaaaaaagcaaacccattaaagagtgggcaaattacatgaacagacattttgcaaagga

SEQ ID NO: 780936 - DNA, 606 bp, Homo sapiens
gattcctatattatctatgtaagatttgcataatgcttctttctgccagcattagcccattaactacctccagcagctacatgaggaatagaagagtgacaggaaattgaggacaatagtagtgaggatccatttggagacagagatcagtatgtcttcccctttccaaratgcaggaacagggaaggcttcttctcctctgaagccaactgagggtggcttcatgggaaccctgggagagcatgacatacgtgacctgaagtttcacagataaagatcaggtcactgactctaaaactcacccatgaacactctaaagaatgacagtctatgactctttccccaccgcaagtttcccagcctggttgaaggaaaaaatattaattggtaaagctcagagttttagtataatacagaacaagacttataatattaaggaaaaaataccgttttttattacctgaaactcactggaaaagcttttgaccttgaatgactttcatgcaggagaaggaaacaacaaacagaggactgcagttgctttctgttatcttatggagcccaactcactttactgactaggttacacatacatctttccaggaa

SEQ ID NO: 780937 - DNA, 630 bp, Homo sapiens
gtccaaaaggctaaaatggctgaggaaaaatattataacacctggtgcaagaacggagtttttattaagtatgagtctttgcaatgttacttagagggctacaactgatgaggaagggtcatggtatgactttcgggtgtgtgttgaaatcactccttctctggagggagggcttgaggttgaagactccgcaattactsaagaggcgctgctgctcaagctgcttggccaaggggactgtctcttacggtcccagtggttgcctctcccaccactggacctggtcaaaaccatcaagttcaccctgaggggcctcaataactttgagtatccaaagtaagtggagtctggatgacatcactcccaggtttctgggctacctgcctacaagaaatgacttatcctctcccagcagtcttcaaggtttgcatgaaagtgtttctctgaaatgggggtgttgtaggctttctgactggaggccctcataatacatgtgctgtagaaaggtcactctaatagcagtgtgtaggagggcctagtgggaaagtacattaccaaggcagttgcagtcatcagggtgagaaagatcagtgcctgaaggaagtgtgaaaatggtgaggaagggcctac

SEQ ID NO: 780938 - DNA, 634 bp, Homo sapiens
gaattgcatttcatgccctcaagtctcctaaccctggagcattgttaggacaagccctgaagtgggaaaatgtgtcctcctgaccatatttcctttccttctcaaagatgcctcccagaatcatagagttcataggaggagtttgaaaacaattgatccatggaatatatataaaaataaactagggcatgtaattaaataacattataacattattctactcttgtttacaatttttaatttagcttgtatgtayctaataaaatgtactaaattaatatttgtttgaggaagtaatgctgcttaaaatctgttatgcttattattgacaaagaagtatcttgaaagattatgtattttttaacccacggtagtttttacatacttttaaaattatgaaaataataaaaccccaaaagagagttgggaaagcataagagagaacaaaaatcttttttttaatttttaatgttttattttttatggttacatagttggtgtttatatttatggggtacatgaaatgttttgatacaggcatgcaatatgtaataagcacatcatggaaaatggggtattcatcccctcaagcatttatcctttgagttacaaacaatccaattacactctttat

SEQ ID NO: 780939 - DNA, 463 bp, Homo sapiens
  misc_feature 82: n = A,T,C or G
atttgcgtattaagaggttggcaaattacattgcctttgctcctccttctgcagccacagtactggtttttcatcactcttntgatatgctaatactccctgaggaactagcggcgccaaccccaactctatatatattagacctcctatccactatttgacagtggtgaccactttctccyataaactctcctctccttgctcctgcatctgtttccatctcttcaaagcccgcatttctgtgaatgctttccaggtccagttggctacccactcctcatttccacctctgtagtccccatcctatccatacctcctgacctccactgcaccagcctctctgccaaccatgacatccagattttcaccagtctgcgtgaggctggcctccctcccttcaccgttggcagcactcatcttccttgaagcacggcaaccatcttgttacttctgctgtgaaatg

SEQ ID NO: 780940 - DNA, 463 bp, Homo sapiens
  misc_feature 82: n = A,T,C or G
atttgcgtattaagaggttggcaaattacattgcctttgctcctccttctgcagccacagtactggtttttcatcactcttntgatatgctaatactccctgaggaactagcggcgccaaccccaactctatatatattagacctcctatccactatttgacagtggtgaccactttctcccrtaaactctcctctccttgctcctgcatctgtttccatctcttcaaagcccgcatttctgtgaatgctttccaggtccagttggctacccactcctcatttccacctctgtagtccccatcctatccatacctcctgacctccactgcaccagcctctctgccaaccatgacatccagattttcaccagtctgcgtgaggctggcctccctcccttcaccgttggcagcactcatcttccttgaagcacggcaaccatcttgttacttctgctgtgaaatg

SEQ ID NO: 780941 - DNA, 623 bp, Homo sapiens
tatatacgtgtgtatatatatatacgtacatgtatgtgaacacaattatatgcataaagtacatggtatagctaagagctgataagatattaagaggaaagctccatttttcatcataaggcccatattccagctctagctctttctcttactgattaatcccaagagaaaagaagagctcagtgggtaggacagaagaggatttaggtttgttgggtagcaactgtatcccaggttctatttcaaatgttacacatgcattagstcttttaattcttatccaaaccctaccactaagcattattatctcagcttaacaaattagaaaattgaggctctaggaggtaatgagcttgccaaggtgtctgagcctcaattttctcttccaaaagtgaagaaaatagtatctacactatgaatctcataaagttgttgcatggatcaattgagctatatatatatatatatatatagctcatatatatacatatatacatatacatatatatatatatataacacatacatatatgcaagagctttgttaagtagaaagtgatatgctgttatttatttgctttatcccaactgaatccaggctcctttaccacaggaacatctta

SEQ ID NO: 780942 - DNA, 600 bp, Homo sapiens
atacatatacatatatatatatatataacacatacatatatgcaagagctttgttaagtagaaagtgatatgctgttatttatttgctttatcccaactgaatccaggctcctttaccacaggaacatcttatcattcttcttcaaacccccagcatctagtataatgccaagtccaaagtagttacccaatgacagctttttaatgaatcaatctttaaatcctcacatacctaccctcatactttaaacgtggtagacattagtgaatatttgttgagtttaattggactagaagaatgactcagctaaaaagtatatggcactccattgaccaggcagttcaaataccaytacattgaaaacatctgtaaaacaaaatattttttaatctctaataatgtctcaccttttaaaacaataattaattcaagaaaattctaattttagacatatgccagaatagctcatttcctctccaataatctgatgagtctcttgtgtatgttatggtgaccagcagatataataaccttcagttgatatcgatagatagacttcgtctttcattaagtaatgatctgattgccagtactttgaa

SEQ ID NO: 780943 - DNA, 603 bp, Homo sapiens
ctaacactgcttgcaaagggtaaaaggaccaggaaacacttcctggtgaggccaatagcaaaatttgaaacataaaagcatcatatttaagaattatgcatcatttttacctgtaagatgaagaatttgcacatatgataaaaaacctctgcattctgaggatttttttcaaatgcagtaagccacactgctctggctttgtcatgctgatttgtttgcaaatataatgcaacaagrgcttccagcaactggcagttaataggacatgattccaataaagatttacaaagctccattgcagcctcataccttaacaaaaaagaaaaaaaaaggctaaagacatgaaaagatcactttttaatataaggttagctgcttggcaattaagttgtacctctccaggagttggtgcagagcaatcatgtttgtgtaaagtggaaggcaggcctctattctttcctcaacagcaaggctctcatctgtgcaagctttcactgcatctacccaaaaacatcacaacaacatgaatcacgtcaatcataaaaatgaaatatttgactgtgttacttcaactctgagagaccaatgggaaaagatgacccc

SEQ ID NO: 780944 - DNA, 636 bp, Homo sapiens
cttgccaccagcattcttattatccagacttgtgcctgccctgtcattttcttctcttacctcctatattcagccagttttcaagtcttaaagctcataattccaccttgtctttcctgtttgttcactctattttgtcaccacctagttcaggttctcattgtctcatttgggtaactcgtttttggtttgtttgttttgtttgtttgtttgttttttagacaaagtctcactctgtcgcccaggctgcagtgcagtggcacgatgtcagctcattgctacttccaccccctggattcaagcaattctcttgcctcagcctcccaggtagctgggattacaggcacccgccatcatgcccagctaatttttgcattttagtagagatggggtttcaccatgttggccaggctggtctcgaactcctgatctcaaggatccacctgccttgacctcccaaaccgctgggattacgtgagtgagccaccgygcctagcctgggtacctgttaaaatccattaacaaatcacctgtcctaattctgtcaacaattaatgaattaatcattgtttctggggatggagaccatgaaggtcttcaggtgatcttataaatattaaacagagagaactactt

SEQ ID NO: 780945 - DNA, 627 bp, Homo sapiens
cctcggtgtactcggcttcccactgtgccagggacttgactggaagggcgggcctgctagcggacttggggctgctgaccacaccgttgctggtgggcctcttgaggatgcggacctgtggagggggtcccgggggaaaattatcatcctgaatcacaatgggcactttgggagatttgaatttcctgctttctgtgtgatcttcagttttttttccagacgtctatttcyccgctgtctgccgtctcctcccagctctcagcaacctcctcatattccatcttactcgccactttccagatcgcttgctttcttatttccacattttctctgacttttgcagtattcaatattattacctgattctgatttttcagacatcactctatggtccttggctttttggtcgttcctctcattcctttgctgtttcaagctctgttcccagcctaagctttttaccaccgaattctgttctgtgacccataacttaaaactaacccaacttttcattccctccagactttttttggtaagcagtatcatcatgctttaggtggacactgagtcatactgctgtggtagtgctggtacacgtagttttgaataccaggttcttgagtgaat

SEQ ID NO: 780946 - DNA, 627 bp, Homo sapiens
cctcggtgtactcggcttcccactgtgccagggacttgactggaagggcgggcctgctagcggacttggggctgctgaccacaccgttgctggtgggcctcttgaggatgcggacctgtggagggggtcccgggggaaaattatcatcctgaatcacaatgggcactttgggagatttgaatttcctgctttctgtgtgatcttcagttttttttccagacgtctatttccccgctgtctgccgtctcctcccagctctcagcaacctcctcatattccatcttactcgccactttccagatcgcttgctttcttatttccacattttctctgacttttgcagtattcaatattattacctgattctgatttttcagacatcactmtatggtccttggctttttggtcgttcctctcattcctttgctgtttcaagctctgttcccagcctaagctttttaccaccgaattctgttctgtgacccataacttaaaactaacccaacttttcattccctccagactttttttggtaagcagtatcatcatgctttaggtggacactgagtcatactgctgtggtagtgctggtacacgtagttttgaataccaggttcttgagtgaat

SEQ ID NO: 780947 - DNA, 631 bp, Homo sapiens
cataacatggtttaataatgaaaccatatttcaaaataccaatacagtgtggttattactacttaatagaaaggttctctccctactagtgcccaataagaaactaatgaatattttgtttgtgaagaatggcagcaaacacccctttattggtattgctctggtttaaagacattattgatattcgtcaaactgcattgcatttactggttccattttaccaattgctaggatgcttctgagtttctgaggttttgacccatctggaagtctctgagccaccttgtctgggaaggaaaggccttctgctttagtggaagggccttgccaagagggtagaggcttaggtagagcccaagctgttttgtcatctggckatgtttgcaatcttgagcaagcacttgtctgaatctcagtgtagtcaacagaaagttgagagtaatagcatcagccttgcctcccaccagcctgttctaaggcttcagtggtgttattccttcaattagaactcactgcagacctcaactgaaactcgggccccttggtgctgtgttgtcctgcttagaggatgatttactaggttcaagttgagatgagggtgtcggcagacattaaaaccaaagtagcaaag

SEQ ID NO: 780948 - DNA, 665 bp, Homo sapiens
aaactatcagccttttttcttttcacttgctctggcctaaattcttatttttgtctctttctccctacaagcaaagctgttctttactgacatcatcaaccttctcattcagtcttgggataccacccagcaggtgcccccaaaccttgaactctcagagaagccatggtccatcccaacttaaatgaaactcagacactttagaggaagtcccaggaaagcccaaggctccagatggtcyacatagcactgaagcaccgctcctctgaactggacttgtttattgctccccagtagggaagaccctatggaacatcctaatgatgacttgacatcgggtagaccaaatgttcatgtccatttttcccaccaatcacaactctcttaaagttagtagtcacttgggagaccattaagtcatcctcctggttccaggaaaggggtctttttattattatgctttgtgattcagctcttgtcccaaatactctatgaaccccccaagttgagttaactgttcccctctgtgttgccatggcccctggatttccctacaccacagcactcatcacaataaatcataagtgtctttcagtttgcctttctcccactaggtcaatgttctcaaactgaagcctgagtcagaaccccatgcagggcttatt

SEQ ID NO: 780949 - DNA, 506 bp, Homo sapiens
ctatgcctcagttacttagggctcatactgtccctttctgggaacccctagggatagtagggaagatagtccatgagagctggttgctcagaagactgacacagaccaaggtgtgttctagtttagggggagcgagtctgggtgttaacagctaaggagtaagaagttakacaagtgctggtggatggcttgagggtctcacagtgactctagagtatcgctgatctctcgacacaagccctcagtgtggtgtttgatacacccatgacctgagctatcataaactctggtctgccctagggttctgaccagagacttgaaaccaaaaacttcagtagctcaactcctaacttgaccctgttccctggaaagcactactctaccctgagtcttcctaagtctagtcttgaagccaagaaaactgacattctctttccccaaactttgctttttttggaagaggccctcaaaatctccaggcttgtcactctgtgcaaggcattcat

SEQ ID NO: 780950 - DNA, 547 bp, Homo sapiens
gctggtggatggcttgagggtctcacagtgactctagagtatcgctgatctctcgacacaagccctcagtgtggtgtttgatacacccatgacctgagctatcataaactctggtctgccctagggttctgaccagagacttgaaaccaaaaacttcagtagctcaactcctaacttgaccctgttccctggaaagcactactctaccctgagtcttcctaagtctagtcttgaagccaagaaaactgacattctctttccccaaactttgctttttttggaagaggscctcaaaatctccaggcttgtcactctgtgcaaggcattcattcccaaggttgcattatattccaagatttctgttagagcttcagctactgtctggattctaaccaatgggaagattttaaaaaagggataaatgaggtaccactgctctaaggatagtgcctgggacctgaattcacaagttctacttatgttccatttgctgtctctttagtgagacgaccacacatagctaccagaaaaactgcctattctgggc

SEQ ID NO: 780951 - DNA, 590 bp, Homo sapiens
atgctgataggagtcagatacagaaggctctcccagccccttggtttttaacattcttcctcagcgtgggtacccagggctattggaatgcctggcctgaggatcagcacctagtcttccaggcatttcttccatttcttccttcctgcattctcccaacatctgcttttggatatgggtagagacttgagctatttctcaaccctgagagaaacagtctatttctcatttccgggaagtcgtcatcttgcatctggctgcttaccttgtgacttacctctagatgcctatttcaggaggcgaaaccaagcttcatctatagaccgacttttctcccagacttatatttaaatctaaagctctttatctccatcttatttcttcacatgcagttccatgcatctgttcaggaatatgtaatcagctcttctgtacctctgtccyaataatcttgctgaccaacagatgcctagaactgcaggttaacgtcttaacttcattcagtaaacccatcccttccatcttaaggctcctgtatgctagacccatggggtcctctgttctttcctcagctggaagtgtaagaagat

SEQ ID NO: 780952 - DNA, 618 bp, Homo sapiens
cccaagatattagaaataatattaccagggttgcatacacatggcgtactctccctgtgacattggcagcaacattcccctagaatattatgaataacatcagagggggtgtacacacataacgtatgcaccttgtaaaactaggagtagcatctccctaggatgttatgaataatatcacagaatgcgtacacacatggcgtataccccatgtgatgttaggagttacatccttctagtacgttaggaataataccacaaaggtgttcccacatggttaacagcatatggaatattaggattaacatccctcgagaatagtacaaataacatcacaagggctgtgcgcacatggtgtacatgccctgtgacattaggagtacatttccctgacagattacgagtaatatcacagagtgtacaccttctgtgacatttggagtaacatcccctaggatagtacgaaaaataycacagggtgtacctggggagtaacatctttctaggatattgtgaataatatcacaaaacgcacagcccctgtgacacgaggagtaacatccacctaggatattatgaatactatcacagggagtacaccccttgtgacagtagaag

SEQ ID NO: 780953 - DNA, 540 bp, Homo sapiens
cacactcggcccctgggagtgtcagctgggagacccggattgtgtctgcccctccaaatcacctctgctccccacctctttccatataaactccaggagggaagggagttgtggctgctttcttcactgctgtatctcctgtgctagaacagcgagtgcctggcatattatagatgctaataaatagttactcactaaagccaggactccacagagagtaggagaagtctgggaagtctagcagtcgaggaacygggggcaggtggctgtggcctaagtcctcagatgctgcgcccaggcccctggttctatgattcaggccagcctgctctagggaggtaacccctgctgccccatggtctttagccctggtggccccgccctggccctggcctggctggaagccaaagctccctggggcattccccactcctcatctgtggaagaggcatcccccacccacttcctctcctcctccacagccctgatcgccacctggccccatgtcctgggatccaccacctgcgaaggacgttagtg

SEQ ID NO: 780954 - DNA, 631 bp, Homo sapiens
gggagcttttaaaataataccagtctgggccccatcccagaccaatttcattagaatttctaggtgtggggaagtcatcacaatgcaatatactgagtgcaaagactgtaacagggtatgcaggcaagtgagaagggatcctgcagtaaggagatgaggacaagcagctgcaccatctgtgcctccattttctcatctgtagaatggggaatgtaacagtcccttgaaggactattgagaattacataaaatgatatawggaaatgcccagtatatagcagatgcccagtgttcatcacttcccttctttctccagaatgggcccctggttgactctgagttgagcagctgggctgctgtgtttagaatgtcccctacactggtccctcatcaaggacccttccccaccaagaaagaaaacttcatgactgttcatagtttggggcaagagttctcttcagcagccatctccataatcccagcatcttgattcgctgtccttaaaaacaggctgggtcccttggaaccagactttccctataagacagctcacagtgcagaccccagacctctaacacccccacaccctttcaaagaacacctattttttaaattttattttccataagtt

SEQ ID NO: 780955 - DNA, 410 bp, Homo sapiens
taatgcatttattagtttcaattttatattcagtttgccctctcatgcctctatgcctttgtgcttgcccacgccaaccccatctttgcctgggtaatttttactcacatttttacattcacaagcctcacaagcctcttcttccaagaagtcttctcttacagatacattccctccccaccctgctccatcygcactgggataaggggctcttcctatgcattgccatgaccctgtgctttcccacgtggcaactgtcatggctattgtggggtatctacagccaggctctggttgaccaatttctagagccttacagagattcatacggcttcaaaaggagaacctcattatgaaggtgcttcacaaataatacagtgtcacataaatgcaccatattatctattagt

SEQ ID NO: 780956 - DNA, 792 bp, Homo sapiens
gtcttccgggatcccaatttcttctgtctttaagagaactgagagttcatcacagctccctatgaaaacttctattgtaaattgcttcagaaaattcctggttttatgcctgttagtcacttacttaggaaaagtgctttaaaaaactgcttagctcctagatggctaaattgctaaattacctatatcaatcacgagttatttagtctacctccttgcctctgagacagataagagtatttcttctttataatgacccccagaaaaaaaatctttcatccttataytcattgtttcatgcactcaaagtttataagttcttcttcagatataacccaaatcccttttactgaagcttaagaccttttatgttttttctgttcccagtggatatcataaagaaaaaaaaaaacagacactattcagcatctacttgttcagtcttctgcccgaagttcttcagggctcacaattccattcaacatccttccaagcatgtgatgactgctcttaaaatcccctttactacctgcccatcacctcccaaccactcctttacattcatctcttctttagctctctgaaatgcagtacttgcctcactcaacacctgcttcaagaacttaatcagcacattcaaaaattatcccaggtcttccagcaaaggcaaagctggatatatagctcctccctgtaattcactaattcttctataaaatgcacagagacaagacgaaggttttgaaagcccaaagaaccatttcttatttgccacaacaaacatttcacagg

SEQ ID NO: 780957 - DNA, 593 bp, Homo sapiens
aagataaaatgaaaacaggataaactaagaagaaggagaagactgtgttctgggtgtttgtttataagtagcacacaaggcttgcttccagaggccagaagcaagggcttgattagcaagagggctgctcttgaataatgcacctgcagaaagtaagcatcttctccccagcatcatggatgttcaggaaaccaaataaaaacttacaatatagaatacagagacaaagtttaacatgytaggagtctggagttaccatgttattcaaagacagaattatataaggcaaatctagtcaagaaaatcattatggatgtatgcaaagggtaaacgacagggtttgcaatctttttaaatgaaaaaaaaatccaaaatgtccaacactaagagagtagtgaaataaatgatggtagcatagcataattgttgggtgtgtagggtctgaaatcagaatgcttaggttaaatcccaactctaccactcaagaattgtgtgacttttagaaaattacttaaattatttaagcctccatttcctcatctgtaaatgagcataatgatagcacctgcctcctagtattattacttagtaca

SEQ ID NO: 780958 - DNA, 593 bp, Homo sapiens
aagataaaatgaaaacaggataaactaagaagaaggagaagactgtgttctgggtgtttgtttataagtagcacacaaggcttgcttccagaggccagaagcaagggcttgattagcaagagggctgctcttgaataatgcacctgcagaaagtaagcatcttctccccagcatcatggatgttcaggaaaccaaataaaaacttacaatatagaatacagagacaaagtttaacatgctaggagtctggagttaccatgttattcaaagacagaattayataaggcaaatctagtcaagaaaatcattatggatgtatgcaaagggtaaacgacagggtttgcaatctttttaaatgaaaaaaaaatccaaaatgtccaacactaagagagtagtgaaataaatgatggtagcatagcataattgttgggtgtgtagggtctgaaatcagaatgcttaggttaaatcccaactctaccactcaagaattgtgtgacttttagaaaattacttaaattatttaagcctccatttcctcatctgtaaatgagcataatgatagcacctgcctcctagtattattacttagtaca

SEQ ID NO: 780959 - DNA, 542 bp, Homo sapiens
ggatccacatatacacacacaggggcctggcgaggagctcagtccagcagatgatcagcctcatgacatcagctcagatctgatcctgggacgcccaggttctccaaggccctggtgactccccaagcctgtggcgatagcacttacctgggaactccaggccccttctctgcaagacytctgatgtgtccaccacctgtgtaagtcccctctctcaggccctcagggctgctgcctcctcggcctcccagcctggctcaggggcagtcactcgctggcaggtaaaactgttccctgagctccccactggcctctgatcagaccaggtggacacccctcgggcctgggtcctgggcccatggctaatatcatctgaactaacatgtgattggccaagaggaaactggtctgactccctccctcccagctcctccccacctcaggggcatcagcaggcagcagcccctgcggcccctgccccgcaggcttcacttgaggactggacaaggcaatattggaaagtgcgcaagggcgcctcagcc

SEQ ID NO: 780960 - DNA, 578 bp, Homo sapiens
gttataattgaacatacattccttcttaaatatacaaaacaacataaacaaaaagacacttaggtaacaaaaaatagaaaacgagctccttaacttgattaacagcatataacaaaaccctacagaaaacattgctttttagtgaaacgtcttttyttttgatattgtaaataagacaagagtgcctgctattgccatttcttgtcaggactgtactggaggtcctaactaatgcatttatacaagaaaaaaagagaaaaccagtaaaaaggaagaaacaaactgttattattcacaaataaataaatgtgtacacaggaaatctgaaacaatctaaggataaatttttcagtaagagtttagcaagattactgaatactaaatcaaaacacaaaaatgagcagcatttgtatacactagaaacacttaaagatagtgacattttcaaaaaaaataccatttgtgactacatataaattacataagtatctagtaataaatctaacagatattcttgatctctaaggagaaatgtattaactttgctgggaatcattaaagaagatctaaattaatgg

SEQ ID NO: 780961 - DNA, 620 bp, Homo sapiens
ttataggttgtcctcagtcgccttctataagtgattctgaaagtttatcttgcagtgtttcccaaccctgagaaggttatatgtgtctcaccaaacctatggtcatttctaacctcttttctttccctgttgaacaccatctgtttgccagtgcgcacatatacatgaacacacacacacagtttggtaattgtctctgctaccaaaactagctattgaaaggtcaaggaggccgggcacagtggctcatgcctgtaatcccagcactttgggaggccgaggcaggtgaatcacctgaggtcaggagttcaggaccagtctggccaatgtgataaaaccccgtttctactaaaaataccacgccacactgggcgtggtggcgggcacctgtaatcccagatactcgggtggctgaggcaagagaatcacttsaacccaggaggcggaggttgcagtgagctgagatcgcgccattgcactgcagcctgggcagcaagagcgaaactccatcttgggaaaaaaaaaaggtcaaggattcccatgtccttttggcatcacagcataacttaaggcaagagaagtgcaagatatgaaaacaccaagcaactgtaccagagcca

SEQ ID NO: 780962 - DNA, 582 bp, Homo sapiens
ttaaccatttactgaattactcagttcttcacttctcatttgtaaaatggaaataatatctattctgtctcactggcttgatataattaaatcagctaatgtatttttaaattaaggctttatataattattggtttctaatgtggaagtaaatgtgagcgatgtttttaatttttatttaatgtttgcctttagagtagaatttgtagtcacttaagccacagggatctattaaaatcagtgttaactgtaggaataattatttttcccaggtaggttttggatatgaatcagtaccaccatccgtgargggaaaattatgctgcaaattgtatatttctaactatctttcatctgagaaaattggacagcaccatggtgagcccctggaggaggaaagggcaaacaatcttgccagaacttttccctgagtggcttagcttctccccactcaccaatggctagattttgacccgggcagttctggataatctgggatatggagaggaagcagacaccacatttccagattttaatgacttctctgctacataaaaatgtctctttctggatcactgagct

SEQ ID NO: 780963 - DNA, 593 bp, Homo sapiens
aggggatggtgggaaagctctttttttttcctcattttagaaagaaatatgggaagtcttagaatatgtaggaaattatttatgactgaaataatgatgccctctatatatttgcatatatatgtgtatatgcatatatacatatttttaataggcaatattactatttttactagcagcttagattttaaaaaaaagtttgcccaaaatagccaaataatttaattaagaagatattttaagttttttttttattttgagataggtactcgctctgttgcctagctggagtgcaatggtgcaaacatggctcactgaaacctccacmtcctgggctcaagtgatcctcccacctcagcctcccaagtagctgggactaaaggtgtgcaccaccatgcccagctgatttttttaaaattttttatagagtcagggtctcaccatattgcccagcctggtctcaaactcctgggctcaagcaaccctccttaatacacggcctccgaaagtgctgggattacaggtttaagccaccacgctcagcctaatctttaattattttgaaaatcacctgggttcccttcacgatttgc

SEQ ID NO: 780964 - DNA, 593 bp, Homo sapiens
aggggatggtgggaaagctctttttttttcctcattttagaaagaaatatgggaagtcttagaatatgtaggaaattatttatgactgaaataatgatgccctctatatatttgcatatatatgtgtatatgcatatatacatatttttaataggcaatattactatttttactagcagcttagattttaaaaaaaagtttgcccaaaatagccaaataatttaattaagaagatattttaagttttttttttattttgagataggtactcgctctgttgcctagctggagtgcaatggtgcaaacatggctcactgaaacctccacctcctgggctcaagtgatcctcccacctcagcctcccaagtagctgggactaaaggtgtgcaccaccatgcccagctgatttttttwaaattttttatagagtcagggtctcaccatattgcccagcctggtctcaaactcctgggctcaagcaaccctccttaatacacggcctccgaaagtgctgggattacaggtttaagccaccacgctcagcctaatctttaattattttgaaaatcacctgggttcccttcacgatttgc

SEQ ID NO: 780965 - DNA, 523 bp, Homo sapiens
taccctcccctgacacatgcacatcattctcaccacatgtacacctctaagctcagaattagggcttttacatcattaaatagaaccactatttacttagtgacttaagccaaaaacctagaaatcatctttgatttgtcatttttcctcataacccacactgaattagctctaattaattttaattaactagctcaaattaattctaacttggcaagccctatcaggtctatctcaaaaaatttatagtaatcctaatagagttaaagagggcctaataatcaacacttacattcccrtctccagttaagaaccaactgaaaatagacacaaaagtcagacaaatggagacaaatggaggtcaaaatattacctttatcagtattacagctaatattgacagctcattcttctgcctgcaggtaagaaggcatcctaatagtgaactcacagctagacagccttcctacccagtcccaggtggcatggaccaccacagacttcactgtgcagggcagagagt

SEQ ID NO: 780966 - DNA, 523 bp, Homo sapiens
taccctcccctgacacatgcacatcattctcaccacatgtacacctctaagctcagaattagggcttttacatcattaaatagaaccactatttacttagtgacttaagccaaaaacctagaaatcatctttgatttgtcatttttcctcataacccacactgaattagctctaattaattttaattaactagctcaaattaattctaacttggcaagccctatcaggtctatctcaaaaaatttatagtaatcctaatagagttaaagagggcctaataatcaacacttacattcccatctccagttaagaaccaactgaaaatagacacaaaagtcagacaaayggagacaaatggaggtcaaaatattacctttatcagtattacagctaatattgacagctcattcttctgcctgcaggtaagaaggcatcctaatagtgaactcacagctagacagccttcctacccagtcccaggtggcatggaccaccacagacttcactgtgcagggcagagagt

SEQ ID NO: 780967 - DNA, 622 bp, Homo sapiens
acattgagaccataagtatagcatctagggagggtgtaagaaataggaacgttgggaaaatgttttcaaatttctcaaagatagggttagatagtagaaactatctaaaaatgtccaaagcttatggaataagctatctgaatcactcaaagtaattcatgattctgtttgttccctgagatgagagttaaggtgcacatgmttaatctaagtgcattggaagaatgtacccaaagtatacattcctctggtccgtgaggcaacgtggtgaggcagcacagtgaggtgtccctatgactgccgctcagcccagctttgggactcgtgctttcttcctggaaaggggcaataaagaacagagcccctgtaaaccagagcacaagtaacatgtgctttagggctcaggaagagggcaagctgggagagaagggtggcaagaaagccattgagaacgcaattaagaagcagccatgcatgtgccactgttgggtgtgcagggggatgtcagggcagagggaatcacatggctgatatcaggagagaaaatgaggatgccaggagctaggaagacaccctctgaagcagataccctaagagttctgtgaagggtctgaggcctggg

SEQ ID NO: 780968 - DNA, 605 bp, Homo sapiens
agccaagactttttactaggtgctttctggtgtaagactagcctgtttggtcccaagttcaggtagcttctctagccaccgatttcctctaaggggcaagagggacctgctttgctcctgccaacccctctccagttagtgaggttctgctcctgatgctcagctggtctctgggagttgctctctataccagctaccttggactttgacaattgagtgtaaaatcttcaatagagtttggttactgcaattaccactaaatattcagctctytgagagtagggactttactccaatatatggatggggcctgttttcaatatgccactgaaaaaacactgaatgaataaatgaaacgatgaacacccagcctcagagctcccctttcataggataagggaacaatagagtgaaaacagccatttgaaacagtcttaaatttcatgtctgtctccctcatcttcttcttgtcttgctgatcctagcaattcccatctcagcctaagctcctgcatctccatcacactacccccaactcctaacccccaaccagtttctcatcttaactattttggccactcccttttggcataaagatgaatgtt

SEQ ID NO: 780969 - DNA, 587 bp, Homo sapiens
  misc_feature 18, 41: n = A,T,C or G
aacataattatgcctaanaactggagtgattatagttaaanaatcatttgtaaagattatagcttttttaaaaaaaatgttaaaataaaaacaaaatgacaataacaagatctcaaaactaactgtcatagattggggaaaaattcccagagcatctcattttaacatgatggggggagtgcaattgattattatcaatagatttggttttgaaaaatacaatttgatctcatttataaatattgatgtaaaaatccaaaagaaattaaatattaacagtttgattagcagattaatttatcaaatatttattgagcttctattatgttttaggatctaggtatataacaataaattaacagacaaaatttctgtctctcatgcaacttagattttacmccatgatcaatagtggtttacactaagaaaacacacatgggttagtactatggcatctatgaatataatttagaatcttatcaagtcaaaagtgaaaaaaatactattattttggttagttgttgaaaacttgataaaactcaaattttattcttgattataaaacaaaacaacaataacaacgtcct

SEQ ID NO: 780970 - DNA, 420 bp, Homo sapiens
tcttgttgacaccttgattttagcccagtgaaacatgtgttggacttgtaacctccagatctgtaatatcataattctgtatggtttaaggtttgatagatggttatggcagtcgtagaaatgaatacaacattatctccactatyattatggagtgctgtgaatatgaatattggaaagaaaacaacaataattacttgcaaatgatatggttgtatagctggaaaactcaaaataatcaaaaaactattagaaaatatcaagtgttcagtcaggaggatcatttattaatgtaaaaatagctttcttacatttcaacaataaactacgcattaatacaataaaatcccaattgttgtagcaaaaagccataaaacatataaagtaaattcaataagaaatttccaaggtgtgcttaaa

SEQ ID NO: 780971 - DNA, 420 bp, Homo sapiens
tcttgttgacaccttgattttagcccagtgaaacatgtgttggacttgtaacctccagatctgtaatatcataattctgtatggtttaaggtttgatagatggttatggcagtcgtagaaatgaatacaacattatctccactattattatggagtgctgtgaatatgaatattggaaagaaaacaacaataattacttgcaaatgatatggttgtatagctggaaaactcaaaataatcaaaaaactattagaaaakatcaagtgttcagtcaggaggatcatttattaatgtaaaaatagctttcttacatttcaacaataaactacgcattaatacaataaaatcccaattgttgtagcaaaaagccataaaacatataaagtaaattcaataagaaatttccaaggtgtgcttaaa

SEQ ID NO: 780972 - DNA, 617 bp, Homo sapiens
aaaactttgggattttaatctgtgtgtgcgtgtttgtgtgtgagagagagtgagaaatgtagtgtttcattttgtatgcattaaactgtcttgccaaaactcagatctaagattgttaaatagatatttggggaatttttttttaatcactttaaatgaaaaacgtcagctttactgggcattctggaagcaaaatatattatgctgatggtaaagtgagaaccttaagagtatactcatgatggtggaaagtgtgatggaccaaaatgcataagctatatacttcctgtgagtagtaattttagttacaatggagtagaaaaatatggtccatttaaacttgtcttytacctcataacggccttgcaagatacttttgaagaagcaaatgtctagagccttactttaagtaagttaaacaacttaagtggatgatttggaataagattgttacatccagctgtagaaaatgtggttttaattgggttgatgtgcatttttgaatatcacctaagacagttaatttttttaaatcttgagaaattacttctttggcattcttgacctgttagctaatataactatagattctgaatacttagcatatactatgctgg

SEQ ID NO: 780973 - DNA, 566 bp, Homo sapiens
actgtatccaaactattccatctcagactttgtcttattcctaaaagtactctatggaagaaaatatttgaaaatgtaatgggaaataatccaatctaaaacacagcacccaaaatttaaccttatcaataaaaaagcaaatcagtattttggtactatgatactactaaatattccacaaataacacactcagaagaraaaaaataaaattctatattcctgattattgcaaggtttaaaaaatcacttaaatctaaatactggagggaaatgtagtttgcagaaaatcatggaagcacactcatgctacagacaaaattgccctgaaatttgcccagttcagagcctcaatgcatacttacatattctccttattaaaatgctggaaattaatttctcgcccaagaggaattcatagtcccatgtttaaagcacaaagattacaaggggagcatttagattatctagagatgccatcatgtgaatttagcctattattattgaacattcgtagtttatggacaaaaaatagtaaatcagttcagcaggataggctgcttaagaa

SEQ ID NO: 780974 - DNA, 566 bp, Homo sapiens
actgtatccaaactattccatctcagactttgtcttattcctaaaagtactctatggaagaaaatatttgaaaatgtaatgggaaataatccaatctaaaacacagcacccaaaatttaaccttatcaataaaaaagcaaatcagtattttggtactatgatactactaaatattccacaaataacacactcagaagaaaaaaaataaaattctatattcctgattattgcaaggtttaaaaaatcacttaaatctaaatactggagggaaatgtagttkgcagaaaatcatggaagcacactcatgctacagacaaaattgccctgaaatttgcccagttcagagcctcaatgcatacttacatattctccttattaaaatgctggaaattaatttctcgcccaagaggaattcatagtcccatgtttaaagcacaaagattacaaggggagcatttagattatctagagatgccatcatgtgaatttagcctattattattgaacattcgtagtttatggacaaaaaatagtaaatcagttcagcaggataggctgcttaagaa

SEQ ID NO: 780975 - DNA, 569 bp, Homo sapiens
ttggtataatggcaacaggttctatcttacaaagtctacctaataggcctcatcaatatatgcagaagagaaattaactatcttggacccactttccatgaatagtgccagggacatgctagatacttcttaaatacttgatatctgactgttgactgatatcttagtgaactactgtggaatgcatttaacaaaatctttaaaatatgtattattccactgggctatataaacacacatcaaaacattctactgacatcgaaaaccttaattttatacttcaggcaataaaatacaaagaattataaagctacatcctcaagaatacagggtaaatttaacacattagtggaccaactttggcagcaagataccaaaatttactacccaataagatagtattttaaccagtgttgctgcataatttattttgwgtttgtgagctgaaaatacttcaaaatgatgttctggctgtgcgcagtgactcatgcctgtaatcccggtactttgggaggccaaggcgggcgaatcgcttgtgcccagaaaatcaagaccagcctgggcaacat

SEQ ID NO: 780976 - DNA, 585 bp, Homo sapiens
tacatgtttgcttttttgatttatcttccttagttatgcaagtgacctcggtatcttcctaataaaccttcctctatgtttagagttgattttgatagtattcccccaaaacttaaattgattcgatgatttgcctcattcatataattacaaaatatccccctaattggactcctttaactaaattttaaaccccttcacaccctrtctcactgccctgcacttgtcaccatctaacataaacattttacttacttatattctcttattattacattactcctaatagaatataagtcctatggaagcagaaattgtagtctgttattcccagtgctataattcagggtctagaatagtttctggcactcacttaggagttatttgttagatttgtagacatttatggtactaaaggtactgggatattatttatatctctcaggatttctaatctcttaaggaactctttctcctctcctctcctctcctctcctctcctgtcctctcctgtcccctcatcctccccttccagcctcctcctctctcattctcctcttcctttctcctacttttccctccctt

SEQ ID NO: 780977 - DNA, 621 bp, Homo sapiens
aacatttaatgaaagccttttattattgtttctctgggatggaatagtcatcctttgatgatgtctctatgtggacaaagaaatatacaatgtcactgacttttcaatttctgctgtgccaatgaggtagacaagtggatgatttggttttgattctcttgttatagtttaagaaaaagaattgcaatgattctttgaaaaattwagttattttaaacatgtagacatatttttagccaaaactatcttctaatgttacttttgcttgcctttgtgggaaatataaatgaaagtaataagggcgaaagaaaaatcatttgctatatcttattgtgtacgcattttaatgaggttaaatgattaacactgtcagtggacaaacttgtagctcccagagtgtccatacaatcacaggacaactttgcacaactcttactaaaatagaaataagagctatacaacatcactgctataaaatagaaggagccatataacagtatactttagaggatagtgtcagaaaatcatttttaggcctggcgtttaactttgaagcatactaaatgttgttttaaagttaattcatgtatacacacattgttataatagcaaccagctatt

SEQ ID NO: 780978 - DNA, 643 bp, Homo sapiens
aagaagtgtgtccaaatgtaaaagcctctaaaattagacatgcttgatacagaattttacaatactttgcctgctcaataagggatcactaggtaacattttggtaagactaacttaaatgtttcaaattaaatgtgaagattttttttctaaaccaaaatgtattcaaatgagtacatacagaactaaaaaaataattaaattataggatcttgattgaatcctcaaaaagcataatgttataatggaaaataagaattgtgcttattaaggaattaaaaaacaaagatggctataatcccacaggcatacaagggaatcttaccaaatrgtgccttttaaacatgtattcctgttggttctgagttcaaatcttagatagctattaagaattaaataaaatactgaggactaaaggaaattttttttctattctatttcattaggagcattttgaacaatattgcatgaaatactaacgtacatattaaacaatgtatgtatttatatgtccagaggctacaaagaagtaacagaaaaaacaaacaaaactttgttactttgttctgaagaaggccttagacttaaatgtacaagaaacagttatgagtcctatttttaaaattatttttaaaaccccaat

SEQ ID NO: 780979 - DNA, 667 bp, Homo sapiens
aaggaaattttttttctattctatttcattaggagcattttgaacaatattgcatgaaatactaacgtacatattaaacaatgtatgtatttatatgtccagaggctacaaagaagtaacagaaaaaacaaacaaaactttgttactttgttctgaagaaggccttagacttaaatgtacaagaaacagttatgagtcctatttttaaaattatttttaaaaccccaatgcctaagccacactgtggatsactgaaattggaattatttgtggatatcctagttgcattaccagtcaactctgcctcagtttcttcacctataaaatggtatgacagttgcagtcatcatcaccgtcatcatcattatccttatcatcttcaacttcatatcccagagttgatgaaggatcttaatgtttattaaatggtaaaattattagatgatgaaaagcttttgtgaataagctctgtttttctctataaaataaaataaaattttactgtaattaaaatatccactgtaaaattagagacaggtttgtgaattaatttgaacatctggcagcaatggtcctaggaaatcagatgattttgtgtgttatgtttataaattatccatggaaggaaagctaccagcttgagttctttgatattgacactaattta

SEQ ID NO: 780980 - DNA, 565 bp, Homo sapiens
tttcccactcaccattctgcatcttttcattcttaaaactaagccagccctggagaagcatccccactcccatcagtccaggcaccctattgccaatttggcaaacaagaaactgttgcttttgaatcttaggattgtgccacttacttaacagtaagccatgcttatggctttttaattaagttctgcaaccacaaggatactttctctatacccctattggtatgcactatttggacaatcctttcttctctttaatatgttagggttyttgctaatacatctgtgctttttttcatttatttttatagaagagacttaatgtttctattttgtatccctcatgttgcctctgaatgattttcaagaagggaatattgattttacccagccacattaaatataaaaattcaccctctcagtaacttacttttcttttaaccttttttttttatagactatatcattatttaaaatattctttttcgtgtgttaccccaacttgaaaagtaaactcaattaaaacaggaattttgactgcctcagttattctgcaatcacggtg

SEQ ID NO: 780981 - DNA, 617 bp, Homo sapiens
gacaaatggaagacgcagagctttggcaatattgggcttataaaagtggtattgagaaattttggtagaaagtcctccacagaaagcaggcaaaactagcacatctgaccctggtatgcagatcaacagcagcaggaagtaaatgagatcctgagyggaaaatgctgtcttccagattctcttttgcagcagatgtttatagttcggtttttgggatcaatggcagttaaaacagacagcactactgaagtgatttatgaagcgatgagacaagtattggctgctcgggctattcataacatcttccgcatgacagaatcccatctgatggtcaccagtcaatctttgaggtacgttcagttttattttcagactttcttatggcttcagctaattccccttttaaggctaatgcacccatctgaaatgttagtactggaatgaagagactactcttgcttttgcccccactactttttacataagatagatagcctagaaagtgctcccttagagacaagaactggtatcttcaaaaatccagtggtgagtgaatactgttgttcacaaagatgccatcacactagacttattctctatattatagctcagagctt

SEQ ID NO: 780982 - DNA, 613 bp, Homo sapiens
atagatctggtttctttgtaacacgaaatgcatacagactacactattaatttcctggttgcatataaaactaaatgtgatctcagtgaatgtgacatagaattttttatttgttagccatgctgaaggacactttcttaytgttaaattttttttttcttctgagatggggtcttgccctgtcacccaggctggagtgcagtggtgtgatcatggcttactcaggcttgacctcctgggctcaagccagccccctgcctcagcctccctagtagctaggactacaggtgtgcaccaccatgcctaattttggtaatttgttttcttttttaagatatggggtctcactgtgtagcctaagctggtcttgaactcctgggctcaagcagtcctcttgccttggcctcccaaagtgctgagattacaggcatgagccaccacgtatggcctaagatagattcttattttttttaaataattactggagaaatttgagtattttttaagttatatgagtatatgccatagaatctttgggcagaattattaatatataatcattttaagtgcttaatgtagaataactttagctgttattatagttttttctaac

SEQ ID NO: 780983 - DNA, 462 bp, Homo sapiens
gcgtgcctgtgatcccagctactcaggaggctgagacgcagaggttgaggctgcagtgagccgagatcgctccactgcactccagcctgggcgacagagtgagatgctgtctcaaaaaaaaaaaaaaaagagagagagagagagagagaaagaaggcctccctgaaccctgattttccctggagacctgaaggatgaagaggagttaaaggcagaagggaataaggagccggagaagcattccaagcagaaggccrgcacttgcagagggagggaggcaggaaggaggattgctcatttgaggaactgagagccagccagtgaagaagaagtggggctggagctggggtggagattgtgctgggtcttcaactttatcctcagggcactggggagccactggtggtttagaacacaggaatgacatgacctgactttcaaaggactcctctggctgctgtga

SEQ ID NO: 780984 - DNA, 632 bp, Homo sapiens
aaatttagtggacaatatacaaaccaagagagacaaaaactaaacgtacacactaaggactcctctgaaattctctttacaacccctaactgaaacccttaataattctttaaaaggtagaaatctctaaactgaaactacagtaaaaaaaaatactgggtcaggtgcagtggctcacgcctgtaatcccagcactttgggaggccgaggtgggyggatcatgaggtcaggagatcgagaccatcctggctaacacagtgaaaccctgtctctactaaaaatacaaaaaattatccaggcgtggcggcgggcgcctgtagtcccagctacttgggaggctgaggcaggagaatggcgtgaaaaaaatatatatttttttccgagatcaattttctctccctgcctgcaaatatacaattatctcccttatttataaaaaacaaaaagaagacctttatgaccctgctgtctataccaaccattctctttcctcaagtctttcacatctcaaacaaatggccagtacccagaagatgcctttatttctttatgacctacccctgattgggcttccacccccactactctgatcttagcagtgcactctcagtaatgacttcctttacaaattc

SEQ ID NO: 780985 - DNA, 632 bp, Homo sapiens
aaatttagtggacaatatacaaaccaagagagacaaaaactaaacgtacacactaaggactcctctgaaattctctttacaacccctaactgaaacccttaataattctttaaaaggtagaaatctctaaactgaaactacagtaaaaaaaaatactgggtcaggtgcagtggctcacgcctgtaatcccagcactttgggaggccgaggtgggtggatcatgaggtcaggagatcgagaccatcctggctaacacagtgaaaccctgtctctactaaaaatacaaaaaattatccaggcgtggcggcgggcgcctgtagtcccagctacttgggaggctgaggcaggagaatggcgtgaaaaaaatatatatttttttccgagatcaattttctctccctgcctgcaaatatacaattatctcccttatttataaaaaacaaaaagaagacctttatgaccctgctgtctrtaccaaccattctctttcctcaagtctttcacatctcaaacaaatggccagtacccagaagatgcctttatttctttatgacctacccctgattgggcttccacccccactactctgatcttagcagtgcactctcagtaatgacttcctttacaaattc

SEQ ID NO: 780986 - DNA, 629 bp, Homo sapiens
ggcaggatccctgcactctcaggtgcagttgcagcctcctagccatggcaccagatctgggcatccctgtgcactcagaagcccagaaagccatcctgccctcttcaggcttagaagggcctgctcctgctccctggcttctcctggtgcctgatctgattttggagcaaagttatggccaagcctgggtgctgtcacaacctggtgggtgtgtaaacacttggggcagcactgacacactaccccgccccccacatacccactgccatcttggccacctctgggcatccatgagtgtgggaggtaggccaggtgsggggtgagggcagctcagcagtgggtctgcaggtgcccctcagcacaaatagccacggcaccatggaccacatgttgacagtgggaggcagacaggttcctggatggaaaggggtggttccctggtgaaaccccaccttcaagccactgactgcctgaagcctgagggccaggctgccagttccagatggagtctaaggccagagtaagagcttatggtgctttttctgggctgcccatggccacctgtgaaccaatcaacacacactccctcccttctgagcacaagaaaaacccagactcatccaggctca

SEQ ID NO: 780987 - DNA, 635 bp, Homo sapiens
acttttttgacggaagaaattattttctaagtgaagcaactccaaaataaaaatgtgtgctcaagtgattaattaaggaagttccccaggaacaccatggaaggggaataggggaaacagaacaatgaaggggaagaaggcaagtgagggtgcaatctcaaggtccctcaagggtgttcagactgatccaagggatttatagagtgtgagttatgcctcaaagttgttctgacaaaaataagggaggtgggctttcatatctcagcacccactgaattaggaccacctgaaggctcatggaattttctaagtactcttggctctctagggatgtaggcaatgtgctctgtggcagcatgaggagagttcaccaaaaaaagatacaggtgctgcctaytggaaacaagaggtagtgtatttttgaaaaaggaaaaaagaaggatggaaaggaaaaagaaattttttttaagagtgaaggaggagaagaaaaaatgaagaaaaataggagaaggaaaaaacgaagagtcaagacttctaaatggggcactgatattgatacaggcttacatgaaataagaagactccaggaaaatttcgtatttgtaatctgatacatatttcatttttccttacct

SEQ ID NO: 780988 - DNA, 505 bp, Homo sapiens
aaccaggccattatatttctgtaccaagcagttctcggatgtgggatgtcttgagaagggacatgaacttggatgaaggaactttactgtgctgtgagtattgttgccaggagtcagctgtcaacactcccaggagacgggaaattatgctttagtcactgaggcggcatgtagtgtcagaccacagccttgttaaacagagccagaatttggaggatggttggtgggtttaacatttggggcttgacatcttgtccccacaagctgctgctggcctcttccttgtccatttctgtgtgacctgttaaggasccccagcttcctgcttcttctttaccatatttggaatgcaaaaatctacacgtaatttggcccatggacccttctgcttagacatatccttgtagctattttttttttaaaagatgactatgccttctagaatatttctaagaaactgcctaagtcaccactgctcaccaagaggcctttgttttttcctctt

SEQ ID NO: 780989 - DNA, 435 bp, Homo sapiens
tcctcgccagtctctctcacgtcttcacccccagcccttacggaccctccagtctgtcccagcatactctccaaccacgcccacatttcagcgcggggcttttccaggaaccctcgggatcaccaccaagcccaccactttcactgagttactccccagtctccagcacgtctttatctccaaccctcagggactcgcctgtctgtcccagctactctccaarcacgcccacacttcagcgggagtccgttgcaggcacccagaaatcaccaccaaactcaccaatttcactgcgttactccccagtctctctcatgtcttcaccatccctcagggactctcccgtctgtcccagctactctccaaccacgcccacatttcagctggagtccgttccaggcaccccggaatcaccaccaaactcaccaatttcac

SEQ ID NO: 780990 - DNA, 622 bp, Homo sapiens
gggagtccgttgcaggcacccagaaatcaccaccaaactcaccaatttcactgcgttactccccagtctctctcatgtcttcaccatccctcagggactctcccgtctgtcccagctactctccaaccacgcccacatttcagctggagtccgttccaggcaccccggaatcaccaccaaactcaccaatttcactcagttactcctcagtctctagcacgtctttatctccaaccctcagggactcgcctgtctgtcccagctactctccaagcacgcccacacttcagcgggagtccgttgcaggcacccagraatcaccaccaaactcaccaatttcactgcgttactccccagtctctctcatgtcttcaccatccctcagggactctcccgtctgtcccagctactctccaaccacgcccacatttcagctggagtccgttccaggcaccccggaatcaccaccaaactcaccaatttcactcagttactcctcagtctctagcacgtctttatctccaaccctcagggactctcctgtgtgtcccagctactctccaagcacgcccacacttcagcgggagtcagttccaggcacccaggaatcaccaccaaactc

SEQ ID NO: 780991 - DNA, 470 bp, Homo sapiens
accccggagtcaccaccaaactcaccagtttcactcagttactccccggtctcgctcgtcttcacccccagccctcagggactctcctgtgtgtcccagctactctccaaccatgcccagatttcagcgggggtcagttccaggcacccaggtatcaccaaccaactcagcaatttcactgagttactccccagtctctctcawgtcttcacccccagccccctgggactctcctgtctgtcccagctactctcccaccacgcccagatttcagcgggagtcagcctcccacactccggaatcacctacagactcacagacttcactgaggtcctccctggtctgtctcaggtctttgccctcagcccacagggactcttgtgtctccttcagctactctcaaaacttctctagattccagctggagtcagttccaggcacccacgatacaccaccgaactcacgaattt

SEQ ID NO: 780992 - DNA, 607 bp, Homo sapiens
gagttgtctaagttgagtgcaaattttcctctgatctttctgatgccgagacaaaaaaggcagtcatgtttgttatgtgattggaatggaacccgagaagagagcatgctgtgttcttgtgggacaggaaagcttgcgtgcaccaagtctgaaccaccaccttcattggtgacatagattatgtgctggaacatatttcacaccggcctggcagtaaacacttgtagtgttgtgcagtggaaacggtcatcttccgctaaagcacggcgtgttgtgcagcggaaatggtcatctgctgctaaagcacagcttccatcgtaatgtatgytccttgctcaaagagtgtggtcccaaacagcctttgggaggtcctccttgattcatggatgaaacctggaacatcttgaggactgagttaaccataggtccttaaataactctccacacgtttttcttagtttatctctacatgcagggtgtgcagcagcctgttcaaagtcatattttctgggaaatatttccagtgtttatttgcactttagcccactctgtgtagccttatttcttctaaactcaccattaacctgaataatagtcaaatttaggg

SEQ ID NO: 780993 - DNA, 594 bp, Homo sapiens
ggtagtgaccagcacaacatggaagaagccagggcagcatgcagccagctgctctgcagccccaaatggctcctgggccttgggaagtcactcataaaggggaagctggtcactttgaggtccctgaagggaagggtgaacgtgcatcccaacagccctggcagccagcagcatgccatacatattctcacccaacgtgtgtgacagaggtcccctcctggggcacaagtcccatacataaagcatcctgtcccagtcggacctcatcctgagccctgggaggggagggggaccatgggcccccctgcagcagccaggattaccacccaggggactcggccttctgtggccctggccagacttagaatttggcccaccacacacttactcggagcagcttctcagtacctggggcctgtgcataccaggcaaggccaagctggctcaaagagsaaccagccacctctgcaagggtatgccagtagcaggtggagcagtcaccaacctcacgcactcaaggaaacagggatggccagtttcccacagtctgagtgaccaccacctgacagctgatggagtggaggcctgaggaaa

SEQ ID NO: 780994 - DNA, 484 bp, Homo sapiens
ggaagcttatagctgcaggtgcttaaattaaaaagaagaaagatctcaaatcaataacctaacattacacctgaagggggggaaaaaaaaaactaatgacaaaccaagcaaaaggaagaaaataacagattagagcagagataagcagaataataccagaaaaaaaaggaaaaaaaaacacactgagttttttttaaagatcaataacaattttaaaactcacagctatattaagaaaaaaagagaaatctcaaatactaaaatcgtaaataaaagaggtgacagtacaacagatgccacagaaatgaaaaarattaaaagagactaatgtgagcaaccgtatgccacaaaactgggcaacctagaataaatttataaattcctagaaacacaaaccaccatactgaatcacggagaaataaaaaatccaaagagacctgtaactagtaagaagattcaaccagtaatcaaaaaccccccaaaa

SEQ ID NO: 780995 - DNA, 484 bp, Homo sapiens
ggaagcttatagctgcaggtgcttaaattaaaaagaagaaagatctcaaatcaataacctaacattacacctgaagggggggaaaaaaaaaactaatgacaaaccaagcaaaaggaagaaaataacagattagagcagagataagcagaataataccagaaaaaaaaggaaaaaaaaacacactgagttttttttaaagatcaataacaattttaaaactcacagctatattaagaaaaaaagagaaatctcaaatactaaaatcgtaaataaaagaggtgacagtacaacagatgccacagaaatgaaaaagattamaagagactaatgtgagcaaccgtatgccacaaaactgggcaacctagaataaatttataaattcctagaaacacaaaccaccatactgaatcacggagaaataaaaaatccaaagagacctgtaactagtaagaagattcaaccagtaatcaaaaaccccccaaaa

SEQ ID NO: 780996 - DNA, 633 bp, Homo sapiens
ggcagtttaatgtctgccagaacgtgcttttccctattaagcctggtgagacacagtctggagagaaacctcatgtccttgatataaccaggagatcccacagacgtcatgaacatcttactcagcatcacaagattcaaactctgctgcaggccttttcaatgtaatgaacaagtgaaaaccttcaacatggaggcaatgttctttatacataagagggttcatataggacagacctttggtaaatataatgaatatgagaaagcctgtaataactgagctattattgtccaagggataactcaggtaggacagccaacttgctgtagaaagtctgacttcaccaaacatcagcaaacacacacaggagagaaaccccatgaatgtgttgaatgtgagaaaccctccrttagcaaatcagaccttatgatacagcacaagatgcctactgaggaaaaaccttatgcctgtaactggtgtgaaaaattgttcagctgtaagtctggcctcactatccatcagagaattcacacaggggaaaagccctatggatgcaacgaatgtggaaaaaccgtttgccataagtcattcctcactttacatcagagaactcatactgggggaaaaccatat

SEQ ID NO: 780997 - DNA, 487 bp, Homo sapiens
aatcatcgagactccgtgggcataggaccttccgagccaggtgcgggatataatctcgtggtgtgccgtttcctaagcccatcagaaaagctcagtattagggtggcagtggcccgattttccaggtgccatctgtcacccctttccttgaccaggaaagggaactaacttcctgaccccttgcrcttcccgagtgaggcaatgcctcgccctgctttggctagtgcacagtgcacttcacccactgtcctgcacccactgtctggcactccctagtgagatgaacccagtacctcaaatggaaatgcagaaatcacccatcttctgcatcgctcatgctgggagctgtagaccggagctgttcctattcggccatcttggctcctcctcccattattttttaatattttctgaaaatcttctttaaagagagaaagccaaatgtcacccactttttcataaaaccttacaggcaaatctattattc

SEQ ID NO: 780998 - DNA, 487 bp, Homo sapiens
aatcatcgagactccgtgggcataggaccttccgagccaggtgcgggatataatctcgtggtgtgccgtttcctaagcccatcagaaaagctcagtattagggtggcagtggcccgattttccaggtgccatctgtcacccctttccttgaccaggaaagggaactaacttcctgaccccttgcgcttcccgagtgaggcaatgcctygccctgctttggctagtgcacagtgcacttcacccactgtcctgcacccactgtctggcactccctagtgagatgaacccagtacctcaaatggaaatgcagaaatcacccatcttctgcatcgctcatgctgggagctgtagaccggagctgttcctattcggccatcttggctcctcctcccattattttttaatattttctgaaaatcttctttaaagagagaaagccaaatgtcacccactttttcataaaaccttacaggcaaatctattattc

SEQ ID NO: 780999 - DNA, 665 bp, Homo sapiens
aatctatctgtgtgtatttattattatctacaaacttattggtcagatcaattatgaataaatacatgtttttattgtaccacaatgcctccctaccatccttccattccattccttgtattagtgttactcatttcaattgtatataagcatacataatatawctgtatttgttattgtctatgatcttcttggtcagatcaattaagaataaatacataggtttttattgtaccacaattctttctttaatgctctttttaaaaaaatgttgatccaggtttcagttatatatcttttgtttccctaaagaatttaatttaacatttcttgcaagacaggtctcctggcaacaagtttcttgaatttttatttttctgaggaaggccttaattctccttcacttttgaagggtggtttcagtgggtacagaaacttaggttggtgggttttttctgtcaacattttgaatttttcatttcactgtcttcttactttcacagtttctgaaatgttgaatgcagttcttatctttgtgtctctgtaggtaaggtgttttctgccccacctctggtttctttcagagttttcctttatcttttatttcatatagtttgaaaattatatgtccaagtgtaggttgttggtatttattctgcctggtg

SEQ ID NO: 781000 - DNA, 588 bp, Homo sapiens
ttctgatgtggacgttggattctcagaacacctggcttgtggctgatggctgctctcctcatcttcctgattgggtagctagtcaaattaaaaatagcaataataataacaagggtagaagagagtagagtcatgcttgggaatcaatctagtaaaaattgggattgtgtagataataatagcaatgattaaaaaccaatgcattacagagtgcccaaaatgtgccaactctaagatagttgctctaagcaatattttgcgtgaattaactgtctttgctccccaataattttgtaaattattttttgacgttatcatcattttgcaggtgtggaaatgagtgcactaagagtctagatgcacagtttacattatacagtgatgatgggagtggttggcactcaaacccacctcctgtgtcccagttctsacactgtaagcatttacatttctctgcctcagtaaatctcttttccagtggagcagagacttatttctgagctcatgggcttgcattgcctttgtcccctgctagacctaggtgtttttttgttttggtttggttttttgagacagagtcttgctcgg

SEQ ID NO: 781001 - DNA, 432 bp, Homo sapiens
cggcttccctatttttaaggtgtcgggactccaactgagctactgctggcttccttgctcctcagcttgcagatggcctattgtgggacttcaccttgtgactgtgtgagtcagtcctccttcataaactccctttcatgtatacatagattgtgttagttccgtccctctagagagccctgactaatacacccaatcagtgagtggctctcctccggrggatgtttgggggccaggctctcccatctttggctcctccttctctaacatgtggcttctaagcttgcggtgctgctgggcacggagctgatggaagaggacagaacctacaggatcacctatgggagcgtcacccaggccaggtgaggaaggcagtgccacatgtctgcaccccctgccactggctgcgaacacagtcccatgactcacagc

SEQ ID NO: 781002 - DNA, 665 bp, Homo sapiens
ttattttgaatgctgcttgttgctttgctaatgggaaggaaactctgaggatctcaaccttacatttaactggtcttgaccataaatggcgtttgttccttctgttctgaattctctggaacaaattactcatgtggaaccacctgaccatgaaggcactagaaagttcaatcctgccatgtgctagaaaatgatttggtaaaactattatttctctattattaatatctatatcttcyctattattaatagggaagatacagtggacaaccttagcatgccagaagagaaaaatgagatcacaccattgaggcattgaatcaactccagattgactgattccagatattctgtctattaggataaaagcctattgttgaagtagaaagagttgaatatcctgaaacttgcatctaaaagcaatctcaaaaacacagcttcacgtcaatggagttggctgccttcctgttttgataccctgctctctctgaatttaaatgatctttcacttcaattatgaatttcttatttatttatgtaagccaatttgtatgaaggtatctgttccccttcaaagaatacacacacttgacccaaaaaaactgaatgagttatactaaggatctaaacccatgtggcccagcccatagtctaatatgagaaac

SEQ ID NO: 781003 - DNA, 643 bp, Homo sapiens
catcacgctcgtaaaacacttagcagactatctgatgcattgtgcatgggggcgctcaccaaataagttgatgttaccatcattattttgaggcttcctggtgtgtgcaggggcacataacacaagttgtggctgcctcaccagatgcaagagacaggccccaaattctcctgctgttttcgtttgtttgcttttatgtctttatatatcgtgtcagagtgtgtgagcagagtttaaactcaagcccacaataacgacaaccagcatgggatagacctggatccatcagactggtgagagggaccctgttatgggctggtcagaggggctggagactggagtgggctttaccttcagtactgggtggaagaaatttcatctcttgccattcacaagaaagccttgtgctttggaggacttacaaatgcttcagtgaccttcccattctggctggtgggaattggcacctgtgtgagctctgagtacttttccctyactccctttgaggtggttcttccttggctaacctcacatgcgtgcgtggatcagaatcctgctgaggacttcacctgggctcgctgtacagcccaagagtttcttctaggtgcaactttcctcatctttgttaactctgcttgcaaat

SEQ ID NO: 781004 - DNA, 619 bp, Homo sapiens
atcagattgactcaaggctccagagaaactcaaagctccatgacatgatttctttcttattggtaggcccaggcgggtggaacacctgaggtcgggagttcgagaccagcctgaccaacatggagaaaccctgtctctactaaaaatacaaaattagccgggtgtggtggcrcatgcctgtaatcccagctacttgagaaggctgaggcaggagaatcacgagaatcgcttgaacccaggaggcagaggttgaggtgagccgagatcgcaccatttcactccagcctgggcaataagaatgaaactccgtctaaaaaaaaaaaaaaccaaaaaacaaaaaaacagtgttttcagcagctggcaaacattaagagcctatcaaatgcttatctaatattaaatcaatacagtttagcttcatcaaaccacatattcgggaagcatgtcacatttccaatatggacattattagtgaaatttgcaactatgcaactgtgccaatggccaccaagaattcaatagcaagcctagagatcaagtaatagagcgctctgcagtgcagttgctgccaaataatataacaacatgtaaaaagtatttcagtaatttgggagtgaaa

SEQ ID NO: 781005 - DNA, 619 bp, Homo sapiens
atcagattgactcaaggctccagagaaactcaaagctccatgacatgatttctttcttattggtaggcccaggcgggtggaacacctgaggtcgggagttcgagaccagcctgaccaacatggagaaaccctgtctctactaaaaatacaaaattagccgggtgtggtggcgcatgcctgtaatcccagctacttgagaaggctgaggcaggagaatcacgagaatcgcttgaacccaggaggcagaggttgmggtgagccgagatcgcaccatttcactccagcctgggcaataagaatgaaactccgtctaaaaaaaaaaaaaaccaaaaaacaaaaaaacagtgttttcagcagctggcaaacattaagagcctatcaaatgcttatctaatattaaatcaatacagtttagcttcatcaaaccacatattcgggaagcatgtcacatttccaatatggacattattagtgaaatttgcaactatgcaactgtgccaatggccaccaagaattcaatagcaagcctagagatcaagtaatagagcgctctgcagtgcagttgctgccaaataatataacaacatgtaaaaagtatttcagtaatttgggagtgaaa

SEQ ID NO: 781006 - DNA, 619 bp, Homo sapiens
atcagattgactcaaggctccagagaaactcaaagctccatgacatgatttctttcttattggtaggcccaggcgggtggaacacctgaggtcgggagttcgagaccagcctgaccaacatggagaaaccctgtctctactaaaaatacaaaattagccgggtgtggtggcgcatgcctgtaatcccagctacttgagaaggctgaggcaggagaatcacgagaatcgcttgaacccaggaggcagaggttgaggtgagccgagatcgcaccatttcactccagcctgggcaataagaatgraactccgtctaaaaaaaaaaaaaaccaaaaaacaaaaaaacagtgttttcagcagctggcaaacattaagagcctatcaaatgcttatctaatattaaatcaatacagtttagcttcatcaaaccacatattcgggaagcatgtcacatttccaatatggacattattagtgaaatttgcaactatgcaactgtgccaatggccaccaagaattcaatagcaagcctagagatcaagtaatagagcgctctgcagtgcagttgctgccaaataatataacaacatgtaaaaagtatttcagtaatttgggagtgaaa

SEQ ID NO: 781007 - DNA, 632 bp, Homo sapiens
ctttctcccagttcctttccggaatgccaatgacttatagatttggcctcttgacctaatcccatacttctcagaggttttgtttatttctttttattcttttatctttatttttgtctatcttatttcagagaaccaatcttcaagctctgagattctctcctcagcttggtttaattctgctattaatacttgtgattgcattgtgaaattcttgtgttattcagctctgtcaaactcacttaggtcctttttcatactggctgtttcatttttcagctcccataatgttttattgtaatttttaatttttcttggattgggttttgccatcctcctgaatctcaacgatattcattcctatccatatgctgrattctatttctgtcatttcagacagttcaggctggttaagaactcttgttggagaattggtaaagtaatttggaggatatacaacactctggccatttgagttacaagactgcttgtgttcattctttctcatctctgcacgtgggtgttcctttagctgtagtgtggattgagtagtcaatagatttcttttctggatgttttcaccaggctgaagctttgtgcagggtctttatttgaagctggcttcttgtctc

SEQ ID NO: 781008 - DNA, 517 bp, Homo sapiens
gcttccagtcccacctctgccacttagtggctgtgtgtctttgcattacttaatgtcttcaaatctccatttctttacctgtaaaatgagtataatcatagctgtctcatagagatggtgtaataattgaataacataagtttagcacagtgccttgcacatagtgagcactcacaaatgtcaactgttgttattattacaactattaaatggtactagcagatacctttgtgcaacatatgcaatatgtctttatgaggcattcctaatttcacatttatctacagatatacataatcagaaccaaatgattacyaaatacattggtttatgtcatctagttcccaaaaagtaaatctcattggccacacacattctacctccacaactttgtattcctgatgtgtcctaatctataaaactgactcacactgcatgaattcaaataacattgtgttaaaaagaaaagaagacagagagagagacagtgacaatgtgagaaggaagctgttagtac

SEQ ID NO: 781009 - DNA, 596 bp, Homo sapiens
cagtgggaggaaaaggacccttggagtccagtgaaagctggagccatggaggtgaggtcacccagtgagtgatgtagacatggggagccacaaaccctttcagatatataatacagaagcagagagggagtagaggcattgatacccaagctctctctcttgccaccctcagtcttctgctggtgtttatcattggtcaaacccaactgaaagccggggtaagggaacatgagtttcatagtctgygtgcatcacaaagagggcagagcaaggtagagaattaaccttcgagatggaattggagttagaataaccagcatccttgattcaaggtggtaaaagggaagacaatgctacctgcctatttgttaaggagactgagttgacaggaacaaagtttatcgggtgatattcccatgcagaatcaacatagaagctcctcattctttggcaagaaatgttccctccaattgtatatatttgacattggtcggagtgatggatggagagaaaaaaataaaggatactaggtccttggtgtgttgtttcacgtgaagaccacaaagattttctagcggagagatgtattcttatgg

SEQ ID NO: 781010 - DNA, 596 bp, Homo sapiens
cagtgggaggaaaaggacccttggagtccagtgaaagctggagccatggaggtgaggtcacccagtgagtgatgtagacatggggagccacaaaccctttcagatatataatacagaagcagagagggagtagaggcattgatacccaagctctctctcttgccaccctcagtcttctgctggtgtttatcattggtcaaacccaactgaaagccggggtaagggaacatgagtttcatagtctgtgtgcatcacaaagagggcagagcaaggtagagaattaaccttcgagatggaattggagttagaataaccagcatccttgattcaaggtggtaaaagggaagacaatgctacctgcctatttgttaaggagactgagttgacaggaacaaagtttatcgggtgatattcccatrcagaatcaacatagaagctcctcattctttggcaagaaatgttccctccaattgtatatatttgacattggtcggagtgatggatggagagaaaaaaataaaggatactaggtccttggtgtgttgtttcacgtgaagaccacaaagattttctagcggagagatgtattcttatgg

SEQ ID NO: 781011 - DNA, 637 bp, Homo sapiens
ccattctttcaggaaccatgagtacattaatttattcaggtcttataattgattgaagaaccatgacatggctcaacactcaatgtgacattctacaagggtcaagttattcaacttatatttgctatacctaaatatttttggatatgtaataatttgggtcattagagaatttattwttaattagttaccaccaaaaattctggtggttttatactcactagttgtaagatcttagataagtgtcataagatttaaatgccttagtttccttatctgtaaaacagattatagtacctgtctcatggattaattctgtggattaattgtgagaacaattaaagtggttagaatagtatcaagcacaaaataagtgttcaataagtgatagctattatttttattgaatgtagatcaatatctttagtttgccaataaaagcccttcatcctcttattatcatcttacccttcactgttattttacaccaaccacgtttcatttttgcttagctggattacatcatgttttctgacaagtctctcacttctgtgttttgacatctttttctgacatgtcctttcatggaacactgcttattggatttcacacattttccgatgttcatatcaagtgc

SEQ ID NO: 781012 - DNA, 619 bp, Homo sapiens
gggattggtcacattccattgcgtgacatctgacactaactgtttttaaacacagggctgcttcttcaattattaatttctacctaagggcaaatgccaagagaacttactttagtttctacctcctgctgccatttcaactgtcaagaacagcaggagtcaaaaatgaaaggcaccaccttagagaaaggctgtggcacagtgtcattttaaaaactgacagctttgtgcagtcccaaatcttaaggaaaagggattgtcacttgtgcctcctattgccattttgacaaaggaagacattctcccacatccaaaggcaacagtaatttaaaaatggcaagtagaaacatatttgcaagaagcaagtgggaacttctttactgtaagctcatgtgggaaagggaacagctgaaagtctattcattcattgaaaaaacaaccacattttaatgtctgccyattaatataataaaaagaggctaacttccaatgagagagggtacacaataagccaagatgataaagcaatgccaaaattttagttaatttttctaaaaaattaagagaaaccatattagctttgcattaaaaaaaaaagaaaagataacactgaaggatt

SEQ ID NO: 781013 - DNA, 524 bp, Homo sapiens
aattcccttccccttctccattcttgtgagctctctttgataggaaaaaaagatacaaataacaggatgcaaattacaaatataccaggcatctgaaagaatgagaatagaacctacaaagatctcacaaaggaggagggcagtggtgtactggcagctagactgaaaaaaaaaaaaaagccctcatttgtacttgtgatagtggaaaaactcaaactgtttttcctctgttctatcaccacaagcaacacagaagacttctgtgaccaaatgtgtggggtttctccccacacagctaagcaagcaatcagctctgcagcagacaccarctgggtgccctccaattcaattcaattcagccactatctggagacagcctcagatcccacaagttgggggctcagtcacacaaaaccaccccctccttcccatcagcataccccagcctctagaatttctaatgcactggcttcaaattgggactctcagagccccctctttgggttcaattaattttctagagc

SEQ ID NO: 781014 - DNA, 597 bp, Homo sapiens
tgcgtgaacatcatcaagggtccccacaggtggtagcagctgtcagagtaagtccgtcagtatattaggggtgtgtacacttcctttccaatcagtaactccagtcaattatagtccaaagtggggtgcagtggtttaaattcagtagatgattttggagagcacacagttttaacaaatatatcttgataaggttgagaaactattggagacaatctagtaaactaagaagtacttgcaacgtgatttttcatgcaaataagttgcaagttagccttttcccttcgtgtaaaatatgtactattccagagagatggggtccagactattataggcatagtataatgaacctcactgcagagtgtactcagccaggagctggtgatttggctgtaatggttrctgaaatattctgaattggttgataaaagctgctgcccttagttcctcacaggcaaccatccctgccctgcccattttcctaggactaagcaacttcctcacaacctggcaaatgaaagtttaagcccttaagccctgatgcagcaagggctccctctgcttggatatccccatgtcacaccagctgttaactat

SEQ ID NO: 781015 - DNA, 426 bp, Homo sapiens
tctagctctctcttcctatatttccatttatgagtgttcagtgtatgtagggtctggccatttaggaaagtcagttttgggccagagtgcctgtcacttgaaaccattattttagtgattgaaagttttcttcaattaatcaggaccttttggggttcaagtgacagaatccaactcaaattagcttaagtaaaagtgggaattagctcaaataccagaaaagtccaggatggatagctgctccaggagtcgmaatgatgtaatcaagcttcacctcccaccactggtgaagatggtttcaagcattctggggctcacatgcaacctgcttagcaactcccactgaggaagagcttcttcacattaagtccaccaggaaagtcctgggagaggactaaatcatatgctcacgtgtgaacccatcac

SEQ ID NO: 781016 - DNA, 513 bp, Homo sapiens
tcattgtctcttttgatctttgttggtttaaagtctgttttatcagagactaggattgcaacccctgcttcttttttttttttctttccatttgcttggtagatcttcctccatccctttattttcagcctatgtgtgtctctgcatgtgagatgggtctcctgaaaacagcaaactgatggttcttgactctttatccaatttgccagtctgtgtcttttaattggggyatttagcccatttatatttaaggttaatatggttatgtgtgaattcaatcctgacattatgatgttagttggttattttgctcgttatttgaagcagtttcttcatagcattggtggtctttacaatttggcatgtttttgcagtggctggtaccggtcgttcatttccatatttagtgcttcctccaggagctcttgtaaggcagggcaggtggtgacaaagtctctccacatttgcttgtctgtaaaggattttatttttcctttgcttatgaagcttagt

SEQ ID NO: 781017 - DNA, 640 bp, Homo sapiens
gtaggtatattcccaaaggcaaataaatcattttaccaaaaagacacctgcactcaaatgtttatgacagtactattcacaatagcaaagacatagggtaaactcaggtgtccattaatagtgagttggattaagaaactgtggtacatatacaccatagaatactacacagccataaaaaagagcaaaataatgtcctttgcagcaacacagacgccgctggaggccattatcctaaggaaattaacaaattaagccaaccaaatatgctcacttataagtgggagccaaacattggctatacayggacataaagatgggaacaatagacaccagtgactccaaaaggagagaggagggagggggacaaaaggcaaaaaattacctattggatactatgttcactgcccgggtgacaggttcaagtgaagctcacagcatcatgcaatatatccatgtgacacacctgcacatgtaccccctgaatctaaaataaaaataaataaataaataaaaatgttttcttttcattctttttggattgttttgatcacatcaaaatgtcttcatgtcaatagtacaagaatcttcattgtagcattgtttgaaatagtaatatgttggaaacaacttcaatata

SEQ ID NO: 781018 - DNA, 453 bp, Homo sapiens
gtatttttaatagagacagggtttctccacgttggtcaggctggtctcaaactcccaaactcaagtgatccacctgcctcagcctcccaaagtgctgggattacaagcatgagccactgcacccggcatgggaagttttaaagctactgattaaatttctttacttgttataggtgtatttagcttttctatttcttcttgmgtcagttttgacagtttttctctagaaatttgctcatttaatctatattttttaattttctgacatacagttgatcatagtattcctttatggttttttaaatttctgtaaggctggtagtaaagcctctgtttcattcctgattttagtaatttgagtctctttttttcttggtttagctaaaagtttatgaattttaatctttttaaaggaccaacttttggtttcattgattttctttactgtcttcc

SEQ ID NO: 781019 - DNA, 453 bp, Homo sapiens
gtatttttaatagagacagggtttctccacgttggtcaggctggtctcaaactcccaaactcaagtgatccacctgcctcagcctcccaaagtgctgggattacaagcatgagccactgcacccggcatgggaagttttaaagctactgattaaatttctttacttgttataggtgtatttagcttttctatttcttcttgagtcagttttgacagtttttctctagaaatttgctcatttaatctatrttttttaattttctgacatacagttgatcatagtattcctttatggttttttaaatttctgtaaggctggtagtaaagcctctgtttcattcctgattttagtaatttgagtctctttttttcttggtttagctaaaagtttatgaattttaatctttttaaaggaccaacttttggtttcattgattttctttactgtcttcc

SEQ ID NO: 781020 - DNA, 612 bp, Homo sapiens
caggaaaatgaatcatttcatattaggggatggggcgataatgatgataaatgcctttttgaaagctttgtgttccaaccataagcccttctctaatagttcttcggagctgattagaagcttaaaaagccccattttggtcaagagctggtaattcctagtttccctttggtggaaataattggtctgataatatccaaataatatttattaattaaataatattcattttatgtgattgtactatgtacatgttaattggatgctgaataatcagttttactatcttcattatgtaagtaatgcataaatccaattttgtttaagagttacagataatatgtactatgcaggagaaaaatagaaagtctttcttcaacatccttctcccacctgcctcagccatcctgttccaggtgtagccacagccrgtagatgagtatggatccttaattctccttgctgtacacacacaagtacgtatatgaatgtacataaacaaataactttttccataaatgagaacacactgtaagttttttcctgtgaccttttttccacttgacatgttgaggaagtcttttcattttaatttgatacaatgcctctatt

SEQ ID NO: 781021 - DNA, 538 bp, Homo sapiens
attacacagttaatgttattgtagagtccaatgtgaaatctgtgcatttaatatggatatggaaagtatagaattccagtggctgattttatccagctgggaatatgttcccttcaagcttgggaggggtcacccatcaaacagaattgaacagaaaaactaagcatccatcttaaaaagaagacaaggactcactagcactgcaactcagcttctgtgagacttcagctttggccttatcatccctcatttcccattaaataatttcctgtatttcatagcaatcccaggctgtctgccttttgaccttggcttcctgakgctgctgaagttgtgtgaagattctgttcattttgggtctctagtgaattaggacgtgattctattcagttcatgcaacaaatgcccattgagtgtttctgactttttgggcactgttgcaggcacagcaggacttatattcataacatttaataagtggtaaggtctgggtaccaaccaccctggtactagaaggttgtcacagagggtttccagt

SEQ ID NO: 781022 - DNA, 613 bp, Homo sapiens
tggccaagtggcaagcagaagaaaggtatcccagcagaaagatttgcatgaataatggagaccagcatgtatgctaccaactagaaaaagcaagaagttcagtttggctggaatacaagtgcaagcagtgtctggtgcrttgggatgctagattgcagttggaataaattaatatctcactgaggatcttggaccttattatatggtgtggtagtgataagcccctgcaagaatcagagctccctatatccctgttgtgattctgggcttggctaatggtacgttagcaaatgtgatacaagcaaagcctgagaagtacttccatattggggcttggcttctcttgctgcccttaggaaccctaagatcacatatgaagaagccaaggcttagcctgccagaggatgagagaccaggtacaccaaagacaagctgtcctcaaaaggctcccataccaaccagcctacccaccttcacacccatgaatgaagccatcctagacacaccagccccagcagaggtgacccacaccagaaggatctaactaaccctcagaattatgataaataataattctttgttttagtccactaagttttagagcggtttagta

SEQ ID NO: 781023 - DNA, 598 bp, Homo sapiens
cctggacacttaaactcatgccgcaaatgacttcaacttttttgatgaccgcactagaccatattatttccttcagtacatatttctatccaggattcattcaacaaatattcatggtgcatggcccaaaagtgttcaggatgatccagatgttgagactaacctcaggaagctaaraacctaatggagtgacgagtcaggtccatgaatgaccagaaattatattcagaatttttaacaaatgtaaggcatgggcactgaccaatcagaatggatttctctatagaactgcattagggtgttggaggacccctggcattccaggcattactctttcagttgttggatcatagggagattcaatggggctgggagtggggccagggttctgggtcactcagggtgtttaggaaagagactatttactaattgattcaattttacagtcactggtacatcagaattagtatatacttgttgattatcaaccctataggagatattacagaggcaagaaatctatcagttagctataactacctaacaaactcccctaaagcactgtgactttaaataatggctatcaattactatgttt

SEQ ID NO: 781024 - DNA, 598 bp, Homo sapiens
cctggacacttaaactcatgccgcaaatgacttcaacttttttgatgaccgcactagaccatattatttccttcagtacatatttctatccaggattcattcaacaaatattcatggtgcatggcccaaaagtgttcaggatgatccagatgttgagactaacctcaggaagctaagaacctaatggagtgacgagtcaggtccatgaatgaccagaaattatattcaraatttttaacaaatgtaaggcatgggcactgaccaatcagaatggatttctctatagaactgcattagggtgttggaggacccctggcattccaggcattactctttcagttgttggatcatagggagattcaatggggctgggagtggggccagggttctgggtcactcagggtgtttaggaaagagactatttactaattgattcaattttacagtcactggtacatcagaattagtatatacttgttgattatcaaccctataggagatattacagaggcaagaaatctatcagttagctataactacctaacaaactcccctaaagcactgtgactttaaataatggctatcaattactatgttt

SEQ ID NO: 781025 - DNA, 568 bp, Homo sapiens
accgacgactttggcctgatggatgacaccctggaggtacttttccagagctccctcacagataggttgacaaggctgtgtcaggcctgcatcccaatttgacttcttttgtccaatactactccccttcctttctactaacactgctctctgataaatatcttcagtcccaaactccatctggcatctgcttccagagaacccatcctgaaagaccagcatggatccaaccacaaaggctctgtgtatgaagctgagatgtgttccctgagttcaagcatttcaaaatgagaaccaactaatgaactgtctgtcctctgacraactcttcagagtctctccaagtctgaaatagatgtcccatcctgttacaaagttgaaacatctaaactctggtgagaagattagagaaaaagaatagaaaccaacgccattgtattcattcaacaaacatttcctgaatgcctagtcagcatcagatactgtctgatctgagagtaccagacctcaagagtaagacatggcacagggccctctcatggaaggcttcctgaaggagatagctcct

SEQ ID NO: 781026 - DNA, 568 bp, Homo sapiens
accgacgactttggcctgatggatgacaccctggaggtacttttccagagctccctcacagataggttgacaaggctgtgtcaggcctgcatcccaatttgacttcttttgtccaatactactccccttcctttctactaacactgctctctgataaatatcttcagtcccaaactccatctggcatctgcttccagagaacccatcctgaaagaccagcatggatccaaccacaaaggctctgtgtatgaagctgagatgtgttccctgagttcaagcatttcaaaatgagaaccaactaatgaactgtctgtcctctgacaaactcttcagagtctctccaagtctgaaatagatgtcccatcctgttacaaagttgaaacatctaaactctggtgagaagattagagaaaaagaatagaaaccaaygccattgtattcattcaacaaacatttcctgaatgcctagtcagcatcagatactgtctgatctgagagtaccagacctcaagagtaagacatggcacagggccctctcatggaaggcttcctgaaggagatagctcct

SEQ ID NO: 781027 - DNA, 622 bp, Homo sapiens
aagaggtctgggtcttagtcctgtggggccccttgtctgatgtcaggaatcatcatcatccctctcctcataggttgagtttcagctcagcgggggccccttctccaatctgttcatggtaaagaagggcacaccagtataatacaatacaaaagtctcagtaatgtgaccatgatagagaccccaagaaagggttttttgttgttgttgcgttgttttgttgtkttgttttgttttgttttgttttgttttgagacggagtctcgctctgtcacccaggctggagtgcagtggcatgatcatggctcactgcaacctctgcctcccgggttcaagtgattctcctgccttggtctcccaagtagctgggactccaggtgcatgtcaccatacctagctaatttttgtattttgagtagagacggggtttcactatgttggtcaggctggtctcgaactcctgacctcaggtgatctgcccgccttggtctcccagagtgctaggattataggcgtgagccactgcacctggcctaagggtctttcttgagatataggagagttagagaggatttgctgatggggaggttctctgtctgctgaggctggggtggaagagatg

SEQ ID NO: 781028 - DNA, 594 bp, Homo sapiens
ccacttggtcatgataaatgatctttttgatgtgttgttagatttggcttgctagtgttttgttgaggatttctgcatcaatgttcatcagtaatactggcctgtagttttctttttttgatgtatctttgtctggttttggtatcaaggtaatactgaccttgcagaatgaacctggaaggagaaactacttccatttttcagaatagtttgagtagagctggtattaatttttctttaaatgtttggtaaaatttagcagtgaagtcattggatcctsggcttctctttgctgggagactttttattacagctcagtcttgtcagttgttattggtctgttcaagttttggatttcttcatggttaaatcttggtagggtatgtgattaggaatttatccatttcttctaactattccaatttttttggtatatagctgctcacactagtctctaatgatcttttgaatttctgcagtatacatcataatgtctgttttttcatctctgattttactggatcttctctttttcttagtctggctaaaggtttcccaattttgtttatctttcgaaaaccaacttggtgaaaa

SEQ ID NO: 781029 - DNA, 616 bp, Homo sapiens
gtaatatgggatcctaagttgttgctgtctttgtttttttttttaaataggtaaatttgttttaaaatttaaaaacgttaaaatgcaataaaatttactgtttttggtgtacaggtctatgagtttggacaaatatgtaatcktgtaaccaccatcacaatgaacatactaaagggttccattgtctctgaaaatgccttcagtctgctcttttgtagtcagccttttccctagctctaatccttggcaacctctgatcttttctctgtccctgtttttttgctttttccagaatgtcatataaatggaattatatggtatatagtgttttacatctgtcatctttgactttacatagtgcatttgtgattcacccatgttgttgtgtgtatcaatagttcatttttactggagagtggtattctgttgtatgaatgtgccacaattagttttgttccatccattcaccagtttaaggacatatgcattttttatttatgaataaagctactgtaaatattcatgtacaggtgcttttgtgaaacaaatactcattccttttaggcaaataactaagagtggaattactgggtcataagttaaatgaatgtttacc

SEQ ID NO: 781030 - DNA, 654 bp, Homo sapiens
tagtagaatgtgggttctatcaaagtgagattgttagagcctatgtttcctagatttggaggcttcctatttcttggtttacaccatagacagaaggaattcctaggacaggccaaggggtgagtacaggggcagatttctagggggcataatcatggggaaaaatagattatctgataggtttgactataagaaaaatggtatttagaaatggctttagagccattggaatgtgggggaagattaaaccagagagtagaagagaacaatcaagtacatgcaaatcaacattagaaaaaggaaaaggtatcacagagaggaaatatagtcagagtataataccttaatcagcaagcaatatytacttagtcattataactacaattatggatatcaccccacattatgtttcaaccatattggggactggggtgggggggtgagtgggtatgaggtgaagttcttatactgtgtaggatacagtatatcagtatagacacacgtgatttagaagcatggcgctaaatgccagaagcagcagctaaaccaatttaacatggttgcatctgggactgagagaacattgatggtagtgtaaccagcagaagggtggccacaggactgctgtgtttcgagtctttttgcaccatctga

SEQ ID NO: 781031 - DNA, 668 bp, Homo sapiens
ctggtgcctccttaattaccttaataattgaccttctgaattctttttctgacaattcagagatttcttcttggtttggatccattgctggtgagctagtgtgaacttttgggggtgttaaagaactttgttttgccatattaccaggattgtttttctgggtaagctacgtcagagggaggatctgggacactaaggggctgctgttcagatttttttgtaccacagggtgctcccttgatgtggtgctctcccccttcccctagtgatggggattcctgagagccaaactgcagtgagggttatttctcttctgaatctagtcwcctagcagagctaccaggctctgggctggtactggggagtgtctacgaagagtcctgtgatgtgatctgttttcaagtctctcagctgtgaataccagcacctgctcttgtgggtgtagcaggggagcaaagcggactctatgggggtccttggttgtatttttaagtgccctggttttgtgttggttgccctccaaaaaccaggaggtggcactttcaagagcgcatcagctccagtagtataggtaggatacaagcttgccctagggtctgggagtgggtggggccatagcgctcctaagagattgtccttttttttagctaccagtgtgggtagagaaa

SEQ ID NO: 781032 - DNA, 608 bp, Homo sapiens
tcctactgacaatctgctgtgtgtttaaactatacaggggtggagtgagagaacttatgcagaggtggagtgagagaacagagaacacagaaaggatggttccctttccctaggagcttagaaagactaactcccagaaaataaaactagagataggaggcaatacagttaagcacaaaattcagtggagcagaaaggatttataggtagctggttagagaagggcaagatatatatataaagctcatggagagggactttatttacaataaaaaaattctctgtttcacagttttctacctgtaaattaagagaacactacctgcctcacaggattgctgtaaggattaagcgaacaaatgtatgaaaacattgagcccagaatctggcattcaataaatttattgatattcaataaaaaaaaaaaaaagagaagggcaagataaaaggggcctggaattcaaaaamgacttcatggaggagctacgttctgaggtatgctccaaagcccttcttgctccacggtgaaaatagtatttggaagacaccgtttcttttcctacctgcctctctttcatcctttctctttccttcctttctttcctttg

SEQ ID NO: 781033 - DNA, 608 bp, Homo sapiens
atacaaattaatcctaaatagaaaagaatctcaaatcaagtaatggattgaatttaatcaatcaattgaattgtactttagaaacactaccagccaaatctatgtaatcaacaataaaactcacatacaaatttacattaattgttttcaataagaacgagccattgactatatcctctcaagacaacaaggcactttggtattaaaatataattttttaaaaagtcacattcaatccattatgacctagcaatcctaacttgccacaaccagatgggagaaattgtgggaaaatgtccwattccattaaatctgtataaatccgtggattaagatgaaagtatacatggaagaaaaggctttttaaaagaaaagtctctatgagacatagcctgaggcttagaatcttctacattgaggctccaatgacatccaggaaataaaatccttccgaaataagagtcagatgaattaacaacaaaaagtccattaggacacgaatttgggctcaagtatgttcaaaactaatctaggcaataaatatttttgaaaccttttatgagcaaggcattcttttttgcctcaacactgtcaatgattcatttctg

SEQ ID NO: 781034 - DNA, 608 bp, Homo sapiens
atacaaattaatcctaaatagaaaagaatctcaaatcaagtaatggattgaatttaatcaatcaattgaattgtactttagaaacactaccagccaaatctatgtaatcaacaataaaactcacatacaaatttacattaattgttttcaataagaacgagccattgactatatcctctcaagacaacaaggcactttggtattaaaatataattttttaaaaagtcacattcaatccattatgacctagcaatcctaacttgccacaaccagatgggagaaattgtgggaaaatgtcctattccattaaatctrtataaatccgtggattaagatgaaagtatacatggaagaaaaggctttttaaaagaaaagtctctatgagacatagcctgaggcttagaatcttctacattgaggctccaatgacatccaggaaataaaatccttccgaaataagagtcagatgaattaacaacaaaaagtccattaggacacgaatttgggctcaagtatgttcaaaactaatctaggcaataaatatttttgaaaccttttatgagcaaggcattcttttttgcctcaacactgtcaatgattcatttctg

SEQ ID NO: 781035 - DNA, 632 bp, Homo sapiens
taccctctgaagcatacaccaagaagttagcaatatccttgtcctcttccttcattaattaattccgatatcctagcatttattctccaggtagtcacaactagttccgatagccctgaaggtagatatgctgagacattttctaggacacttatttcacaagatactacctgaaaagttactttaaaatatatgagaaatgtctcccaaactcaaaacagcaacacatttttggttctatgagcacacacagaggtaaaatactgtcaatcccttccatctctcatgctgagtgccccatatatactgaagtgtattggtttcagatgaaaggaaaagccgtgtgccgatgacctgtggtctgtaaatagaatacaaaggcttagtctttccttgcagagaacttgtgggagaartgttgtggaaaagcagtgtgagattatgtgaattatggcttttgagacaccaaaaaaaaaaaaaaagtgtcacaatgcttttctctaagtacaggtgtatttggctatctttaactcctatgatcttttagcctagtaattgttccatctatttttgcatatttgatattaaagattgttttatcaattatactaacagttcttaaagttgaaccc

SEQ ID NO: 781036 - DNA, 623 bp, Homo sapiens
acatcgatgcggaaatcctcaataaaatactggtgaactgaatccagcagcacattcaaaagcttatccaccacaatcaagttggcttcatttctaggatgcaaggctggttcaacatatgcaaatcaataaacataatccatcccataaacagaaccaatgacaaaaaccacatgattatcttaatagatgcagaaaaggccttcaacaaaattcaaaagcccttcatgctaaaaattctcaataaactagacattgatggaacatatctgaaaataataattgctatttatgacaaayccacagccaatatcatactgaaggggcaaaaactggaagcattccctttgaaaaccggcacaatacaaggatgccctctctcaccactcctattcaacatagtattggaaattctggccagggcaaaaaggcaagggaaataaataaagggtattcaattaggaagagaggaagttaaattgtttctgtttgcagatgacatgattgtatatttagaaaaccccatcatctcagcccaaaatctccttaagctgataagcaacttcaggaaagtctcaggatacaaaatcaatgtgcaaaaatcacaagcattcgtatacacc

SEQ ID NO: 781037 - DNA, 547 bp, Homo sapiens
catacatacacatttctctcaccccaactataataacaataagtatgttggtttacaatgataacttttctctttcttgagcctagtttcaaagtaattttacttcaatctcatatggcacaggacagttaaacagtgataatgggagaaatgggtaaaagaagtatgaggaacagatactcagagtcagaattagatagaagtgaagcattatggagcattagagatagagggattgtaagtcaaaatctatgacattcttagcccccacrcctgacacatcacaccactcctctaaaagatcaagacattgtaaacatgaactaatataactatattctgacatagctagaaactgaaactgcacccttcaataactcactgggttgccctctctagtgccttgatatttctgttttataaggctttggtatcacataggtaactaactgtagtctcttatatatggtatctaaggcagatttgttgatacagtctacacattttataaagttatgcattcttggaaacataaaattctagacag

SEQ ID NO: 781038 - DNA, 640 bp, Homo sapiens
acacattgcatgccagatggttgaagacaaacccttcaaatattcagggcctgacatgtcagtgaagttttaaaagtttgatgatctggaggatatcctctccatgaataggatatgttactacatcgtgtatcccatccactaaaacaacacagctcttggtctactgctttggatttcagagacaagatacaacacacttaaaactagtgctctgaccctttcactgtgtgacttgaaaggattccagttttaggtgggacccagagcaagcatgggctctgtgtcagatttaggctatggtataaactgtcttactactcaggccatataatccagtagatctaggtaaaccagaggtactcatcatagacaaagatgccttgtggagtctctgcyagatcccagtaggaaattttcagactatactcttgagtttgggtgtaatttctttttcttttatagctgcctgaaaagcagctcctgttgggttcctggggcctattacagcctaagttccgactctgacatcagtgactatgcaactggaactgtccattgtaaattgatattgtcaggtcttccaagtcacattgttgggcaggagcagcacccatctttcatatgttggaaatgatac

SEQ ID NO: 781039 - DNA, 549 bp, Homo sapiens
  misc_feature 483, 487, 488, 490, 491, 495, 500, 501: n = A,T,C or G
acgaaaagctggttctttgaaaaggtaaacaaaattgatagaccgttagtgagattaaccaaacaaagaaaagagatctcaataagctcaactagaaatgaaactggagatatcactattgataccacataaatacaaaatatttattcaaagctactatgaacacatttacacacataaactagaaaacccaaaggagatggataaatttctgaaaatatacaactctcctagattgaatcaggaaggtatagaatctctgaacagaccaataacaagcagygagattgaaatggtaatttaaaaattaccagtaaaaaaaatttaggaccagaaaattcaaagctgaattctgtcacattcattgacgaattggtaccaatcctaatgacactattccaaaagatagagacagagggaatcctccctagatcattctatgaagccagtatcaccctaataaaaaaaaaagccagggaagancatnncnnaacnaaaannaaagaaaatgaaaaagaaagctacagaccaatactcctataaacatgg

SEQ ID NO: 781040 - DNA, 616 bp, Homo sapiens
atgaatttagattcctgccagcaatatatgattgcctatttgcccacagccttaccaacataatgtattgtcctactttttcatttatgtcagtgtgattgtaatgttttaatttgcatatctctaattatgattgagtttgaacattttgtcatttgtttgagaacttttttyttatcttcaaatagatacctccaggatttggggctgcagttggacgttttccatctcttctaatagcactgtaacaagttgtcttgaataaacacgagctcgttagccataagaaaactttaaagatgagttatctaattcaaatggaaggaaaatgtttttaaatcatcatagtaaaatatgagctgtttattttgcaaaatatgaggtcaatcagttcaggataataaatacttatgaatgtcaaggaaaaaaagcaattgctcattagtcaaaactcattaccaaaggaggggcacaatacaaaatgggtgtttccacccttttctcctatcacctgaacacgtctctgaccctataaattatacacatttcttgagacctaccatagaagccacagcgatctctctggtaaactttccctcctatctccccgcctccc

SEQ ID NO: 781041 - DNA, 582 bp, Homo sapiens
ctctggcaactcttctttatacaactaaaacaccataaaatatttactatgaaaataaatttctgcttttaagattacagacttctagagctgtatgcctaaagattctagaagatatgtgaggatcatgtagttgtccacattctatacatatcgaaactgagatgatttcagaagacagagcagctacttagtaagagagttgatagtgaatcctggctcctacttcctggtctgatgatccggaaaggaaactcttgggattatttcaatcaaaaaatacttcattgagttcctatccctgtggaacaagtgtgggcacataaagaaattaaaaataygattattcaagaagtatataacatcttgaggatatcccatataaatgaataaataataactcaaggcaacaataaaaaatcacacagaaacattataatttttctaatacaagatacagacataatgtttggagagagttctgggttaatctttctctccctgtatatgtttgattctactaggatcatctaagtgcaatcttcctacgtatttgaaaaggtgtaaaggtagagtttcaaa

SEQ ID NO: 781042 - DNA, 582 bp, Homo sapiens
ctctggcaactcttctttatacaactaaaacaccataaaatatttactatgaaaataaatttctgcttttaagattacagacttctagagctgtatgcctaaagattctagaagatatgtgaggatcatgtagttgtccacattctatacatatcgaaactgagatgatttcagaagacagagcagctacttagtaagagagttgatagtgaatcctggctcctacttcctggtctgatgatccggaaaggaaactcttgggattatttcaatcaaaaaatacttcattgagttcctatccctgtggaacaagtgtgggcacataaagaaattaaaaatacgattattcaagaagtatataacatcttgaggatatcccatataaatgaataartaataactcaaggcaacaataaaaaatcacacagaaacattataatttttctaatacaagatacagacataatgtttggagagagttctgggttaatctttctctccctgtatatgtttgattctactaggatcatctaagtgcaatcttcctacgtatttgaaaaggtgtaaaggtagagtttcaaa

SEQ ID NO: 781043 - DNA, 625 bp, Homo sapiens
cattcgtacaataaagtaagctagagaaaagaaaatattattaagaaaatcatagggaagagaaattatatttactattcattatgtggaagtagttcatcataaatgcctttatcctcgtcgtctttatgttgaaagtacgctgaggaggaggaaggggagagattggtcatgttgtctcaggagtggcagtggcagaagaaagtctktgtataagtggaatgatgcagttcaaacctgtgttgttcaagagccacctgtatatttaaaataagaaactgagaagaccattaaaatagttattgtaaatttaatttaagtctgatgaagagtttgctgagtaatttccagctgagagagaagcatcataaatagtttatatccacattttcctcccaagagcaaatgcaaacaaaattattaaacattatgaatcttgcaaaaataaatttgaagtcccaacttccagatgaaaaatatgatacattttattatttttatttaccagtgtaattcatttcttaatgaacaatagggaattttaaaaccatttttctaaaactatttaaccaacctgaaggaatttaaattataccatattaattaacattcaattgtttaaaga

SEQ ID NO: 781044 - DNA, 625 bp, Homo sapiens
cattcgtacaataaagtaagctagagaaaagaaaatattattaagaaaatcatagggaagagaaattatatttactattcattatgtggaagtagttcatcataaatgcctttatcctcgtcgtctttatgttgaaagtacgctgaggaggaggaaggggagagattggtcatgttgtctcaggagtggcagtggcagaagaaagtctgtgtataagtggaatgatgcagttcaaacctgtgttgttcaagagccacctgtatatttaaaataagaaactgagaagaccattaaaatagttattgtaaatttaatttaagtctgatgaagagtttgctgagtaatttccagctgagagagaagcatcataaatrgtttatatccacattttcctcccaagagcaaatgcaaacaaaattattaaacattatgaatcttgcaaaaataaatttgaagtcccaacttccagatgaaaaatatgatacattttattatttttatttaccagtgtaattcatttcttaatgaacaatagggaattttaaaaccatttttctaaaactatttaaccaacctgaaggaatttaaattataccatattaattaacattcaattgtttaaaga

SEQ ID NO: 781045 - DNA, 597 bp, Homo sapiens
tgtacctcccaaccccacaatttctctacctggatacacagaacgaccaacactcacatatgaacacaaggacacatgtagaaagaggtcatttgcaacactgtttctaatttctaattctaatttcagtagtgtataatagacaaaaacttcaaacaaacgtcagcctgtgaatagggggatggatttataaactgtgctttwtacatattgtatagcagcaaagataaataaaatagaggtctgagtattaaaatatgaataagagttatgtctctttaatgattacctctgggaatagagggagggacagggggttaagaaagggattagaggacttcaatgttttattctttaaaacaagtcatatgtaaatacatcaaacaaaataataataactgctgactttgggtcttgagtatatgtatatctggcaatatcctctgtatgtttaaaaatttctcggttgagatttttatttaaaaataaccaacaggagtctctgggaaaattgctaacctgcaacaccttataattaatctcatttagttcagtcatattttatataaatttcttactcttcttggcttaagcacc

SEQ ID NO: 781046 - DNA, 664 bp, Homo sapiens
cttatagtagctgctttaaagatccttgtctgctaatccagtatctggatcatttctgggttagtgttcacagattgttctctccctccaagctaggccacatttttctggttctttgtagagagcagtttttccaacccctgccggtggactgctacgggtccatggcctgataggaacctggctgcaagagcattcccgcctgggctctgcctcctgtcagatcagcagcggcattagagcggcattaggagcgggaaccctgttgtgaactgcacaggcgagggggatctagattgcatgtgccttatgaaaatctaactaacgcctgatgatctgagatggagcagtttcatcccgaaaccatccccckcccccactacgtccatctcttccatgaaatcagtctctagtgccaaaaaggttggggattgctgttgtagagtagtttttgtacctggacattgtgaatggctggattcttttacatccctcagaagagtatacttttgttttagtagtcaatcactttgcttagactcaaattgtaaactttgtctcgggaagtaactcaaatttcagttcagtcctgttgtctttggttgggctgtgcgcagtctgccccatatatgatagatcaggagtcagcaatagatttggcaga

SEQ ID NO: 781047 - DNA, 631 bp, Homo sapiens
agagatgtgcacgttagattaactggtgtgtctaaattgtcccagtctgagtgtttacgtgtgtctctgtgcgtgtgtgtgtatgctttgtaatggaatgacgtcctgtccagggttggttcccaacttgctccctgaactgcagggataggctcagaccatctgcaccttgaactggaataatgggtaaataattatcttacttgtttttattaatctctcttaaatgtccatatagctcacatttatttcaatgtgtaatattagaagtgtttggggtctttatttagaaatttgtttttgtgtgrccagaaatatgccaccaaaacttagctattgtttatatcaattagcctacggtaaaataattttcactctacatcgttttgcttaaagtcgcaatttccaggaacatatcaatgatattaagtgaggacttactgtatatagagaggagagtggagagcatgaagctttggagtaaaggtagggaaattgggctttatcataatggatatttatattgatgcaggatggaatttaggttagagaacaggagagggacaaaggagctagtaagaggtaacagccatggaccagggaggtgaggctggatggaaaagcaaatgaa

SEQ ID NO: 781048 - DNA, 598 bp, Homo sapiens
tgttatcaaagaggaagtaagataaaatgctgggctaagttcatgttaggccactggcttatctgaatccatattcccagaaaagccataacaaagtgaccctagtcatgatttttctcaggagtctttcttgagttgtcatttcatccctgactgactactgcacaacatgaaatcagcaagattctccacaatgccttccacagcatatacgtacacctccaatgcctatagctctgctttattgaggcagtttaagaaagtagagaaaattgaataataaatatataaatatggttagttaacagaaagctgtttcacaaaggcctagggtagcttcaggactttcagaagtgcactgccctgagaaaccatttgcctgtggaccaagtttgcttttaaggattaagccatgtgactcccaagttttctcattgcaattaaacatgtaaaygtccatggtgaaggaacaaaattttgcaaaggttaaccagatcccaaaggttaggggaaaaagacacactaagattaactacctcagatataccagaaacactttgggcagaacagcagagcttctggacaggaaactagaaaa

SEQ ID NO: 781049 - DNA, 643 bp, Homo sapiens
atcatgagaacagcatgggaaatacctgcctccatgattcaattacctcccactgggtccctcccatgacatgtggaaattgtgggagctacaattcaagatgagatttggtggggacacagccaaaccataccacgtatacaaccaagctgtaccctgagcactttgggtacatgtcatcagaacttcctgaggctgtgtcatgggtacatccttcaccttggcaaatatactttctaaatagattgagacctgtctcagatacttttggtttacaggtgatagcgttgctggaaaagagggtcctgattcagatcccaagagagggttcttggatctcatgcaggaargaattcaaggcaggtacagagtatggtgaaagaagcaaatttattagaaacgactttgttacagggtagggcatcctcagaaaggagaaggaggaatgcgccattctttgttagtgtcttcgttgataagaaattctaaggagctgtcattaaaattggaatgtgcagatgtgctcactaaaggtagggggtattggtgctgttaaatcaagtttagcctaaagctgcctccttacatattttaagtttggcctaaaatttctctgtacatggtgaactataacctaaaagga

SEQ ID NO: 781050 - DNA, 612 bp, Homo sapiens
ctgggacgtcctccccagcatctcccatgtccacttgtcacacctgtcacatgcagtctcctcccgccctcctagcccctgccccagctcgcctccacggctcacctgcccaatgtctgggggatctcccaccatcgctgtgatcacaattctcctctagacgtgagcccaccgtgaatggctcccacagtcacagcggtgttgaaaactcagctccccgcagggccggggagtggagggaggggtggggcytccggatcctcagctgctgctcagctgtggcccctggggcttgttccatgtgggatgcaggttgcaggtcctgtgttgccaggtcatcagttttcatggctggatattgttttgtttttgtttttttgagacagggtctcactctgtcacccaggctggagtgcagtggtgtgatcttagctcaatgtagtctgaaactcctgggctcaagcaatccttccgcctctcaaagtgcctctcaaagtcctgggactacaggtgtgagtcactgtgcctggctatggctagattattatatgaactgtcccaatgtttaaaacactgcacaggcagctggaacacatctgggacatccagttc

SEQ ID NO: 781051 - DNA, 612 bp, Homo sapiens
ctgggacgtcctccccagcatctcccatgtccacttgtcacacctgtcacatgcagtctcctcccgccctcctagcccctgccccagctcgcctccacggctcacctgcccaatgtctgggggatctcccaccatcgctgtgatcacaattctcctctagacgtgagcccaccgtgaatggctcccacagtcacagcggtgttgaaaactcagctccccgcagggccggggagtggagggaggggtggggccyccggatcctcagctgctgctcagctgtggcccctggggcttgttccatgtgggatgcaggttgcaggtcctgtgttgccaggtcatcagttttcatggctggatattgttttgtttttgtttttttgagacagggtctcactctgtcacccaggctggagtgcagtggtgtgatcttagctcaatgtagtctgaaactcctgggctcaagcaatccttccgcctctcaaagtgcctctcaaagtcctgggactacaggtgtgagtcactgtgcctggctatggctagattattatatgaactgtcccaatgtttaaaacactgcacaggcagctggaacacatctgggacatccagttc

SEQ ID NO: 781052 - DNA, 612 bp, Homo sapiens
ctgggacgtcctccccagcatctcccatgtccacttgtcacacctgtcacatgcagtctcctcccgccctcctagcccctgccccagctcgcctccacggctcacctgcccaatgtctgggggatctcccaccatcgctgtgatcacaattctcctctagacgtgagcccaccgtgaatggctcccacagtcacagcggtgttgaaaactcagctccccgcagggccggggagtggagggaggggtggggcctccggatcctcagctgctgctcagctgtggcccctggggcttgttccatgtgggatgcaggttgcaggtcctgtgttgccaggtcatcagttttcatggctggatattgttttgtttttgtttttttgagacagggtctcactctgtcacccaggctggagtgcagtggtgtgatcttagctcamtgtagtctgaaactcctgggctcaagcaatccttccgcctctcaaagtgcctctcaaagtcctgggactacaggtgtgagtcactgtgcctggctatggctagattattatatgaactgtcccaatgtttaaaacactgcacaggcagctggaacacatctgggacatccagttc

SEQ ID NO: 781053 - DNA, 631 bp, Homo sapiens
gttggatatatcaacatcttgttttcacatttcactgctgagggggtattccgttacatggatgtaccgtagtttatttatcttctcccgagtagaggaacatttgggtagttttcagagtgggatcattatgattaaagctggaagtttcaccagctttgcttttgtggggtaaaccacacttggtcatgatgtattatctttttgtatactgctaaatctaattggctacagttgttgagaatttttgtgtctacgtgcatgttggatattggtctgcagttttctttttttggtaatgtctttgtttttatatcgaggtaatgataccttyataaaagttacattttgggatgcactttggaatagtctgtatagaattgatattatttcttccattttagtagaattcaccatgaagtcacctgagccttcattttcaatgttggcaggttttcaactacacattcagtttcttttatggatgcaggactatgtaggtcgtctacttctttttaaataagttcaagcagtttatgtttttttgaaatattcatcaatttcatcaaagttgtttaatttataggcacagagttttttgtggtattccgttgttagcctttttcatgcc

SEQ ID NO: 781054 - DNA, 631 bp, Homo sapiens
gttggatatatcaacatcttgttttcacatttcactgctgagggggtattccgttacatggatgtaccgtagtttatttatcttctcccgagtagaggaacatttgggtagttttcagagtgggatcattatgattaaagctggaagtttcaccagctttgcttttgtggggtaaaccacacttggtcatgatgtattatctttttgtatactgctaaatctaattggctacagttgttgagaatttttgtgtctacgtgcatgttggatattggtctgcagttttctttttttggtaatgtctttgtttttatatcgaggtaatgatacctttataaaagttacattttgggatgcactttggaatagtctgtatagaattgatattatttcttccattttagtagaattcaccatgaagtcacctgagccttcattttcaatgttggcaggttttcaactacacmttcagtttcttttatggatgcaggactatgtaggtcgtctacttctttttaaataagttcaagcagtttatgtttttttgaaatattcatcaatttcatcaaagttgtttaatttataggcacagagttttttgtggtattccgttgttagcctttttcatgcc

SEQ ID NO: 781055 - DNA, 519 bp, Homo sapiens
gacgcctccagcgtctcccggacagatttgtcacgagactcatcttccgtgcggagccctggtcttttagagcctcatgtgctcatcgtggccactgacttctggaggctcgtccccagtctagggctcttcagggtggctttgggaggagtcaggatgtctctgatcacagcagctcccgggagggggcaccaagctcaggtggttcccagcaggcactttgtcaccagggcttgaacacccgtccctgcctgggtcactgcctgcctctgtggtcacrtttatcaaggctgtggacaggcagaatctacctgaatccaccagcgtccgcagtgtctgcactgggccagagggtgatgctgccccgcgtgtcctgcgtggttttgtgtgggttttgggggtgttgaatgggttgggcttccactgtcctgttgaccaggagacagaactcttcaaggtgtaacggaggcagaatcctagcttcgccttctcccatcctgggagacttttcctattcca

SEQ ID NO: 781056 - DNA, 567 bp, Homo sapiens
atagactcttttctaagctcacagtggcttcctgttggcacagtcacccaaccgttttctttttcctgttacaacactatttacaaaactctgctcttgctaaactttctttcctcccccaccccttttattctggtaatccagaacaccagaagtctctattgagataaaatatagttggtcagccaacactgacaattgcrcgagctgcttaaatagtttcattagaatggagtttgatttagggagaggtaacattttctattttcttttccttctttggaaggatgtttcatacatatttgtgtggcatatatgatgaaagttttgttctacttcctcttctcaacccaatctccaactgttccctccctttcattaattccagtatcatctctcttaaatccttttctggtaaacttgccttatatttcagcctcttcataataaatttacattgattgatagaaatggtattacagtgatcatatatagatctgagaccagatatttctgaagtgcgtctgtctgtgtctgctgtttctgataattcttatgatattttct

SEQ ID NO: 781057 - DNA, 704 bp, Homo sapiens
gaaattcagatattttcaaaatttggatccgtgtttctggaatatggcttaagagttggagaagaaaaatagctataaatgacttgaatcaaatatctgaaatggactggtggtgatggtgaggggcagcaatgtgtaatttagggaagtgctgaccacaacataaaattgggaggaatctaaggcattgccaaatttataaatactacaatagaaatgcagatgctaagctgttggctaatcttactagttaagtgactaacttctgatgccatctggcagagtgattcaaatttgtgctaracacaaaatatatgtctttttccctctatttgcctgcatgtattaataaaaacactgttgcagtagacacataccaattttacaaggaaatgtttaggggtgaggtgggactgttaaatacttacatcaggtcaaaggtcactctgctgtttccagaggactgtcaggtagccaggaggcccagggccacttttgggcctgcttacaaaaccctaaattttccgcagttgaatgccaagagtcttttgcagttattttagagcaggggagaaaatacaatgtgttgccaaataagcttaatttggtaggcaagcagtaaaaataacccaacagccaacatttagagaatgcgtactctcttaaatgctttatgtatattatttaatctttaaaacactgtg

SEQ ID NO: 781058 - DNA, 678 bp, Homo sapiens
atttaaacatctgaaagaaatacgcaaatgtttctatgtaaaaagaaacactgttctttggaaaacatgaattatataaactataattagagcttcaaaactgcaagtgtttaaactaagattacaaattgctgtgttaaaaagatactgagacgctcagggggaaaraaattaaatgccgactaactaaattaattctcccacatcccaagctgttctatctcccttatgcctttccctctgccatcactgatgatcacgtacgtatctgttagaacctgcttctataatgaattcaagttacaatgaattcaggtttgatttgcctccttttcttaccattatagttggcagtgtcgacttgaaagtattcatttctattaataatcttcaactaaatatagtgtactggaaaaagtaaactgaaatagttaaaaaaaaatgcaattgaattctatgtttcaaactaaactagaacttgttatttttttaaaaaaataaaatgagttttgtgtgttttggggagcacagagtaaagatctggaaattaattgaatttcattagcctagattcataccactaatatatatgaaagtatggtcaggggtatgagcagaatgaggcttgaattgtctaaaagtatctctctaaatctaaacaatgtgcacttacacaga

SEQ ID NO: 781059 - DNA, 678 bp, Homo sapiens
atttaaacatctgaaagaaatacgcaaatgtttctatgtaaaaagaaacactgttctttggaaaacatgaattatataaactataattagagcttcaaaactgcaagtgtttaaactaagattacaaattgctgtgttaaaaagatactgagacgctcagggggaaagaaattaaatgccgactaactaaattaattctcccacatcccaagctgttctrtctcccttatgcctttccctctgccatcactgatgatcacgtacgtatctgttagaacctgcttctataatgaattcaagttacaatgaattcaggtttgatttgcctccttttcttaccattatagttggcagtgtcgacttgaaagtattcatttctattaataatcttcaactaaatatagtgtactggaaaaagtaaactgaaatagttaaaaaaaaatgcaattgaattctatgtttcaaactaaactagaacttgttatttttttaaaaaaataaaatgagttttgtgtgttttggggagcacagagtaaagatctggaaattaattgaatttcattagcctagattcataccactaatatatatgaaagtatggtcaggggtatgagcagaatgaggcttgaattgtctaaaagtatctctctaaatctaaacaatgtgcacttacacaga

SEQ ID NO: 781060 - DNA, 678 bp, Homo sapiens
atttaaacatctgaaagaaatacgcaaatgtttctatgtaaaaagaaacactgttctttggaaaacatgaattatataaactataattagagcttcaaaactgcaagtgtttaaactaagattacaaattgctgtgttaaaaagatactgagacgctcagggggaaagaaattaaatgccgactaactaaattaattctcccacatcccaagctgttctatctcccttatgcctttccctctgccatcactgatgatcacgtacgtatctgttagaacctgcttctataatgaattcaagttacaatgaattcaggtttgatttgcctccttttcttaccattatagttggcagtgtcgacttgaaagtattcatttctattaataatcttcaactaaatatagtgtactggaaaaagtaaactgaaatagttaaaaaaaaatgcaattgaattctatgtttcaaactaaactagaacttgttattttttwaaaaaaataaaatgagttttgtgtgttttggggagcacagagtaaagatctggaaattaattgaatttcattagcctagattcataccactaatatatatgaaagtatggtcaggggtatgagcagaatgaggcttgaattgtctaaaagtatctctctaaatctaaacaatgtgcacttacacaga

SEQ ID NO: 781061 - DNA, 638 bp, Homo sapiens
cttgtagcagtatttttttctttattgatgtttacatagccaatttccagtcatactacctaattgctaatccaaccaagataaatctaaaccttttcccacaataccattcccaaaaacacttgtttaatgcatagcccaagatctactttactcacacagcccaggtactacagctcacaatggaaackcttcttgtgaatttctttaacccttcatgttctgttgagaaaattttagatttgggccgaatgtagtagctcatacctgtaatcccagcattttgggagactgaggagggtggattacttgaggtcaggagtttgagaacagcctggccaacatggtgaaaccccgtctctactaaaaatacaaaaaaaaaaatttagctgggggttgtggcaggcacctgtaatcccagctacttgggaggctgaggcaggagaatcgcttgaacccaggaggtggaggttgcagtgagccaagatcgcaccactgcactccagcctgggtgacagagtgagtgagactgtctcaaaaacaaacaaacaaaaaagtttaaatttaactaaaaactgctttagtgattcattactttttctgccatgcatgtaaatatcaccactaaaatactttaa

SEQ ID NO: 781062 - DNA, 622 bp, Homo sapiens
tggatgtttggggaaaatgaatgcaatgattctgtgttctatcaaattcttgtttagccacctattagttatgtgaagtgatcaaataacttttggagcctcaattccattttagataataaaaatgcctgcatagccatccccacagggctttctggggatcaaataagaaaacgcatatgaaagtacttggcaaactacaaagaaacacacatgtgtaaattatcattatctaagatacaatgtacccaatatccacaaaaagtaatctctactaatttactcacagacaagggctctttttgtaactttacttaagtttcttcaatatgatcttataccttaaactcagtatgtttaatattggatcgtccttactgaatrtgagtttacatagcaagtatataaacttaacacattactgtgaaaatttagaaacgtcaccatttactttcaagcacaaatgagcataatgaagacgggcatctgaaatgcagaaagtaacaggactaacaaaaaaaaatttatttcttactttcaacgtttacatattttgaatgaataaattaggtttctaagggcacagtttatattgtcatataaatatttaatgataaaatca

SEQ ID NO: 781063 - DNA, 472 bp, Homo sapiens
tggacagatcatccagacagaaaatcaacaaagaaacataacacctaatttacactatagataaaatggacctaatagatatttacaggttatccaatggccataaaatacaccttcttcttctcagcaggtagctcattatcaaggagagaccatawgttaggccacaaaacaagtcttaacaaattcaaagaaaatgaaataatttcaaatatttctcagaccacagtggaataacattaaaaatcaataagaagagaaactttggaaactatacacacacacatcagaattaagtaataagctcctgaatgaccaatgggtcaatgaagaaattaagaaggaagttgaagaatttcttgaaacaaatgaaaatagaaacacaacataccaaaacctgtgggatacagcaaaaacagtactaagaggaaagttgatagcaataagtgcctacatacaaagtagaagaact

SEQ ID NO: 781064 - DNA, 604 bp, Homo sapiens
gttattttgccttcattcttgatcttataataagctccactttgcctgtatcattctagaagtccatcattcaaaatgaatctaatggttaagatgtgttctgatcagaaacttgtggagacttcaattatgcctgaaacctccttcaacccagatactttaattctattaatgcaacccaaaatcttatcagctttttgtggcagcattacacattgttggcaaatagtgagctgactataaaatcaaaatgtccaagtattttacaggtacagctttccatattattcaccgtgtattccccatactgatgtcttaaatttgtttatatcagaaactaatacagtactgtcatytcaattgaattgcctatgttggagacagattgttacatcggcatgttatattttgtatcctgactctattattcattctattttcagctatctcaattgtgtgtcatcatagataagataaacctattttgttatttttatctgatccataacaaatatatgaaacaaaacacagctaaaagagagccctgcagcagcccatatatccccttctaattcacattgatccccttgtcaccatcattaaa

SEQ ID NO: 781065 - DNA, 618 bp, Homo sapiens
acataattgaaaaagaaattatgaattagaagatatcatgaagtgaatatttagaagtcccaatagggataaaacaaataaacaatatgaaaaattaaaatacataaaaatctaaaataagtcatgttgtttaagtgcaagttcgaataaataaaatggagtgaatgtcaaatagggaataaaaatatataattattaaaataattaattataatagcttaaaggcattctgatcaaaagaaaaacaatagttaaaagcataataccataatagagaaaatcaygtaaagctatctaagataaaattcaaattaattataaagcaatgaaaagaaacatatttctcaatatgtgaataagatcaagaatccaataggttatggttttcaaagttctgagggaaaaacatgtaaatttaaaattacatatatttgaaaagttattttcaggtttaaggacaaaatgtaacttaatacacaaatacaatgtaagtataattacgtcagtgaaatgcatttaaaatttgctgaaaatttagtttataaagaaaaacactcttcctgagaacaaacattgagataaaataaatgtgcaaacatctaaatagatggaaactat

SEQ ID NO: 781066 - DNA, 618 bp, Homo sapiens
acataattgaaaaagaaattatgaattagaagatatcatgaagtgaatatttagaagtcccaatagggataaaacaaataaacaatatgaaaaattaaaatacataaaaatctaaaataagtcatgttgtttaagtgcaagttcgaataaataaaatggagtgaatgtcaaatagggaataaaaatatataattattaaaataattaattataatagcttaaaggcattctgatcaaaagaaaaacaatagttaaaagcataataccataatagagaaaatcatgtaaagctatctaagataaaattcaaattaattataaagcaatgaaaagamacatatttctcaatatgtgaataagatcaagaatccaataggttatggttttcaaagttctgagggaaaaacatgtaaatttaaaattacatatatttgaaaagttattttcaggtttaaggacaaaatgtaacttaatacacaaatacaatgtaagtataattacgtcagtgaaatgcatttaaaatttgctgaaaatttagtttataaagaaaaacactcttcctgagaacaaacattgagataaaataaatgtgcaaacatctaaatagatggaaactat

SEQ ID NO: 781067 - DNA, 611 bp, Homo sapiens
gagagagagaatgtgtgtgtgtgtgtgtgtgtgtgtgtgtgttgaaatcagaaccccaccttactgtgtttattgtggaatttggaaatgaaagcctaaagcccaaaattaaaatcacacatgatagcacgttgcaaactgttttctgtgctagatgggtcgttctagggtgtaggaccctggwaacaccgttttccccgtcttccggaaagagctactcacactgctcaaagcctgcatccacatgtaccatgtcaaagaccagctcaagagcctggacccatatgccaccttcagcagggttgactgcagctccttgttcttcctgagcatcttctccaatggtgacctgagagttgcgggaggcattggggccaggattgaacagaggaaaaaggagcatggaggccaggtgctgaggaccaggccatcttacctggagagttctggccctgagacatccagaccaacatgacgtttaggtgcagacagctggccctgggtggccctgtgctgatcaccggcctcggcccctcaaacagtgggaaatggaagaatggcttggaaatgggccctgtcgactgtgtgtcatctgagcacattctcccagg

SEQ ID NO: 781068 - DNA, 632 bp, Homo sapiens
ggattaagcacacttgatcttggtggttaagctttttgaagtgctgcctgattcggtttgccagtattttattgagaatgtttgcatcgatgttcatgaggaatattggcttaaaattttctctttttgttgtgtctttgccagactttggtatcaggatgatgctggtctcataaaatgagttagagaggattccctctttttccattgattggaatagtttcagaagggttggtaccagctcccctttgtacctctggtagaatgtagctgtgaatccgtctggtcctcgacttkttttggttggtaggctattaattattgcctcaatttcagaacctgttattggtctattcagagattcaacttcttccttgtttagtcttgtgggggatgtatatgtccaggaatttacccatctgtcctagattttctagtttatttgcgtagaggtgtttataacattctctgatggtagtttgtatttctatgggatcaggggtgatagcccctttatcattttttattgcttctctttgattcttctctcttttctttattagtcttgctagcagtctattttgttgatcttttcaaaaaaaaactcctatattcattgatttttgaatttt

SEQ ID NO: 781069 - DNA, 632 bp, Homo sapiens
ggattaagcacacttgatcttggtggttaagctttttgaagtgctgcctgattcggtttgccagtattttattgagaatgtttgcatcgatgttcatgaggaatattggcttaaaattttctctttttgttgtgtctttgccagactttggtatcaggatgatgctggtctcataaaatgagttagagaggattccctctttttccattgattggaatagtttcagaagggttggtaccagctcccctttgtacctctggtagaatgtagctgtgaatccgtctggtcctcgacttgttttggttggtaggctattaattattgcctcaatttcagaacctgttattggtctattcagagattcaacttcttccttgtttagtcttgtgggggatgtatatgtccaggaatttacccatytgtcctagattttctagtttatttgcgtagaggtgtttataacattctctgatggtagtttgtatttctatgggatcaggggtgatagcccctttatcattttttattgcttctctttgattcttctctcttttctttattagtcttgctagcagtctattttgttgatcttttcaaaaaaaaactcctatattcattgatttttgaatttt

SEQ ID NO: 781070 - DNA, 632 bp, Homo sapiens
ggattaagcacacttgatcttggtggttaagctttttgaagtgctgcctgattcggtttgccagtattttattgagaatgtttgcatcgatgttcatgaggaatattggcttaaaattttctctttttgttgtgtctttgccagactttggtatcaggatgatgctggtctcataaaatgagttagagaggattccctctttttccattgattggaatagtttcagaagggttggtaccagctcccctttgtacctctggtagaatgtagctgtgaatccgtctggtcctcgacttgttttggttggtaggctattaattattgcctcaatttcagaacctgttattggtctattcagagattcaacttcttccttgtttagtcttgtgggggatgtatatgtccaggaatttacccatctstcctagattttctagtttatttgcgtagaggtgtttataacattctctgatggtagtttgtatttctatgggatcaggggtgatagcccctttatcattttttattgcttctctttgattcttctctcttttctttattagtcttgctagcagtctattttgttgatcttttcaaaaaaaaactcctatattcattgatttttgaatttt

SEQ ID NO: 781071 - DNA, 632 bp, Homo sapiens
ggattaagcacacttgatcttggtggttaagctttttgaagtgctgcctgattcggtttgccagtattttattgagaatgtttgcatcgatgttcatgaggaatattggcttaaaattttctctttttgttgtgtctttgccagactttggtatcaggatgatgctggtctcataaaatgagttagagaggattccctctttttccattgattggaatagtttcagaagggttggtaccagctcccctttgtacctctggtagaatgtagctgtgaatccgtctggtcctcgacttgttttggttggtaggctattaattattgcctcaatttcagaacctgttattggtctattcagagattcaacttcttccttgtttagtcttgtgggggatgtatatgtccaggaatttacccatctgtcctagattttctagttwatttgcgtagaggtgtttataacattctctgatggtagtttgtatttctatgggatcaggggtgatagcccctttatcattttttattgcttctctttgattcttctctcttttctttattagtcttgctagcagtctattttgttgatcttttcaaaaaaaaactcctatattcattgatttttgaatttt

SEQ ID NO: 781072 - DNA, 514 bp, Homo sapiens
aattgtcataggtttccagtgaataaacccttttattattttgtcctttgtttttctgacaatttgatttcataatatattttataaactaagacagttatttaaaaagcattttgcatactataattgtgacattgtcctcatttggttatgatttgcataattttttggatgcatcttgccacatttagtctktttttgttactatagtgtaagatggctcatatctgtcatcctagcattttaagagattgaggtgggaggatcacgtgaaaccaggagtttgagaccagcctgggaaacaaagcaataccaagtctctaaaataaataaataaataaattgagtccctttagacagatgtagttagattttctttcttttttttttttaattcctatactcaatttatgacttttggttgagaagtttagtttgtgagtagttacataattttctgcatttgaaggaattacttttgacactttgtggagtaaaatttaaatattaaatt

SEQ ID NO: 781073 - DNA, 514 bp, Homo sapiens
aattgtcataggtttccagtgaataaacccttttattattttgtcctttgtttttctgacaatttgatttcataatatattttataaactaagacagttatttaaaaagcattttgcatactataattgtgacattgtcctcatttggttatgatttgcataattttttggatgcatcttgccacatttagtctttttttgttactatagwgtaagatggctcatatctgtcatcctagcattttaagagattgaggtgggaggatcacgtgaaaccaggagtttgagaccagcctgggaaacaaagcaataccaagtctctaaaataaataaataaataaattgagtccctttagacagatgtagttagattttctttcttttttttttttaattcctatactcaatttatgacttttggttgagaagtttagtttgtgagtagttacataattttctgcatttgaaggaattacttttgacactttgtggagtaaaatttaaatattaaatt

SEQ ID NO: 781074 - DNA, 514 bp, Homo sapiens
aattgtcataggtttccagtgaataaacccttttattattttgtcctttgtttttctgacaatttgatttcataatatattttataaactaagacagttatttaaaaagcattttgcatactataattgtgacattgtcctcatttggttatgatttgcataattttttggatgcatcttgccacatttagtctttttttgttactatagtgtaagatggctcatatctgtcatcctagcattttargagattgaggtgggaggatcacgtgaaaccaggagtttgagaccagcctgggaaacaaagcaataccaagtctctaaaataaataaataaataaattgagtccctttagacagatgtagttagattttctttcttttttttttttaattcctatactcaatttatgacttttggttgagaagtttagtttgtgagtagttacataattttctgcatttgaaggaattacttttgacactttgtggagtaaaatttaaatattaaatt

SEQ ID NO: 781075 - DNA, 643 bp, Homo sapiens
cctgtctggatcctgcctagagagggcatggtggcgtatccctgcaccagccaccagatgatgtaactctaccttctgtctagtccctgcttatagggtgaattgtgacttatcgctaggcgcagcatttagctaatatgactcttcccttttttcaggttctgcccacggggaagattgtgacatatcgatgggtaaaacaccaaaatgattttactcttttgtctttgctctgtccttagaaggcattgggacatattgctgaaccagcaccaaggtaatgtaagggtcctacctgaaccctgcccacagggagcatagtgacatatctctgagcccatgaactatttgatgtggctctattctcttacctggactttgcccatgagaaagactgtgacgtatttcttggtccagtgyttaggtaatgtgattctcctctccagcctgagacatgcccacagaagtaagagtgacatctctgggcctagcccacaggtgatgtgactcttatcccttctttctgccccggggagtcattgtgatgtatctctgagaccattattagaatgatgtgactctcctgttcttactgcgacctgtccacagtggggatgatgatgtatcacttaggccagcacat

SEQ ID NO: 781076 - DNA, 643 bp, Homo sapiens
cctgtctggatcctgcctagagagggcatggtggcgtatccctgcaccagccaccagatgatgtaactctaccttctgtctagtccctgcttatagggtgaattgtgacttatcgctaggcgcagcatttagctaatatgactcttcccttttttcaggttctgcccacggggaagattgtgacatatcgatgggtaaaacaccaaaatgattttactcttttgtctttgctctgtccttagaaggcattgggacatattgctgaaccagcaccaaggtaatgtaagggtcctacctgaaccctgcccacagggagcatagtgacatatctctgagcccatgaactatttgatgtggctctattctcttacctggactttgcccatgagaaagactgtgacgtatttcttggtccagtgtttaggtaatgtgattctcctctccagcctgagacatgcccacagaagtaagagtgacatctctgggcctagcccacaggtgatgtgactcttatcccttctttctgcccmggggagtcattgtgatgtatctctgagaccattattagaatgatgtgactctcctgttcttactgcgacctgtccacagtggggatgatgatgtatcacttaggccagcacat

SEQ ID NO: 781077 - DNA, 544 bp, Homo sapiens
gccctgtgataagactctctaccacccgagggctttctgtaatatgtgagagagtggatgatcttaacgaggagacccagggattttttttttttcatttccctaagtgtcggtaggagaagcaggatctctcctattggctggtgtgacatatgaaagtcatcattgcacctgtgtgttgtgttccaagatataagtcacaattacaccttcatataggaagagagcaggagagtaaaatcagttggacgctgggccagggatatgtckcttccctgagaacaggggaccagggaacagagacacattacctgaatgctcaggcatgggttatgtagcaatccactccttaaattaggaaccaggcagcagagtcacatcacctgggtgctggatctagcaatatgttacagtccgctctgtggtcaggatgcaggtaggagagtcacatctccttggtgatgaatgcagaaaaacgtcacaagtttctctgtgcataaggtagaggaataagccttttatcccctaagtgttgggcccgggg

SEQ ID NO: 781078 - DNA, 504 bp, Homo sapiens
actctaaccatatgctaataattcaaaatctgttctttatgggtgtccagttatggttgaatatttcagttatctagaaagagtcttcttcagttgcaagatttgtttattcagtatttcacaggttaatgtttatccaattttgttttgtaatattttatattcctgtattttcctgttaggataggctgtcttacatcatttaaktgtgtttttagtttctgcttctatgttataattttttatgactatatttaactgtgtacactttaaaagagtgtagaaaaaaagtcaaatatgaatcaaccatatgtgtattgccaacataattctctgttcgtttgactgtataaacattactcatgctttatttatgacttctgtatttatttaattagtgggtggtcaattatttttttaatcctctctgggtgagtagttgtggaaattgccctaatttccacatctatgtattaatgaatctatattacgtttgcgtgagga

SEQ ID NO: 781079 - DNA, 504 bp, Homo sapiens
actctaaccatatgctaataattcaaaatctgttctttatgggtgtccagttatggttgaatatttcagttatctagaaagagtcttcttcagttgcaagatttgtttattcagtatttcacaggttaatgtttatccaattttgttttgtaatattttatattcctgtattttcctgttaggataggctgtcttacatcatttaagtgtgtttttagtttctgcttmtatgttataattttttatgactatatttaactgtgtacactttaaaagagtgtagaaaaaaagtcaaatatgaatcaaccatatgtgtattgccaacataattctctgttcgtttgactgtataaacattactcatgctttatttatgacttctgtatttatttaattagtgggtggtcaattatttttttaatcctctctgggtgagtagttgtggaaattgccctaatttccacatctatgtattaatgaatctatattacgtttgcgtgagga

SEQ ID NO: 781080 - DNA, 548 bp, Homo sapiens
caattatttttttaatcctctctgggtgagtagttgtggaaattgccctaatttccacatctatgtattaatgaatctatattacgtttgcgtgaggaaaacacctctgtgatgcgggggtaatttttttttttttgaccacagaagtttttattgccctcctgctccgcaaagggaccttgcttctgctggtttagcacctcaagacgtctgtgatgttggtctcagacaccactttgccatccactatcctgtgggtgttggtcttttggatgctttacaggtatttgctgctgtccagaataccaccaagattgaagtcctccccatcttctagcaggcggcagtaggtggcaatctctgtgaaatgggacacagagatccagragccccagaccccacgcctcatagaagctcgccgcgctgctgacctgctgagcactttagctgggcgactggacagatcccagggacaggtagtagttgatggagaaggtgcggagcaagtggtgaagctcgctgtgtacggggaggaaagcgagaggaca

SEQ ID NO: 781081 - DNA, 563 bp, Homo sapiens
ttggctacattgcagaaaaacaaaatgcctttccagagatcagttttttgagacagggttttgctccgtcagccaggctggagtgcagttgtgtgatcatggttcattgcagccttgacctcccaggctcaggtgatcctccagctccagccttctgagtagctgggactgaagtcatgcaccaccaggcctggctaatttttcaatttttttttttttttttttttttttttttttgtagagatggctttctctatgctgcctgggctggtctcaaactcctggtctcaagtgatcctcccacctcagtctccctaatagttcgacctacaggcacagggaagcatgcccggtrtatttattaaaatgtagttaccagaatatttaaaattcacttgtgcctctcatattatttcttagagaattgcctcccttttgaaatctcaggctgcctgctctaaaacctggatgtgccaggaaagtaaaacatctgaaattttaaaacaattgtcattatattgattccatatatgaataacacatatatattattcattaataca

SEQ ID NO: 781082 - DNA, 655 bp, Homo sapiens
ttgtttgcagatgacctgatcctacatctagaaaacctcattgtctcaggcccaaagcttcttaaggtgataagcaacagtagcaaaatctcaggatataaaatcaatgtgcaaaagtagctagcattcccatgcacaaacaacaggcaagcagggagacaaatcatgaatgaactttcattcacatttgctacaaagagaaaaaaatacctaggaatacagctaagaaagaaagtgaaggacctcttcaaggagaaccacaaacaactgctcagagaaatcagagtggacacaaaacagatggagaaatattccatgctcatggagaggaagaatcagtatcatgaatatgggcatatkgccctaagtaattcatagattcaatgctattcccattgaactactgacattcttcagagaattagaaaaataaaaacttttaaagttcatatggaaccaaaaaagagcccaaatagccaagccaaccttaagaaaaaaaaaaaaaagctggaagtgtcactctacctaacttcaaactatactagaagagtacagtaacaaaaacagcatggtactggtatagaaacagacacatagacaaatgaaacaaagtagagaacctagaaataaagccaaaaacctacaacaacctgat

SEQ ID NO: 781083 - DNA, 655 bp, Homo sapiens
ttgtttgcagatgacctgatcctacatctagaaaacctcattgtctcaggcccaaagcttcttaaggtgataagcaacagtagcaaaatctcaggatataaaatcaatgtgcaaaagtagctagcattcccatgcacaaacaacaggcaagcagggagacaaatcatgaatgaactttcattcacatttgctacaaagagaaaaaaatacctaggaatacagctaagaaagaaagtgaaggacctcttcaaggagaaccacaaacaactgctcagagaaatcagagtggacacaaaacagatggagaaatattccatgctcatggagaggaagaatcagtatcatgaatatgggcatatggccctaagtaattcatagattcaatgctattcccattgaactactgacattcttcagagaattagaaaaataaaaacttttaaagttcatatggaaccaaaaaagagcccaaatagccaagccaaccttaagaaaaaaaaaaaaaagctggaagygtcactctacctaacttcaaactatactagaagagtacagtaacaaaaacagcatggtactggtatagaaacagacacatagacaaatgaaacaaagtagagaacctagaaataaagccaaaaacctacaacaacctgat

SEQ ID NO: 781084 - DNA, 578 bp, Homo sapiens
ctatcaggtcttctggcccaaaggctatttttacttacctctagccaagtgcctgggatggatcctttctgcgtctcaccaaggctcaccacttagccatagcctcaaacccgtggggaaggaaggtctccccgccctgcaagaggacaaataactgatttttgttcatttgactctgttttaaaattctctttaaaaaaaaaaaaacaaaaaaaagaaaaagaaagcatatctgaaacttaaaaaaaaaaaaacaaggaaaaaagatgaaaaamatgacatacttacataggtgaaaaacacatagatatatctataagcaacaaacacagctaattcaaatataaattaaatatcacattgtcataatgtgtaccgagttaaaaaattatcattcaactcatgatatcaagctttaaaagcaaaaatacaattaactgctctgagaaaacatacccccccagaaaagaaacacaacaacacagaactgaaaataagaagagagattttaatgcataaaatcctgaatacaacataaatatacaatgaaaaataagccctttttgtttttttttgag

SEQ ID NO: 781085 - DNA, 573 bp, Homo sapiens
tgcatgcacctcttcaaaaatattctcctcatagtccaccctcaaggtgtacatcctctgtgtgcttgcagtccatggcagcctctgccttgggaaccgtccagctgcacacctgcaatatggtggtgaccctcttgaatggatggttctgggccccattgcaggcagcagatagggagatgctcagcccatcaagcccagagccctgccacaggcttctgtgaggcctccacctgctctgggttcttgccctgagaggctgccctgaagtcaaacagaagcaggtgggactctcttccacagctgctctctctcccactgacagctccctagagggtaactcagacagagaagatagaattctcaggcagaaggacaggagtttcggctgccrattcattccatacccccacatgacatgacacaaggcaggggctgtgggacaaagtcattgcctttccttctggcatgaggaatgccttaggaagcaggtctggtggggctagggttgagcgatagcttcaggccacaaggagtggacggacactgagcaagtatcctggttatctgtcc

SEQ ID NO: 781086 - DNA, 545 bp, Homo sapiens
agatgataacaatttagagtattctgaatttcagtatgtatttaccatttttagtgacatttatactttagtatttttcatattgttagttagcatttcgtcatatcaatgtgaagatttcttccagaccatggctggagaaggaaagaaggtgtgttttgcctgattcagggactatagagagaaccaagttctgcaggcctgtcacctaagtctcagatgagtatgaattctyttgtgtttttcacagatttttgcagtggcaggaccaagttcaaatgagtcatagccaagtctacagtaagatgtggtagtattctgttttgaaccgaggaccatgattggcaagcttgccacttggtcaagtgcttaccctctaaagatgtcttccttggtctttgcctccagctgggtgtcacaaactctgaactggattctaaggctttcatgaatgcacttatgtttcctgtggcagctgcattatgttgtgggggatgtgcatgccgaacctcccattctgtcatcttgcttatgttactctcctt

SEQ ID NO: 781087 - DNA, 545 bp, Homo sapiens
agatgataacaatttagagtattctgaatttcagtatgtatttaccatttttagtgacatttatactttagtatttttcatattgttagttagcatttcgtcatatcaatgtgaagatttcttccagaccatggctggagaaggaaagaaggtgtgttttgcctgattcagggactatagagagaaccaagttctgcaggcctgtcacctaagtctcagatgagtatgaattctcttgtgtttttcacagatttttgcagtggcaggaccaagttcaaatgagtcatagccaagtctacagtaagatgtggtagtattctgttttgaaccgaggaccatgattggcaagcttgccacttggtcaagtgcttaccctctaaagatgtcttccttggtctttgcctccagctgggtgtcacaaactctgaactggattctaaggctttcatgaatgcacttatgtttccygtggcagctgcattatgttgtgggggatgtgcatgccgaacctcccattctgtcatcttgcttatgttactctcctt

SEQ ID NO: 781088 - DNA, 615 bp, Homo sapiens
tcatctaaatcccaatggtatttttttttgcagaatttttgtgtataattctaaaagttgtttaggaactgtgactaggcaaacaccctttaaaaaggacaaagagttattacattttctgatttaaaatcatgatacaaagctacaaaaataaaaacaatatggtattgccacaaaaacggatacatagatgatgaaacagaatagacatcctggaaataaaccctcgcatacgtgataaaataatcttccatatgctttccatgamcatgcaatagaaaaataagaatctctttaacaaagaattttcaaaattgaatgtttacagagcaaaaataaagttggatgcttcttttgtattatacataaaaagaaaagttttttaatggatttaatgcttaaacataaaaactaataaaattcttagaagtaaacataggggaaaagtttatgacataagtcttaaaactttgcttaagtatgacatcaaattcataagaaacaaggaaaagaacaaaaaagaaaggaactacattaaccttcaagtattctacacatcaaggaaaacatttagtggcatacaaatgtctcctaataagtgggtgaaacctgggt

SEQ ID NO: 781089 - DNA, 615 bp, Homo sapiens
tcatctaaatcccaatggtatttttttttgcagaatttttgtgtataattctaaaagttgtttaggaactgtgactaggcaaacaccctttaaaaaggacaaagagttattacattttctgatttaaaatcatgatacaaagctacaaaaataaaaacaatatggtattgccacaaaaacggatacatagatgatgaaacagaatagacatcctggaaataaaccctcgcatacgtgataaaataatcttccatatgctttccatgaccatgcaatagaaaaataagwatctctttaacaaagaattttcaaaattgaatgtttacagagcaaaaataaagttggatgcttcttttgtattatacataaaaagaaaagttttttaatggatttaatgcttaaacataaaaactaataaaattcttagaagtaaacataggggaaaagtttatgacataagtcttaaaactttgcttaagtatgacatcaaattcataagaaacaaggaaaagaacaaaaaagaaaggaactacattaaccttcaagtattctacacatcaaggaaaacatttagtggcatacaaatgtctcctaataagtgggtgaaacctgggt

SEQ ID NO: 781090 - DNA, 615 bp, Homo sapiens
tcatctaaatcccaatggtatttttttttgcagaatttttgtgtataattctaaaagttgtttaggaactgtgactaggcaaacaccctttaaaaaggacaaagagttattacattttctgatttaaaatcatgatacaaagctacaaaaataaaaacaatatggtattgccacaaaaacggatacatagatgatgaaacagaatagacatcctggaaataaaccctcgcatacgtgataaaataatcttccatatgctttccatgaccatgcaatagaaaaataagaatctctttaacaaagaattttcaaaattgaatgtttacagagcaaaaataaagttggatgcttcttttgtattatacataaaaagaaaagttttttaatggatttaatgcttaaacataaaaactaataaaattcttagaagtaaacataggggaaaaktttatgacataagtcttaaaactttgcttaagtatgacatcaaattcataagaaacaaggaaaagaacaaaaaagaaaggaactacattaaccttcaagtattctacacatcaaggaaaacatttagtggcatacaaatgtctcctaataagtgggtgaaacctgggt

SEQ ID NO: 781091 - DNA, 525 bp, Homo sapiens
cctaggagaaagcgcagagaaattccatatttgggtctggatcctgggcccatcctggttttgtcaggtccctctctgtagagaaccccatgtgcctgctctcaccataactcattgtatgccatgcttggggggtgtggtgaacctgccagttgtccaaggagatgggggacttgaacccatcaaatatctgctcactgattttaatgcagctctacaaagagtgttcccagcagcraaaaaagttaattgtcttctttgtttttaccaccaggtgacatctgcattagaaattctgtttcctagatcaggaacataggagtatctgcatagacccccagccaatgaggaaacccgaggacagcttaaggccttgggattcacatctgagtagacgtacttggtccgcaactcacaactttttattccaccaaccgtgacctgggtatgaacatgacagacccaccagggttcctgtgtcttaaaacctgcccctgtgaggaaaagccccctcctttcctgctc

SEQ ID NO: 781092 - DNA, 632 bp, Homo sapiens
gaatgagataattacccctagtcaagcagtggaagtatggatggctttgggatgggtgaagacaaaagaatctcagcagagggtgcagataaaaaaaggcagaaacacaggaggcttatgcaggaagaggaatgagtttgctggactggggagagtgacagtaaaaagcagaggataataggcatctctggtcatctagggactatagggtggattagttgggggttacagaatcagtgaggtactttttaacagtaggatgggtaaataagagctataatttggaataattatgtagcaatggtggttaggagcaatagacactcaaagtattacataaatattttttttcttattctcccacacaagcgttttgcctttcctcttaaactgagaacggagtggtttgctatgatgtttttaaattctcacagacaagcattattstttgctgccttttagtaaaggttagttttaaccaaattaaagaagattgaatggattttcttgatcataatggttgagtgcaatatctcataccttctattagttttcagtataactgaaataacagagtgtcaatactccatggaggggtgctccgcttgctaaggctccctcctctgggctag

SEQ ID NO: 781093 - DNA, 611 bp, Homo sapiens
atgcatgaatatctagaaacaaaactttgcggaacaattttgataaatggaggaagagatagatctgttcaaccttctcagaaatgggagccagtagctatacataattttcttagtaattctttgtaaaattgtaattctcagtgattctttgctacattttaattttgcttaaatatgcaaggataatttattttaaattcataaatttaatctgagctattatttgtaatatatttatgctgaggtttttccactctctgaatttgccagactatataaaatcaaaccrtctcacatcaggtggccagtgaatgaagcgtgagaatatgccatacaatatctagaaaataacttgcatgtttcaaaacatccaagctatatactcatggaaatcatagtaatattgattgtaaattgtatcattgattgcagttttactatatgccaaacattgtgacaagcattctagattgtcatttaattattaaaagtatttgagtaggttctagtaatatcctcattttatagctgaggaaattaaggaaaaaatctatttttcttaaattcctaaagtcatattgaagcaaaaatgtctggtatcttctgtc

SEQ ID NO: 781094 - DNA, 611 bp, Homo sapiens
atgcatgaatatctagaaacaaaactttgcggaacaattttgataaatggaggaagagatagatctgttcaaccttctcagaaatgggagccagtagctatacataattttcttagtaattctttgtaaaattgtaattctcagtgattctttgctacattttaattttgcttaaatatgcaaggataatttattttaaattcataaatttaatctgagctattatttgtaatatatttatgctgaggtttttccactctctgaatttgccagactatataaaatcaaaccgtctcacatcaggtggccagtgaatgaagygtgagaatatgccatacaatatctagaaaataacttgcatgtttcaaaacatccaagctatatactcatggaaatcatagtaatattgattgtaaattgtatcattgattgcagttttactatatgccaaacattgtgacaagcattctagattgtcatttaattattaaaagtatttgagtaggttctagtaatatcctcattttatagctgaggaaattaaggaaaaaatctatttttcttaaattcctaaagtcatattgaagcaaaaatgtctggtatcttctgtc

SEQ ID NO: 781095 - DNA, 670 bp, Homo sapiens
cccagtgccagaatgcataattagcatggacatactgagcagctgaaagacccccacactggctccctgactggtagggtaaggatcattatggtgggaaaggctaaatggaagccatagtaaatagtaaatctatttaaaaaaatatatattttatacatatataataaaataaaacaaygtagaatccctggagggactgcgagattagtgccaccatcaacgacttgaaggatgcaggggtggtgattcccaccacatcctcattcaactctcccatttagcctgtgcagaagacagatggatcttggggaatgacagtggattatcataagcttaaccatgtagtgattcctattgcagctgctgtaccagatgtggtttcattgcatgagcaaattgacacatctcctgatacctggtatctagccattcacttggcaaatggctttttctccattgctgtccataaggcccacagaagcaatttgccttcagttggcaaggccagcaatatatctttgctttcctacctcagtggtatatcaactctctggctttgtgtcataatcttatttggagagaacttgatcgctttttgcttccaccagatatcacactggttggttacattgatgacattatgctgattggatccagtgagcaagaa

SEQ ID NO: 781096 - DNA, 666 bp, Homo sapiens
cccagtgccagaatgcataattagcatggacatactgagcagctgaaagacccccacactggctccctgactggtagggtaaggatcattatggtgggaaaggctaaatggaagccatagtaaatagtaaatctatttaaaaaaatatatattttatacatatataataaaataaaacaatgtagaatccctggagggactgcgagattagtgccaccatcaacgacttgaaggatgcaggggtggtgattcccaccacatcctcattsaactctcccatttagcctgtgcagaagacagatggatcttggggaatgacagtggattatcataagcttaaccatgtagtgattcctattgcagctgctgtaccagatgtggtttcattgcatgagcaaattgacacatctcctgatacctggtatctagccattcacttggcaaatggctttttctccattgctgtccataaggcccacagaagcaatttgccttcagttggcaaggccagcaatatatctttgctttcctacctcagtggtatatcaactctctggctttgtgtcataatcttatttggagagaacttgatcgctttttgcttccaccagatatcacactggttggttacattgatgacattatgctgattggatccagtgagca

SEQ ID NO: 781097 - DNA, 666 bp, Homo sapiens
cccagtgccagaatgcataattagcatggacatactgagcagctgaaagacccccacactggctccctgactggtagggtaaggatcattatggtgggaaaggctaaatggaagccatagtaaatagtaaatctatttaaaaaaatatatattttatacatatataataaaataaaacaatgtagaatccctggagggactgcgagattagtgccaccatcaacgacttgaaggatgcaggggtggtgattcccaccacatcctcattcaactctcccatttagcctgtgcagaagacagatggatcttggggaatgacagtggattatcataagcttaaccatgtagtgattcctattgcagctgctgtaccagatgtggtttcattgcatgagcarattgacacatctcctgatacctggtatctagccattcacttggcaaatggctttttctccattgctgtccataaggcccacagaagcaatttgccttcagttggcaaggccagcaatatatctttgctttcctacctcagtggtatatcaactctctggctttgtgtcataatcttatttggagagaacttgatcgctttttgcttccaccagatatcacactggttggttacattgatgacattatgctgattggatccagtgagca

SEQ ID NO: 781098 - DNA, 649 bp, Homo sapiens
attgtgattattcaggtcagtttttttttttttttttgccaccaaatctagagtttttattttcctgttctattgttcaagaaataccccagagggctgtccaactacttcattagtaaagacaccatgatcaactagcaactgccaaataactctccaggccaaagcactctgattactgctatgtgcctgcttccctttccagtagacatacccctcttgtattttgtggttaagyctggcctctgctactcctggatttcatcaactccattgaaatcagggaacccttctcagtggtaggaatcttaggatcatacctgacttactaaaagtacacaatttgaggtgcttaggaagctcttggccgctagttgctgctagacacagtgcagtgcaggagcctggccagagcaacacatcaaaaccagaaagtaagttgtcctcttcaagtgtccctctagcgccatctactgatagtttacattgtcctggctgtcaaagaaggaatatttacagggtccaaattcttcatcatagaaaagacaacttgaagctaaggggcaataaattgataactagcataccttctactgtaaaagtttaaccatgaccatttggaggcttaaatggaagcttcaaagccttg

SEQ ID NO: 781099 - DNA, 649 bp, Homo sapiens
attgtgattattcaggtcagtttttttttttttttttgccaccaaatctagagtttttattttcctgttctattgttcaagaaataccccagagggctgtccaactacttcattagtaaagacaccatgatcaactagcaactgccaaataactctccaggccaaagcactctgattactgctatgtgcctgcttccctttccagtagacatacccctcttgtattttgtggttaagcctggcctctgctactcctggatttcatcaactccattgaaatcagggaacccttctcagtggtaggaatcttaggatcatacctgacttactaaaagtacacaatttgaggtgcttaggaagctsttggccgctagttgctgctagacacagtgcagtgcaggagcctggccagagcaacacatcaaaaccagaaagtaagttgtcctcttcaagtgtccctctagcgccatctactgatagtttacattgtcctggctgtcaaagaaggaatatttacagggtccaaattcttcatcatagaaaagacaacttgaagctaaggggcaataaattgataactagcataccttctactgtaaaagtttaaccatgaccatttggaggcttaaatggaagcttcaaagccttg

SEQ ID NO: 781100 - DNA, 623 bp, Homo sapiens
tccccttgccagactactataaatgccaacaaaaacagaaggcttaagatccagtcttataatataaaaatattcagatttcaatataaattatcatttatcataccaagaaatagcaaaatctcaaactgaatgaagaaagaacaatgaatagatgttaaaagtaggagatattagacgtttttgrtgattttaaagaatccgtgataaaaatgcctcaaggagcaattacaaacataattgaaacacataaaaaaaaaagagtcgtaacaatgaaatagaaagtttcagcaaagaagatgaaaatataaagaagaatcaaatggaaattttagaactgaaaactgaaattaaaagatcaatagatgaacttaaaagtagaatgaaaggaagataacaaggtaaaaaaatcagtaaactagaagacagaataacagaaattaatctgaaccatacagataaaatattttaaaaaggaacaaaaacagtatcttagagatatgtgggattataacaatatattgtgtcattgatgctccagaaggagagataaaagcagaatttggaaaaataatctaagaaataatgagtgaaaaattccctaattttgcaagagacataaa

SEQ ID NO: 781101 - DNA, 611 bp, Homo sapiens
catgcacttctcaaaagaagacatacagtttgtcaacaaacgtgaaaaaatactcatcatcactaaacatcagagaagtgcacaaacaaagccacaataagataccatctcatactagtcagaatggctattactaaaaattcaaaaaaataaaagatgctgacaagcctgtagagagaagagaatacttatatactgttgataggaaggtaaattagttcagcaactgtggaaagaagtttggagatttctcaaacagcttaaaagagagctaggattcatcccaccaatctcattactgagtatatccccaaagaaaacaaattgttctgccaagaagacacatgcactcatatgttcataacaacagtatccacagtggcaaagacatggaagcaacctaggtcctcatcaaaggtggactgcataaagaaaatatgcyacaaataccctatggaataccatgctggcataaaaatgaatacaattatgtcttatgcagcaacatgtatacagctgaagatcataactctaaattaatacaggaacagaaaaccaaataccacatattctcacttataagtgggagctaaacattgcgtacacatgaa

SEQ ID NO: 781102 - DNA, 557 bp, Homo sapiens
tttggtactatgttcactacctgggtgacaggatccataccctaaacctcagcatcacacaatatgcccatgtaacaaacctgcatgtaagccctctgtatctaaaataaaagttgaaattatttttaaaagactcartaaataatttcatacacacatgcacacaggcacacacacacacacacacacacacacacacacacacacacacaatgaccaagtggaattaataccaggggtgcaagcttgctacaatatttaaaagtcaatcattgtaatccaaccatattaagaggttgcagaagaaaaatattaccatattactacagagaaataattagacaaaattcaccacctattcataataaaaattgttggaaaaatagtgctagaaaggaacttcttcaatttattaaataagaagcctacaggtaacattatacttaatggtgaaagaccaaatgctctcccccgaagactggaaataatataaggatatccactctcaaccactctcatttaacatagtgtttgaagttctggcctgtgcaataaga

SEQ ID NO: 781103 - DNA, 638 bp, Homo sapiens
tatatatctatgtatacacacacacattgtatttacaaacagtatcctatagtatcaaaatcttttataaccaatacttcacatgaaaaattttaccttgaagaatttcaatatttataagtaattttatgatcataactgtaaatggctgcttgttctattgaacatgctatcctttctaaaaaagcagtttccttttttgggcatttaggttrgcaccattttttttttcacttccaaatgtccaaatttggattttattttttaaatgccaacttagaatctttggggactttaaaccacacacaatgattttagtattttataagtttagtcttctatatcatcctcttgtttgcatcctcttttaaaaaaagcttttttcttgcattcttttctttcttgcttaccctttggccatcagagatgagagtgaggtgggctgggagttagccttatggcaaactcccctcttgctgctggtcctaccctttgcctccagctctccttattccaggaaacattggggatgttctgcctggagctcttccttatctttcctgggccacaagctccttcacaaaggggtcagaacaggatttacttcaatgtggtctctgaatcacagacattctcgg

SEQ ID NO: 781104 - DNA, 638 bp, Homo sapiens
tatatatctatgtatacacacacacattgtatttacaaacagtatcctatagtatcaaaatcttttataaccaatacttcacatgaaaaattttaccttgaagaatttcaatatttataagtaattttatgatcataactgtaaatggctgcttgttctattgaacatgctatcctttctaaaaaagcagtttccttttttgggcatttaggttggcaccattttttttttcacttccaaatgtccaaatttggattttattttttaaatgccaacttagaatctttggggactttaaaccacacacaatgattttagtattttataagtttagtcttctatatcatcctcttgtttkcatcctcttttaaaaaaagcttttttcttgcattcttttctttcttgcttaccctttggccatcagagatgagagtgaggtgggctgggagttagccttatggcaaactcccctcttgctgctggtcctaccctttgcctccagctctccttattccaggaaacattggggatgttctgcctggagctcttccttatctttcctgggccacaagctccttcacaaaggggtcagaacaggatttacttcaatgtggtctctgaatcacagacattctcgg

SEQ ID NO: 781105 - DNA, 600 bp, Homo sapiens
ggattatagtactgcaagatccagaaaggccattttaattataatgctcaaattctgtcacctttctgtctctttttgttttctagagtagaacgccaatctattgaccttcaacttatgctgaatgtaatctatgtattttggttcttgcctggaargcaactgagcttgaggatttaagaaacagagcttaaaagtgtttcttctttcctgagaattagaaaatagacattacatctttcaaatatccctttattaaagagctaaacatacaccttgtttctacccagtctctattctcagaccaggatgttctgattatttctgcaagtgatgcttcaaccttggggtcaatggggactttcattgtgttgactgcattgattctgaaagtctgattagatcaagtaactccactgagatgtaggcacaatgcaatccatacttagacgtgtcctcatgaaataggactttggaagtttgctaattttgccaaattgcatttaattctgaatattttagatatgttgacaaaatttaagattggcaaacttacagctaaaattcctaggaataatggaagatgtcaaaactgttggt

SEQ ID NO: 781106 - DNA, 632 bp, Homo sapiens
cactactaaaaaatgttgggcagctttgacctggttatttgattgaactttctgaatctgatttgtcaactgaagacaagtaaaagtttttttacaaattctatccttagcctctcaattaatctcaaatatttgttcagagaaataattgaaaattctgactgtatcctgactgaaatgtggatcamtgggggcctcaaagcttcagtgtgtttagttccctatggttttgaggcacatgccctatgtgaaccttttgaaggacagaaaaattcataactgactagcaattggttaactttagttaaaaagtgaaacacctactctagtggtgcaaaagatgtctgcaaagggcaaaatcttcagctttgaaaggcattcagcaatgtcaatagactagcacttgagagtcacctaaaatttatttgtattacttttcacccaattttaaagaagaatatttctaagataaaagcttaaaactttttaattaaaaaaaaaaaactaaactcagtactcctaagccttcatagatatatacttcagtatcttgcatgacattgaaagctctaataaccaaattctttcctgactcctaattatgtgtccttgttcttctgtttaaagtaaca

SEQ ID NO: 781107 - DNA, 533 bp, Homo sapiens
attgtccactgttaatttggttggtgaacttttgcagatgtatttttctcctcctacttgcttttaacattttcactttggttctactgttttactatgatgtatttttctgtaaatttttttctatttgccctgagatctattgggattcttgaactgtgaattgattttttataattagtcctggaaagttcttaaccacactttttttcaatagccttctctttcattctctcttatggtcttatgggaattggatcatacttcacctgatcttctgtattttccatttatctgtgtctctgtattttcatcttgatattttcttttcacctctttagttccactaattttttatttaatagcttctaatctattgacrtttttaaggtttaatatttatctatgttccttttaaaaatacactgtgtcagtcaggtgaggtggctcccgcctgtaatcccagcactttgggaggccgaggaaggcggatcacgaggtcaggagtttgagaccagcctgaccaacatggt

SEQ ID NO: 781108 - DNA, 550 bp, Homo sapiens
ttggtcatttttttagcttgcaccagctgggttttggcaccgcctcacccaaacttcatattatgagacatcacggccaacttgcaaactgctgcagtaataagacttgcattttgtgatgcttttgttctcactgacgtgccgtatctgcgttccacttgggtacttcttgctttgaacgagaagcacaaggctattggcgaagttgatgctggggatcggtcagcaatttcatattttccaagaagccattttaggaccctggacaaggtctcgagctgcaaacttgtggtcctgccttgggagaaggcacaaatttccctgtgaggtttcaggtaggacctctcttcttcggtggcactgcaccagcagataccttytttgtccgtgcaaggcttcgagaggctctatgtggacgaggctgtggccgtggttgatttctctgaaaccaggaggaccacaccctgccccctcaatgtaggttttcctgggccaggaaacatttgctgtgggaaacactccgctctcggcctctgccatgcactaatgc

SEQ ID NO: 781109 - DNA, 617 bp, Homo sapiens
caggtgcacaccatgcctggcttctcatttctgtgctaattacatttgtcagttggcctgtgagtgtcctgacagtactggctccagcagcagcttctgttcctggcttctcaggtaagttctgattctctgcattcacctgtctctccagttttcaggatagcagtttrccccatgacctcatttctctgatggatctgagaagagttgttgattttccatttgctgagcttttttcttgttgtggggacagcagtgataacttccaagctctttacctgtcaaatcattatcttttgatatttgaatggttttagttttacatgtggatttgtattccatctggaatatttcttttatgcattatataaggtagagaactaacttttcttagtgaaaatctgtcattccccatttatttgggatgacttcattatacacaaataacccacgtaagtgtgtgtgctctgtgcttctcgttctcttccgttggcctatttgcctattcctaaccacttccatactgtagctttttaatacacccttcaatgctgggtagcgcaaaccccctctgattcttcccggcgattctctcgtgttgcctctcctctgtattg

SEQ ID NO: 781110 - DNA, 656 bp, Homo sapiens
gctagctttccaacagaaactcttcagatacctgaaaaacagtatctacaagaaacaaccttagccagcatgcggacacatggacacttcagttgctgaaacaccggaatgcttcccgatccatcggttggtagcaggcccccaatattcatatttgacgacaatatggtcctcaacttggtacacacatcccatraaagttcaaatacaaaacacacatgcaaaaagtggtggctttcgtgcaccccaggaatcactaatgaaaatgcagtatgaaaaaccacaaagtgagaattggagctgattatctctactctacccctctgtgcagacactgttctgaaaggtttactcaagcattaattcacttactattcgcagcaacccaaggaggatgttccattattatctccacttcacaaaccggcccatagtcacatctctactgagtgggagagccagcaaggttgcccagacagcctggctcctgcagatctgtcttctgcattgaaaacatcatatttacagcagctaccatattctgaggcatgttcctaatgccaaatgtgtaagacggaggaaatcacattcacttaaaggcattatttactggtgtttgactaacctctcccaaatccacccttggatgacaccca

SEQ ID NO: 781111 - DNA, 600 bp, Homo sapiens
tagatagagtcccattctgcagctggatgaccctcctgtgctgacggcacacaggcactgtagcaggaacttgtagatagagtcccatcctgcagctggatgaccctcctgtgctcacggcacacagcccctctaggaggagcatgtagatagagtcccatcctgcagctggatgaccctcctgtgctgacggcacacaggcactgtagcaggaacttgtagatagagtcccatcctgtagctggatgaccctcctgtgctcacggcacacagcccctctaggatgagcatgtagatagagtcccatcctgcagctggatgaccctcctgtgctgacggcacacaggcactgtagcaggaacttgtagatagagtcccatcctgyagctggatgaccctcctgtgctcacggcacacagcccctctaggaggagcatgtagatagagtcccatcctgcagctggatgaccctcctgtgctgacggcacacaggcactgtagcaggaacttgtagatagagtcccatcctgcagctggatgaccctcctgtgctcacggcacacagaccctctaggaggagcatgtagatagggccccatc

SEQ ID NO: 781112 - DNA, 564 bp, Homo sapiens
attgagtcatgagggctccactctcatgaatgagattaatgcccttatagatgaggttgggaagagtgccctctgtcctcttctgctatgtgaggatgcagcgtgaaggcatcatattggaagcagagaataagccctcgccagacattgaatctgttggagccttgatcttggacttcccagcctccagaactattagaaataaaattttattatttataattttcccaggctaaggtattttgttatagctgcccaagcagactaagaccatgtctattatttcagcatatatccttaagcatttacatcacatacattgtttggagaggtttgcttgtttaaactytaagcaacacatcttgaagatcttttcatgtctatatacatagatatacctccttcttttaaaattgttgcatagtgtttcaaagtgaagatataccttactttattaaactatctatgatgaatatttaggttctttcaagtgttttctattgaaaacaatgatgccacatgtagccttgcacgtgtagcctttgtgggtacatttgagtattt

SEQ ID NO: 781113 - DNA, 564 bp, Homo sapiens
attgagtcatgagggctccactctcatgaatgagattaatgcccttatagatgaggttgggaagagtgccctctgtcctcttctgctatgtgaggatgcagcgtgaaggcatcatattggaagcagagaataagccctcgccagacattgaatctgttggagccttgatcttggacttcccagcctccagaactattagaaataaaattttattatttataattttcccaggctaaggtattttgttatagctgcccaagcagactaagaccatgtctattatttcagcatatatccttaagcatttacatcacatacattgtttggagaggtttgcttgtttaaactctaagcaacacatcttgaagatcttttcatgtctatatacatagatatacctccttyttttaaaattgttgcatagtgtttcaaagtgaagatataccttactttattaaactatctatgatgaatatttaggttctttcaagtgttttctattgaaaacaatgatgccacatgtagccttgcacgtgtagcctttgtgggtacatttgagtattt

SEQ ID NO: 781114 - DNA, 614 bp, Homo sapiens
ggttagcaaaatcctctacaacttcaacctctcctatgaatgtcccctgctctaagtgaaatctggctgtctcatataataatgctttcctgtgcagcactttcaagcaggggctgattttctctcacttctcaccttcccctaggccttgaaccacttacagacccttctccataaaaacattcagttctgaatctcacatcatcagaktcaacatcatccctctttgtagccatttactgcttccaagtaactttcctcttatgccttaaagattgtggctcctagctcactgtcattctctctaatatattcttatcataattcctggtaattttaataactatataagtaatgattataatgcattgccctctcagttatctgatctctcctccactgatcttgacatttccacccaacctcagcctctcatttccatggttataatccttgaccgtgttattactaataactgaaaccttttttctctaatcttaatttcaaatatctcattcgccaaacaccatctcttaactttctagtttgctctctatagtacaccaattctaacaatccctcaacctatcaggacattcaatctactaattcta

SEQ ID NO: 781115 - DNA, 621 bp, Homo sapiens
tatgcacatatttggtaaaagtataaagaaaagcaaagaaatgattcacataaaatttaggaaactgtttatctctgagggagagagaagatgggagattcaatcaagtaggacctcacaagaggctttaaaggtactagaaatctcctttttgttaagctgggtagcaagtagaaaagccttcaatttgttattctttaagttgtgggtttatgttaaatatacttttatacatatgacatattttacaatttaaaaaaaggatataaatggggatgacaaattagaatttgggggctgtaacccagacttttccactgactgtgtaacyttaaacaagtcatttaacctctcagagcataatttttcttcttattttattaatgaggaagctaacagctaacatctgtttaggactttggcatttaaagaactgtttaaagttcctagactgtaaacatgcaaatatgcatgagatcataaaacaaaatcatacctcattaataaataccacaatactaagaactcattggtagggcacacaaggctattcaccattctagcctctgcctatctttctaacaataaaggcaacaactaatttttttaatgtgtactata

SEQ ID NO: 781116 - DNA, 578 bp, Homo sapiens
ccttttacaaacgttataagaacacaaaacaaaaagaaaacaaaagaaaccaaattagggttgtaatgtgtccagaattggtttcttccagttggttcttggtctcgctgacttcaagaatgaagctgcggatgcttgcagtgagtgttacagttcttaaagatggtgtgtccatagtttgttccttcagatgttcagatgtgtctggagtttcttccttccggtgggttcttgttctcactgacttcaggagtgaggccacagactttygcagtgattgttacagctcttaaggccgtgtccaaagttgttttttcttcctggtgggttggtggtctcagtgacttcaggaatgaagccgcagaccctctcgtgtgtgttacagctcataaaggtagtgcagacccaaagagtgagcagcagcaagatttgttgtgaagggcaaaagaacaaagcttccacagcatggaaggggacccaaacaagttaccactgctggctcagttggccagcttttattcccatatttggccctgccacatcccgctgattggtacattttacagagcgctgattgg

SEQ ID NO: 781117 - DNA, 505 bp, Homo sapiens
tgtttctctaatatttgtttaaaatattagaattttaaacgtaaaatgttttccaattaaatactttaaattgtatcattgtagacatttctgaaaatattactaagaaaaatgtaggaaaatactttttggccggcactttatgagttcaaagcaactcatgtcagctcctagtgcaataaatcttactttagaatgattctagttaataaactggcaagttcagaatcaaataccaagaaagtcctaaataaaagcttaccaacatttgaaatgctaacasactatagtactttttaattgctgaaaacttttttttggaggttatgtgcttctttttaaaaaatttttattttactttaagttctaggatacatgtgcagaatgtgcaggtttgttacataggtatacatgtgccatcatggtttgctgcacctatcaacccttcatctaggctttaagttctgcatgcattaggtatttgtcctaatgctctctctcccct

SEQ ID NO: 781118 - DNA, 565 bp, Homo sapiens
cccatgagagcaacctctggggataaacccggtaaagctacagcagtggagttttcccagaccttggaagtccaacccttacagcattgtaccctggagtcaaaggagattattttggagctttaagatttaatgacttccttgctgggttttgaatttgcatggggattgtagcccctttcatttggctgatttctcccttttggaattgtagtgtttacccagttctgatactttcattgtatcttagaagtaaataacttgtttctgattttacagacacataggtggaagggacttgccttatctcagatgagactttggacttttgagttaattctgaaatgagttaagactttaggggacwgttgggaaggcatgattatattttacaatgtgagaaggacatgatatttgggagggggcaggggtggataaatatctaaatacaacttggttatttgttcctgcccgagtctcatgttgaattttaatccccaatgctgaaggtgaggtatggtgggaggtgtttgacttatggggtggatccctgatagcttgatgc

SEQ ID NO: 781119 - DNA, 613 bp, Homo sapiens
tttttaaccattctaatgtagaaatataagcttgctattttcttctcctcttccatgattcaaagagaattatattcaggcatatgtggactgactccctggctcacctcagaaatttcttaagtaatttttggattaagtattcttggttattggggttttaaaaaatcataaagcaattgttaagtctgagcatttaggtttttttctacgattattttgtattattagaaatatagaaatagaaatagcaggaagcagcagttcagacaatacaaaatctatctcatacctccaaatcagtctcaggaagaagtaagtctataacagatacatctctttagtttctgatggcacatccttgagaaaagaaggccctttaaagcaatcttcatctgtcttaaaaaaaaaaactattagaagaagagggaagaaccttaaaatgtaraacccacctcatggaaaattagggctgctctggtttgtcttccatctgtctaggataatatcttaaaccctgcactattcctgtaactctccctagaatggcaaaggtcatagtctgggtaagtaagcatcctttacacatcacatctttgttagggatgtcagt

SEQ ID NO: 781120 - DNA, 646 bp, Homo sapiens
tccaaggtaataaaaatctgccttgtgcaatttaggactcaagcaggagcacatgcaggaagcgcttttctgggcctcctccagtagcattgcctttttgcttctactccttttccagagacagtaagtctttgtctggtcttcgtggggagctggggcaaagtgaaattccaggaatagagaaactaaaatctatgtggtgtctctctgccacaggttgaatctgtctttttcctgtccttctccatcttctcatcagtgctctgcaaaagccaatagaaaagcgctgatgagtacagactggttatgtctggacaaaatgctcagcctttcaggtcttggtaaacattcagtcattttcttgttatctgctttatggcagttccctctctctttgaagtctgtcaaaggtggaatagtgtttgtgttctctctctttggaggaacttgccactgtgatgtttggaattcgatttaccttgttagctagctctwagatggagtctagattttgtacatttttgtagctagagcttgttagggtagaagtgacattctcctgtggctttctacaaacttagttgaagcaaaagtcaagttacacatatatttaattgtttattcaatcatagatcattgagaaatg

SEQ ID NO: 781121 - DNA, 557 bp, Homo sapiens
cataaaccaaactagactagactgttatgaagataccaatcaggggctaagagttcccttgtatcttattgtccacatgctttgttgattagcaacagtttaaacattaagatcccatcaagataaaccaaaggaaagatcatytccaactgcttatgagattttgaaggcatcatccagtggtaacacactgagatgcaaggctttttgtaaagaattgacaaaggtattagctccctgcttcctatctgtggccctctgccaatgcctcgtctctgcatttgtttctcccctccctttctacggctttccttttccccatgtttattcctattctccttcatctaaatgtgccatctgtaaaagcctactttgaaaaagatcactgttaaattctgaacccttattttcctgtccttaatataaagttcataagtttatggcctcagaagtctctcaaaatctttcttaacaaaagaactgactaaactaagttatttttatttccatgttgcttttggctggttttcttttgtgcgtcagaggcttccaaaagg

SEQ ID NO: 781122 - DNA, 557 bp, Homo sapiens
cataaaccaaactagactagactgttatgaagataccaatcaggggctaagagttcccttgtatcttattgtccacatgctttgttgattagcaacagtttaaacattaagatcccatcaagataaaccaaaggaaagatcatctscaactgcttatgagattttgaaggcatcatccagtggtaacacactgagatgcaaggctttttgtaaagaattgacaaaggtattagctccctgcttcctatctgtggccctctgccaatgcctcgtctctgcatttgtttctcccctccctttctacggctttccttttccccatgtttattcctattctccttcatctaaatgtgccatctgtaaaagcctactttgaaaaagatcactgttaaattctgaacccttattttcctgtccttaatataaagttcataagtttatggcctcagaagtctctcaaaatctttcttaacaaaagaactgactaaactaagttatttttatttccatgttgcttttggctggttttcttttgtgcgtcagaggcttccaaaagg

SEQ ID NO: 781123 - DNA, 557 bp, Homo sapiens
cataaaccaaactagactagactgttatgaagataccaatcaggggctaagagttcccttgtatcttattgtccacatgctttgttgattagcaacagtttaaacattaagatcccatcaagataaaccaaaggaaagatcatctccaactgcttatgagattttgaaggcatcatccagtggtaacacactgagatgcaaggctttttgtaaagaattgacaaaggtattagctccctgcttcctatctgtggccctctgccaatgcctcgtctctgcatttgtttctcccctccctttctayggctttccttttccccatgtttattcctattctccttcatctaaatgtgccatctgtaaaagcctactttgaaaaagatcactgttaaattctgaacccttattttcctgtccttaatataaagttcataagtttatggcctcagaagtctctcaaaatctttcttaacaaaagaactgactaaactaagttatttttatttccatgttgcttttggctggttttcttttgtgcgtcagaggcttccaaaagg

SEQ ID NO: 781124 - DNA, 537 bp, Homo sapiens
agacgactttggccccttctcatataatacatgacttccttttacacaataatgagaatgtgggtttatatgactaatctgacacaatacagtaacttctgcttaaaaaaaaaagctgaacatttcttaatatgcagttacaatgtaaattactatgttcatggatggatctttaatttccaagtttctctattattttctttcttttttaaataaggagccagagtgaaaattgtcacttgccttgtaatcagtcacctaaaaactagagtgaaaattgttgtgtgtgaaaagagttcaaaattggtttctatgtcccaggarccggagagctggtcttcctactgctgtctgtctcaggacacagcacacccatccgctgtaggaaaggcagaggtttcgcttagagctgcttgcgtgtaagggaatgagggaactcaacctggcatgaacaagcccttgatgatttaccttctttcctaatgcccagagcattccttccttgcttacccaatctaaggaagggtttcctactgc

SEQ ID NO: 781125 - DNA, 633 bp, Homo sapiens
aaggggtaaagaaactcacacacattatttctatgttgttctaaccccagcaccatcacttccactcgcagcaactatcaatcaatgagaaacttctagacaccttgcatgtgttaacttatctcatcttttcagtggcactcaagaaaacctcagatgtaataatatttcagtatatagaggagaaatgaaagtcttcagaagttaagacatttgctggggacacacagcaaaagtgaaatcaagttctgtgtgattgcaaagtgcrgtcttcctatcaccagacgccacaaggccaacatagatgcatgagtgccaacgatcgaaaaatggacggcccgcgtcattacatccagggtagggtcttaccaacagtcacatcctgagagagtcagggctgaaatgttacttttccttctttatcctctagatgaaggaagtggggtagaaaggaggggggtgggcttagggagcagcttgattgccgagggtaaaggtggcctgcagtcctggaaactgagtcctgggactttccttttcaggctctgctggagtttggctaccagctctacttgtctgggggatgtgtcaatgagccatttgcatgatgctttacagagttaaacccattat

SEQ ID NO: 781126 - DNA, 547 bp, Homo sapiens
taaagtgaaagcaatattctaagaatatgagaagtgtgtgtacgtgtgtgtgtgtgatgttacattgttaagggtatttttttaaagttgtagttaaggggagaaaaggcaattatatctagcaattgtatttttgtttgtttgttttgagactgagtctctctctgtcacccaggctggagtgcagtggcgtgatctcagctctctgcaaccttccaggttcaagcgattctcctgcctcagcctcccgagtagctgggactacaggcatgtgccaccatgcccagctaatttttttgtatttttttttagtagagatgggttatcactgtgttagccaggatggtctcaatctcctgaccttgcratctgccctcctcggtctcccaaagtgctgggattacaggtgcgagccaccgtgcccggccagcaattgtatcttatagagcagttgtccccaacccccagtccacagactagtactggtcaatggcctgttaggaaccagggccacacaccagaaggtgagcggggtgggggtgagtga

SEQ ID NO: 781127 - DNA, 511 bp, Homo sapiens
  misc_feature 186: n = A,T,C or G
atggcctcactgtgattaatgaagaactaactgccaaattcaccggacgctttttaatccttatattataaaaatcaaacaattgtaagcattgtcaaactcttcctcctacttgaaattcctcttgctgaattctgcagtggcatacggcagtttctcaaataatattgtttaattcactgttgntcattataatgtttatgaaaaaaaatttgatgcccagctggggccactgtctgtgtggagtttgcaagtcctccccatgtctgtgtctgcctgtgttttctctgagtactccagtttccycccacacatcaaagctgtgcacattaggtttgttggtgtgtctcagtggtcctagtctgaatgagtgtggatgtgggcatgagtgtgtgctgtgatgggacagcatcctggccagggtcgggtcccacttggctcctgagctgctaggacaggctccagccacccaagatcctgcactagaataaataagtaaataattatctaa

SEQ ID NO: 781128 - DNA, 620 bp, Homo sapiens
aaagctttgggttggtgaaaaattaagtaatctaggcatgatttatgggatgcaggaggatgtggataggttacatgcaaatgtcattttataaaaggaacacagcatctgtggatttaggtatgcttagggggtctggaaccaatcccctgcatatggttaggggataaccatattcaaaagaaacatcaagctttaagttcaagatctaatcaccaaatttttataaaatggaaatgacgctttccccaactacatcacatgactacatcaaggatcatgttaagtacaggtgagtagatatatatatatatatatatatatatatatatatatatatatayacacacatatatagatatacacaaaataatttatacacaaacataaaatcatgaaggctttttaaaaataggaactgttaattatacataaagcatctccattcgtgcaatttttatgtcttcttccaggtaattaattttatggaaatatacaatcctcctcctgcctgcacctctcccacatacacactaccttcctagtactctggggaatattgggcaaacattctcaccacaaaattatattaagaagttaaataaacattaaatattgta

SEQ ID NO: 781129 - DNA, 620 bp, Homo sapiens
aaagctttgggttggtgaaaaattaagtaatctaggcatgatttatgggatgcaggaggatgtggataggttacatgcaaatgtcattttataaaaggaacacagcatctgtggatttaggtatgcttagggggtctggaaccaatcccctgcatatggttaggggataaccatattcaaaagaaacatcaagctttaagttcaagatctaatcaccaaatttttataaaatggaaatgacgctttccccaactacatcacatgactacatcaaggatcatgttaagtacaggtgagtagatatatatatatatatatatatatatatatatatatatatatacayacacatatatagatatacacaaaataatttatacacaaacataaaatcatgaaggctttttaaaaataggaactgttaattatacataaagcatctccattcgtgcaatttttatgtcttcttccaggtaattaattttatggaaatatacaatcctcctcctgcctgcacctctcccacatacacactaccttcctagtactctggggaatattgggcaaacattctcaccacaaaattatattaagaagttaaataaacattaaatattgta

SEQ ID NO: 781130 - DNA, 632 bp, Homo sapiens; identical to SEQ ID NO: 777413

SEQ ID NO: 781131 - DNA, 684 bp, Homo sapiens
tcgcaggctggagtgcagtggtgcagtcacggttcactgcaggctcgacctcctgggctcaagcgatcctttctggccttagtctctggagtagctggtactatgggtactatagatacactgttattgttattattgtggatacagtgtcttgctatgttgtccaggctagctttgtagattttttgacaatgtttgtttgcttatgagatgaaataacattaataataagcatttaaaaatgtacattgtcactattttgaacagcttcatgctagaagatagctayggaattatgagtctggaaacataggatagtatattataatttatatataattatggtaagatccattttttttttagtgttttcataatcaactttgtcttttccttccaggtcaataacgactggagtgtgatggagaggaagagacagtacacggttgaaatttttcctgatgaaaggtaaggaaagaaaaaccagggtcatatcagacttagataaatcagggagaagaggtaacaattaacttaatctagatgacaaagcttattaacttgaaaaatcactcccttagctctttttatttcttgctttcattaatattcctttggacttcctatcttacacaggatccgtgtggcctccagaataccctttaagtaggcattgaatggtag

SEQ ID NO: 781132 - DNA, 589 bp, Homo sapiens
cattcttttctgtatacattttaccttagtgagatactatttgtaaagacaataaactaagttagcctctgataaaaatgtatctctaaaaggaacaattttacaggattttaatacagcttatgcaatacatttcatgtatgaaataatatcctatatcgttagtgtgcctaacaacacaatttgggaaactcttatttaaatggtgttcagcatttaaagaagacatcaaattatagcccatttgttaaaatgaatgtttccttataaaatggtcagattttgaaaaactgccttgggtrgcatagctcgctgataagtgattccaaaaaaatgacacattactacagaaagttgaagaagtggagattttgaatttcactgttagaaacataaaactgattctcaaaagttaatgtcagtgagtggaactaaatagaagaaattataaaatttgtttattttcttcatttatattcttaacaggcacacataataaactgataatttttttaagatccagttgcttattttcttaatgatgctaagaaaattgttttttaaatttatttttctctcttaaaatata

SEQ ID NO: 781133 - DNA, 640 bp, Homo sapiens
tagtagtattgtcaggtcatagggtatgcacacataaatagaaatgattgattagctgcaatttgtagtgcacacatatttgctatgtaagtgatccatgtttaagactttaactgaatttaaaaaatattttattggagccaatctaaatgagctaagggtttgtattgtttacataagcaaagattacacttactgggtcaattcggttgattaactttggatatataaaatatatagctagttgttaaatagatataattattaattggcattacttttgtttgtatataaaaatttcaaaatatccatgacttaagcaaggtaaacacccactgggtggcttaagcaacagaaatgtatttcttrcagttccggaagttgaacgtctaagattaaggtgatgacagggttggtttctggtgagtcctcccccattggcttgcagatagccgccttctccttcatgacctttcctctgtgtatgtgcatcccttgtagctgttcttccttttatgaggacattagacttattggattaaggtcctacccatatgaactcatttaaccttaattacccctttaaaggccctacctccacttgcaggggttaaaacttcaacatatgaatggggttgag

SEQ ID NO: 781134 - DNA, 453 bp, Homo sapiens
atctggttttgtacatgttggcaattcaggaaggctaagtgtgttattagtccaagaaatgtagtgaatagacacaaccactcttacataggcactctgtgcttgacatgatttcctgaatgttagtgggggaatccgttacactaatccacacaagtagtcgtaatgctgctggcaatttcccagacattaacaatgaagatcgttggcttratgcaaatcattgacgcctgtgacagatcaagtcaatattaattcctgtctgatacttttcttgtgacatttgaagtcatctctgttttgtctaaaaatcttattcgtaggacagccacctacagggccacccagaatggctcattaagccaacacatttcttttgcatctttgtgcatgaagggatctagagaaaaactatattattcctgttttttccctcctgcctcacacaggtca

SEQ ID NO: 781135 - DNA, 609 bp, Homo sapiens
ttgttagtttcttctcaagacttatcccagggcttttcttataataagtgggtggtaaataattgctgaataaattatggggactcttagagctataaaagatagaatttgggattacctgtgttgcttattagaaaagtttttaaattaactaaatcattttgtgaggatatatatgaactcagttggcctcacatttgccttgaagttttatgttcctgcacttaaatcaacagygctttttctcattattttcatttcttcagacttttttcccctaacatagttgataaaattccttctgcccacactgaatctttaaaaacacagagtagttggaaaaaacttgtgttttgctatatgtgtataattagtattctgtataaagaaatgaccgtagttctcttgaatccagatgctgcgtgggggttaaattttacagattcagccatttgctaagaaaaataaggtcaaaattttagggtaagaaaataatgagaatgatttaaacttgtatagtacatttcagtttataaatttctttctaaaagtttctttctaatatagtattttatttaattttgacaacaaaactgtgatgtggatagg

SEQ ID NO: 781136 - DNA, 650 bp, Homo sapiens
gattgcaccactgcgctccagcctgggcaacagagcaagactccgaaaggcagaaagaaaaagaaagaaaagaaagaaaaagaaaaagaaaaaaaagaaagagggagggaggggaaaaaaaaagaaaaaaatgtcctagatattctgaaccaaagtggtcatcctgtcrcaatctgtaattttaccccattttaaagtctctttatgtatattttctagttattttgttttctgtctcctgtgagagaatgtaatatccatgtcgatacaaatcatatcttgattgttaattgctgaaatcccagtgcgcccaaaattgcacgtcctgtaataggtgtttgataaacttttgttgaattctgaatgttaaaccctttgacaagtgacctgacatgatgaataaaaacttatagggtttaaggattaaaaaatttccataaagaattgtttacttaattcacaatggctaggacttgccaatgggtatagaggccaccagaaactggtgaactattttttaaaatctcataatataagaggaatcatattattaactggccactattctgagttttgaaaaacattttacaactttaaaaaatgattcaaataaagcaaggagacgagtaatgcaagtaatgccaagtatg

SEQ ID NO: 781137 - DNA, 523 bp, Homo sapiens
atttcctcatgtttctaagcctcactccattacatttttattgatcacagcaccagtgccagacgacaaatgggaattcttaagagaaagggcattagaagtgttaaaaggcaaccacagagagctgtcacatggagaaatggtccatgccatcttcatttgatctcactcctagttgggagtcatcagaatggggaacggagatatctttcagcaaggaggtcccagtgatatgattaataaaaatatgtcaaaagacacatgagaatagaagttcatttgatacaagcaaaggttattgtttattctactaatacggttccacagaatccaggtcccagcagtgccccctcttaraaggacaagcctccctagttttcaagtcttcacaaatgtggctagctgacaaaataccatctgatcaagtcataatcttctcagatccttcataaatcttcttactgccatgctcatgtttttaaccccttccaacctcttcgagctgacattaagtagcttcttt

SEQ ID NO: 781138 - DNA, 518 bp, Homo sapiens
agatgacttgctaaaatatctacacagtgcagagccctggtcaaagcacttgcttttcaaagtgacttactgtgttgaagtgtagccatgggttgcaggttatcaccattgtttattgctaacagtaacattgaccatttttacccgggcacagtcagaccaacggaagccactgagtttgaggctggttacataggaacagtatgcctaggttacccacgggatataagaaaccctggctgaaactccaatttgtgctccctggtttccaaggtgttctgtgctcacatcagtagctcttgttccaagagagaaaatgcatcgtggtgtggctcttgyagacagagggcaattatagcttgcacctgtcctctctggaccctatgctgtgaggcaggctgtggctgtgacacttattcttgttttaatgttgtgggtatattgcatcctttttctgcaaggaactctagattcgtaagcactgtcatttggttcctgtgagtcctctttagcaattg

SEQ ID NO: 781139 - DNA, 646 bp, Homo sapiens
atctgctcttttaactttgattaggatccattgactttccccatttgtaaaatagaaatgtaacttccaaatcaaaatttatggcattttaatggactgttctaaatattataatattttttcttgttcaaataacttgatttaaagcttctaattgaagaacataatagrtatttctgaattgcatctctccaagcttatttcagaaggaaactcaaaaagaattgttccttagactttgactggtttacagttttaaaagagctgccaaattgtagtttactgatctaaataagaggaacattaaggttacacctgcagctagaagaaaagtgctggatatgtacaattttatgtagctggatctgcagaagatgatttttgcacacagagtaaaggcatctaaaaacgtgtctgctcttattcagacatttccaatatttcttttttaagcccacaagtctgattacctctgtatgtctcttgggagctgcaattttgctggaaagagattcagaacagtcagagcactcacataaaatagatagtttttaaagtctgtaccctctacggtagtaataaaatgacctaaaaatattctgaaagtctctcttatgacatagtggatgaatcattagcttattta

SEQ ID NO: 781140 - DNA, 612 bp, Homo sapiens
accgtaatagcagctgcctccacaactcactagcttaaaattgctaaagggcaacactaagtaatctcagtgtatgagccagaatgccagaagaagtgccatatttgcttaaaaatagcaataccgatcatacttacatgcacatatctttagtgataacatttacctttatatttggtttgttaaaggtaataaagaatcctggcattcccttttgcttttgtccagatactttatttttgcctcytttgccatgctatagcattagataaagcaaaacgggtgtgcttccacctaaaacattctagggggaaaaatgttgagcagaaaaggattatttcaaaagaagccggatatggtggcatgcacctgtcatcgcaggcacttggaggctgaagtgggaggattgcttgagcccaggagttgggagaccagcctgggcaacacagtgagacccccatcccttaagaaataaattttaaaaaggggaccacatttaaactgtagaccgaagtggaatgaatcaatcggaaaggagagtggaaagcaaatgtttgaaagaaaataaaaagaaaagcaagccaacaaaataaatggacaaagaagggcagt

SEQ ID NO: 781141 - DNA, 639 bp, Homo sapiens
gatactccgagatgcttttaatttattgaatactttttattggtatttatcataaacaagagactcacaaatatatcccagaggggaggttttggtgtagttgactatagtagttattaaataatctattaataaaagcccacaaaatggaagatagaaagatagaaaaacaaaagacaacacaggatggtgttggtatacagaatttatacttgaagtttaacaacacggaacaagaaactttattaaaatattcatttaaagaacttccatatgaatcaccagaggctcttagtaaaatattgattcsgattcacagatctgggtggggcctgagattctgcatttctcataagctccaagcagatactgatgctattcttcctcaaatcacactttgactaacaaggactcacacaggttctctgtaattggtgttggtagtcattcatggttagatgtagttgaggactgccctcttaactacctctcggctgccaggttataaagaaagcaagtctcagtacaagttctgtcacttaggagcatttattagccaatgggtacaaaacaatcttacagcctgtgccagagacacagtgaagtcacagttctgtcttttggggtgcttggtgtgag

SEQ ID NO: 781142 - DNA, 639 bp, Homo sapiens
gatactccgagatgcttttaatttattgaatactttttattggtatttatcataaacaagagactcacaaatatatcccagaggggaggttttggtgtagttgactatagtagttattaaataatctattaataaaagcccacaaaatggaagatagaaagatagaaaaacaaaagacaacacaggatggtgttggtatacagaatttatacttgaagtttaacaacacggaacaagaaactttattaaaatattcatttaaagaacttccatatgaatcaccagaggctcttagtaaaatattgattcggattcacagatctgggtggggcctgagattctgcatttctcataagctccaagcagatactgatgctattcttcctcaaatcacactttgactaacaaggactcacacaggttctctgtaattggtgttgktagtcattcatggttagatgtagttgaggactgccctcttaactacctctcggctgccaggttataaagaaagcaagtctcagtacaagttctgtcacttaggagcatttattagccaatgggtacaaaacaatcttacagcctgtgccagagacacagtgaagtcacagttctgtcttttggggtgcttggtgtgag

SEQ ID NO: 781143 - DNA, 460 bp, Homo sapiens
gggctacttgggggccaagtatgttcgatatagaggctccatcttctcttttgtcaccacgtgtacagtaaagaaacaggcaacatggcgccagccaggtagagaccccatccgcataataaaaaattggggtggggtggcagcttcttctcacctaygcaaacagtacacctactgctaaccagttctttgcatgctatgcaaatggcacacctggtccaaccaatctttcctgccctgtgtaaacaagacactaactccgcaagctcatctgcagaaccatctgcacttcaccatggactggaagacctgttcaggacccctctctctgcaggagagagcttttgtctttcttttgtctgtttaacttctgctgtgaacctcactcattgtgtgtttgcatccttgattgccttggcatgggacaatgaacctcaggtatcaccccaaatgaatgatg

SEQ ID NO: 781144 - DNA, 596 bp, Homo sapiens
atactacaggattttcctggggctccagagtgacctgggagcagctcagccagagctggccctggagctaagagtcaaagaaacaaagcagcatcgatcaccatgaattaattaccaagggctggggagatcacgtttatctcagaaggcgcaacagaaacaggtgcaaccagaggaccagaggcccttcttcctggaccttggaaytgatatggcctcgaaaaatggcagagaaatcgctgaactgcctgagacgagatgacctagaatcagatgaaaccaagttcctaccactcagcacaatggggatttgaagtagaaatacattcacttaggaaagtagaaacgtgcatttctggcacctgattgtgtggcctgagattcctgtctgctacagtgacatcgctggtgacattattagtgccccactttgtcagcagcatgcagtagctggcctaagatgtccaggtcactaacagtattctgatgggttcagccagcacaaaggtcaaacacctcatacacagccctgcctggggagcagtatctggttcctccaccctcctatcatcgcggttaagaacagttgattcata

SEQ ID NO: 781145 - DNA, 633 bp, Homo sapiens
gtgtggcaattcctcaaaaacctaaaaacagaactaccattctacccagcagtcccattcctgagtatatacccaaaggaatataagttattctaatcttaaagacacacaacatgctaatgttcgttgcagcactactcacaatagcaaagacatggaatcaaccgagatgcccatcggtggtagactagataragaaatgtacatatataccatgcagtaccatgcagccgtaaaaaagaacaggatcatgtcctttgcaggaacatggatggagctgcaggccattatccttagcaaactaacacagaaacagaaaaccaaatacagtatgttctcacttataaatgggagctaaataatgagaacccatggacacatagagggaaaaaacagccacagggtcctaccagagggtgcagggtggaaggagggagaggaccaagaagaataactaatgggtgctaggcttaatacctgggtgaaacaggcatacctagatgaaataatctgtacaaccaactcctgtgacacaggtttacctatataataaacttgcacatgtaccactgaacttaaaaaaaagtcagaatgaaaaaaaaattaaaaatactttatttttagggccatttt

SEQ ID NO: 781146 - DNA, 633 bp, Homo sapiens
gtgtggcaattcctcaaaaacctaaaaacagaactaccattctacccagcagtcccattcctgagtatatacccaaaggaatataagttattctaatcttaaagacacacaacatgctaatgttcgttgcagcactactcacaatagcaaagacatggaatcaaccgagatgcccatcggtggtagactagataaagaaatgtacatatataccatgcagtaccatgcagccgtaaaaaagaacaggatcatgtcctttgcaggaacatggatggagctgcaggccattatccttagcaaactaacacagaaacagaaaaccaaatacagtatgttctcacttataaatgggagctaaataatgagaacmcatggacacatagagggaaaaaacagccacagggtcctaccagagggtgcagggtggaaggagggagaggaccaagaagaataactaatgggtgctaggcttaatacctgggtgaaacaggcatacctagatgaaataatctgtacaaccaactcctgtgacacaggtttacctatataataaacttgcacatgtaccactgaacttaaaaaaaagtcagaatgaaaaaaaaattaaaaatactttatttttagggccatttt

SEQ ID NO: 781147 - DNA, 629 bp, Homo sapiens
tgtggtgatttaattccttcttggttttttgttattgttattgttttggggttcagggtgtgtgcgtgtgcgtgtgcgtgtgtgtgtgtgtgtgtgtgtgtgttttggccaagatttgggattatttcattcttcctgaataacaacccttgatattttctttaatctgggtcttctggtaacaaagacagtttctctttgtctgaaatgtctttatttcactatcattcttaaagaatatttttgctgagatactttcaattattttggttgagaagtcacctgtcagtctacacattttttccctctaattggaaagataacaatgaattttaaagaactagactttagttctggagggacatggctgagaatcctggctctgctataactagtgagtgcctcaagctttcacacctgtgaaatggggataacaatatctcccttgctgtgattttgtaaagattggagataaattattattattttttagwcatgtggcctaatgggcacttaaaataataacaatattattataaatgttaataagttaataactttcttataaatccttcttgttcagaaaaacaaacatctgtatagcccctgcacataagagcaaatggacc

SEQ ID NO: 781148 - DNA, 643 bp, Homo sapiens
tctgatacaggcatttaaacttccccctcccaaattctgggtcattgacatcctgcagattttgatattgtgttaagattttcattcatttcaaaattcttcctgattttccttttaatgtcttctttgacccatagaaatctaaaactgcatatttaatttctgaaaaatttgaaaattttacggaaatctctctattattgattacaatttttaattcctgtgtggtcacaacatayattttgtattactgaaatgcttttatattgactgaaacttgtttttttttccccaaggtcacagattatatatatatatataatatactatattatatatatatatatatatatatatataaaatactatattatatatatataatactatattatatatatatataaaatagtatattttatatatatatatatatattacttgaagttctaggttgcacaggatgtggtttaacttgatgattattcaatgtgcagttgaaaaaactgtctattctgctcttctttggtggactattctatgaagctcaattaggtcaggttcattgttagtgttgttcaagtatattatgttctcacagatttttccattaggcctatcaattttggggaggaatactgaa

SEQ ID NO: 781149 - DNA, 611 bp, Homo sapiens
tagatatgtagattttgacatatatgcatggaagtatatacaaatgcacgtacatatgcagatagttttggacttacaatgtttcaacttaggatttttttaactgaactatggtgcaaaagcaatatttatgcagtagaaatcatactttgaatactcatacaatacagttttccactttcagtgtggtattcaataaattacatgagatattgaacactatattataagataggctttgtgtgagataatcttgcccaactgaaggctaaagtaagtgttatgagtatgtatgaagtagactaacctaagctatgatgttccgtagactgggtgtattaaatgcattttttacttayaacttatgttgagtttatctggacataactctgttgtaagttgaggagcatttctatctgtatgtgtgtgagcgtgtcagtgtttatgtgagggagagagggaaagagaggaaatagctttatttacctcttggaatatatgaaatgcagttataacaacttcattcatgtacttgtctaataattctaacgtctgtgtcagttctcttttgtttctgactgattggttttcctctttattatggtcatatt

SEQ ID NO: 781150 - DNA, 649 bp, Homo sapiens
tttatctgatacgtagccagtgtttagcttcttattcctgagctcgcctgctctcagattcctgccctgatattgttttccatttttgctcacagagtcagggtcactgtgtgaagttgtgcaattgtgcactgcccaataccaggggtgtgctttgtgcaggattcctctgtatgaacagttcctctaggagtgacgccattcttactggttgcagtatgatgacgccatccccagtgaacaatatttctaagtcartaacagtagttcagagatgccttttcatattgagaagctggtgtttggagagagacaaatgaatcttattagtgatttttatcaggacaaatcattatctaatatttggctactggaaatgcaacacaacttatatattatatttgcatataactaaagaaactctatcacctttcattatcactacccctattgccatcaataaagaaatcaatatgccactagtgtaaaacagagattttttctgagggtacattctgtgggagtgataagcatgtattctaacagaaaagatggaaagctgcctcttttaagttttatagttttcatttcctatgctttttatctctgatggtctgtaaacgtcataaaaccttttaagaaatttgaa

SEQ ID NO: 781151 - DNA, 641 bp, Homo sapiens
tgaagtcataaccgggcgttactgccccgaaagactgccttctgatttcttcggcaaacttgtaggtaaattggttacattcctaaaaaaagaaaattaagaagtgaccctaggttaattaaagaaaacaatcattccacttctaaaacttgggattytatagacccaacagcaaatgtagggtgtcatgttattaaaggtgtgcaaattccccacctggccggggcctcacccaccactctcaggccctttgcaaggtatacactctcaagaatcctaatctttttttgttttttcctttgtaaagcaccttaaatggcctttgccccatctgaaaaatccttgaaggctcaatctgaattttaattgagcacattcttcaaaaggtttcctcagcgcaattaaccttctctcccacccctattttgtggtctcagcagcagtttgattacaaccgtgcaacaaagctgattacaaatgacagcaccagtgacagaaataggagtagtgacgtctatggtttgcacagactgaatcagagtcttcggagattcatcttgggcactggtattttataaagtctttcagggatgctcatgtctaccctggactgggatccacagaggtgacactgtcagttc

SEQ ID NO: 781152 - DNA, 622 bp, Homo sapiens
agctgggggagaacaccttgcctagaagagcaaagaacagatattttcctttcttctccctttatctctttgggtaaaaagactggattaaaacttttataggagcattaaaggaagctgagggagtcatggatttttggtctgttggcttttgtggctttaaatcttttagcctgtgagctttcaggattttgccttttggggctaagaaagtttgtgggtcttttggacctttggaattctggggctatgttttctctcttggactgaggaatgctattgttttacagatacagggawggaaaaagtacagaacgaattgtttgagattgactctcagcctcaggctgaagtaagagaagtgaaggatacctgtatatgtctttctgaattcttgtagcagacacttgtcatttcttttgactgcccagcattggagtccttctctggatttggggaattctctaccttataaatcttgatgggagacaaagactccctgccccacacagaagctagatactctctttcctactttcctttgcaggtagaataaaatgtacccaggctccactttgactcaggagttagtggcgcaaggaagcaggcactgtgcggaatc

SEQ ID NO: 781153 - DNA, 629 bp, Homo sapiens
agattcaaggcccatgccagtctggcccacatggccagtctcatcacatcctctgcagcaactgcattattagcattattatatcatgcttggaaccaaggactgcaaactcttatgcttgtccttatgaataaaaggagttgagtaaaagaaaaatcagaaatggtgagaactatggcaagctgaagagttcatgttccagcttcatcctctttattcagttgttaggcatcaggtcttagagttgtgaaaatattttctttcatttgctcatcaaacttgctctacasctctttgaaaatatttgtagtggccggacacagtggctcacacctgtactcccagcactttgggaggccgaggcaggtggatcacccgaggtcaggagtttgagaccagcatagccaacatggtgaaaccccatctctactacaaatacaaaaattagccaggcgtggtggcgtgtgcctgtcaccccagctactcgggaggctgaggcaggagaatcacttgaacctggaaagccgcggttgcagtgagccaagattgcaccattgtactccatctgggcgatagagtgagactccgtgtcaagaaaaataaaaaaagaaaatatttgaactactttt

SEQ ID NO: 781154 - DNA, 487 bp, Homo sapiens
cattattctaacgattcctagaattgccttcatttctcactatgagactgcaggtccacccacctcagaactatctggggtgattattcatactgctttcccacactcggacaatgtaagggccaggatttctggagaagggactatgtatctacatttttatttacttcttatttttaattgacagataaaamttatatacatatgtatttatggtatacagcatgatgttttgaaatatgtacttattgcggaatggttaaatcaacctcattaatatatgcattgtctcatatacttatttttttgtggtgagaacacttaaaatctacttggcaattttcaagtataggatacattgttactaactatagtcactatgttgtacaatagagctctcaaacttattccttctgtctaggtgaaattttgtgtcctttgaccaatatctcccctaacccctcccaacccccagcctttggtaacc

SEQ ID NO: 781155 - DNA, 595 bp, Homo sapiens
gggaaaaggacttggagtggaaaagtattgagtattcagtcagagtgaaaaaaagtatctttagtgtttccttcctcctttccccaataaggaatctctgcagaggtacccaaagaaggcctctgctatggctccaaataaagagacctctgaatggggrcctagtccaggaatgctgacatatgtaagagcatgacaggtcagcgaggtcttagttcttgactgtaactctcatcagagatggcaatgcaccaactgtgcacaaaatctggggaggcaagggggcagctttctccctttaggcctgccagtaaaagcctttccctgtggtgtctgccttcaaaaatgatacaaaggtttttggctattaccccgacttctcactttcaaagaactaactcgttttctcgatcttctctattatctttctattctttatttcattcatttctgctcttatctttttctgcttgctttgagtttactttgtttttctttttccattttcttaaggtggaaggttatgttgttttttttttacatgtgcatgtttattacattgatctattgcttaatgctggaatttgagtttcta

SEQ ID NO: 781156 - DNA, 608 bp, Homo sapiens
agagttctgaaaatgtgagcgccagcagctgctgcttttgcattgtggtgggcttggcagaggagcagagactggaggcagtgggccaaagtggattcttgaatgggagggtcacaggaggaatgcaggatttagaaacattatcctggcagcaagagatgagggaaggaaaaaccattttgcattgggggtgaattttcaggaaaacttctctcttcatggttcctaataattttggtgggtactcaattataaataacaacaatatttgtagcctgagggcttttgtatctataaggtgaatttcaagctcttcaraatgcccagcaacaatgcctactgtgtgctaagtgctagggaacaaggaaaaataggatttggcctccactttcaaggtgctctgaacaagagagaagacagacggtaaagacatagcacacgtggagtgtgcctgggacagtggaagatgcctgggcatgtaccagcacataggtttcaggatgtgtggagcgtgaggggaagtgaggtggagaaggaaggaaacttgtgtgagtttgcagggatcagctcaggaagcttcttccatgcttaggtggtttgcatgtttg

SEQ ID NO: 781157 - DNA, 556 bp, Homo sapiens
gaaaatgaatgttgcagaaaacctcaggattaccattcttgttagtccaactcgttcattagtaacagtggcctcaagagctgagcccccatgcctggccagtctttccaagagatgcaacatgctaacagcaacccctgccctgatctggctggctgactgccgtgacctccacttggcccccgaggccccatcagctatcggaatactgtcctggcatctggcaactggtcattttatgacctgggtaaaggaagtgtggggtgttctttccttcttccttctttcttgccaragatctgttgtttcctgggtaggaagttccttttgccacatgaatggcgatcaatacggggcctggcctcacagactaatcttagtggccttagctgaggaagactgtctgcccaggtcccctccccctgcagaccatagggcgccgtggccatgggagcgtcaaagatctgctttccttcttgtgatggcccctgtagaacttcctcatgggccagaatcccggcttaaaagggagcctctctccaaaagtgcatgaaca

SEQ ID NO: 781158 - DNA, 598 bp, Homo sapiens
ttctctaatccaactcttaatttggtcaaatttcttttgatttttatttagcataacatttcaataaactttgataattcctaaaatgcttagaatgctacaaatacttattgagcccctactctatgccggaccctttgataagcactaagtgcctactcataaagacaccagcattcctgacctcacaatttcataattcattcatatacaacttatgatataagaaragttatggtaaagataaaaagtaaataaaatgacatagagtataggaaagagaagcactaatggcacaaccctgaattccaatgaagaattaattatcaaaattctttgtgatctatttttttcaacaaatacttaaatactgatgttgcaagccctattctaaatattggggtacatcagcaaataaaagacaaaaaaatccttgttctggtggagctaacacactagttgggtgagacagaaactaaatcataactactgtaaataagaaaattttaacaaaaaagaaaatgaaaacaaaaacaaaagcaacaaccaccaaaaagaaaattatgaagtatgcaattttttattaaccatttttcct

SEQ ID NO: 781159 - DNA, 630 bp, Homo sapiens
caggtggatttataaaaaggatttgtctttatagctgtccttgacagattttacaactaccacatatgcctcaatatcaggtatgttttgaaatattacataaatttttagttgctcaaaacagaactctgataacttcctatgctttttttctccaaaacctgcacaagcgatcatttctcactgacttaattgtaaagtgcattacccagccagaaataaacacctgccctcaattttgtcccaaatctttagagtctttgccagtcttgacatttccttacacctctcaaatcttccaatagaggttttggggtcagacggatcccaaattcttaactctaccccrtactagccattagaaactgggcaaattatttaacacagaaggagacaaacaggagcagtaaaaactacacgaagtaatacaaataaagcacttaataataggtaatgccagcaatgtgtagctatcagttatcgtagcagcaggaatctcgttcctgaagcccatgccatacacaaagcgtggtacttcatgttttcttaatgtatcctgtaatctctctgcagtgtctttacccataccattcctccctctggcaggcctctcttaccttttgttttaga

SEQ ID NO: 781160 - DNA, 581 bp, Homo sapiens
caagcttctgcctaaaaggcagagaggaaaactcactctgtcctcaaaaatcaaggaaagtagtttagtaggcagagtacttgtcatttgacccaaaaaacctcatatttttaccagagtcaagatagaaaaagatcaattcagtcttttaaagaagcaatgactcagaagaccaatcacatcaggacaggacctgctgttcaaactgcttagattttacaaggtgctattaggtatacttaaagttgattggcctataaattggcaacaaaaaatcccttgtggtatttcaacaaaagaagatatttctgtgagttttacatggctctctcttggagagagtggtgaggaaattgcgcttcagttytgtttcttcattctcttttctactagtagttttagctctgtgagtttccttcttcaactagaaaaagacaattggatttatcattactagctctaatttttaaaaagacctataaagcaaggtcctcttttcattgtgaccactgtttaattgatcttttctatatacaactgaagtttttttttgctgaagtgtatatgacatgtttacttac

SEQ ID NO: 781161 - DNA, 673 bp, Homo sapiens
ggcgtaaaatctggtgtgcagaatccacaggcagcggaaggaccaagcccttttctctctaagctgggaggtgggtaacccagggcaaattttcagtctcatcacgccctccatctggaaacagattcagagctgttggggagagcacggttggagtgagaacagcccttcgttttgggtgacagctgagtgaggtctgtgacagctacctttcccccacttccaagacaacctgcatgaatcagcagacacagccataatcctattaggtacacagctccagtgactgagaatttcacccccattccccgcagcagctgtagcaagacctgcccaaggagagtctgagctcaaacacgtctagtcccacctccacttggtggtccttccctatccaccctggtagtggaagacaaaggacatataatcttggragttctagggccatgcctgctgctagtgcctctctatactactgtagctgatgctttctggaaattgcctcctaggaggaggtcaaccagcacaaaaatagagcattaaaacaccaaagctgagaaccttcacaaagtccattgcacccccctgccaccttcactggaacaggcactggtatccctggctgagagacccatacgcagttcacatcacaggactctgtgcagacaacccc

SEQ ID NO: 781162 - DNA, 625 bp, Homo sapiens; identical to SEQ ID NO: 780039

SEQ ID NO: 781163 - DNA, 612 bp, Homo sapiens
gaagtgagacttagttgttctccatttcacagatggaaaaacaatggtttgtgtggtaatggatttatgaagtaccagccataaatgtggagtgaaagcagagtgaaaactcactatatgccagctgctgtgctaggcattggggataaaatggcaagaggaaagagtcgtgaccttgactttcagagagcaaaaaatctagtacagaaaacaaatataaaataaaaatccagctgatgagttcataattatagaagagctgagtgctctgagaaaaagaaacatgaaccaagacagctacaaaaatatcatatgttttaaactaggaattcaaagaagtcttcctttaggaagtaagttgaagctgatattcaaggaatgaataatagttgagcaggaaaaagcagggcagaggggcttccaaawataagaaagagcatgtgcacagaagcatgatggcgacaagaagaatggctcctatggcaggacctggaggtgggcagtggaaaatgagcctgcaaagataggcagcaatgaggccacacgtggtctttagtcattcattgttaacaatttgggattgtttcctaagactgtaaagtcatagaaata

SEQ ID NO: 781164 - DNA, 520 bp, Homo sapiens
gagaaggttccagagagaagagatacattcttatttattcttaagtctctgacttgaattttatcaggtctttgttatcaaattttccaaaaatagaataagcattactcacagagtcctcctgccctgtagtaaaagccccaactagttttattggtttattattcctcaaaagtctgaaaattattcatgacaaaaacttacttggtattatcaaagtcataygtgtagagaagagtccgtaagtttctaggtaaagttgttccctcaccctaatatgtaagtggatataatgatgacttaattacttttagaagtaagtttacaacaaagccttaacctagactctattgtttgggtgcgggatgagatttcatacactactaagtaacttcagaatagttttcactaccctgacacagtatagtataaagtgtgtgatcctaaactgaatatcaccattatagttactcttttgctgagaataatttcattttcttatccaaacacactactacct

SEQ ID NO: 781165 - DNA, 613 bp, Homo sapiens
agtgagactctgtctcagacaaaaaacaaacagcaacaacaacaacaacaacaacaaaaaacagggacaaagtcctgggaatctctgggggtagtgtggctgcaaagcagttaaggttccagcatcctggcaattattctctagcctaaggatgcagacagggttaaaacccagcaagaaactcaaagctaaatgaagtctccatatgtgtggctcagtagggttctaggagaagcagacagatgtaattagaagttctcagacattgtgttgccacagcaactgctggccaggaagaargtggggaaaacctggagtccgaggaatacagtcttccaaggaaatgccagtggtgttcatcatgcttgggcttcatggctggctcctccagcttgcccacgcccaggctctagaaggccctctccctcaaattcctcctaatccccattcccacccctggagcaatttcaaatgcacatcaagggctcccttcagagggcatccaaaggaaggaatgaggaactctcagaggagagtttgtgctgaagagtaatctctggtctctggggctttctggagctgagtgaggatcagtgagggaggctgcaagttt

SEQ ID NO: 781166 - DNA, 654 bp, Homo sapiens
tactccagcgactgggagtgccactgaagctggtcttcaactgtcagtccctttggggactgcctcagcagaggaaagtggcctcatccctcacaaatatgccccttccagggtagcctgcacccattcagtggtctctcatgctcaattcaggacagctctgagggtggtcacgtcttcagaattcctcagcagcgctggctgacacagttcactaagattgcattggagctctacttctccctctgctcaatcttgctgcttctgttccacgggcattagttccaagaccactccctaataaactccctaaatgccatctccatctcaggatctgcttcctgggaaacccaattagggagaatttgtttgttttaaagtttcaggtatattatattatcttatgcattgcaatatcaataattgagccttcagtattattcccaatctggtcttctgctattttcttggaattactragaatttctgagcttttcttcctccctctatgaatcttcttttcatgccatacatgttaacttctatttacatgatttagaaatttcttctcaccctttctcttcttttcctccaaacttcatgcaagcaaatccctttgactagtgagctttgtttctgaaacattttttctaa

SEQ ID NO: 781167 - DNA, 614 bp, Homo sapiens
ccggaatgccaatgacttatagatttggcctcttgacctaatcccatacttctcagaggttttgtttatttctttttattcttttatctttatttttgtctatcttatttcagagaaccaatcttcaagctctgagattctctcctcagcttggtttaattctgctattaatacttgtgattgcattgtgaaattcttgtgttattcagctctgtcaaactcacttaggtcctttttcatactggctgtttcatttttcagctcccataatgttttattgtaatttttaatttttcttggattgggttttgccatcctcctgaatctcaacgatattcattcctatccatatgctgrattctatttctgtcatttcagacagttcaggctggttaagaactcttgttggagaattggtaaagtaatttggaggatatacaacactctggccatttgagttacaagactgcttgtgttcattctttctcatctctgcacgtgggtgttcctttagctgtagtgtggattgagtagtcaatagatttcttttctggatgttttcaccaggctgaagctttgtgcagggtctttatttgaagctggcttcttgtctc

SEQ ID NO: 781168 - DNA, 526 bp, Homo sapiens
acagaactggcttccagtcccacctctgccacttagtggctgtgtgtctttgcattacttaatgtcttcaaatctccatttctttacctgtaaaatgagtataatcatagctgtctcatagagatggtgtaataattgaataacataagtttagcacagtgccttgcacatagtgagcactcacaaatgtcaactgttgttattattacaactattaaatggtactagcagatacctttgtgcaacatatgcaatatgtctttatgaggcattcctaatttcacatttatctacagatatacataatcagaaccaaatgattacyaaatacattggtttatgtcatctagttcccaaaaagtaaatctcattggccacacacattctacctccacaactttgtattcctgatgtgtcctaatctataaaactgactcacactgcatgaattcaaataacattgtgttaaaaagaaaagaagacagagagagagacagtgacaatgtgagaaggaagctgttagtac

SEQ ID NO: 781169 - DNA, 558 bp, Homo sapiens
gtcagcaaactttttctgtaaagggccagacagtaaatatattaggttttataggtctaaagaattttaggctttgcagtctctgtcaccaggaccagttatataatttgtaaggcccagtgtaaaataaaaatgcagagtcccctttttaaaaattattaatatctgcaagatagttgcagctgagcgttaaaccaagcaggagatcattctaaaggctggggctttctatgaccatacaggtctcacgcctgtgaagccagccctgtctattacaactgttcgcccctgccattgtagtgyagaagaatccatagacaagtaaatgaatgggcaggggacatcatgatttggctcagggctgttgtctgccaacccctgaagtagaccatcttttagcatgtcagcatgctcataatattcacaaagtttatgaaatgctaacataaaaaatagaaaataagccaggcatggcggctcatgcctgtaatcccaggactttgggaggcaggtagatcacttgaggtcaggagtttaagaccagcctggccaacatgg

SEQ ID NO: 781170 - DNA, 599 bp, Homo sapiens
agatgattgattaaaaaagcctctgccacaatgcaaggcagataataagataataagtgttagctgaatttgtatcagcaacctcacgtagtactgagggctgggttggtctttttcatgtctacattcaagacaagcttaggaggaataagtggtgagttctgttatgtgtttttacaatggcttcctccagaagtctctcttcgcctttgtctgccaaggtacatatttgagataaacctttgcagctatagataggtctctgttcaatataaatgcyccctgcctcatgggtgagtgggcatggaggtgtaaggtggtagagatcatatgaattgcatagatgtagctatagtacctttgtggccttctgcctccccatcccacaatctactccttgagagactgcttatccctagagcttactttcaaccatcaaccagacacttaagacacttgagacaattagttatctgagtataactagacataaacctagccacctccatgaatcagggatgtcaagggaaaaaaagatttgactgtctgtctttgggaagcatctaactttcctttacagaaaggtacagggaaaaacc

SEQ ID NO: 781171 - DNA, 628 bp, Homo sapiens
tcagcaaagtaaactatgctgtctgcctgtttaagtacatgagcagataatctctatatgttattaactgaagaagcaagttacaaatatctggaagctatatcatgtaacattttactggttggcaagattatgcatgaatttcatttgctttattcttgttgtttgtctgcatttttacattatctaaaagaatgtgtggctttttaataagacaaactttacaaaaacaaacaaattcttttaaattagttaagcaaagagtaaattacataaagagaacaaaaagaaatcttgtgtgtgagagtgacaggagccttctaatcatgcactgtgagggagggctgagcccaacctgctcactatgcaggtaacacagtgagatctcaaaagagggatggtggttttgtctaaggtgcaagatcacatagctgatttggagtccaaacccaagtttcttctttctaggccactacaatgaggagtggkttatgagcagagtggggtaaaatcctggtatccaacaaaggaggtcgggtcaaagacttctgtgataagttcaggggttagattacctccaaatgtgctcagattggctctatgccacaaaagccaaactcaacttcag

SEQ ID NO: 781172 - DNA, 540 bp, Homo sapiens
tttttttcctgtattattgggctgctgtctgttctcaaatatactgagacaaattcttatcctttgtaactatggggatctgggcccatggtgcttactatcattatttctgttgtatttgtggtaattattgttattattattaattatactttgtaattatatagcttcttattttaaggaaagataaattgctagaaaataaacaagctcctgttctttagagatttttggagttttgaacattttaaatccaattttgaccttttttcacaaagatttctacatgaatcttcaaacacaacatkttttttgtctgccatcaaaaataaagtactgacttgtgagatactgccctcgaagttatgcatgagaaaatagtctctcagagcatttcatttcctctttctgccttttaaatgatttcttacagtatagttaccacatagtggaagtttgttttggagaaagattttgaagcagaaggtggagatgcttaaacagtggcccatgcctaggtagaaagttctcattgcccct

SEQ ID NO: 781173 - DNA, 665 bp, Homo sapiens
tgttcatgcattctatgaacatttattgactcccaaatatatgctacacactgtattaaatgctgagaattttgcttgaaagtaagacttttccatttaactgacaatccatgggcttgaacaaagccaccaaacagatagtgtgcaaataaaaataaggatttctaacagtttctgtgtggctcaaccaaataatcagtaattgacaacacacttgagtccattatgcaaaagtaatgctcggggtaaaaaagaatatacagagattaaaaaatatgtttttcaaagattaaaaaatttccctcaaagtgactagagcactaagaaacatattaatatgttcataaacaatttccaaagattcacaatcactttaggaacatrcaaataaaaaaattttattaatgtccttaatcttatataagaatatatgcctgtgtttgagactgcaaatttattaatttattggatacatatttattgagcatctactctatttcaggaactgaataatattggagataagtaaagcacagcctcgttattcaagaagctcacaatttagtcaccagactctaaaagagaaaacacacatctcaactgaaaactgtaatacaatatagccagagcaatgacacaaatatacataaacatgtaggatgggc

SEQ ID NO: 781174 - DNA, 616 bp, Homo sapiens
aaaacgttttcagaaaattgcaagcttgattagcttgctatggctaaatatttaaaacttaggtttgcaggcttccaggctttttctgatctcaactagacatcggcagtcgggaaaagtgctcgttttgtggtaccgtaactactgccattctcctagacaaaacttcagaatatcagtatgctctatttctcacaaatgaaattctcacactaccacctacagccccactccaacaaaattttccttttttcaccctgagcaatttgttcattcctagattgccaatatcagttaagtgttgatcatattctagaacatcaaagtaattaacaataaggtgtgaatgaggtttacaggttcacaaggcaaatttgcattttaaaagaggggcttgttaaacacaaatgaagttctaatagacagartgtgtgaaagatattttttctccaagagattggagaagatttctaatgctctttttcagccctgagatattaaggatgttgggaatcctttcccctctttagtctcttgtcagccactcctctttttaccctaccacctttgcaagtagagtatatttaaaataaaggatcatcagtgagacaaagaa

SEQ ID NO: 781175 - DNA, 622 bp, Homo sapiens
ctcccaatcgtaagcatactatttgcaaatataaattattaggtggctggaagaatgaatgaatgaccaagagagtcttagattagtccaaagaaaatgagcccctcttgaagggtaaaagttctgtgatacttaatttagtcctatgcaaaaatttttagttggtaaaatatttaatcattttacatttagcacgtttttcaaaattgcatgaattttcacatctttgtaatgctgttaactctttgaaagtatttttagtgtcattatgaaaatgtcacaaagtgaaaattgttattgcctcccacacctataatttctaaacatggttraaataacaacaggattttcactgaatttggattatagtctgcaatgattaagacatcatttttatcatataatgaattcatatctagagttgaatattttataagaattcctctgtaatattatagaaattgtgatagctttaacccatttatgcctgaggttgcaattttttgaatttttgcaatcagaccttggcgatgaccttgagctgtaggatataaataactcccacatgcttagtgttccaacaatggaacactaggcgtaaattggttttaatatgttgttt

SEQ ID NO: 781176 - DNA, 622 bp, Homo sapiens
ctcccaatcgtaagcatactatttgcaaatataaattattaggtggctggaagaatgaatgaatgaccaagagagtcttagattagtccaaagaaaatgagcccctcttgaagggtaaaagttctgtgatacttaatttagtcctatgcaaaaatttttagttggtaaaatatttaatcattttacatttagcacgtttttcaaaattgcatgaattttcacatctttgtaatgctgttaactctttgaaagtatttttagtgtcattatgaaaatgtcacaaagtgaaaattgttattgcctcccacacctataatttctaaacatggttaaaataacaacaggattttcactgaatttggattatagtctgcaatgattaagacatcatttttatcatawaatgaattcatatctagagttgaatattttataagaattcctctgtaatattatagaaattgtgatagctttaacccatttatgcctgaggttgcaattttttgaatttttgcaatcagaccttggcgatgaccttgagctgtaggatataaataactcccacatgcttagtgttccaacaatggaacactaggcgtaaattggttttaatatgttgttt

SEQ ID NO: 781177 - DNA, 589 bp, Homo sapiens
acattcttttctgtatacattttaccttagtgagatactatttgtaaagacaataaactaagttagcctctgataaaaatgtatctctagaaggacaattttacaggattttaatacagcttatgcaatacatttcatgtatgaaataatatcctatatcgttagtgtgcctaacaacacaatttgggaaactcttatttaaatggtgttcagcatttaaagaagacatcaaattatagcccatttgttaaaatgaatgtttccttataaaatggtcagattttgaaaaactgccttgggtrgcatagctcgctgataagtgattccaaaaaaatgacacattactacagaaagttgaagaagtggagattttgaatttcactgttagaaacataaaactgattctcaaaagttaatgtcagtgagtggaactaattaaaagatattataaaatttgtttattttcttcatttatattcttaacaggcacacataataaactgataatttttttaagatccagttgcttattttcttaatgatgctaagaaaattgttttttaaatttatttttctctcttaaaatata

SEQ ID NO: 781178 - DNA, 682 bp, Homo sapiens
gctaccattcaatgcctacttaaagggtattctggaggccacacggatcctgtgtaagataggaagtccaaaggaatattaatgaaagcaagaaataaaaagagctaagggagtgatttttcaagttaataagctttgtcatctagattaagttaattgttacctcttctccctgatttatctaagtctgatatgaccctggtttttctttccttacctttcatcaggaaaaatttcaaccgtgtactgtctcttcctctccatcacactccagtcgttattgacctggaaggaaaagacaaagttgattatgaaaacactaaaaaaaaaatggatcttaccataattatatataaattataatatactatcctatgtttccagactcataattccrtagctatcttctagcatgaagctgttcaaaatagtgacaatgtacatttttaaatgcttattattaatgttatttcatctcataagcaaacaaacattgtcaaaaaatctacaaagctagcctggacaacatagcaagacactgtatccacaataataacaataacagtgtatctatagtacccatagtaccagctactccagagactaaggccagaaaggatcgcttgagcccaggaggtcgagcctgcagtgaaccgtgactgcaccactgcactccagcctg

SEQ ID NO: 781179 - DNA, 585 bp, Homo sapiens
aaggatttacccaattaatacatgaaacgcgtttccagtttccagcacatataaaaaatatgtcctgatttctagggattggaaaaccagtttgagaagaaagacagttcttggtgttaatattatgtatctccatttctaattaaattcaaggagagaagaaaagaaacaactgcttctgcaaacctgggtttgcagcgtttctccgtgcaagccttagagatctgtgcacaagtgtgtgttgtgtgggcctgttagcatgtgtaacttttgacggatcacttatcttagttattgctttctattttatttcccctggaccccagtaataacttgggcccttctatggtatgaaagatctctgaaaataattcagaccctgttggatgcctactaaaacatgattgaattaagcttaaactycagatggcctttatctagaggggtaacacaagtaaaagattttttcatgtaaaaggctagacatcacattggttgccatctccctaaagcccttgtagacctagaaacattaaaaaataaataaataaataaaataaaaacacctcgtgcatctcgttgatg

SEQ ID NO: 781180 - DNA, 567 bp, Homo sapiens
ctttctcttttgcttccccacattatttttgttcagtgaagatacacttattagtttaaaggaaatttgaaaagttttttaattatggtaaaatacacgcagcctaaaatgtgccattttaaccattttaaagtgttcagtagtaattaagaacactcacgttgttgagtaagcaaatctccagaactctcttctttacttttaactttaattttaggttcaggcatacatgtgtaggtctgttatttaggtgatattttttgggtctctgtccccacccaaatctcacctccaattgtaatccccaggtgtccagggagagacccgrtgggaggtgattggatcatgtgggtggtttcccccttgctgttctcgtgatagtgagggagttctcacgagatctgatagtttataagtgacagtttcccctgctctccctctccttcctgccaccttgtaaagaaggtgcttgcttccccttcaccttccatcatgattgttagtttcctgaggccttcccaccggggcagaactgtgaatcaattaaatctctttataaattaccca

SEQ ID NO: 781181 - DNA, 516 bp, Homo sapiens
ggttctaagacctgaagatacaatcttacaagtcacctgtcttaagtatttttttcctatttgctatattctgtccttgttggtatttttgttttagaactgtaccgggttgcatagatgtttaaaaagatttcttttcttttcattttgaaatarttttagatatacaaaaaagtgatgaaactggtacaaagattttccacaatctttcatctagattcccaactgtgaacatcttatgtaaccatagcactgttatcagcctcatgacattgaacaatactataatctatggatcttattcaaattttgccagttgtcccactgttgtcttttttctgatccagaatcacacattgtttttagttgtcatgtctccttgtctcttttcatctgaaagagtttttcagtctgtctttatttacctttcgtgaccaagaaacttaagggcactggccagttattttatacagtctctcatttcaggccagaagttttatatttttatgtagctgc

SEQ ID NO: 781182 - DNA, 516 bp, Homo sapiens
ggttctaagacctgaagatacaatcttacaagtcacctgtcttaagtatttttttcctatttgctatattctgtccttgttggtatttttgttttagaactgtaccgggttgcatagatgtttaaaaagatttcttttcttttcattttgaaataattttagatatacaaaaaagtgatgaaactggtacaaagattttccacaatctttcatctagattcccaactgtgaacatcttatgtarccatagcactgttatcagcctcatgacattgaacaatactataatctatggatcttattcaaattttgccagttgtcccactgttgtcttttttctgatccagaatcacacattgtttttagttgtcatgtctccttgtctcttttcatctgaaagagtttttcagtctgtctttatttacctttcgtgaccaagaaacttaagggcactggccagttattttatacagtctctcatttcaggccagaagttttatatttttatgtagctgc

SEQ ID NO: 781183 - DNA, 614 bp, Homo sapiens
tctagaaagcaaaaaaacttctaaattattcttggttcctactggatccttttgactcaacaaaaggaatgggtcaaagttagaatgaggttaagaaaataagtgaagctctgcaaagaaggatgctgacgagttttgagctgtgctttctgcggaagcactgcagagaggtggctgcaggttaaatatcttccctctctccccctccccctccatatttgaagattatgttacctttcagaaaccttttccttttaatctgttcttcctttttcatcttttcctggagagaaatttagagcattatctactttccacyagaggaaaaaatccttttctccatggggtttcctgattgacttggtgaatgctgagaatgcatccctggttcgatatttctccctttagtgattgaagaaaatctctgatgacaatactatgcacctgggggtaacacctaaactcaacacaggcctcctgtgctagttgtgatcaacttgagtgattttgaagagaaggagaaaatggaagcttcaaaacaacttacatcttcacgtgctagtgattcttaactaatcactgctctgacctcacaaacaggtcatcatgctggc

SEQ ID NO: 781184 - DNA, 566 bp, Homo sapiens
gcattttcctccgaaggcagtctcctaggtaaaggttgtgctattcattccttgtgggtacatgtgatttcagggcagctaatttgtttagctgacagcaggtgctgtttaagtcttatagttagctttctctcctttcctccttagaagtattcatcggtgaactgtaatggtcagtgatcccattattcaaagatcactttaccataaggtacatraatgtattttgagacaggacataatttggaaccatggaggagttccacaagtttcattaatgttcatgatatatatgtgcatatttctgtcttgattaaaagggcttgtgatacccactgtgtctgtgggtctgttatgcattaacacacatgctcctacattgtccttagttttatattttaggctatttttctccaagtatatgttttgcagttgtcatactaagctttcttattcaaatcatagccaataatatagcagaacttaagtgaaggtcattgttttttcctctgaggataagaatattatctggattgcaatatagctccagaattttgctttttatt

SEQ ID NO: 781185 - DNA, 611 bp, Homo sapiens
agaatagaaatgcgtccattatctaaaaaacacagaataggtatgtacattacaatacatccattttatttattcttttgctactagaataattatgaatattctaaatcaagatggaaaatgtatgtgccattatataacttataaaaccaaagaaaattatatctttattactataactattcaaactatacaaataagaaatgaagaatttgaaataaaaatcaaaacaacagcatcatcaacaaaaatcatgaagttttgtcaaggtggtgggattttgtgtgttttttttaagtagatttacttttttgtggtcatgtaatttactaattcaactaagagttattgrtgatttcatatgtgctggaagcattgctaagccctccagctgaaaagataaagaagtttatcattttaataataaattctaacagttttaaagaaaaacattttatacctcaatgcctttgccaaaataattaactctaccatcattcaaggcccaaattgaatcgaacctgtttcatgaaatctattgataatctattcatctcatcattcctaatctttttctagatttatcaatcttctatctctccaaatgaaag

SEQ ID NO: 781186 - DNA, 589 bp, Homo sapiens
cgtcttgagggctcttcctactctgggatgctggaggatgggacgctcaggagttggaggaacccttgtaacccagaggctggcttgtgcccgcgggacactgcagtggtataaacaaccaaacacaggtgtagacttgccggggaggtgcacctgcctgcaggagtcctgttacctcaccccagaccccacacrcactgggaccaactctcggccccagccctggcccctggggcagacccccactcgcagccccttctgaccccaggcagaccaccctctccgcctgtctgaacaggcaccccttgccctgtgcccggggcaggtctctgtacctgttttgtgcccccgcaggtccctgccccttttctgtgccctggatgggacacacaggctgttctgtgcccggggcaggccccgccccctttgtgtaccctgggtgggacacataggccgttctgtgcccggggcaggcccccagcatctgcacatttatatgtgctcctgtaggggaggaggagtccccgcttgtcctgggcctgtgtgtgctgtgaacacagcaggcactccctaaatggtggtggtggtg

SEQ ID NO: 781187 - DNA, 589 bp, Homo sapiens
tacgaaaagttgggaagtgtttccctttcctttattttctggaatatttgtgtaaaattgctattaattatcctttaaatgtggtggaatttagtgttgaaactagataagactagagatttttattgattatgaaagaggaatgtagatgtttccaratggaattgtggatctgtctacttcttctttcagttctattactctttctccaggtaaatgtttcatacattttgatgctttgctgttaggtgcatatatacttaggattgttgtgtcttaattgtgaacccttttgttattctgtaatgtacctctttcttcctgataattttttgtactctaaagtttgctttttctgacattcacatatgacattcaactttcttttgattcatgtttacctagtatatatatttttatatatttttaatcctttacctttaacttacctcattatatttgaagtagatttctttttaataacatatagtgggattatatttttcaaattccttctgatgagttcagtcttttaattgttatgattagaccacttgtatttaaggcaattattgactcgtttggattt

SEQ ID NO: 781188 - DNA, 622 bp, Homo sapiens
cagggggcggtgctcgttggggaggctcaggctgcacaggagcccacggtggggtggggcgaggctcaggcatggcgggctgcaggtcctgagccctgccccgtggggaggcagctaaggcccggcaagaagtcgagcacagcagctgctggcccaggtgctaagcccctcactggccagggccggcagggccggctagcggctcccagtgtggggcccaccgagcccatgcccacccggaattccagmtggcccgcaagtgccacacgcagccctggttccagctcacgcctctccctccacacctccctgcaagctgagggagccgggtccgacctcggccagcccagaaagaggctcccaccgatcagcggcgggctgaagggctcctcaagtgctgccaaagtgggagcccaggcagaggaggcgctgagagtcagcgagggctgtgagggctgccagcacactgacacctctcaacatcatagctttcagagatattaagactacagtttcatgttttattctcaccatactaaattcaggaatacactaaactagactgtgttagcctaggaaagcttagaataaataatttgttcatatctgaatatcctctaaa

SEQ ID NO: 781189 - DNA, 610 bp, Homo sapiens
atccattcaatatttattaacagagaaaagatacctatgttgcctacataaacaattccttgtggtcacagaattgttttgtaaaattcagccaatgtctttgatgtggagaggagcagaaggtattacctggggcatgttttccttatttaaaactagtgttctttcctgaatttgataaataaaagaccaggagtgggcaagcatcatatggactcagctgaatcagtttccaagaaccccgcatttcagcccgagcacatgcaaagctggtcaccacagtggcagctggaaaagagataggtgkggccattggtcatgaatgaatgcatgtgttgggcgtactggctaaaagcaaaattctattgtgtgcctgtctacccaatgacctcatgagttgcaatgaccagctgctagcctaagctccaaattcagcaagactattaatctcttggtgctagaattcctttattggatattaagttttctatacaacggggacatgaagcaaaaattgtagaaggaggttgttgagtatctggagatgttccatcttctattctattacttagttccctgactcatttattctagctaaaagaagaactgc

SEQ ID NO: 781190 - DNA, 612 bp, Homo sapiens
aggaggagagaaaaaggaggtgttggtcttgctatctcagggatggcagaggtagaagaaaatcatataagtgaacacacagttcaaacctatattgttgaagagtcaactgtacaattgatttttgcatatccatcttgtgtcctgtaaatttgctgaactgttttatttgctctaataatttttattagatataagatcatgctgtctacaaagagagatcattttaattctttcctcccaatgtgaatgccaatttctttttcttgcctaagtactctggctagaacttccaggacaatgtcaaataaaagcagtgaaagtggatatccttgtttgatcctaatcttaggagggaagttttcaatctatcattattgagtataagtattaagtataatgttagttttgggctttttgtagatgttctttatcwgtttgaggaagtccccttctgttcctagtttgttgaatgtttttattatgaaagggtactggattttgtcaaatgcttttcctgcatctattgaaatgatcataaaattttttaactttattctattaatgacacatatattgattgattgatttcaacatgttgaaccagccttg

SEQ ID NO: 781191 - DNA, 543 bp, Homo sapiens
agtagtaacaatattaacccaagatgatgttcagacaagcaagcaatagaatttagaaaaataacaatagcccaaatgtagggagcatttacgatgaaccaggtgctgttgtatttattaacttattcaatcttcatcacagtactatgagttgaacacaactattattactcttgttctacagatgaggaaaatgaggctctaatttaattgattatctcactcattgttacccagcttccaagaggctgagccaggatttaaaccatagcacattaactccagaccatatactcttaactacatcactatattatattcatgttaatcaaagaagcgtgtttctgataaaaggttttaaaaagcatcatacttaaratctacagaaacccctaatgatcagtctcttttggaaaatttcactcttaaagatcaacgagtgaacaagcacacggcagatgtcactaaatcattatttattcatttattgagattttcattccagctttagcaaatgtattcaaaatttctagcaaaatgaat

SEQ ID NO: 781192 - DNA, 613 bp, Homo sapiens; identical to SEQ ID NO: 748220

SEQ ID NO: 781193 - DNA, 596 bp, Homo sapiens
cacagaattgaacctttcttttgattgagcagtttggaaaaactatttttgtagaatatgaaagtggatatttgaaaggctttgaggactatggtgcaaaaggaaatatcttcacattaaaactagacagaagcattctcagaaactttgtgatgcatgcattgaaatcagagagttgaacctttcttttgattgaacagttacaaaacggtgtttttatagtatcttcaagtggatatttcgtgccatttgtggcccatagttgaaaaggaaatatcttcacctataaactagacagaagcattctgtgaaacttctttctgatgtgtgcattcatctcacagagttgaacctttcttttgattgagcagtttggaaaaacsctttttgcagaatctgcaagtggatatttgaaaggcttgaggcctatggtgcaaaaggaaatatcttcacattaaaactagacagaagcattctcagaaacttctctgtgatgcatgctttgaaatcaggcagttgaacgtttcttttgattgaacagttacacaacggtgtttttgtagtatctgcaagtggatatttggtgccatttgtgg

SEQ ID NO: 781194 - DNA, 645 bp, Homo sapiens
ggatatttgcaactctttgaggccttcattcgaaacgggaatatcttcacataaaagctagagagaagcattctcagaaagttctttgtgatgtgtgcattcaactcacagagttgaatctttcttttgattgagcagttttgaagcactttgaggtctattttggaaaaggaaatatcttcacataaaaactacacagaatcattctgagaarctctttgtaatgggttcagtcaactcacagagttgaacctatcttttgattaagcagatttgaatctctctttttgccctgcaagtggatttttggagcgctttgttatgtactgtggaaaagcaaatatcttcacacgaaaattacacagaagcattctgagaaacttctttttgaggtgagccctcaacacacaaagtcgaacctatcttttgattgagcagttttgaatctcttttattgcggaatctgcaagtggatatttggagagctttgaggcctattgtggaaaaggaaaaatattcacttaaaaactacagagaagctttctgggaaacttctttgtgatgggtgcattcagctcacacagttgcaactatcttttcatagagcagttttgaatctctctttttgtagaatctgaacataga

SEQ ID NO: 781195 - DNA, 625 bp, Homo sapiens
ttaacctatctaagcgtcagtttcctcatctgtgaaatgggctaagaacagtcactcctcagagggttctttcgagggttaaatgagaaaactcatgaaaagtgcatggtggagtatctggccaatcactaggccaagtgtccccttggggcgttcatctctgtgctgcaagagcttgctggcttggcgtggtggctcatgcctgtaatcccagcattttgggaggctgaggcagaccgatttcttgagcccaggagctcgagattagcctggtcgacatggcgaaactgcatctctgcaaacaatccaaaagttagccaggcatagtggtgtgctcctgtagtcccaggtacttaggaggctgaggtaggaggattgcttgagcctgggaggtcaaggttgcaatgagctgagatagattgcamcactgcactccagcctgggcgacagagggagaccctgcctcaaaagaaagaaagaaagaagagcttgtgcacaagtggtgttcagggaatgtctggagacctgatctcaagtgctgccttggtgtatgggctgcctcccgcctggaggcacagagctcaggaacagaaggtgggagggcagcaggactcccccagccttc

SEQ ID NO: 781196 - DNA, 642 bp, Homo sapiens
cagctcatttccagtcccagtttcccaaccagcaagcccatacacatctccctgcttcagcaagccaagatccgctccccttaaaaatcagtacagggccataaatcacatgattttttccctcttagagggatgattagacagataattcatgtaactgaatcacataataatcactgaatgaaaggcagccattgttttcattaatggagagagcataccttccctgctctcttctcttctacaccactatgagttgatgtcatggcagattctatggcagaaaagctcttcgtctggggctaccaccgcagagtgggggcattttatcacctttgggaagaagcacagccatcactaggcacagaaatctatatgttgtgaacctgtgggccagaaactaggcagtctccccaaatggaaataccatcaacaactggaaagtttgtgatgagatcttgttctggagtattgagaaacaggagtcccacttacaccaagcgtgktctttattctaccccaaaggtagagggaaacagcagtgtggcatatgagaagagagcctggccattagaggacctggccagatctgctatgaaccatcaccccacataacgtcttggcctgctaggtgcaccgggt

SEQ ID NO: 781197 - DNA, 596 bp, Homo sapiens
tttaagtgggattgtattaatgtatagatctgtatggggaaacatgtaatcaagtcttcgatctaaaaaaatgatacagcccttcatttatttacatgtttttaaatttccttcagagatgttctgtagttttcaggtacaggccttgcatgtcctttgtcagatttttcccctaagtatttcatatttttagatgctgtttaatggtattttaaaaactcaattacagatagttgattgctagtacataaaaatacaatttgttttgaatattgttttcttatcgtgcaactttgctaaatttacttattcagtttagtggtttttttgtagcttccttaagattttcaacagagataattgtgtcatctatgcataaagacaatttwatttcttccattctaatctgtatgccttttatttccttttcttgccttattgcatcagttaggacctctagtacaatgttgcataaacatggtgagtgcggtcatgctttccttttcctaaacttagatgaaagacattcagttgttcatcattaagtaaatgtgagctgtaggtgattcaaaaatgtccacttcaaattgacatcc

SEQ ID NO: 781198 - DNA, 493 bp, Homo sapiens
attctgcaatatttgctgttctgcagcctccgatggtgacacccaggcaaacagggtctagagtggaccttcagcaaactccaacagacctgcagctgagggtcctgactgttagaaggaaaactaacaaaaagaaaagacatccacaccaaaaacccatctgtacgtcaccatcatcaaagaccaaaggtagataaaaccacaaagatggggataaatcagagcagaaaagccgaaaattctaaaaatcagagcgcctcttctcctccaaaggaatgcagctcctcaccagcaatggaacaaacctggacrgagaatgactttgacaaattgagagaagaaagcttcagacgactggtaataacaaacttctccgagctaaaggaggatgtttgaacccattgcaaagaagctaaaaaccttgaaaaaagattagacgaatggctaactagaataaacagtgtagagaagtccttaaatgactgatggaact

SEQ ID NO: 781199 - DNA, 642 bp, Homo sapiens
tagactgatgtgagtggagccaagatatttagacaattgatttagtatgtcagaatgaatgattaggtataatggaaaaaaggagagaggattgaaaggtcacaccctagtttctgtgttagataactaggtgcatagtagaataactccgtgaaagaatataaacagatttgtagggaaaattcacttcattttagacctactaaattttagacacctgctagatagayaagtgagtatctctggggactactgtatgtgtgcatctggggcccagaataagtatttgtgttgggattgtagtttgtctcttatcacatgtaggtgctagttgataccttggagtagatgatagtgtgtgcaaagtagaaattgaatggagactagaacagaatcctgagaaacaaccaataaaaaagatgtctaaaatgataataaataagaattaccttgagtttacaaagaaaactagcagactaaaatatgacagaaacaagaagaaaattagcattttaagaaccaagttggttcattgcttttactgctatgctgtggaaataagatacaaaattcaaactatcgacttcaccaagcaacttttggtgatttggcaagcgtagttctcgtagagcgttgtggtgg

SEQ ID NO: 781200 - DNA, 618 bp, Homo sapiens
ttctcaatactaaaagaagtgtgtctaatgtttgacattattatgactttactgtggatttatggatactctttatgagaaaaaatttcctctatttccgtaatttcctaagtttttttctttttgtttatttatatgtattggtgttgaattctatttaatgcttttaaagcaactattgagatgataatgtggattttctcctttaatctgtttatgtgatgaattgcattaacagagttttataactaaagccaactctgtattcccaagataaatccaacatagagatgacacatgttgattttcaaattaatttctagattcagtagcttatattttattgagtaattttgcattaatattcattagtgatattggcctataaaattcctttttagtgctgttcttrtatgttttagtatcaatgtcatattggccttgaaataattaggaagttctacctctttctattttcagtgtccaatataaccctactgatacccacagtttgactagagtttaaataggtttatttatgacaataggtcccctgacctcccttttcttagagcagttgctttagaaaatttgcaattagaaattctttccttatcc

SEQ ID NO: 781201 - DNA, 664 bp, Homo sapiens
cattttataatttactccagttttttcttctttttctctttcagaaagtattattcttcatttcaaagttgaatcttcaggaaaagtcatcgaattttgatctctttattttcttttgctattgctcattcattgtatatttgttctattttttaatttactcaactccattgcctaaacagctattaaattatttctttaataaattttaattctcaagaactatttctttttctgtaatcgtccatttattttagcatcctgtttttttttcatgtrtatcttctctcatctctggtgatattaattgcagttctttttaaaagctttgtatcacattgattgtatttattttttaacttttcttgttttgccttttcttttatgctaatggtttcccaatatatcttaaattcttacctgcctttcatatctaagaatgagaccaaggcattgaaagtttgattggaaactgtgtgcctaattaggaattttgaccagagaaattcagtggagagttatcaggcagaagctctggcatttcatcaaggtacccaaagtgtcagaatctcaatatatctgaagcaatgtctctgaagtaattacatatttttaggttatcctgcaatattctgactgagtaggggacagatgataggcctgt

SEQ ID NO: 781202 - DNA, 624 bp, Homo sapiens
cacttagcatagcttccaagtttattcgtgttctcccacatgattgaatttccttttgtaaaggctgaatagtatttcgttgcatacatgtaccacattttctttgtccattcctctgttgatggacactaaggttgattccatatcttggctattgtgaatagtgctgcagtaagcataggagcgtagttaaccctttgccatactgatttcaatctctttggatatgtacccaaaagtgggattgctgaatcatatggtagctctatttttagtttttctgatgagacttcatagagtttctcttaatggctgtactaatttacatttctaccaacaatgtacaacagattaatttttttgataaaagccrctctaacaagtgtgaggtgatatgtcattgtggtttcaatttgtatttctatgatgattagtgatactcagcattttttcatatagttgttggccatttgcatcctttcttttgagaaatatcttttcaggtctcttgcctatttttaaaatgggctatttgttttcttgctaatgcagtgtttgagttccttatatattcttcacattaactccttatcagatatatagcttgtaaatattttccccatt

SEQ ID NO: 781203 - DNA, 636 bp, Homo sapiens; identical to SEQ ID NO: 778465

SEQ ID NO: 781204 - DNA, 636 bp, Homo sapiens; identical to SEQ ID NO: 778466

SEQ ID NO: 781205 - DNA, 602 bp, Homo sapiens
tagtgatattttcatgtaataaaatgaaagattaaaagctttgactgggagtgtgtgtaaaatagatgagtagcatatttggtgtttttctggctcaacatatatgagatagtagtagtaaattcaattaggagcaggaaagctgtgatgaatacagacctggacacaatgagtctatgataaggaacattaaaatggatatgaaaacctgaaatgcaccagggagaataggccagggaggagagtgaaagaaatgcaggtctttggagtcctcccagactgggtagtggaagtccagctaggagctccagtgtgttgtccaaatccaggaagtaccattcccatagaataacacagtgtgcgtgatgctcagtagctgtactgactggtagtataagaaatcgataataytgcagtataatattataatacctgcccctagtagtaagaataactgttcttctccctgcttcacatatacctttaaaagtcctttgcagtgtcttcattttttttttttttttgcatgcctccactcttttgaagacttacggacattattcattcagattcacagtggcggatgttcctgtttccatatt

SEQ ID NO: 781206 - DNA, 595 bp, Homo sapiens
cttaaacaacaaaaacttattttctcatgaacaaaaacttattttctcatgattctggaggtgggaagtccaagatcaaggtggtagctgattaggtttctggtgaggcctctcttcctgacttgtagatggttgccttcttgctaagtcctcatgtggccttttttctgtgcaagctagtgtgagaaagaaagaatctctggtgtttcttcctgcaaggacaataatcatatgggtccagggtactacccctgttacctcattaactttacctcytaaagaccctatcaccaaaatcagacacactggaggttagggggtagggcttcaaatgtgcattttagggggacacaattcagtccatagaagaaaactttaggagagctttccactgcctggctctggcttcctgtgatgaaactagttgtgacctgtaaaagaatttgttctctttgttgtctcgattggcagaacctgagttttcttcagtactctattaaaacagaaaagtatgccagtatccctggtacaggacacttccatagctagctttttacttctgaaatctgtcctttgttacaagacagagtttatg

SEQ ID NO: 781207 - DNA, 568 bp, Homo sapiens
aaaaaaaaaaagtgaagtgagtagtactatctgtatcaatggggagatatcctagatcttccaaaacaattgacagcctaggctgagagaacaggatacgagttacaatagtctttggcttgtcttcagtggaagcaacaagggcagaaatcaatgccagctcctaaagaaaacagcrataacaatctccccagtaaatttacacaatctcttggacagaagaactggaagcaaaatcctgtgtaaagggagaaacaactcagataaaatattgaaatttttaagagttatatatttaccccaataagataatgttaactataaagaggctgtcttaaactgggagggtctgttctttcaactggacaggttacctaatttctcagtgcttcagtttcctgtaggtaaaattaagatcattgtatccatatttaagggagtttgacaataagattaggttggttccttatggaaaataaagttcctttttttctttcaccatatgggaactaaagtgaataaattcttcactgtgtgttttgagtatgatgagagagtatgattaata

SEQ ID NO: 781208 - DNA, 568 bp, Homo sapiens
aaaaaaaaaaagtgaagtgagtagtactatctgtatcaatggggagatatcctagatcttccaaaacaattgacagcctaggctgagagaacaggatacgagttacaatagtctttggcttgtcttcagtggaagcaacaagggcagaaatcaatgccagctcctaaagaaaacagcgataacaatctccccagtaaatttacacaatctcttggacagaagaactggaagcaaaatcctgtgtaaagggagaaacaactcagataaaatattgaaatttttaagagttatatatttaccccaataagataatgttaactatwaagaggctgtcttaaactgggagggtctgttctttcaactggacaggttacctaatttctcagtgcttcagtttcctgtaggtaaaattaagatcattgtatccatatttaagggagtttgacaataagattaggttggttccttatggaaaataaagttcctttttttctttcaccatatgggaactaaagtgaataaattcttcactgtgtgttttgagtatgatgagagagtatgattaata

SEQ ID NO: 781209 - DNA, 491 bp, Homo sapiens; identical to SEQ ID NO: 749225

SEQ ID NO: 781210 - DNA, 491 bp, Homo sapiens; identical to SEQ ID NO: 749226

SEQ ID NO: 781211 - DNA, 619 bp, Homo sapiens
ttgttgaaagttttaaaattacaaaaatatagatcaagattctttttcaccgtatttgaaacaaaaaactaataatttctcaaattgttgactattggaaatattttgaaaatattatccacattatcaattaagaagtrtcctacatttccaacaagatataatccttattggctttccagacatccttagagaaacagtgtactagattcagtgtttaaaatgtgtttccaataatagaattcctactatatacttttacaagcatattaaatttgaaagtgttttatattttcagagtggttcatacatgtaattttgttccattctgaaactggaaaagtgttaagtgagtaaaataagttttattatccctaaggaaaaaatactataaaaacaaaaagagaagagattataaggcttacttgtggttttccaattcattagtaacaaaaaaaaatgtgatttttcccttttcctctctgttgtttttttctttagaacttgaattttccttttttttttttttaattctagaccctttgcaaccaatgacatgcatgtgtgaggtaggatgctggaatattattcagccataatacagaatgaaattctgcca

SEQ ID NO: 781212 - DNA, 618 bp, Homo sapiens
aatactcaaaattttctcttaactttttgaaaatatacaataaattactaaacatatttactctgcattgctacagaacactagaactttattcctatctagctataattttgtattctttaaccaacctctctctatattcccctgtgccttattcttcccagcctccaataaccaaaattctactctccactattatgagctcatttttttagctccttgtatttacctttctgtgcctaagttatttctcttaacgtaatgtccgacagattcacccaggttgccccaaatgaaacaatttcattattttcttaatggctgaatagtcatmtacattaggtatttatcctaatgctatccctcctctagccccccgccccctgatatgccctggtgtgtgatgttcccctccctgtgttcatgactaacagccattttatttatcctttatcattttgtgcagtagctttaatattacccagaccactgtagccatcaatacattcttgaaaaagaatatgatgatttgtaatttttccaggaagataattgggaaattgtatatattgcttgattaaattttagtgtatttatattacataaaacctgtaactc

SEQ ID NO: 781213 - DNA, 618 bp, Homo sapiens
aatactcaaaattttctcttaactttttgaaaatatacaataaattactaaacatatttactctgcattgctacagaacactagaactttattcctatctagctataattttgtattctttaaccaacctctctctatattcccctgtgccttattcttcccagcctccaataaccaaaattctactctccactattatgagctcatttttttagctccttgtatttacctttctgtgcctaagttatttctcttaacgtaatgtccgacagattcacccaggttgccccaaatgaaacaatttcattattttcttaatggctgaatagtcatctacattaggtatttmtcctaatgctatccctcctctagccccccgccccctgatatgccctggtgtgtgatgttcccctccctgtgttcatgactaacagccattttatttatcctttatcattttgtgcagtagctttaatattacccagaccactgtagccatcaatacattcttgaaaaagaatatgatgatttgtaatttttccaggaagataattgggaaattgtatatattgcttgattaaattttagtgtatttatattacataaaacctgtaactc

SEQ ID NO: 781214 - DNA, 637 bp, Homo sapiens
ttctgcacacaatatacaatatcagcagtcaacacctctgcaagtggaatacagaaactgccacttctgcttaactagttggagtgatgtgacaaggattagttatgcgtgagagggtatcagtagacccatgtggtctcaaaataatgactttccttcttaccctgaaatcaaatcatcttagctgggaatgattaaaaatatttaattattgctttgaaatcaagtatgttatttggttctacttttttcactattgtgtcatatttttaastataattttaagaacctcacaaaaaatattggtataattccatatatactgtaaacagatttatttctgagaccagaagctctcttttttatgggtaagtaaatatttgcaagcatggttccattccggtagaatcattttgcagtcatttgttttgtttgttgttcattatttttgttttatacatttgtaaacaggtaagaacagatttttttcatagcaattatgaaattaatacttagacattttaacatgggagtgccagtttagctgcctgagaaccaataaagaatttaatttcctattctcattttcacatttcatggatcgtagtttcaaaggagttctaattataagagtacc

SEQ ID NO: 781215 - DNA, 545 bp, Homo sapiens
cacaatgttccatacaaagacatttataagcagattcttataatactactttaaaaaataccaattttggcatgctcttttaagcagagacaaaacagatattttgccaggaggattcagtagcagagaacaaaaataacgtaaatttggtggaatcagaaaatacatcttataaaaacaaatataaaactctgaagaaataatgcaatttacttaggtaaaatatgaaattggataggatgttgaaagctgtgtacccaaayaagattatctatatcttcaccaaaatgtgaatatctaacgaagagcaacatatattgaattttaaaataatagaattttcaaagaaatagaccagattatatcatacagtgcttaatgaccaaaattagattaattttattggaattaaaaaattatagcactacctggaatctggtcattaatctaaaataaatttaaaaaataattttcaaactccataatatgtaatttcatacatgtagcaataaattattctacataaaagaaagaaaattaattgc

SEQ ID NO: 781216 - DNA, 591 bp, Homo sapiens
atgtttttctcatttaaattgtcattctagggacagaaagtaagttttgaaaagaagtagcttttatggaagagaggtgcctgagaatttcaaaaggatttaagacaaggggaatgagaagagattgaatgaaagaagagaaaacagagagaaagagtaattaaaaaaaagaaaagaaaagaaaacaaagataatcccaaagagcagtgtgcacagttttgctgcaatcagtaccattctggtcaagtctccgtcatctgctctaggcttagttcctctctgccctaggctgcttctggtaaaaccgcackctcagcttgttgggcgtcttcatggagcctgttatttgctgtgggtctaagaaagggaaagcttcaggcttcaggcatctgtacctcctatctgttctcagctccatggaaattcttaagggatggggctatagataagagagtgggaaatggagatcaaggtctcaaatgaaaggcagggtggtttgatttttaagctcccctgatactttttatttatatatttgctgcttctagaaaaaccaaaaaaggaaagtgattcatacatagaatgcctgta

SEQ ID NO: 781217 - DNA, 588 bp, Homo sapiens
ttttctcatagaaacgataaagtgtagttcacaaataaatggtgactttagcatttcaaacttactttttattgatcaaatgagtaaaaggatatagactgcctcaggtaaattatctaccatttcactgaagcagtttattcacatggcctttctgtatttatttcataggtttgcataataaggattcacatacacagttgagctctccttccttcgggctagttacctagctgtcctaatcacccggtaattaaaacaaaacccactccagataattggcagttttctctaattgaaaactgggtagacaataatttggtctagggaaatgccctactctcatactgtaatatgaattaccatctgtccattaaattagccmccgtaaaatattaacatataaatgactactatagggctattcttaaagtggccctaacatttaattttttttttcattttgttgactcacccatttctttctagggaacaataaggaactgtattctagggttgatggcaggaaagggcaataacttttgtcccacaatgcagacatgttaagaatatttagaatatctaacc

SEQ ID NO: 781218 - DNA, 610 bp, Homo sapiens
aaatggtttgaatatgtgctaaatcaagatagtgcttcataaccatgggtgatgaaggaaaatccccaagtgagaagccagatgcagctaggttcagctcaatggcaaggcctcctccttgagcagactcaggaacactgcttgacaatgctttgtcatttctctcctcacatctatttcttaataagatagatagtatggagtggcactgtcctgtcggatgtgctgcaktaatggaaatgccttctaattagcactgtccaatatggtagccgttggccacatgaagctactgagtgcttgaaatgtggctggtgtgactaaggaacttcatttttaattttgtttaatttgtattaaatttaaatggtcacctgtggcccgtggctaccatattgaacagcacaggcctagaccacaaggggatcttgtccatttttgaaaatggggtgaggaataaaagagaaacagcactctcttctttcagagctaaagacttctgctgcttttgggtcgtgatgctgatggaaacacagaccattggatttgagtctcaaacctgtattcaaattttcttatatattctttgaaaggaaggttttatctatgg

SEQ ID NO: 781219 - DNA, 610 bp, Homo sapiens
aaatggtttgaatatgtgctaaatcaagatagtgcttcataaccatgggtgatgaaggaaaatccccaagtgagaagccagatgcagctaggttcagctcaatggcaaggcctcctccttgagcagactcaggaacactgcttgacaatgctttgtcatttctctcctcacatctatttcttaataagatagatagtatggagtggcactgtcctgtcggatgtgctgcagtaatggaaatgcyttctaattagcactgtccaatatggtagccgttggccacatgaagctactgagtgcttgaaatgtggctggtgtgactaaggaacttcatttttaattttgtttaatttgtattaaatttaaatggtcacctgtggcccgtggctaccatattgaacagcacaggcctagaccacaaggggatcttgtccatttttgaaaatggggtgaggaataaaagagaaacagcactctcttctttcagagctaaagacttctgctgcttttgggtcgtgatgctgatggaaacacagaccattggatttgagtctcaaacctgtattcaaattttcttatatattctttgaaaggaaggttttatctatgg

SEQ ID NO: 781220 - DNA, 511 bp, Homo sapiens
ccacatcatggaataagaaacatatctgtatatttatatcatttaccgttatggatattgacacatatacacatccacatacatgtgctaatatatatcctaacataatcataaagcataaagctaacttaggcctacattatttttaaaatatgaatatcacatattaagttctgctgtcaacattctatctatctcatttagacactggtctgatccttccacatggaacattaaaaaaccttcaaaaccataatttagagtagaaacatcatatctcaccttacagttataccttaatttatttgataatgtttaacatcactaaaamtacaagcaaatttaaaataattaaataatattttcatcgattaaattaatttttaaaaatcataatacctaattttgtatgtgtatgttgtaaaatagcattcacttaacttttatggaggacaacttgaaaatatataccaagattcttaaaaaggttcatagcctttgttctaataat

SEQ ID NO: 781221 - DNA, 499 bp, Homo sapiens
ttgaaagaaacaataagcctgggtccgtgattagatcatgaaactgtttcaacagccctgagcagcctctcccagacttctacttacatgagaaaaagaaaatgtttcaccattttaaagtcactatttttctgattccagtaaccaggagctaaatacagtttctaagtgatgtatattggaatataatttataattccaaaggaaggagatatactttgaaaccctaattccatttacagtcttaattcccctgtgctctgtaacactgcatattggtatattctgmgaattcacaagtggccttctgtttttttgtggaaggcattgttttgccattcacactatgctcattctttaaagttacagatacagatctactaccagtttgattaaaatgataaatgttgtgagtgagctgcttccgaagatgggaatttccctatcactgtaggtgttggatcatagactcagttaggaagaatgttcaagaaagctg

SEQ ID NO: 781222 - DNA, 564 bp, Homo sapiens
acacctttaatgcaccatttggaatttcctcagccaaatgtccaatttcatcttttataaattctgctttccacacacctgtaggacacaatcctgataagttttccaccactatacaagaatccctttccttccagttttcagtaacatgtgcctctcttccttccacaccctcactagcacagtcattaacatatagactcatatttagtttgtttaagacaatctaggcattttctatcatcctcaaaatttttccagactcttcctgctgccccgttccaaagccactttggcatttgtagacatgtgttccagcagcaccccaatctgttcattttastttcctattgctgccataacaagttagcacaaatttagtgacttaatataaatttgttatcttgccattttgtttgtcgcaagtctgacatagctctcactgggctaaaatagtgcatcagcagggctgcattcctttccagaggctttggtggagcatctgttttcttgcattttctagcttctagaggctgcctttactctttgtctcatggtcccttc

SEQ ID NO: 781223 - DNA, 619 bp, Homo sapiens
caggaacatggtgatattttaggggtgcaagagtgaaatcttgaaacttggagcagcctgacatacagtaggacattcagatgaggtcattttgacatgacgttttgatagcagtgacattttaatgtgatcatcttatyttggacacataaagcagctgcttcaaaatgtaaaagccctgttttattaccaaataaagggggcaaagcagaaacccctgactactcctcacctttgaaaagcattactccctgacacccatccctcccttcttggcttgtccctttcatggacatgtcgatgttgtgcttatttttattcttcctaatttaactcataataagtacttatgccattgcaataaaaatataaaaaatatcaaagattcttaggatgttttccactttttttttcctcaaagtatactttggaacacaaacattgctagatgtgtcgggttttttgctcctgctaacctgcaacccttcaaaacaggtatttcaaggaagtggcagtcaggtgagctgcagttcagttcaaacgcaataaagctctgaaccaaagattaattctcgactagccattaatcaaaaccaaagacaactctgctacctttcat

SEQ ID NO: 781224 - DNA, 586 bp, Homo sapiens
ctttcccttctcagcacctcttcctcctagtttctactactgaggtctgttaaagtctactcctattccttccacaccttccatgagaaaggtctcatacttcctggcctgccccaaagctgtttccccaccaaggggtttacctgccccgacctctgtcagccagcctgctactgtttccacagcaygaatctcagggctttggaatcaacgactcttctatctccctcctttactagatgatggtcagctgcacagtggggtggtttagagtggacactctgaagccaaactgcctgggttccaatcctctgtttactagctcttggaaaagtgagtgtgtggaaattgccttatctgtaaaatgcaaataacaattgtacttatcttataggttgttgtgaatactgactgtgatatatatggttcggaatcattcctggcaatgtagtaagagcttaatgaaagctggttaacattattattgtgtggtgttaccgatactaatgagaatattaatcttggcatagccagtgtctagtacagcgattgatagacaggcattctacaaatattggtggaaggg

SEQ ID NO: 781225 - DNA, 628 bp, Homo sapiens
gaagcttttcctcctaactctaagcaggactgatgtgattaacttgcaccatctgatgagtgccgactacaggccaaattctgtgcaaggtactctcatgcagggaaggtatcactacccttatttgcaaacaaggggaatgaggcttttcaaagtttaatgacctgagggcttttcaaagtcatagtaacctgagggacccaggtttcaaatgcaggtctcacagattttaagcctatggtgtggtggggaatactgaaatgggaatcagtactggatggcagtccccacgtaaagggttcattctggacccatcatcttatttccagacctgccctccctgcttcccagaaatgatgtgacagtcaaaaaataaaccagagcagaatgttaagacaaactgcactccacccctcactgaaggctccttagaggtatayagataacagctatggactcctatgcacttgctgcgccccaggcccagtggaaagcagctacactctattatcccatttaatcttcactgctttatgaagtatgcactgttattttttacaggtggagaaaacaaggcttcaaaaagctgagtaacttgaccaaggtcaccccactaataaatggcaga

SEQ ID NO: 781226 - DNA, 612 bp, Homo sapiens
gtctcgagatcgtcgaagccgcaattaggactttgttttccgtcactggtaagagcaggggtcatttggtctagggaatctcctcatcatacccagaacctttaattcattttctgagccctgtgaaatagatgttcccactggcagagataatagggcaacaatttcctgatggccactagactattttatcgtaacatccattgtgtacagagctttataatactaacggttgacagctctcacatcatgggacactgtgaaaaactcaaatmaacaaggacacaggtatggaaagttgtaggagcaaaacacccactgtatgaaaaagatatgacacaaataaaaagagaaaaaaacaaaatagattaggctcacgtaccttagttgtgacaaagtagaaaaatcaccttttttcctcaattgtctctccctccagatccttacagtagttaacacccaacccactggcttatcttcatcctcaagtctcaagcgcttatagagagtttatgtagattcgtaaattagccagtgggagagaaaaagcagcagagggctgttgaagaggaattttccttcactctgccccattccaacaagatccaccca

SEQ ID NO: 781227 - DNA, 576 bp, Homo sapiens
gcttgcagatgaccgcctttgccctatttcttcaaatggtcttctttcggtgtgtgtctgtgtctaaagttccttttttatttcagacacaggtttgctcttgttgcccaggctggagtgcagtggcacaatctcggctcactgcaacctccgccttctgggttcaagtgattctcctgcctcagcctcctgagtagctgggattacaggtgtccgccaccatgcctggctaatttttgtatttttagtagagacgaggtttcaccatgttggccaggctggtctggaactcctgagctcaggtgatccacccgcctcagcctcccaaagtgctgggattacgggtgtgagtcactgcrcctggccctaaagttcctcttataaggataccagtcatattggattactgtcctaatgacctcattttaacttgattacttctttaaagatcctgtctccaaacacaggcatattctgaggcactggaggtgaggacttcaacatatacacttggaggtggggggacaaaattctgcccataacgccatatgttatttatccattcatcaattcaca

SEQ ID NO: 781228 - DNA, 506 bp, Homo sapiens
atctcttgagatttgtacatgtctcccagcatcacatctgcccttttaacaagcacactccttccactgctcacggccacctcgggttcactgcagtcagggaatctgtgtcttgcagcagtcaagtctatatcaaacttgaatttatttattttcttttgtttytgagaactgtaattccactccaaggcctagactgtacccaacagagctgcatgtatgtttaatgaaaacatgtcctagaatattcacaatacttctactacttatgccctcaaactggaaactacccaaatgctggagagtagaatggatgaatgaattgtagtaatatttattgaatacaatacaatacaataatgataatgaattaacttgaactatatccaagaaggatgaatctcacagacattatgttggctgaaatgagccaatcacagaagtgtacatattctataactctgctacagaaagttcaaagaacagacaaaaccagtgcacaatat

SEQ ID NO: 781229 - DNA, 506 bp, Homo sapiens
atctcttgagatttgtacatgtctcccagcatcacatctgcccttttaacaagcacactccttccactgctcacggccacctcgggttcactgcagtcagggaatctgtgtcttgcagcagtcaagtctatatcaaacttgaatttatttattttcttttgtttctgagaactgtaattccactccaaggcctagactgtacccaacagagctgcatgtatgtttmatgaaaacatgtcctagaatattcacaatacttctactacttatgccctcaaactggaaactacccaaatgctggagagtagaatggatgaatgaattgtagtaatatttattgaatacaatacaatacaataatgataatgaattaacttgaactatatccaagaaggatgaatctcacagacattatgttggctgaaatgagccaatcacagaagtgtacatattctataactctgctacagaaagttcaaagaacagacaaaaccagtgcacaatat

SEQ ID NO: 781230 - DNA, 455 bp, Homo sapiens
ctgcagaatacacattattttcaccagtagatggaatgttctccagagtagatcacatctcagaccacaaaacaagtctcaacaaattcaaaaaggtagaaatatcaagtatcttttctgctcacaagggaataaactaaaaacatgcaaacagatggaaattaaacaacatgcttctgaacaaccagtgggccaatgaagaaattaagaataatactaaataatttcttgaaataaatgtaaatgaaaatacatcatwcaaaaatctatgggatactgcagaagcagtactaagagggaagcttattgcaataaatgcctgtatcagaagagtggaaagacttcaaataagtaacttaatcatacacctcaagaaactagaaaagaacaaattacacccaaaattaggtgaagaaaataaataataaaaacaagagcagaaataaatgaaattg

SEQ ID NO: 781231 - DNA, 669 bp, Homo sapiens
cacaacatcaaactaaagtcctgatctacatcaggtccgaatgtggccactcttgatctgtagatctaggaagtaaaaagacaagttctaccatggtgtcaaaagggacaaggtcactgcagtaaacactgccacacgaaaaggggaagaatggcaggcatattttaatcactggtctctggacattttgaaattatattgggcagttattgtcaggtcttcttctgtaaaggaaagaaatttcctctgataagactctggttctactccatgtaaatgggtcagtgcctttccgggaaaggtggattttttttttttctctcatggtagccatcagaatctcccacaaggcaaacttagtcatgcaagcacatttattttctgctactatgccatttgtcaaagcaagtctcatggccaagtcaaaagtcaaaaagaagagtacattactgtacatccaccttgaaggcttaacaagcatrtggttccataatactacaacaaaagagtgaagcctcagggtcaataacttaatcttccgaaagaaccctgttttataatataacgccataaaagtttgacctgtcattattccacattaaggctgtcatttgggaataaattagatcccaaatcagggtcaactgaatataaacataaatattttca

SEQ ID NO: 781232 - DNA, 627 bp, Homo sapiens
agattcctagaacagaagaatattcacttgtgcttttatttcctgtcagtgtttgtcataatagggataactaaaatttactgaattctttccagaagcactatcatcaccaagtgccagaacactacactttccttgttctcctacctcgtgggaggctctttcaaaatctccttttctgctctgttctctcttcttggatcttttaatattgaagcagtgaaaaatttaatagtttgtcctctttttactttttatccactactgtagtgatctcatccaggttcatgatttagtgtctctatactgatgactccaaatttaaatctcatcaaggagtctttgagactcatgtttacaactgcctaatcagcatctcctcttggctatctaatgggcaccacaacagattccaatayacactccccatctccattgtccacaccccaaaacctgcttattttgaagtctttattacctcagttattgataacattttccttccaggtagccaagtcagaaagctttggtcaacctgactctcctctctcactcacatcccacctccatgcaacaccccagacaattctcttgtctctatctttagaataatctggactctgaagc

SEQ ID NO: 781233 - DNA, 612 bp, Homo sapiens
ataaacactgttgtgttagttatctgttgctgcataacatgttaatgcaaaacttagcaacttgaaatgatgcatatttaatatctcacagtttttgtaggtcaagaattcaggcacagttcatctaggtgggtcctctgcctcagagtcttcatgagactgttattacggtgtcagcccaggctgcagtcatctyaacattcaactgaagtagcatccacttccaatttcactccatggttgctagcatgatacagtttctcacaagctactggactgagaacctcactttgttgctggctgtttgcaagaggctttcctggtaggtctttccatcaaagcaagcacaggagatgacccagggagagagaatatcagcaaggcagaagtcacagtctttataacctagtcacggaaataacaccccatcacttttgtgagaagcaagtcacaaagttcagctacactcaagaagagaatattacaaaggctttaaacaccaggaagtggggaccactaaaatatatatcagaagctgcctgccacaactacatatacaacaactacatatacactttgcacctgttttttccacataagaataaatcacat

SEQ ID NO: 781234 - DNA, 569 bp, Homo sapiens
aagtgattgagtcatgagggctccactctcatgaatgagattaatgcccttatagatgaggttgggaagagtgccctctgtcctcttctgctatgtgaggatgcagcgtgaaggcatcatattggaagcagagaataagccctcgccagacattgaatctgttggagccttgatcttggacttcccagcctccagaactattagaaataaaattttattatttataattttcccaggctaaggtattttgttatagctgcccaagcagactaagaccatgtctattatttcagcatatatccttaagcatttacatcacatacattgtttggagaggtttgcttgtttaaactytaagcaacacatcttgaagatcttttcatgtctatatacatagatatacctccttcttttaaaattgttgcatagtgtttcaaagtgaagatataccttactttattaaactatctatgatgaatatttaggttctttcaagtgttttctattgaaaacaatgatgccacatgtagccttgcacgtgtagcctttgtgggtacatttgagtattt

SEQ ID NO: 781235 - DNA, 569 bp, Homo sapiens
aagtgattgagtcatgagggctccactctcatgaatgagattaatgcccttatagatgaggttgggaagagtgccctctgtcctcttctgctatgtgaggatgcagcgtgaaggcatcatattggaagcagagaataagccctcgccagacattgaatctgttggagccttgatcttggacttcccagcctccagaactattagaaataaaattttattatttataattttcccaggctaaggtattttgttatagctgcccaagcagactaagaccatgtctattatttcagcatatatccttaagcatttacatcacatacattgtttggagaggtttgcttgtttaaactctaagcaacacatcttgaagatcttttcatgtctatatacatagatatacctccttyttttaaaattgttgcatagtgtttcaaagtgaagatataccttactttattaaactatctatgatgaatatttaggttctttcaagtgttttctattgaaaacaatgatgccacatgtagccttgcacgtgtagcctttgtgggtacatttgagtattt

SEQ ID NO: 781236 - DNA, 600 bp, Homo sapiens
atatcttcttctgtcttctttcccatatactttctaccaaaaatggtatcagatgtcataaatccatcatatccttgactttatatttaaaactttaaacatttcattacttttcacaatttttattttttcttatttcatcagaatgtcactaatttgaaggacagtttcactgtaactgaaaatttatcaccaatccccttccattctaagaacttgaacaaatttrtttatcataattgcatatcaaaatagaaatttagcattcacaggtgtcaaagacctttcctctcaaaagacctatcacaattaaaatattcaaacaaactgacacaggttaactatcatgtacctatggaaaatttatgtcccttttacttatctgagaaccctcaagactagatttgaggcctctcaggaacaccctatttttcacagagtttaatacgtattcagaataatcacactacaatgacgactagaaagaatatgctctaattagcttgcttttgacctgacccctttcttaattttctatcgtataaatatcagagtatatgaatagaatgattaggacctatatttaataaaattataacc

SEQ ID NO: 781237 - DNA, 621 bp, Homo sapiens
ccttgttagctgtatttctagcaattttattgtattctttttgtagcaattgtgaatgggagttcattcattatttggctctgttgttggtgaataggaatgctatgattttttgcacatttcttttgtatcctgagatttgctgaagttgcttatcagcttaagaagctttttgggtgaaataatgggattttctggatataggatcatgtcatatgaaaacagggatagtttgactttctctcttgctatttgaatacggtttatttctttctcttgccagattgccctgaccagaacttctgatattatgttgaatgggagtggtgagagagggcatccttgtcttgtgtcagctttcaacgggaatgcttccagcttttgctcattcagtatgataytggctgtgggtttgtcatatatggctcttattattttgaggtacattccttcaatacctagtttattcaaagtttttaacatgaagtatgttgaattttatcaaaggccccttctgcatctattgagataatcaagtgttttttttttctttagtactgtttatgtgatgaatcacatttactgatttgtgcatgttgaaccaaccttgcatcccaggga

SEQ ID NO: 781238 - DNA, 639 bp, Homo sapiens
acatatatgtataaatagaatgggtacactctaaaataataaaatgtatagtatagtaagttttcacttaatgttgttgataatttcttggaaactgcaactttaagtaaaatgatgtatcaggaaataaattttatcacaggcagattaatacaaacaaaagttaagtatcggggtaacccgcccccgataattcaacatgagtccttttctatttttcctaagtgtcagccagtctgagaaataaagggaaagagtacaaagagagaaattttaaagctgggtgtccgggggagacatcacatgtcagcaggttccgtgatgcccccgcaagccgcaaaaccagcaaatttttattagtgattttcaaaagggggagggagtgtacaaatagggtgtgggtcacagagatcacgtgcttcaccaggtaataaaatattacaaggcaaatggaggcagggtaagatcacaggaccggggcgaaattwaaattgctaatgaagtttcaggcacacattgtcgttggtaacatcttatcaggagacagggtttgagagcagacaaccagtctgaccaaaatttcctcgtcctaataggcctgggagcgctacaggagaccagggcttatttcatccctta

SEQ ID NO: 781239 - DNA, 617 bp, Homo sapiens
ccatcaagaatgaaaagtacacatgtatcctaggtttcaagttccaacaccaaaacccatagatagaaaagtgctacactgttcatcaccacagctttcttcctgcctaacttttggaagcagacttaagttaggagaatttctaaggatatatatatagagagagmgagccctgaaaatccagaaaaagaattattactgtatttcatagattgctcttctgaaacaaatcttcctgtccatgacatatcttcaccatggagaaattctaagaaagcactagaaacttagtagtttaaggtagctcttagtcagtgacacccagtcagttgattaattttagatgcatacagctatgattttatgtagccctcttatcagccctcaaatcatcacaaacttagcagcttaaaacacccatgcattaactcatagtttttctgtaagtcaaaaatcagggcatggaatgagtaggtcttctgactagcatttcattgcgctgaaataaaaatgctggccagggctgtgtcctcatcagatgtctaaagtggggaaggctgtaatctcaagctctctcaacttgttggcataatattttttcctcataattgtaggaa

SEQ ID NO: 781240 - DNA, 649 bp, Homo sapiens
gttccacaatcttgcagaggttttgtagtgggactgagtttctgtagcccacagcaatttcctgtgcatcaacatatcaactactaacccaactgttttcctgtcttacctcatttcttcatcatgtttctcatgctttctacttgcactcaaatcttcatttcaagatctgctttgggaraacacccgactaacacaatcactatacatttttctaatccataggaactggcaaacagtgttaaaatatggggataataatgacatcgaattacatatattatttagatctcatgtcattgcctctgaaaccagagggacttgttcctttgtatctttgggtacctgcaacactctatcatactataaaataatttaagaaaaatctcaggacttaagtagtcatctgttagacactgatgctttggaatatgtgacagcagaataatttggcagaattaaaaaaaaaggaaaagcacttggttgtgcttaggaagtaagtgtacgctaacagattgtgttgtgtagaactgctttgcatgttaactaaatgtggaaacacatctgtccctaaaagtagtgactcagggaactcaatcttaattcaggcatttcaagaataaaacatagtaccagccaacccacttac

SEQ ID NO: 781241 - DNA, 649 bp, Homo sapiens
gttccacaatcttgcagaggttttgtagtgggactgagtttctgtagcccacagcaatttcctgtgcatcaacatatcaactactaacccaactgttttcctgtcttacctcatttcttcatcatgtttctcatgctttctacttgcactcaaatcttcatttcaagatctgctttgggaaaacacccgactaacacaatcactatacatttttctaatccataggaactggcaaacagtgttaaaatatggggataataatgacatcgaattacatatattatttagatctcatgtcattgcctctgaaaccagagggacttgttcctttgtwtctttgggtacctgcaacactctatcatactataaaataatttaagaaaaatctcaggacttaagtagtcatctgttagacactgatgctttggaatatgtgacagcagaataatttggcagaattaaaaaaaaaggaaaagcacttggttgtgcttaggaagtaagtgtacgctaacagattgtgttgtgtagaactgctttgcatgttaactaaatgtggaaacacatctgtccctaaaagtagtgactcagggaactcaatcttaattcaggcatttcaagaataaaacatagtaccagccaacccacttac

SEQ ID NO: 781242 - DNA, 596 bp, Homo sapiens
  misc_feature 84: n = A,T,C or G
gaaaaaaaaaaatgtatggatccggagttctaggatcaggaaagccagactttacggtcttatttatgccctgtagcggcagtncaggacatttcagaatggaaacctaagctgttttgcttgatgaacagaacacttctattttcactcaaaaagactcagtgatatgttagattcaacaatttaaaagagaagtttacttagctgtggcatacttgagctattttgttacaccaatttatcatttcttggccctgygggcttaaatgtttccaggtggcataatgaacatttttaaaaactaaatttgaaaatttatactgaagtcatttggcctaaataattacatggaagagagtgaaaaagtttatacatcaaagtggtattttttttcctcatagctaatattttatataatgcagagttaagtacgttttgctaaacctcagagtgaaacacagaccttggcaacatatagtaccatgaggttaaataggggctgaagacagtagtctctaactattcctatattcataaaaagaatttctggacacattattttattacttagaataaagatggcacatcatgtcctg

SEQ ID NO: 781243 - DNA, 596 bp, Homo sapiens
  misc_feature 84: n = A,T,C or G
gaaaaaaaaaaatgtatggatccggagttctaggatcaggaaagccagactttacggtcttatttatgccctgtagcggcagtncaggacatttcagaatggaaacctaagctgttttgcttgatgaacagaacacttctattttcactcaaaaagactcagtgatatgttagattcaacaatttaaaagagaagtttacttagctgtggcatacttgagctattttgttacaccaatttatcatttcttggccctgtgggcttaaatgtttccaggtggcataatgaacatttttaaaaactaaatttgaaaatttatactgaagtcatttggcctaaataattayatggaagagagtgaaaaagtttatacatcaaagtggtattttttttcctcatagctaatattttatataatgcagagttaagtacgttttgctaaacctcagagtgaaacacagaccttggcaacatatagtaccatgaggttaaataggggctgaagacagtagtctctaactattcctatattcataaaaagaatttctggacacattattttattacttagaataaagatggcacatcatgtcctg

SEQ ID NO: 781244 - DNA, 567 bp, Homo sapiens
ctctcagatgtccagtgttagaggatccagttttcaaaaacttcacactgtgtatacgtctcaccccaagatgtgccccagtcgttttgttactgtgtattttgcctgaaaagttctatattttgattaaggtcacttaaaaaaagtaggtatcattcaagggtgtagcatcaactcaaattagttcttgtttacaatgttacctcattggattcagaaggacctgggcttctagcagagctaatagaatggaatcaggaagttagcaagacttctaaggccagtcaccagtggctcacacctgtagtcccagcactttgggaggccgaggtgggcaaatcacctgaggtcaggggtttgagaccagcctgcccaacatggggaaaccmccatctctcctaaaaatacaaaaattagccagctgtgatggcacatgcctgtaatcccagctacttgggaggctgaggcaggagaatcacttgaactagggaagtggaagttgcagtgagccaagatcacgccactgcactccagcatgggcgacaaagcaagactttgtctcaaaaa

SEQ ID NO: 781245 - DNA, 606 bp, Homo sapiens
attcaatcaagcccttgagttctgagtcatccaagagaagatgttctgtaaaaaagtgacttgtgattcagagttcaggagaaagggctcaattaaaataataactttaagaagggtgtccagaacctgtggaaaaatgaagcccctttgtaggcatttattctgttaaagagtagtattttagagaaaaacatatctgaaagatatcgtgtttgtaggcaggaccctggagagatgatgtaaccagtaagaggtggtgttaggacttatttttccattagtagtaataggttatagagagctagagacatgcttgtccatgcttctttatggctaatatgacagaatttgtcttgtgatcacaatttgggtgtagttggtggctaaaaaagattttctctgcatgaagctaactgacccacctgggcttaagctcagtcttagctttattaggtycactctccaagcacctgagcaatctcctggcctaaggctgcataatatgccagtcattttcaatgagatgaggtatctgaagattaggagcaatgggaaattactttgatttttctgaaagctcatcatgattaggtgattcctaagaat

SEQ ID NO: 781246 - DNA, 630 bp, Homo sapiens
ttagagaacaattgtttgttttggattgcacacaagggagatatccccagttctgatttttttttttcttgagcttaatgaagacaattgaagaagggagcagaaggaattggtcttaattttgcctaaattcttcttagatctcaaaattattacatgcctcatttcaccaatcaagaacatactcccatttggaaatctgggaaggttttctgaaaagagttgcaaaacaactgttttgccttttacctttgttgtagacttctactaccttttgaactraaatttatacctttttttctttcttattttgataaggtattgctttttaaaatttcaggaccacctgactattacattcatcatagtcatctaccaagtccttgaacatgtcggatttcaattgtgaactacgttcacattagttttgataagagtttgtattcaggtttcccctcaaatatattttggcactgttttctttgcagatgacatgtgaatgcattctgaatgtataacttccttctacctgactgaaaagtatttggtgacaattttaactccttgaagacctgagttgctgtataaagtggatttgttaaattttgatctaccttttcttaagaggga

SEQ ID NO: 781247 - DNA, 548 bp, Homo sapiens
ttactctgttgatagtttcttttgttgtgcagaagctctttagtttaattagatcctatttttcaattttgcttttgttgcaattgcttttttgtcttcatcctgaagtctttgctcatgcctatttcctgaatgatattgcctaggttttcttctggagtttttacagtgtttggtttttcatttaagtctttaatattgagttgaatttgtatatggtggaaggaaatattacagtttcaattatctgcatatggctagccagttctcctagcactatttgttaaatagggaattctttccccattgcgcattcttgttaagtttgtcaaagatyagatggtggtaggtgtgtggtcttatttctgggttctttattctgttcttttggtctgtgtgtctgttcttgtactagtaccatgctattttggttactgtagctctgtagtacagtttgcattcaggtagtttgatgcctcgagctctttttttttttttctttttacttgggattgccttggttattcaggctcttttttggtttcata

SEQ ID NO: 781248 - DNA, 548 bp, Homo sapiens
ttactctgttgatagtttcttttgttgtgcagaagctctttagtttaattagatcctatttttcaattttgcttttgttgcaattgcttttttgtcttcatcctgaagtctttgctcatgcctatttcctgaatgatattgcctaggttttcttctggagtttttacagtgtttggtttttcatttaagtctttaatattgagttgaatttgtatatggtggaaggaaatattacagtttcaattatctgcatatggctagccagttctcctagcactatttgttaaatagggaattctttccccattgcgcattcttgttaagtttgtcaaagattagatggtggtaggtgtgtggtcttatttctgggttctttattctgttcttttggtctrtgtgtctgttcttgtactagtaccatgctattttggttactgtagctctgtagtacagtttgcattcaggtagtttgatgcctcgagctctttttttttttttctttttacttgggattgccttggttattcaggctcttttttggtttcata

SEQ ID NO: 781249 - DNA, 623 bp, Homo sapiens
gctttgttctttttgcttaggattgtgttggctatgcgggctcttttttggttccatatgaaatttaaagttctttctaattctgtaaagaaagtcaatggtagcttgattgggatagcattgaatctataaattactttgggcagtatggccattttgatgatattggttcttcctatccatgagcatggaatgtttttgcatttgtttgtgtcctctcttattttcttgagcagtggtttgtagttctccttgaagaggtccttcacatcccttgtaagttgtattcctaggtattttattctctttgtagccattgtgaatgggagttcactcacgatttggctctctgtttggctgtttttggtrtataggaatgcttgtgatttttgcacattgattttgtatcctgagactttgctgaagttacttatcagcttaaggagatttggggctgagatgatggagttttctaaatatacaatcatgtcatctgcaaacagggacaatttgacttcctcttttcctaattgaatatcctttatttctttctcctgcctgattgtcttggccagaacttccaatactgtgttgaataggagtggtgggagagggcatccttg

SEQ ID NO: 781250 - DNA, 628 bp, Homo sapiens
tgatttaaactaatgtcataatctctttagcagctataagacactctggagaggctaggctttctgcttcaactttgtcctaagatctaccttctcccacaagattgcaggcctctgcttattattgctaccacggtaacgcctaccagcatgaggactaccacatactggccaaagattccttccaaagattctttccatttggtcttccagcaccactgagaacaaaagatataacatttttcaatctttttttcctgcctccacatgaattcgcatactcaacatactttttttttttttttttttttttttgagacggagtctcgctctgtcgcccaggctggagtgcagtggcgggatctcggctcactgcaagctccgcctcccgggttcacgccattctcctgcctcagcctcccatcaacatacttttactgaggatccatctcccatcttagcacatgagtgagtcttaaaggraaggcaaggggagtctgctttaagatctcaaggatgtgagggaggataatgatttgaaaaaacacctagcatttctgtcatgactgtaccactcacttccaccaacacaggcctgtgtccccattaagaatccttaggttaaaac

SEQ ID NO: 781251 - DNA, 613 bp, Homo sapiens
  misc_feature 589, 590, 591, 592, 593, 594, 595, 596, 597, 598, 599, 600,601, 602, 603, 604, 605, 606, 607, 608, 609, 610, 611, 612,613: n = A,T,C or G
atatgaagatatttgagtaccacttatcttagatttgggggatgccccagtgaacatgataaatacagctttgtttttagttttgttttgttttcatggagattatagtcaagggagaaagaaagaaaacaaatcagaaaccaagaaaataggacgatatcagatattggaatgtaccgtggaagaaaataatrttgggtaatggaatgcagaggactgggaggtaatgactggggttttcttcaattagatatcatagatggcctgaggacatggcatctttcagataggaacaatgagaagagctggcactactaagatctgggaggatgtcattccaggaaaaagtaatgacacacaacacatgaagactctctgaagcagatgtatgtggcctgtgcaagtgtccaggagagctacggaggccagagcacaaagaggaagagggagaatggagtgaagagaggtcagagaggaaggacaatgccagggcctttggacttagagcacattcacagtctgtatattattctgattctaatggaaatccacgaagtttcgagcaggtttaggttattcgaaaaatcannnnnnnnnnnnnnnnnnnnnnnnn

SEQ ID NO: 781252 - DNA, 568 bp, Homo sapiens
ccaccctggacaggattccatcccattgcagagcactcacacacacccatactcattcagtctggaccatttagacaggctagttaactgaatggtcacatctttggaatgtgggaagtaacaagagtacctggagaaaacccacgcatatgtgaatagaacatgaaaactccacatagacagtggcctcagcagagaaacaatttttctcattgatattaaaacaaactgatgttgaaggaaacaatgttattcaaggaccttctatagagtgatataatttaaaatttttaaayatcactttataattcaaaataatgatacaattaaaattatactttattaaaataaccataaaatacaaaagtataattttattttagaattacttcctttcattttgtcttgcctaaaactaatactcctttttccaaactcccagattttataagaagtagactctgttcatgtattcaatcagctctaccatcaggatgaacccaaaaatagttcagctaagtaggatgcagaaaataataattttaacaaacttgaatcagttgttcat

SEQ ID NO: 781253 - DNA, 582 bp, Homo sapiens
acggtatgattctacacctagaaaacccaaaaaactccatcacaggctcctgaaactgataaacaagttcactaaagtttcaggacacaaaatccatgtacaaaaatcagcagcatttctatacaccaataatgttcaarctgagagccaaatcaagaaaataatcccatttacaaaaaccaccacacacaaacaaaatacccaagactacatctaaccaaggacaaaaaagagctctacaaggagaactataaaacagtgctaaaagaaatcatacattaaacaaacaaatgaaaaaatattccatactcacggattctaagaatcagtatcatttaaatgaccatagagcccaaagcaatctacatattcaatgccattcctatcaaactatcaacatcatttttcacagaagagaagaaaaaactattctaaagttcatatggaaccaaaaaagagcccaaatagccaaagtaagccaagcaaaaggaacaaagctggaggcatcacattacgtgacttcaaactatattataaggctacagtaactaacaaaaacagcatggtattggtacaaaaaca

SEQ ID NO: 781254 - DNA, 582 bp, Homo sapiens
acggtatgattctacacctagaaaacccaaaaaactccatcacaggctcctgaaactgataaacaagttcactaaagtttcaggacacaaaatccatgtacaaaaatcagcagcatttctatacaccaataatgttcaagctgagagccaaatcaagaaaataatcccatttacaaaaaccaccacacacaaacaaaatacccaagactacatctaaccaaggacaaaaaagagctctacaaggagaactatraaacagtgctaaaagaaatcatacattaaacaaacaaatgaaaaaatattccatactcacggattctaagaatcagtatcatttaaatgaccatagagcccaaagcaatctacatattcaatgccattcctatcaaactatcaacatcatttttcacagaagagaagaaaaaactattctaaagttcatatggaaccaaaaaagagcccaaatagccaaagtaagccaagcaaaaggaacaaagctggaggcatcacattacgtgacttcaaactatattataaggctacagtaactaacaaaaacagcatggtattggtacaaaaaca

SEQ ID NO: 781255 - DNA, 637 bp, Homo sapiens
gtgccaagcagtcaagttgtgaatgcaaaggaaaagatcctgaagaaaattaaaggtgctaccttagtgagcacataaatgacagaaagtgaagtcattttatggctgatatggaggaagttttggtggtctggactgaagatcaaaccagccacaaaattcccttaagccaaaacctaatctagaacaaggccttaactctcttcagttctttgaaggctgagagaagtgaggaaccttcagaagaaaagtttgaagctaacagaggttggttcatgaagttaaggaaagaaaatgtctccataacataaaagtgcaaggtgaagcagcaaatgctgacatagaagctggagcaagagatccagaagatctagctaagatcattgatgaaggtggctacactaaacaacaggtttttaatgtagatggaacarctttatattggaaaaagaggccatctaggactttcatagctagagaagagaagtcagagactggcttcaaagctttaaaggacaagctgactttcttgttgggggctaatgcagctggtgactataagttgaaaccaacactcatttaccattccccaaatccgaggacccttaagaattatgctaaatctattctccttgca

SEQ ID NO: 781256 - DNA, 589 bp, Homo sapiens
tttttggttccatatgaaatttaaagtagtttttttctaattcagtgaagaaagtcaatggtagcttgatgaaaatagcactgaatttataaattactttgggcagtatggccattttcacaatattgattcttcttatccatgagcatggaataatgtttttccatttgcttatgtcctctctaacttccttgagcattgctttgtagttctccttgaagaagtccttcacattcccttgtaagttgtattcctaggtattttrttatctttgtagcaattgtgaatgtgagttcactcatgatttggttctctgcttgtctattattggtgtataggaatgcttgtgatttttgcacactgattttgtatcctgagactttgctgaagttgcttatcagctaaaggagatttcgggctgagacaacagggttttctaaatatacaatcatgtaatatgcaaacagacacaatttgatttcctctcttccttgtgaataccctctatttctttctcttgcctgattgccctggccagaacttccaatactatgttgaataggagtggtgagatagggcatccttcgtc

SEQ ID NO: 781257 - DNA, 611 bp, Homo sapiens
aaatggccaacaattataagaaaaaaggccagcatcagtaatcatcaggtaaattcagattaaaaccacattgagatattgtctcattttgttagaacggctattatcaaaaaggtaaatgataagtgttggcaagaatgtgaagaaaagggaacccttgtacactgctgatgggaatgtaaattagcacagccattgtggaaaacaggttggaagttcttcaaaacattaaaactagaactacrcaacccaccaatcccattactggatatatatccaaaggatctgaaatcagtatgtccaagacatatctgcattctcatgcttattacagcattattcaacacagccaagatacggaatcaacctaagtgtccatcaacagatgaataaagaaaatgtggtatatatacagagtggaatagtatccagccttaaaaaatgaaattctgtcatttggagttcacgtggatgaacttggaagacattatgttaagcaaaataagccaggcacagaaagacagatatcgcatcattttacttatttgtggaatctaggaaagtcaacttatagaaacagagagtaaaataaaatgataattaccagaggc

SEQ ID NO: 781258 - DNA, 604 bp, Homo sapiens
tgggcaattttcaagaattttcatcagattggagaggcagtttattatgctgtgtaggagtctgactctggaattagactgcctgggtttgacttctggctcctttacctattagtagtgtaaccttgggcaagtgtcttaacttcttcatgtctamatttccttatctgtgaaatggagataataatagtacttatttcatgagaatattatgaggattgaatgagttaacatatgtaagcacttacagccctggtgcccagcatattgtaaacactgtatgtgtgttagttaaataaaatagagtaatttaaaaaacttatgtaaatggttagcttataaattttgcttctgttttgtaacaaaataacttctgagaatcatattgttacaatgacaaatgggaaaaattttctgatatttaaaatagactttcaaaaacatataaacattattattttaactaaactgtaataattccattttgaagataggggaggggaatggtggaagtaagactgctaattcttcgtatgccaaagaaggaagtaattggtaatacacatatagttttaaactgcttattttgctctaagagcatttt

SEQ ID NO: 781259 - DNA, 627 bp, Homo sapiens
agaatgaatttttaaaaatgtgatgctacaagagattcactttagatccagagacacaataagttgaaagtgaaaggatgggaaaagattccatgcaaatagtaaccaaaagagagctggggtggttatagtatgagacaaaataaactgtaagttaagaattgttacaagagacaaagaaggagattatatattgataaacagccaatccatcatgaaggtattataaacatatatgctccaaacaacagagcccccaatgtaggaagcaaaaatggacagaattgaagggagaaatagatacttctaaaataataattggagactttatagaacaactagacagaagatcagaaaggaaactgaatacttgagcaacactgtaaaacaaccagacctaacagacttatatagaacactccacccaataacagtggaatrtatatttttctcaatggtatatggaacattatcctaggtagaccatatgttaggccacaaaacaagcctcaataacattttaaaagattgaaattattcaaaaaattgtctgtggtcataatggaatgaaactagctatgaataacaaaaggaaacctgggaaattcacaagtatgtggaaattaa

SEQ ID NO: 781260 - DNA, 533 bp, Homo sapiens
attttaaaagattgaaattattcaaaaaattgtctgtggtcataatggaatgaaactagctatgaataacaaaaggaaacctgggaaattcacaagtatgtggaaattaaacaacatactctttattttattattattatttttttgagatggagtctcactctgtcatgcaggctggagtgcagtggcgtggtctcggctcactgcaagctccgtttcctgggttcacaccattctcctgcctcagcttcccaagtagctgggaccacaggcgcccgccacgatgcctagctaattttttgtatttttagtagagatggsgtttcactgtgttagccaggatggtctcgatctcctgaccttgtgatctgcccacctcggcctcccaaagtgttgggattacaggtgtgagccaccgtgcctggcctaaaacaacatactcttaaacaaccaatgggccaaagaataaattacaaatgaaattagaaaacactttgaggtgaaggaaaatgaaaatgcaacatacccaaacc

SEQ ID NO: 781261 - DNA, 526 bp, Homo sapiens
cctgactgtgggctcagcccctggcaggagagggtgtctgagctggtgagtgcagagttgtgtggtatccagctggttgctccaagtgccggcacaggagctggctccgtgcaccgcttgcggctggaccaggcatgtcacaagtgactcccacagtgggctctggagtccagactaggggaaggtggtggtaaccaaatgggtcaggcaacccagaagccccagaggtgggtgttacagcatgctaacagctctttyagatctgccctctgcagcctgacgaacaggggcatgttaacagccctatcagtcctgttaccccactcccgcccatggccctggggctggcctggccccccgccctgcttcttgttgcatagggtggctaccaggcgctgctggtggggcagagagctaccgtgttactctcttcttcctacccatgtttggtggcatcctgagctcttgtcctgtgtccaagaatgagattacactaacaatcggagggtgaggaggacagagaaga

SEQ ID NO: 781262 - DNA, 627 bp, Homo sapiens
gcatttggccacagactgaggactgcactgtcagtttccctgcttctgaggtttggggacttggactgtctttcttgctcctcagcttgcagatggcctattgtgggacttcaccttgtgattgtgtgagtcaattctccttaataaactccccttcatatatacagtcatcctattatttctgtccctctagagcaccctgaataatacacacaatttcaggtattcagaagttatcccagaaaatacagaagggatattgctgaagatatttttaacaaaagaagaaaaaaaaggcttaaggagttttgtcatgtgagagaaaaaaaataaaaagagggtagacctccctttstttctccaggacaaaaattcacggatgggaattttagggagacagacagtatgtaataagtatattctttctaataattggaactatctaataatgctctggtctgcttccatgcataaagcactctgcctctagactcttcaggctgagagaaggtggcctggtcagatgccatagaaacaatctctgctgcctctagggtgaagttatctaaatgcttcctaatgtctttgccaattctgaaaaacaatgatttggaaataaaggtcaga

SEQ ID NO: 781263 - DNA, 558 bp, Homo sapiens
aaacaaattggcaagattcgaggttttctctggattctagcatctttaaaaagagaatgtctgttgttttataaaagcatttatttacatctttatcaggtatcctccagtcccaaatgtgagaggttagggcaatctgtggattgggstggctttctcttctaagtcactcccagactagggaagtgactcagaagagtcactgagtggggaaacacagaaccagggatggctctgtagctctgacctaacttaaagctccagattggtctgaccttttctcactttgcgattcagacctgaaaaaaatgaggccaaagttggctcatcttcctcccttgaaaatgttctaaggagatgaaccacatcctgtcctatctcccccaaaccatacctcagcacaggggcttgtttcattggtacaagaataagttgtctttcttttgctagaaagctcacaactttaaaacctacaaaaaatgaatgaattataatctagaacttcagatatctgtatcataatagttggatatgcttatggagtatgatatgatcttt

SEQ ID NO: 781264 - DNA, 627 bp, Homo sapiens
gtgatcctcctgtcttggcctcttagagtgcacgattacaggcagaagccactgcacccagcctcaaaatagttctctaggggtctgtcgggtaaattgggcctaagaactctgagtttgtcctgtccacatgcacaacgacattgccttctcttctaattttgcttctgcctgaggtgatatcctaaggctgagccttcagaatactaggtgcagcagatttaataactgtgcgtgaatttggtcaacctcattagcccaacccgataattaaattccaattaaaatatctcctgcttctgacacagaaaaagaaaaagtagtgaggaacagattagattattttgaccttttaatttcctttargcattgggtctgtaggtcaatgattaatattaacatgctttgtgtaattaacatcaagtcccctgataagtaaggcaggaaattcttcatagttagtattttagaaggatgcctgtaatctccatttgcacaaaataaactgacatatgattttccaggaaggatgttagaataaatgactatccaatcgtaggatagagatatattgttagtaggaagtatacgtccattaaactgattgtctgactctggtttttaaac

SEQ ID NO: 781265 - DNA, 409 bp, Homo sapiens
cagtttaatttgctctggaaataattatgcattcagtttggtattaattcatttaaatcaattcttgaacctggaaaccaaaacattttccctttgagacttcaagattcctgcagttgttgtcaccctatagctcttcaagacaatttgcaaaatatgcaggaaaatgcacgaaatgtgaaattagctattacattaagaatgatgcaccagtggaactgaaaatgacaytgacaaacacaatgtcttttgggatatctatttcagtaggtctctttgcagatgcaacagagttttctggtgaccaaatgtctacctagttcacaaatctagactcatttccattcaacatagagctatattttaataggttccaatgaaaccaagatgagagtcatctctatcggcc

SEQ ID NO: 781266 - DNA, 627 bp, Homo sapiens
ggggatccttttttttcccaccctcatgctttcacggagactgtggagcagcttggcaggctcaaattgttttgaggacaaaaggttattgtcaccaggaccttcataatgcagttggcctcttccctggctcccccacctccccttccccctctcctcagatagtttgcacagtggctagatttacaaagccattctcttcgcagtgcccccagtgctgagttcattcctgatggagtcttcccttgctctccctatcacccccttggctctcacctyctgcgcatggtgtcattggtcccggtgccagaatccccaagctggggcccatcctccccatccctttgtgttgagctgctgttgcaggatgcacactgtagctggcattgtgttgccttgagagcagtgtatcccgacccgcagccctctgagatgtctcaggccataatttactggcaagtgtctatgttaccgagttgaaacagcagtttctcacagctcgctttgtggcaccaagtctctgctcctgtgaccactggctattttgctttctcaagtaggatcagcgtacttcgtgccatgtccagccacctggggtggcaagcaagccagggacccagagggaca

SEQ ID NO: 781267 - DNA, 627 bp, Homo sapiens
ggggatccttttttttcccaccctcatgctttcacggagactgtggagcagcttggcaggctcaaattgttttgaggacaaaaggttattgtcaccaggaccttcataatgcagttggcctcttccctggctcccccacctccccttccccctctcctcagatagtttgcacagtggctagatttacaaagccattctcttcgcagtgcccccagtgctgagttcattcctgatggagtcttcccttgctctccctatcacccccttggctctcacctcctgcgcatggtgtcattggtcccggtgccagaatccccaagctggggcccatcctccccatccctttgtgttgagctgctgttgcaggatgcacactgtagctggcattgtgttgccttgagagcagtgtatcccgacccgcagccctctgagatgtctcaggccataatttactggcaagtgtctatgttacygagttgaaacagcagtttctcacagctcgctttgtggcaccaagtctctgctcctgtgaccactggctattttgctttctcaagtaggatcagcgtacttcgtgccatgtccagccacctggggtggcaagcaagccagggacccagagggaca

SEQ ID NO: 781268 - DNA, 606 bp, Homo sapiens
tggctgtcgggagagtgagggtaggttttaaggatgttatctttacaagatgggtggccttcagctctctaccacgcaggtcaattcagttctgagagatgccacatgtgaacagggaaatcacacaagaacaggccaaggagcgacctggatgatgagaggctcaagccagtgatcgtctttggatggtragaatatcatgtctttcttttcttaatcttatttgtatatttaaattgtacataagtagctctctgctcctcccatttgacagacagccgcctcttctctctcattgacagctgcatccctgagacactacggtgaaggtgaagatcaaagtcaatggatttggttgtattgggtgcctagtcaccagggcggtttttaactctggtaaagtggatattgttgccatcaatgaccccttcattgacctcaactacatggtctgtgtgttccagtatgattttgtctgtggcaaattccatggcactgccaaggctgagaatgggaagcttgtcatcaacgaaaatcctatcaccatcttccaggagcgagatccctccaaaatcagatggggcaatgctggtgctgagtatatca

SEQ ID NO: 781269 - DNA, 484 bp, Homo sapiens
aacatcagaggatgcaaaccagggatcagacacatagttttgtttttgtctgcaatatcccaatatcccaatgtaactcaaaatcactttcccccaatctaacagtgactttataacttaagttcatcaaatttaagtggattgctcaacaaacccatcataaaatagttctatataccatggttacatttccaagaataatcaaactttgtgcacacagggatataacagttctctctcaaaggagctacaatttgagtgttaaattcataaaaaggttttaaygcaacatgagatgttccagattttaatagaaaaaggcagatttccgaaagatcatatccttaaatacatgggttcataatctaagaaaactggattgatatgatctacaacagattctgtgaagcttactttcattgattacaactatataacatattacagtatccccttcagtagttttcacactgtgctccacaga

SEQ ID NO: 781270 - DNA, 656 bp, Homo sapiens
gaaaaggaaaataaaattacactacattttttcttttaatatattttataatgagatataatttacctacaaagaattgcacacatattaagtgttacaatcccaagatatttgtcaaatgcatatacacatgcaacccaatattcctatcaagatatagaacataacggtcacctcagaaaatgtccccttccagtcaattctttgttgctctgatttctttcgacatagatttgcttgttctagaacttcatataaatggtacccaatatttcctttttttttttttttttttttaagacagagtctcacyctgtcccctaggctggagtgcagtggcacagtctcagttcactgcaacctctgcttcccaggttaaagtgattctcgtgcctcagcctcctgagtagctgggattataggcaagtgccaccacacccagctaatttttgtatttttagtagagatggggtttcaccatattggccaactggcctcgaactcctgaactcaagtgatctgcctgccttggccttctgaagtgatgggattacaggcatgagaatatgaactctttttgtacagactttttttttggcttctttcagcatgaggttttgagattaatccagtgttgtatgtatcagtagtttatt

SEQ ID NO: 781271 - DNA, 633 bp, Homo sapiens
attcattataacccagctgtgtttgtcttccttcagttcctagaaaacgccacacttttcctcacttctcagcgaatactcctgcggtttcttctgtctggaatgaacttcctcccggtctttgcatggctggcttcctctcaccctttcagtcttgtttatcctctaagaaagtttccttgaacccctgtacctgagtagggtttttttcatagcccttcctcaattgcttcactcactttgcatgtttttctggtctcttcactatttgaaaaaagttacaattttttcattatctatcttccctagtactttgaactgtgcctttttttgtttaccatagcacccagtacaatgctgacagatattatgggctcagtaaatattttacaaaatgatttattgagtgatggaacatctaactaaatatgttacatatatgtctagtgcataggaaarataaatggaagtttcatcttggctcaatcacaaccctttctcccttaatccagttacttacttagcacaaaatatctgaaagcagttctggggctgttgtgaattcaaagatgagacctggctcttgcctttatgcacttttgccatgggaaagaagattaacttgtataccag

SEQ ID NO: 781272 - DNA, 633 bp, Homo sapiens
attcattataacccagctgtgtttgtcttccttcagttcctagaaaacgccacacttttcctcacttctcagcgaatactcctgcggtttcttctgtctggaatgaacttcctcccggtctttgcatggctggcttcctctcaccctttcagtcttgtttatcctctaagaaagtttccttgaacccctgtacctgagtagggtttttttcatagcccttcctcaattgcttcactcactttgcatgtttttctggtctcttcactatttgaaaaaagttacaattttttcattatctatcttccctagtactttgaactgtgcctttttttgtttaccatagcacccagtacaatgctgacagatattatgggctcagtaaatattttacaaaatgatttattgagtgatggaacatctaactaaatatgttacatatatgtctagtgcataggaaagawaaatggaagtttcatcttggctcaatcacaaccctttctcccttaatccagttacttacttagcacaaaatatctgaaagcagttctggggctgttgtgaattcaaagatgagacctggctcttgcctttatgcacttttgccatgggaaagaagattaacttgtataccag

SEQ ID NO: 781273 - DNA, 578 bp, Homo sapiens
acaatctataatttctaacaccatgattttcatttcaaacccagcaaggatcccagcagaaattttggcatacatgggcactcccattaagtcattgagaatgatctaaatattcgttcagagggaatgagaccttcttgaagagatcatatctgcatcaagaaaattaagggtagagatgtatatattaaatattgacatatatgttagtattatatatataaatagcctttataaatcaaataaaaactgaataccacaacttaaatggcctatagatacatatatatatatatattttwtatataggcaaaatacagaagcatgaacaaatatggaatgcttactataattttaaaaaatttaaattcaaatatgaagtataatttttaaagcttttagatgggcataaatgaaaaagattgataatatccagtctagtgaaggtaagggaaaatgattatccttattcacagctgatgggagggcctcagaccctccaacctgtcctccatgctactacaaactctgtggaaagcattctcttttgtatttatcaaaattgtaactctattcaa

SEQ ID NO: 781274 - DNA, 591 bp, Homo sapiens
cacaatctataatttctaacaccatgattttcatttcaaacccagcaaggatcccagcagaaattttggcatacatgggcactcccattaagtcattgagaatgatctaaatattcgttcagagggaatgagaccttcttgaagagatcatatctgcatcaagaaaattaagggtagagatgtatatattaaatattgacatatatgttagtattatatatataaatagcctttataaatcaaataaaaactgaataccacaacttaaatggcctatagatacatatatatatatatattttttatataggcaaaatacagaagcatgaacaaatatggaatgcttactataattttaaaaaatttaaattcaaatatgaagtataatytttaaagcttttagatgggcataaatgaaaaagattgataatatccagtctagtgaaggtaagggaaaatgattatccttattcacagctgatgggagggcctcagaccctccaacctgtcctccatgctactacaaactctgtggaaagcattctcttttgtatttatcaaaattgtaactctattcaacattgattcacc

SEQ ID NO: 781275 - DNA, 646 bp, Homo sapiens
atataacttgctgaaaagcataagcacctcctcagagttcattttatatgacttctcatttcctagttagactcatggtatctatattaaaataactcccaagaaaaaccttactgtttggaatggtgatcggtatgcagttagatactctcctgagaggcaaaattggctttgtcagcctgttaatattaccagtgaaggctgttggaacagctttaccagcaccttctgctagagcagaacatttgtaaagtttcactgagtgtataattttgttaattataaatcctttttttttgagatggagttttgctcttgttgcccaggctggagtgcaatggcgcgatcttggctcaccgcaacctccgcctcccaggttcaagcaattctcctgcctcagcctcccgastagctgggattacaggcatgcaccaccacgcccggctaattttgtatttttagtagagacagggtttctccatgttgaggctggtctcgaactcctgacctcaggtgatctgcctgcctcagcctcccaaagtgctgggattataggcgtgagccaccgtgcctggctaattataaattcttttaaaggtactgattaaaatagttaaatggtagtaggttaataatttaaatttgt

SEQ ID NO: 781276 - DNA, 663 bp, Homo sapiens
tgtaagggttggtcaagttcattgttagaggggacaatccccatatgaccacccactgttctgacatcaactgcaaattttggggtccccaagacaaccctcagtttggctctttggataggatgacagacctcaccattacactcatggttatggtttattacgtggcaaggatacagattgacatagcagccaagagaagagggatgtgggacagatagaatccaggaaaagttgcagacacagagctccttctgtcctttccttgtggagttgtggacagcacggagcctcacagtcttagcttgtgcagaatgcctgaagcatygccaaccagggtagctagcccaaaccccagtgttcagagtcttcagctggggctccacagtcaatggcccacagagttgacctcaatctgtagcctctccagaggtctgagctgatacttcaagacccaaagctcccacccttaaccatattgttaacacctagtatgtccatctcatactctaaaaatctctgctatgaatagccccctctaccctaaatcacattgctagattgtccagttaccccaggtcccccagtacataaacacattcctactaggcaggacattccaaggctagtgtgcacctctcaggagctgggggcaaatgcccc

SEQ ID NO: 781277 - DNA, 576 bp, Homo sapiens
aggatgagtatagtataaaattatctctgtatttctgcctcagcgtagagaaaatgttctctatgaaatataatcattttattaaacactacccaacaccatctagtatttaaccagttccaatatttctcaagtactattacattcttttctcccacatatcgtcataaagcatttgtttttgtttttcctttttatctggcaaagatgctacttataccagtgattaacacaatttctaagtaagaaatagaactagaagtgaaaacttacatagaaaagtaagatggaaccagaagtgagggctaggatatgggatacatttgacaacctacagttgtttttcaaccccttcaagttatatcattatctattacagaaaaaaaaaaaaaaaaaacargataaaaccacacctgagcagacggttttccaggggggtctccagggatcatttaattttcaaagagaactctttacaagttaatctctgttctaataatctcctcaacagaattcctcacctccccctcccatcacctgttttactgggatccaagcccccactctttctgtaac

SEQ ID NO: 781278 - DNA, 552 bp, Homo sapiens
aaagctagatgatgggttgatgggtgcagcaaaccaccgtggcacatgtatacctatgtaacaaacctgcgcgttctacacatgtatcccagaactttaaaaaaaaaagaaatagtatttcaatatggtctgaattaggatgtytgttattagatataaaggagaacatatgtgttgagggccatttgagcctgttctgtatataaactcttatttttgcccttttctttgtagcatgtttggggtttttctggagttgaactttttagatatctgaaaaatagctgttaatatttctgatggaagttgcaaattttcttccagctcattatttattttttactttgcttatggagatttgttttgttttttaccatgtgattttttttttgagatagtgtcttgttcctcctggagtgcagtggcacgatcttggctcactgcaacctccatcccttgggctcaagtgatcctcccatctcagcctcccagcttgctggaactacaggcacgcaccgccacacccggttaattttttaaattttttgtaga

SEQ ID NO: 781279 - DNA, 564 bp, Homo sapiens
tggtcctgagtggtgtcaacacgcccctcctcttgggacctgtgagtaacaaaccacttgcttaacggcagtctcctgatctgttggccccaccatacctacatcataataaagtctacattttacaacgcaaacgaacaaaaatgtcctgctcagtgctgccctgagagcagaggttattccaggattcttgctcgcctctgtaaagggtatccgttctgcagacctttctgccggtcacactgacggcatattgcagagcctgccagggactcacaggggatgacaggggatttatcaggtggttttttactgcactgtcattactgggggcgaatccactttaatacattcatgcctcctgagcctgtgggaattcaagaggaacagaaccagaaataawtgaaccataactccctttggcatcttgcctctctggaggcttaattcttacaaatatgtgctctgctttcaaatcttagtttgatgattttctcttcttctttttcagttttccccccacgacctgaccgtgtcgctatagtgacgggagggacagatggc

SEQ ID NO: 781280 - DNA, 454 bp, Homo sapiens
aaccccgcaccctttgtaatctaaactcttctgtttactggacttcactactttcctcctgatgtcctctttctgtcccaggatctcctccagaacccacattacattgagtcatgcctcctcttggctgtgacagtttctgagacttgccttgtttttcatgacctcgaagcaaggtcttgtacatgactcttgtatgggtttatttattaaaaagatatttatttggctyacagttctgcagactgttcaagagtcaaatacaagaccttacttcaaggtcatccaaagcaaggcctgcagaccatacaagggccccttgccacaaatggcacttggatgtggcttgtgtattagtccattttgtattgctatagaggagtaactgagctgagtgatttataaagaaaagaggtttatttggctcacggtgctgcagactatacgagaaaca

SEQ ID NO: 781281 - DNA, 493 bp, Homo sapiens
ttattattattatcattattattattattatgtggctgaaagcggttctggaacctgaaggaaaggtttcaattccattattattattatttttattattatgaagattaggctggaagaggtcccagtaccagtaacaaaggtttatattctaattattattgttacggttgttattattattaggctgaaaaaggtctcagtacctgtagcaaagatttttatgctggcaccaggcacagcggctcacgcctgtactctcagcactttgggaggccaaggtgggtggatcayctgaggtcaggagtttgagaccaccctggacaacatggtgaaacccctcctctactaaaaatacaaaattagccgggcgtggtagtggcacatgcctgtagtcccagctactcgggaggctgaggcacgagaatcgtttgaacccgggaagcagaggttgcagtgagccgagatggcgccattgcactgtagcctgggc

SEQ ID NO: 781282 - DNA, 558 bp, Homo sapiens
gtgttagaagccataggaaatatcaatgttttttcaacatggatcctaattttaagatatgtatagtatacttggggataatgaaaatacgagtaggcagaaaagataactattgagtactgggcttaatatctgggtgataaaataatgtgtacaacaaacctccatgacatgtgtttacctatgtaacaaaccttcacatgtaccgtcaaacctaaaataaaagctaaaaaaagaaaatacaastagaaaagtaatattattaatatgagaattaattattttcatatggaggaatcagggaaggctccatgatacagcatggtcttgacattaagagtttgtggaattggtgttccaggtagagaaaataataataatgacaataataataataacagtaaagacagtgatagataacattattgtttctgatacccaataatctttgagttatgtcattttcattctccaaaagcctcacgaagttggtttttaattccttttacagatgaggaaactgaggcactttgaggactcaaggttatatatctatca

SEQ ID NO: 781283 - DNA, 478 bp, Homo sapiens
cccactcatttagataaactgctttaacttatccctttttcttggcaactccaaagcattgtgaaactgtgtccaaataactagaccacatgcggataataaagttagagccagtccagaaaataagatacttcttcttaatctattatcgatgtatgacaaaaacacaggaccaacaccttccaggaaattttgttcaaaaagacaacagccaactggagacacacatgacaacatctactcaaatactttaaagtatttgtgagcgtggatctttttattaacccgtggagaatggaaaaraaaggaaatgatcagaaaatggcaatgaaagaatatggcagaagaatggagatcatacagaattacttcctctctataaaatatataaattaagtaaaattacagtgcgatgcttaaaaacacagactctggagccaacttcttgagtttcaatcctggctccctcatctactag

SEQ ID NO: 781284 - DNA, 562 bp, Homo sapiens
agactagcaaaatacattcttgtcctcacaaaacccttgtatacattctatacaccaggggttcccaacccctgggaagctgaccataagggtctgtggcctgttaggaacagggctgcacagcagaagataactggcaggtgagttagcataactgcctgagctccgcctcctgtcacaacagtggtggcattagattctcataggaccatgaaccctatggtgaactgtgcatgtaagggatctacgtcgcacaatccttatgagaatmtaatgcctgatgatctgaggtggaagagtttcatcccgaaaacaacaaccctccatccatgaaaaaattgtcttccacaaaacctgtccctggtgccaaaaaggttggggactgctactatacactctcagaaaaaaattacttaattgcatgcatagtcttgaaaactatttaaagagtttttcaccatctaaaggtgtttttgatgatgccctccttaggcaaaacttcacctttgcactgaaacttcttaatagataggcccccagagactttacctactagagtcta

SEQ ID NO: 781285 - DNA, 656 bp, Homo sapiens
attttcttagctttataagtgaaggaatgaaagctcacagaatgtaaatagctcatccaaagttccaaagctaaggaggtgtagaaaggagaatcagtttcaggtctgtatctccagtgtgctgtctttcaaaccagagagctagttaaaacaattaccagcccttagaccagctgcctggtcaccatgtcacccagacatctccctttgcactgtgggcatatgtgaacccccacatgaaggctttgtcattccctaattatccaggtttgttactgatcagtcatactcctgatttgtcctaattgtgtgtgtgtgtatgtgtgtttgtttcccttaagaggaaggcaagtttccttaaaaaacaacaacaacaamaaaaacacatacagagtaagaaaatttaccagtttactattaacaaacttaaaaattcaaaaaaaagggggattctgagggaacatgaaaatttatatgggactagataatgaataaatatattcactaaaaatatggcacccttacttagtgctctgcctttttaaaagacatgatacacatcttcttggtacggtatatccactattatccattcaatttccatttatttccccgtttgctagaacttttcaagctttcactcccctgctgtttta

SEQ ID NO: 781286 - DNA, 549 bp, Homo sapiens
cagtttgagctggacacaaataacgcgtgtgtgtgtgtatgtgtgtgtgattgtatcagacaacatgggggatacaaatgctaccagatagacaagaagatgcctgagagaaagaccatttcgctgaattgcccatggttatgcctggaagatttccctcaaatgtgggataaaatggagaacctctcttgctgggctgggtgctttaatgcctctgttttgttacagattatattattctygccctgataatttttcaaagaaaccaagaattgatttgaaaacgaaccattatcttctctagagatcatagcaatgggtgttccagcctcatatttgcacggtacttcctgaaaataggaaaatggggaaataaccttggaagggccttctcagcattctctgatgtcatgaaaaatcctatctgcctgggagattcctcaaccctcaggcttataaagttttagttaaactgcaatcaaacatgagtaaagtatatttgttggagacataaaaggagattttattacaaatccaaaagaaaaagct

SEQ ID NO: 781287 - DNA, 549 bp, Homo sapiens
cagtttgagctggacacaaataacgcgtgtgtgtgtgtatgtgtgtgtgattgtatcagacaacatgggggatacaaatgctaccagatagacaagaagatgcctgagagaaagaccatttcgctgaattgcccatggttatgcctggaagatttccctcaaatgtgggataaaatggagaacctctcttgctgggctgggtgctttaatgcctctgttttgttacagattatattattctcgccctgataatttttcaaagaaaccaagarttgatttgaaaacgaaccattatcttctctagagatcatagcaatgggtgttccagcctcatatttgcacggtacttcctgaaaataggaaaatggggaaataaccttggaagggccttctcagcattctctgatgtcatgaaaaatcctatctgcctgggagattcctcaaccctcaggcttataaagttttagttaaactgcaatcaaacatgagtaaagtatatttgttggagacataaaaggagattttattacaaatccaaaagaaaaagct

SEQ ID NO: 781288 - DNA, 580 bp, Homo sapiens
tgcaaagttcccaaacgatgtcagtgtttagccaaatatgagacccactggtttagagctgtaaacagtgcagttgctactgttttatggtagatgttacagaaatatgtcgttgaattgcctataaaatgaattaaagattrgagcatttctttttcccctattcataaaccattgtgatcgcagtcttctatagaaattacctattttgcctgatgagatttacttagaaagggaaataaacacatagctatatctctcctgaagtcttcttgcagttactaattaaggcagtacacacattctcagttgagctagaactttagctattgtctctttgctctactgaaggtaacccgagtgttacggctttttaaatgagctggaacaataaatacaaatttcgttggcaagacaaatactttttctcatatgccaacgattatgtaatcaaagtataaagtatccatataaagccttgcttttgaaaataatttcaatttaaaaattaaaaatagtaattaacattggtaacagtatattgatgaccactgtttagctgatacagtgaatacaggtg

SEQ ID NO: 781289 - DNA, 580 bp, Homo sapiens
tgcaaagttcccaaacgatgtcagtgtttagccaaatatgagacccactggtttagagctgtaaacagtgcagttgctactgttttatggtagatgttacagaaatatgtcgttgaattgcctataaaatgaattaaagattggagcatttctttttcccctattcataaaccattgtgatcgcagtcttctatagaaattacctattttgcytgatgagatttacttagaaagggaaataaacacatagctatatctctcctgaagtcttcttgcagttactaattaaggcagtacacacattctcagttgagctagaactttagctattgtctctttgctctactgaaggtaacccgagtgttacggctttttaaatgagctggaacaataaatacaaatttcgttggcaagacaaatactttttctcatatgccaacgattatgtaatcaaagtataaagtatccatataaagccttgcttttgaaaataatttcaatttaaaaattaaaaatagtaattaacattggtaacagtatattgatgaccactgtttagctgatacagtgaatacaggtg

SEQ ID NO: 781290 - DNA, 580 bp, Homo sapiens
tgcaaagttcccaaacgatgtcagtgtttagccaaatatgagacccactggtttagagctgtaaacagtgcagttgctactgttttatggtagatgttacagaaatatgtcgttgaattgcctataaaatgaattaaagattggagcatttctttttcccctattcataaaccattgtgatcgcagtcttctatagaaattacctattttgcctgatgagatttacttagaaagggaaataaacacatagctatatctctcctgaagtcttyttgcagttactaattaaggcagtacacacattctcagttgagctagaactttagctattgtctctttgctctactgaaggtaacccgagtgttacggctttttaaatgagctggaacaataaatacaaatttcgttggcaagacaaatactttttctcatatgccaacgattatgtaatcaaagtataaagtatccatataaagccttgcttttgaaaataatttcaatttaaaaattaaaaatagtaattaacattggtaacagtatattgatgaccactgtttagctgatacagtgaatacaggtg

SEQ ID NO: 781291 - DNA, 635 bp, Homo sapiens
gctttgaacttgtctaatacacatagttcttactcgtgccacagtatgttgattgtgagtatattaattcatctggagactacatttagaaaagggaagaaaacgcaaatgactacaatataaaggctagaatgatttcaggcactgaaatattatgggattatttaatgacaaatgcctaaatttgcagcctctttaagaaatcctttataattggtgctatctcaattatatatgtataagatatacatatgtaaatttgagatatgcatatattgagatagacacatattaatatgttgaaatatgtatgcatgcatgccyatgtatatgatttgtatataaagctacaaatttcacatattcacattgattttacaaatatcattattttgataactgtgctaatgtttaataggcatattacagacttaaaatatatttttaagatgtaggttaaaggagaccctaaataaagctgcattgtttcattttcatgccacatgcaccaaaatgggtttttttttcctttctggctaaattttagctcaaggaaagagtcggcctatgcctatgggaaaaaaaggtcatgattcagatctctgttaacacattagctggtctgcaacaagcag

SEQ ID NO: 781292 - DNA, 635 bp, Homo sapiens
agggatccccaactccgggctgtggacgggtacccgtccatagcctgttaggaaccagctgcacagcaggaggtgagcagtgggcaagcaagcattactgcctgagcaactcctcccgtcaggtcagaggcggcgtttgattttcataggggcataaaccctactgtgaactgtgcacgtgagggatctagggtgcacactccttatgagaatctaactaatgcctgatgatctgaacagtttcatccccaaatcatcacctccctgcccactgggctgtggaaaaactatcttccatgaaaccagtcctgatgccaaaaaggttgagtcaagggatacttaaaaagccaggaaacatgcagtccaaggcttggcccaaaccaactggacactggtggtgacacagagaagtrggagccagttgtttctgtccccacctctctcaaatgatggagctggtgtgtgtgatttagaattataaagaaaacagactggtaagagaaaataatggtcctaaggccaaagtgagagaaaaacactctgaacttctgggagacagaggaaaaggagatggtggtttatcaaacacaagctgcaccaagtggacacattaaccataaaataaacaacgtacc

SEQ ID NO: 781293 - DNA, 437 bp, Homo sapiens
agagtgaagaggatacattaaaaggcaaaattaatgaaaagaaatttatacctgaactgattttttcaaaaaggccttccaagatttaaaaacaaaaaaaaagcacaggattttcttttaaaggtggaaacacaagaaaagacaaaatgcggacagctggaaaacatcacagcagtgggaggtgtgaaagctgacccaagaggcccaaagccgcagttggcaatgggacaaacaaatggccaatktaattgccaacacaaaatctgccccaccccatccacctacccacccatgacatcctggatgtcatgctaagaaatctggattttattccttataatgtggggactaaggccacgtggtctgtcatgtcttcccacccaggagagccaaaataagaaagactccacgaaaggcaggaaaaaaaccatcagtgc

SEQ ID NO: 781294 - DNA, 601 bp, Homo sapiens
catgcatagattttttaaaaaattattctgctagtggccgggtgcagcagttcacacctataatcccaacactttgggaggctgaggcaggcagatcacaaggtcaggagatcgagaccatcctggctaacatggtgcaaccccgtctctagtaaaaacacacacacaaaaaaaaaattagctgggygtggtggcgggcgcctgtagtcacagctacttgggaggctcaggctggagaatggtgtggacccaggaggcggagcttgcagtgagccgagatcgcaccactgcactccagcctgggcgacagagtgagactccgtctaagaaaaaaaaaaattattctgccagcacaagtcaaacatgcagggggggaattagattttaaaaaaagataaaaaaataaaaacttaaatttcttattaatttataaattatagtactagatattgactagtaataaatatgttcaggaatatgtttacataaaagcatttctaagatgtgagaaaaaatgatatagtgcctggataatgatttatgtgcaaatattgacacatggatgagaatatctgcaagaacttatgaggatccattagca

SEQ ID NO: 781295 - DNA, 642 bp, Homo sapiens
gcactgaccagagccaagggcatagtggggaggccaggagtttttcccgcattcatatacttcagcaacaagcatgctagccccgttggttaccttaaacctacgttctgccatcagttaacaacagtaggaatagcaacttcacaccacagggtcaaatgaggtatgtgagccgggcacgcgtggctcatgcctgtaatcccagcactttgggaagctgaggcgggcgaatcatgaggtcaggagttcgaaaccagcctggccaacatggtgaaaccctgtctctactaaaaatacaaaaaattagctgggcatggtggcaggcgcctgcaatcccagctgctcgggaggctgagacaggagaattgcttgaatctagsaggtggaggttgcagtgagccgagattgtgccactgcactctagcccaggtgacagagtgaggctccatctcaaaaaaaaaaagaaaaaaaaaatcaggtatatgtctagtctgatcaggaaggatagctgcagaggcaaagtctatcctcagctacaaattcttcaacacccaacctatctgcagaaccgaagtgaaaacagtagcttcacaaagaatgatatgtaaaatacagccctgcctttagtaagcattcagtaaa

SEQ ID NO: 781296 - DNA, 624 bp, Homo sapiens
cgctcaggactgggagccttccctatccagagactgcttagagggtggaaagtacaccatctacacatgcaatgccttgcgcttgtttaacagcccaaggacatagaagagaaggaccaatgggggtacgtgcaaggaaacccaggcttggtcagagtcaagtggcaacccaagtttacaaagtgatgctacaacccagcagttggtaccttcgtgtaatgatctttccacgatcatggagcaaatgctgggtttgaagccagacacgtgggtgtgattcctggytctcctgcatcctagcaagttatttagaactgttgggaatttagtttccttgctctgaagggtggaaataataatacttgcatcacagagcagaggtgagattagaacagggcttctcaatcttggcacagttggcatttgggatggataattctttggtgtggggactgtcctgtgcattgtaagatgttgaacagcacttctggtctctacttgctggaaaccagtagcatccccttttctgctaaaacaactctcagcctcattcacattgggagacccactgaggtgcctttatcaaagcaactggtcctctttgttttggggtcggctcatctc

SEQ ID NO: 781297 - DNA, 589 bp, Homo sapiens
taaggtagctgctcccagtaaaataggccaacaaaggaacccattgcacacctgctgtgtaaagatgaagcaataccatgagagaaatatgttgtcccttctcttgtgggtagtgttttgtgtccttgtagactcctctttactgtactgtgctttttgaatgtcatgcacagccccctacaattgacttgaacactgttacagactgaatgtttgtggcccccaaaatttatatgctgaaattctaacccccaaggtgatagtaggaggagatggggtatttgggaggtaattaatcagagcggagtagtcatgaattggatgaatgcccatataaatgggaccccagaggactctttctctccaccatatgaggatacagtgagaagacaccatctgcacaccaggaagcaggccttcagcaagacactggatctgccrgcaccttgttcttggggttcccaccctcctggactgtgagaaataaatttctcgtaagccacccagtctatggtattctgttacagcagcgagaatggatgaggacacatttcaaaagaatcattgatctgactcaaaaattgtccca

SEQ ID NO: 781298 - DNA, 509 bp, Homo sapiens
taaatattgtagagatttgatgtaaagcctgatgcaaagttagaggttaattaaaattaggaagaaccaagtggtttcttatttgcataggcaactgcagtccacataaccttatcaagtaactcacttagcaatgcgttgtttctctgttcataaggaactcattacatctrtgataagaaaatccactcaaagacttaacccatttgaacactgattcaggatgaaaatgttcacctccagtattgatatgcgtgaacaattcatcatgggccatctgtatagttttttgtcatgaatgtcatggatgtattgtatcatttcagggccagctggcattcctggattcctaggtctcaaaggtcccaaaggcagagagggacatgctgggtttccaggtgtcccaggtccacctggccattcctgtgaaagaggtgctccagggataccagggcaaccgggactccctgggtatccaggtagcccaggtaagtgtcaagaactgtgaa

SEQ ID NO: 781299 - DNA, 509 bp, Homo sapiens
taaatattgtagagatttgatgtaaagcctgatgcaaagttagaggttaattaaaattaggaagaaccaagtggtttcttatttgcataggcaactgcagtccacataaccttatcaagtaactcacttagcaatgcgttgtttctctgttcataaggaactcattacatctatgataagaaaatccaytcaaagacttaacccatttgaacactgattcaggatgaaaatgttcacctccagtattgatatgcgtgaacaattcatcatgggccatctgtatagttttttgtcatgaatgtcatggatgtattgtatcatttcagggccagctggcattcctggattcctaggtctcaaaggtcccaaaggcagagagggacatgctgggtttccaggtgtcccaggtccacctggccattcctgtgaaagaggtgctccagggataccagggcaaccgggactccctgggtatccaggtagcccaggtaagtgtcaagaactgtgaa

SEQ ID NO: 781300 - DNA, 575 bp, Homo sapiens
aaccaccttgcgggttgagggaggtagtctttcaagacaggtaactttgaactgctctggaatcagcaaaactcagccaagcaaggtcagaggcagtgagaagtgggcatgtcaggccaaaaaaccatgtggaaaagcacaggaatatgaaagcaagcagagggtctcagcgggcaggaatcgcacctgcagccccatggggccatatggcctctctgctrgggatataggggacacagaatacagagagcctcccacaccatgcccaggagttcagactcagcactgatggccaggtctaaatacttttaatcaaccaagtgacatcatctaattcggggaatttatttaggattgatcattaatctcaactatcctatatttttacaaataacttctgttttatttcataaatatcaaagagattggtataaaagttctggggatgaatcttagttcctttttaatacttgatatgctaaggaagttctcagagtgtggtctggggaacccctgaaactaagcccctgcaagctgcttgttttaagtaccgattctaggcctcagacctgctc

SEQ ID NO: 781301 - DNA, 575 bp, Homo sapiens
aaccaccttgcgggttgagggaggtagtctttcaagacaggtaactttgaactgctctggaatcagcaaaactcagccaagcaaggtcagaggcagtgagaagtgggcatgtcaggccaaaaaaccatgtggaaaagcacaggaatatgaaagcaagcagagggtctcagcgggcaggaatcgcacctgcagccccatggggccatatggcctctctgctggggatataggggacacagaatacagagagcctcccacaccatgcccaggagttcagactcagcactgatggccaggtctaaatacttttaatcaaccaagtgacatcatctaattyggggaatttatttaggattgatcattaatctcaactatcctatatttttacaaataacttctgttttatttcataaatatcaaagagattggtataaaagttctggggatgaatcttagttcctttttaatacttgatatgctaaggaagttctcagagtgtggtctggggaacccctgaaactaagcccctgcaagctgcttgttttaagtaccgattctaggcctcagacctgctc

SEQ ID NO: 781302 - DNA, 595 bp, Homo sapiens
ttgggcaggagcagatggggacagataacactaaagacatggccatgataacatctatgacagcagttcttaaccttgtctataattacaatctcctgggatttttttattattattatttgctagtacccaagcaacaccccagactaattaattcaaaatctttgagggtggcccccaagcatcaatactttttaaagctcccagaacaattctaataagcagctagtactgaaaaccaccagtgacagacttagcctgtttctctcagcatttgaatattttatcccataatgtagaaaatggaatttaatgaaaattatacctgtaaagacatattaagtagttaagtatgtatttgctttgaagaccagaatgtatgcatacrcatcattatcttacttcaaaatcaaaatatatttccagtgtcacaattcaaaaatgttaaaagatcttccatgtcatctaaaaagaaattcattgacattcaagaacttaactgatcatatgcatatgatcttggttcctgggcaaaccgtgaccttgattggtcctgcaatatcatccattacaaaggtagctattatccaactgt

SEQ ID NO: 781303 - DNA, 458 bp, Homo sapiens
tttgagaagaacagaagggttattttgtaattgaatttacatacctttgatgtttcacattgttacattctaatcatgatttgtggcaggaccaccaaaggaatgacagtgtgcccttcccaggaagcatgtgagactcactggtcccaggatttgatcacttgattaaggggctgttcccattagacactgtgaaagtactgcttttccctttgtaattaaggagcgytaatgattttggcaggggcaatttgggtaattcaaaacattcgattttttgaaagattttttttctagtttttggctcttataaataaagcttctatggagagtgtcagataaaggttcctaaatacattgggttgtcagggaaggtttcgttaacaaggtaattatcaattagaagtgcaatgtggaaaccagtttgagtagggaatacttatttgtataacttagag

SEQ ID NO: 781304 - DNA, 458 bp, Homo sapiens
tttgagaagaacagaagggttattttgtaattgaatttacatacctttgatgtttcacattgttacattctaatcatgatttgtggcaggaccaccaaaggaatgacagtgtgcccttcccaggaagcatgtgagactcactggtcccaggatttgatcacttgattaaggggctgttcccattagacactgtgaaagtactgcttttccctttgtaattaaggagcgtyaatgattttggcaggggcaatttgggtaattcaaaacattcgattttttgaaagattttttttctagtttttggctcttataaataaagcttctatggagagtgtcagataaaggttcctaaatacattgggttgtcagggaaggtttcgttaacaaggtaattatcaattagaagtgcaatgtggaaaccagtttgagtagggaatacttatttgtataacttagag

SEQ ID NO: 781305 - DNA, 554 bp, Homo sapiens
aagagttgaactttattagtgttcatggtgaggcattatagtaatttgtggtaggttcatagtatggtccccaatttcttgttcccatcttatcctggaaagggaatatatactttcattcacaattagataatttgctatagcctgttagtataagaagtataatccaaacacagcattgttagttctgrccacgtgatatagtttggccaatgtaacctgagccgaggtaatatgcaccacatccgagcacaatctttaagagagatagcacccagttctgccagctctcctgtccttttttgtcttccataagaatattatgtcacaaatggtggccagtcctttatcatgtgtctgacttaagaacacacatagcacaccaaacaaccatcacaggtgaagtgagcaagtaatacatgtcaatgaaaagtcagatattggttaaaatccactgtaatttttggactgtttattaccgcatcaaagctgactaatacagtgtttattaggaaaagtaaataactcaaacaagtcaaaaaagggaatatctt

SEQ ID NO: 781306 - DNA, 399 bp, Homo sapiens
tttgaataactgtatataaacctatcgacttaaacttctataagacttacataagctttagacttatgtagacatagaagttgatcatatatgatacttggacatacatttaaacatgtaagaaaaatgaagctggrcacggtgactcacacctgtaatcccagctgtaatctactgaaaatagaaaaattagcccggctggtggtgcgcacctgcaatcccagctgaggttgaggcatgaggaccgcttgagtgtgggaggtggaggttacaacgagctgagattgcaccactgcactccagcctgggtgacagagccaggctctgctaaaaacaaaaaacaaaaacctaaaaagataagcaaaattgaaattgacggtagtcctaaaatttcctcat

SEQ ID NO: 781307 - DNA, 636 bp, Homo sapiens
ggaaggcatatttagagtcagtataaatattgatgcgtagtccctttgcaagagtgagggcccgagttaaggcaatgagtttggcttgctgagaggtagtggaggggggcagagtggcagcttcaatgatagatggaaggtactatagcatagcctgcctttgctggttagtggcgatkaggcctggtaaaactgctgtcaataaaccaagtgtgatcagggtgaggaacaagaaagaaggaaatatggggaaatggagtgaatggcaggtggatcagagagatacagtcatgggggtcagatgtggtatccggaataatgtgggaggccggattgaagtccaggccaggaacaatggtaattgtgggagactcaacaaagagtgagtatagctgaaggagccagggagcagaaactatacatgtcaggtgtgaggaagaaaatagattttggaagttatgagaactgtagagagtgagttgagcatagtttgtgattttgagggcctctaaaagtattagggtggcggcagtacttgcatggagacatgatggccagcctaaaacagtagggtcaagttgtttggatgaaaggctacagggcatggtcccagtccttgtgtaagaatcccgactg

SEQ ID NO: 781308 - DNA, 583 bp, Homo sapiens
agaaaggaaagaaatccccacattgaggaatttttaagttgggatttcggagggagcgggatgcatatgtatgtgtgtgtagtccaaaagggaaaagagaattaatggaaaaaagaaggtaaaactaaaaccaagcaaaaaaaaaaaaaaaaaaaaaaaaaaagaaagtgcatttaggaactgaaagacgttagtatggatgaaatttaragtacgggtagggaaactttccctgacagggccatgtagcaagtgatttaggcttttgtggcccataaattctatgacacgactactcaaccctgtctttgtagaaaaagcagccaaagacattccagaaacaaataagcatcactgtgctccaacaaaaatttatgtttaaaattgatagctgatctacaggatgtagtttgatggtccgtagtttagagtgtgggggaccacactggtacaccaggacttggtggaagagcatttgaaagctataatataaagcacagataatcataaagacaatatacaatcactggctcgtatttagcagatgagaaatatgatttttttcacattttagaaactctct

SEQ ID NO: 781309 - DNA, 583 bp, Homo sapiens
agaaaggaaagaaatccccacattgaggaatttttaagttgggatttcggagggagcgggatgcatatgtatgtgtgtgtagtccaaaagggaaaagagaattaatggaaaaaagaaggtaaaactaaaaccaagcaaaaaaaaaaaaaaaaaaaaaaaaaaagaaagtgcatttaggaactgaaagacgttagtatggatgaaatttagagtacgggtagggaaactttccctgacagggccatgtagcaagtgatttaggcttttgtggcccataaattctatgacacgactactcaaccctgtctttgtagaaaaagcagccaaagacattccaraaacaaataagcatcactgtgctccaacaaaaatttatgtttaaaattgatagctgatctacaggatgtagtttgatggtccgtagtttagagtgtgggggaccacactggtacaccaggacttggtggaagagcatttgaaagctataatataaagcacagataatcataaagacaatatacaatcactggctcgtatttagcagatgagaaatatgatttttttcacattttagaaactctct

SEQ ID NO: 781310 - DNA, 625 bp, Homo sapiens
ggttggtggaggctggggttttaacatatgaattttgggggaacacaaacattcagcctataatagccatgcttaaaatgaatcctaagcactaagtaggaattttctcaaatttcttatgaaagaattaaatgtatcatacatttagtttagatggatgaattggcaaaacaagaaaagtagaatatggaaagggtagtgaggtgggtaaggaacagagggaatattcattttaaatattctcctayatgaactttttgcatttatgaggtgaaaagaatttctccatcttttgtaatactgtactacttatatactgtttttaaattagtactatatatttatatttgtgtatcttacctctctgataaatcctgaacttcctcaagacaagaactagctattttttaaatcccactgtaatatcaaagcttaaaattttgatattatacttgttccttaaatctaataagaacagatttatacttttgattcaggaggaaagattatctcaaacgtctaaagtatttttcctcatatatttagatgtgtctcaatatatgaataaactataagactgaaaaaccagttttctcacctggcttcatattaatgatggcagata

SEQ ID NO: 781311 - DNA, 459 bp, Homo sapiens
aagaaattatattccagacagccccgcagttgtctggttcagatctggacggctcccttgtcgttcatttgaaatgcacccaagggttaactgagcacaacactggctgatagaggagaacggcttcaccacctacacccccctctgcccacgtccccaggaagccatgtcagggcagaccaggcaccttctcattctgaggagagtgcatctcagcccaaatattgtgttccatttagagaacactgaacagattaacagtgaagcttctccaagaaacggtggacagagagcacctggagagtcccgggctgtggcmccagaattgcgccagtgaagctggtatcgacttcaaataccagagcatcttacttggggaaggattggcctcattcatgtgattctaacccaaggtaacattagaaacatgctagggtttatcacatgccaagcatgctg

SEQ ID NO: 781312 - DNA, 459 bp, Homo sapiens
aagaaattatattccagacagccccgcagttgtctggttcagatctggacggctcccttgtcgttcatttgaaatgcacccaagggttaactgagcacaacactggctgatagaggagaacggcttcaccacctacacccccctctgcccacgtccccaggaagccatgtcagggcagaccaggcaccttctcattctgaggagagtgcatctcagcccaaatattgtgttccatttagagaacactgaacagattaacagtgaagcttctccaagaaacggtggacagagagcacctggagagtcccgggctgtggcamcagaattgcgccagtgaagctggtatcgacttcaaataccagagcatcttacttggggaaggattggcctcattcatgtgattctaacccaaggtaacattagaaacatgctagggtttatcacatgccaagcatgctg

SEQ ID NO: 781313 - DNA, 580 bp, Homo sapiens
attcacattaagtggaataaataaagactaaaaatagttccgtgtcagttcagaagaggattcaccgaatgagtgagaatgttcagtgcttagggtgtcgaggttgggcttcggggttcgaggctgtgaactggactgcatgttgcatttgaggacctcgagkttagaggatcctgtggtctgttcctatttatgcagctcgtggtggacttgtgttcaacccaggtcttctgtctctgactccggcgtgttctctgccacacccagctcttggggtcgtattgactaaggtgggtccgtaactgtcactgcagtgggcactcaggggaaccctggaaagccacagagaaaatccactagcacaactgcaccttggggaaagcgcttcgtgtgtttgcttcagctattcaaggagtcctgagctcctgtacgatgaaaatgtttcttcatctctgacacttctgtggggcttcgcatacaatgctgagttacatcgcgagttatcaacaaacatttctggaatgaatgatccactgagttgggagagaaaagccaaggggggattttaacacagggggct

SEQ ID NO: 781314 - DNA, 597 bp, Homo sapiens
cagtcgatagagcagagatcatgtccatcagcatcaaggcagcatgcaattcctccctcggctcagactgcttgaaaatgtggaggcaccatagaaatcatcaataattccatatgtctatgtacacaaaatgcaaaacaacttttggaaatggaaaaattgggtcataccaatcacaacatctaatttaaacagcaccatcagaaaatgaagttaacagtagaagcgaatgatcccagtaactaaaatgtactcaatttacaaacggggtgcagtaggaggggtgcactggttggacagatgactgtcagatgcactcaggtgatgtcctccgaggcttctggaaaggctctggaacttggtgtactgtttgtgcacsaccttgcccagatgaatttcttatcactctagagcagtaacaagtaagagtgtgaatttccatttggctaaatggaagctatccccgtgataaactgtactcctcccttaactgaaggggccactgccgtcaacaatactctcaggggctcccttcctccctcctccatcagcacattcagggaccctcacccacaggcagccaggatggacatagga

SEQ ID NO: 781315 - DNA, 639 bp, Homo sapiens
cctaaatagatatgcacctaatcctgaagctcccagatgtataaagcaattactactagacttagaacagagatagacaatgacacaataacaatgaggaacctgagcactccactgatggcgctaaacaggttattgaggcagaaaatcaacaaagaaacattagatttaaactgcactctgaaacaaattgacctaacagatatttatagaacattttaaccaagaaaagcagaatatacattcttatcatcagcacctggaacattctccaagatagactatataatagtccagaaaacaagtctcaatagatttttaaaaatcagaatcatatcaaatatctccttggactactgtggaattaaaacagaaatcagctacaaaaaggaaccctcaaaactatacaaatacatggaaatgaagcaatctgctcctgaatgatttttgggtcaacaatgaaatcgaaatgaamatttaaaattcttttgaaaggggtaacaatgacacaagttatcgaaacctttgggatacagcaaaagcagtgctaagagaaaagtttataggcactaaacaccaaaaagtctgaaagatcacaaattaacaaactgagaccacaaattgaggaactagagaaac

SEQ ID NO: 781316 - DNA, 593 bp, Homo sapiens
cccttgatgttgaagttggtgctttacaatcctccatgcctatagatttcattggccataccccagtcttttattgccatgactcaccttgacatctgtgaacaaaacttgatcctgaacttgagacaaggactctctgggcttacccttgtccttaagtgtgtattacctttgtcgctgtctttcctttttcatatatcagctgcatttccactgcaaactagaaggttcttcaggtcatcatgaaacatgagcttactaagcaggaatctctatagcctatccctcagcctggcctgggtctctggatacattgtttggttcctttttcttccacttgataaataatttctacaacctcattatatttttaggaactttctaaactccactgaccttcctctaccctgtccttttgggaaagtagtgggaaacttggcatgcacytccttgtcactttgtacatcactaaagatctactccatggcagtcatgtagaggccagtgcatttgagaccatacacagatgccaccactagtccttttgaacacagtgggttctctgtgcttctgtcgttggaccttgactttcc

SEQ ID NO: 781317 - DNA, 655 bp, Homo sapiens
aacatatgccagacactattttgggcactggggatgtaagagtaattaagaaagacaaaaatcccttccctggttcccagatgctcgttcccttcccttccctcccttggcccaaggctagaggtacttctgctggagacatccttctccttcagagctacactctattccattttctctaacagtccccaaagaaaatctccatccctataggaagattcaaaaaacctgggcagaagcagctgasggacccttctccacgtagaaaaacaaagcttacattccaaaacagaaactcaaaaaggggaggaatagaaaacacactaatgtaatcacccattttcaatcatggcctcttaaacactccccaggaaacctcttcaaaaatatgaaacatttccctggaagaggggtctattagaaaaaaatctacattccactaaaccaagtcttctgatcactaaatgattctagataattcactgctgttaagtaaccagaggacagtctcaagactaatgaaggtgcctgcagatgggctcagtaagctagcctcatcacataacttccttcccctcccactcgctacttataaatttaaatattcacaaaaagaaggcacgagcttattcaaacaaaaacagaatgatgaaca

SEQ ID NO: 781318 - DNA, 636 bp, Homo sapiens
aataatctcactatgatactgtcttcccttaaaaataaaatgtaaatctctggatattggatattgggcttagttaaatgaatattatataaggctaaataagtgaacaatgggaaggattcccattactttctgacaataactaaaagtcttatgttgaaatataaatatgaaactgtttcatctgttatattcaatttttttcaagagcttttgttattctcttaaagtttaattctcagtaaacatgtaagtttaattcctcttaccagcataaaagctgaactctgcctatgcatgtatgaatgagcaaaaaataaaaagcaaaatcacggaaactcagctatagctgtagaagtctatgtgaagacaagatgacaccagttagtttctttaaaaaaaaatttctttagtgtctgtgtcagtaaacactgaacccagaaaagaaattgactggcaagtgaaaactttcaaaatcttacattckttttactagctgggtctaccccaacaggcacttataattgtttaaggagaagccacagagatgaaaatagaccagaaagtgtgaaggatataaaaatcatctcagagttctgttctccaaaatagcctgttagaaactcatatcccaag

SEQ ID NO: 781319 - DNA, 614 bp, Homo sapiens
caaaaactttagtgttggcaagaaagcagagaaatgggaatgctatatgttaccgtagaaatataaatggatagaaccattttggagatttgtctcataagtcaatgtttgtctcataaaacttttaaaagcagttctaaatataggcatatatcctagcatggtttttgcattcatgctcaagaaaactatagaaagttaatcattacaacagtgcttaaaaataacaaaatagaagggacaaatgaaggtaayctaaatgagcatcgaaagtagacaattgatgtgacttattcataatatggaattctatacagcagttaaaagaaatgatttttttgcagctataattgcatatgtataaatacataccttcaacacgaaaacttatctgtgaaaaaataatttgcatatcaggagtaatatttttcatgtacattttctaaaaaggacaaataaaaatttattgaccaacatcttcaagtaataataattggatcattaaggtaattaagaaattaataattaaattatcattggattaattagtacaattaggacatatctgcaaaatagtaaatattgcttaattagaataattaattaggaaaata

SEQ ID NO: 781320 - DNA, 544 bp, Homo sapiens
caagagcaaacagtttcaaaagctagtagaagacaagaaataactaagatgagagcagaactaaaggagatagagacacaaaaaactctttaaaaaatcagtgaatccaggagctgtttttttgaaaagattaacaaaatagactactagccagactaataaagaagaaaagggagaagaatcaaatacacacaataaaaaatgataaaggggatattaccactgatctcacagaaatacaaactaccatcagagaatattataaacacctctatgcaagtaaactagaaaatctagaagaaatggacaaattcctggacacatacaycttcccaagactaaaccaggaagaagctgaatccctgaatcgaccaataacaagttctgaaattgaggcagtaattaatagcctaccaaccaaaaaaaaaaaaaaaaaaaaaaaaaaaaatcccaggaccagacggattcacagctgaattctaccagaggtacaaagaggagctggtaccattccttctgaaactattccaaaccatagaaaaag

SEQ ID NO: 781321 - DNA, 612 bp, Homo sapiens
cttagcctcccaagtagctgggactacaggctctcaccaccatgcctggctaatttttgtattttttgtaaagatggggtttcatcatgttgcccaggctggtcttgaacttctgagctcaagtggtctgtttgctttggcctttcaaaatgctagttttacagatgtaggccactgctcaagtggtctgcttgctttggcctcgcgaagtgctaatattacagacgtgggccactgtgcccagcctgcctgcagtwttctttacttgtagtgtctttatttggctttggtatcagagtaatgctgactctgtaaaatgagtttggaagtgtttcttcctcttccgttttttgggagagtttgagaaggattggcattaattcttctttaaatgtttggtaaaatccacccatgtagccatctggtcttgagcttttctttcttaggaggtttttgattactgattcgatctccttacttacaaatggtctgttcagatttttattttatgttattttattttttgagacagggtcttgctctgtcaccaaggctggagtccagtggtgtgatcatggctcactgcatcctcaacttctgagactcaagcag

SEQ ID NO: 781322 - DNA, 596 bp, Homo sapiens
ccactgcactccagcctgggcagcagagagagaccctgtctcaaaaaacaaaccaaccaaccaaaaaaaaaaaacagaaaacaaaccaccaactgtgataagtcctatcaatattaggtgctcttgatatgatgtgatgaaaatgacactttatttctgkgttatttttcttaaaaatctataaccccagtttaataatgatttttaaaatcagacaaatcccggttcaggtacaaaatacctagccaatgctcctcaaaactgtcatggctatctacaacaagcaagtttgagaaattcacataatggaggcataatgagtaatgacataggatcctgggacagaaagaagatattaggttaaaactaaggaaatccgaataactaagtacttttgttaataacagtgtcttcatattagttcattaactgtaaaaaatgtaccatactaatatcaaatgttaataataggggaaactgggtctgaggtatgtgcaaagtctttgtactgtctttgtaacttttctgtaaaactaacattgttgtaaaacataaaacatttaaaaattataaatattacacatcaggttctactg

SEQ ID NO: 781323 - DNA, 635 bp, Homo sapiens
ggaagaagtctcttttgcagcctctaaactaccaagctttacccagagaggtacaattaagttcaaggtcaacactattcttcattctttgttcttgcaatatcaatacacaaaccctctaccacgatagaaaactctgccttcacaaataaataacagcaatatttgatgagccttgacttccttcttcactaccagtaactgccattctcacaactggagacatcatggactttacctctaatcttgattagacaggcaggcacggtggctcatgcctgtaatcccagcactttgggaggccaaggcgggtggattgcttaagaccaggagttcaagaccagtctggctaacataacgaaaccccatctctattaaaattacaaaaattagctgggcgtggtggcatgcaccagtaattgggaggacgagacatgagaattgcttgaaccctggaggcagaggttgcagtgagctgagatggcgccactgcactccascgtgggttgacagagtgagattctgtctcaaaataataataataaacgattagaaaattcacttctataaagtccctcctagctgtggtcaagttgtgaattcagaacagattggcatcaaaaaaattgtgtact

SEQ ID NO: 781324 - DNA, 488 bp, Homo sapiens
agaggacactgaagttccattaagcctggatcctgagtcattagtccccaaaaaacaaatttcccattctccaagggtaaggaaatgttagcattcaacttcctgaggtgaagggcattccagtccctctatatttctatttcttctatttcttctaaggcaaatggagagtaaacaaacaggacaatctgaataaatatttgtgtttctacaaagaaaacttatttcccatgtggaggttctctactccctaactgctggggttgaaatgttgatctttgcctgaattagagtttcaaaaacagtaaacttctcatatttaaaacagtmcctttctgcatgtgatttctctagggatacccaagagttacattgaataaggttttaaaatagaagtaatggctttaatatcagttttgtatctactgaaacaacgcatgattaattctctctttaaaaaatggtgggctcaacttattaaataagta

SEQ ID NO: 781325 - DNA, 668 bp, Homo sapiens
gtcacggagctttaaggcaactaaagctgtgagttaggtagagcaattgaacatctttagtgggcaaattagaaaggaaaaaaggtagaggaaagaagatggccatttttttttttaatccaaacatattttccatccttacagaggtaatccatgggcaaaggaagaattatccccttctaaaaccctcaaatgctggctcatagtatataactttgaatgtatacatgggtgtggggttaaaaaaaaaaacagacaaagcattgtatctttgggtggctaacacaacccagccccagtggcttgtgcttatgaggcatatttcttaggaggctggctgagcttcatccatgactatacaggaggccaggtgctaaaacctagataggtacagtattggatctaaaggcaagtggaggttgggcgcagtgactcaygtctgtaatcctagcactttgggaggccaaggtgggtggattgcctgaggtcaggggttcgagcccagcctggccaacatggtgaaaccccgtctctactaaaaatacaaaaattagccgggcattgtggtgcatgcctgtagtcacagccacttgggagactgaggcaggagaatcgctggaacccaggaggcagaggttgcagtgagccgagatcatgccactgcactc

SEQ ID NO: 781326 - DNA, 624 bp, Homo sapiens
cccatttgcttttgaaagaagagaaatatggctctgttccgcctggctcactggtggtcagagtttaaggttatctctcttgttccctgaacattgctgttatcttgttcttttttcaaggtgcccagatttcatattgtttaaacacacatgctctacaaacaatttgtgcaggtaacacaatcatcacagggtcctgaggcgacatacgtcctcctcagcttatgaaaatgacgggattaagagactaaagtaaagacaggcataggaaatcacaagggtattgattggggaagtgataagtgtccatgaaatcttcacaatttatgttcagagattgcagtaaagacaggcgtaagaaattataaaagtattaatttggggaatctgataaatgtccatgaaatcttcacaatttatgttcttccaccatggcttcagtcrgtccctccatttggggtccctgacttcccacaacagagctgcacctgtccagtcacagtccagactccagcatccctgaactcttggggacccagagtgagaacttcattgatgactgcttggcaaatctgatggtgctttttccaggcccatttgtggtcacccatggacaaattagca

SEQ ID NO: 781327 - DNA, 624 bp, Homo sapiens
cccatttgcttttgaaagaagagaaatatggctctgttccgcctggctcactggtggtcagagtttaaggttatctctcttgttccctgaacattgctgttatcttgttcttttttcaaggtgcccagatttcatattgtttaaacacacatgctctacaaacaatttgtgcaggtaacacaatcatcacagggtcctgaggcgacatacgtcctcctcagcttatgaaaatgacgggattaagagactaaagtaaagacaggcataggaaatcacaagggtattgattggggaagtgataagtgtccatgaaatcttcacaatttatgttcagagattgcagtaaagacaggcgtaagaaattataaaagtattaatttggggaatctgataaatgtccatgaaatcttcacaatttatgttcttccaccatggcttcagtcagtccctccatttggggtccctgacttyccacaacagagctgcacctgtccagtcacagtccagactccagcatccctgaactcttggggacccagagtgagaacttcattgatgactgcttggcaaatctgatggtgctttttccaggcccatttgtggtcacccatggacaaattagca

SEQ ID NO: 781328 - DNA, 618 bp, Homo sapiens
cttataaaagacattttagaatattttcctttatttcaaaggaaatatccattatttcaaaaaatgttagtatttaaagtagtgattacttcccagtatttcttaatattagtaaaacactacatcatctgaagaaataattgccacatatttgaaagtctatgtctgctcgttttaaatagtagttttcaaaatgcctaaagttgcaaatctggactactcaagtcaatagtctacttgagaactggataatttaggcatagatattccactgatatattctggagcaccatgtagataaatctttgaaaaaaaaaacaacattctcagtcttctctttatgtttaactctatgggcacatgtcagtaatgagcttagtatcggtaatcacagagrtagcatgtgtaagcagactcttgagatcagctagatcatttcctatgggaatttacaaggatatcttgctcctttcttttctttacttgtatatgaattacttgatacaggtttggataatttaaatgtttgctcaatcctctacacgcctctgttctctcactacagcccaaagaaagatgtacattggtctttgtaagatgagttatgtgattcagccc

SEQ ID NO: 781329 - DNA, 656 bp, Homo sapiens
atctgtattagcaatgctctattcacagttaccaccaagctatcttctaaaacacaaataaacaaaatgttaatttaatgactattgccttttccttgtggactgagtaatttaaaatgcattacaataggttttatgtttatttgttaattaattgcaaaattgaacagctattatgtataagacactatattgagcaatagaaaaaatagtaagacgtaataagacataacactagttaacatttctagagtacttaccataactcagcactgtgctattaaggtttttgcgtgacttagctcatttagtccctttagaagcctagaaattttgtctcagtgttactaaccattaacaagaagtaaaatgaaaatacagatagttttaaatataatgcaaacttatatccttgtttttgcagatttgtatatctggtttatgcctgttcttcctatgtaattattaatagaacatcctctgcctttgaagaatgtcccttsaatgatattttacatcgttatcccatttaaataacttgcccaaggtcacacagctagttactggcagaactatttcttaaacccagattttctgaagccaaagcctaaattaaaccatctcccacagctaaggaatactttttagtttaatgt

SEQ ID NO: 781330 - DNA, 635 bp, Homo sapiens
atttaaagttgttttccttgtggggttttagacttccttgggacctgttactgctttctctattactaattcttccttttgaaataaaaatatttatcatatgtttgttccaccattgagttttggaaatacctaacttgtttgatttcacaggttcacagcagaagagcaaattcctcagaatgaattgtgccttgagccaaacccatatctaatttagatgagactctagactttaggattttgagttggacctggaatgagttaagacttttggagttaatgagatggaatgactgtattttgtacattagaaggatgtaaattttgggggtcaagaggtggaatgttatagttttaatgtttgtgtcccctcccaaattcatgttgagacttaattcctaaggcaatagttttaagaggtggggccttraggaggttcttaggttatgagagcaagccatcatggttggatcagggccacatgaaatggctgagggaactggatgggtccttttgtccttccatcccttctaccatgtaagaacacagcatttctccctgcagggacatgtcaaaaaaatgccatcttgaaagtacagcctgggcccttactggacaacaagcctgctagc

SEQ ID NO: 781331 - DNA, 606 bp, Homo sapiens
tctagattttctagtttatgtgcacagatgtgttaataatattctccgatggttatctgtaattctttgaggtctctggtaatatcccattgttgtttctaattgcatttatttggatctgtttacttttttattattctagatagtagtatatctactttattaaatttacaagaaaataacaactcctggatttgttgagattttttaaaatttttttttaatctatctcagagtccttcagttcagttccaattttggtaatttcttgtccttagctttgcagtttgattttrgttcttttcgtcatgatgttaggtagttaaaatgagatctttccaactttttgatgtgagcatttagtactataaatttccctcttaacactgccttagctgtgtcctggagattctggtgtgttgtatacttgttctgattggttttaaagaacttcttgatttctgactttattatttacccagaagtcacttagaatcaggttattgcatttccacgttattgtatggttttcaggaaatatctttgtcttgatttctaacttgattgtgctgtggtgcaagatagtggttgttatgattttaggtg

SEQ ID NO: 781332 - DNA, 606 bp, Homo sapiens
tctagattttctagtttatgtgcacagatgtgttaataatattctccgatggttatctgtaattctttgaggtctctggtaatatcccattgttgtttctaattgcatttatttggatctgtttacttttttattattctagatagtagtatatctactttattaaatttacaagaaaataacaactcctggatttgttgagattttttaaaatttttttttaatctatctcagagtccttcagttcagttccaattttggtaatttcttgtccttagctttgcagtttgattttagttcttttcgtcatgatgttaggtagwtaaaatgagatctttccaactttttgatgtgagcatttagtactataaatttccctcttaacactgccttagctgtgtcctggagattctggtgtgttgtatacttgttctgattggttttaaagaacttcttgatttctgactttattatttacccagaagtcacttagaatcaggttattgcatttccacgttattgtatggttttcaggaaatatctttgtcttgatttctaacttgattgtgctgtggtgcaagatagtggttgttatgattttaggtg

SEQ ID NO: 781333 - DNA, 619 bp, Homo sapiens
tgagactccatctcaaaaaaaaaaaaattattatggacactttctatcctaatatgtacagttttaatgtatcttttttaatttttaatttttgtgggtacatttttaaattttgtgggtaattttctggatacatatatacagtaggtgtatatatcgggtacatgagatattttgatacaggtatataatgtgtaataatcacattagggtaagtggggtatccatcacctcaagcatttattctttgtgttacaaataacccagatacactcttttagttattttattttwttttttttgagacaggatctttctctgtcacccaggctagagggcagcgatgtgatcacagatctctgcagccttgaccttgctcaagcaatcctcttacctcagcctccagagtatctaggaccacaggcgcctgtcaccatgtctggctaatttttgtattttttgtacagttgaggtttcaccatgacgcccaggctggtcttgaactcccacgttcaagcaatcctcctgccttggcctcccaaagtgctgggattacaggcgtgagccaccatgcccagccttctttaattattttaaaatgtacagttaaattattatt

SEQ ID NO: 781334 - DNA, 667 bp, Homo sapiens
ttcttattcctggacttcagcagttaagaagagcctttattacaagacaatgttattgataattaaaaaataaataaactcttaaatgataagcgttcctgggttataaggccaactctgtcactaacaatgtgaggagcagttacttcatctctagtctcattacctcacctccgaaatgaaacagctggagtccatcttcttgggggcctggttctaatgcccactttgaatgctgtttctttcaaggcactgcctggctcagtcattcargaaaaaatctactgctgttgcaagcttgatatacagtccatttagaaagagattttgaagaagaaaagaaaaaaaaacaagtaatgttcatttgtttcattacaacaatttaatagaaacaaccatccaaaaaatagaaaatgtcaagtgggctattaaaaccctccagcaggaacgggtgcgtctaggcacaaatattaaatgcgaacagcctcaagagaggaatacagaagggcatgcttgctgcaccggctcaagcaccatttttgtctgaagagaggatcatgcagaaggctggatatccacagcagcagagcttggcttacagaggatccattgtgcagagggaccttggctgctcttctgccaaaaacaaattgtatacccttgctgt

SEQ ID NO: 781335 - DNA, 616 bp, Homo sapiens
ggttatgtgtataaagtgtatatgaacaacataaatgaatttttttctttagatttagatcctattctcaatatttctcattacgtatacggaaatgttcgaaaaaaaaaaattgaaacagcactggccccaagcattttagaagagggatactcaaactrtatatgatcccatcagcatgtaaatcaccacagtgaaatctatcactgaaataactgaagtaaaatcaattaatgctaataaccattataccatacgtagaggtgggagtgtggaacaaagaacacaacaatatagactgccatatactctgtgagatcatggaaaacaagtggcctcaacaacaaggggaaaggcatgagtaccaataagagtatacttggttcagatgccatcatgactacagccagaattcttctgtctcattcatttctgacccatttgtcctccaaaagtcttatagcaaggtgtgataacctctgcttggagaagctgtcaagtgaaaaataaaaccatgtccctgcctaagtttaggattccatcaaattcctggccttgaagcagaatgatatgacagaaaggatgcaaacatttgaattaaaaattcctaaattta

SEQ ID NO: 781336 - DNA, 608 bp, Homo sapiens
acctgttgtgcttttatttcaatgtttaatttacagaaaaactgaataatacccctttaactttagccaatatgtttacacacagaattttctttacaatcaatcttccacaacttgcttaaaccttcagctttattctttgtaacttaaaataatccttatagcttttaacttaggcaaaaaaaaattaaaaaaaaacacattcccatgccttcttataatcttttaaccaaaagtatattctactttccttacacactttgcatgtaaaactgtttcttcagtagtctcaaatacatattacactgtcaactcttggtaacttttacttttggtaaaaaccttaataagtttgggatttaaattatgtaaaattaaggagtgcagataaggtctgacttttttcagcatctaagttcacaggtcccaggycttacttagctgtaaataggcaagttgtacaattaagagttggagtagcattttatgaagcatttaggaggcctaatcacttttaagctgtacagcatttcttgcataaattcccctttagtaattatttcacaacttaaacaatctgacatgctttgactttctgacttgtccta

SEQ ID NO: 781337 - DNA, 615 bp, Homo sapiens
agtagtattctgttgtgtgtatatatatatatatatatatatatatatatatatatatatatacacactacacttttttaatccattcctctgctaatgaacgtttcggttgcttctatatcttggtaattgtgaatagtgctgcagtgaacatgggagtgcagatatctctttgatacattgattttaaaacttttgagtaaataccgagaaatggaattcctggatcatatggcaattttatttttagtttattgaggagcctctatgttgtttttcataatggatatactaatttactttcctacccacagtatatgagttaccctttctctacatccttgacaccacttgttatctatctatctatcttttagataataaccattcaaacaggtgtgaaagggctatctatctcctttggatactaaaktgtatttctgtaataattagtgatattgaacttcttttcttgtatcttttggccaattttatttttttttttgagaaatttctattcagaacttctacccatttttaaatttttttgggccttatgttttttgcttgctttacattggatattaaccccttatcagatatatggtttgcaaa

SEQ ID NO: 781338 - DNA, 617 bp, Homo sapiens
tcaaatttggaaaatttcaaccattcctttttcaagtacaagcccgccacaacacccaccaccccatggtagatcgctgaatgtagtcccacaggctatgaatgttcataatatataattcataatatataccatatatattacatatatatgtagagagagagaaataaattagacatatagatagatctatatatatacagaaatacaatgatgtgattgtcactctgccaaatattgtatacaattactcatgtgtaggggaaatttgggggccagtaatgtataattaattttttccagtcatttccctttctttggctcatttttaatagcttatattcctatgkcttaggggtaatgtttattctacactgtggaatctgttgttaattccatcagattatttttcatttcagatattgtacatcatatctccaaaattttcatttgtgtctttttaaaaatattcccttcttcctttatgatgatctcagtttcctttgcattctgaaaatattcacaatttacaacagctgttttaaggatattgtttactaattctttcatttgagtgtctttcttagttgatttatcccccttccaccccccacaac

SEQ ID NO: 781339 - DNA, 565 bp, Homo sapiens
cttggatttctagattccggaactggaagacaacaaatttctcttgattaagacatccagtttgttaatggcaaccctagaaaaatacattgtattgccaatattccaccattattaatattctccgatatttattttacattcctatacatctatccatttattaattcatcttattaggatgcatgtcaaataaaaggatggtatctatacacctcaacaatgaacayttaagtatataataagctgaaatgcaatattaggttatgggtttttaaaaaattacttattctttgatagagataattgtacatgtttatgagatacatagtgatgtttcaatacatacaatatatagtgagatcagataagggtaattaacatatccatcatctcaaacatttatcatttctatgtgttgcaaacattcaatatcttctctggagcaatttgaagatatatgttattgttagctatagtcatcctacagtgctatagaacactagaacatatttctcctatctagctataattttgtatcctttaataaatctctgcctattcc

SEQ ID NO: 781340 - DNA, 623 bp, Homo sapiens
aaatactccttcaaaaaaagagatgttataacctctgttgttaacaatgtcacaaaatgaagggccttcacagaaatacttaaaatttctaaagtgatatccttcaacgtagtggaaacatttcacaatttaagagacatatgaccttgaggtgaaactcaatttaaacaaattaccaagtggatgacagggaaagttatttcacatgtcctgtttcttcacatgggtgttcttaaagatgaaatagagtaatgaaaaggcrgtttgtaaaacataggcattcctccaatgttagatttgttgttgttcaatatggcagtgactttatataggtgattttgtcattctaacatggaaaacacaaacaaattcaaaggctagcagaaggcaagaagtaactaagatcagagcagaactgaaggacatagagacacaacaaaacccttcaaaaatcaatgaaaccaggagctggttttttgtaaagatgaacaaaattgatagactgctagcaagactaataaagaagaaaagagagaagaatcaaatggacgcaataaaaataataaaggggatatcaccatcgatcccacagacatacaaactaccatcagagaataccagaa

SEQ ID NO: 781341 - DNA, 623 bp, Homo sapiens
aaatactccttcaaaaaaagagatgttataacctctgttgttaacaatgtcacaaaatgaagggccttcacagaaatacttaaaatttctaaagtgatatccttcaacgtagtggaaacatttcacaatttaagagacatatgaccttgaggtgaaactcaatttaaacaaattaccaagtggatgacagggaaagttatttcacatgtcctgtttcttcacatgggtgttcttaaagatgaaatagagtaatgaaaaggcagtttgtaaaacataggcattcctccaatgttagatttgttgttgttcaatatggcagtgactttatataggtgattttgtcattctaacatggaaaacacaaacaaattcaaaggctagcagaaggcaagaartaactaagatcagagcagaactgaaggacatagagacacaacaaaacccttcaaaaatcaatgaaaccaggagctggttttttgtaaagatgaacaaaattgatagactgctagcaagactaataaagaagaaaagagagaagaatcaaatggacgcaataaaaataataaaggggatatcaccatcgatcccacagacatacaaactaccatcagagaataccagaa

SEQ ID NO: 781342 - DNA, 623 bp, Homo sapiens
aaatactccttcaaaaaaagagatgttataacctctgttgttaacaatgtcacaaaatgaagggccttcacagaaatacttaaaatttctaaagtgatatccttcaacgtagtggaaacatttcacaatttaagagacatatgaccttgaggtgaaactcaatttaaacaaattaccaagtggatgacagggaaagttatttcacatgtcctgtttcttcacatgggtgttcttaaagatgaaatagagtaatgaaaaggcagtttgtaaaacataggcattcctccaatgttagatttgttgttgttcaatatggcagtgactttatataggtgattttgtcattctaacatggaaaacacaaacaaattcaaaggctagcagaaggcaagaagtaactaagatcagagcagaactgaaggacatagagacacaacaaaacccttcaaaaatcaatgaaaccaggagctggttttttgtaaagatkaacaaaattgatagactgctagcaagactaataaagaagaaaagagagaagaatcaaatggacgcaataaaaataataaaggggatatcaccatcgatcccacagacatacaaactaccatcagagaataccagaa

SEQ ID NO: 781343 - DNA, 612 bp, Homo sapiens
tgatgtggtaaaatgtaaatgagaactactatcaaatcttggtttgcgacttgtattcctcattggcattagtcttccatttaaaaaattgatgtaatcattatcccaaagaattttgttttaagaatagaatagaatgatttgaattaaaaagatttatcaactgtaaaattctatatccatatcagaataagatattatacatatttattaaatgtgtgattatatatgtaattatataattgtaacacaatataagaaataaaaatttattatccattattaattcatttttatttcctagtctggatgtttaaattattttaaactgttatacaaagatttttatccattttgtggtgttatatagggaataatgaaaacacttatgttacatacaaaggttttgkttttcttactgtgaattgaatcttaatcccacccagtgtttaacttctgatcccagttttactgtgtaaaaatcaccaaaattttgatgaggctagtcaaggaaattagatagaacatgcaaaatacagcaatagagcatttgttactcatgactctgaaaatctagaacatcgaagaaacttaaagaatacacaacactac

SEQ ID NO: 781344 - DNA, 586 bp, Homo sapiens
acatactatcaatctgttttccagaaagttttgggctgggtatggtggctcatgcctgtaatcccagcagtttgggagatggaggcaggtggatcatttgaagtaaggagtttgagaccagccaccatcaacatggtgaaaccccatctctactaaaaatamaaaaattagctgggcatggtggcacatgccttaatcccatgctactgggaggcagaggaagcgctcgaactggcgagacagagattgcagtgagtcaagatggcgtcactgcactctagcctgggcaacagagtgagactccatcttaaaaagaaagtttccatcattcaattatgttgtaatcaaatgttacttccaacaaggcaatctgattaggaaacatacatccttcatcacctctggagtctgagtaaagggatatggaaaaagcaaagaacaccagtgtacaagatgagatttcagcctacatcagccgcaccaccttgaaccaacatgctgtctcattttcctcatttgcaaaatgaggacgatggactagagggtctctaaagtcccttttaatgctatgattttaagagaaata

SEQ ID NO: 781345 - DNA, 602 bp, Homo sapiens
atatatatgtatatattttgagacagagtcttgctctgtcgccagagtagagtagcacaattttggctcactgcaacctccaactccctggttcaagcgactttcctgtctcagcctctggagtagctgggattacaggtgcccaccaccacgcctagctaattttttgtatttttagtagggacgggtttcaccrtgttggccaggatggtctcgatctcctgacctcgttatccgctcacctcagcctcctaaagtgctgggaatacaggcgtgagccacaaattggagtaaatattttaaattgagaagttttgtttttttgtttgtttgtttgtttgtttttgagatagtgtctcgctctctgacgcccaggctggaatgcagcagcacaatctcgactcactgaaacctccccacctcccgggttcaagcaattctcctgcctcagcctcccagctagctgggactacaggcatgtgccaccacaccgactaattttttgtggttttttttgttttgttttttgggttttttttaaagtagacacagggtttcaccatgttggccaggctggtttcaaactcctgacctcaggtgat

SEQ ID NO: 781346 - DNA, 602 bp, Homo sapiens
atatatatgtatatattttgagacagagtcttgctctgtcgccagagtagagtagcacaattttggctcactgcaacctccaactccctggttcaagcgactttcctgtctcagcctctggagtagctgggattacaggtgcccaccaccacgcctagctaattttttgtatttttagtagggacgggtttcaccgtgttggccaggatggtctcgatctcctgacctcgttatccgctcacctcagcctcctaaagtgctgggaatacaggcgtgagccacaaattggagtaaatattttaaattgagaagttttgtttttttgtttgtttgtttgtttgtttttgagatagtgtctcgctctctgacgcccaggctggaatgcagcagcacaatctcgactcactgaaacctccccacctcccgggttcaagcaattctcctgcctcagcctcccarctagctgggactacaggcatgtgccaccacaccgactaattttttgtggttttttttgttttgttttttgggttttttttaaagtagacacagggtttcaccatgttggccaggctggtttcaaactcctgacctcaggtgat

SEQ ID NO: 781347 - DNA, 632 bp, Homo sapiens
ttgcccaggctggaatgcagtggtgtgatcagagttcactgtagcctccaactcctgggctcaagtgatcctcccacctcagctttccgagttagctggggcacaggcacatgccaccaagcccagctaatttttataatttttagtagagatgggagtctcactacattgcccaggctggtttcaaattcctggcctcaagcaatcctcccacctcgctgggcctcccgaagtgctgggattacaggcaggagccaccacaccgggcctgtagctgcatctttgaagaacaagcattcctgcctttcatcagcctctgcctcgagccctgccttggtgggacctgcagggaacccccgcccagagacaccagcctgcagagctgcacaccaggagtctccaggtgttttgcaccagacactccattyatttatttatttatttatttatttatttatttatttatgacagagttttgctcttgtcacccaggctggagtgcagtggcacaatttcggctcactgcaacttccacctcccaggttcaagtgattctcctgcctcagcctcctgagtagctgggactacaggcgcctgccagcatacccggctagttttttgtatttttaata

SEQ ID NO: 781348 - DNA, 549 bp, Homo sapiens
ttggtattaaatggcttgcaaaatgcatgcagatgttgtttaaaacctacactatagaactgggttatcaagggaactggaatttgctttcacaataatgaaccagtcataagagtgagtagccacaatccaaaggctacatcagaaatgcaaacatttccatcataggacttaccaactgaagctgcagaagtctcagaaaacacggttttcatatacagtattttacacaactacatcttgtaaataaaaataaaatacattcattcagktataagaaaattagagtaatgcaattcttagttttccatatttagcactttagacagttcaccataagaaattgatggtaaatgctatacacttccctggcccatctggccactaattatcctaacatgcctttctatttatatgcaaaatcacaaacaataacaccagcagtgagaatatgttcccattcaacataatacacttatgccccataaaaatgaagaacttaccctctacctgcagagaaaggatccaactttccaaccattagtatac

SEQ ID NO: 781349 - DNA, 705 bp, Homo sapiens
tttcaaaaataaaaattatgaaagatgtaaaataaacttgcttccttatttgatatctccattgtattgatcagtgttctactgcaagaaaggaaaatcactctggctagttcaaacataaggaatttatcattggtattaaatggcttgcaaaatgcatgcagatgttgtttaaaacctacactatagaactgggttatcaagggaactggaatttgctttcacaataatgaaccagtcataagagtgagtagccacaatccaaaggctacatcagaaatgcaaacatttccatcataggacttaccaactgaagctgcagaagtctcagaaaacacggttttcatatacagtattttacacaactacatcttgtaaataaaaataaaatacattcattcagttataagaaaattagagtaatgcaattcttagttttccatatttagcactttagacagttcaccataagaaattgatgstaaatgctatacacttccctggcccatctggccactaattatcctaacatgcctttctatttatatgcaaaatcacaaacaataacaccagcagtgagaatatgttcccattcaacataatacacttatgccccataaaaatgaagaacttaccctctacctgcagagaaaggatccaactttccaaccattagtatacctgtttctgagtggtactcattcc

SEQ ID NO: 781350 - DNA, 621 bp, Homo sapiens
aaaattgtgtcagtaaaaactcaggatccatttacttctcaaaaatacaagtactaagctcattcaaatattaaaagaatgaaataaatggctgggttctctgtttactccatgctgtccctgttctgtcatttttttatttattctttttaatattctatttgaaatacattgacactttaggaaaatgctctcatactatgatacttttcaatgaacsaaagtcgcccaaattgcctttcctgacatatttattaactagtattcccttattttacctttactgttagaaaagaacagattcatctacaatatgatgtacataaggaggaagatggaaagaggaggtatcatttttaataacttctcatattattattaaccaattactccataaacaattatctgcataattagaaggacctgcaatatgatcagggtagagttaatttataactacccaggactacaaatggctaaataccaaataagaagtctctcccctcttctttgacttctagtattctcaaatggtgttgactatgccagaatttttgctcatatcaaactcagaagtcctcctttttcaaaaataaaaattatgaaagatgtaaaataaac

SEQ ID NO: 781351 - DNA, 541 bp, Homo sapiens
tgggtagaaatactgtatttattttagtgtgaatatattacaataatgtttgcacctggtttttcttttttggcatgagatacacatttactttaattgacatcttttataaagctgattgatattttatatttaatatcttaacactttgtggtttttcataggtgtagtagtttactgtggctgccataataaaataccacagactggatgacttaaacaatggaaatttattttctgtcacatctccaggctgaaagtccaagattaaggtgccagcagagttggtttctccggaggtccttctccttgcttcacagatggccaccttgtcactgtgcgctcacatggtctcttctcygagtgagtgtatccttggtgactcttcctcttcttctaagcatatcagtcctactgaactgaaaaccctgcccttattatctcagttaaaattaattacctctttaatgggcctatgtctaaatatagtcacactctgggttaaggcttcaacatactaatttttactgttatttggttc

SEQ ID NO: 781352 - DNA, 621 bp, Homo sapiens
aaaattgtgtcagtaaaaactcaggatccatttacttctcaaaaatacaagtactaagctcattcaaatattaaaagaatgaaataaatggctgggttctctgtttactccatgctgtccctgttctgtcatttttttatttattctttttaatattctatttgaaatacattgacactttaggaaaatgctctcatactatgatacttttcaatgaaccaaagtcgcccaaattgcctttcctgacatatttattaactagtattcccttattttacctttactgttagaaaagaacagattcatctacaatatgrtgtacataaggaggaagatggaaagaggaggtatcatttttaataacttctcatattattattaaccaattactccataaacaattatctgcataattagaaggacctgcaatatgatcagggtagagttaatttataactacccaggactacaaatggctaaataccaaataagaagtctctcccctcttctttgacttctagtattctcaaatggtgttgactatgccagaatttttgctcatatcaaactcagaagtcctcctttttcaaaaataaaaattatgaaagatgtaaaataaac

SEQ ID NO: 781353 - DNA, 621 bp, Homo sapiens
aaaattgtgtcagtaaaaactcaggatccatttacttctcaaaaatacaagtactaagctcattcaaatattaaaagaatgaaataaatggctgggttctctgtttactccatgctgtccctgttctgtcatttttttatttattctttttaatattctatttgaaatacattgacactttaggaaaatgctctcatactatgatacttttcaatgaaccaaagtcgcccaaattgcctttcctgacatatttattaactagtattcccttattttacctttactgttagaaaagaacagattcatctacaatatgatgtayataaggaggaagatggaaagaggaggtatcatttttaataacttctcatattattattaaccaattactccataaacaattatctgcataattagaaggacctgcaatatgatcagggtagagttaatttataactacccaggactacaaatggctaaataccaaataagaagtctctcccctcttctttgacttctagtattctcaaatggtgttgactatgccagaatttttgctcatatcaaactcagaagtcctcctttttcaaaaataaaaattatgaaagatgtaaaataaac

SEQ ID NO: 781354 - DNA, 652 bp, Homo sapiens
tgtgtcagtaaaaactcaggatccatttacttctcaaaaatacaagtactaagctcattcaaatattaaaagaatgaaataaatggctgggttctctgtttactccatgctgtccctgttctgtcatttttttatttattctttttaatattctatttgaaatacattgacactttaggaaaatgctctcatactatgatacttttcaatgaaccaaagtcgcccaaattgcctttcctgacatatttattaactagtattcccttattttacctttactgttagaaaagaacagattcatctacaatatgatgtacataaggaggaagatggaaagaggaggtatcatttttaataacttmtcatattattattaaccaattactccataaacaattatctgcataattagaaggacctgcaatatgatcagggtagagttaatttataactacccaggactacaaatggctaaataccaaataagaagtctctcccctcttctttgacttctagtattctcaaatggtgttgactatgccagaatttttgctcatatcaaactcagaagtcctcctttttcaaaaataaaaattatgaaagatgtaaaataaacttgcttccttatttgatatctccattgtattgatca

SEQ ID NO: 781355 - DNA, 621 bp, Homo sapiens
aaaattgtgtcagtaaaaactcaggatccatttacttctcaaaaatacaagtactaagctcattcaaatattaaaagaatgaaataaatggctgggttctctgtttactccatgctgtccctgttctgtcatttttttatttattctttttaatattctatttgaaatacattgacactttaggaaaatgctctcatactatgatacttttcaatgaaccaaagtcgcccaaattgcctttcctgacatatttattaactagtattcccttattttacctttactgttagaaaagaacagattcatctacaatatgatgtacataaggaggaagatggaaagaggaggtatcatttttaataacttctcatattattattaaccaattactccataaacaattatctgcataattagaaggacctgcaatatgatcagggtasagttaatttataactacccaggactacaaatggctaaataccaaataagaagtctctcccctcttctttgacttctagtattctcaaatggtgttgactatgccagaatttttgctcatatcaaactcagaagtcctcctttttcaaaaataaaaattatgaaagatgtaaaataaac

SEQ ID NO: 781356 - DNA, 631 bp, Homo sapiens
cccaaccccaacactcttctgctttggaaaaacactggcttaacaatttttccagccttgtaggttttctgcttctccccagtcccaagatccgttctcaatatgtggaggctgccgctgcgtgaatgaggtttaaagtgcttgaggggagccgcctcccaggctcttcccctaggtctccagcatcaggagctctgtcctaacagctatagcaaatctgggccagcagagggcactacggaaacagcctgaagctctgagggcctccatgcctccagaaagcatcttctgcaaccctcgccttaagccactctcctttacacagcccaggccagcccttatcttttacagtgttgtaattcccagggcgcaatgtacacacacagaagatacaytgcgtagaaacatacttggcgcatatttctcacaggaaggactagctgaaagaaacaagtctcttctcagtttctaccttctaagacaaaggagagatgcccttatctcagccgctcccctgcacctccctagccttgctggctcactgaggccttactctaagggtgttgcttccaagtggctagagactacagaagcaggcagtgttgagtcctgagcagcagtcttgggtctt

SEQ ID NO: 781357 - DNA, 633 bp, Homo sapiens
aactgttcttagaggatccctggtgtttagtattttatgagaaatgaacatgtagcaaaagtaaattcaagtttagaaactagaaaatgtctaatcaaacaatgtgaaaaatagaagagggcattaatagatgtaaaagcagaaattaactaaattaaattatgcaatcccaataggaaaacatggttctccctgagtctcttctgaagtgcagyccactcattcccacagccatgcttcttaggttgggcagtggaattcacagacatgtggatcatcctagactccactgcagagtccattgagtcatatcactaatacctcctcctcggaggagtcttgggtcatctgtctacccctcctcattgtttcacctgctgggctcccagcgactcctttccttcatggaagacttactcctgagtggtggtcttcttttttgttttaagctgctggacaacttcatggatcatgaccatgacttacccagaagtctgggttctagggaacatggaagttcgggtgaagtagaattgacttatcataactttcaccccaactcccatggtcaatctgtggccgtggtcatttcttagagttactccaattctgaaaacacccacatcctcacca

SEQ ID NO: 781358 - DNA, 620 bp, Homo sapiens
accatagtgaagggaatccaggacccaacaaagttggcaaagaaatggtaagaattccttactggtcagcctcccagtttctttctttccatgaactctctggtcgagtgaatggtaaaaaaaaaaaaaaaaaaatcactctctctcttttcctttccaaatttaagattagtgagagaaaacgttttatatgggactagttgggttttagcaactctgrtgtatttaatttggggtgtgaatatttatattgttttattactggaaaggggtcccaatccagaccccaaaagagggttcttggatcttgtgcaagaaagaatctggggcaagtccatagcgtaaacgaaagcaagtttactaagaaagtaaaggaataagagaatggctactctatatgcagagcagcccatttttatggttatttcttgattatatgctaaagaaggtatggattattcatgagttttccgggagaggggtgggcaattcctagaactgagggttcctcccttttttttttttttttttttttagaacatttagggtaacttcctgacattgccatgacatttgtaaactgtcacagtgctgttgggagtgtgccttagcatgctaat

SEQ ID NO: 781359 - DNA, 565 bp, Homo sapiens
attggttataaaaccaaaatttttcatatcattaaaaagaaacacaactgaaagcatagtgacacagaatgctgaaagtaaagagaaggaattaatatcccaaggaaatctgtagctatgttaatatcaggcaaatggaatattagatacaagggactattaagataatgtggggtgttccttacgaggaaaaaataccttacccaaaagacgctaaatctgtttgtgccaaatcatgtttcgtccactggatctgtccttcatgactttttctttgtatttctttttatcttttatactgcawttcagaagaacttctcaccttgctatttcagttcactagttttgattttaattttatccattttgccattcagaccatcttcttttcttttcttttttttttaacttttattttaggtttaagggtacaggtgcaggtttgatatacaggtaaactgtgtgtaatgtgggtttggtgtacagatcatttattacccaggtaataagcatagtacctggtaggtatttctgaacctcttcttcctcccacccttcactctca

SEQ ID NO: 781360 - DNA, 603 bp, Homo sapiens
ttctgtgtggcatttggtttgaagagcagagctagctgcaggtcagacatagattgaacatggggaagggggcaatagccacatagcaagttggggtgaggtcacacaagcattcctgaggcttggaagacccagctgagggtatcactgtgaagaccttggtggtctatgattctgttagcatgtgaaggtagagatttggattgggataggggatgatttcctttagaaggaaggcccgtttgtcctttgacgattctcatttggcaaaaactcagttttgcagaaasttagctatctgccttccccatgcagcccctgaggaactgagccctgggccaaatccatgcccaccctcgatgctgctggcagtctccctacgtttcttgggtcatgccactctcccaccctccagacaaccatctcacaccacctctgttctcctcaaacctccaggctccccattgccctctccttctcagcagatggccttgcttcctgcttcccagcagccagggactgtcagtttctacttaaacacacacaccacttcctaccttcgcctgttcatagaggcccgtccttctcctctccagagctcat

SEQ ID NO: 781361 - DNA, 686 bp, Homo sapiens
tgtttttccccacaaagtctatcttagaagaggagttgcaaatcccttgcaagggagggttatagttggatgccaaagtggtcagtttttgacctgggtttggtgtggggtgtgtccacagagctttagctttcagtgcatctgattctgtgaaagaaataagaacggagtagtggaaatgaactattgcggtaggttggcaagtaagtctggtgacgttagggagtaaactgggaggaagttccctaggctctgatctctgtaggatcacrggtgggagggcaggtttgatctctgcccttgtgaggaggttggatggagccctttgattccatccctacctccgctagctcagcatttacagcaaacagcacctgctgttcaggacacttcattatgccttcggagtccttcaggatcttgaggatcagagggtatctaagtttttctgccttataaaaaagtggaggagcttttcagagcattctagaataagagataagactagagtctgggaacggagtagaaagatgctcaaggaaggactcctcttccttgtttccacagctgggccacaagcccaggtctcttttgcctttgactgtacaacctgctgcctgggagttcctgggagggacaggtttcagagtgtgtccttgatggacacatagtagagccctgggatc

SEQ ID NO: 781362 - DNA, 615 bp, Homo sapiens
ggtgtgtccacagagctttagctttcagtgcatctgattctgtgaaagaaataagaacggagtagtggaaatgaactattgcggtaggttggcaagtaagtctggtgacgttagggagtaaactgggaggaagttccctaggctctgatctctgtaggatcacgggtgggagggcaggtttgatctctgcccttgtgaggaggttggatggagccctttgattccatccctacctccgctagctcagcatttacagcaaacagcacctgctgttcaggacacttcattatgccttcggagtccttcaggatcttgaggatcagagggtatctaagtttttctgccttataaaaaagtggaggagcttttcagagcattctagaataasagataagactagagtctgggaacggagtagaaagatgctcaaggaaggactcctcttccttgtttccacagctgggccacaagcccaggtctcttttgcctttgactgtacaacctgctgcctgggagttcctgggagggacaggtttcagagtgtgtccttgatggacacatagtagagccctgggatccaggaagtaacaagagggcacttcccagtccctgaaa

SEQ ID NO: 781363 - DNA, 776 bp, Homo sapiens
aggttcagggggaccagctataagaaagactgtcacaccacataaataatcacaagagataattacctctgctgctgccacatttctcatatatgatcataaccacaagaagcaatcatatcatcattgccaagttaaggataaagctgatggttggataatccaggcttatggaaaatggtcaagatttcctttattcaggggaccagaatgagacagagtgaccctgttatttctgacacatctcaaggttaaaaaggtttattttgctttgtttttcccagttattggatatgatgcacacccttgcttcaacagcaacagggaaaatgtaaactctgctttacaaaagcaaacatctattgagcatttcctttttgttttttgtagtcactgatacktgctttacaattcttatttaatccacacgacaaccctggcagagaaggaagaaggttacgatacttactttacagaggaagcacctgaagcccagagagggtgagaaacttgccagggtcatgaagctttaaataaatgacatgaaccagctttaaacccaaacagtctgaccccagagctgagttgatcagatgggtaagccaaggggtaggcattacaggcagaaggaacagcagtacaaaggtgtcatggacgggggtaatagaacagtatatggagggaactacaagaagtcagaggagaaaagaattcctaatctgggtgtctcaaggtcgaggagaccagtgaggatcctctgtcctaagactggtaag

SEQ ID NO: 781364 - DNA, 776 bp, Homo sapiens
aggttcagggggaccagctataagaaagactgtcacaccacataaataatcacaagagataattacctctgctgctgccacatttctcatatatgatcataaccacaagaagcaatcatatcatcattgccaagttaaggataaagctgatggttggataatccaggcttatggaaaatggtcaagatttcctttattcaggggaccagaatgagacagagtgaccctgttatttctgacacatctcaaggttaaaaaggtttattttgctttgtttttcccagttattggatatgatgcacacccttgcttcaacagcaacagggaaaatgtaaactctgctttacaaaagcaaacatctattgagcatttcctttttgttttttgtagtcactgatacgtgctttacaattcttatttaatccacacgacaaccctggcagagaaggaagaaggttacgatacttactttacagaggaagsacctgaagcccagagagggtgagaaacttgccagggtcatgaagctttaaataaatgacatgaaccagctttaaacccaaacagtctgaccccagagctgagttgatcagatgggtaagccaaggggtaggcattacaggcagaaggaacagcagtacaaaggtgtcatggacgggggtaatagaacagtatatggagggaactacaagaagtcagaggagaaaagaattcctaatctgggtgtctcaaggtcgaggagaccagtgaggatcctctgtcctaagactggtaag

SEQ ID NO: 781365 - DNA, 543 bp, Homo sapiens
cctggtcaagtcatccagtaatttacatgcatcatctcacctctgcctcacttcaactctagaagcagatactattttgttcccattttagatatgaggaaactgaggctttgtgatgttatataaccccaggtcacacggctaatacgtggcaatgttggactttgaacaaagctcaatcccatactcaaaactcactctgaaatactcctgcaataggtgacttgagtatttcaggacactgatgaaactggktatctgcgttcgcttgtcatccttctctatgtccctaaaaccatggtgaatggaaacgcacagatcagacacctgatttttgggacattccttccacagtcacttttgttgagtgagtggagaataactaccatgtttccagaatttgaagaatgacttggtgatgcctccagttctcaaaatgtttctcttggagttgattttaagtcctattccagcctcacttcccaccccatgacagaaggtgtggtgacttaggagtaaaaacaatgctagtaatctttataa

SEQ ID NO: 781366 - DNA, 697 bp, Homo sapiens
ggtcaactatactgtctaggctaatttcttagaaaataatgagcatagttaaggataactgagaaaatgtaaactatggagactgtatcccatgtcaaaattaaaaaattggtggattgatagggagagaggaggataagggagaaaatgtattttgccattgtagaaatcagaaatttgggccgggcacggtggcttacacctgtaatcccagcactttggcggggggatcacctgaggccaggagttcgagaccagcctggccaacatggtgaaactgtgtctctactaaaaatacaaaaattagctgggtgtcatggcagacacctgtcattccagctactcaggaggctgatgcaggagaatcasttgaacctgggaggcggaggttgcagtgagctgagatcgtgccactgcactccagcctgggtgacagagggagacttggtctaaaaaaaaaaaaaaaaagaaatcagaaatttgagcagtcaatgatgtgccctgggggtcacagtccccccaccccggagataatggatttggtgctttctttttgatttttcaaaataatactaaagtcattttcgcttccctctgaattactgcagtaaatttatatagggtggatgttggccttgccacagcaattatgtcgtttcgaagtatgccattgttttgtcctgcagctgaaaaatgg

SEQ ID NO: 781367 - DNA, 657 bp, Homo sapiens
gaacaggaaggagccaaacacaggcctgctggcgccaggagccgcaagattttccgttcaggttgtgtcgtctcagagctaagatgggtgcatgcgagtacttccccggccagttaacaaatgcgagcatccagtaccgtgcccatgactgtgggtgcagggagcagagtgtaggcagatgagcaaatggggtttgatgcctgaggaacaagaagtcttaggctaagtgtgtgagtacctgcaaaaatgagagaatagcacaagacggcatagctgagtaatacattgcatggttttgcttccaagtgccagcatctccgagtagtgtatctgacaccagcacactctggtgtcagaatcttgggtttatattctggctactcaaactgtgtggtcctgggcaaattctttaatcttttttgggtttcaatttccatagctataaaatgagaatagttgtagtatctatctcgtgaatttattatgagaattaaattattttctcygtggattaaaaaaaaggacttttgcccctgattcttgtttttgaatacagtcttgatccccagaagtgtggcagctctcttgtacacatgatgaagagtgtgaaggggaaaagttgatatgcaaacaatggtggatgagggggtgaagctg

SEQ ID NO: 781368 - DNA, 607 bp, Homo sapiens
gccattttatatataaattacatatatttttatgtacatttaagtctataagtctatctatccacctattgaaaatctaaaataaatctgtcactctcctaaatataacataaaattctctgttttcttccaataattttgtttaattttcccagagttctgtgatgaaattcagactgtttttgtcagagcaaagagttaatagtctagtgacatgtggagtagtaaaaacagagcttgcagctaaggaattctttttaagaatacatgaaatattttctttgaaacatrtttactgaatgcttactaagtttaaggaattgggattttttctatagttacaaaaataaacatcatagacatgaccattaactaccagcacttacattctagcagaggtaggaaactaaaaactggtaagcagacaaataaacaagatacttacaaatcataatacaccaagcaaggaagtttgttagaaaacaccatctcagaaaatgactgattgagatgagatgttggtgaacagcatcttgacccttgggtcaagtgacagtaaaggactcaggatgtacgcatggagaaagctttcaggaagtgggaccag

SEQ ID NO: 781369 - DNA, 483 bp, Homo sapiens
taatttgtgaacagaaacaatttcactttttcttttccaatttaaatgcctcttgtttaattgcctacttgctgtggttagaactttgagtaagtagggaaggtgggcatccttgccttgttcctatcttagagtaaaagctttccatctttcactattgagtatgatgttctctgtgggtttttgatatatgggttttattatgttgagatactttccttttatttatagattrttgagtgtttttatcatgaaaaggtattgaattttgtcaaatttttttctgagtcaattgatataagcctgtgtttttgtccttcattctgttattgtgatgtattacattgatcaattttgctatgttgaaccatctttgcattccaggaataaactgcacttaattgtgataaattattcttttaatatgctactaaattcagtttgctattattttattaaaaatcttcacatccatgttcataa

SEQ ID NO: 781370 - DNA, 519 bp, Homo sapiens
ctggaaggagaaaacactttcttcccctttttggaatattatattatccttcctgtaacttcttcctttccccctgctgctcaccccacttgcagggacttgggaaggaagatggtacttcactgtgcctttgaatctttgatctttactaatgttaatgccagtggttgcgtggttatctgtctagagagggaggtaacacagtagacaagagagggatacagtgaaataagrtattgtggttggatgagcagtatgctggaatggccaaagggatgccccatactcagttttaacttcaacacacttctgcaatgcaaagctcctctgacacccagattatcagtaactcctggtctgctcacaaggagacctcttggaagtgttgtctgttgacttacatgttgtgtatatgtgtgtctattttcctatgaaaatcaagtaaaggggctgggtttagacctatctatgcaagggcagaaataaaacaatgctacaagtcttgagtaaaaaacaaga

SEQ ID NO: 781371 - DNA, 519 bp, Homo sapiens
ctggaaggagaaaacactttcttcccctttttggaatattatattatccttcctgtaacttcttcctttccccctgctgctcaccccacttgcagggacttgggaaggaagatggtacttcactgtgcctttgaatctttgatctttactaatgttaatgccagtggttgcgtggttatctgtctagagagggaggtaacacagtagacaagagagggatacagtgaaataagatattgtggttggatgagcagtatgctggaatggccaaagggatgccycatactcagttttaacttcaacacacttctgcaatgcaaagctcctctgacacccagattatcagtaactcctggtctgctcacaaggagacctcttggaagtgttgtctgttgacttacatgttgtgtatatgtgtgtctattttcctatgaaaatcaagtaaaggggctgggtttagacctatctatgcaagggcagaaataaaacaatgctacaagtcttgagtaaaaaacaaga

SEQ ID NO: 781372 - DNA, 668 bp, Homo sapiens
gaacttccaatactatgttgaataggggtgatgagacagggcatccttgtctggtgccagttttcaaagggaatgcttccagtttttgcccactcagtatggtattggctatgggtttgtcataaatagcttttattattttgagatatgttccatcaatacctagtttattgacagtttttagcatgaaggagtgttgaattttgttgaaggccttttctgcatctattgagataatcctgtggcttttgtcattggttctgtttatgtgatggattacctttattggtttgcttatgttgaaccagcctttccaccccagggataaagacaacttgatcgtggtggataagctttttgatgtgctattcagtttgccrgtattttattgaggatttttgcaccagtgttcatcagggatattggcctgaaattttctttttttgttatgtctctgccaggttttggatcaggatgatgctggccttataaaatgagttagggaggattccctctttttctgttgtttggaatagtttcagaaggaatggtaccagctcctctttgtacctctgatagaatttggctgtgaatctgtctggtcctggactttttcggttggtaggctattaattactgcctcaatttcagaacttgttattggtcta

SEQ ID NO: 781373 - DNA, 626 bp, Homo sapiens
tattgattaataacttgctgtgattagaattgggtttgaatatttcaaatctgttcctagatttgtttcacttcctaagaatgattacttctacccttaaccatattgtttttctcaacatgcaacagcttaacaaatcagcagtgaaccttaaatactctgaaaaaggtagcattcttacattcagtacattttattttccttcctaataataggtaattccttygcattgtgttagttgtttcttgctacataataaattaccacaaacttgagacttgtggcaacagccacttagcacacagttctgtaaactgtaagcacactgggttgtttgttcagtgtatcaggctgaattaagatgtcttccgggctgagtccttgtccagaggctctgaggggaaatcacttccaaactcattaaagttgttgagagaattaggttccttgtggttgtagaactgaaacccttgtttcgctgctggctcttggtcagtgacccctctcagctcctcagggcctccaggttccttctcacgggccatccatcttcaagccagcaacagcgcatctttcccctggcactttgtacctctctggtgtcctcttctgcctccagtgagaaa

SEQ ID NO: 781374 - DNA, 658 bp, Homo sapiens
gttcctggacaatgcaggcagtataaatttgaatcccacacaatgatgagaataggtccatagttaaaaaatcacaggggaaactttatttagagtactgtcaaagacagtcaagtttattgttatctttatgtattctggtaatagatttcagcctttcactgaaggtaatgtccttcaaagggtcagctttatgtgagaatctgggttccaactacctttgtgacacaggctgaaggcccagtgttgtattcccacacattgatattcacatcctttgttccagagtgacaaactggcccacctgaggcacgaccgcagaggtcagcaaacttcttccataaagaaccagaggttctgtagattacactgtgatgtacaactgctcaacaccactgctaaagcatgaaaccagccacagacaacatataaacagattagcattgttgtgttccaataacattttactgatggacactgaaattttatttatttayttttttttgagatggagttttgctcttgttgccccggctggagtgcacggcgcaatctcggctcaccgcaacctccacctcccaggttcaagcgattctcctgcctcagcctcccaaatagctgggttacaggcatgcggcaccacacccggccaattttg

SEQ ID NO: 781375 - DNA, 624 bp, Homo sapiens
tgaatacatctcaaaaacataatattgatgaaaaagcaagtttcaggatatatacaacttttaaaatgtcaacaatctacagaaaaagattttctttcttaaaaaagaaacaggctttattccagcaaacagtttgcaaaccgtggagatgtaccttggtagaaaataaaggcgccttctgagagaacaaagaaaaggggttgtcatttacagagaaagttcacagtcaggttcccactctggtccactatacaaatgaggggtgcaaacttgttcagttctgattggctgaggcaggtcacagagtgtttgttaggtacaaaaggccaaatggtattttctggtagctgttaattcaggtggcataaataggaacagacagctatgaaagtcctaaagttactgggtgtataggttttccaggaatgcggagtacacatatgatctctacatgtctgcaaaggatcrcgtgggtctattttgaatttggactgttagccactcagaatctgccttaaagggttggttctttcagggttcacaaaaacatgcaatcaacgttctagattgtttgtggatctacacccacagcaaaagtatctgaaatgtgcatgggcatgataa

SEQ ID NO: 781376 - DNA, 527 bp, Homo sapiens; identical to SEQ ID NO: 746330

SEQ ID NO: 781377 - DNA, 527 bp, Homo sapiens; identical to SEQ ID NO: 746331

SEQ ID NO: 781378 - DNA, 594 bp, Homo sapiens; identical to SEQ ID NO: 734222

SEQ ID NO: 781379 - DNA, 596 bp, Homo sapiens
gtagcaattatccaggtattacattgaatgccttgggtgagcatctgaaacttgctggctttaggtgagactgagcacattattagctgcagtgattatagggcaaaactccttttgcttgagaaaagcagaaggaaaagtttgtcttgcacttcaggtactagcatagccacaggggagggtaggtcatgaagcaggctcttgaggtccctgattctgggacttgaatcttggatggcacttctgcacatgccctgggccagaagggagcccagtgccctgaagagtgagtcccaggaaggcagcatttgccacaagctgacttaagagctcttggaccttaagggaaaatctgcggtagtctggcagtactccttgkggccggctgtggcactggctatggatgctgaggctcctctgcctttggaaaggggagggaagagtgggaaggactacgtcttgtggtttgactgccagctcagctgcagtacaaaaaaacacttggtagacttctaaggtttgtttactctaatccctcactcctagatggcacctctggatccacccagggcctgagagacgctccagtgcaatca

SEQ ID NO: 781380 - DNA, 596 bp, Homo sapiens
gtagcaattatccaggtattacattgaatgccttgggtgagcatctgaaacttgctggctttaggtgagactgagcacattattagctgcagtgattatagggcaaaactccttttgcttgagaaaagcagaaggaaaagtttgtcttgcacttcaggtactagcatagccacaggggagggtaggtcatgaagcaggctcttgaggtccctgattctgggacttgaatcttggatggcacttctgcacatgccctgggccagaagggagcccagtgccctgaagagtgagtcccaggaaggcagcatttgccacaagctgacttaagagctcttggaccttaagggaaaatctgcggtagtctggcagtactccttgtggccggctgtgkcactggctatggatgctgaggctcctctgcctttggaaaggggagggaagagtgggaaggactacgtcttgtggtttgactgccagctcagctgcagtacaaaaaaacacttggtagacttctaaggtttgtttactctaatccctcactcctagatggcacctctggatccacccagggcctgagagacgctccagtgcaatca

SEQ ID NO: 781381 - DNA, 600 bp, Homo sapiens
agtccttttggacctatgaaaagacatagacacacatagaacaatagtaggagacttcaacacctcactggcagtgttaagcagattattgacgcagaaatctaacaaagaaattctggacttaaacttgacacttgaccaagtggacctaatagacatctacagaatactccatccagcagccgtagaacatacatttctcttattttcacatggaacatactctaagatcaaccacatgctcattaataaagcaagtctcamatttttaaaaaaattgaaatcatactaggtgcactctcagaccacagtgaaataaaaatagaaatcaatatcaagatccctcaaaactatacaaatatatgaaaattaaacaacttgctcgtgaataattcctacccaaagagcaaaattatggcagaaataagaaataattaatgaaaataggaacacaatttaccaaaatctttgagataaacgtaacgcagtgttaagaggaatgcctatagcactaaataccttcatcaagaagttagaaaaaactcaaattaatgatctaacactgtacctatagaaactaaaaaacaagaacaatccaat

SEQ ID NO: 781382 - DNA, 660 bp, Homo sapiens
aacaaccaatgggtcaaagaagaaacaaaaagagaaattaaagaaatatcctgaggcaagtaaaaacggaaacacaacttaccaaaacttatggattgcagcaaaagcaatactaagagggaatttatagcaataaatgtctccatctaaaaagaagaaagatctcaaataaacaacctaacattacacctcaaataattagaaaaagaagaacacactaagcccaaagttaacagaaggaagtaaataacaaagattgagccagaaataaatgaaatagagactagaaaaacaacagaaaagatcaatgaaactaaaagttgcttaaaaacaaaaaagataaaatcaacaaatctttaactaaaccaagagaraaagagagaggactcaaacaaataaaaccagaaattaaagaggacacattacaactgataccacagaaatacaaaggaccgtaagatactgctatgaacaattatacaccaattaattgggtaacctagaagaaatggataaatttctggaaatataccctttaccgagactgaatcacgaagaaatagaaaacctgagtagaccaataattagtaagaagattgaattagttatagaaagtattccatcaaggccaggcgcggtggctcacacctgtaatcccag

SEQ ID NO: 781383 - DNA, 602 bp, Homo sapiens
agaaaggctttattgcccccttcatttctgaaggacaggtttgcctggtattgtattcttgattggcaggttttttttttcttctttcagcactttgaatatatcacacactcccttctggcctgcatgatttctattgaaaaatcggcttatagtcttatgagggttctcaggtagatagcaagtagccattttcttgttttcaaaatcctctctttgcttttaacttttgacaatttatttataatatgtccttggtttgggcatctttgggattatcttatatggtgttcttggtgttctttgggcttcctgaatctggatgtcwtatttccttccccaggtttgggaatttttcagccattatttctctgaatgagttttctggttctccttctgtgagtttcataatgcatatattgccacttgatgttaccctgtaattctcttaatatatcttcactgttttttattctttttttttcctttttgctcctctgactagaggatttccagtgagctgtctttgactttacttctcctttcttctgcttaatcaaatctgctgttgaaacctcatattgaatttttcagttcagtta

SEQ ID NO: 781384 - DNA, 627 bp, Homo sapiens
ttgctggaagaatccatgccatgtctccaagactgctcttgtctccagttagggaagttctctgcctctaagagcatatgtgattagattgggctggctcatctattaatttcagataatctccctattttaagatcagctttttagtcaccttaattacatctgcaaagccctttcatagtagtgcctatatttgagtttggttaaataaccaggtgatgagtatcttcggggagatctttagaattctgactatcacataaccagtcatccatggtggtagccaacttgacaacccgtctttgtattagctttctatgctttcctgctttgctttcactatctcttacctttacttcctagatcatagctgccaataaagtgttggagtttgagctttgtctcaggctctgcatattggggaacctgtctayagtacttgtagtggacctttagagtaggcttcaggatgggattctgaaactggtttgctcacaagtcagatggccataagggacccattcctgaagtcatgcagcagcatggcataacctctggcatttcaattaccgaagttctcacctgtggtttgatgcagtgagatacaggtggcaaataagattgtag

SEQ ID NO: 781385 - DNA, 611 bp, Homo sapiens
ttttcccataggaaaaatggctaaattaaaatatgaaaaaattataataattgctaaaactcacatatagttagtatacaccagactcctttctgagtactttatagagcattactttgtataatcctcacaataaccttatggggtaggttgtgtatcactcatatcaactactgttagagattatgtagcatagagatatacattgtggaaacttgaatcaacctgcctaggtaaaaacckagcactgtagcaaaacaacactctgtatgaacttgagaaaattacttattcgctctgcgcatctcagtgtcctcattggtaaaaagcagaattatatagttcattctacaaacttttttttttttttttaatcttggatgttatgttgcccaggctggtcttgaactcctagcctcaaacaatcctcctgcctcagcctcccaagtagctggtattacagttctgagctaccacacctcactcagcaaacatttatcaaatacctaccacatgagtatcacttagtccctactttcaaggaattcaccactttctgaggatgagagacatgttcaactaaacaaaagccgttcttcaggactataaag

SEQ ID NO: 781386 - DNA, 506 bp, Homo sapiens
atgcaatgggcagagaaagtaaaaatttaggtaccagaccattaatattatattaatattatgatattacattaataggataagctatcaatagaaaaagattggataggattgtagaaaaatatatatttctatgagcagatctgataaaactgtacagagrtttgccagttgggtatgaataatcaagaattcaacaaatatttgagggtaactacttttatgaggctaggcatgatttatataattttatgatatgaaaatatttccaatattggttctcttctcctattaggttggtgcaagagtaatcacggtttttgttattaaaaagtaagaagttttttacaatctaatattagatcttaaatatcatcctaaaaaataatctggccaaggtaaaaacattctctccaaaaattttattacaataaaaatgctagtgatctaggaggaggataaaatgcaccaaattaaatatttttagaacttattatttattctct

SEQ ID NO: 781387 - DNA, 630 bp, Homo sapiens
ataataatattctttttatggctgaaaatattccatcatgtacatacaccacattatcttcatacatccattgatggacacttaggtcgattccgtatcttggttataaatagtgctgcaataaacatgggagtgaagatatctctttgatatactgatttcctttctttgggatacatacccagctgggggattcatgaattatatggtagttctaattatagttttttgaggaatgtccatattattttccataatggctgtactaatttatattctcaccaacagtgtacaagtgttccccactttctccacactgttgccagcagttgttatgttttgtatttttgttaatagcattctaactaggatgagatgatatttgatttgcattttcctgataattaggtatgaatgatgttgagcatttttccatatacccagccrtggtgtcgattttaagaaatgtctatccaggccttttttatttttaaattagattttgttttgttttgttttgtttgtttgctacccaatggtttgacttccttatatttgctggcaattaactctttgttgggtggatagtttacaaatgttttctcccaagaagttgtctcttcactttct

SEQ ID NO: 781388 - DNA, 641 bp, Homo sapiens
gcaattaataataatcatgggcattaacctaagataccaaaagaaaaaaaaaaacctgaaagtcagatgatttgaagatccactaatcctaatgtgctttttacaattagaagcagcaaatttgtattggaataagggatctaaaaaaagatttccccagccagccttatgtataaaagtatgtttccctagaaaccaagaaaaatatgcayagaaatatggatggtttagactgtttctttttggttgggggaattggggattttgttgcactctagcaattccaggtctagatttcataacgctttcattctctctttctctcatgaggatataaagccattgggataggttgctaacacaatttctatttttgtccctcaaaaacctggtattattgtctcacaaatctaaggtttgcttttttaacatcactgtaaatttcaaggtcttttgattcttcccgcatagacgtgtttagttatgccatagaaagacaagatgtattacattaagcaacatttccaacatttcattaaaaatcttgcactgaaaaaagatacttaaatatctcctttagggatgtccttacgtccttttaaagctttatgtgtctgtttaataagtgaaatataaatatg

SEQ ID NO: 781389 - DNA, 634 bp, Homo sapiens
attttaaataatttttttagagattttaaagagttttcaagtgttcagcttcttaagtcatagagaacagaagagatttagggagtaatgtatatgtcttacaaagtattttatgttatacttaagttcatggatcacatacaaaggttttaaattagacaaggatttgggcccaagggaaaagaatggtcatatttacacaacataaaactcagttatyttgttcattttgataaataatgagaaatgagctaatagtctaacctcaaactcacttttttttgttgtttgcaagctattatagacttcatgctcttataaaataaccagttttttttccacagtttggtaatattacaatataaaaatttgtgagaattatgtttttacaaattgaaataaaatttccagcacaattcatatccatgatctgcttttgaaaagaataaaatacacaatactgcatctttttgttaaaatgcataacagtttaatgaatacttaatgattgtagatatcattatgttatgaactcttattttttatgatacttttttcttctttgttgccattgctatatattaaaaaatataagtaatgattagaggagaattctaatcgtttgataattttc

SEQ ID NO: 781390 - DNA, 649 bp, Homo sapiens
atcatcaatgatcttaataaattacaataattttatttgcaagttttatcatcccctcaccataatggttatagacacactgatacggcctgtgcttttagtcaaaattactctaatacttggcacaatcaacctgatagatatgaattcacctaaaaaatttcttaagagaaaatttaartatctaataattaagaatatataattttataagggtcataaagaatgagtactagttcatatcagagctttatatctggtctaagatgaaaactgcgcaagtttaaagctattgcaggcatatatttttgaagggtatcattgagattcaccttgctttctctcatactccacatccacaggacctgcagatcctgttccctcttccttcaagattcatttagcatccaattcctttcttgccatcctgatataaggtacaatcagctgcccccagaattactgccatgctattctaagtggttttcctcattctgcctttgcttcctatgttcagttatcaacagagaacttcaaggatacctttaaaatgtgagtcaggtcatgccatttctctgctcagaagcctccaatgttttatcatctcaatcagagaaaaagcgaagttcttaaaatgtcctacaaggta

SEQ ID NO: 781391 - DNA, 629 bp, Homo sapiens
ctcagcataaaacaggttcattaagaaaggttctgcaataacactctatgtaagagtttatggaaacaattaatagaataaaattgatgtaacattttatgtactactgcattttacatattctaaggcaacgagaaggctttaatacatgaaaatcatcaatattttacaatgaaaacaatatctaaagttactcttattaccacagaatacaaacaaaataagttactttaattggccattacatcttcattattggaattatctagtattaacaaaatatttcattttggaatgtttatgtagctattacagggagtagtgctatttaaaaataaacamctgtttcttgtcttccctataaaatcttctagctcagcaatttaaaataagctgatgttgctttttcagtatcatttgcaattttctgcatgaattcttaacaatttcaaaaacaatgtactatgtgtggggttgtaggaattgaaaaaattttctcctatattctcatatcaatttgagcagataaatttattttttagacgatttgcttccaaagagattgctattctcttttttgtttcttatggctcatacatacacctataagatattaaaaataatttaaa

SEQ ID NO: 781392 - DNA, 629 bp, Homo sapiens
agcgcacagaaaaatacataatattataacactgtaacagcagtatgtaaactgctagtatcttaagtagaaacactaaactatgaaccaattaagaattgtaactataacaaccttttaagacagatagtagagtaaattataaatagaaacaacaatgttaagaagtgggaggatgacattaaggcatagagttttcattagtttactttttgcttgtttgtttatataaacagtgaggtttttatcagcttaaaataataaataaggttgtatttgcaagtgtcatggtaacctcaaaccaaaacaaaaaccagatacataaaaaataaaaatcaagaaattaaagcatactaccagagaaaatcaccttcagcgaaaggaaaacatgaagaaaaggaagaagaaagaaaatactacaaaaayaaccagaaaacaaataacaaagtggcaggggtaagttcttatttaccaataataacattggatgtaaatggactaaactctccaatcaaaagacatagagtggctgaatagattaaaaaaaaaaaaaaaagaccaaatgatctgttgccaacaagaaacacatttcacctataaagacacacgtaggatgaaagaaaaagtga

SEQ ID NO: 781393 - DNA, 629 bp, Homo sapiens
agcgcacagaaaaatacataatattataacactgtaacagcagtatgtaaactgctagtatcttaagtagaaacactaaactatgaaccaattaagaattgtaactataacaaccttttaagacagatagtagagtaaattataaatagaaacaacaatgttaagaagtgggaggatgacattaaggcatagagttttcattagtttactttttgcttgtttgtttatataaacagtgaggtttttatcagcttaaaataataaataaggttgtatttgcaagtgtcatggtaacctcaaaccaaaacaaaaaccagatacataaaaaataaaaatcaagaaattaaagcatactaccagagaaaatcaccttcagcgaaaggaaaacatgaagaaaaggaagaagaaagaaaatactacaaaaataaccagaaaacaaayaacaaagtggcaggggtaagttcttatttaccaataataacattggatgtaaatggactaaactctccaatcaaaagacatagagtggctgaatagattaaaaaaaaaaaaaaaagaccaaatgatctgttgccaacaagaaacacatttcacctataaagacacacgtaggatgaaagaaaaagtga

SEQ ID NO: 781394 - DNA, 587 bp, Homo sapiens
gtcatgattgagagaagttatttacaaatatacatcataaaaaggcttatatgtagaatatataaaaaacatttacaattcagtaatatcaaaacaaacagttaaatgaaaaagggtaatcatcttgaacagacacgtcacaaaaaatatctatatggacaataagcacatgaaaagttactcaacatcattagttaccaaggaaatgcaaatataaccctatgactatgtcagtggaggcaaaacaattattcaacaaaatttggtacttatgagtaataaaagttcttaacacactagggtagaagaaaatgtattcattttcatagagggaatctatcgatacctacagctaacagactacttaacagtgaaataataagagactggaaaaaggcagggatgtttgttaacaccagttgawacttgaggtcgtagccagtaccataggcaagaaaagaaaagaaaatgaatacagattaaaatgaataaggcaaactattttacttgtaacataattgcatgtgtcggaaattctaagaaatgccttttaaaaacttactagactaaattaacaatattgcagg

SEQ ID NO: 781395 - DNA, 641 bp, Homo sapiens
aaaatattttgatacttgatattttatatatctgtctggtatattagcccattaacggtcagaaagagagtgttactatattgttaaggcattagataaaattctaataaagacaataaaagtagtagcttccacatgatttagtaaatggagttgcactacagcaaatttactcttaatcactgaaaagctaccaaaaagaacttgattttggctagggttactggctgaaatcttcctcctatggatcaataggttcaacctgaattcccaaccattttccttgctgtataacttttcctattgatgcatacatcactttgactttcaaaaataacggtcaagttatactaaagacagatgcttgctattagtagcaggmaattacttagtgaatttgtttttatcagattgtcagttaccttctggttatagtggatcagctttcatttcaatttaaataagtaagtctatggcagaatacagaatgtactggtggtaccaagtcctttgtaatgtttttcttctaggtgatgcacattgtttcccgtccataaaaccttcattaaatggtgcattacccttaagaagatttgataacagatctcatcctgccccttattgcttactgttgaacactt

SEQ ID NO: 781396 - DNA, 583 bp, Homo sapiens
ttatacattctgattatattatgccacagtgaagtactttttgtaatgtattttcatggggattacttataatgtatatctggatttctaactcccttgctaaactggggacgttttcatcaattattgccttaaataggctttctaaacttttttatctcccctctttggaataytgataatacataagtttagttgctttaggtagtccataatgtctcaaagtctgtgattcttcttttttcttctatttttctttttctttttatctgcctggattattttaaaagattggtcgtcgagttctgagattctttcttctgctaggtctagtcgattactgaagcttcaaatgtattttgtatttccttcaatatatttttcagttctagaatttcttttttttttccccagcatagctatacccctggcaaatttctcattaataccctaagttgatttttctgattttataaatttgttttaaattatctcgcctttcattgagcttctttaaaatccatgttttgaatcatttatctggcatttcaaggatttgttttgtgttgagatctgttgctga

SEQ ID NO: 781397 - DNA, 497 bp, Homo sapiens
taccagctgtcatattttaattttatctttcctgcaacaagttcatgtttcatccaagtctgcaaaacctgactgactgcaaacatgagtattttgttgtaattgaaggagttttcacttgttttagtgctgctatgtttgaattccacagcacagcttgagacaagccttggaaccttctatgctccaacaagaccacttytggattccactatattggaatatagagatcaaatcagcaaatatgcaaggagattcttccatcacttgctcaggtgaatgatatgtttggattgattagcgtcagactaattacttatttcaggagacatcctctttaattaaaatattccatagtaaggctatgtgtttcctaacagtccatctcctcaaagaaatatacatcttcttttggtcttatttaatttgttattgttttcattttaaggaaatatttgaatattatttgggggttttatataaccaatactttttaa

SEQ ID NO: 781398 - DNA, 650 bp, Homo sapiens
ggaactattaatctgtggatttaatttatgcttaaagaactcaactatatatgctctggggagagaatgagaagggggtgtgctgggcagtgggggagacagagagcaagtgagactgatttaaatactgaggcattctgtccctgagtgagcatgaaatgaaagatgtgaaatctgttgcctctgtgatggctctctgttcccacatgcctctcaaagtgtgagcttctcacagccctgagtgtgattctgctgttaacagagatacctctttctttatacaatctgtcccccaaacacatgtcatctccttcatctggtgctcaaactgagaaagcagsccaagccttcaacgaagcagaaacagctgcctggaccacatattcctgaaaatggtctgtcagtctccagcgtggcaccttcccagggatttttcaggggtaacttgggctttaagccatttttgctctatgagctacctttagatggaagccccgggggagctgctcttgcactgtccttgcattattgctctgtataagcatcttagtcccctccttgactccttaaggataagtacttgaagtgaggctaaatcctagagggaatggccttgccctgcctcacccttccctagaaattagggtctt

SEQ ID NO: 781399 - DNA, 601 bp, Homo sapiens
caggctggccacaaattcctgggctcaagtgatcctcccacctcagcctcttaaagtgctaggattacagatgtgagccactgtatctggccagttcatttcctattactggttcattgtaaaggatacatctcagaaacagccaatgaaagagacgtactttccggatgcggtggctcatgtctgtaattccagcactttgggaggctgaggtgggaggattacttaaactcaggagtttgagatcagcctgggcaacatggtgaaaacccatctctacaaaaaattagaaaaataaaaataaataaccgggtgcagtgttgtgcatctrttattccagctactagggaaggtgagccgagaggatgccttgagctggggactggggaggcttaggttgctgtgagctgagattgtgccactgcactccagcctggacaaaagagccagaccctgtctcaaaagaaaagaaagatgcccagggcaaggtaagttaggaggggcacagagctcccatgtcctctgttgaacatgccaccttgccaacatctcctgtgttcagcaaccccagaagctctgcaaaccccattcagggtgttta

SEQ ID NO: 781400 - DNA, 596 bp, Homo sapiens
tggtaggtacataatgggtttttgggtgtaattgaggtaggtgtcatacacaataaaatgtaaaaatgtatagcctgaaaaatattttacatataaatatctaatcactacccagatgaagatatagaatatttccatcactccagaaagttctctcatgttcctttccagaaagaagctgctattctaaccacactgttttgacttcggccactatacatgcattttgcctgtttttgaacttcatataattgggctcagacagtatggactctcctgtgtctggcttcttttgcccagcataatttttttttttttttgcactttatccarattgttggctgtatcagttactctttttttcttgctgagttctgttgtatgattatattactctttgtttattcattttgtttctgattgtttctaggttttggctattgtgaattaagctgctatgaacattctcatatatactcatttctcttgggtatatatctaggagtggatttttgggtcttggggtaggtgagtgtttattagaaatgacaacagtttcccaaagtggttgtactagttgtacactccactttggt

SEQ ID NO: 781401 - DNA, 608 bp, Homo sapiens
gaggcctcttttttgcctggtgggtcagcaggtcctgtctgtacaaatgatgtttactggtccactcctccaggtttataaaaatgagcattttctctgtactgacaataatgaaataaggaaactgaggcttggagaggcaatatagccccgcccgaaatcacatgggtaataagtcagagaactagaattcaaactccaagtctacctcctggacccaagctcttaacttctgtgctatgaactaataccacatggagaattttgattattttcttagcatttaccaccatataacttaatatgtattatacttatttatcttgggatgtcacttctgggattaggtttcaaaaaggactgtgaaactgtctctcattttctttttctgtctcttcctctttcccctccctagccctggrgtaagccagctgcttcttatgaagaggtgcaagtggacaagaactgatgtctccagcccacagccagagaggacctgaggcctgccagcagccgtcgaagtgagtttcaaagaggattctgaagccttgagagagctgcagccctggctgacaccctgattgtatcctcgtgagagcctgagccag

SEQ ID NO: 781402 - DNA, 621 bp, Homo sapiens
ccatctctgtaaaaaataaaatttagccaagtgtggtagcgtgcacctgtggtcccagctactcggaaggcaaaggcgaggattgcttgagtcctggaggttgaggctgcagtgagctataattgcgccattccagcctgggagacagggtgagattctgtctcaaaaaaagaaaaaataataataaaactgtgggggaaggacactcaaaccccctackggaagcaaggcttcctcattccatcatattctgctcatcctccaaggctcggctaaggggcctgcctctccaagaaacttcccagccctcagcccccttccttcctgttttcgcagcactcggtgtcacctcgtcctgcccaactatgtagcgtgcagggcctccatcttccacatgactgcagaaccagagagctctggtggtatctggttccatgtgtccccactggcacctcgcctgggacgttgtctgcactgaccagtgctagcaatcaaaatagcaggcatgctgaccatgtgctgaggctcagtacgcagcactggtcagctatgatttcagctcagcctctagcatcccgctggggtagcttaataatccctggatttcacagatggaaaatg

SEQ ID NO: 781403 - DNA, 454 bp, Homo sapiens
tccactcctgttctcataacagcgtctcccttctccatcctttccctgctccgttcatgtcgtttgggtggggcatgtgagccaggactgggcagtgagaatccctgtgattggttcagggctgggcacctggccagaaytggccatatggatttgctctggatcttctgcttgagaaaagaggctcactctgagctctgagtatgctgcactgatccagtggtgctgcgggggccaaccctgagtcagctgaaggaaaacatgcttgtatataaagccagaacagagaaaccagagctgagagaagataggctgattcctgatgtctgagcaacttgttccaggcagaaacaagctcctggatgagtcaaacctttttcccttttgcttaagctagtttgagttgggtttctggcatttacaaccactggtgctgacaaacacaaagaaagaa

SEQ ID NO: 781404 - DNA, 577 bp, Homo sapiens
ggcacatgaatatttttatattttaaaagtcatatttattgcttattagatatattagaaacatattggaaaatgataactagccatatataaattaacagtttcatggatattaaatgtagatttaaaatttgagctagtttaaggaaaatacaaataaaaaacacaagtggctcacagatttggcaaaaatcacgcagaaattttatgtaagactgaagtgggagaaacactgttacattaaatcaagatatactcatattaaatgtgttcttttgaamaacgtaatcaaccaaatagaaatcaaaccagaaggctcaaataaggactaggttcaaaacgaacctgaaatggttagtttttagagctttatttatttctatatatttgtgtagtatgtgatattttgccagttctggaaacatgatcaggccttgttgagccaaaggtaattttaaaatagtagctgtgacaatttttgaccacatagtaaaaacacagtaagaatgatatattgccatccaataaacagccacttctccacatgttaaactgaaaaatatcaagatatactctt

SEQ ID NO: 781405 - DNA, 618 bp, Homo sapiens
agcctgaacacaataaaaacacaatcgagctccagtggaaacagcagggagctttcagctcacagatatggagaggtcttaaaactttagtgtctacctgtagcgatctggaccttgccaaggagggctctacctcaagccactagtcatgattgggagagcatcgcattgtgaccaaatatgactgagcttggaggatatcaaagtgttacaaaaggaccatggaaaaaatccaggatttttacttggaaataaagaaaccttaagggatatgttacaacatgaaaaagaatgaaaactggggcttcagraggctgaattatatccggtgattggaaatgtaagaataaagaactccattaactgctgaagccgtcaacaacagcaaaaaagtaaagggctgccttatgaaggaacaacattttgtccaagaaatattcaagcagaggctgaaagatgagtcctcagtaagctatagaaggaattcatgagcagtatgataagcaggtgtgtgtggttccttcaattctatcatgcaagatgcatttctcaactgtaaggctctgtacatgaccacacaccataggaaaacccacccatttgcataagtaagaggaa

SEQ ID NO: 781406 - DNA, 576 bp, Homo sapiens
tccactaaacttggagttcctagcaggcagacagcactcattatttttctaaacccagagactgggacttagcaggtatttaatattttgagaatggtctattcttgatgcctactctggcaggaccttatgcttatataactcgctaccacacgctatgaagctcaatggttctatttacagaacacttggagaaagccagcttagcctgtggtgtccatctagtggttgatagaggctgtggtctcaattccttttcactgtgagtcattgtgttggtttaaagctcctggctggtgatatttagggctaaggatgttggcttttgagaatgaggctgatcaatagcctagtgtrgagagaaaacaggatgtaagcatttggtcttccacagtggctttttaggggctgctgtcttccctccttggtggcaggaattactccatcaacaaatatgggcacagatgcctgcggggagactccgttcttcagaaattgaggaactcattcatgctgaattaattaaagtcatccctcagtatccatgagggattggtttcaggacccccagaaaat

SEQ ID NO: 781407 - DNA, 534 bp, Homo sapiens
cagtaagcattagacaaggacttggtgtttcaccagtgaagcagccctcttttaggctcctgactgaagcacattcctccactatctggataatttggacagcaatccagatggaatgagaaagaaggtgatgtttcccaggccaacccaattgggtatatcaacttgggtgaccaatgaagtgacaaattaccacataataatgttcatattctgactttaagcataataataaacaacatgtgcttgcaatttgatacagggctcaayagcaataccccaaatcatttggagtgctggatgtcagtaataaggaaaatgatatagcttcctagagtaaaattttgacataagcctgtgcccagtaactttcaggtttttttcctcagcataagaatgaattttcaattaaatttatatgtagaagctcaagatataaggcatataacagtggaatgtgtttgtttgaggcagaggtaaaggaaaaaatcagaaaacagcctgctcagagttcccactggagctatccttgaa

SEQ ID NO: 781408 - DNA, 504 bp, Homo sapiens
ttaaaaagtattggttatataaaacccccaaataatattcaaatatttccttaaaatgaaaacaataacaaattaaataagaccaaaagaagatgtatatttctttgaggagatggactgttaggaaacacatagccttactatggaatattttaattaaagaggatgtctcctgaaataagtaattagtctgacgctaatcaatccaaacatatcattcacctgagcaagtgatggaagaatctccttgcatatttgctgatttgatctctatattccaatatagtggaatccaraagtggtcttgttggagcatagaaggttccaaggcttgtctcaagctgtgctgtggaattcaaacatagcagcactaaaacaagtgaaaactccttcaattacaacaaaatactcatgtttgcagtcagtcaggttttgcagacttggatgaaacatgaacttgttgcaggaaagataaaattaaaatatgacagctggtacaaaaac

SEQ ID NO: 781409 - DNA, 506 bp, Homo sapiens
agcaccatttattaaataggggatcctctccccattgcttgtttttgtgtcaggtttgttgaagatcagatagttgtagatgtgtggtgttatttctgaggtgtctcttctttctcttccattggtctatatatcagttttsgtaccagtaccatgctgctatggttactgtagcctttagtatagtttgaagtcaggtagtgtgatgcctccagcgtgttcttttggcttaggattgtcttggctatatgggctcctttttggttccatatgaaatttaaagtaattttttctaagtctgtgaagaatgtcaatggtagttttatgggaatagcattgaatctgtaaattacttctgctttgcctactttttaacgggtttgtatttctcttgtaaatttgtttaagttccttatagatgctggatattagacctttgtcagatatacagtttacaaatattttctcccattctgtaggttgtctgtttactctattcatagttt

SEQ ID NO: 781410 - DNA, 506 bp, Homo sapiens
agcaccatttattaaataggggatcctctccccattgcttgtttttgtgtcaggtttgttgaagatcagatagttgtagatgtgtggtgttatttctgaggtgtctcttctttctcttccattggtctatatatcagttttggtaccagtaccatgctgctatggttactgtagcctttagtatagtttgaagtcaggtagtgtgatgcctccagcgtgttcttttggcttaggattgtcttggctatatgggctcctttttggttccatatgaaatttaaagtaattttttctaaktctgtgaagaatgtcaatggtagttttatgggaatagcattgaatctgtaaattacttctgctttgcctactttttaacgggtttgtatttctcttgtaaatttgtttaagttccttatagatgctggatattagacctttgtcagatatacagtttacaaatattttctcccattctgtaggttgtctgtttactctattcatagttt

SEQ ID NO: 781411 - DNA, 622 bp, Homo sapiens
ggactaaattgcaacacttgaccaattggacctgatagacatataagagaatactccacccaacaaccacagaacatacattcttctcatctgcacaagggacacactgaaaaactgacaacctccttagccataaagcaagtatcaataaatttttttaaaaatcaaaatcataccaactatacacttggactacattgcaataaaaatagaaatcaataccaaaagttctcccaaaaccacaaaattacatggaaattaaacaacttactcctgaatgacttttgagtaaacaatgaaattaaggcagaaattttaaaattttttgaaatcaacgaaaacagagacacaacatacaaaatctctgggtgaaaggaatgttaasaggaaaatttcccgcagtaaatgcctacatcacgaagttagaaagctctcaaattaacaatctaacattgcacctagaggaactagtaaaaaaataacaaatgaaccccaaaggtagcagtagaaaagaaagccaaaatcagagaacagaacaaaattgaaacacaaaaatccatacaaaagatcaatgagaccaaaagttgttttctgagagaataaacaagattaatagagtgct

SEQ ID NO: 781412 - DNA, 590 bp, Homo sapiens
gcgggcaaaccacttcaggccaggagttcgagatcagcctggccaacatggtgaaaccctgtctctactaaaaatacacacaaaaattagctgggcgtggtggcgcatggctgtagtcccagttaatcaggagcctgagacaggagaattgctcgaacccaggaagcagaggttgcagtgagccgagatcatgccactgcactccagcctggtgatggagtgagactgcatctcaaaaaaaaaaaaaaaaaaaaaaaaggcttaaaaatatacaaattagccaggcatcggggtacatgcctgtagccccagctactctggaggctgaggcaraaaaattgcttgagcccaggaggtggaggttgtagtgcaccccagcctaggcaacagagcgagactctgtctcaaatataaataaataaataaataaagtttaaagatgggatcgcaccatgttgcccaggctggtctccaacttctggcctcaaccgatcctccctccttggcctcctacagtgctaggattacatgtattagccaccacactcagcctggaattatcttgctcatttattgtctcatttgttgtc

SEQ ID NO: 781413 - DNA, 590 bp, Homo sapiens
gcgggcaaaccacttcaggccaggagttcgagatcagcctggccaacatggtgaaaccctgtctctactaaaaatacacacaaaaattagctgggcgtggtggcgcatggctgtagtcccagttaatcaggagcctgagacaggagaattgctcgaacccaggaagcagaggttgcagtgagccgagatcatgccactgcactccagcctggtgatggagtgagactgcatctcaaaaaaaaaaaaaaaaaaaaaaaaggcttaaaaatatacaaattagccaggcatcggggtacatgcctgtagccccagctactctggaggctgaggcaaaaraattgcttgagcccaggaggtggaggttgtagtgcaccccagcctaggcaacagagcgagactctgtctcaaatataaataaataaataaataaagtttaaagatgggatcgcaccatgttgcccaggctggtctccaacttctggcctcaaccgatcctccctccttggcctcctacagtgctaggattacatgtattagccaccacactcagcctggaattatcttgctcatttattgtctcatttgttgtc

SEQ ID NO: 781414 - DNA, 615 bp, Homo sapiens
ccgtctcactaataataataataataataaaggccaatgctggagtcatacctcaatgtaggttgttaagatgcaaccacttaaacatccagatcatctggcaaattcctgtacaccaagggtttccttcctgtaatcccagcactttgggaggccgaggtgggaaaattgcttgagcccaggagttcgagaccaacctgggcaacatggagggaccccatctctacaaaaaaatwtaaaaattagccaggcttagtggcacattcctgtggtcacagggacctgagaggctgaggtaggagtgtggctggagcccaggaggtcaagactgcagtgggtggtgatcatgccactgcactccagcctgggtgacagagcgagaccctgtctcaaacacaaaacaacaacaacaaaaacaaccccaaggtttcctgatctaggctatagttcctggtttttcccttcctgattaagtgcaaggtgcacactccctataccccaggattggtccctttggaaaagatctcatcaggctttggcctttatcctacagaggaacaatactacactcgcatctgacatcacggggcttagggcttcagaaatgaagacagg

SEQ ID NO: 781415 - DNA, 615 bp, Homo sapiens
ccgtctcactaataataataataataataaaggccaatgctggagtcatacctcaatgtaggttgttaagatgcaaccacttaaacatccagatcatctggcaaattcctgtacaccaagggtttccttcctgtaatcccagcactttgggaggccgaggtgggaaaattgcttgagcccaggagttcgagaccaacctgggcaacatggagggaccccatctctacaaaaaaatataaaaattagccaggcktagtggcacattcctgtggtcacagggacctgagaggctgaggtaggagtgtggctggagcccaggaggtcaagactgcagtgggtggtgatcatgccactgcactccagcctgggtgacagagcgagaccctgtctcaaacacaaaacaacaacaacaaaaacaaccccaaggtttcctgatctaggctatagttcctggtttttcccttcctgattaagtgcaaggtgcacactccctataccccaggattggtccctttggaaaagatctcatcaggctttggcctttatcctacagaggaacaatactacactcgcatctgacatcacggggcttagggcttcagaaatgaagacagg

SEQ ID NO: 781416 - DNA, 610 bp, Homo sapiens
taccaagtgaacactacaagaaatgctaaaaggagttctaaatcttgaaacagaatatcaaaatgcacaaaaatagaaccttcttaaagcataaatctcacagaacctataaaaaataccacaatgaaaaaaatctaaggtattcaggtgacaactagtatgatgaagtacctcaaatctccatactaacattgaatgcaaatggcctgaatactccacttcaaaggtacagaatggcagaatggataaaactccaccaaccaagtatctgttgtcttcaagagactcacctaatgcataaggactcatataaacttgaggtaaagggtggaaaaaaatattccatgcaaatggaaacaaaaagcaagcaggaatagctgtccttatattagacaaaacagactttaaagtaacaacagtttaaaagacacagacagacattatrcaatcataaaaggatcagaccaataggaaaatattataattgtaaagatacgtgcacctaacataggagcctccaaatttataaaataattattactaggcctaagaaataagataaacagcaacacaataatagtggggggacttcagtactccactgagaaca

SEQ ID NO: 781417 - DNA, 611 bp, Homo sapiens
ggtgagaagatttcactgaagaattgctttaaatagaaagctcttctgatgtacttaagtgtttgtaaagtcacttcctaccctgggctaaaagagacacaagaaaactcgaggcttaaaatgttggaaatcactgttgcttgaatagtaagcagaaatgagggtaaatcatttctgaaattttaagtataaactaatgaaaaattgctttgctatagaaattgcattttcatctaattgaatatattcattttattaagtgggttactactgtgtattctttaatttcattatcttcaagattaatttatagagtctatatgaaaatactacgtggaataggagttatattttataaggagttgctgtgttttaaggagttatgttaaaatcacattatctggtgmgtatcagttaaccacaagggtactggccagtcagttatgtttcaaaatacctgttacttagtttgagaaaaagtgactttgggcacatattcctgcttcttattttgtaaaagggaatgctgtggtttgtaatactaggctattgtctagtttgattcaaagcaccctactccattcagcctgggcaagatagtgagaccccat

SEQ ID NO: 781418 - DNA, 706 bp, Homo sapiens
acaaacacaatttaatctttatcatatatgtgtatccattaatttatttttggccccatccttaacagttaaacatattatggcagtagtttttgtttttgcgtgcgtttttctcctaggtctggaataactattcttggccctgtgggtgcacattaaaatcatgtaggaccaggccctaaattttaaatcaaaatctttgagggtggaggccctggtattttttaaagcccctcacgtgatggctttacaaaataagccacaaaagcactggtagatgttatctaccagtgatatgcttttgtggagttttgtttgtttgtttgtttttgagtcaagatctagctctgtcacccaggctggagtgcagcagatcgatcatgggtcactatagcctcaacctccgggcttaagtgatcctctaacctcagcctcctgggactaaaggctsatgccaccatgcccagcttatttattgaagtccagccagtatcgagaattactgtgctagggctatgatcccctgtgttaacattttcttaccttgctcttgaaggatcgttaaacaccagttcagcgggagttggagggctgacgacgctacagaatctggactctatgacttgttttgggagtaacaggagggtgtgatgaggaatttctgtgaaggtgacttctggatcctcagcttcaattactgaaacta

SEQ ID NO: 781419 - DNA, 576 bp, Homo sapiens
tttccatgaactttttgaagaccccttatataaagcaaatgaaatcggtatatctaagcaatgtctgtactctcatgttcattgcattattcataatagctaagatatgccaacagcctaagtgtccatcaatgcatgaatgaataaagaaaatgtggtatatacacagtggagtattattcagccatagaaagaaagaaatcttaccatttgtgacaacatggataaccttggagggcattatgttaagtgaaataaaccaggcacrgatagacaaataccacaggatctcgcttatatgtggaagctaacaaagttaaactcatagaagtagagaatagaatggtggttaccaggacctgaagtcagggaggttgaggtcatattggtcaaagcacacaaaattttcagttagaaaggaggaagaagttcaagtgatctattttacaatatagtgactatatctaaacaatataatgtatttttgaaaattgctgccgggagcggtggctcatgcctgtaatctcagcactttgggcagccgaggcgggtggatcacctgagttcagaagttcg

SEQ ID NO: 781420 - DNA, 585 bp, Homo sapiens
tcaggaattaaattgacatacatattaagctactcactaagaataaaatgatttccatctcatttactgtagaaatatacaaaacacacttacattataaagaggaatacagatgatagagagtgcatatttttataataaattgagaaacctatgttaaaacaaaaagaggaaagaaaatatcttggattataaacaagagatcaattatgactaatatgtaaagaatttgtatcatctgtaatttattcagtctcataaacctgagggtacatttctcacagatacccagtatcagcraaaacctctcatgggatcagttagggcacaggctaatttactctaataaagatcccaattttaagtaaatgggggctatattttttcatctacttatctaaaaagaggaggtaatcaaaaaaacgactgttactttcaacaactggatttcatctttatttgcaagaaagtgaaatttgttgccatctgctgttcagcgagaaaactgaaaaaacatcctgagcaagaggacctgaatgtaaggaaatgacatggtgctttctacaatacttctgttcccatcct

SEQ ID NO: 781421 - DNA, 657 bp, Homo sapiens
atttcttttaagtgtttactcttttgatccattttgacccagcttctctggagttgctgaaaaatctcttggtattccttgttcagtctctctaaatgttgtttttcttccttatggagaaccggatgcagcttcctatactcattcctgatcatctgtgcccgtaaaaccacatcgccctgtagggatatgaattttgtaggttatatacccaggcctacttccacmtcacagaacccacaacttcatcctcctcattccttcttttattttccatcctttacaaacaggatgatgagttaagcaagaccttccttcaaaatttgtgtaattcatcaattcccaaacatctgcaaaaaagccctttggatttaaatgtttaaatctatgtcctctcaaatcggaaataccattagaaaacaactaaaatttatgattgattgttcagttgtcatggataatacacataatctttgttactcaattaggttgttgtttcaaatctctgtacttcacagcctgaacaatcactcttagtagaaatgtttttagtatattataatcaggatcagaagccatcacacaaaaaagatcttagtaaaaaatttaacccccatctctcaaaccgactacctcttttctgtctcctgtctttct

SEQ ID NO: 781422 - DNA, 391 bp, Homo sapiens
ctgttatactactatcttttttaggtctccttaatccctctgcacaaatagttttacactgaactcctcaaagcatgcagtttccatgcaccatctgtttcttgccaggaacctaatttatacagtgaaagagaacaatgtttatgttgcttctgaaaamaatgtgtttataaatgtgaagaattggtagattacttacaataattctatgagttattttaatacttaaaataagaaacaatttacaaaatggatttcttttgtccttttgaatctattaaaacaaataaactctaaggggaaatactagagagctgagttaaaatatatttcacacatgtgtggacacacacctacccatacacatatatatctctgaatctttaattct

SEQ ID NO: 781423 - DNA, 507 bp, Homo sapiens
cccacacagccgcctctgcgtgaattactctttctctattacaattcccctgtcttgatgaatcagctctgtctaggcagcaggcaaggtgaaccccgtgggcggttacagtaaggttaaatctttctcctgtgatctggattttcaggttccccagtgaggatgtgtgctcgaggtggactttcccccctcacactttggctactcagttttttggccgtcttatggagtttgcagtgacaakctgcctctttcaaagggtctgtgaattctttcagttttcctggtatgttcctgtggtagttcttcagcaaatgtttacaaagggagtctctacacgctgttctgtctatccgagtgggaactgcaagttagtactgcctcctatctgcctttttttcctgtaagttattttttgagtaaatttaggtaatttatatttttctaaaaaatctgttttatccagattttaaggctaatatgaatatgttttagcgaaggatttta

SEQ ID NO: 781424 - DNA, 641 bp, Homo sapiens
tattacatattattgctgtcattattaacttaaatgtgtaaacactcaatttcaactagacttttaaaatgaattggttgttttcattggtgagattgtgaattcaaaatttttggtgtataatttgaaaaacatcaagtgcttcaaatatttttacatcatttgacttctagtaattcaccacgtttatgtttatttatattaaattgaataggtgcattaaaaaatgttgtaacatgctatcctgaaaacattgtttataaaaggtagttaatatacggaatgtgctatgctgaagctactaaaaatttcttagagtgattaatgaaagaacaaacaaaatattcatattggctgaatcttagttctaaacataggaatttgcttcaaatatttaaccaaagatgtttaccaatacttatttaaaagaatgttcactggaaaacttttataattacttaaaaagggaggatatcagtatrttcaaaataaggaattgttcattatattaataccattatgaggtcactgagaaactttaaacaagaatatttaaagacagggaattttaacatattgttaattgggagaaaagcaaattataaataattacaattctgctcattatatatatatatatg

SEQ ID NO: 781425 - DNA, 641 bp, Homo sapiens
acagcgagattccatctcaaaataaataaacaaataagtaaataaacaaataaatggaaagaaagaaagcaagaaagctgggagcttgcactggtgaatgctggcaggaactagaaactagacatgttcaagatggcagctacatcttcccttagccgccagccacttgtacagtaaggatcagacgagatggcacgggctgaggggagaattcatttgcatggtaaggttagggtggagcaacgagtcttccctgcacactacgcatacaccatacctgactgaaccaatctgtgatccctacgtaattcagacactgtccctgcaagctggactgtaaaacctagcacatctgctgccagccatttttttccactcaggagtcccctctcttaatagtgagagcagcttttctttctcttttcttctgcctattaaacctccactcttaaacttgtgtgtgtctatgtcctaaattttcctggcatgagatgatgaacactgcrtatataccccagacaacatagccgtttcaatacctgtacttttgtgtctgatttttttttttttttacttagtctaaccatttcaagtgtttatattgaaacactttcagtagttcattactatttgtgaccaaa

SEQ ID NO: 781426 - DNA, 619 bp, Homo sapiens
ttgtgtttttaatgctacagtagtttacttgtcaaaatttttgaattactcagtacttcacacagataactttcttacttcatatataaacccatttatttaaaggaatgaaaataggtgtattactgattcattatctcttaatatatattcctgaacagttaagggattgtatgaatgaatattctataactccctagtgaaaagatatatggcttgagtcttattatgagagtcttcagaaacacatttaaagatttcctctaggaataaagatgattctaaacattgatagaaaaataaactaagataatgtaaattttaacctgctaaattttaaattttacatgyaagatgtaaaaactcacataaaaattagggttgtgtctctacttttttcttaaaaacatatgttacatatatgattgttacatatcttaaatgtgatatataatgagatgttatatatgaaatatgtcatatacaagataaatatgcaattacatatacatatataggcatgtatatacatgtataaactattaataggttctaaaattatcaaaaatacttaatacaaagatctctttatgaaatctcctatttttccatcttttat

SEQ ID NO: 781427 - DNA, 661 bp, Homo sapiens
atccattgaaaggaatatagcaggatccagagtctccacaacatatacttaatagtgtccaggaattgatcaaaaatcactagacaggtgatgaaatgaaaaaatataatccgaactcaaggaaaaaattcatttaaaaaaaatcaacccaaggatgatccagatgttgaaatgagtagataagaactataaggcagctattatacatacgtccaagaattttaaatgaaaaatatatacacaatgaatgaacagatggggaatctaacccccaaatcagaaactgtgaaaamagaatcatctagaagtaaaatatacactaactggaatgagattaacagcatatcaaagatagcagaagcatctgggaacttcaagacagatcaacagaaaccatccaatctgaaaagcagtgacgaaaataagacttaaaaaatagaacagagcctcccagacctgtgggacaatatcagtccattcaatacacttatatttagagtctcagaggaaaggagagagagaataaggcagaaaagacgtgaagaaataggcctatgacttacagatttagtgaaagacaaaaatatagattcaagaaaatcaccaaaacccaagcagggataaatagaaagaaaactacctctaggaaaactgctaaaat

SEQ ID NO: 781428 - DNA, 613 bp, Homo sapiens
ggaatttattccattaggctatggtgtattattttcttaatgtgatgttggattctgttcactaatattttatttacaacttgtgcatcaatatttgtaattcattctctctctctctgctttccttaagaagtttaattattaatacattacaaaaggaattaggttttcaatcctctggaacaatttatggagcattatgactatctggttcttaaatgtttagtagaagtcacctgtgaaaccatctgggcctgatgttttttatggggtagtttcttgatggtttttgcaatttttttcctgaggaaatagctctgtttaaggtttctgtctctaatgaygtcaaccttggcaaattgcctttccctaggaaattatccattacatctaggcttttaaatttatttgtatagggatctgcaaatgagtctttatttttatttttaacagttatttgtttcaatgattatttccccctttggtttcttatttatgtatttgtgctttctcttttttcccataagttagttaaatgtggtctactttgttaattatgttttaaaaaacagaattttgatttattcaagatcttgtatttttctattctctg

SEQ ID NO: 781429 - DNA, 588 bp, Homo sapiens
tcaaaaaatcatttttagtaatttctacaaaaccaagaaaggacaagaagaagaaaaaaaaagaaatacagaccaaaagaacaccacagagaaaataagcctacttatatacaaaaagcataaaatgtaatatatttagcacctccaaataagagaaagagaagggttatttataagattattttgaaaaagctcttctctaaaaagagggacagatctttggaacaaaagatgcaaacttgaaccatattccaaaataaactctagaaggaagggtgaaatataaaagagtcatagaaaagcaacacaaaacaraatagaatatttataagtattctgagggataatatctttttacactttaaagcagggaagaaatgaaaatggaaagactgacagcttgggattcatacaagtttaaaatatctgtccagtggaagaaaaaaaatagtcacggaattaaaacaaaatggaaaacagcattttggaattcatttgcctgaaatgtgacaaacaaatggttaatctcactgctacctaaacattcattcatatttataagaaaaacaattttctcaagtgtaatat

SEQ ID NO: 781430 - DNA, 633 bp, Homo sapiens
gccactgacgagtccaccagctcctttcaaatttaatttcaggggtcaaatgcccccttctatttggggctcttcctatcagaccaaatgccttgtttgtagttctgatgatttaggctggaaaacaccgttttctgccaacgatgcagtcagctgcatagaacaagctgccattgttaattaggtaagttatgtggtcaaggaagtaccttttactggtggtctttattcagaataaggaagaggggacttgtgatggagccacacagagaactagcaggtcaccagccagagcactggaccctaggagaggacttgggctctctgagccagttytgactgcccacggaagatgtctccacacattccccattgcttgggccaaaaggcagtggcagaatctctggggccgtgggaggagccgaagaacagacgtggggagggggaggattgtgatctggggaagagatcggcacacacgcatctttgttggacctgaagggatgctatgttgttctttgattaacacacatgctctgtgtattgtcacttctctggtctaaaacccttgacactgggacttcccatgactggaggatcaagtctgaattttataaggtggcttcagaacac

SEQ ID NO: 781431 - DNA, 633 bp, Homo sapiens
gccactgacgagtccaccagctcctttcaaatttaatttcaggggtcaaatgcccccttctatttggggctcttcctatcagaccaaatgccttgtttgtagttctgatgatttaggctggaaaacaccgttttctgccaacgatgcagtcagctgcatagaacaagctgccattgttaattaggtaagttatgtggtcaaggaagtaccttttactggtggtctttattcagaataaggaagaggggacttgtgatggagccacacagagaactagcaggtcaccagccagagcactggaccctaggagaggacttgggctctctgagccagttttgactgcccacggaagatgtctccacacattccccattgcttgggccaaaaggcagtggcagaatctctggggccgtgggaggagccgaagaacagacgtggggagggggaggattgtgatctggggaagagatcggcacacacgcatcttkgttggacctgaagggatgctatgttgttctttgattaacacacatgctctgtgtattgtcacttctctggtctaaaacccttgacactgggacttcccatgactggaggatcaagtctgaattttataaggtggcttcagaacac

SEQ ID NO: 781432 - DNA, 557 bp, Homo sapiens
gttactacagcaaagggcacgaaagcctccaggatatcaatcgtaaaaacacagatatttaaaatatagccatactgtcaaaaaactcctttagtaaaataggcagtgacctaaatcccctggaaatacccagaagtttgctggttatcttgtgtcaaaaaacttaagaagggctgtaaattaataataaattatacattattttttaagttcaaaatataatggcctattcttggatgacagatawccctcaagagcctatggcatccataaatattttcagaaaaaataaacgtacttaatttgttacctcaaggtaaagatgacatttaaacgatgaatgagaaactaatgctttccaataaaaaagaatacttgtactactagagagtcattttgaaatggatgtttggaaatgtttctatgattaatgatttgtggctgaaaatgctataatttaatttataaaaactcatatgttcacacttgaaaaacttggaaacagattttctaggcttttaaacgccttccatatgaagagtttcagcaggttttgg

SEQ ID NO: 781433 - DNA, 636 bp, Homo sapiens
aaataagtgacttacagtcacgtatggactgacctggtagcaagttgggacgtgcctttttaaacattttctcacactgagcacatcttcctctatctgttattgttttcctaatatgtggcttggaagggagttagacagctctccaacaccgacggaagtgcggaaacccagcatccaaaaaatgactggcagtggtaaaatggtctactggctgaaacataccacttttcatcacagcaaatgtttggccaagaaataatcatcagtctttctccaggaacacctgtaacctcggggtttttttcttttctttttttaatgagagtgttattatactgcagaaacacgtcttattttatgatcagccttgcagcttcaygagaaaagttcatggaaactcccaatacattaaaaacatgcacttgacattctctccacaatttttacttgtacatgaagcaggtgctcacattcctgctgctgtttttctaggactgtgctgtccaatatagactccaccaaacatacatggctatttaaatgtaagtgaattataaataagtaaaactaaacattcagttcttcaggttcagtaaccacatgtggcttgtggctaccacgttggacaatgca

SEQ ID NO: 781434 - DNA, 545 bp, Homo sapiens
gtgagggtgtatgtgcccaggaatttatccgtttcttctagatgttctagtttacatccatagaggtgtttttggtgttctctcatggttgcctgtatttctgtggagtcagtggtgatatcccccttatcattttttattgtatttatttaattcttctctcttttcttctttattagtctatctagcagtctatctrttttattaacttttccaaaaaacaagttcatggattcattgattttttgaagggtttttagtgtatctccttcagttcagctgtgatcttggttattttttgccttctgctagctttggagtttgtttgctcttggttctctagctcttttagttaagttgttaggttgttaacttgaaatctttctagttctttgatgtgagcattttagtgctataaatttccctcttaacactgctttagctgcatcccagagattctggtatgttgtctctttgttctcattagtttcaaagaacttgatttctgaattaatttcattatttacccaagagtcattcaggag

SEQ ID NO: 781435 - DNA, 545 bp, Homo sapiens
gtgagggtgtatgtgcccaggaatttatccgtttcttctagatgttctagtttacatccatagaggtgtttttggtgttctctcatggttgcctgtatttctgtggagtcagtggtgatatcccccttatcattttttattgtatttatttaattcttctctcttttcttctttattagtctatctagcagtctatctgttttattaacttttccaaaaaacaagttcatggattcattgattttttgaagggtttytagtgtatctccttcagttcagctgtgatcttggttattttttgccttctgctagctttggagtttgtttgctcttggttctctagctcttttagttaagttgttaggttgttaacttgaaatctttctagttctttgatgtgagcattttagtgctataaatttccctcttaacactgctttagctgcatcccagagattctggtatgttgtctctttgttctcattagtttcaaagaacttgatttctgaattaatttcattatttacccaagagtcattcaggag

SEQ ID NO: 781436 - DNA, 608 bp, Homo sapiens
atatctccctgcatcattgatacttgccttttatcatggcaagacttctgggcttatagtccactaacagctgcagtcatctcaactcattcctggcttggaagcgaaatatctgacatttcattctgatttacatatcatcatattagaattcctatttttttattgcgcattttctcagggcagattttcatgtggtgaatatccaggttttagttacttagtcattctgagtttttttttaatttccttgtttaaaaattttaaaactatctttagatgaataaatgtctgctattcttgcatactgttaactactcctgtctatttcatattccaaaagccacrcccaccattatttttaacacatgcctctatctctggacttcactcttggcagtggagtctgaggctgctgtgggaccacagacatccataagctttctaagatacctttcgtctgactgaaagggtattctagttgccattttattccttccacaggtttttaaaagttgttaacagcccaacttttgctttggtctttaagccttggagcaaagtttagagtgagagcccatgtcttgctggggtaccggaacttgacc

SEQ ID NO: 781437 - DNA, 653 bp, Homo sapiens
tcagggttcatggaagagctactgaaacagatattcaaagcccacggacttatgtcatccaggattctatgccaaaatttgaaaatcctatcaaacaacctaagtctatacatatgccagtcaggagaatttaggagctaggctacatcagaaaaaattctagggggaagaaacctattgattctgccasaagaaatactctattaattctttactccaaagctgggaaccataaaaatgctcagggaacctatataaggaatgccactccaggcattccttatcagttagcttttactatataagaaaccactacaaaacatagttgcttaaaatggtagccatttatttagctcacagttcttcaggttggttatagaactgtgatctctgatcctctggacagttcttctggttttagctggatttgtaaataggtctgtggttggctgctaagccagttgaggtaggctggtctagaagagtatcagctacaatggctagtctttattccacaaaatctttcatcctccataggttagccagggcttgttcataaattatctgagcagtgttccaaaagggagcaagaaaggtaggtgcaaggcctcttggaatctatgttcaaaactagcacactgccatttccaccg

SEQ ID NO: 781438 - DNA, 620 bp, Homo sapiens
aggatccgtttccaaaaagtcaccaagagagtagttcctgtacactaaccctgcccccagaatgctgagttgttttctattgaacttagaacacgaacccagcctttttctcaacgacatccttctcccaagacacaatgtggcccctcatgccaaygtgtgtgaactctactccccaccccttaatcttcctaacatgcagagatcccttagatttaaagtgcaacccctgctatgaatcaataactttagaaggacttaccacagaaagagattagcatgagaaagctaagcagatatcatcgcaacagttcactttaaaaataccaccactccttctatctgtgactacagatgcctcctcacagaagtggggcagagatcatctagccagaaccaactagcaggtcatctgcgcctcccccgtccacgccaattccattccccgctctctcctcatgtgctaagttctcccacgttcttacggtgtcagcgaagaatttatacatgcctctaaagtgactcactgcatgagtattactgtttatttttagcaccttgttgttttgcctataaatccctctaaatgtcatttctcactgcctggcccctttcaggac

SEQ ID NO: 781439 - DNA, 617 bp, Homo sapiens
acagagaaccactattctagggcggtgcagacaggaaatatggagttggagcccccaaacagagcattcaccagggcactgcctagtgtagctatgggaagggggcagctgccctcccgacttcaaaatggtagagctatgggtagtttgcaccttgatcctggaaaagccacaggaattcaactcttaaccatgagagcatccaaagggtctggaccctgcagagccacaggtactgagctgcccaaggccttgggagaccattccttgcatcagtgtggcctgtatatgagacatggagccaaaggagattattttagaactttaagatttaatgtctgcttcactgagtttcagacttctgtggggtctgttacctstttcttttgaccaaattctcccttttagaatgagaatgtccactcaatgctgctaccaccattgtatcttgggagtaaataacttgtatttggtctcacaggcagaagaaactcatctccagataatatttggactaagaacttagaattttgagttaatgctggaatgagctaagactttggggcactattgtgaaggcataattccatcttgaaatgtgagaagaacatgagatc

SEQ ID NO: 781440 - DNA, 643 bp, Homo sapiens
aggctagcatataaagggttttaagcaagagagagacaaagtacaagttacatcttcaaaagagcattctgactgctctatggagaatgaatttttgtgggatgagagtgaaagcaaaacgaacacataagaggtagttttagcagaatgacaagaagtgatggtttgaacctggcagttgtattagaaaaggaaagaaagaaatagaataaagaaagtttctggtaatatcatccacagggctattgtttgattgaatacacaaaggcagagcaataaagaggaaaataaaccaagattggttgctaggtgtttaccttgaacckctgggaacatgctgatgccaagtattgagctgagcaatctttaaaactagattatagtagaaataaacagatctgttttgcacagaagtttgagaggtttattaaatattcaagtcaatctagggttctaatgagttgtccagtgagtagcaaggactagagttataaatttcagtcaatggactacatacagtttatacaatttatgacaggatgaaaatgtccatcccaaaggatattgatgcactaatctctggaacctaagaatgttatcatatacagcaaaaatttaaaaaggtgtcattgcatttttcttt

SEQ ID NO: 781441 - DNA, 616 bp, Homo sapiens
  misc_feature 1, 2, 3, 4, 5, 6, 7, 8, 9: n = A,T,C or G
nnnnnnnnnaaagaaataaaagttctaacctatgtagtttaaatactttcattcaaatacaggtggtaaaggtacagtttcctcaaggcagtctaagtacagtcagccccccatatttgcaggttccacattcaaagtttcacccacatggatacagtctactactgattaaaattttttgaaaaaaataaaaataatacaacaaaaataatagaaatttttaaatgatacagaataacagatgtttatatagtatttatattgtaagagggattataagtaatytagagatgatttaaagtatagaggaggatgtgcataggttgaatgtaaatactatgccatttttatatcagggacttgagtatttgtgaactttgatatccactggggtcctgaaaccaatcctctgtggatatcaaggaataattgtatatgcctgccatcctggtttaattaaaaagctgtctcttttattatcaaaggtggccttaatagttcaacaaattatatggtcaccctagagataatgcaaataaaccaataactaaagtagaaacgggcaagcagttagtatcagaaaattgatacaaagcattatcattggaattcataa

SEQ ID NO: 781442 - DNA, 662 bp, Homo sapiens
tgtttgctaattcttgcttacaggatccagtcaatacaatgtcatcaaggtaatggaccagtgtgatatcttgtggtagcgaaaaacaatcaagttcttttccaataataagattatgacacaaagctggacagtygatatacccctgaggtaggacagtaaaggtatattgttcatctttccagttgaaggcaaatggcctctggtgggccctatggacaggaatggagaaaaaggcatttgtcaagtcaatggctgcatatcgggtactaggagatgtgttaatttgctcaaacaatgaagccacatctggtgcaattggagtcaccacttagttaagcttatgataatccactgtcattctccaaggtccatctgtcttctgcacaggccaaataggagagttgaacaggagggatgcaatactatttttgatgtactatttttcttggtagaggcagctctaacgcctttcatttggtattttccaacataatagctgtcaccctaccagtcacagagccaacgtgagggttatgccagtggctaagtatgtctataccaattatgcattctggcactggggaaatgaccacaggatgagtctctggacccactggacccactgtaagttggacctgagctaaaactcctataattac

SEQ ID NO: 781443 - DNA, 579 bp, Homo sapiens
agctagttagatgaccccgcatggattgagagagaaaagaaagcacaaatattgatactcagttgctttctttaccactgtcctccctctgacaactgaacatttgtgcacatcctttttcttacacatgtattatctctacaaagaagtcaactcagagttatatttagtaacttgatccaactaaaagtccagaaaatctgggtgatacctatcccctccatcaggtctgggtgtgacaccttataatctagtgactatttcctaaagtatattgcaccagtggccaaaaccttaatcattcyttatatccacattctttgccatgtaactcagtgtccactccctatgcatatagcagtgttcccccagccttttactctggtctcagccaggtgacttgctttgatcaaaggaatattagcagataagatgtaagcagaagcttgccctctactttcaacataagaacatgcttatgtctagtccacagaaggatgaaagacatacaaagcaaagccagttgcctcagccaaggcatcctcggttagttgacagccagccatcctccagatagat

SEQ ID NO: 781444 - DNA, 559 bp, Homo sapiens
atttaacaggctgagtgcaatgatgataatagccctaccctgtgttagttgtagccacattttagaagtaattgtctttaatgctgcccatgttttaataataggcaggatatcattataaacgaagttcattattgcttttaaatggctccctggtgcatgatcttgccccatcctacttacttaatcctgccacttacatgcctatatagatcactttcttatagaaactccatattctcataaaatttcctctcctatgagagaggctttaggccttctcgtaatcatcacataagtcatcaaagcattcacagatctatgtcatcatccagtttgacttgaagctctgaaagtagtgatmtgtttttcataactctctgtattcaagtgaccattacagtaatctgctcataatggatgtttcacaggtgcataaaataaatgcatgcaaatgtcctccgtttaatttccccctgtaaatgggcagtatttctctatgctggaaaaaagaaagtctggatatagaatggcaagactatacaacagatccttttag

SEQ ID NO: 781445 - DNA, 601 bp, Homo sapiens
tatttactctgattttttttctctggagttaccctttgatgacaatactgctgtttaagattgagctgtagactgacctaagaaacagaaaataaaagttttattacataatgattatctttaatcttgctgtgaaaacaaagatcattttgagatattgatttaaaagctatgaacattctctccaggaaaaaagaaatgtatgttagttatcgagttttgtatgtgacttcagaggtttaatgaatctcttaaatccattagaaattaagrgttttgattatgtgaaatcccagattataacataatcattaagaacaaagaataaggggtaggatgcagtggctcatacctctaataccagcactttgggaggctaggcaaggaggatcacttgagcctaaaagttcaagaccagtctgggaagcacagcgaaaccctgtctccaccaaaaagaataataaaattagctggatgtgatgatgcacgcctgtaacccagctacttgggaggctgagctgggaggatcacttgagccccagaatttgaggctatagtgagctattatcatgccactgcattacagcctgggtgacagagt

SEQ ID NO: 781446 - DNA, 644 bp, Homo sapiens
tttttttttttttttttttttttggaatactttggcattttcctagaacagactctgaagaagggatgaaagatatattattataaatgtttatttactctgattttttttctctggagttaccctttgatgacaatactgctgtttaagattgagctgtagactgacctaagaaacagaaaataaaagttttattacataatgattatctttaatcttgctgtgaaaacaaagatcattttgagatattgatttaaaagctatgaacattctctccaggaaaaaagaaatgtatgttagttatcgagttttgtatgtgacttcagaggtttaatgaatctcttaaatccattagaaattaagagttttgattatgtgaaatcccagattataacataatcattaagaacaaagaataagggrtaggatgcagtggctcatacctctaataccagcactttgggaggctaggcaaggaggatcacttgagcctaaaagttcaagaccagtctgggaagcacagcgaaaccctgtctccaccaaaaagaataataaaattagctggatgtgatgatgcacgcctgtaacccagctacttgggaggctgagctgggaggatcacttgagccccagaatttgaggct

SEQ ID NO: 781447 - DNA, 595 bp, Homo sapiens
atgggggtgggggatttgagtggatgggtccttccagcgggcatttgggtcatttggcccgtcgccctgcctgcaggctggcctgcacgcagcacctggcctaggcaccctggaatctctcccttcctgtggcagacacaggaaactcctacctcatcacggcagctgcatgtgtgggtaagcccacggtgatgatgacttctgtactggctgtttttactccttgctttaatgatattagctcacgtggttatcctttcccttctagcaggatttttccacagccagacaattctttgcggtgaggaggccaccctgtgctctgtaggatgtttagcagtatctctggcctcaatccacaggataccagtagcacccacccwccaggttgtgatgacccgactttctcctgatactgcctgatatcctctgtgggtgaattttcctggttaagaatcactatcttacaggaaggtggcaaagatgagagtatcagactgtaagttccgcgagagcaggcattgtgtctggtttggtcgtggttgtgtgccaacagatagtagattttcaatacatatttgttgaatgaatgaat

SEQ ID NO: 781448 - DNA, 588 bp, Homo sapiens
cccattataattttcggtggcagtgcatatggcgggtgataaactaataaagctgcagtaggaagaatagttctgcttttatttttatggctatttctttaatctgatgcataattaatgtacaaagttcaacttcgttttggtcagatcccagattactcgaggcatccggaggggttaatattttttggtgcatttgggggtaggaggttgggataaaacaacaaatttttatctatatggaaggatgcttaaccgggattttttttttttttccaaaaagaaaatacttaagttatccttgctttcagagttcatgtccattggaagtgtcaagagattctgtgttcaaacattctcaaagcaccgctttccccttaccccttacctaagagaacataattctaaaaatcyctttggggaataattttctctgccttccatctctctcaatgatgtgtccaatctccacaatttgtctggcctcctcttgaactgatttacggttcaccaaaatctgtgagaggatttgccaggctgcagaccaattaattatgtttgctgttagacctgttaggtgttggcatt

SEQ ID NO: 781449 - DNA, 599 bp, Homo sapiens
tttctctttggaaatggagcccatcagatttgcctcacccctgacttagcactttgtactaaatcccttagaaatgccttcccttaatctccacattcctgagttttttatggcaattgcattttagctcaacttctatgtcttccaaagatcttccctgttcacaacaattacatgccctggtcataaattatcttattttctttgttgcttgtttatcatatgcaccttcccacastggaatctaagcttcctgagagctaagccttatttagaacaatgcctgacacataatgggcacacaacaatatttttgcttaaacacatgtataagtaagcgaatgatcccctaactgccaatttcctaggagagagaattgaattgccccagctgggatcagtattcaaccctctttttattagttgaggcagagtgggttgagtcagatagaacagccacttctcctggctgcctgtgtctgaagggaggtgtacttgatttggggagaaaaagaagccatggtgaatcacgaaaacatattccccaatgacaagtgtatcgtgcttgtcaatttacagagggtagtgagggtaggggt

SEQ ID NO: 781450 - DNA, 599 bp, Homo sapiens
tttctctttggaaatggagcccatcagatttgcctcacccctgacttagcactttgtactaaatcccttagaaatgccttcccttaatctccacattcctgagttttttatggcaattgcattttagctcaacttctatgtcttccaaagatcttccctgttcacaacaattacatgccctggtcataaattatcttattttctttgttgcttgtttatcatatgcaccttcccacactggaatctaagcttcctgagagctaagccttatttagaacaatgcctgacacataatgggcacacaacaatatttttgcttaaacacatgtataagtaagcgaatgatcccctaactgccaatttcctaggagagagaattgaattgccccagctgggatcagtattcamccctctttttattagttgaggcagagtgggttgagtcagatagaacagccacttctcctggctgcctgtgtctgaagggaggtgtacttgatttggggagaaaaagaagccatggtgaatcacgaaaacatattccccaatgacaagtgtatcgtgcttgtcaatttacagagggtagtgagggtaggggt

SEQ ID NO: 781451 - DNA, 599 bp, Homo sapiens
tttctctttggaaatggagcccatcagatttgcctcacccctgacttagcactttgtactaaatcccttagaaatgccttcccttaatctccacattcctgagttttttatggcaattgcattttagctcaacttctatgtcttccaaagatcttccctgttcacaacaattacatgccctggtcataaattatcttattttctttgttgcttgtttatcatatgcaccttcccacactggaatctaagcttcctgagagctaagccttatttagaacaatgcctgacacataatgggcacacaacaatatttttgcttaaacacatgtataagtaagcgaatgatcccctaactgccaatttcctaggagagagaattgaattgccccagctgggatcagtattcaaccctstttttattagttgaggcagagtgggttgagtcagatagaacagccacttctcctggctgcctgtgtctgaagggaggtgtacttgatttggggagaaaaagaagccatggtgaatcacgaaaacatattccccaatgacaagtgtatcgtgcttgtcaatttacagagggtagtgagggtaggggt

SEQ ID NO: 781452 - DNA, 604 bp, Homo sapiens
agccccactttgccaataaggaaattgatccttagattaaataacatacttgaaattgtgcagtaagtacatggaggaatgtccatacaatatatctatttaaaccacctaacagtggggtattatggaagagcatatgggagcactttgcaaagtgtcaaccgcagaataagtgcttgataaatttcacattatacctctctctctctctctgcagatttcagtcacttatgaccacagaattaattctaaagaaagcaaattgaaggaggtgtttgcacgtatttttttttccctaatgattctactgtaccctggagcattttcacggtttgtgtttaatcacagaatctcagccatgatgtttctgacaggcaatttccttaatgcatttgacagagatggattacatggagggccattggaygccatggttttgtctgcaaatggtaagactagattagagctatctgggtctagtgcctccagtgatattgcatcctaataattcttatgataacatggatcacctttgtggacacacacattcttggccagatgggatacagtggttttcaagaaaccctgccacttttattacact

SEQ ID NO: 781453 - DNA, 576 bp, Homo sapiens
tgcacctgactcacccctccagcctcgatgcatcgcatgcagttagcatgttcagcacaatcttctctcttgggtttgggcaggcatatggtctgtgcctagcagagctgatattgctggttccaaaaaactgcctgttacatgctggtggtcacaagagaagaagaggtgagaagggctcggrgccagacaaagcacgcctttgtaaatgaatgtggagttggccaccagcagtcttcattatccccgtcattgcaggcagctgagctggctttgtgtcagccctgctcggagtagccttgttaattcacccccatgaaaatggaagtttcatacacattgacataattaatgaagaggcaggcagcatgctctaccaattaacaccacagggaaaagtaaaatgggctttcttttggcatattgtgccaaagttaaggactgtaagacacagcaaataaatagagatgcttttaatgagctgcaagatcgagctgaataagtcagaaaggagtgttgggtaaacactgccaactctttgcaccgttaagagtaattgatgagcatagttgaaag

SEQ ID NO: 781454 - DNA, 634 bp, Homo sapiens
ctgtagtcccaactaatagagaggctgaagcaagaagattatttgagtccaggtatttgaggctacagtgagctgtgattgcagcacttgcaatccagcctgggtgaagagtgagattctgtgtctgtaagcaaacagataaacagacaaaaagcccaccagttctcmtaaggactaagagagcaagaattcactcaccctctattcccttcctggcgggcattaatctattcatgagggacccatctactcttcacttcatcttccctctatgcatgtctgtgtccaaaatttccttttcagctgggcacagtggcttatgcccataatcccagcactttgggaggccgaggtggtcagatcacctgaggtcaggagttcaagagcagcctggccaacgtggtgaaactctgtctctaccaaaaatacaaaataataataataataataataataataataataataataataattgcagggtgtggcagtgcatgcatgtaatgccagctacttgggagactgaggcaggagaatcacttgaacccaagaggcagaggttgcagtgagctgatatcgtgccattgcattccagcgtaggcgacaagagcgaaactctgtttcaaataaataa

SEQ ID NO: 781455 - DNA, 634 bp, Homo sapiens
ctgtagtcccaactaatagagaggctgaagcaagaagattatttgagtccaggtatttgaggctacagtgagctgtgattgcagcacttgcaatccagcctgggtgaagagtgagattctgtgtctgtaagcaaacagataaacagacaaaaagcccaccagttctcctaaggactaagagagcaagaattcactcaccctctattcccttcctggcgggcattaatctattcatgagggacccatctactcttcacttcatcttccctctatgcatgtctgtgtccaaaatttccttttcagctgggcacagtggcttatgcccataatcccagcactttgggaggccgagrtggtcagatcacctgaggtcaggagttcaagagcagcctggccaacgtggtgaaactctgtctctaccaaaaatacaaaataataataataataataataataataataataataataataattgcagggtgtggcagtgcatgcatgtaatgccagctacttgggagactgaggcaggagaatcacttgaacccaagaggcagaggttgcagtgagctgatatcgtgccattgcattccagcgtaggcgacaagagcgaaactctgtttcaaataaataa

SEQ ID NO: 781456 - DNA, 508 bp, Homo sapiens
taataaaggaaagcaagatatggcaaactgagctggttgcttaatttgttcagtaatctgcaatttatttttagattgaggtaaactactaacatatttattgagcaactatacttgtacaaagtgttgttctaggaaatgtgtgtaaaggatggcaggatagtatgaaaaaatacaaaataaggtccgtgttgttaaaaaaatatgtaggattctgtgtgttagaactctattgagtgctttctgtatattattctatttaatctttgcaacaattagaaagtaaaattatccctattttgcagatgaacartctgagagagaggttcttttccttttttctttccttcctttcttcctcttttcccttctctttccttcaacaaagttagactcaaatattaatagaaaatagtgctttcttccaaggtttcaccttttctaaaggtagcagaattatagctatgtaataagtgctatcatagaggtatgaacccagtaatatggg

SEQ ID NO: 781457 - DNA, 588 bp, Homo sapiens
tggccagtgagatataagaaaaagtctgctgggagggctttggaaatgtctcttgaccttaagagggaaacgttggaagaggtagctcttttatttttattttttatttttgtctctaggcattgctgtgctgggaaggaatgcttaaacctgccacagccatgttgtgattatgaagggagccaacctgaggacaaatcacattttctgaggatggcaaagcaaacagatgcaaagatcctgggtctttgatggcattgtkgagttgctggacagcttccctacttttcacgttcctatgacacaatgttatcatcgtccttgttgtatcagccagggtgagctggagtcttctataatggtctcctcactgataatagagcatgtgtaggggcatagggctcagaagggtcacagggcacttagaaatcgccaatagttcatcatgactggaatgcaggatattgtggagtggagtgtgatgtgatggctagagcgaaaatgaaataatgggcaaggcttagatcataagagccttatatgttaagggtagacatttggattttgtaaataatagggagtcattga

SEQ ID NO: 781458 - DNA, 588 bp, Homo sapiens
tggccagtgagatataagaaaaagtctgctgggagggctttggaaatgtctcttgaccttaagagggaaacgttggaagaggtagctcttttatttttattttttatttttgtctctaggcattgctgtgctgggaaggaatgcttaaacctgccacagccatgttgtgattatgaagggagccaacctgaggacaaatcacattttctgaggatggcaaagcaaacagatgcaaagatcctgggtctttgatggcattgttgagttgctggacagcttccctacttttcacgttcctatgacacaatgttatcatcgtccttgttgtatcagccagggtgagctggagtcttctataatggtctcctcactgataatagagcatgtgtagrggcatagggctcagaagggtcacagggcacttagaaatcgccaatagttcatcatgactggaatgcaggatattgtggagtggagtgtgatgtgatggctagagcgaaaatgaaataatgggcaaggcttagatcataagagccttatatgttaagggtagacatttggattttgtaaataatagggagtcattga

SEQ ID NO: 781459 - DNA, 570 bp, Homo sapiens
ccgatggctcctactaggaagagaagagtttccatcccttgttagcaggtagtcaactcttttgtgacaactctgatgtacatgatggttttctttccccacactcaggaacagaggtactctgcttacaaaaggagctgaagtgaggcagggggttccaacctgaggtttctgctacccacagagacaacccaccctccccaggtaggggaagggaggtaccagggagcgtaggtgcccagaggggtgagggtgaggacctcagggcttccattcatttatttgattattttcttaatatctttctccctcattggactatgtagtccatgagaacagggattatgtctgatatagggccagatatgtgtaaggagcttagtaaattgttmttaaatgaataaatggacaaagaaataaataaagatctcaatgccagaactgtatttctccagcacccattcagcctttgtctaaggttaagcctttgattgcactgaacggccttgtgcgtgatcagagaggccttccaaccctgtgtccccgcaattccatcagcatcctgtgttt

SEQ ID NO: 781460 - DNA, 567 bp, Homo sapiens
tacccccattggccatgttgccactctatcacccaaattaaatcactgttagttctgagagcagcttgactggattaattccctgtcaatgcattccccacccatttgctggagggcttaaaaaatgtaaatttgggcctgcaaggtagctcatgcctgtaatcccaaaacttttggaggccgaggtgggcggatcacctgaggtcaggggttcgagaccagcctggccaacatggtgaaaccccgtttctactaaaaatacaaaacatgagccgggcatggtggtgcgtgcctgtaatcccagctacttggggggctgaggcaggagaatagcttgaacccaggaggcagaggttgcagtgagccgagattgcgccactgcactccagcaggggcaacaagggtgaaaatccgtmtcaaataaataaatatataaataaataaataaataaataaataattaaataagcaaatttgattgtgtcactcccttgcttgaaaggctcccttggctagacaggtgcttggctatatatcctagaggtttctcagagtaattcttaataa

SEQ ID NO: 781461 - DNA, 512 bp, Homo sapiens; identical to SEQ ID NO: 734437

SEQ ID NO: 781462 - DNA, 621 bp, Homo sapiens
ttctctttagaaattttctttactgagaccgggagcagtggctcacgcctgtaatcccagcactttgggaggccgagggtggctgatcacaaggtcaggagtttgagaccagcctggccaatatggtgaaaccccgtctctacttaaaatacaaaaaaaaaaaaatgaaccgggcatggtggcgggctcctgtagtcccagctactcrggaggctgaggcaggagaatcgcttgaacccaggaggtggaggttgcagtgagccgagatcacgccactgcactccagcctaggcgacagagtgagagtccgtctcaaaaaaaggaaaaaaaaaaagaaattttctttactgaactaaagcatctcttacaaggtgtccattataaaggccacattacatgagttgttttcttactgtgccattcatttggattcatctgcctttgctacttggacattttagactggactgccttcattttctgtaggttttagctggaacttaatttggtttactccaagtaagttggtaggtgacgacattgttggatggatccagaaatgaaaccaggagcaagcaggtttagttctggatttttggttaagtattttatttagtgaat

SEQ ID NO: 781463 - DNA, 513 bp, Homo sapiens
ttggttggcagtttttaccattaattatacaattattttttctgattatgaaagcaataaggcatacaatgtcaatcattaaggaaatatgaaatatgtaaaataagcatgttctctagtctcatctccacagataacttctttcaagatttgatgcatttctcccaaatttttattttctagacatacactaacatttgtctttgttaaaatggggtcactgagtacattttattttgcaacttgtttttttcccatttacctgtacagccagcacattttcttatgtcatcacagtagtgccacctctctaatwaatgcaaagtgttctattgtgcagatggtacatatgaaaatattttctttctttttttttttttttttgagacggactctctccctgttgcccaggctgtagtgcagtggtgcgattttggctcactgcaacctccacctcccgggttcgagcaattatcctgcctcagcctccccagtagctgggagtacaagcat

SEQ ID NO: 781464 - DNA, 634 bp, Homo sapiens
tctgaagttgacctgggatgctcaaacttggtgtggagaaagaggtccacttttcccctcacaatgtaaagaaagttgcggggaagtcccaattgggtggaatcctccacagctcagcaatgccgctgtagcctgactgcctctctagattcgtcctctctggkcagggcatatctgaaaaaaggcagcagcccagcaaggggcttatagataaaacccccgtctccctcggacagagcacctgggggaaggggagactgtgggtgcagcttcagcagacttaaacatccctgcctgctggctttgaagagagcagtgcatctcccagcccagcgttcaagctctgctaagggtcagactgcctcctcaagtgggtccctgaaccctgtgtctcctgactgggagacacctcccaccagcagacatctcatacaggagagctctgtctggcatctggtgggtacccgtctgggacaaagcttccagaggattgaacaggtggcagtctttgctgttctgcagcctccactggtaatgcccaggcaaacagggtctggagtggacgtccagcaaactccagcagacctgcagcagaggggccagactgttagaaggaaaactaacaaacagaaag

SEQ ID NO: 781465 - DNA, 634 bp, Homo sapiens
tctgaagttgacctgggatgctcaaacttggtgtggagaaagaggtccacttttcccctcacaatgtaaagaaagttgcggggaagtcccaattgggtggaatcctccacagctcagcaatgccgctgtagcctgactgcctctctagattcgtcctctctgggcagggcatatctgaaaaaaggcagcagcccagcaaggggcttatagataaaacccccgtctccctcggacagagcacctgggggaaggggagactgtgggtgcagcttcagcagacttaaacatccctgcctgctggctttgaagagagcagtgcatctcccagcccagcgttcaagctctgctaagggtcagactgcctcctcaagtgggtccctgaaccctgtgtctcctgactgggagacacctcccaccagcagacatctcatacaggagagctctgtctggcatctggtgggtacccgtctgggacraagcttccagaggattgaacaggtggcagtctttgctgttctgcagcctccactggtaatgcccaggcaaacagggtctggagtggacgtccagcaaactccagcagacctgcagcagaggggccagactgttagaaggaaaactaacaaacagaaag

SEQ ID NO: 781466 - DNA, 495 bp, Homo sapiens
attatgactttggcatttgaacttaaaggtttttttctccttcttgactgcaaataaacaacagcatggaggggggaaaaggaagacaaaaccaatcttggtagtagtaaaatcactgcattcaagttgaacacacctcagaaagtaatagaaacaataagttatccacttaacggcatagcatagacgatgtgtttgagtgcaccagaaactstctttgaattaacctctgtgacttatctcttattgtaattttgaaattcacacgatgactccacttcataaaaaggaggagtcgagaccacatgagaggcctcaagttttgaatagtttggtgttttaggattatacctgccaagtcaattgtggcagggggtcgagggtgtggcttaaaattatcttggtgatcaaaatctacaaacctggttatagacattgaaagcgtctctatacctttattatttttaaaaccaaattgtaaacaattacctgggt

SEQ ID NO: 781467 - DNA, 655 bp, Homo sapiens
tgtttaaattagtgttaatctatatccaagaagatgcttaacattcagtacactctaaactcacacttgaaaggtgggttgcatatgaaagatgctgtactctggataattctgccagagcttcaaaacttgctatctgaatctgcacttaaagagtttcagaagagataatataagaccattttcaatagtgaaatgaatgatatgcctccactcttggatgaacagaagtrtgagaaatgaagagcctgggagcttaacaccttgggaaaagactcctaaaatttagaaccctatcttgcattcctccccttaatgaagggttttcttgtctgacaccattagaaagttagctgatctttcagtcagaacactttctcatttttcctgggaattagccttccaggcaaagtggctactagagttcctagatgatcagagtatcaggactacactgagcttacagagcaagaagtatgactgtttgggagtctgcttgtaatgggtatttgtacacctcttgatctgagactttcatgagaggttgtagaaagatgtacacctcagtaactatataccctgttttgcccaggagggtcccagtttgcacttactgtccagtcttggtttttaataacaccacttttcacttcta

SEQ ID NO: 781468 - DNA, 629 bp, Homo sapiens
gtccctacccaacaacagagggtgcagattctcacccccaactaaaaaatgacttacgtagctaagagcatgacacaggccaaagctaacctttgaatccctgacggataggcctctataatagcaaggtattacacaacctggcctgcaattattatttgtatttgaccatcaaaaaatcttgtggaataccatgaacaggaagggttagaggtcttttcatttattagacagattttactgagtaacaactatgtgcccaggcactaagcaaggtgttacaggtaaaattttttttttwaaaaaagggggtagatatggggtgagaggtacagacattaatcaaattatcacaacataaattaagccatggtaaatgttacaaggtaaagctttgaaggcatacaaaatggatgcaggaatgcccagcaggaacagatctaggttatgggatttcaaaaacaaaacacatcatctagtgaggaaagctcatcatctagtgaggaagacttgtacaaagaggtagcttgagtatagtgcaataccaggtaaaagtgcttccttgtgttcgaagcctgacaagatgttctaggcttatctatctcagacacttcctgcttagatttgaa

SEQ ID NO: 781469 - DNA, 622 bp, Homo sapiens
tataagcagaataaaaatgcatgcttgcattatacaataatatgggtgtacatttccagagttctcgtattcatacactgtataagaagatgacaaacaattttgcaatgaaaaatcttgtccatacgtttttggcatgcatcagaatatatctgtattcctgagtcaaagggtttgtgcatttgtgattttgattgataatgccaaattgcctcacagmagtgactttaatatacactctcatcctcagtgtatagaaatgctttcttcctcacacagctctaacaagcacgtcataaaactttttttttatttttttatattttgagatggagtttcactcttgttgcccaggctggagtgcaatggtgcaatctcagctcacctcaacctccgcctcccggattcaagtgattctcctgtctcagtctcccaagtagctgggattagaggcacgtgccaccacgcctggctaattttgtattttaagtagaaatggggtttctccatgttggtcaggctggtctcaaactcccaaactcagatgatccacctgccttggcctcccaaagtgctgggattacaggtgtgagccaccacatccagccataaaactcttaaa

SEQ ID NO: 781470 - DNA, 622 bp, Homo sapiens
aggagactctattttctgacactggtgaataatatatccaaccgtagatgaagaaaatccctgttgttattgatacttaatactccagaaaaggtactgtactttcaagggtcctcaaacctctttggcttcaaggctctgaaattgattcagccttttaatgtataaagaaaaagattctgaaataatgaaatgtcagtgcttaaggtacaaaacakaaacagctcagtgaagcatattatataggtgtcagataagtgatcgaaatggttatattatttgttctcaacacacttattgacagtctgctatgaccaaggaattatacaggtgctatgaagaataaaaagataaacacagtcccaattgctcacgaacttacaattcagtgagggagacagacatgcacgaataattagaatatgcaaccccagagtttgccttgcactggaagagcaatgaaattagaaagcgaagctgtcccagtcatagcagtaaccagttgtgtaacagtgaacatagttcagattctctattaagcaacatagttccctagtatgtaaaatgaggtgtcatgtggactggtccagtggtctccaatacttatttatgatgatgggca

SEQ ID NO: 781471 - DNA, 622 bp, Homo sapiens
aggagactctattttctgacactggtgaataatatatccaaccgtagatgaagaaaatccctgttgttattgatacttaatactccagaaaaggtactgtactttcaagggtcctcaaacctctttggcttcaaggctctgaaattgattcagccttttaatgtataaagaaaaagattctgaaataatgaaatgtcagtgcttaaggtacaaaacagaaacagctcagtgaagcatattatataggtgtcagataagtgatcgaaatggttatattatttgttctcaacacacttattgacagtctgctatgaccaaggaattatacaggtgctatgaagaataaaaagataaacacagtcccaattgctcackaacttacaattcagtgagggagacagacatgcacgaataattagaatatgcaaccccagagtttgccttgcactggaagagcaatgaaattagaaagcgaagctgtcccagtcatagcagtaaccagttgtgtaacagtgaacatagttcagattctctattaagcaacatagttccctagtatgtaaaatgaggtgtcatgtggactggtccagtggtctccaatacttatttatgatgatgggca

SEQ ID NO: 781472 - DNA, 573 bp, Homo sapiens
gagttatttacaaatatacatcataaaaaggcttatatgtagattatataaaaaccatttacaattcagtattatcaaaccaaacagttaaatgaaaaagggtaatcatcttgaacagacacgtcacaaaaaatatctatatggacaataagcacatgaaaagttactcaacatcattagttaccaaggaaatgcaaatataaccctatgactatgtcagtggaggcaaaacaattattcaacaaaatttggtacttatgagtaataaaagttcttaacacactagggtagaagaaaatgtattcattttcatagagggaatctatcgatacctacagctaacagactacttaacagtgaaataataagagactggaaaaaggcagggatgtttgttaacaccagttgawacttgaggtcgtagccagtaccataggcaagaaaagaaaagaaaatgaatacagattaaaatgaataaggcaaactattttacttgtaacataattgcatgtgtcggaaattctaagaaatgccttttaaaaacttactagactaaattaacaatattgcagg

SEQ ID NO: 781473 - DNA, 529 bp, Homo sapiens
caatatcttacacagcaattaccccatattttctttataaccatcttttaactagtaaattggaattttgtcagtgagggaggcatcccatgactatctgcagggatctcagtttcacagatattgattactgtaagctaagtgacaatgatgattcacatttaaattcttattaaatttaatgcaaattgatacaaattacatacccacatataagataatggtatactagctatgacttacaactagaatataactaagttatagcttttgaaatgaaattaattgagcctaaggaataattctattaggcattgatatttatttaattttaagagaatatttatatttaagcagtacctgaaaagttacttcattttcacaagattctaagagtataacrttgtcatttggtacatcagtgccttgggcctatcttgccctattatttttaacaagagtagggatggaaactgtgagataattgtctgttgcaataactagctatgctgttttggagaggaagtcc

SEQ ID NO: 781474 - DNA, 588 bp, Homo sapiens
actggaatctccggcttcttactccctacttaaacatgccctcgttcaaatgcactggctgtctttgtccccttgtatggtgccctgctaggcacattcagtgcaacagtgaactccagcaacattcagaagtgcagaaaacacatgcagcttcatgccatgggccagtcaaaccttaataaaagtaaaggataaaaagtcttaacattgtgctataaatgttgattaccagatagtaataaaaattacaggakgtactagaggctttatttagcttctaactcaaacattaccttttaagtaatatcaggaaattccactcttgaataggtttctgtaataactcctaaatgaaacacaccagaaattttacagtaaggatcatatttcttaataaatccagttttgttctattctgaaccatatcccaaatcaacccatgtgtcttgctccttcaacaatctaaacaaatgcaggtcatccaaatgatatattaagttccgttatatttttctgtgagagaccagatattatgaggaaagaaggctgtgtataattgcctaatgaatttaaacacctgttacatca

SEQ ID NO: 781475 - DNA, 588 bp, Homo sapiens
actggaatctccggcttcttactccctacttaaacatgccctcgttcaaatgcactggctgtctttgtccccttgtatggtgccctgctaggcacattcagtgcaacagtgaactccagcaacattcagaagtgcagaaaacacatgcagcttcatgccatgggccagtcaaaccttaataaaagtaaaggataaaaagtcttaacattgtgctataaatgttgattaccagatagtaataaaaattacaggatgtactagasgctttatttagcttctaactcaaacattaccttttaagtaatatcaggaaattccactcttgaataggtttctgtaataactcctaaatgaaacacaccagaaattttacagtaaggatcatatttcttaataaatccagttttgttctattctgaaccatatcccaaatcaacccatgtgtcttgctccttcaacaatctaaacaaatgcaggtcatccaaatgatatattaagttccgttatatttttctgtgagagaccagatattatgaggaaagaaggctgtgtataattgcctaatgaatttaaacacctgttacatca

SEQ ID NO: 781476 - DNA, 623 bp, Homo sapiens
ataaagcacaataaggtaaagtatgtctgtactttgtatgtcattttattctccttcttcctctgccccactaggatgaaaattccatgagagttttgtttgtttcatcctctacttatcaccattacctacaactatggttggctaggactgtgtgtgtgtgtgtagggacttaaaaatatgtgttgaatgagtgaatattcaaatgagaacaccctccaaatatcccaagggttagagaatgttgctgataagactagggttatcggttttatgcttcagactaggagagacaaatagatttcatcatggcttttttagtggctgcctggagccctgcgtgaaaggagtgatatgatcataaaaatgagtgayatgatcgattagcaatgtctgcccttgggcatcagaaacgcccactgggataatggcattatgccaactattcgtcactcctgcccctaaattgttacataattaccccctaacttttcactggtgtctacctttatacacacacacacacacacacacacacacaccactaaacaaaagtctagcatggttcactctgttttaacagatagtggacatttttgagatatcagctaaaatatttctac

SEQ ID NO: 781477 - DNA, 584 bp, Homo sapiens
aagcttcaggcaagaatcagggatattttagggtagtttgtacacaccaaatacttctgggtagttagttgcttgttttgctcataagcaagggcaattcttatacagatcttcagaatacctaacaggtaaacaaaagaagagtcctctttgacaaattcagccagagggctaccctccagtgaaaaaacactgagcagrggaggatgcttggaaagttatcctggacttacctctacctgtctgacttcagtcacttcagctattccctggataccagcatttagctattatgaactaaattgtgctttccaaaaatttacatgttggaaccctaggcctcaatgtgatagtatttagagatggggcctttggaagtaactaagtttaatgaagtcatgagtgtggggtcctgatgcaatgggatcaatgttcttgtaaaagaggaagcagggaaacaccatgtgagactatagtgagacagtggccatttgcaagccagaaggagagctctcacaagaaaccgaatcagccagaacatcgatcttggatttctaggctttagaactgtgagaaaatgaatt

SEQ ID NO: 781478 - DNA, 572 bp, Homo sapiens
taataacggcactgtcatcttaatatttagttgtttaaaagtcatccatttttctcctataaagacatattttagttatattttgcaaatatttcctaagacttatttaggcttgattatatttttaaaattctggctctagcaaggtaaaataacttgatttatcaacatatgacaatcatactgaagtaaactatctagagccctaaaaaaggtgggtacccagccrtttccttgggttatttcatagagctcaaaggataacaagcatttcaacatgagcagcaaaataggaaagctgggataagggctctgagtagtcccagctactcaggaggctgagccaggagaattgcttgaactcgggaggtggaggttgcagtgagctgagatcacaccactgcactccagctagggcgacatagcaagactaggtctcaaaaaaaaaaaaaagcaagagtctaaacaaactcataaccaaccataaatatctcaccctattttgttaaaaacacacaaaacccctgaaaacataataatttcttttattgaagatagtgaagaaagacctg

SEQ ID NO: 781479 - DNA, 571 bp, Homo sapiens
ttcaaagcccaattctgcttagttcaacttactttcaactgggcatggtggctcacgcctgtaatcctaccactttgagaggccaagataggaggattgccgcagctcaagagttcagcatcagtctgggaagcatgagatgctgtctgtacaaaatttagaagacaaaaaaaaaaaaactgggtgttgtggtgttgtggcccatgcctgtggtcccaactacttgggaggctgaggtgggaggatcacttgagactgggagatggaggctgcagtgagccagttataccactgcactccagcctgtgccacagagcaagacctgtttccaaaaaaaaaaawaaaatcttctggaaagagaaagtgagtgagttcttcctgccattatatgcagtgggccttcacgttgtactggccatatttttaccgattagcccactgccactgcctatggagcttaggagaacctcatgcaaacaggacttctgattgcctgcccttatctcctccttccttgggtgaatggacatctcaacagtactttgattctcaaggctcatgggacttcagt

SEQ ID NO: 781480 - DNA, 526 bp, Homo sapiens
acaggtcagctgttactatgtcactgtactccagcctgggcaacaggccgggcgcggtggatcacctgaggtccggagtttgagaccagcctggccaacatggtgaaacccccgtctctactaaaaacacaaaaattagccgcgcatggtggcaggtgcctgtaatcccagttacacaggacgctgaggcaggagaatcgcttgaacccgggargcggaggttgcagtgagctgagatcgtgccatcacactccagcatgggagacaagagcgaggcttcgtctcaaaaaaataaaaataaaaaaaaaaaaaacagagcaacatcctgtcctaaaaaaataaaaatgaaaaagaaagaaacaaaattggtatctaagacctaagacttagtagcaaaattattactaatagtaacagcttgcccttgaatagcaatttacagtttacaaagcacattcacatgcactgaatcattttgctttccaaaaccactgaaggaactagcaaggcagaaattaatatacct

SEQ ID NO: 781481 - DNA, 631 bp, Homo sapiens
ggggttttttgttggtggcggcgggggatgttcttcaaaaaaaaacccacaaatatttgctctaaaataacacttgccttacaaaatacaggtacccagttattaaaaattaatgctttgggacaacaatcctagtctccaaaaaacttagatcattattatagctatgtgtgatgaagagaaaaagaaattcttttgttgtcccaaagcattaatttttggtaactgggtacttgtattttctaatgtgagtgttactttagagcgaacatttattttaaaaagaaaagaggaagaagaactccccccacaaaaacaatgtataccacggaatacagtgcagccaagaaaaagaacaagatctgaacccagaaggcagasgttgcagtgagccaagattgcaccattgcactccagcctgggcaacaagagtgaaactcatctcaaaaaaaaaataaaaagaacaagatcatgtcctttgtagggacatggatggagctggaggccattacctttagcaaactaacacaggaatcaaaaaccaaataccacatgttctcacttaaaagtgggagctaaatgatgcgaacacatggacacgtagaggagaacagcacacactggggccttt

SEQ ID NO: 781482 - DNA, 572 bp, Homo sapiens
ttattttccacatgaatttttggaccattcaaaaaatattatagttcagccatggtggctcatgcctgtaatccaagcactttgggaggccaaagtgggaggatcacttgagcccagaagtttgagaccagcctgggcaacatagcaagatcccatgccaatttttttaaaattgtgaattaactttaccttttttactttccgcaaaggaaagaggactttggaaaaccactctcatttcacagtaatgatgcttgtattctctataacattargaaatattaaaatgttgctatacattttattgctgaaagctaatatcccaaactcattttgtgcatgagtaaagaatgaaattatttctgacaactacaataaaaatatgttgttgttaaataaagggttgttattagaaagaagttatccaaccaattaggcctgtgctaactgcattaacaggactatgctccctgttaatgttaggatcctacaaaccctgtgagctcatagggtttccaaaagcataagccgccttggcatttgggtttataagaatatttcttcttagtgat

SEQ ID NO: 781483 - DNA, 613 bp, Homo sapiens
ttatacttgtccctgaacaccctttaactgtgacttgtaggataatttctgaacccatttaaattctggaaacctgagagttgcctgtctaagcagtagctgtgctccttctgtggcatcttcttgtaaaatattggrttctaaactggttgcagtggaaacccagggccactgagggaagagtggaagccagatagagtgtcccctccttctgtgctggctgggacaggcaatctcagcccaggggtcggggagaggaaccgggattcatacccgcaggattttgtttgagatttcatgcctatcaagttcatcctcaaagaacccaatgtcattctgatttattattattatttgaatgagagtcaaccaccgactaattgtgtctgggatatgtcagccccaagcctgccttagggcaaaaggttggacaagataattaggactgtgaggaggaattgagagacttcctgtggaagtatcagagtagaagaagccaacacaaaaatctggcatcagtaatggtctttcttttattctcctctcaggacggtttggaactttgggatccttgaaggaccccgtggcctagcagatgagcaccctgcctgcg

SEQ ID NO: 781484 - DNA, 661 bp, Homo sapiens
caagcagacttctccttgcatctgattggttggaactggatcccttgccttcccttaaaccagtcactggcaaaggggaatgagattgccttgggcttaaagtaatgatgactcattctctggaagttaggagagggacttgcccttcccaataggaagraaaatccacctattacaaaatcagggagtgaaacacggggcaaatgccagtgagtaggccatgaacattgcctgccccaggaagaaaccagttcctacttgtagagaaggcagcagaatgccaaagcccaatttcacctatgccacagtgcagccaagtccagcccttccacccaccccctggtacctccccatgatttcttcactttacaacaggaacagtaatttgatgtttactttgagctcaggaaggctgtggggggcacagaatgtgcagtgggcattgtcagaagaatgatctgaggtgttgagagagaggcagagatgtagagaaaggtgctcagaagcaatgggtaataaagcaaagtgtttaatataaacattatttcatttaaatctcaaaacaatcctatgaagtagggtccttttccacagtttatggatcagaatgcagggagactaagttttgcccaaattcacatcatttgttcagtatgtcctc

SEQ ID NO: 781485 - DNA, 661 bp, Homo sapiens
caagcagacttctccttgcatctgattggttggaactggatcccttgccttcccttaaaccagtcactggcaaaggggaatgagattgccttgggcttaaagtaatgatgactcattctctggaagttaggagagggacttgcccttcccaataggaagaaaaatccacctattacaaaatcagggagtgaaacacggggcaaatgccagtgagtaggccatgaacattgcctgccccaggaagaaaccagttcctacttgtagagaaggcagcagaatgccaaagcccaatttcacctatgccacagtgcagccaagtccagcccttccacccaccccctggtacctccccatgatttcttcactttacaacaggaacagtaatttgatgtttactttgagytcaggaaggctgtggggggcacagaatgtgcagtgggcattgtcagaagaatgatctgaggtgttgagagagaggcagagatgtagagaaaggtgctcagaagcaatgggtaataaagcaaagtgtttaatataaacattatttcatttaaatctcaaaacaatcctatgaagtagggtccttttccacagtttatggatcagaatgcagggagactaagttttgcccaaattcacatcatttgttcagtatgtcctc

SEQ ID NO: 781486 - DNA, 607 bp, Homo sapiens
ttctatattctaaaattaattgctctcacgttgcctaagaacagaagcaagaaggtgaagtggactttgattcaagtttaagaacacaaatgatagtttagtattgtgttccaaaaaatcacaacgtattgcctcagacaaggaagtctcaaggtaaaaagtatatgtgttctgagaaccatattttctacctgagaaatatgttggttaaaaacttaagtttaaaaatttttgtttttaagttaaagattctagatgtcctctgataaatgaatggataatgaatggataaacagctgtggtatatccatacaacggaatatagtttagcaataaaaagaaataagctatcaaaccataaaagaacaagaagaatcttaaatgcatatcgccaggtgaaagaggccaatctaaaatcgctgtatactrtatgattccaagcacctgacatcctggaaaaggcaaaactttggagacagaaaaagaacagtggttgtagaggttttggggagggagggaggaatgaaaaggtggaacacagcagatttttagggtagtaaaaaactattctctgacactataatggtggttacatgtcattacacat

SEQ ID NO: 781487 - DNA, 646 bp, Homo sapiens
tcctgcatgttacattcttaaatattctcagtggagcatttttccagttcattgtgagtatccatttattgatttatttgtctgttatatattgtttgtcttatccaccacaaaatacacatcatcagaacagacacattttattgttgttcattgttatatccccagcatctagagtaagtcctggccgtaatagatactaaataaacattagtttattgaataaataaatgactaaaatatccactgggtatataatttttgatgattgaatagtatttcctaatagaggtgtaaccagaatttagttaactatcccttttcatgcttatgtgacatgatatttttattaacataaccagtgttctcaggaacaaagatcttggtyactagttttgatttttcttcaggatagagtctagatgtagagtttactaggttgaagcataagaagatacaaagccattacagcttaatattttttgcagattttttccctttagaacactagtaaaagttttacactcccataagcaatgaatggaagttaagtcttactatgtccttgctttttgtagtaacttttttcaactttctcaattctggaatttggaggaatttcatttctatcgtggacatcacatta

SEQ ID NO: 781488 - DNA, 611 bp, Homo sapiens
tgaaaaagctatgcctaagtggaaatatttagttatccatagaaatgatatttcctggtataaaggattttacctttatacctttattttgcctaaggtttttaatagacttctgactagttagcctaaacctgtgtatctgtaggtcttacatgtgatgatgtttacaaccttgatagctgcttcatggtagccaaggttgttggagtaggtcatgaatgctgccagctggcttcttctacaaattcatgccatccgaactcagctatggaccctccttgctatggaacagccttttagtctctgtttttttccctactgtatttcccacagctgctattccaaaccttttccattgttctcaarttcagaaaactattcctgtacattttgtatcagcagaggacctcaaaacatacttctcagtgattgaagttatccagtccaaactctagcttcttaatcctcacttggcttttgggatgctgttctcttgtgggtatctttctacctttccatttcttgctcctatttctcttcccacctctcaattagggactttcctacagttctctttggtcatcataaccatcctcctaataatatgccag

SEQ ID NO: 781489 - DNA, 609 bp, Homo sapiens
atctgaaaatcacttcttttctaaacatggttgtcttttaattctttttcttgcctgagggcactaaccagagtttcaagtactgtattgaatagaagtgataagagcagatccctgtcttgtcttgttcctgttcttagtgggaaagctttcagtctttcaccagtaagtatactacccgtaagtttcttttataaaatccygttatctatttgaagaagttcacttctaatcctagtttgttgagaatttttgtcagtaatggatgttagattttgtcaaacgatttttttgtctattgagatgatttaatttgtaaatatgattaattacattgatattctaatacaaaacaaccctgcatgattggaataaacaccaccgcttattaatgacatagtatccttttaatatatcataggatttaattcgttaaattttagttcgaaatcttggatctaaattttgtgggaggtagatctgtggttgtccatttttataacacttttgtctgattttggagtcgtggtagtgatgacctcggagaataagttggaagtactttccttggtactacacctttcaaattaaaaaaaaaaaatccataac

SEQ ID NO: 781490 - DNA, 570 bp, Homo sapiens
ccatagatcttgagatacctgagacatctaggtggagttgatcagtagggaattaggaataggatctggaccttcggagagatagctggacttaagatttaaaaatcaggggcaatcatgagtagttgaagccatgggatctggtgaaattattcatctatccattctttaaccactaatgcaacatacatataaaaatgttgcattagttgcaacatacatataaaaatgcttgcctgtcattgggctaaggggagtacagaataagttattaatggctttgtaagcatttacagagaagcaaaagctattccttcctttaaaaaaataataacagtgaatatttacagggtgcttatgctgtgccaggcagagttctgcctgctttatagctattgttcctttaatcttcacaataawcttatgaagtaggtcctattctcattttacagaaatggaaactgaggaaaagagcagttgaggaatttacttaatgttatccatccaataagtctccgaatcttaatgtccgttgcaagttaggatcttattattagaatattcccttaa

SEQ ID NO: 781491 - DNA, 565 bp, Homo sapiens
gaatatttacagggtgcttatgctgtgccaggcagagttctgcctgctttatagctattgttcctttaatcttcacaataaacttatgaagtaggtcctattctcattttacagaaatggaaactgaggaaaagagcagttgaggaatttacttaatgttatccatccaataagtctccgaatcttaatgtccgttgcaagttaggatcttattattagaatattcccttaacagagttttgtagaggagggaaaattaaaagaaaatgctaatatatcaaatggcatacagtattgtggaaaaaaaaaaaaaagagacgttacaggtagctatgataattgctactatcattaaaaatatttaatttggaaataagatgtaggagattctgaatagaataatttgaaaaaataggtttttctgtctygagctttttgcattttttcctgtggtgctaactgactttcaagcatcaatttgttctggctagacattctcagtcgggttcaaagttggtgatacataaagcaacaatagcaaaaacaagtaacttaagtcatagat

SEQ ID NO: 781492 - DNA, 597 bp, Homo sapiens
aaaataacaatacttttatacggttggtgtgaggattaaacaagtaaatagataagcagttcttagtagagtacctggcatttgaataaaaatcttagcattgaaaaaatgtttttattattattaaaagctggaaaattaaatagatctgttcatggatacctgattcataaatatcacaagaaaaattggtgtctaactttaaaaacatgtttttatggaaaatgattgtaccttttgatacagaatyggttagagggtacagaagtttcacccagtgtgcgcattcccattatcttatgaggagtctagatatgccaaatgaatttcagaacaagcaaaaatgttaaggaacattatttaaaagcatttttattgcactgacaatgtatgttaaattgaaagtgtaagtaataaaccatagagaaatggcaaacttctaccaattatattttgttgttgcatgttatagtacaatttatactttgttgtggtctcagattcagaaggagagtacataaaaagattccttttgtgggggtaaaatgtacctatctttatttcatcgtttatcattttgtgtgagtcttgtccata

SEQ ID NO: 781493 - DNA, 608 bp, Homo sapiens
ataaatgttttaagtttctctggagatactgatattccaagggcaactctagaaaacttcatttcagtgatgtgtaaagtaaaaaataaaatgcaagaattgtgatgacaatgtggacattgatatttttcatgcattttgagtgacatgatcaatagtctaatgaaaaccaactattacaagtctctgaaatcctattaaatttcatcttctaccatacagcactgtaaacatatcagtataaattgacatttcccagaagatggataatagttcagttttaattccgataatatttagaatatagtagacaacaccaagtcccattttataatgaaggctttaatacactggtatatgaaaacagagaaacaatgttamtgaagaaataacattaaaaaatatttttgaaccaaccagaagaacttgagttctggttaaagctagtctgacacacactggatttatccttttaaagtgcttcatctctgggtagtttgatgttaatgtcacagtgtcacttaccatctttcaggatggtttctctctctgtgccatctatcttctgccggccaattaggaaactggtggtgtcagcaaagtagatg

SEQ ID NO: 781494 - DNA, 472 bp, Homo sapiens
aacatttagtcttgggagggtgaaacctgaattctatctttagttgcctcagtggctcacagcagacactaacaatttacttatctacaaaacagaatttgtggtatccatttattattgacagtttaggacactaagactctcaaattacagagtctccttttccatagtgttatgttagacccttttcctacagtaaagggaagagagattagagcaagaaaatacatgtagatctttattaaatacaagtgactgtaatgagaaagacaacagggtagcacagaacactattttctatcattgcyaatgtagcatagacctaagcaagcgttaagtgatgagacaaacctgtgtgacacatagttcatcttcagaatgactcggagggtacaggaatcactgtgtaccatttatagataattcaggtacaatgaggttgagaaccttgcaggtagagcaggttctcaag

SEQ ID NO: 781495 - DNA, 589 bp, Homo sapiens
tgggagctggtgatggaaagagaacccaatgagatttggggcttgagcaattggattggtggtgtcattgatacagatgacagagtgttcgctgagcacctaggcactgaacagagatttatttccttcttcttaaccctctcccactttattcggaagttcatatgagccataacaaggattggaagaagttttagaagtaacctcctgggagtccatgaattagcagcagtgagaggctagaggcctgacaaagaattgrgaagcagctgctatatcccaagtggcaaatgccagtgtggatggagaagagagagcttcattctgtggcaggaaagcttggctgctgacaatgagactgcacccttgggatttgtcccttggattctttagcatctgagctctaacctctgaaacacaagaaaaaatgagcaaggtgatttgtccaggccacctctacttctggagaaaggagtcatagcaaatgatccaccactatctagtccctgagtggatttatacaaaccaccccgaagacactggggtactctaagattggccccagataagccatggggatacagcacag

SEQ ID NO: 781496 - DNA, 561 bp, Homo sapiens
acataagccaaataaattcttgagtttttattacaaagaggaagtaggtgttatttccattttatagatgaagaatctgaagatcggagagatgaagtggtttgctttactcgaactgaattatacaccaaagtttgtctgatcccagagttagtttcctaacacttgtctttaaattaacagaaaggccaggcatggtggctcacacctgtaatcccagcactttgggaggccgagacaggcagatcacctgaagtcaggagttcaaaaccagyctggctaacatggtgaaaccctgtctccactaaaaatgcaaaattagctgggcatggtggcacgtgcctgtaatcccagctacttgggagggtgaggcaggagaatcacttgaacccagcaggctgaggttgcagtgagccaagattgtgccactgcactccagcctggacaatagagccaaactccatctcaaaataaataaataaaggccaggcgtggtggctcacgcctgtaatcccagcactttgggaggctgaggtgggtggaccacctaaggtcgggagt

SEQ ID NO: 781497 - DNA, 490 bp, Homo sapiens
actctctcccaagacctcccactccaagccccctacaacatggcagcctcccaccctccagagtccccaccacagagcatccacagcctaaggcttccgaatcctcgaaggtcggatctagatggggcctcgagaagtcttattatacgtatagggaaacctacgcccagaggaggggaaaaattggcccgagatggtggcagactggggaccaccacctccctctcccccatctagtcccacrcacttgccccactgcagggctcctcccactgcaccagctgccttagcaagagaagcaaggacacagctctgggtttcaggaaagatggaaacccagaagaaggggcctgctggggccaactcttagcctttgactaaggacagtgtgacaatgccctgcccccaacctccccccacctacaagcccagcccagatcagtggaggtcagagtgggcaaccgtgcaacccacctccctcccagcacag

SEQ ID NO: 781498 - DNA, 655 bp, Homo sapiens
agcatcttcccaacacctaacttctttctacttccttttccatctgactgttagcacattgttacagactgggacattaaagcttatacatctattggtgctgggaagtgaagaaatgtgtatctgatttcctaggtccctttgaaacccaatattatgaaaaatatgtgcagtgatagcaattcttcatatcatacttcccaatgtgatttctttattactaaaagtaaccatctgatataggtctactgagtatcatctcccttttacagagaggcaactgagactgagggacaaaatgacttgttcaaggttatacagctcgtatactgtagaggtgggactcaaagctgagtttcccaactagagatccagcctacctagatagacattgcctgcaccgttttaaggtgtaaaattacttcaccatcaggaagtwgaaagggattctttttcctcccaagagtttgcatgttgtaccctgttccctggatgttaggagctccccatcactggaggaatccgggctgaggctgaggcctgcttagagggatacagtggcagagatttctactttgggtggaaggttgacctcaacgattcagactccctggaaactgaggatcttcaaggatccatctgtgcacttgtgaaa

SEQ ID NO: 781499 - DNA, 671 bp, Homo sapiens
tagcagaaccaagtgtcaattgaatttccatatgctagctcaaacaatgggaactgaaattttaaaaacaaagccattattattattattgttgttatttgagacagagtcttactctgtcgcccaagcttgagtgcagtggcacaatcttagctcactgcaacctccacttcccaggttcaagtgattctcctgcctgaaacctccagagtagctaggatcacaggcgcacgtcaccacgcccggctaatttttgtatatttagtagggatggggtttcaccaggttggccaggctgctctcgaactcccgagctcaagtgatctgccggcctcggcctcccaaagtgctgggattacaggcatgagccactgtgcccggccaaaagaaagccattaataatagtgtttaaaaatcaaaatayctaggaataaatttaataagagacatgtatattagtgtcttactgctactctaacatatgccatatagtgacttaatacaaatttattgccatacagtcctggaagtcagaagtccaaagtcagtctgtctgaaatcaagatgtcacagattcgccttctggaggctcttgggggagatgcttgccttttttcacttctaggtgctgcctgagttccttggctcatggcctcttcctccatcattaa

SEQ ID NO: 781500 - DNA, 650 bp, Homo sapiens
ccatgtatgtcccgagtgccggcttcttggttccactgtctagagtcaggcccctggctctgggcctcggctctgggcaagtccttgttctcagaattcttgtttttttttttaactagaatctcactgtgtcacccagactggagtgtagtggtgcaatctcggctaactgcaacctcaacctcccaggctcaagcaatcctctcacctcagcctccctagtagctgggactacaggtgcacaccactatgccgtgctaatttttttttttttgtagaggtggggtctccctatgttgcccaagctgatttcaaactcctgtactcaagcgatcttctcaccttggcttcccaaagtactgggatgacagacgtgagccactgcacctggcctaraatttttcttaacttcaagcagtgtgtcctgctgggggatgggatgagctagaaactgtggtcccatggggtcagcaaggtttggaaatgatcacaggggttcccaggccaacctcaccacctctgagctgagtgaccctgggcgagtcagttcccttccctgggactcagtcttctcctttgaagaaagggtacaagagaatctagaacatcgtaggacttcggcaaatgtcggtccctttcccccacactcc

SEQ ID NO: 781501 - DNA, 620 bp, Homo sapiens
atgggaatagtgtctatcacattgaacaaacatagttctaaacaattattttccttttccatattcagaaattgtaaaagaaataatgcaacaaaaataatgaaatgtacagttatgtggtaggtttaacaatgacaatactttgtaataaaattgttatagaaaaatatsaatttcttgcaaattatgaggagttttgtttatcttgttttattaaaatatagaataagatagataaatttataatagctgaaacgtttatctgaagggtagaataattctataatacgtatactttattacagcaagttctattgatccattctctaagatttaggatcagaatacaaaaataaatatgtggctctactacagtattttttaaaattatttgctaacagtataagatatcatggataagcaaatgtctttgttctttgacattgttatgattccttttctcctttgatttttagttgcaccttgatttaagatgaaatcagcattgatctggcatgcttcagagagactaaaagttactttatatttaatagttggttttatttgtggttgaaaagatgttttatgaactttttaaaatcgattgagtagagtgattc

SEQ ID NO: 781502 - DNA, 624 bp, Homo sapiens
ttttttatgctagaacagcattcacttgaatggagttttgcagtctaatatgcttttgaggttgcagtgctcagtactccctgcgcaaatcagaaatgtgaggagcatgctagagacaagcgcctggccaaggacactgcctttgtcagccagctctgcagaaggcggggcaagtactcctctctgaggctgggaaaatgcttggaaaccgccagaaccagctgaattgtaaaatatttcagacgtgttcgaagaaaacaataaatcatcaacataaacaagacatcattagggtgcttgatgggcatttcttgaatgagaagattctgagctatgattactgtgtgtttacctttgcccacargacataaatgaattctgtaatttggtaaaaaagaagaacatttctttactgtccggctggtttcctggggaaaaaataataatatttcaaaggggaaatactttgttaaacatattcctttacagcaacctagcatattattcaacacttaaactcacacattgcattttattctaatatcttgaggctagtatttgtgaaaaggtattaataaaaacaggctttcccttacatccttctcaataataatctgtcagttg

SEQ ID NO: 781503 - DNA, 613 bp, Homo sapiens
gactctcattttatgaggttcccctctccccccatcaccattccttttactgctcaattcttcattttgggtaaaactaccttttttctgaaagatatccttctttcagtcttttattgggaaagtttccttctctttgtctgaaaatgtctttgatcctcacacttgcataacagattagccaagggtcaagttctatttctttttcttttattaccttgaaaccctgttctcttgtctctggtgcccctgcacttgagaagactgtctgttgctggtcggatggtggttcctttgtgtgccagctctagctccttcctgatcgctatgtctgatggtggttcctttgtgggccgctccttcctgattaacctttactgttttggagtttccttgtgtcctgtcttggtaaggrcttatttgatttttaatttatgctccaaacttactgtgattcctgaatctgagaattcctttctccagctaatcctaaaaaattataaaccatatataatttacatttgactctcttccattctcccctctaatggaaataagttgtaccttcttattcccatgtcccttaaatccctttcctattttctctatcttt

SEQ ID NO: 781504 - DNA, 574 bp, Homo sapiens
gcagtttaacggactgtactatactgacagtaaaacgaactaatctggcatccatacactgtgtctgtcaaactcagtgatgcacacaggtttaaacattgttttttatgtgttttaatttttcatagccttctaacgtgacctgtgagaygtctctgcagagttgatgccatgaggtagtgagctcacctaagaatgtcatcgtcatatagtcagcaagaataagatatagaagacgatgccttcgtggctttacacacctcaaaatgtggagctgtatcatttatgtgattcttttaagacataatcactcaattgaaagcttggagcagataatgcatcttagtagccagagcttcgcggctgccattgtatttccgctccttcgtgaaggggagcgaggcgtgctctgcagagcagcaggtgtgtgccatgtgagggctggagggcacagcacgagagctgcttcgtggggctctcaccagttctgtggctccatgtccagaccagttctgtggctccgtgtccgtagcaaagctggatctggccacagctgtcgggaatgtctgaggga

SEQ ID NO: 781505 - DNA, 574 bp, Homo sapiens
gcagtttaacggactgtactatactgacagtaaaacgaactaatctggcatccatacactgtgtctgtcaaactcagtgatgcacacaggtttaaacattgttttttatgtgttttaatttttcatagccttctaacgtgacctgtgagacgtctctgcagagttgatgccatgaggtagtgagctcacctaagaatgtcatcgtcatatagtcagcaagaataagatatagaagacgatgccttcgtggctttacacacctcaaaatgtggagctgtatcatttatgtgattcttttaagacataatcactcaattgaaagcttggagcagataatgcatcttagtagccagagcttcgcggctgccattgtatttccgctccttcgtgaaggggagmgaggcgtgctctgcagagcagcaggtgtgtgccatgtgagggctggagggcacagcacgagagctgcttcgtggggctctcaccagttctgtggctccatgtccagaccagttctgtggctccgtgtccgtagcaaagctggatctggccacagctgtcgggaatgtctgaggga

SEQ ID NO: 781506 - DNA, 620 bp, Homo sapiens
gaattaatttttttaattttttaaggaatgtggcacatactatcaatctgttttccagaaagttttgggctgggtatggtggctcatgcctgtaatcccagcagtttgggagatggaggcaggtggatcatttgaagtaaggagtttgagaccagccaccatcaacatggtgaaaccccatctctactaaaaatamaaaaattagctgggcatggtggcacatgccttaatcccatgctactgggaggcagaggaagcgctcgaactggcgagacagagattgcagtgagtcaagatggcgtcactgcactctagcctgggcaacagagtgagactccatcttaaaaagaaagtttccatcattcaattatgttgtaatcaaatgttacttccaacaaggcaatctgattaggaaacatacatccttcatcacctctggagtctgagtaaagggatatggaaaaagcaaagaacaccagtgtacaagatgagatttcagcctacatcagccgcaccaccttgaaccaacatgctgtctcattttcctcatttgcaaaatgaggacgatggactagagggtctctaaagtcccttttaatgctatgattttaagagaaata

SEQ ID NO: 781507 - DNA, 638 bp, Homo sapiens
cctaactcattctatgaagccagtatcattctaataacaaagacagggaataacataaaaacaacaacaaaaatactacagaccaacattcctgatgaacatagatgcaaaaatcctcaacaaaatattagcaaaccaaattcgacagcacwtcaaaatgataattcactatgattatgtgggtttcattccagggatacagggatgattcaacacacacaaactgacaaatgtgattcaccacaaaaacagaattaaaaacaaaaaccatatgataatctcaatagacatagaaaagccattcaataaaacccagcatccctttatgataaaaactctcagtaacctaggcatagaaggaacatacctcaaaataataaaaaacatgtatgacaaacccacagccaactcatactgaatggggaaaagaagaaaacattccctataagaactggaagaataacagggatgcccattttcatcacttctattcaacatagcactgaaagtcctagccagagcaatcagggaaaagaaataaataaatacatccaaatcagaaaataggaagtcaacttacctgtttgcagatgatttgatcatatacctaggaaaccctaaagagtccttcagaagac

SEQ ID NO: 781508 - DNA, 627 bp, Homo sapiens
cttaaaatgaagtcccaggaagtatctaaggatccagactagagaagtttacaaaagttacagtgaggccagaaggagttctgctatcttttgcctggtggctatatagatttagaaccaatattggagctcttagaatcaacctgcttgatttgaatctgaactctatcttttgccaaaaatgtatatctaaacatcatattgtattccataaatatatacaataattatttgtccattaaaaatacaattgaacaatatcttaggcaagtagtataaccttaaggttctcagcttatttatttttaaaatattggtaatactcatatttaccttataaatttgtggaaaagttacatgaataaatacatgtaaaatgtttagaacaatgcctagttgagagtgttgcataaatacaagctatcaccattacttgactaaaatatagtcatagttgtcctctctcccatgtggacsaaaatgcttctttattattttaatcatcgttttgctgctgttgaatatattggctaaaaattgaaattaggcattttatataatagagcctatgaatatttattccaacttctgccttgatagttgaacaggtttgtctctgaaaatagc

SEQ ID NO: 781509 - DNA, 625 bp, Homo sapiens
tattctgtaacaatgtgccttcctaattttttctttaggcttattctaagtgtgataaccaaattaataaacatttccattatttgaaagatacacacacaaacattgtgtaactgttgtttagaatgatgtgtgtaaattatacttcttcaaatttagtccactgtgacaaaccttggatcaataaaatattcctaacatctagatgaattaaatgatttttatttacacttattgttygaaatcattccacattttactttacctgacacttcagcaataaatgtgctacttctaaaagttgccttgcttgttcatagaggactcaaatacttttattattatattactaatatcattcactccttaatctttttcttcattttaaaaaatagaattcatttttctttttaagatattcttagaatccactgatattttaacttaaattcaactagctgttttctaggcctgttacctagttgggattttttttttccacataaatcttcagaatgtttcatcatttcttgttgatatgcatttctcttccttggattttgctgaattatatgcttaagtaatttcctcacaaaaggatgtatttcaaaataaattgcataca

SEQ ID NO: 781510 - DNA, 615 bp, Homo sapiens
actttttatatttacttattttacttttaatcattgactatacaaaatttatttttatagaaattgttctcatcaccattgactaaataatatgttttcttcaaaatgtattatgccatgtttattatatactaaattttcatgtgtattgagttcatttctaaaatatgtattctggttttaagacatgtgtactcattcatcagtctcacacttaaagattatgttaattctaacagaagagaccaagctgaggaaagaatattagagttcaaaggctggttctttgaatcaactcagtcagataaaaaataattatgaaatgaacaaaacttctgaaamtataggattatgtaaagacaccgcacttacatttaattggtattcctgagaggagacaaaataaacaacttggaaattatatatcatgatatactccataaaattttcctaatctctctagaggttgacaagcaaatttaagaaatacagagaaccctgtctagatacgctacaagatgataatcaccaaggcgcagagtcatcagattcaccaaggccaatgtaaaagaaaaaaaatttattaaattcagctagagagaaccatcagaccac

SEQ ID NO: 781511 - DNA, 629 bp, Homo sapiens
attgtttagtatagatgcatattagtatcaggattgttaaccccatacaccatgggaaaaactcttatagtgattatgtacagcctttgtggcttttttgtttgttttgcttttatacttacaaattctacacacttctaaagaaactcaggctagtacttatttcccctaaccacttcagaaaagttatttcattcacatataagtcagattgacatgttacattcttcattccatgttggaatcctccagtctccaaagggattttttaaaatttgtgttcattaatgttcattctttatgctctaaagttctatgactataagaaaatacatactgtcacataaccaccagtataatatcatatggaatagtttcaccaccctaaaaaagccttttgcacttcacctattcaaatctttcttytttaccataaactcctgccaactaccgtctttgtaccatctatatacactatatacactttttccagtgtcatatagttgcaatcacatggtagtagcctttccagacttacttatttcacttagcaatatgcatttaagatttttccatgcctttttgcatgatcttgataggtcatttttttaactctgaattgtaatcca

SEQ ID NO: 781512 - DNA, 639 bp, Homo sapiens; identical to SEQ ID NO: 742996

SEQ ID NO: 781513 - DNA, 639 bp, Homo sapiens; identical to SEQ ID NO: 742997

SEQ ID NO: 781514 - DNA, 477 bp, Homo sapiens
taagcattttgggcagagggaacatcatgtgtaaaggtgaggaggtaaatgcaaataggctgaatctaaggacatgaaatatgtccagactggctgcagcatggggcacaaaaggagagcagtgaggtggaggcttggakgaacctgcagaggagggcagaggctgaggcatgtaggagcttaaaagcagggacaagttttgtgggagaagataaggagttctgttttggattatcagagaaagtaatctgcaaaactggctaaaagaagaagccagagagataggaaggagatagtgagaaagtgttgaatgaataccaaagacgagggcatttcaggaagagagcagtacctaccctcagctaagttttaagctccccagagcaaactgtgcttcatgcagccctagagtcccaccactaagaggtttaaaggaggccctcgaagggtctgatgggtgggctttggggatccagg

SEQ ID NO: 781515 - DNA, 609 bp, Homo sapiens
cccagcgctagaggagagaatcggtaccctccctccggacgccagtaggtgacaggcgatcctaagcggcgggaacacgccaacgcaccctcgcctcccggcgccccgcatcgcctcgaccctcgggctacagaacctgtttccacgccggagaaaaccaagggaagagttggttgtgatgcagcaaacaggagccatgcggagagcctctgcggagccctggcgatgctgcagccaatatctgctttccctgtctacacagcccaacaaaccgattatgaccttctccctgatcttctgcgacaccgacscagtctgggtgtcacagactccggcggtgccagcgaaggtgcccggccctacccctgcggcgctcgccccccaccaccgcgccgcagccccctctgcggaatccgccgggatccaggctgccactcacctcgcgcgagggagacgcaactcggctgcactgtcctcggcgccgctgcggggctgctgggctgcggggctgcggggctgaggagctgcggtccgcggcgtcaggggtgggcgagggtgagcagcgcacgaaccatccagagcccagaaagtctccgtgccgaccgcggc

SEQ ID NO: 781516 - DNA, 633 bp, Homo sapiens
taagtgaggcccctcaccctagtctacacttctgcatgctctcctgcatttgtgtatgctttggtttgtgtgttctccttaaagagtcagcattctgcatatcatagtactgggaggagagtattaagccagctctggcaggaaaaacaactctgcttggagatagaactgaaaatagatttccccattgggcagaaatacagatgcatgaaatctcttgtgcatcccatttgatattcctggcagcaatagttctgggatcttattatttgaatgcttcttgcccattgtgatgaggactacatatccacacatgaatgtacatacgtacagtagaatattagaaatggcagaaattccatttattgtgtaacgaaacccaatctttccagtcatttactagtcaggagagctggtctcacaattacatrtggaaatattatatttgaagatatatgatcttcataattttgtttcggatatgggtgaaaagcagtctgagagctaccagattaaataaacaacagtaataatcttttttattcctgggaaaagaaatgaggctgatttgaaaaagaacaaatcaacttgttaatgtttcaaaaaatatctcattagaagtaaacacaattt

SEQ ID NO: 781517 - DNA, 621 bp, Homo sapiens
ttgcgcatttctcctataggtaggtagctgaaatcttccctgaggaagcccaaacagagtgaagtaggaaaaaggaaatctgacctaggtattcatggttaattttacagatccacagaggaaaatggtaacctttgaagtcttcccacaaatccctaaaytaggcctaaggccagaagagttctatatcagaacgttttgggaatcgtcttcaaaaccggaatccatttggccaataaagagtctatttgaattacaaattgtgttgtccgaatcagtgtttccaaactagtctaccagcagagccacaacttttctgtttctgccactttaagagagtaacaaaaaaaaaaaaaaaaaaaaaaaaaaaaaacttctcagctgccttactttgtagctgagataacagaatttggccacagagtgatttacttgactgatctatttatggcaacttgtttatgtatttttaaatcacagttacaatgagctattgttcacgtgtatactgtagaaccacataggttgcaaatcaatcccaaggaatcctgatggtacaggattattttttagcttaaaaaaaaaaagataccaaaggaactggtgaccactttaaattgc

SEQ ID NO: 781518 - DNA, 579 bp, Homo sapiens
aaagctcctagtgccttgaagcagtatgagcgtggaggatcctttataaaaaatacttagtctaaggccaacatttcaccccctttcccttttcctgtcccccctccttctcaaagccacattctctattctttccattttccactagagcccttataaaagaattatcttttcatgagttcttaaaaatataaaaatggtatctaaatcgccattgaaatatatgttcactattgcttgtttgtgtagttaacttttataaamccccaaaaagggcaaattgatggattaatccaaatgagattgacatcgttgcattttatatcctgataaaatcacacaggaacaggagctataatcttatactgtgtatcctccaatatgtgtttatcttattctctggctaatgaggaaaaattaacattgtcaatactgcgattgaagctggagataagcttatgtctagtctatcacatgactgactatagtcatcttctgtttctctgcattaaatcaacacagatgctttggctttataaatgtcagtcaacatcatttaggctctgccgcctgctcagt

SEQ ID NO: 781519 - DNA, 502 bp, Homo sapiens
gtattttgtaaaaatacaaaaattagctgggcatggaggcgcgtgcctgtagtcccagctactcaggaggctgaggtaggagaatcgcttgaacccgggaaggggaggttgtagtgagccaagatcgtgccactgcactccagcctggtaacagagtaagactccatctcaaaaaaaaaaaaaaaaaaaaaaraaaagaaaagaggagagcaaattcctatacaagcaacatttatgatcatcttcttgcctttccagtaacctttaaaatgaccttccctaacatgcaactgattcctacgaatatctttcatgaagtggcttttttttcccccatacagtcaggcaaattaaaatctactacagaaaaatgcttgtcattcagtttctcatgcctaattaagagatttcttagggagaataaatatgatgatccacacataaatatttgggatccttgaacatccaggcattatgatgctgatgctatattaattacaaa

SEQ ID NO: 781520 - DNA, 604 bp, Homo sapiens
gtaatccgcccgctctgggggactagggaggaagaagtagaggaatggcttccgggcttcctctggtcaaagggccttgctctcattattacccttgtctggaatgttctctcttcctccatctttctcctctttcttaactccagcccaagggtcactttatgagggaaactctcccacatttcccagtctcggcctccttggtttatgatctccargaacctgttcctttccttcagagcatttatctcaatttgtaattacatactcattattatgattattttatttatgactgcgttcccacaagcctgtaaacttcatgagagcagaaatggtgtcttttgatatttgtcacagtatctccagtattctgtgcagtgccttacttgtaatactcatttaattaataaataaatgaaagaattatttaaaggaatagccggtgatgctaaggacaatttccactagagacattttttataaaagtaggagagcagattcaagaatagcttattagaattaccactgtctatgtcaggtagcattctaggacaaagtacctcatacattttttttcaattgctatttatagtttttactt

SEQ ID NO: 781521 - DNA, 604 bp, Homo sapiens
gtaatccgcccgctctgggggactagggaggaagaagtagaggaatggcttccgggcttcctctggtcaaagggccttgctctcattattacccttgtctggaatgttctctcttcctccatctttctcctctttcttaactccagcccaagggtcactttatgagggaaactctcccacatttcccagtctcggcctccttggtttatgatctccaasaacctgttcctttccttcagagcatttatctcaatttgtaattacatactcattattatgattattttatttatgactgcgttcccacaagcctgtaaacttcatgagagcagaaatggtgtcttttgatatttgtcacagtatctccagtattctgtgcagtgccttacttgtaatactcatttaattaataaataaatgaaagaattatttaaaggaatagccggtgatgctaaggacaatttccactagagacattttttataaaagtaggagagcagattcaagaatagcttattagaattaccactgtctatgtcaggtagcattctaggacaaagtacctcatacattttttttcaattgctatttatagtttttactt

SEQ ID NO: 781522 - DNA, 445 bp, Homo sapiens
ggttccttgtctagggtgcacccctttttcttggaaactgtgagtaactatcttttaatgaaaatcatttcctgatctgttgtcttcctatacctcagatcttctataaatacactatcttttaaaacagtttttttccaagcatactgtaagtactttgaaggaagkgattgcacttcaaaatttcttagtatcccaggactgcttaagtatagttggtattatttattcaataaatactcgctacttgattccatttaggacctacggatttaggatattatatgttaaattgaaaattattcactggaaaaacctcaatattcacttaaacaatgtggattcaatctgctatagttcttcaggaaaattgggctaggattatgtgaaagattattattaagggttcctatgttctctgttcagttcttcccttcatatttgt

SEQ ID NO: 781523 - DNA, 597 bp, Homo sapiens
aaaggtacatctgtaaaatacaaactgtacttcctgaacacaaagatagaaagacagctctgtgctaagagtgcattcaggatacttcgtcacctgtggcaaataaagtcagatacattgattattccaaactttttgaagcattcagaagatgtacagcactaatcaaattattttgctaatcctttcttaatctctcacattttccatatctttgtgtgtttggaccacattatctgaaaaaatgccattacatttacctaaattgttaattaatttcctaatgatcaatgggacacatgttaaatgtataatcgagtgctcataatcaccataataatttgatgtgtccattgtagcttcattatgttttatattcccgtgaaatccacatgatgcccagtgttactcagaccccttggatctaagaaagattgtctagaatcctcatgtcttcrtcctacaaagactccaatgccttgcccaagtgccagtaattagaaaaaataaaattgatgttatctcctttcttagatcatctcttcactactaccttctttcccatagtgatcttggtgagaaaaggccacacatctt

SEQ ID NO: 781524 - DNA, 656 bp, Homo sapiens
taaaagaaggtagtcatcaataccagctgcaactacatgactgtaattgtcatgagtatttcctctttattaagaatgtgtttctgcatatatacacttgtactaagaaaaatcttcattttatttcctttatttgtcctttatcatgtgacatamgatttattgatttttatcagcatctaagtgttgttaactttatgtaatagcatttggggtgagaattttatgcttccagttgtatgagggatagctgtaattatgaccttattattttatctgaagattatgtatgatttcaggagatgtgtatggattcaagttgacaaggggtgaacttatgatggttaaatgttgagtgtcaactagattggattaaaacatgcaaagtaccgaccctgggtatgtctgtgaggatgttgccaaaggagattaacatttgagtcaatggactgggagaggcagacccaccctcaatctgggtgagcaccatctaatcagctgccagtgtgcccaaaataaagcaggcaggagaagatggaagagcagacttgctgagtgtttcggccttcatctttctcccatgctggatgcttcctgccctcaaacgtcagactccaagctcttaatcttttggactcttggacttgcaccagtgg

SEQ ID NO: 781525 - DNA, 611 bp, Homo sapiens
atctctgagctcttggtgaccagcccttgtcccccaagctgaccaagttgagagagtacttgtcctcccagcactgtctctcagtatcaggaagttgagatcagtggcagggaaagatggaaggattggcaaggaaagtgcagggccaagtagagtagctcagagcctcagcaatgggcacctgtcctcccccaaacaacctgtggtctctccggctccctgcttttccaccattggtcccatcctgggctaccagcctccactgagctgctctgggaacttagggtgtctcacattacttccctgctatggcatattttggtttcagttgagctattttytgaagatgtggatactccagttttattctttttctgtctgtgtctcagtactcttttccttttttaagaatgttccccaagcctggcttttgccagaccctgtgccatctccccaagctctatttacaagaacaagaagtgatttgtctgtttatagcaggtttaattaagacagttatgcgccgtgaactctttgggcctcaatcaatgcacttagatttggaaactcagatagaatcacatcttacacgtgcggccccggctggcgcc

SEQ ID NO: 781526 - DNA, 656 bp, Homo sapiens
aagggtttttggaaattgtggtgataggagaaaaagagagatgagataattctatttgcagtggattattaggagagaaacaaaaatataaaatatgaatcctttgttttttttctaaaataatttgtgcccacagctcaatttgagcacatggatttggctggcctcccaaaccatgtgacttggaaattgatttaatctttcctcccaaatcatgtgacttggaaattgatttaatctttcatatgtgatcaaagaatctttatgcaccgcccccccsctcctccttcagtagcaaaatgatggactctttgcatccatagcctacctgtgtaggattgggagagatttcgaactaggagaagaaatggaggcagcagcagaaaggtgttatgctcagagtctgtagggatattgttggtccaaactcatgtgacttatttctgttgttttaggagtctgcaaactttctctttaaagggcctgagggccaatagtaaattaatttaggttttgcagctgacatacggtttctctgatttcttcttcttcttattcttttgcttgtttttttgcttttgtttttacaacactttataaatgtaaaaaccattcttagctcaaagatagttcaaaaacaggccatgggttcgatg

SEQ ID NO: 781527 - DNA, 621 bp, Homo sapiens
tcctctaaaaactattttcaggtaaaattctatttaatttttaaactcatttctaatcaatatatctggattggttgcttcctcttgatatattgtgctataaaacaccaaataaataacaaagaaacatggtacattcaaataaaggaattaataatttaagatcctgattgattcaggtttaatcatttcatactaccttctcttcctacagacccctataggcttccattcctctcttcctactttcttcatctccccgtatttaaatttcagatgatttaaactctatatgtgttttttatggtcttcagaaaaaagaaatagagtcaaaaatgtaataatatttattcaatacctatgtgtttattttatgtacaatrctcagtgctacgcattagttataagagggaggtggggatttaaagatgaacggtatatggttccttgtgtcagaaagcttacattctaatgattacttatccgaaaaattactccaggaagttgccgttttagtaatatatagtaaccataaaatcagacaaatgttaccaaaacaatgacggagaggggagacacagcttgggttgagaacaaaatgaagactaacaaggaggaaaa

SEQ ID NO: 781528 - DNA, 644 bp, Homo sapiens
actttcagtaagttatcaacagtgaaaaatatactcctttttaaatgtatttatattaacttcatgattatttaacatctttttccccaatttaatatgtagtaaacttaaaatacacccttttatcactttgtatttttagttaagaaggttatagttatttcaattaatgtgtagaaaactagatattgttatgtaaaaacttctactttaattaggcaacacatattttggaagacacatgtgatagccacgtacacamaaatttcatagtatttctgatcaaaaaaaattctaaaacgtcaaatataaaaaaattgaccagaaattataatgacaagaacatgaaatgtcttaattagtgacactaattaagtgtcaaaataataaaaatagtatacaagttataaaagtaatctcagagaaatatacattcagtggagaaacatacagcgacattttctctgttttctttctccctcctcagagatttaacgggttgcttctctcatcctagtaacactggatttgataagtatatagcagttacctatggttgtttatttcattattttgccataaatgttatttactgacacatgttataaaactattctggttttaaacataagcattatttaaaa

SEQ ID NO: 781529 - DNA, 695 bp, Homo sapiens
agaaagaaaaagaacgaaatatgcagcactcaaaaaagggaaacagtttaatagagtcatataaaatgaataaattgtgaccaatatccactgcttaatgtagaggagaaatgggaaaaaattcttctccaaagagttcaaaaacagaagacttaygactgaaataagtatcattaactacactcctcaaacaaataaaaacctgtaagtctaattctgtgaagttttcaagtagccaaaattttaattcagagttactattttgattatatccatttcatggatttcaaaattggaagtcacccaagatatttgtggttcaactacaatttgaaacacatttcacagggacctaagcagaagtggttttaaaaattccaattaaagctatgttaacattttcttttgtaaaccttttggtctctacgatggtttgaaaagcaatgaaataaaagcaaaaaataattttaacaaatataaacagaaccaataattgccttcaagtaaaaacttgatgcaaccttttaggaggactgctaatatctttaaactagtatgtattttcaaggaacaaatttgaaaataaatgtgttacatttgaatttttattctgttaataactagtttaattaaaaagaagtatgaaagctttactgagaaagaacaaaaacttcagaccacagtaattgtttggt

SEQ ID NO: 781530 - DNA, 630 bp, Homo sapiens
tcaagatgtcctctgctctcctccaagagtcctctgtgctcatggctgcctcatgtgtgtctgtctgtgtgtgtgtgtgtgtgtgtgcgtgctcacacatgtgctgtattagtttcttttggctgccataataaataaccacaaactaggtggtttaaaacagcaraaagtgtcacatttttggaggctggaagtctgaaatcaaagtgtctgcagggcagtgctctccacaaaggcactaggggagagtccttccttacccctccagctctgacaactctagacattcctggacatgtggtctcatcacttccatctctaccctccacagtcacattgccttgtcctctgtgtctcccctctatatgcctcttattaggacacttgtattagtcaattttcatctgctatagcagaataccacagactgggtaattgacagagaaaagaagtttatttctcaagttctggaggctgagaagccaaggtcaaggagcctgcatctggtgaggaccttcttgctgcatcacccatggcagaaggtgttccagcacatgctttttgagggacacattcaaaccataccacttgtcattcgtgatctttagcttaattatagctgcaaagact

SEQ ID NO: 781531 - DNA, 630 bp, Homo sapiens
tcaagatgtcctctgctctcctccaagagtcctctgtgctcatggctgcctcatgtgtgtctgtctgtgtgtgtgtgtgtgtgtgtgcgtgctcacacatgtgctgtattagtttcttttggctgccataataaataaccacaaactaggtggtttaaaacagcaaaaagtgtcacatttttggaggctggaagtctgaaatcaaagtgtctgcagggcagtgctctccacaaaggcactaggggagagtccttccttacccctccagctctgacaactctagacattcctggacatgtggtctcatcacttccatctctaccctccacagtcacattgccttgtcctctgtgtctcccctctatatgcctcttattaggacacttgtattagtcarttttcatctgctatagcagaataccacagactgggtaattgacagagaaaagaagtttatttctcaagttctggaggctgagaagccaaggtcaaggagcctgcatctggtgaggaccttcttgctgcatcacccatggcagaaggtgttccagcacatgctttttgagggacacattcaaaccataccacttgtcattcgtgatctttagcttaattatagctgcaaagact

SEQ ID NO: 781532 - DNA, 612 bp, Homo sapiens
gcttctcccctagcttgcccctgagtgaccctctcatgctgcccctaccgtgactgccgaccaggctgcagctccccttcctgcctcccatcccaacaagcccttcccctgcatccctaggtcagaccttcttggcctcatatggaatcttgtccctgagggtctcctgaagagtgccctggtggcctggggaagcccctcctgtccactccgccatgctgctgagacccaccttctgtccacagctctgagcctcccgcacttgcctctttacctyctcaccccctctgcctccctccccggggagctccacacccccgtccttccacgctctgtactctctcaccctgggggtttgcacatgctgtccttctgcctgcaacacttttccctgccccaacctggaaaatgcctagttatccagcaagagtgactcaggcatccccttcggaactctccaaacaggtgaggctctgcaggaacacccatagcccctcatgcagtcattcattcattcaacaaatacctaccaagcactactgagtgccaagctgtgcttaggcctggggagttggtgggggggtggacaaaccctgccttcttgtaactatt

SEQ ID NO: 781533 - DNA, 549 bp, Homo sapiens
ctgaatatcgctggacgcatggagaaacaaagttggggtgggatgattcctgtgcatgcttgttttccctgcagcagatggaatatatttccagaaccatctgcttagaacaatcaacgtttccaatgacccatagccaatgtgcctagaattccttggctattccctgatctgataattgggacaaaaccaagtgaacaccccgtaagacagtcctacctgcccttgctgctttccaccaccgtatcaaggtcacagattcatttaaacaaktccaaagggcacacgacctcaatttttataatttccttactgaaattcaagagaaacttcctagctgttccccattatccttttgttgcttggaaaagttaaagtttaaatggcaattctctttagaatttaatatctgttcccaaacattctcggtttaattgctaactgattctttagaaaattgaattgctatattacattgtttttatgcaccaatggcctgggaaatgttggcagcagtcctgccaaagataacgacgtctatgtatcaag

SEQ ID NO: 781534 - DNA, 528 bp, Homo sapiens
  misc_feature 505, 506, 507, 508, 509, 510, 511, 512, 513, 514, 515, 516,517, 518, 519, 520, 521, 522, 523, 524, 525, 526, 527, 528: n = A,T,C or G
ctttcagcagaagtaacaaaataacattaaaagtaaagagtgacctaatttcagctctgaatgttttaaagtaacaggtatttgggtataacaaatgaagatctgggataactaaacttttggataatcatggttagagcttattcaatcattgagtggtaatatctggaaacttattttataaaactgtagataattgkaattgagcataagaaaatctgtgataattcaaattttagattctcttaggataaaaaaaagacccctctagaaaacacaaatccgaacctcatcaataatttagaaaggggaaaaacatatttttaatgaactgactagtgtttatggaattattaatgacagtcatgtaatacaatcttattcagagaataccttgattttaatcagaatataagcaggaatgtattattatgaagcatttcatagcatttaacagcacaaatatatgtaatatatgtgttatatcaaccacaaaataggtttnnnnnnnnnnnnnnnnnnnnnnnn

SEQ ID NO: 781535 - DNA, 640 bp, Homo sapiens
aagtaaaagtaatgatccctagaaataagttttaattccctcatagaagtttccaagtctaaatgttttaatctcctactaatacctacttcaatttcaccattacctgtattaaatatattacattttataaacttgagctgtagatacatgtgtaaagtgaagccctaaatttttaaataagtaggccaaagtcatattcatagctggcatctggacggttctagaactctagaatttcaccacactgtggcaggccacttccatttcctctcttaatttctagttatatcaatctttctttggagatttttctttacagtaatggcccattatagaaaagttagatgtgaacatttttattgaaaaaatgttttaaaaacgactatattttcataagcagtaacttgtggaaagtaaaatttgcrcaagacaatcaaataaatgtgtacgtgtatgtgactgtgtgtgtgcatgtgtacacatgtatatgagaaatcagtaatttttccttatttctgtttttaaactattattttgaagtttaggggtacatgtgcatatttgttatacagatgaatctgtgacatgggggtttgttgtacagatcattttgtcacccaggcattaagcctagtac

SEQ ID NO: 781536 - DNA, 547 bp, Homo sapiens
aaactgtttctaaggccaggccacagcagctcatgcctgtaatcccagcactttgggaggccagggcgggcagatcacccgaagtcaggagttcaagaccagcctggccaacatggtgaaaccctgtctctactacaaatacaaaaattagccaggcatggtagcacacrcctgtaatcccagctgctcaggaggctgaggcaggagaatcgcttgaacccgggaggtggaggttgcagtgagctgagatggcacaattgcactccagcctgggcaacagagtgagactctgtatcaaaaaaaaaaaaaaagccaaaaacaaacaaacaaactgtttctgcttattaaaatgaactgaagtatgatatctgataagatagggaatttataagttgtttctctaactcctttcttctttagacatagtaacaacaaaataattataaatgctgctttctttgcaaggtgaataaaatgttcggtcaagggagtattttacaaatcctggggtattattaaatattgccagctctggtacccaaactaa

SEQ ID NO: 781537 - DNA, 611 bp, Homo sapiens
aataaggacagggacttttaagactgttgaattgttctgaggctgacacagattacagagtttagatttattaagaattcccaagtttgaattatttttattgcactctagacacaattaactaactctagggtgatctttaatataaatgataatttctactgtataagaaaagaatggagctagttctggtgaatgcaagtattcttaatgtcatgtttatttaaagataatatttaattagaaattatattaataaaactatgtttctaatttctttgtcatagtgctgtgttttctgagtttcatgcagtgattagataagtctaacaattaatttagtggccaccatcctttaagtacatgtttttaaaacatgtttttttaagaggtccagataatgtctctcttatttaagatatattttycctcaattaaccttcagtgtaaaatgcttgttaattggagaatgccactattggtaaaatgatgtataaaataactcattctgaaaaggtcaatcattttcagaaacaaaattatgctattcttcaatttgaaaaatttagagatagactttcagggccagatattttaggaccaaaagaaac

SEQ ID NO: 781538 - DNA, 682 bp, Homo sapiens
tataatcaacctatatttgagtgctttaaatccaatatgttttgattgaggatcaaaattagttgtttgcagcagatgagcagtgattacctttgattcaattatgttggatgtgggatcagtgattctttcatattgtgctcattacaaataataaagggtaaatattatgaaatgttcaaatgacacatgccttcgtaatatgaatatatttaatatttttacaacttagttgtcgactgccaggcgcatcacagcatgataatatacaattttgctcatctagaagatatccacatgtccaaactccacttygtgaagcaagtttaaagtgggagaaagaaggaagtgagtatattgtagacaactgactttttgaaaatcagacaaacagatatcaagaaaaatttgtgaccaggatagaaaatgtatgttgaggggaaatgtttctctccaaaacatgttaaagatgagaaaattgttttttgactaatataccaagtgtgttttgcagctgtagcaactccaattcacacctataaagaagcacaggtggtactgtttttgcaactcagttcattcatatgcaatacaatttaatgctcatgataaatttaaattttaagtttaggggcgtatttttccttttgggaaaagcacttcaaactttcaaccttgtaca

SEQ ID NO: 781539 - DNA, 626 bp, Homo sapiens
taggttctccaggaaagagtggaatgtttaactcttgccaatacacgttgaatttccctaattcaaaaatctgatatacacaatgctccaaaatccacaactttttgagcactgatgtgatgcaaatgaactaaattctgcaatcaaaaaacagagtggctgaatggataagaaaataaggcccaatgatctgttgcctacaagaaacacatttcacctatgaagatacacagactaaaataaagggatggaaaaagatattccacgccaatggaaacaagaaaagaacaggagtagctatatcagaaaaaaaagatttcaaaatagaaactgttaagaagagctaagaaggtcactacatatatatcctctctctctctmtatatatatgtatatatatacgtatacatacacacacatctatctatatacatcctcttgctgaattgatccctttatacatataatatatatgacatatatttatatattaaatttttgtagagcattcagacaagagcaagaaataaacgagcatccaaattgcaaaggaagcagtcaaattatccttgtttgcagattatatgatcttatatttggaaaaatctaaagactccaccaaaaaa

SEQ ID NO: 781540 - DNA, 601 bp, Homo sapiens
aatttacaaagaaaagatgtttaatggcaaattcacagttccacgtggctggggaggccttacaatcatggcagaaagtgaaaggcatgtctcacatggcagcagacaagagaggagagcttgtgcagggaaactctcctttatgaaaccatcagatctggtgagactcattcactatcatgagagcagcaggggaaagacccgcccccatgattcaattatctcccacgggatccctcctacaacacgtgggaattcaagatgagatttgggtggagacacagctaaaccatatcagacatgaataatcattctcaaaagaagatatacaaacagccaacaaacatgaaaaaatgctcaatatcactaattatcagggrcatttatttattagtttatttctaaagcatttgaaattaatttgtagacattattgcattaacctacatattgcaacctaaattctgggaactaaaacatactacctgtataagaccaataccataaatatatcccataaaaatgttgatacaatacaataaactgaaattatgatataaagtttgtatttaagacttcccaattatcttgttactgtact

SEQ ID NO: 781541 - DNA, 639 bp, Homo sapiens
tttgatgaaaatgacaaaggtgatcaggaaaaaaagtataataggaaaaataaaatataatcttaaaaatatttttctccaatttgattgcctatatttgtgcctttaccctcttttccctccattatggaggagaagagttgtaggacatgatgtgtattagttcactttcacactgctataaagaattatctgaaactgggtaatttatgaagaaaacaggtttaattgactcacagttctgcaggttatacaagaggcatgactgggagacctcaggaaacttacaattatggtggaaggtgaaagggaagcaagcatgtctttaccttggtggagccgaagagagagagagagaagggggatgtgccacacacttttaaacaattagatctcatgagaactgactcactatcatgagtacagcctgataatctgcccccctcccccaattacctcccaccaggcccctcccygacccttaggagattacaattagttatgagatttggatggggacacagagccaaatcatatcattccacccctggtccctcccaaatctcatgtccttctcacatttcaaaaccaatcatatctttccaacagtctcccaaagtcttaactcattccagcatt

SEQ ID NO: 781542 - DNA, 622 bp, Homo sapiens
aattcatgtgataaatataaaaaataatattacctaagtgttcattacctactggtaaagctctaggctctaggaatatagatataaataaaacaaagtgctttcatggacctggaatgttggtgaaaggtaggagagaaaataagcaatagaaaatkcttgtacaatatgctaagtcactgtaagaatgtataaaaaaaatgagcagaagagtaatggttttgaaatacctatctaatgagatgatatttgagcagagatctgaggggatggcaaatccgtatagaaattcttagggtagagtgttctgggaagtgcaagtgtgaaagccctaacagaaagtcctgcccatcaaggaccagcagagatctgggtgacaaagtgaaatcagcaaggaaaaaatcgaagggagatgagctcagagagttcagcagggaaactgatatgaaactgaagagtagtttgagattgtaagaggagctgctaaaataaagtaacagcaatttctctgtgggaacagaacactctcaatatcatgtacccagaaccaaagtgaggcagaatctaatagaggagcagaagaatcactaataacactaaatcaaactgttgtgttcatcaa

SEQ ID NO: 781543 - DNA, 612 bp, Homo sapiens
gttattaactcaaggtacatttgaaatgttagttaattttcctcaacactaaatcataaatggtgttttgcctctcattaaagattaaaaaaagaaaatgtgaatatgaaagcagagagtgagagtgaagaaggcacaaacagaaggacattgggaacaagcagccgctaatcatcatcataacagactcaggctgggtatgttgaaggtttatttttaaatcatttttcatatatttgacagtaagacaaatactaagaaaggacttgacttagctaacaagaaaaacatttatatcatcttaggctttgagttctctcagacttaaaaacactgcaaatatattccacattcttcagggaatctaagaccaaatcaagagaacttaagttttaatgacagcctttgcttttgtgtgctatgtcattttgtcttaagtggagctctactgctacatcttagtgactccatctayaagtgaaggcatatgtactctgtcatctacttcaagcacacagaatcaataaaaaatgtttaagtctctataaacttgggaagtattatgactttagaacactttctttcatgcagaatctctcaataagtgtaagt

SEQ ID NO: 781544 - DNA, 603 bp, Homo sapiens
atacactctcccaagactaaaccagggagaagttgaatctctgaatagaccaataacaggatctgaaattgtggcaatattcaatagcttaccaaccaaaaaagagtccaggaccagatggattcacatccgaattctaccagaggtacaaggaggaactggtaccattccttctgaaactattccaatcaatagaaaaagagggaatcctccctaactcattttatgaggccagcatcatcctgataccaaagccgggcagagacacaaccaaaaaagagaattttagaccaatatccttgataaacattgatgcaaaaatcctcaataaaatactggcaaaccgaatccagcagcacatcaaaaagcttatccaccatgatcaactgggcttcatccctgggatgcaaggctggttcaatatacttatttttagagagtgaaaaaaggaaaggaaaggaaataaagaaaagaataactcaaaacttatycctctacttgtttgccttgattatcagtgtttattccactaaaagtatttctttaggtatcattcagaatagctaaaataaaaaatgatgacaacactaaatgctattgagg

SEQ ID NO: 781545 - DNA, 663 bp, Homo sapiens
gtggaatgccatagaacaactgacctgtgcctaatcatttcatccctacactgagactcactcgtccttagttttgttttcatttttgtgactgactttcattaagattttaaacaataaaaaaattatctgtcaaaagctatttacccttttctaatgtagaaataataaatatccaacatgcaatctacttaactgcagtagtgtgaagtacagtatcttcatgcattaaatcatattttgatcatgattggactttcttctcacagagccctattaatttcttagagtgaaatattgaaagttccacttaaatatttttaggaagactaaagaccacattccaagagtaggtaagaatacatctcctttcttctcacacacacttattgccagggtrcacctactaatgtggagagagagagagcacaaaggaggaaaggggtcaggccacagccttactaaaaacctacctgtttcttttgcttccctccaactcacccacaatcctcatgcttcccaatccgcaaagcaagagcctaaaatataatattacccagcatttattgaatgatgacaatgtgctatgtatcatggaaagccttttgtatatactaatctttattcttcacaataaccctaagaagctagtatcttatctga

SEQ ID NO: 781546 - DNA, 591 bp, Homo sapiens
tggctagcatttacaagcattgtatcactgaagaatttgttttgcaattgaattacaatcaaattttgagtggcaaagtttttatgttagtagttgcctgtaatctaagaagtgattgttgccatgagaaaaccaccatatcgttaaatgtttcagcagggtagataagacatatacttgcttaagggttattccaaatgactaaggagatccctttgttgtctaatattccatatttataaaaataagaatgacaattgttttttatctctttttaacgctctttgtgcaattttacttcttgacatttatcctatggaagtaatccacatgtatacacaggtatagctacaaagacattcaattrctgcattgtctatattagggaaattttgaaaattacctgaaagccaaataatatgaggcagctaaagaatgaaaaagaaccaaaaaggttgttgtggatccacacttcctaacgtgggcagaggcttatgactgctattgagaggaaaaaggcaggttacaaagctagatgtgtatgataagcccacttttctgaaaatcaaacatatataaatagaccaataa

SEQ ID NO: 781547 - DNA, 603 bp, Homo sapiens
aaaggtaaattaaaggagtcacatgctggaagtgtataaatattaggaccagcataactaataatttatttacgctttctatttttaatagtcaaagaatgacaaaaatctagttaagctaaatctaaaagagttctaattgagtaataaaggtaaaagtttaattattagtttttttctcaagatagaacataaagcaatggcataccttgtcaataaatcttagattcagtgatatatttgtgactgtcatataggctacattatttgaagggytggttgaagaacagtttctgcaaaatatctttccaaagaatcataaagatagacctgcaaatgctacattgtcacttgcacagtggcccaaaatgtctgcttttcagtagagaggtttattctgaagtagatgcaaatgttatattcaggaaagtctgtgctatggagaggtaaaatatacattttcatttaaaatgcatattttcttctatttttatgatgtattattttgttttctgtttgttctcttttcatttgaagtttaaaatccatcaaggtaaaacttgtgtatctggcacagggtattacaggcatttacgtgtcaac

SEQ ID NO: 781548 - DNA, 564 bp, Homo sapiens
ttaaagatgtggtattctatttttatacctagaaaaattcaattttgacaaagctgtcagctttgggaaggcagctcataacaacagtgaatgggtgagatctcattacttcgaagttcatacaacaaacaatacacctgacaagggattaatatccaaacatacaaggaactcaaacaactcaatagcaagaaaacagtcaattaaaaaatgaacaaaagatctgaatagacatttctcaaaagtaggtatacaaatggccaaaaagcatatgaaaaagtgttcaatatgactaatacctatcaatgctttttcggccttatcattgtaagaataatacttcattagtaaagaatgtcattgattttcaattaaaattcaatcagaagagaggtgaasttaggaaggcctaaaatatttatccaataaaaccttttgttctgtcatcaaaggggacttaactttcaaccactttgttgactttgttgctatgtatggccaacctgagagagaaaaagcaaaccattttagacagccctgatgtataatcttaagtgtagcatt

SEQ ID NO: 781549 - DNA, 614 bp, Homo sapiens
ggaaaatgatatgcatagcaatctttacaaactaccatcttaataaggctattgtctcttaggtttattatatgttaccatttcctgaattttctgcactcctttaatatgtaaatactttcagatatcctttttgagttcttttcatatgacttagagtgtagagtggtactcaggtttagtccttagatctcttctcttttcctattttttcattcccaaactatacgcttttttgtttcatagctttaaaagcaatctatatggtagctcacaaatttgtatttccttcttattttcttctcttaactctgtattcaagtatctaatagtttatcagataatttcttcaataactaaaagcatctcaaattcaacatctttaaaattgcaattcttatttccacactatcatcaaacatttttccccagccttctactcttcgacaaatggaaacaatctttctggttcrtaatgcaaaacaaaccttggagccatattccaattggtatgtttgtttctcttttttttttctgacagtctacatccaattcaaatttcaactttaaaaatagattcagaatcttacaactgctaatgctactactgtagt

SEQ ID NO: 781550 - DNA, 632 bp, Homo sapiens
agctctaatccataataacaacataaaaattcaagaccaatgtatgatacaataagattagaacgtattatagaaagtaggatgtttggggtataaagcctatcatttttattttttcttgtatatttggtaggtaattctcaaagagtagaaaaatacattacactctttcacccttgaactactatttctcttcttgtagccatactggcatttttccattccactgtagtcagaaagatcagttataaatacaaattcccttattaaatttctgctgaatttccctgcctctttccacttttgcatcccttccacaactttaaaatcctcaagcattttacattgctgttaggataaakttcaaaatacttatcatgacctacatgtccttggatgatgaaatctttgctttccatcttcacttcacccttctcctccttgtgtttatatcctctaaccattccaaggaacttctgattgtcctcagaggctttatatactcttccctttatatggaagcatctttaccctcccgtctgttaacttctattcattctccttgtctgccaaggtccgctcagttttcctgttaatggaagtacaaattgcattattctttttccttctag

SEQ ID NO: 781551 - DNA, 555 bp, Homo sapiens
gggttagaaacagaatatattagccactgcctatacttccggtgggcttgtagacaatctagtttatgttacaaggctgccattatgtttatttactcaacaaatgacaagcaagcaacttagacatcgtatttaacactgagggttataaaagcaatgtcttcaaaaataataacctggaatatactaagttcttcccagggaaaagttttatcagaaaaaggcaactttgctatgctgcaattttcaagagaatagataacagcctggtaaccaaactactttaggtgaacttaagasagatgggcttgtgcagggcacctagatgaagctttccaagggcatacaaaaatatacacccctgttactttgcttttagaaagcaccaccagcaccaacatcactagacttgaaaatagtttttctgtgactagcagagctcagaattgagctactactgtatatgggttgactcaatttgcaggtctgtaatttgttctcagggaattgaaaagacagattggatagcaatgtagtattctcctagaggagaca

SEQ ID NO: 781552 - DNA, 666 bp, Homo sapiens
tccattttacctttcctgaagattgaggacagtaaggggtatgaaggttttaccaaataccaagagcctgagaaactgcttgggtgatttgactaataaaggccagttcatttttggactgtacagaggtgggaaggccaaacctaagaattttgtcttacagaagggaagaaatgaccatggtggccttttcagactctgtgggaaaggcctctacccatccagtgaaagtgtctacccagactaagaggtattttagttttctgactcagggaatgtgaataaagtcaacttgccagtcctgggtgggggcaaatccccaagcttgatgtgtagggaagggagggggcctgaacaatccctgagcagtagtakaatagcagatggaacactgagaagtgatttccttgaggacagatttccacaatggaaaggaaatgagaggttttaagaggcgggctagcggcttgtaacctacatggaagaggttatgaaacaataacagaatagaatgggcctgtgagctggaaggagatatttttcttagtctaagaaccattcgccttgtgtgggaagagattgataggtggaagtttcagtgggggagtaggtgggagtgaccgatgagaaggagaaaaactggctgtgagggacagaagttggaat

SEQ ID NO: 781553 - DNA, 593 bp, Homo sapiens
tagagggaaaaaatagcttaaattggttatgcattgcattaatgtagaataattcagaaaaatacaatttttccaactaaaaacttgataccaaaaaatgttcttccaacttttaaaaaatttatgctgcatgccaaaaatcttgaacatatttcataaaataaaatttagcaactgactaaaaatgtctggctatgattaaacatttttgtggtaacaacatcttagttatacaagatttgggtggatattagctsactggtttagtacttactgacttacttaaatttcatgacaagaatgtacatagaagcctaacaaccatatttcatccaatctaaaaacaccaattgagagcctgagaatatgacaatactagaggtacaacgcaggatacatcgcctgctcttgaggcctctaccatctggtgaagataagacatttactcatatttatattaaatcaagtaagtaaaaactgtcagaagaggggtataaaataaatgccacaggagagtaaaggaggaacaatggctagatgagttaatcacaagagaatgagtcttgaaagaaaatgttgagagctaaagatac

SEQ ID NO: 781554 - DNA, 474 bp, Homo sapiens
caatggaacacacaaataaaacttagcacaactggtgcttcctatgaaactaagaaaacgcaaagtgagcaagacacgtagcaacggaataatgcttacttcatcaaatttgagaggcaaagagtacactatacatgaccattcatcttgaaaacaatgtaacaatgtaagattggggaaaactcattacgccagaacttagaagacagcacaggcttgctttgccacatactacgtgaccttgggaatattccctaaatctctacgtttctcaggtgcaaaatkagactagctattccctaaggcagtgttttccaaactgtaaattgagatacattggtagatagtaatttcaatttggggaaccaggagcagcattaaaaaaaataagtatatttttaaaatgcaaagactaggaaataaagtgcattcgattctgtacaaagtgtaaataagtattatttcaggaagctt

SEQ ID NO: 781555 - DNA, 601 bp, Homo sapiens
aaggtgtgagctttttgctttttactagaaaaacaatgatatgtaaatttcttattataatttgtattactctactcttatttgctatttgtcaactctgcaagagacaagggttggtacagaaaatatcattttatcagaaggaaaccttgtcttctacagtaggtactaccttcttgagctgattctggataataaagcttgcttcgcaataatccagagttttccaaaccatatatttgactccctttactgactgatatgcaaagttgtgtttaactatatggaaaattgtgaatccttttcwtccaagtctacacactccacttgcttttcccttctaccttgaattcatgtgcattcccccagttttctgcctttgtaatggaggcttcagttcttctgcagccacagttgcaggaaacccaattgtaatcagcagctgccctgctgctaaaagctattagtgccaatgttgttaatgaccgacccagttgaatgtgctgatttaaggggtagacttatttcttgtcactccctagggccttgttcttaaatgagatttctacgttgtttagttgtttactcctctagcataagg

SEQ ID NO: 781556 - DNA, 549 bp, Homo sapiens
atatcacaaatgcttaaatggaagttctaagtaaattgatcaaggtcataggactctaggtaacagaaacaggattggaacttgtctggctagctggaaagcccacacaaatcatgaacactctactactttccagtgttaaatgatgtgtatacaagaacaattggaggagcatacggtcaactttcagatatcctaaggtcctttccacagtaacaattggaacaggcctgtgatggtcagagtgaccacygggcatctgcttgaatctttgtggggaatacagagcagcgaggggggccacatggtccccagtaaagcagaggtcacaggtgtcacatacaggctctggtgaatcccacggagtccctgtagaaatctcacatctgcttaccccgagaaggtctcccagaatcctggagctgccttgctccagaagtggatctccatagcaaccttaggccaaaagagtctcatgcacccgttctagtccaaacatgctatgatggactttgtttccatggggcattcaatacatatgtgaatctg

SEQ ID NO: 781557 - DNA, 500 bp, Homo sapiens
taactctaatcttcaaggaccacacaatttactaggcttaggctctagtttataaccgaataattaaattaatactctattccccatcatagcacatcagggatctatctgttttgtttctgtttctttttactacttttctgttgcctttcctattctctttctttcctagtattgcaatcctacagttctttaagaataaagttgttaccccctttgaataattttaatctcctaatttaattcctttaataaagttcatattcatttagttataggcattcctaagggaatcatgcatttttattataattagataatgaatattcgatgaccaagattctgaaataaaaatyataatgccagtgatgaaaatgcacaatatctagaatcttttattacagaattaccaatgagaataatctactgggaataactaatctgttcaagctggcgaaagcagtggatgtggaagtaaaggttttaatattgcccaatag

SEQ ID NO: 781558 - DNA, 597 bp, Homo sapiens
tcattctttctatttttttctactcattaaccatgccctcctccccctagaatgaaattttaagttcaccattgaggatacttagaatttaaaataattctaatgtgttctgaataagccatgaccaaatctgcatatacatggctttgaaaagaattaatttttaaggtatttttttctcctctttctagattgtgaggtaaattttaaaaaaattctgtacagaaatggaatttaacttggttattggtaattaggccaatagagaccatgtttcctttggaagcctaaattatctacagggattatgaagatcaaatgaatccaagtttatttttaaggtaaataaatcatttwaaaaaaatgaaagccaggcatccattttgcattgtgaggagttcttggggctcagaaaatactcctccaaaaatatggctctttggcatgctttgaattaaaggaaattaaaggcatcagaaataagcctcagaaccaaggtctctccagtgttccctcccaagccccactctgatctcttttctttcctgaagcattgggagctactcttgctggaattttattttttgtttttttaga

SEQ ID NO: 781559 - DNA, 625 bp, Homo sapiens
caggcctctgatccatctccagctgtgcgagtcaagctgtctatccaccagatcatctgctgaactctctttgtcagtgtcttgctggctttagatttttccacatatttttctttgctggtctttgaaacttccttcttgatctcttgcaagtcatcactatcgtcctggacagcctccttcagcagctccagctcctccttctccttggttagggacttattttgctccttcagtttagaacacgcatcgctaagtacacccatttcttctttagttattttctcctccttcaagatctccagcacaggggcagtgtccttcagggcctctgagggcaggataacatcaggcacttctggctgctggtcagccactggcctctcaggggtggcttcttccacttcgtttcttgggatagcttctgcagctcattmtccctgtgctccagctggatggccgtctcctcctgtaatgtggcctccaattttactttgttgtccacctgctcacccttaaccttgtccactttcacctgggctcccttcaccactgtctctggaagagtctgcaaggtggatttgagctggtcagtaggagagagggtgtctgggaggtacatagc

SEQ ID NO: 781560 - DNA, 614 bp, Homo sapiens
aagggtgatgctgggattcaaatccaagcacgtaagaaagcaaccagatacaaacttgaggcaacctatcaagacaaatgctaggtagggcaggctcatagcaggcaataccaacaagcttgatggagcgaaaattgggagttctttaatttctatagaagtagatgtgttgccttttaagtgaagttgtagtgttaatggaaaggggtcccgatcctgacccctttccacttcttggatctcactcaagaaagaatttgggacgaatccataaaatgaaagcaattttattaagagagtaaakaaataaaataatggttacttcatagccatagcagcactgagggctgctggttggctatttttatggttatttctttattatatctaaataaagggtgtattattcatgaattttcaggtaaagggatgggctatttccagaactgagggtctctctgctttttagatcagataggataactttggaatgtcgccatggcatttgtaaactgtcatggcgctggtgggagtgtcttttagctaatgccatataattagtgtataataagcagtgaggacgaccagaggtcactgtcttgattttggtggga

SEQ ID NO: 781561 - DNA, 630 bp, Homo sapiens
  misc_feature 210: n = A,T,C or G
ttaaatgtaccttaaactttggtttgtatgcttttttctaaatttgtttcagaatctcagtagttttctgggtggctcatgcctgtaatcccaacagtttgggaggccgaggtgggtggattgcttgaggtcaagagttcgagatcagcttagccaacatgatgaaactccatgtctactaaaaatacaaaacgtagccaggcatggagncatgtgactgtaatcccagctactcaggaagctgaggcacaagaatcgcaygaacctggaaggcggaggttgcagtgagctgagatcacaccactgcactccagcctgggtgacagctaggtctcaaaaaaggaaaataaccatctcagtagtttctaaattagtatgcatctatttttttaaatgagaatcttgttacatatggcactatagagtatgaacttttagtaattatgagttaagcagttcaacttattttgaattttattttcaaccataacacctttgctaagttatgagaaagctagtctgctttttgtgatagtataaaatatttattgtcaatggttgtttttagtaatcataaatgatagctaaaactattttgcatcataaatttttaagtttgggcccatcagt

SEQ ID NO: 781562 - DNA, 309 bp, Homo sapiens
tgtttatttgcctttttcaccctggttctctcatgagtatacaatggagtttccaggaggctctgcgacacctgttggcatcatcaccagatggctaatggattgtgtgctggtgtatctcacgcttttaaatgtcccagtttctagcccggtgcagttgcaccakccctgctactcgggaggctgaggcaggaggataatttaagactgggagttccagaagaagacctggtgtcaaaaaaaaaaaaaatggggcaacgaaaatgagagcaatacagctttcaagaatgggaggggccaggggtggtg

SEQ ID NO: 781563 - DNA, 622 bp, Homo sapiens
catgataacctgtataaaaggatcctcttgggcattactttctgggttttttgtttgttttcagaaacagggtcttgctctgtcatccaggctggagtgtcatggtgtgatcatatatcatatctcactgcagcctcgaatttctgggctcaagctatcttccagcctgaacctcctgagtagctaggactgcaggtgtgtgccaccatgcccagctaattaaaaaacttatttttgtacagatgaggtctcattatgttgcctagagtggtctctattcctgggctcaagaaatcctcccctctcagcctcccaaagcactgagataacgtgtgtgccactgtgcttggcctgaattttttattttaaaatacattttgtgagctgtgcttagtaatgcacacctgtagtcctagctacttaagaggctgaggcaggggsatcgcttgagcctaggagtttgagaccagcctggacaacacaggaaaaccccatctttacaaataatcaaaaaattagccattactcgggaggctgaggcatgagaatcgcttgagcctgagaagttgagctgcagtgagctgtgattgcaccactgcactccagtctggctgggtgacag

SEQ ID NO: 781564 - DNA, 576 bp, Homo sapiens
aaattatatgtttataatacaattggaacaaattaaagataacagcagtaggataagaacaagctatgggtattcttctcacttgcttttccctgtgcatgcttttaatactttgttttaaaacaaagtaacccatgcttattatacaaacttgaacaattatgaattataatgtaaaaattaataaaatcctatcatttccttcaattccatacttctagaattaactaatgttaaaattgatgtgtgttcrtcaacaactatcttgtgtccttctaggaataaatatatacaaacataattcatgaatatgtatatatgtttgaatatgtataaatattaatatgttgaagcatatgcacgtacatatatgcgtaaatatatatgcatacacacacaaatctttttcgatttctttcttcctttgttcattcattcctttgtccctcccttcctcactccctgccttctttccttcaaggttcgtaatatactcataataggttcttttgcttaacaatatgttattgacattccatgaattagtagtttgtaatcttggctgcacactggact

SEQ ID NO: 781565 - DNA, 576 bp, Homo sapiens
aaattatatgtttataatacaattggaacaaattaaagataacagcagtaggataagaacaagctatgggtattcttctcacttgcttttccctgtgcatgcttttaatactttgttttaaaacaaagtaacccatgcttattatacaaacttgaacaattatgaattataatgtaaaaattaataaaatcctatcatttccttcaattccatacttctagaattaactaatgttaaaattgatgtgtgttcgtcaacaactatcttgtgtccttctaggaataaatatatacaaacataattcatgaatatgtatatatgtttgaatatgtataaatattaatatgttgaagcatatgcacgtacatatatgcgtaamtatatatgcatacacacacaaatctttttcgatttctttcttcctttgttcattcattcctttgtccctcccttcctcactccctgccttctttccttcaaggttcgtaatatactcataataggttcttttgcttaacaatatgttattgacattccatgaattagtagtttgtaatcttggctgcacactggact

SEQ ID NO: 781566 - DNA, 528 bp, Homo sapiens
aaattaactgaccttaaatggatgggttgatttctgggctctgtattctgtcattggttgatgtgtttgtttttatgccagtgccatgctgttttgataactataactttataatatattttaagataagataatatgatgcctgtggctttttctgtgtgtgtgcaagactgctttggctatktggtatctttttgttccacaatggggaaaggacagtctcttcaataaatggtgttgggaaaactggatatccatatgcaaaagaatgaaattggacctttatctcacaccattagcaaaaatcagctcaaaatgaattaaagacttaaacataagacctgaaattgtaaaactactggaagaaaacgggaaaagttctaccacatttgtctgcaaaatgtcatatatattcaacagaatactattcagccctagaaaagaaggaaatcctgtcatttgtgacaatatgaatgaacctggaagacattatattaagcaaaataagccaggcatggaaagacaata

SEQ ID NO: 781567 - DNA, 626 bp, Homo sapiens
tagcgatacatgagatgtatgaaaaggttaagaaggttaagaaatctcatcatctccatagtatttgagagttgtgaactatgttaaaacatataggctatcactgtatatatttttcataattggacatagcaaagagagagccacaaattcagttactttaatttgttttgcttcttctaaggaattagattttataatggagtctggagcagtaaatgcattataaaccttgtgttatttcttttcagttttgaagataagacattaaaaacaaaattaattcagaattaggtatgagactgtccaaaatatctgttctgggatggacacttcttgagttacagaaatgcaatcataagattcattgattgagaagtgtaatggagttaracgctatgaggagaaattaataatattgtatagttagtccaccaactggtaaaaaaatggttgtttttacagagtagatcatttgtgctgtatgtggcatcataagacttaatggtgatttcagtgaaagatctggagatgcttcaacaaatttagacatagctgaaatcattttaagacaaggaggataggttgtaatcattataataagaaataggctataataggcaatg

SEQ ID NO: 781568 - DNA, 607 bp, Homo sapiens
atgtaattgagtaatatccctaggacatggccttactgctaatattcacaaaacgaaagccttatcacaatcaattttcctataatagtttttccttgggagacgtatggagacacctaggattcatacctttcagcagtggatgtacagaatgtaatggcttgttatggctcatttggggtcccagatgacataataaaaatgcataaattcaaaggtttgataacttaatgatcagagtctggtgtctaatatggcctgtataaacagagctgggctgtctaaactaacttgaaaaargaagaaaacttttaagataggactcaatgtctgagggcttcattctaaactctcagaaaaaagagattagtttttttctgcgtagaaaagagaaagagagattagtttttttctaccgtttgttccccagataagcaactggacagactttgggaataggacaaatattgctatattaacatgtaggtccgatgatctgcagtgattagtgcaaacagcttttccttcttagcataatgtgattaatttctaccttaggagaaacaacaacatacatagatgtgaggatacataattgttacatctt

SEQ ID NO: 781569 - DNA, 657 bp, Homo sapiens
gatgaaaaaagtagaatcaacagggacagcatcacttactcaaagcatgaattacagcaaaatggaagctaggaatggaacacagacattgtggccccttgtcacttgctttttccatgaaggatgtaaagtaggattcagtgtttgaaaaaaggagtggtatgttgtaattttaaactaaattatacttttattacttaattatatgttcattagaataaattaggagatataaacacccagaaaacatagaacactcctataatttcataacctagaaatgatagctattcgcatgcaataaaatttttggtgcacatgtaaagctatatttttgtataaatgtggtttataatacatcaagtatttattagcacacttttctttcaactttatatttaggtattttcaactcaggaagcaaatattgargaataattttaaattattgcctagtttccattacataaatatgcttttttaaaaactcttttttttggtattgtttctacttatacagtattacagataatgtttttattaacatcattaaaggtgtagttttaatggaagtgaagttgctggaataaagaaaaacacatgatactgaatcccttatttccatggagctatttctcaccaaactgtaatttcaac

SEQ ID NO: 781570 - DNA, 572 bp, Homo sapiens
atatgtgtcagcagtggcctgtctgcagaagctctctgatggttaggcagagtttgctggtgaagtagctatgacaccagtcaccaggaagtgccctggttggacacctaacgcagagttgcaagtaggcatggtcaggtagggaccctgggagaggtcggcagacaagggggtgctcagatcagactagtcctgacccatgggcaagacacckctactctgtccaggtctgacagtcaacaaaggctagagccacgtagaggagcatggtgcaccttggggaatgggcatccctactgggctcactgcctctattcccatgctaaacactctgggcttcacacaggctagagtcctgtcactgccagcactccaagtagctctccctgccagctcaaatttctatgggcatcatggggtctcctgcagttaggattcgagaggtccatgggaggagttagcaaatgctcacctatctaattcagcctttcctctggagacattgagcgtcatgaatgagtcccagtgcttggcagccctgtgcagggttcccgggttcctctcactttggt

SEQ ID NO: 781571 - DNA, 572 bp, Homo sapiens
atatgtgtcagcagtggcctgtctgcagaagctctctgatggttaggcagagtttgctggtgaagtagctatgacaccagtcaccaggaagtgccctggttggacacctaacgcagagttgcaagtaggcatggtcaggtagggaccctgggagaggtcggcagacaagggggtgctcagatcagactagtcctgacccatgggcaagacaccgctactctgtccaggtctgacagtcaacaaaggctagagccacgtagaggagcatggtgcaccttggggaatrggcatccctactgggctcactgcctctattcccatgctaaacactctgggcttcacacaggctagagtcctgtcactgccagcactccaagtagctctccctgccagctcaaatttctatgggcatcatggggtctcctgcagttaggattcgagaggtccatgggaggagttagcaaatgctcacctatctaattcagcctttcctctggagacattgagcgtcatgaatgagtcccagtgcttggcagccctgtgcagggttcccgggttcctctcactttggt

SEQ ID NO: 781572 - DNA, 635 bp, Homo sapiens
gtctttgcagctgctcatttctctgccttgtgtactagtactccaggtaaccacatggcttatttctacactttattccaccaaatagccatgcacaaaatatttactgcagattatttttgtaatagtgaaaattaaaacacaagatgtttctcagagaatggctacagaaactgtaataaatctttactatggaatattaggaagcaaacatgttaacatcaataggttatcaggacatataattgggtaccaaacacattgcaaactgctgtgtgcttgaaagttatagtcagacaaaaatttaaactgtatawatattgagtatgtattcatccatgtgttctgcaataattttaaattaataataaaaaataggctccaatttctttctacatctttgtagaaaaaggctccaactccaatttctttctacatctttgtccatttgctcttctttcattttcatttagtaagggcctctattcaactcacaagcttatttagcttcttgattgcattctgttttatcttttctaggaacagacaacaatgatcatattcttaaatctttgtctaaccatcctttgttttaagaaatggctccttatttctgggttcattttgtacttttt

SEQ ID NO: 781573 - DNA, 635 bp, Homo sapiens
gtctttgcagctgctcatttctctgccttgtgtactagtactccaggtaaccacatggcttatttctacactttattccaccaaatagccatgcacaaaatatttactgcagattatttttgtaatagtgaaaattaaaacacaagatgtttctcagagaatggctacagaaactgtaataaatctttactatggaatattaggaagcaaacatgttaacatcaataggttatcaggacatataattgggtaccaaacacattgcaaactgctgtgtgcttgaaagttatagtcagacaaaaatttaaactgtatatatattgagtatgtattcatccaygtgttctgcaataattttaaattaataataaaaaataggctccaatttctttctacatctttgtagaaaaaggctccaactccaatttctttctacatctttgtccatttgctcttctttcattttcatttagtaagggcctctattcaactcacaagcttatttagcttcttgattgcattctgttttatcttttctaggaacagacaacaatgatcatattcttaaatctttgtctaaccatcctttgttttaagaaatggctccttatttctgggttcattttgtacttttt

SEQ ID NO: 781574 - DNA, 635 bp, Homo sapiens
gtctttgcagctgctcatttctctgccttgtgtactagtactccaggtaaccacatggcttatttctacactttattccaccaaatagccatgcacaaaatatttactgcagattatttttgtaatagtgaaaattaaaacacaagatgtttctcagagaatggctacagaaactgtaataaatctttactatggaatattaggaagcaaacatgttaacatcaataggttatcaggacatataattgggtaccaaacacattgcaaactgctgtgtgcttgaaagttatagtcagacaaaaatttaaactgtatatatattgagtatgtattcatccatgtgttctgcaataattttaaattaataataaaaaataggctccaatttctttctacatctttgtagaaawaggctccaactccaatttctttctacatctttgtccatttgctcttctttcattttcatttagtaagggcctctattcaactcacaagcttatttagcttcttgattgcattctgttttatcttttctaggaacagacaacaatgatcatattcttaaatctttgtctaaccatcctttgttttaagaaatggctccttatttctgggttcattttgtacttttt

SEQ ID NO: 781575 - DNA, 638 bp, Homo sapiens
tgacttttggcttggtaaaaagtcttgatttagagccagctcttttacatggtttaataaaataatccacgcattattattaatgcaaagattaattattaattaataatacatattattaatgcatagattattattagtgtacttctctgtatggaaaagaagtctgatctctttagggtactgttttaactcaaccgtgggtccttcttactggaaagatttctttctttggtacaccataatttattcattgttttcataagcatcattgcagaggaaacagagatttttgttttttaggaaagctgatccaaaatttagagattatgagtttattggaggtctatgattaaaataggattaccatacaaaatattttttaaggcaaaacaatctttcattttatttgtttgcacaggtgacaccattatccacatggaaccacaaggatttatgaaaattctggcatgtcttgccagttgttccaactgaaaactrtcctatgcgtggaaatttgcttctacctcagagtctaaaatttaagctaagaatcttgagtatgctgtggtaaaatagaaagaataactacatttaagtaaatatcgagcaactatttgctttccttattttcctcc

SEQ ID NO: 781576 - DNA, 635 bp, Homo sapiens
ttcttaatttcaagaagactgtcattaataaacacgaaaaacctctaacttcttcaaatatatttaacgtgactcagtagtgtgccgagaagatgcaatggaattctaaaacctacgtttgcactttttctgtctgctaatccacataatttctgactggaggtacacttggaatttactttatttggccttctgctgtttgatgtgccagaatctcccacagatacaggataattggtttagcgtttggggatctggccacaaggtggcagagcttctctgctcatgtagaatgtacgaaaggatccttttggttgacttctgtgagtaggctgacgrcagaagcagatgcctctgtggacagtttaagaaaccacagtgctttggaggaaaggaagagatacttgataatatagctctcttggctggagattgcaggtcccagtggggagaacaatgaagacatttgctggattttcgttcctgtttttgtggctgcagctggactgtgagtcgagagcttttggggaacagagggtttagtaaatactcattagaagtctgaggaggagactcatctggtcttttccagaatgtctgaagttactacagtgaaaaaaataaaaaagcaaact

SEQ ID NO: 781577 - DNA, 637 bp, Homo sapiens
gaattcactgcttttatagtaaggagtaaaccaaattgctctttgtctcagagggaaacagtacctcacccctcaaggtttcttgctgcaagcataactctggaaattggtcaggtagagtggtcatggtcgtaaaccactggcatacctagcaagacatttatgagtataagagattaaggatgrtctggttttcaacaatatccactccatattcttacattgtgttattttctagaaacttttctcatgagtgtgccactccagaagccgttctgatcaatttgacggacagagattccgagactaaatacattgaatttgcctcaaacaatgtttaaataaggctactatcagcagaccaatctgcaacattaacttcacccatttagtcagctgtgacaaagtcccaaagtatagataactaggatataatttcttatccattatacatggaagtttagattgatacgctaatctttgttttaattctcaaaaagagtccaaaaagtagccaccattcctaatggaaagatgttctgtcccacctattcccagacataagcataacccaacaggttaatccagtttggaatttattgttaaacttgatttggatcagcattacatcactttt

SEQ ID NO: 781578 - DNA, 549 bp, Homo sapiens
tagactacgttgtgtgtttgcaagtttttttcaactttttgcaaatctcaaaaaatttttccaatatatttattgaaaaaaagttcacatataggtggacccatacaggtcaaacttgttcaagggtcaactgtagtctccactgtaatttatttttcttyctttatggttagggttttttgtgcacttttaaagatattgctgtccacttctaatataatacagttgttctcctgtgtcttcttttaaaactttatagcttcacccttcacatttagatgtctgacccatctggaatgtgtgtgtgtgtgtgtgtgtgtctgtgtctgtgtgtgtgtgtgtctgtgtgtgtctgtgtgtgtgtgtatatatatgattaaacaattactttggcatctatattgaaaagaccatttcttccccactgaattgcattggcacctttggagaaaatcaagtgattacatatgtgttcatctatttctgggcatgattctgttaaatcatctttttaacaattctcataccaatagaccattttctcttaat

SEQ ID NO: 781579 - DNA, 549 bp, Homo sapiens
tagactacgttgtgtgtttgcaagtttttttcaactttttgcaaatctcaaaaaatttttccaatatatttattgaaaaaaagttcacatataggtggacccatacaggtcaaacttgttcaagggtcaactgtagtctccactgtaatttatttttcttcctttatggttagggttttttgtgcacttttaaagatattgctgtccacttctaatataatacagttgttctcctgtgtcttcttttaaaactttatagcttcacccttcacatttagatgtctgacccatctggaatgtgtgtgtgtgtgtgtgtgtgtctgtgtctgtgtgtgtgtgtgtctgtgtgtgtctgtgtgtgtgtgtwtatatatgattaaacaattactttggcatctatattgaaaagaccatttcttccccactgaattgcattggcacctttggagaaaatcaagtgattacatatgtgttcatctatttctgggcatgattctgttaaatcatctttttaacaattctcataccaatagaccattttctcttaat

SEQ ID NO: 781580 - DNA, 588 bp, Homo sapiens
tgggttatttcacctagcataatctcctccaagttcaatcgtgttgtcacaaatggcaggatattcttctttttcaaggccgagtaatgtttaattgtatgaatataccacaatttatttatttatttgtcactaatctttcttttccatatcttgcatattgtaataccacatgcagaagaataaaattgaacaccatacgcaaaaacttactcaaaattaattaaagacttaaacatgatacctgaaagtgtgaaactactagaygaacacgtagagaaaaagcttcataatattggacatgacagtgatttcttgggcatgacaccaaaagcacagacaacaaaagcaaaaaaagacccatgatattacatcaaactaaaaagcttctgtgcagcaatggagcaatttatggaaagggagaaatatttgcaaaccatatattgataagtggctaatatacaaaatatgcaaggaaccataaaactcagtaacaaaaaaaaacaagtttaaaatgggcaaaagactcaaatagacatttctcccaagaagacagacaaatagtgaacaagtatatgaaaaggtatt

SEQ ID NO: 781581 - DNA, 588 bp, Homo sapiens
tgggttatttcacctagcataatctcctccaagttcaatcgtgttgtcacaaatggcaggatattcttctttttcaaggccgagtaatgtttaattgtatgaatataccacaatttatttatttatttgtcactaatctttcttttccatatcttgcatattgtaataccacatgcagaagaataaaattgaacaccatacgcaaaaacttactcaaaattaattaaagacttaaacatgatacctgaaagtgtgaaactactagacgaacacgtagagaaaaagcttcataatattggacatgacagtgatttmttgggcatgacaccaaaagcacagacaacaaaagcaaaaaaagacccatgatattacatcaaactaaaaagcttctgtgcagcaatggagcaatttatggaaagggagaaatatttgcaaaccatatattgataagtggctaatatacaaaatatgcaaggaaccataaaactcagtaacaaaaaaaaacaagtttaaaatgggcaaaagactcaaatagacatttctcccaagaagacagacaaatagtgaacaagtatatgaaaaggtatt

SEQ ID NO: 781582 - DNA, 590 bp, Homo sapiens
accacaatttatttatttatttgtcactaatctttcttttccatatcttgcatattgtaataccacatgcagaagaataaaattgaacaccatacgcaaaaacttactcaaaattaattaaagacttaaacatgatacctgaaagtgtgaaactactagacgaacacgtagagaaaaagcttcataatattggacatgacagtgatttcttgggcatgacaccaaaagcacagacaacaaaagcaaaaaaagacccatgatattacatcaaactraaaagcttctgtgcagcaatggagcaatttatggaaagggagaaatatttgcaaaccatatattgataagtggctaatatacaaaatatgcaaggaaccataaaactcagtaacaaaaaaaaacaagtttaaaatgggcaaaagactcaaatagacatttctcccaagaagacagacaaatagtgaacaagtatatgaaaaggtattcagtatcactaatcatcagggaaatgcaaatcaaaaccacaatgagatatcacctcacaaatgttaagatgaccattattttttaaaaagttaagtataggtgaggct

SEQ ID NO: 781583 - DNA, 536 bp, Homo sapiens
ccctgtggatgtgaaagtgcagaattttaactattaggccacaggtggagtggcctttgtttttccttgaccagaaagcaaacccaagcctctgcaggaattttacctaccagaactggtttaggtcagatttttcactcttaatttagtcaagagaatttttaaggctggccatgacactattatatgtcctttttaaatgtgatctctttgttaatagyttagaataagagatccctaaaatctttaaattaattgcaccgaaagaaaggatgggaaaagggtctcgttgtgtaaatgaaacttctcaggtagtcaaattgttgacctttcttacccagccagggtttttagaagtgaaaattgactttctccagctgcagagtttcattcaacattagagggggccaggagttggtaaagtctaacagaaggtggaccaaaactgaaaagaaaaaccagaaaaagtgatcacagaattcacatataattgcgatctctcagcataagggtaagttatagccaactgacaataa

SEQ ID NO: 781584 - DNA, 470 bp, Homo sapiens
ttatacaaaactgaataaagtaggtctcaggctctgagcaggcagttttttttcctagaaatagaggtgccaacatgactgttggcagcatattacgggcactcatggcctctgccttccttggtaaggacagtagctgataggctgaggacagtctaggactgggagaagacagtggggagggaagaggggatgaacaactggtcatatgtgacaaacactcaggtgtaataagaaggaagaggaaaggaaccagattctgactcctgcctttactgaagattyaacccctgccccaaaagttcttggaagctctcttacaggtcagctcaggggaccaatcttgttatttcttctcatttacgggatccagcatgtcacagagggtcattcaatcccaaccagcaatatctacgcaggagggtgagaccgtgaaactggactgtgcatacaaaactaatattgtatat

SEQ ID NO: 781585 - DNA, 554 bp, Homo sapiens
caacatagagctcaggccatggcttcagagggtgcaagcctcaagccttggcagcttccacttggtggtgagcctgcaagtgcacagaagtcaagaattgaggtttgggaacctccacctagatttcagaagatgtatggaaacgcctggatgtccaggcagaagtttgctgcaggggcagggctctcgtggagaacttctgctagggcagtgttgamgggaaatgtgggattggacccccacacagagcttctactggagcactgcctagtggagcagttagaagagggccaacatcctccagaccccagaatggtacatccactgacagtttacaccacacacttagaaaagctacagatactcaatgccagcctatgaaagcagccagtagggaggctgtaccctgcaaagccacaggggtggagctgcctaagaccatgggagcccacctcttacatcagtgtgacttggatgtgagacatggagtcaagcgagatcattttggagctttatgatttgactgcaccgctggattttggactcgcatgggg

SEQ ID NO: 781586 - DNA, 554 bp, Homo sapiens
caacatagagctcaggccatggcttcagagggtgcaagcctcaagccttggcagcttccacttggtggtgagcctgcaagtgcacagaagtcaagaattgaggtttgggaacctccacctagatttcagaagatgtatggaaacgcctggatgtccaggcagaagtttgctgcaggggcagggctctcgtggagaacttctgctagggcagtgttgaagggaaatgtgggattggacccccacacagagcttctactggagcactgcctagtggagcagttagaagagggccaacatcctccagaccccagaatggtacatccactgacagtttacaccacacacttagaaaagctacagatamtcaatgccagcctatgaaagcagccagtagggaggctgtaccctgcaaagccacaggggtggagctgcctaagaccatgggagcccacctcttacatcagtgtgacttggatgtgagacatggagtcaagcgagatcattttggagctttatgatttgactgcaccgctggattttggactcgcatgggg

SEQ ID NO: 781587 - DNA, 486 bp, Homo sapiens
gattctgggcagcagaaatttccctatgggagaagatgccagcatgacttttcctagtgtgcaatgagcagcgaccagctctgtctacctccttagggatagcccctgataggaatgctggggttgagcaagaggaagagtgagtgattagaagaaagaaggcaggaaccaagtttcttttcctcctgccttgagtgcaaggtttagttccttttctaacagctcttggcaattccattataaatcaggtgaaagaattagtctgatttttgtttgtttrtagggcctagcatgtcatagaaagccactaaattctaatcagcaatatctggacagtaagggagattgtgaacttagttttcttacaggacataggtattataattattattgtggtaaaaatttcctcctagcaggaagataatttttttgtgtgctttgggaatcacccaaaagttttccactgcaaaaatcaatggaataagg

SEQ ID NO: 781588 - DNA, 569 bp, Homo sapiens
atgttttcaaactatcaaccaacaaaggactaatatcctgaatctataaaaaaactcagacaactcaacaagaaaaaaacaaccccattaaaaaatgggcaagggacatgaacagatatttctcataagaagacatacaagcaaccagcaaacatgtgagaaaatgctcaacatcactaatcatcagagaaatgtacatcaaaaccacaatgagataccttctcacaycagtaaaaatggctattattaaaaagtcaaaacacaaacagatgttggcaagaatataggaaaaaaaagaatgcttatacactcttggtgggaatgtaaattagtacatctatggaaaacaatatggagatttctcaagggattacaaatagaactactattcgacccagcaacaccactgctacccaaaggactacaaatagagctaccattcaacccagcaacagcactactacccaaaggaaacaaaattgttatgtcagaaagacacctgctcttgtgtatttatcacagcactatttacaatagtaaagtcatgaaatcaacctaagtgtccatca

SEQ ID NO: 781589 - DNA, 602 bp, Homo sapiens
tgctggttacataggcgatttcactgcctatgtatgaaaattcaccaagctctacatttaagttttgtgcactattctgaatctatattatactttaaaagtttttaaaagaaaccttatccatcccattgactaaattttgagaacatacttcttattcaatccatcttcatagccccactgcccttcacattagccttcatttaaaacatgcttcataattgttttctcaataaaggactgagctacatgtttaaaaagatgctccggtcccaggtcctaggatctagtatgttatcagatggacttgaacttccctgtgtagcttgctaattactgctttgagtttagacctttggtattgatgtggtttttctctgtctccactcaaatctaatgctgaattgtaattcctagtgttggaggagargtctggtgggaggtgattggatcatggaggtggcttctaatggtttagcaccatccacctagtgctctctcgtgatagagttctcaagagatctggttgtttgaaggtgtgtggcacctccccctttgctctctctctctctctctcctgctgggcatgtgaaagtgtactt

SEQ ID NO: 781590 - DNA, 615 bp, Homo sapiens
ctttcaagttgaattgatcttttttttgtcgtttttgaaatagagaaaagtagatatttttggtggggaagatacttttttttctcaatctatttcatttctcttaaacttgagaagataatgagaaaaagtcttctaggttgctcccttccttcttacagtcccctcctttcttctgtctttcctcttctctgcatttcaattcttagtgtgtgtcaccactaggcacacacatggagaatggggaaaggtgggtcagggatagggtttctggggtgtaaggatgtgtgtgaccccaagtctcttgtttcctttgtaccaagatatgcagtctgtaaatgctctcctagagatagatgatatctagaggcatttcaggcatctggagacatggcttcctgatcaggttctgattatacttttctggtcactttggacacattactgtctgcgtctgagcctcatttcctctttattgytatttagatgggctttctccatcttcttatgatggtataagccttggtagggttttcctgaatataaagaaacttgtgacagagtggactgtactcctgggtaagagtttcaggcctaagaaaagatggtgttcta

SEQ ID NO: 781591 - DNA, 565 bp, Homo sapiens
agaagtttgacataattgttactgtcttggtgctcatgtggtgtttaaggatgctttttaaaaatgatatcctgtaaacctttattacattcagagagatgtttgtctcctcactatatcacaagctctctgaaggaaaaaccgtatccaattcattttttttttwaatttccaaggtctcaaacactcttaaatatattgacttaactataactgaatcaaattggtgagctcatattttttcagttcatacgtatgaattaaatggatgttctaattacataaaattacatttaaagtatttatcttcataaaagccaccgtggggtctcatggccctatttatggtactctccattctgtggacacttctgttgtttcatgtcaacccacaggtacagccctaggaaaagacagctgggctgagctgtccatatatgctgaggaagatgtagtctttctcaaggtttagcacgtcaggaggcatataggcttctcttaaattgagggacggctctgaaggatctagtagtgaatagttgttgaaagatttgagaaatatatt

SEQ ID NO: 781592 - DNA, 638 bp, Homo sapiens
ggttgttttataaacttgattgtgtaattcctttatattgtctgtgagctatgtgcttagtatgtttttgtcataacaggtattaatctctcatttccatgtttagcattcccttaaggacttctcataaggttggtctggtggtaacaaattcccttagagtttccttctgtgttaaggattttacttcttcttcacttatgaagcttagtttggtgagatatgaaattcttggttggaatttatttgctttgaggatgctgaaaataggtctccaatttcttttggcttgtaaactttctgctgaaaagtctgctgatagtgttgtgggattccagttataagtgacctgacctttctctctagttgtctataatatttttycttttgcattgaccttggtgaatctgatgactatgtgccttggggatgatcatcttgtatagtattttgctgggttctctgtgtttcttgaatttgtatgtcaatctctctaacaagattggggaaattttcatagattatgtcctcaaatatgttttccaagttgcttactctctctctttctctctcaagaatgccaataaattgtagacttgatctctttacacaatcccatatctctcagaggttttgtt

SEQ ID NO: 781593 - DNA, 664 bp, Homo sapiens
tgattctcttcaaatttcccacctcttagttctcctcccactctctcccaccctgagccttacacctccaacaatgatcattctaagaccatttatatctcaataggaaagtgatgtaaaacgggtctccttactctgttttggagggtttttttgttgttgctgttgcttgcttctctgtcccaccccaaactcatgtgtgtctgaaatttagcaccaccttgcgacgtttgtgagcatttttctcagagcagcattttgagactgagcctgaactccactgatgttatgacccttaaaagtgtctggctccaaaagactaaggagttcctgcgtaaatccaggtccagctacttcatcactgtgacttgttattggaaaaggttgagctatcaacatattgctcctgtaaaggctcagaactgaatcttagattcttcaggatatttgagtcctctgrggctcctgggtaaagactccaatgtagcagttctgtggactataaatgggagatatccagatcatacaccttcaatggaagaaaaagcactgtcaccttagacgactccaactctgtagtctacttttgtcttcctaatatcatacctcattctccagtgggtttatggcaagcctcatctactcagaagtaaccaagtacaag

SEQ ID NO: 781594 - DNA, 595 bp, Homo sapiens
caacagcgagaactggaagtatggaacctttctgtcttaaccactcagttgcctagaagaatcttttttctattttgctgcattagaaattaaaggcatgagtattgaggatttgggtaggtcagacttttatagtgacaatcacattacaaagcacctcttagctaggttggataaagcacctttaaacatcaaagtctttttcttctttctggatgagatagaaaaatggtctctcctcactctgtatctarggacagggggctcagagagttccagacttacaaagtgagactgcagcagagctgagccatgggacctggagggacccagtgacggttagtctgctccctcccacgggtgctatagtagccacaaccgttcaggaaaccgtccccaggtgagaacgtaacacacgcagggaaaatcccactgctactaagagcaactcagcataagaatgcattacccagcaagggacagtcagaggggctctaaaccagagccccaaatatttgaaaactttatgtggaagccagctataacaagttcgttttccaagccgtgcttccagaagctgttagtggttggtagt

SEQ ID NO: 781595 - DNA, 642 bp, Homo sapiens
acagccaattaagaataatctaagctcttgtccttttataacagacctggttatgtcctaaaaaataagagcatttataaataaagaagaaagtttaacagttcaatagatcaacgtgactttccagctcctctctgaacaggtgacatctatttccccatcccttgaatctcagttggccttgtaacttatgtggatcaatagaatgtggccgaagtgacagctgtgcaagttytgagccctcacctcaagagcctttgcactctgtcacctgctctctcagacctcggcttttttccacgtgaataaaccgaggctaaccttctggaagaaaagagaccatatgaaacagaaccacatcagcctgaggccctggacatgtgcgaaaactgaagatcagcaaagctgacctgaaactgagtcacagttgacctcagatgcatgagaatctaaccaaggctgaaaacatttggttgaatcccacctcaatttctgacccagagatagcaactaatgtacaatatcatgattgttatgcagtcattagaaagaatatattagataaatgtgtattggcctggaaaaggtatcatctaagtatgcttaatgattatccatcttaaaaaaaaaaatacagaaata

SEQ ID NO: 781596 - DNA, 617 bp, Homo sapiens
tgttgttgagcaaatcatagtgtttcttctggttctgcaaggcaactgacctttggatctgggacacaattgactgttttacctggtaggctgcctcaattaaatactatttgcactgatttactaatctacaaatgtattctgtacatgtaacttaatgggcctgaggttgaagatggggagagacagcaacaatgcatactagaaagggtaatgygagcagagaattatttatcagagaccaagaagagaaagagaagctttttgctaaggcttttagtaataggagttaatgaaaatgaatagaaaaaaatttcattttaacttagaagaattgctgaataatgggaacagattccataaggggaacctctgcttctgaaaatatttgcactaggaccagcctacgtgctacaaaaactgtctcacaccaagtctagttggtcacttacatttttagcctattctagtagctatttctaaataagtcttcaaacatagaggtgcctatatttaagatatttaaatgaggctctatttctatagctctctggtgcccttccagcaaagcattgctgtaacacattgcttatcatttctacaagtgagaacaagta

SEQ ID NO: 781597 - DNA, 578 bp, Homo sapiens
atgtgtgaagttgagagcttacagtaaatggtctctgaagtttcccaccattccaaagagtgcgtgagcttaaaatttttcgtgagtttagctaaatatgtgcttagtgttagattaggtttcaaccaagcaaaagaaccctgggagaagtactctgcttggaaatgaagcatcctttggtttttgtggtacaatagatcactgtgggttttcagatggccagaagctgctctttgcaaggggraccatgttaaaggtggatcttagtaagtattattactaatgaattcttaattgattagtttttgagacaagtaataagcttttttggaaatctaagtggactgccaaatgttctcgatttatccatatttcatggggagcagaattcttcatgccttctccatcctcacttctgccaggtagcagtttgcattgttaacagggaagcagaatggaagcttaacagagaagcagtatggaagacgtctccttagcccagtggtcagttgcatcagagaagtctgctctgaaatgcgaacactttctcttgcagctggcagccccctgcaacctca

SEQ ID NO: 781598 - DNA, 578 bp, Homo sapiens
atgtgtgaagttgagagcttacagtaaatggtctctgaagtttcccaccattccaaagagtgcgtgagcttaaaatttttcgtgagtttagctaaatatgtgcttagtgttagattaggtttcaaccaagcaaaagaaccctgggagaagtactctgcttggaaatgaagcatcctttggtttttgtggtacaatagatcactgtgggttttcagatggccagaagctgctctttgcaaggggaaccatgttaaaggtggatcttagtaagtattattactaatgaattcttaattgattagtttttgagacaagtaataagcttttttggaaatctaagtggactgccaaatgttctcgatttatccatattkcatggggagcagaattcttcatgccttctccatcctcacttctgccaggtagcagtttgcattgttaacagggaagcagaatggaagcttaacagagaagcagtatggaagacgtctccttagcccagtggtcagttgcatcagagaagtctgctctgaaatgcgaacactttctcttgcagctggcagccccctgcaacctca

SEQ ID NO: 781599 - DNA, 496 bp, Homo sapiens
tgtgatagagacagaaacaaggccatgaaaagggaagctaccaaagcaatggcatagccaaggaagtgtgtcctcaacagataagtggcaaggaccctgttgagttgatgcttgtgttgtctggtagaattaaaaaataagatgagtgggctgggcgcagtggctcatgcctgtaattctatcactttgggaggctgaggcaggtggatagcttgaggtcaagagttcaagaccagcctgatcaacataatgaaaccccatctctactaaaaatacaaaaattagccgggcgtggtggcgggcacctgtaattccagctacttgggaagctaaggcaagagaatckcttgaacccgggagcagagattgcagtgagcctagatcgtggcactgcattccagcctgggtgatagagcgagactccgtctcaaaaacaaaaagaaagaaaaacagaaaaataaggcgagtggactgaggactccagtgaagggagggc

SEQ ID NO: 781600 - DNA, 564 bp, Homo sapiens
tgcttaacctgtaccagctttaataggtgacctagagcacatccctcccctctacaggcttatgtgttgccacttacgaaatgtcgggtaggactggaggctacctcccactccctgcacctctgattctgtgacccctgyagaattaagaaccagtgtcccttctcctggtcagccctactgacgggagtcacagaatccccagttctttctaagctgccccatctctcacctaaatacaatccccttaaataacaccaaagggaaagggctcagacctccatcacagcagggtcactctcgcacgtggtaggaccataccaccttcacaaaggcggggtttgccacctttggggagctctggggggcctctacctcctcaccagtctgacacaatgccagagattccaccactgggaatttcttataattaaagcattctcttccctgtattaaatgaaaatgcccctgggagagttaatagagcaagcctttatcaaccattaaaaactgagggccagttagtttctctttcttttccccctgaagtggtacttcattttg

SEQ ID NO: 781601 - DNA, 638 bp, Homo sapiens
atgggaaatgtctgttacagtgccaaaatgaagataatcagtataaatattagatttgtcttaatattaagtttatgaaatgtaagtctttcagaagaactatctcaggatatatttattaggtcaatgaaatattttatccatgtgactggtatacacacttcaaaggagaacccaaaatggcaggcaggggagggtggctaatgaaaggtatggcatagtagttaagaatatgaattttggaataaaactgtttgggtaaatcctaattcagaaggttacttaatctctttatgcctcttttttctcatctgtaaaatggggatggtaatagtacctagctcactgagatgttacgagatttaaagagctaatacctataatggactttgcataatggcagcccgattraaagttttcagttaatatgtttttattgctactatgtcaggttgctggagggaaggaagaaaaatggaaatgatccccatttatagtttttgtaaagtacagcattagagtgtggctctggcaacacaggcaaactaatctttgggcaagggacaactttaccaagtaaaaccaggtaggtctggatgtttccaagtgaagtgcagttatccactctgttcattttt

SEQ ID NO: 781602 - DNA, 616 bp, Homo sapiens
  misc_feature 22: n = A,T,C or G
gagtttcctccttttggtctantaatagtgggcgttttctctaattatcgttattacttacgtactctgcttgcagagtatataagataaaatgagacagaaccagtactatagcaatgagatagacccagtgctataaacgactgagctctttttttaaccttctgaaaaccccagtgtattgcctttgtccctgaatttaagtacatgttgctgataataggtatgtagggcaggaagaaaaacagacctgggtttgcatccctgcccatctacttactagctgtgtcttaagctatgatgtttcaattgtaaaatgggatgataacatttgcctcacagtgctattgtgaagattatgagagaataggtgtgaacctgcttcatacaatgcctggcatgtgataggcaaraaccatgattctgatacagctatttatatttacctgaatttacattattcaggtaactttatttcttcattttatattattttttactctgaaggcttcttctgccctctttccctccctcctactctctctctcctccctctctccccaccccgccactttccacaacccaaggaaatctcctgcttcccctttgtttgcca

SEQ ID NO: 781603 - DNA, 628 bp, Homo sapiens
  misc_feature 578: n = A,T,C or G
caaacggaaggcactgtaatgcccagtggcttcagttcacagggtggttctaaaattccattttcacagaattgaagataatttggggttattaccaattctcagcagctcaaattcaatcccgttgatggtgagcagggggttcattttgagagtagaaaattggatgcagtggagaatcagaatgttggatggtctctgccatttccccaaagatatcatcctaactgcatgctgctgcttttaacaaatcagkatacaacttagtattttttgtgttgacaaattttcaaatatacaaaatattgagtctgaaggcaaaaagaataatttttcacttccattgcttcctaggtcataacattcacatctgatatttcttccaaatacagactgttgttggcctgatcatcactcacacatccaggcttgttacatctccacgccactgagtatcagggaacctgccccaatattcacgtaggttcttttctattttccctaagcgtcggccaactttagaaataaagggacagagtacaaaagagagaaattttaaagccgggcatccgggggangcatcacatttcggtaggttccgtgatgccccacaagccacaaaaaccag

SEQ ID NO: 781604 - DNA, 607 bp, Homo sapiens
aacaaaatacatcagacaactgcatccggatatggaacaacagaatcataatcccagaagaagaaaaacaaacaagatgagccttaaaattaccctcacttactgccaaaaagcagtttccaagacatggatcaggaagaggaaccaaaacaagcccagtggcccagctgagtkgaggatacagatatccaagttcagagaggccacggcacttatcacttgggcaaagtattggagaggaggaaactgcagagggttccagaaagctgcagagatgtctagtactgactgctattttgcacatgcaaagagtgaaactccacataggcaggaaaagagtcatcagtaatcagaaaggattaggctgagcaacttccagagctcatatggagctggaaatagttcacattctcaccagccaaagtagagagatcttgaaatacatggagcattaggtaacatcctcaaaggaatcatgtcacagtaatgatgataaattaacaacagaataaaggtcactctggttttaccctaacaaaactcaaaaggaagcatcaaaaggatcaagctgatttgaaagtaacttaagtgtatgacagaacaaagc

SEQ ID NO: 781605 - DNA, 541 bp, Homo sapiens
tttaaaaatatataatacttattaaagatctgctacatgccaggcattccggtaaacatgtttctgggtttaaacccattaattctcacaataacccagtgaggtagagactttcattatccccatttgataaaggatgaaaactgaggcacacagaggttaaagagcttacccaaagccacacagccagtaagtggcagactcaggagtgaaatstagccagcccggccctgtcactgctatgttaaaccactaatccatgttggtcctctaagtcaatcctactgaaatgtttgttacacatattcacgcattaaacctactagcctgggtatggagtatgggacatgattccaggtcactttacaaaagtgtaactcttttttttttgagacagagtctcgctgtcacccaggctggagtgcagtggtgccatctcagctcactgcaaccttcacctcctgggttcaagcaatcctcgtgtctcagcctcctgagtagctgagactacaggtatgcaccaccacacccggctaatttt

SEQ ID NO: 781606 - DNA, 541 bp, Homo sapiens
tttaaaaatatataatacttattaaagatctgctacatgccaggcattccggtaaacatgtttctgggtttaaacccattaattctcacaataacccagtgaggtagagactttcattatccccatttgataaaggatgaaaactgaggcacacagaggttaaagagcttacccaaagccacacagccagtaagtggcagactcaggagtgaaatgtagccagcccggccctgtcactgctatgttaaaccactaatccatgttggtcctctaagtcaatcctactgaaatgtttgttacacatattcacgcattaaacctactagcctggrtatggagtatgggacatgattccaggtcactttacaaaagtgtaactcttttttttttgagacagagtctcgctgtcacccaggctggagtgcagtggtgccatctcagctcactgcaaccttcacctcctgggttcaagcaatcctcgtgtctcagcctcctgagtagctgagactacaggtatgcaccaccacacccggctaatttt

SEQ ID NO: 781607 - DNA, 508 bp, Homo sapiens
catgccataggtactcttttgtgtctgctttgttctgctcaacaccatgtttctgaaatcattaccattgttgtatggttctctaacttcatcatttccatttcagactcagcatatgctgagttcaacctgttgaagggctatctctgtttaattcaccatcttgaaagaaacatttaaaattgagatgttttcaagaatatatagttaaatcctgaggaatcgacgtagaaatgttatcacaagctgtctgaacttactcaggggaagtcttcgtcttcactcacataagagtctaatggaattaatatcaacaatcttagagaaatcccacactattcatgccattttcatgatctccaccttgrtaatttttttttttttttttttttttttttttttttttttttgagacagagtctcgctctgtcacccaggctgaagtgcagtggtgcgatctcggctcactgcaacctctgcctcccgggttcaagtgattcttctgcct

SEQ ID NO: 781608 - DNA, 600 bp, Homo sapiens
caggcatgggccaccatccctggccacacaattgttttttaatttagttatagtagtctgtaccactgtaggatgacaatagttaacaataatatatagtttcaaatagctagaaggaagatactgaacagaaagaaatgagaaatgtttgagatggtagacatgctaattaccctgactgatcaccatacattatacacatcaaaacatctttatgtaccccataaatatgtacaattattatatgtcaatttttttttttttttttgagatggagtctcactctgtcacccaggctggagtgtagtggcgcaatctcggctcactgcaacctccgcctcccaggtgcaagcgattctcctgcctcagcctcctgagtagctgggataacaggcatgcgccaccacacccagctaatttttgtatttttagtagagatgggktttcgccatgttggtcaggctggtctggaactcctgacctctggtgatcagcccacttcagcctcccaaagtgctgggattgctggcgtgagccaccgtgcccggcgtatatgtcaattttttaaataaataaaataataaatttttaagcacccaa

SEQ ID NO: 781609 - DNA, 318 bp, Homo sapiens
aaaacaaaagattgatcacttgtagaatctagactttatttggatcctgattcaaacacgtcatgtctgggcacggtggctcacacctgtaatcccagcactttgggaggccgaggcgggcagatcacttgaggtcaggagtttgagaccagcctgrccaacatggtgaaaacccatctctactaaagatacaaaaacttagctgggcatggtggcgcatgctaataatcccagctactcgggaggctgaggcaggagaatctcttgaacccgggaggcagaggttgcagtgacccgagatcatcccattgcactcca

SEQ ID NO: 781610 - DNA, 599 bp, Homo sapiens
tcatctcaaaaaaaaataataataattcattatgtaatccagctttgaaacactctttggctacacttttgtatgctttaaggaggaacaaaacacagatggtctccaacttacattggttaaatctacaatttttcagctttacaatggtgcaaaaacaatgtgcattcagtagaaactgtacttcaagtacccatacaaccattctggtttgccccttcagtacaatgttcaatgaattatgtgagatattcaacactttattataaaacaggctttattttagatgaytttgcccaaccttaggctaatgtaagtgttctaagcatgtttaaggtaggctaggctaagctatgatgttcagtaggttaggtgtattaaagcaagttttacttaagatattttcaagttacagtgggtttattgagatgcaacctcattgtaagtcaaggaacatctgtacttcagaagtcatcaaagctgcatgagcaggacacaagtcatatgaaaagccaggtagacataatgctataaaaaatccctccattgggccgggcacggtggctcatgcctgtaatcccagcactttgggaggccgg

SEQ ID NO: 781611 - DNA, 579 bp, Homo sapiens
caggagaagtaggggccctgggcagctgtgtttatttgcagagccaccaaactcactaccccatatcataatcttccaaaccagcctgagcataactagcttccttacatctttactaagaaaaggaaaggcttctttcttagttttttgttatcagggaggaatggtttaggtggcaaataatgaaaaaaaccaaagtagatactagtttaaacacacagggaacttttttttattgcttaatgaaaaactggagacagcccagggctggtgcagccagtgtggtatcaacataccaggcaccttttgccttcctgtgttgctatccttagcccattggtttcctaccttatggccacaagatagctgctgcagctccagrtctaccagctaccttcaaggcagcagaaaaggagaaaaaaatggagtctgacccttttaaaaatgtgaataaaatatttcccaggacctctcaccactatacttcaaaagacttcattgactagaactttgtcagatggccgctggttgctgttctcctgattgtaggtctcacgagatctgatggttttataaagg

SEQ ID NO: 781612 - DNA, 621 bp, Homo sapiens
tctgtcaataaataaataaataaggcagattctgagtctgtaggtctgcatcaggacctgagttcctgcattgcttatcagccaccagatgaagccttccaccggccacaccttgagtagcaaggtaatagataacttctcccaccctctcccatagatggtggacctgaggcccagggagkttagactgcttactagaggccaaacagaaagactgcagtgctggggctagaacccatgactcctacagctggtgctcacttcatagcatcttccctgcccctctgaccctgaaacaggattcagggaagaggatccctaagtgtgggtgaggagtaagagactatactatctgctttgaatcaagcttctttatactctatttttggtcaagttacttcccttgcagaagtaccaatagaaattcaaagatgaacacaagcagactccaattcttttgggcctgagggagccaaagtaaaatagatttgttagtgaagtccctcttatttttggttagtacaaatttggcaagtcatccaaagaaaagcttacatataacttggtatgtttttatgaatgcaaattatagccatagactttctcctaagaatgaagttt

SEQ ID NO: 781613 - DNA, 621 bp, Homo sapiens
tctgtcaataaataaataaataaggcagattctgagtctgtaggtctgcatcaggacctgagttcctgcattgcttatcagccaccagatgaagccttccaccggccacaccttgagtagcaaggtaatagataacttctcccaccctctcccatagatggtggacctgaggcccagggagtttagactgcttactagaggccaaacagaaagactgcagtgcyggggctagaacccatgactcctacagctggtgctcacttcatagcatcttccctgcccctctgaccctgaaacaggattcagggaagaggatccctaagtgtgggtgaggagtaagagactatactatctgctttgaatcaagcttctttatactctatttttggtcaagttacttcccttgcagaagtaccaatagaaattcaaagatgaacacaagcagactccaattcttttgggcctgagggagccaaagtaaaatagatttgttagtgaagtccctcttatttttggttagtacaaatttggcaagtcatccaaagaaaagcttacatataacttggtatgtttttatgaatgcaaattatagccatagactttctcctaagaatgaagttt

SEQ ID NO: 781614 - DNA, 580 bp, Homo sapiens
agtcatgcagccaggggccgcaagattcctaatcttcccaattgctcctgtagatagcatttctttttctggttttttttttttttttttttttttttggttagatgcagttttgctcttgttgcccaggctggagtgcaatggcacgatctcwgctcactgcaacctctgcctcctgggttcaagcaattctcctgcctcagtctcctgagtagttgggattacagacatgtgccaccatgcacagctaattttgtatttttagtagagatggagtttctccatgttgatcaggctggtctcgaactcccaacctcaggtgatccacccgcctcggcctcccaaagtgctgggactataggtgtgaaccactgctcccagccagatagcatttctttacaaaacctaagattggtgttcaagatatttttcagaccctgcattctgatagacaagctggtgccacccagactcataaactggctcatctggtcttgtgtcccccaacccccaccccagaaactgactcagcacaagagggacagctttgaccctgtatggtttcttccccaacccagcc

SEQ ID NO: 781615 - DNA, 527 bp, Homo sapiens
ttttttttctgccatgttccgaaaagacttttcccaatactaatattggccagtgttagtgattgtgagaatctatatctgcattatcatgtgatagcattagtattattggtgatgattattcaagttactttaccattccatcgtcttaatctgaaagtctgttttattcattactattggaatatgtaaattaaaacttttacttttatcatgtttatagtttctaagtaatttttacataaattataataattaagttttttctttaacattttgcattattctgcattggtctccaaaaagktaatagcaagcacataccagtgttttcagtgcgttacatacattaattgttgttaaatcttcacaataactctatgaagtgggtattattattattgtccccaatttgtaaatgactgaattcagccattgaaaggttaaataacttgctcaagataacacagccactctataatacagctaaaatttgaataaatatggtctagcttctgagtctgttc

SEQ ID NO: 781616 - DNA, 610 bp, Homo sapiens
ccaatataacatatgtataaatatttaaatgcataaagataccaaaatattaattattaaatacaatgtgttctatcttcctatgttgacagatacacctgcataaagactcagaaaaccaggttcaaactgacaatttttgacctctcagagtattatacacttatgtggcagtgtcagtgagcaaactttaagctcatattcccatcaccagctacattcagcacttgaggggactggtatgtgagaaaccgaatatacagataatcaatggtcaggccatatatgacaatagaacactaatccacaacttctgcagcaaccagcctggaaaaccaaaccacaacctctacaacaatcatctcagaatgttgaatacttgattagtgactgccarttttcctaagttttgcccccgcttcctattcaggaccaccagaaaaaagataaatttcttccccaaacaaaacatataggagtgtctgcttctagttaacacatctaacagcttccccataccaacaacctcctgtctgagcacatctaaaatctactgctactttttttttttttttgctataatgctttcccacatttctgcttacctttt

SEQ ID NO: 781617 - DNA, 532 bp, Homo sapiens
agttcaaccattgtggaagacagcgtggcaattcctgaagtacctacaaccagaaataccatttgactcagcaatcccattactgggtagatacccaaaggattacaaatcattctactataaagacacatgcacacatatgtttattgcagcactgttcacaatagcaaatacttggaaccaacccaaatgcccatcactgatagactggataaagaaaatgccatgttctttagccataaagtgagtgacttggtcagaggcaatgttgtgtggaataccatgacaatgaataagacattccatgagtccatagatgataatcttggcagaaccattgcatgcaggakacacaaacccatatccagtaactgtctactccagtgaggacaaacgtctgccctctccatgataaaagagatccaataaaatcaacctgccaccaggtagctgggtgatcaccccaaggaatggtgccatatctagtgctcggtgttagtctctgcagctggaaaattgggcactcagcagt

SEQ ID NO: 781618 - DNA, 616 bp, Homo sapiens
tggttttgtctttagttctgtttatatgatgaatcacatttattgatttacatatgttgaaacaaccttgcatcccagggataatagcctacttgatcatggtggattagctttttgatgtgctgctggattcagtttgcaagtattttgttgaatatttttgtatcaatgtttatcaaggatattggcctgaagtgttctttttttgttgtgtttctgccagattttgctatcaggatgatggtggcctcatataatgagtttgggaggagtyctttctcctcaattttttggaataatttcagtagaattgatgccagctcttctttgtacatcttgtagaattaggctgtgaattggtctggtcctgggcttttcttggttgttaggttatttattactgattcaattttggagctcattactggtctgttcaggggttcaatttcttcctagttcagtcttggaagggtgtatgtattctggaatttatctatttcttctagattttctagtttgtgtgcatagaggttttcataatagtctgtgatgtgtatttgtatttatatggtatcattggtaatatcccctttgacatttctgattgtatttaatt

SEQ ID NO: 781619 - DNA, 588 bp, Homo sapiens
atcttttgtattatgttttattttgctttcaatttaatttacttatgctctgatctttattatttccattctatgaatttttggtttgctcttgcttttctagttctttaaaatgcattattagatgatttatttgaagtttttccactttttatgtaggcgcttataggtttaaactttcctcttattatctgatatggcttggttgtgtccccatccaaatctcaacttgaattgtatctcccagaattcccacatgttgagggagggactcaggcagaggtaattgaatcatgggggccagtcttttcygtgctattcttgtgacagtgattaagtctcatgagatctgatgggcttatcagaggtttccacttttgcttctttgtcattttttcttgccgccaacgtaagaaatgcctttcacctcccgccatgattctgaggcctccccagccatgtggaactgtaagttcaattaaacctctttttgttaccagttttgggtatgtcttcatcagcagtgtgaaaacagaccaatacagtaaattggtaccagtagagtggggcactgctgaaaagatacct

SEQ ID NO: 781620 - DNA, 642 bp, Homo sapiens
ttgtgctttttagtagagatgactctgtctggaaaggtgtttcgaaggataaatttaaccatggtatcctttaatcggaagagaacactattcccatacgaaaggcacaccgttcttgcaagaaaagagcaaacactagtaaccacagccaagactgtggggagtgtatcagagttacaaccagayacacccataacttgtcacacttataaccgggtgtaacagcaatttgccattgcaacaggttacaaccagggttaccacaatttaccatcataacatgttgctatcacaacagattataatcacaagttacaatcacgacaggttacaaccacaagttacaatcactagcctgccttgccacatcaacaaatctggctaatattccctccagacttgatgtatactatgataaaaggttgaaatctttggtagtttggggaattaacactatctggccttggggaggacatgactattctggggtaacatgagggaacttctttgtggcgatggaacagttctgcctgctaattatggtaatggttactcaaatctacacacataacattttatagacctacccatactcgctcacacacgcatatctgaatgcatgcaaaatctgatgaaatctga

SEQ ID NO: 781621 - DNA, 665 bp, Homo sapiens
tatctgtgtcctaaactttgataaaataaccaaagcattacttagtgttctgttgttgctgtaatcttcttaagtctaaataaatccttgcgttaaaatggtatttgtgtatgttctgaatagaatgctttcatttatgcctgaattgtgatgaatatgcattatttaaatgaagtatatactttccctagaaaatactgattaaatcaaatcttaccaatttgatttcagtcaaatccatgccactctaaactgccatcatttggagaaaacaaaattcttaatagagaaaatagtgtgagttaaattgtccattcttttttcattctgctcggctgcctctaaattatctttaaaaaataaggagtatggaaatttgaggcctgttgcacaattaataarcattaagtttttttagatggcaattagagcactacgaattaaaattcctggaatgtgtatggcgtcttctgctgagctcccccttgtgcatttagctccccttgtctgttctcccctagtcccctgcacctttattggagctctcacatactgcctgtgctctggttcatcgtttctatgtcttattaccactggggcctagtatggaaatagaacctgtaaagtagtaccgtttgctctcagttgccatatttaagtctcag

SEQ ID NO: 781622 - DNA, 469 bp, Homo sapiens
ataagatgttaccaagatcaaaaagctacatacctccctcaccattggcccacaaggaaattccttgtggagggaggacaagtgacgatccctgtaaattatgcatttagccaaaggctaatcagaaactcaaaagaatgcaaccattggtctcttatctgcctgtaacctggaagactcctcctggcttcgagttattctgactttccagactgaacccacgcacgtctcacacatattgattgatgtctcacgtctccctraaatgtataaaaccaagctgtgccctgaccatcttgggcacctgtcatcaggacctcctgaggctgtgtcacgggcgcacgtcctcaaccttggcaaagtaaacttgtcaaatgggttgggacctgtctcagatattttgggctcaccccttccaagcagaaggaaaggaggctgcctttgggtcatgttgtttcccaaaatgtcc

SEQ ID NO: 781623 - DNA, 630 bp, Homo sapiens
actggtaaccccatttgggcagggaccatatataacttttctcaccacttctgccctagaacacagcacagagcctggatcacagtaagtgttcaatttttaaaaacgtgtggactgattgtgttctacaatcggagaccaagctccatgtattagtttgcttgggctgccaaaacaaaatactacaggctgggggkttaaaccacagaagattttctcaaggttctagaggctggaagtctgaggtcaaggtgctggcagggttgatttcttttgaggcttgtatccttggcttgctgatggccatcttctccctgtggcttcacagtattgtccctctgttcttttcggtgctcctaatctcctcttcctataaggatgccagtcagattggattaggtcctaccccactgacctcatttccacttaattactccttgattactcctgcagccacatgttgaggtcctgggggtttacaatttcaacatatgaattttagggggacaaattttggctcataatgctccactcatgagaggaagactctgttgctccttcctccaacctaagcacatgatgcacattctggaaaatcttgaagggtgaacatcatagcttctctgagat

SEQ ID NO: 781624 - DNA, 533 bp, Homo sapiens
gagggcagggcttttcttcacaagccactgtgccacatggcaaacccactctcatggacgggagggaaagccccagcttcccgagggtccccaaaggcatcggttgggcttaggaccatagaaacagggagcatggcctcctggcttggctcacttggagccagcactytgaaacatgttgctctttttagagcactgagatgtgggaggaagagggagaaaaagaaatgacttgctcttcactagggggtgcgacttggggatcacattttcatcgaggcttctgttatgaattttgcccttgcaaaattcataagttgaagtcctaacttccagtatctcagaatgttgactgtatttggagataggcctttacagaggtaattaaattcaaagagggtcatatgggtgggccctaatccaaaaggactggtatccttataagaagagattaggacatagacacacatagagatgaccatatgaggacacagggagaagactccatcttataagccaaggagagatgcttc

SEQ ID NO: 781625 - DNA, 610 bp, Homo sapiens
ctgcagattcaaacaatgagctctgtgtattagatttcataggaaaattgtgagtgcacaaacctatgtgaccaatagatgccgtatcagactgggcaccagagctcctgctgggagtcttctccaagtagtggcaagaactgcaactcaagaataagggcaactaaattagcatcccagagttagaaggtccttttgtttaaaccagtagtttttagcccatgatcttttacaagccctgcatgcaaactggctcctgggttcctcagtcactgaatgtcaaatgcggtgagatgctgaggtggtgctgctaaagttagaatgctcaaagttgccaattaattctgtgcaaaaaggtatttacttcatcattytccaccttaggccctgcctgatgttctcgagtttctgtcagtctggggcctccttagaagtaactgctggcctcaggcttggaaacaaagcaatcacttagagcaaagttactagcctatttgttggacagcaactggctatatttatcctctatttttcccccaccccctctcaccccgtattagtctccaattgctgtgtaacaaatttccacaagtgaagcagctataaatag

SEQ ID NO: 781626 - DNA, 583 bp, Homo sapiens
tttacattcccaccaacagtgtatgagtgttcccctttctccacatcctcgctagcttctgttattttttttctttttgttaaaatccattttaactggggtgagatgatatttcattgtggttttcatttgcattttcctgatgattagtgatattgaacattttttcatatacctgttaaccattgtatatcttctcttgagaaatgtctattcagagcttttgcacattttaaaatcagattatttttgctgttgagttccttatatattctgattattaatcccttgtcagatggatagtttgcaaatattttttcccattctgtaggttgtctctacactttgttgactgttttctagcttgatgtaatcacatttgtctatttttgcttttgttgcctgggcttttgaggtattacccaaacawctttgcccagaccaaggtcccgaagcatttccccaatattccaatattttcttcctgtagttttataatttcaggtcttaagacttaagtatttaatccatttcatttgattttttatataatgagagatgagagtatgacttccttcttctg

SEQ ID NO: 781627 - DNA, 641 bp, Homo sapiens
ctttattgggatataattaatataccataaaattaacctgcttaaagaacagaaatcaatattttaaaatatattcacaggcttgtgcaaccattaccacaattttagaacattttaaaacctcttaaaataaatactcataccccattggtagtcattctgcattcattcctttgtcttcctagacataagcaaccattaagctactttatgtctctgtaaatttgcctattccggacatttgatagaaacgaaatcatataatatgtttttttgtgactggtttctttcacttcatgtttcattttttcaagcttcatccatgttgtagtatgtatcagactstatgtctgattattactattattaataattactactattaatacataataattgcacatacttataggatacatgtgatatttggatacatgtatataatgtgtaatgtttagagcaggacagttgggatatccatcacctcaaagatttctttgtgttgagaacatttcaaatcttctctgtagctattatgtaatatacaataaattattattagctatagtcaccctactgtactaccaaacactataacttatttattctaactgtatttttgtaccattagccaatttttc

SEQ ID NO: 781628 - DNA, 641 bp, Homo sapiens
ctttattgggatataattaatataccataaaattaacctgcttaaagaacagaaatcaatattttaaaatatattcacaggcttgtgcaaccattaccacaattttagaacattttaaaacctcttaaaataaatactcataccccattggtagtcattctgcattcattcctttgtcttcctagacataagcaaccattaagctactttatgtctctgtaaatttgcctattccggacatttgatagaaacgaaatcatataatatgtttttttgtgactggtttctttcacttcatgtttcattttttcaagcttcatccatgttgtagtatgtatcagactgtatgtctgattattactattattaataattactactattaatacataataattgcacatacttataggatacatgtgatatttggatacatgtayataatgtgtaatgtttagagcaggacagttgggatatccatcacctcaaagatttctttgtgttgagaacatttcaaatcttctctgtagctattatgtaatatacaataaattattattagctatagtcaccctactgtactaccaaacactataacttatttattctaactgtatttttgtaccattagccaatttttc

SEQ ID NO: 781629 - DNA, 602 bp, Homo sapiens
attagaaactttttttttctttgagccagggtcttgcccaggctatactggagtggtgtgatcctggcttggttaagccttgacctcctgaactcaagctatcctcccacctcagcactcttcccaaagtagctgggacgacagacacgcaccaccatgcctrgcaaatttttttttttattttgtgcagagatgagggtctcacaatgttgcccaggctgatctcgaactcctgaactcaagggatccttccacctcagcctcccaatgttctgagattacaggcatgaactactgcacttggcccctagaaacttttatagcattttgatattgctgccacttgtgagcacatgaagagttggtcacactgttgagtcaaataattgttttaaaatggccttgtattttgtatttcttttacagtttttccagtaaatcatttttatgatgttttcccaaagtatttgtccatgtcagatagaaaattaaaaataatataaaataagctgattttactacagatagtttgagaagtatcgccctagtatatgcacagtactttggtctgtagtagtctcttagtaaaggtttttcaacga

SEQ ID NO: 781630 - DNA, 644 bp, Homo sapiens
cccttgagcttcccgggtgaggtgacaccccaccctgctttggctggcactccatgggctgcacccactgtccaattggtcccaatgagatgaaccaggtacctcagttggaaatgcaaacatcacccaccttctgcgtcgatctcactaggagatgcagactggagctgttcctatttggccaacttgctagtaacccatagcctgtctttttaagctataaattcttttttctgcttgatcaattcggccactaagagactctgatgcattctttggtatgttagttgcatttttacctccaagatttctacttgattcttttaattattttcatttctttgttaaattgatctaatgagattatgaatttcttttctgtgtgttatcttgaatttctttgcgttttctataacagctattttgaattttctatctgaaaggtctctttctctccargattggcccttcatgtcttatgtaatttgcttggtgagttcatgttttcctggatgatcttggtgcttgtggatgtttgttggtttctaggcattaatgagttaggtatttattgcagctttcaaagtctggcctgtttgtacccatccttcttgggaaaacttgtcaggtatttgaagagactt

SEQ ID NO: 781631 - DNA, 659 bp, Homo sapiens
attcattttaaaggttgaataatattccatttatatatacatcacattttgtttatccattcatctgccaatgaacatttagactttttccaccttttggctcttataaataatactgctgtaaacattggcatacaaatctgtttgagtccctgctttcaattcctttgggtatatactcagaagtagaattgctggatcatatagtaattctatgtttaaattttttgagaaaatgtcatactgttttccacagtggctgcatcattttacaattctaaccaacctggtagaagggaaatacccgactcctgtcccctttagccttcctgtctcacttaaggggtagggagtgaaatagcacttgtgaagctcacagcctaggsacacaggttcactaaaagactgagacttaatcataggactatagaattttccttccttcacaatttaccaccacaccaatagggttccataaaacagggtattgcagctgaaaaaaaaaaaaacctgcaagtttcaaatcttatttaaagaaaaaattctaggaaaagctaaagacaacaggggaggcaaaaataaggacactagaggaaattttagcctctgacacaactatagcaaacagtgaagacagcctaatttctagccagatgaac

SEQ ID NO: 781632 - DNA, 431 bp, Homo sapiens
aagccagatagggactgagattctattactgaatgaaactcttataagggcttgggagtgcagatagggggagttctcaagaaattttacaagaaagtgttatgtattatgaagcatgggttattgtttgtttgtaagtaaaaaaaaataagagagagagagagattaagcaaaataaacattaagcaaggagaagctgctctaaccatttaaatgakacttttaaaatgaagattaacagcctttggcagactagaagaaaaaaaataaaagaaaaatgtcaagcagaaaacagttaccacagatttgatcagtatttactatcaactgtaagaccgttctaggcaggtggggtctatgggaaatacaaagataaatgagagagaatcccctaaaaccaataatattgctttatgtttaatttatcattt

SEQ ID NO: 781633 - DNA, 621 bp, Homo sapiens
cctttcacatcccacctggaaatgctcctgcaaagatggagtgagagcctctcccttttctgcccaccttcctctcaatatggaggaacccacctccccgcaaaatgctgctctacagtcctttggcaattttccttttgaaaagctgaccaataaagtccacatatcatatacttccattcaaatgaaagtccagactaggaaaatctacacagacagaaagtaggttactggctgyttagggtcagggggagagagatgtaggaggaaaatagtttaaagggtatgaggtttctttggggagtgacaaaaatatctaaaattggctggtgatggttgcacagctccgttaatacactacaaaccattaaattgtacacctcaaatgggtgactctgtgctatgtgaattatatttcaataaagctgtttaaatgaaagaaagctgattgttggacagtccttccttagctgccccacctcgctttatttccaaggagccctggaagaacgtgtgccgtggatccttctgcacctggcctgtaccagggccactcttgggaatgttgttgctcgtgctgggcgccactctgtggggctgggcacctcgttgtgattgcag

SEQ ID NO: 781634 - DNA, 621 bp, Homo sapiens
cctttcacatcccacctggaaatgctcctgcaaagatggagtgagagcctctcccttttctgcccaccttcctctcaatatggaggaacccacctccccgcaaaatgctgctctacagtcctttggcaattttccttttgaaaagctgaccaataaagtccacatatcatatacttccattcaaatgaaagtccagactaggaaaatctacacagacagaaagtaggttactggctgcttagggtcagggggagagagatgtaggaggaaaatagtttaaagggtatgaggtttctttggggagtgacaaaaatatctaaaattggctggtgatgrttgcacagctccgttaatacactacaaaccattaaattgtacacctcaaatgggtgactctgtgctatgtgaattatatttcaataaagctgtttaaatgaaagaaagctgattgttggacagtccttccttagctgccccacctcgctttatttccaaggagccctggaagaacgtgtgccgtggatccttctgcacctggcctgtaccagggccactcttgggaatgttgttgctcgtgctgggcgccactctgtggggctgggcacctcgttgtgattgcag

SEQ ID NO: 781635 - DNA, 537 bp, Homo sapiens
ttattcattgccaggaatagaataacttacctgaaaaaggaaaagcaaagaagccaatcttgcaagatgaacctgaggggaggcttacctgctggattcagtggtgcttagctgcagagtgttcacttcagtatgccaagagggctgagggtcccttgcagagttaaaagctcagtccactttccaagaatcttctcacttttcttcattctaaagggcttctggcagtttccttccttatggggcagccaggaactcatgccctacactgttataaatcaagaggtttgatgtacttctagcaagtccagtaggaaccagactttctcaaatagcttaattaaatgayggctattgttaatttacactagtatcctattagctgtccacagagatttctattatccaacatcagtagtgagaatgaggcagatattattagaaaagcatggaattaggacatataagtgccattaggctgtattcaaatagaatattagtatctattcatattataattattttttgtatcttcaa

SEQ ID NO: 781636 - DNA, 605 bp, Homo sapiens
ttcttctagaattgactctttatgcttctttgtacctgataatattccttgttctaattctatcatggtaggcagaataattagctcccaaagaagtccatttggtaatgtccggaacctgtgaatatgttaggttgcattgcaaagggggatgaaggttgcagatggaattaagtttactgaccacctgacctggagatggggaagattattcttgattatctgggtgggctcagtgtaatcaaaagggtccttacaggtggaaacaaagggcataatasaaccagggagatggtgttgtgagaaagacttggtccagcattgctggctttgatgatggagtaaggggacaaaaaacaaagaatgtggaaagcctttagaagttagaaagggtaaataaatggaatcttcactacagccttcagaaaagagcatggtagccagaacaatcaagcaagagaaaaaaataaaaggcatccaaattggaaaagaggaagtcaaatcatctctgttcaattatctctgacaatatgatcttatacctaaaaaaccttaaagactcctccaaaagacttaaatttgataaataaatttagtaaagttat

SEQ ID NO: 781637 - DNA, 540 bp, Homo sapiens
gatattaaggatataaaatcaatggaaccagacaatcaaaatggacgtacactgcttagtgctggataagcattcagtaagtagtagccactattagctttgtatccatggtgaaatctaagctaaggtttctggcttggggttctaggaacatgttggtcctcagtactcaccaacagtgtgggagtgggtgagcayggaaaggaagataatgaatttagttagacaatgaattcgaggaactgtggagattattggcagtgatgatccaggaggcactgtaaacaatccttaggtattctgtcctactattagcagggtaccatgtggcaaccaaggccaaacaacataaatgcaaatgccactatcatcctgaaggcttggatttaatttgggtcctgggcagtgtggctctcaggagcctatggtcaggagaggctctccatagggttagggttaggatagatgaacttgctgagatttgggggagtttgagaatttttttgactcgagcttggaaaacagagaatgatgatgagg

SEQ ID NO: 781638 - DNA, 558 bp, Homo sapiens
gtctctgggcttatatctaaggtctacaatgattggtgagtagagctaagaggtaatagcactcaagtcaagggttctgcagtggcaactagttgaacatggctgacaagtatgggcacagatgtggcctgtttctattttcctcctatgacttggcaacttatttgactgaaactaggagcacaggtggcactgggacygactggaatcttcctgggttctgtgtcctcagattggtagatgaccatagtagttacataatggtggaacaacagaattccaatagctcaggggcaggaaggatgaaagtagccaaagctctcagtgctgtagacaaaatagcctaaagcttctgtgaagtcacctgcctgtggaggaatcaaccagacctagctggagtctcagaactggggtgtgttgtatcacttatgaagtgagtgctgcctctgccacaaagttcctagccaagggcctggcacagagaaggtgcttaggaaatatttggtgaatgaatccaattggagatccatgggttattgaggaccccgaaaagctttt

SEQ ID NO: 781639 - DNA, 705 bp, Homo sapiens
tggccctttctgctgtattcacgcgccctcaccacctcctgtgtattcgtgtgctggagttcagccgccaaggtggagagagactccctgtcggggaaggactccggccccaatgcctcctcctccaggccaggccgccatggtgggtgggaagagaggccactcctagagaaagagacactgtcagtaggtgtcaggaggtgtcccgggagctcgccgcgtggtaaccaacagacacagcccttcttggcattcaaagttgcaccctgatgcctgtgagggagtygtgactttctgttaccactgacccagggcagagttttaaacagtgaccttaaggcgaaaagctccagatctcgttactgaccagtgcagccagccactgccttccttcctttttgattctaaaaatgacactcgggttttagagggttgcttttcaggcagccgaaatccccgcatgcaccttctcgtacatttcaggagagaagaatcaagtccatccacggtatccttgcccaggtaccggtatccatcagagcgtgattggggtttcagcagagccaggcctgcttttcctggcagaggctgggcccctttagatttttcttgtagattttgcttgagcctcccagcccttccttgctcagcacctgtgacccactgggtcacagtgacccacatcccatggctctgaccgcagct

SEQ ID NO: 781640 - DNA, 602 bp, Homo sapiens
tggatggtggcataattgcacatattgaaaaactctaaatttacatcggtggatccagtgcgtctcattatactggaggtgtgaaaactccatgtgcctctttgaacaattgtcctgctctgtcacagttcaggggaaacaaaagtagctccaacttcccgagatttaaatttgactttattccatttagttgatattgtaactagaatttgaatagtcttttccctttcwgattttttttttttttttttttttttttttttggagatgtagtttcgttcttgttacccaggctggagtgtcgtggcatgatttcagcttgctgcaatctccacctcccaggttcaagcagttctcctgcctcagcctcccaagtagctgggattacaggtgtgtaccaccacacccggctaatttttgtatatttagtagagatggggcttcaccatgttggccaggctggtcttgaactcctgacctcaggtgatcctcccgcctcggcctcccaaagtgctaggattacaggcgtgagccactgcacccagcacccttcctgatttccatttccgcttttatctctccactcccgaagatgtatcaac

SEQ ID NO: 781641 - DNA, 602 bp, Homo sapiens
tggatggtggcataattgcacatattgaaaaactctaaatttacatcggtggatccagtgcgtctcattatactggaggtgtgaaaactccatgtgcctctttgaacaattgtcctgctctgtcacagttcaggggaaacaaaagtagctccaacttcccgagatttaaatttgactttattccatttagttgatattgtaactagaatttgaatagtcttttccctttcagattttttttttttttttttttttttttttttggagatgtagtttcgttcttgttacccaggctggagtgtcgkggcatgatttcagcttgctgcaatctccacctcccaggttcaagcagttctcctgcctcagcctcccaagtagctgggattacaggtgtgtaccaccacacccggctaatttttgtatatttagtagagatggggcttcaccatgttggccaggctggtcttgaactcctgacctcaggtgatcctcccgcctcggcctcccaaagtgctaggattacaggcgtgagccactgcacccagcacccttcctgatttccatttccgcttttatctctccactcccgaagatgtatcaac

SEQ ID NO: 781642 - DNA, 542 bp, Homo sapiens
gaggctgggtaaattgtagtttcattgtagctgtctgaacttggatttctcacgcctacttcactggaaacgcaaactctcacagcattttgttttagtttcagaatcagagcaaattagaagtctgaatttccttcaacacttggaaataatttatttatttgaaatatattcataattaattcgttataaaaatgtattaaatgcttatttgagtcagcagaggaagatagaaactttatgaaagtagaaggtggatctcctttttgccttcattttcagaacrtctcgtttacacccattagttgaaacattaatgtcattttattttcgtcctgattatctcataaaacatttcttagaataacagcaatacctatcattgaagttggataagaaatattttgcaattggtttgcaacttaaaaatctgtttgcatgactctttttcagtgaaagtaggcaagagaaattaaaattcagaaatatctcacctaatgtcagaggtaatattgataatttgtgttttacaaataatacat

SEQ ID NO: 781643 - DNA, 624 bp, Homo sapiens
ttcaaggtggtggataaattacctcaatttggtcattacacaatgcacccatttaaacacacatcgaaacatcaggttgtaccctataagtatgcacaattattatgtgtcaattatatttttgtttaaattctacttccagtcaccactccagaggactgctgacgtgaggaggttttagacaatattctgttctggcctagccaagggattagggaggcaatgtaagccaaacttcctttttcacagcaagctcttggactgcagggatcaaatttcattcawctttttattcccttttcccctaggtcccagacccttgctcataataagcatgtggatgactcgaattgaattataagagtgaaagactcttgtgaaagaagaatcattaagactgtgtgaatttaaaaagagaacgaattcaagagaacatgctttgtaagtctgggaaagagaacgtgcacggtacaagggcggtaacatgtgaccaagaagagaagagtaaaatgaactcactagccaattacattcgagtgatctgctacttagaatgcatgattgaactcctaggtggtcttatagccactgcgtacttttcctctgccagactttgaaagcact

SEQ ID NO: 781644 - DNA, 600 bp, Homo sapiens
tagttttctctgtagagatttttttttttttagatggaatttcgctcttgtcacccaggctggagtgcagtggtgcaatctcggctcactgcaacctccacctcctgggttgaagcgattctcctgcctcagcctccagagtagctgggactacaggcgcccgccaccacgcctggctaatttttgtattattagtagagacgkggtttcactatgttggccaagatgttctcaatctcctgaccttgtgatctgcccgccgcggcctcccaaagtactggaattacaggtgtgagccaccacacccggcccattgtagagatgtttttgcatcttgtggttaagtttattcctaggtattttattttatatgtagctattataaataccattactttcctgatttctttttcagattgtttgctgttggcatatagatatgctaccaattttgtaagtttattttgtatgctgcaacattactgaaaatgtttatcaatcctaatagttttttggtggagtctttaggttttccaaataaagatcataacatctgcaaaaaagggtaatttgacttcttccttttcaattcgtatgtgc

SEQ ID NO: 781645 - DNA, 474 bp, Homo sapiens
atctgagaaaattaaggtggttagagttcatatgagagggtaccaaagaggagagagatgcacagagaaaaatttcagagatctgcagtggtctccctcaagtaatcaagagagtgctaatctgtgtatgcaaggctagggaaataaccacccacaaggattgtaaagaacagtgctcagagatcatacatattcaraaaaattatctactgtcaatagtcaatgtgtaacatcttacaattcaggcagcattggttagaacagtagttcccaaaggaaggcaattttggccccaaggggacatttggcaatgactggagaaatttttggttgtcacaactgggagcatgctactgatatctagtctgaaagttaaacaatgcacaggaaatctcccaccactaaaagttatctgtaccaaaatgtcagtagtgatgcaattgagaagtcctaggttaaagtactaaaaaggtc

SEQ ID NO: 781646 - DNA, 613 bp, Homo sapiens
tagagttccagcacatttccacctttccaatgagctgccaggtttgactggagccagtaactgtttattcatgcgtgaccaggctgctgatagagaagtagtgcaatgcagaaaggcattcagcactggaccacccatgaatgagtgtgcttatgtgttgtaattcccttggtgcaggtgggcatctgatactcattcattcagcacmaagggctaggccagggctcaggaccaactcagcagcagcaatctgtcatctgtcacacaccttcttgtgttgcctttctcaggttggctgcagcctctgagccatgaccccgtaaccatttcaaagatagccatggacactagaactctgtttcagaagctttaagacgtctctaggagaggggtggcaaccaagttattttatgcatgctaacaccaggtagcacagtataaacaggcacaaattagaaatattttgaagaaagagaagggattgagttaacctatgaacagtgatgtggacagttgctttcatgaaaaaagaaacatacagcaaatgaggccccagctaactacctattgtatgtgtctacattacaaagagagagacagaaaggattgaatt

SEQ ID NO: 781647 - DNA, 607 bp, Homo sapiens
tgcttttagcagcacaattctcaattgcaaaaatatggaaccagcctatatgcccatcaaccaatgagtggataaagaaaatgtggtgtacatatatgccatggaatactactcagccacaaaaagaaatgaaataatggcattagcagcaacctggacagagttggagactattattataagtgaaataactcaggaatggaaacccaaatatcatatgttctcacttataagtgggagctaagctatgaggacacaaaagtgtaagagtgatataatgaactgtggggaaytggggggaaggggctgagggattaaaaactacacattggatgcagtgtacactgcttggatgatgggtgcaccaaaatctcagaaatcaccattaaggaacttatctgtgtatccgaacaccagctgttccccccaaaactatcaatataataataagaagaaaaactaaaaatatttgaccaagttcaacattcattcttgattaaaaaaaaaacttttaacaatttaggtaaagaataaaacgtcatcaaaataacaaaagtcaattatgaaaaacccacagttaacatcacaatcaatgttgagaaactgt

SEQ ID NO: 781648 - DNA, 581 bp, Homo sapiens
agttaaaacaatttgtgcgacaaaacaaataacatagtattgaattataacccaaagtatgaaatatacatgagtccatacaaaacgtaattgaaataaataaatgagggagaaaggaaagctctttcatttaataaatatagaaggagtaacggaaacagaaaagcaccatttgcaaacaccacagtgatacttgtttcaagaaaaaccatcaatggatgctaaaattagtggataaaagcrtgatgaaaaacaggatgtttacatattctcaaaatatctccccacaggatacttatacttacgaagggaaaatagtaccctgacagtggagaaagcaggcaaacaacaatcaaagttgtcatcaatattggaacatatcgacatcttatctctccagacaggatgccctatgaagcctcagacaaactcaagttgaacaacattctacaaaataaatcgctagttttcttcaaaagtctcagaatcactaaaaataaagactaaagaagtgtctcggattacaggagactaaggagacctgacaactagatgcaatgtgtggtgatggattggatcct

SEQ ID NO: 781649 - DNA, 612 bp, Homo sapiens
aggaatttatccatttcttctagattttctagtttatgtgcatagaggtgtttatagcattctctgattattgtttatatttctgtggagtcagtagtgatatcccccttatcatttctgattgtgtttatttggakcttctatcttttcttctttattagtctagctatctagctagcagtctattttgttaacttttttaaaaaaacagctcctggatttactgattgttgaagggtttttcatgtccctatctccttcagttcaactctaatcttggttattccttatcttctgctagctttagggtttgtttgctcttggttctctagttcttttacttgtgatgttaggttgttaacttgagatctttcaagcttttgaatgtaggcctttagtgctataaatttccctcttgacactgctttagctgcattccagagattctgatatgtcatttcttttttctccttagtttcaaaaaacttcttaatttctgccttaatttaattatttacccaagagtcatttagaagcaggttgttcagtttccatgtagttgtgtggttcttagtgagttgcttattcttgagttctaatttgattatgttg

SEQ ID NO: 781650 - DNA, 598 bp, Homo sapiens
acacaaaattctcttcatggtatttacattccggtgcagcagatatattaaacatataaatacaaaaataaatactgtttaaaattacagacttaagtactttgaagaaatattacaggtttactactacagtacaaaatgggctactgatttgttgggagggtgagagtgataggcagracatacagaaagtattaaaagttattttccaaaattgtaaaagtggttgttattttaatataatcattaatgattattagcaattcttcctttttatcatttttgctatattttccaaaattttagcaattaacatatgctatggtttaaatgtgtcccccaaaatttatgtgttagaaacttagccctcaatccaacagtgtcagaagataggacctaatggaagatatttaagtcatgagggctctgccctcaggaatagatcaatgccattattaaagagaaagtttggctccctttggcctctttgcccttccaccacgtgagtacacagtgttatggagcatacagcagggagaccctcaaaagatgccagtaccttgatcttggactttctagcctccagaactctgagaaa

SEQ ID NO: 781651 - DNA, 598 bp, Homo sapiens
acacaaaattctcttcatggtatttacattccggtgcagcagatatattaaacatataaatacaaaaataaatactgtttaaaattacagacttaagtactttgaagaaatattacaggtttactactacagtacaaaatgggctactgatttgttgggagggtgagagtgataggcaggacatacagaaagtattaaaagttattttccaaaattgtaaaagtggttgttattttaatataatcattaatgattattagcaattyttcctttttatcatttttgctatattttccaaaattttagcaattaacatatgctatggtttaaatgtgtcccccaaaatttatgtgttagaaacttagccctcaatccaacagtgtcagaagataggacctaatggaagatatttaagtcatgagggctctgccctcaggaatagatcaatgccattattaaagagaaagtttggctccctttggcctctttgcccttccaccacgtgagtacacagtgttatggagcatacagcagggagaccctcaaaagatgccagtaccttgatcttggactttctagcctccagaactctgagaaa

SEQ ID NO: 781652 - DNA, 558 bp, Homo sapiens
caaggaagctaagaacctagataacaggttactggaactgctttctagaataaccagttcagagaggaacacaaatgacctgatggagctgaaaaacacaacatgagaactttgtgaagcattcacaagtatcaatagccaaatygatcaaatggaagaaacgatatcagagattgaagaccaccttgctgaaataaggcatgcaggcaagatcagaggaaaaagaataaaaaggaatgaacaaagcctacaagaaatatgggactaagtgaaaagaccaaacctacgattgattggtgtacctgaaagtgatggggagaatggaaccaagttggaaaacacacttcaggatattatccagaacatcctcaatgtagcaagacaggccaacattcaaattcaggaaacacagagaataccactaagatactccacaagaagaccaaccccaagacacataattgtcagattcatcaaggttgaaatgagggaaaaaatgttaagggcagccagaaagaaaagtcaggtcaactaaaaagcgaagcccatcagactaac

SEQ ID NO: 781653 - DNA, 558 bp, Homo sapiens
caaggaagctaagaacctagataacaggttactggaactgctttctagaataaccagttcagagaggaacacaaatgacctgatggagctgaaaaacacaacatgagaactttgtgaagcattcacaagtatcaatagccaaatcgatcaaatggaagaaacgatatcagagattgaagaccaccttgctgaaataaggcatgcaggcaagatyagaggaaaaagaataaaaaggaatgaacaaagcctacaagaaatatgggactaagtgaaaagaccaaacctacgattgattggtgtacctgaaagtgatggggagaatggaaccaagttggaaaacacacttcaggatattatccagaacatcctcaatgtagcaagacaggccaacattcaaattcaggaaacacagagaataccactaagatactccacaagaagaccaaccccaagacacataattgtcagattcatcaaggttgaaatgagggaaaaaatgttaagggcagccagaaagaaaagtcaggtcaactaaaaagcgaagcccatcagactaac

SEQ ID NO: 781654 - DNA, 646 bp, Homo sapiens
aggattcataacaagtgtgattttttaaaagtttaacttaagtaagaataataaaaaattactgaggtaatacaagagaaacaaggatgttccagcctctgccttcccctttccctaacttccgaccttcctccatccctggaggcctttgcctttaaccgcttctgtttttgctgttattagttacttctggtggttaactccctatctttaaataatatgcctctgccggtasttgttattccccttgcctacctctcccctccccatttggtggtatcactattttttcctttatttctactaagaaaacttcctctccatatgaatgtaaataaaactgcatcccagttgtgttcactaccatatacaaggctgagctccagataaattaaaaacctaaatataaaatatagtactataaaggtaatagaaaaaatgtagaatatcttcgcgagttaggggtaagagaataattatagaaaacttcaatattaggcccctgtaatcccggcactttgggtggccgaggcgggcagatcatgaggtcaggagttcgagacaaacctggccaacatagtgaaaccccgtctctactaaaaatacaaaaattagccgggcatggcagcatgcgcctgtagtccca

SEQ ID NO: 781655 - DNA, 604 bp, Homo sapiens
atttgggtttctgagagggatcctggaagcaattaccccacggataccaagggatggctatacgatgatgttatctagattagaggtttgctgtgaggttaaaatgaacgaatatatgttgtggtcaattgataactaaaatgttcccgattctctgcgcttcccgtgtcccagaccctttacattgtgacttcttgtctttttccatcaaaaagtagagcctacttttccttgaatctttcccctttgattcctattgaattccctgtgtcttgcattgcccagtagaacgcagtagaagwaatgcctggccagtttgcaatacaagtcatgtccggccagtttgcagtagaagtcatgcctggccagttggctgcttcctaagggaagcctgccagtctttgtgagaagcctgggctagcatgctggaggatgagtgcatgtgagtgtgactgaggcagcacaacccatagccagccaacccccagacatgtgagggagtccaggctcaattagcagagctgcccacctgaattgaaatggaccacaggtacacaattgagcctagcctcttccaggaaatccatcccatatcctccactct

SEQ ID NO: 781656 - DNA, 586 bp, Homo sapiens
cagaaccaaactgctagtgtaaaaagaagatctgaatacttgtcctgattctttcacttagtagctgtgtgacctggagcaaattacttaacctctctgatttgcagtttagttatgtgaaaaatgagcataagtccctgcataattcatacggaggtagtgaggataaatgtaataatagatgtaaaaatgttgcagtccactgggaaacagtaatacatgaaaggtatgcttaatatttggttgtaaaatatagcctttattctatgatgtccgattttcttggcattcacaacacttagaacccactaataaagccatgctagcaagagtacaattaaggacaagttggaaaactgcccagttcccatgcatttgatcttagtgaagcacagcacatttgaaaggactgtggatgcakgagctgcatttatggggaagtccctccatgaggccctctccatctacccacctgacctcttatccttctacccactcccgaacaatttgctcggctcagccccctccgatccaaagcctctgtgattctaagacccaggtgtgttctggagaagattaatcacag

SEQ ID NO: 781657 - DNA, 579 bp, Homo sapiens
tcactgtgtatgcaacctccacttgggcttctcctcctcacctctgcaagggttgaggggtaagggaaaccaaagtaaatgcaaacttcatgccgcctgctgtgctgtgagtaatgaagttctttgtctctgacccaggagtctcctgtcttctaccagcatccatgaaattgtggcagactaacttgttagcttgcaartaggttataatttcagacccttcatagtttttgacaatgcttaatatataatcattttttatcattaaataacaagtgttttgaaggcagggaccatgctgctcattgtagtatctgcaagccttgtatagaatggactcacagtgcatgcttattgaatgaattaaattggactggctagttttaaactcagttttttttttctcagttaactcaaactcaacaacacctgcattagggccagacagtgaagaggaagaatagagggaggaaggctgacggggaggaagaggaaaaatccaaacaccttgatttcttttgtcttgttgcactcatgatcccctttacagatatttattttcaggaataacatatctct

SEQ ID NO: 781658 - DNA, 579 bp, Homo sapiens
tcactgtgtatgcaacctccacttgggcttctcctcctcacctctgcaagggttgaggggtaagggaaaccaaagtaaatgcaaacttcatgccgcctgctgtgctgtgagtaatgaagttctttgtctctgacccaggagtctcctgtcttctaccagcatccatgaaattgtggcagactaacttgttagcttgcaaataggttataatttcagacccttcatagtttttgacaatgcttaatatataatcattttttatcattaaataacaagtgttttgaaggcagggaccatgctgctcattgtagyatctgcaagccttgtatagaatggactcacagtgcatgcttattgaatgaattaaattggactggctagttttaaactcagttttttttttctcagttaactcaaactcaacaacacctgcattagggccagacagtgaagaggaagaatagagggaggaaggctgacggggaggaagaggaaaaatccaaacaccttgatttcttttgtcttgttgcactcatgatcccctttacagatatttattttcaggaataacatatctct

SEQ ID NO: 781659 - DNA, 579 bp, Homo sapiens
tcactgtgtatgcaacctccacttgggcttctcctcctcacctctgcaagggttgaggggtaagggaaaccaaagtaaatgcaaacttcatgccgcctgctgtgctgtgagtaatgaagttctttgtctctgacccaggagtctcctgtcttctaccagcatccatgaaattgtggcagactaacttgttagcttgcaaataggttataatttcagacccttcatagtttttgacaatgcttaatatataatcattttttatcattaaataacaagtgttttgaaggcagggaccatgctgctcattgtagtatctgcaagccttgtatagaatggactcacagtgcatgcttattgaatgaattaaattggactggctagttttaaactcagttttttytttctcagttaactcaaactcaacaacacctgcattagggccagacagtgaagaggaagaatagagggaggaaggctgacggggaggaagaggaaaaatccaaacaccttgatttcttttgtcttgttgcactcatgatcccctttacagatatttattttcaggaataacatatctct

SEQ ID NO: 781660 - DNA, 625 bp, Homo sapiens
atttgggtttctgagagggatcctggaagcaattaccccacggataccaagggatggctatacgatgatgttatctagattagaggtttgctgtgaggttaaaatgaacgaatatatgttgtggtcaattgataactaaaatgttcccgattctctgcgcttcccgtgtcccagaccctttacattgtgacttcttgtctttttccatcaaaaagtagagcctacttttccttgaatctttcccctttgattcctattgaattccctgtgtcttgcattgcccagtagaacgcagtagaagwaatgcctggccagtttgcaatacaagtcatgtccggccagtttgcagtagaagtcatgcctggccagttggctgcttcctaagggaagcctgccagtctttgtgagaagcctgggctagcatgctggaggatgagtgcatgtgagtgtgactgaggcagcacaacccatagccagccaacccccagacatgtgagggagtccaggctcaattagcagagctgcccacctgaattgaaatggaccacaggtacacaattgagcctagcctcttccaggaaatccatcccatatcctccactctaatgagtatcaatgagttctt

SEQ ID NO: 781661 - DNA, 545 bp, Homo sapiens
aagtaaataatcatatagcctacaaataatgacaattttatttcttcctttctgatgattatatcaattatttttttgccatgccatgtcatgctggctaggatctctggaacaatgtcatttagttttatttttttwaatagagatgaagtctccctatattacccagtctggtcttgaaccgatgagctcaagtgatcttctcatcttgaccttctggtacaatgttaaatagaagaagctagagtaggcattctcgttttgttcctgacttgctttgttgcctttaggagaatgcttctaattcttgactattttgtataatttggatagattccatccatcatattaagtgaattctttccattcttaacttgtttaggatacttgttttgttaccatgcaagacgttgaattttgcctttgtgctttttttgcatctattgtggtgatcatatagcttttctcctgtaatgggctgtgaattatatttggagatttttctaatgttaacctaatcctgtattgctgagataaatcataca

SEQ ID NO: 781662 - DNA, 568 bp, Homo sapiens
aagacaggaaaatgtggaaaagtttggagcctcctagaagctttgacaaaaatgctgatagtgatatgaacaataaggtccaagctgaggtggtctcagatggagatgaggaacttgttgggaactggagcaaaggtgactcttgttatgttttagcaaagagactggtggcattttgcccctgtcctagagatttgtggaaattttgaacttgagagagatgatttaggttatctggtggaagaaatttctaagcagcaaagcattcaaaaakgtgacttgggtgctgttaaaaagcattccatcttaaaagggaaacagagcacaaaagttcagaaaatttgcagcctgatgatgcagtagaaaagaaaaaacaatttttttgaggagaaattcaagctggctgcagaaatttgcataaatagcaaggagcctaatatgaatccccaagaccatggggaaaatgtctctctaggccatgtcagagaccttcacagcagtccctcccatcacaggcctggaggcccaggaggaaaaagtggttttatgggccgggcccaggggagta

SEQ ID NO: 781663 - DNA, 605 bp, Homo sapiens
aagccccagtagaggatccttcgtggcctcttccagctccggggtccctgacaccccccggcttatgcccgcttctctcccctcactgcctccgtcctcacacggccatcttctcatctccttgtatctcttctctgtgtgtctcttataaggacacttgtcatttgactcaggacccagcaggataacccaggataatctcrtcttgagatccatcacttactacaactgcaaagtcctttttttagatggaatttcgtgcttgtcacccaggctggagtgcaatggcacgatctaggctcgctgcaacctctgcatctgggttcaagtgattctcctgcctcagcctcctgagtagcagggattaaaggcacctgtcaccatacccgtctaatttttgtatgtttagtagagacggggtttcaccatgttggccagtctggtctcaaactcctgagctcagatgatctacccacctttgcctcccaaagtgcgtgagccaccgcacccagccagggctgctcttaaatgatgaaaccaatgggctctacagcctcaaatgctgagggtcaagctgtgtcctcttctgccaagaacaaggaagt

SEQ ID NO: 781664 - DNA, 610 bp, Homo sapiens
ccctaatctctgaggcctgtgaatatgctgtgttacatggtcagagagactttgcagatgtaattaaatttagggactttataatagtgagattgtcctggattctctgggtgggccaaattaatttcatgaggccttcacagtagggsactctcaggctgggagcagaagaggggtgcagcaggaagagaagtcagtggagtctgatcctgagatggatggcatgcacgctcactggccctgagatgcaggggccacatgtgaggaccagagggagatctctaggggctctgacggctcctcccagctgacagccagcaaggaaacagggacctcagccccacaaccatggaaactactagcagtatagatgaacctggctgctgatttttcccagggcctcttagtaagaacccagctggttgacatcttggtttcaggcttacagaacccaaagcagagaaagcagttgagctgtcccagacttccgacctacagaactgtcaggcaataaaccgttattggtttcagcccctagctttgtgactgtttgtcatggcagcaacagaaaactaaacgaagccatttcagtgagagcaggaaaagtgct

SEQ ID NO: 781665 - DNA, 614 bp, Homo sapiens
cgtggaagcagaggttggaacaattcactgtgaagacagaggaaggggccaaagccgaggaatgtggtggcctctggaagctggaaagggcaaggaagattctcctcagagcttccagaaagacaacagccctgccgacgcctttgattatagcacagtgaagactcatttcagacttctgaactccagaactgcaaggtcacagttgtgttgtcttaagccactgaatgtccggtaatgagttacagaagcaacaggaagccaatacagctctttaatactcccccaaattaccaccctgttgccccaacaaacattcgcttctctttcttcatcttcccaatgttgtttatctgggtcttcagraagtcaatactatgattatgtaaatattttccactgagccacatcaagaaataagattgcatttctgtctcgtacatgtgtatgttttcaagcttataattactttggattttccccgatgcacctctggctaattttcaacagccacaatttacttgtaaaacgctttctcaattctattttccgcacagcttatatatcaaaaaaaaaattcagttcatgtttttcctggaggaatgcctccggga

SEQ ID NO: 781666 - DNA, 642 bp, Homo sapiens
attataataaaccttatttttccttctgcagtctgtttctggatgctggcagtcattcagaaacatttgctgagcacctcgtacctgctgaatgaacccacgtgaaggggagccaggagtgcggatcattaaaaagcctgtactttctcagtccccatttgacaccacagagagaaaatgcatgctcctgatttgggtagatctagaatgttcttatgaatatggtaggtggagcaagggawccaggttcttatgatacatgataagaaaggccctagcttggtcagacacaaataaaagccaagcttttcatctaaactcccttgcaccatcacccccttaccaaccagtacagagagcttaacatctctataccagatagtgaatgtttctaataagaatggcaaattcttattgtgagagagataagggcattcaagtgttaattcaagagaaatatgtatatggttctttaaatgatttatttactaacagcattaagtatggtgtaaaggaatttacataccctaattctcgtctatatatttttttggattttaaaatgacaacttgtctaagttcgcattagtattaagccctaacatgagacagtatttatagcataagatttttgccacctat

SEQ ID NO: 781667 - DNA, 642 bp, Homo sapiens
attataataaaccttatttttccttctgcagtctgtttctggatgctggcagtcattcagaaacatttgctgagcacctcgtacctgctgaatgaacccacgtgaaggggagccaggagtgcggatcattaaaaagcctgtactttctcagtccccatttgacaccacagagagaaaatgcatgctcctgatttgggtagatctagaatgttcttatgaatatggtaggtggagcaagggaaccaggttcttatgatacatgataagaaaggccctagcttggtcagacacaaataaaagccaagcttttcatctaaactcccttgcaccatcacccccttaccaaccagtacagagagcttaacatctctataccagatagtgaatgtttctaataasaatggcaaattcttattgtgagagagataagggcattcaagtgttaattcaagagaaatatgtatatggttctttaaatgatttatttactaacagcattaagtatggtgtaaaggaatttacataccctaattctcgtctatatatttttttggattttaaaatgacaacttgtctaagttcgcattagtattaagccctaacatgagacagtatttatagcataagatttttgccacctat

SEQ ID NO: 781668 - DNA, 618 bp, Homo sapiens
agagtaatacagtttaagcctggtttgcctggggcattccagtatatacaggtatcccagtgtgattgttattagtgcctcccttcactcacaaaagtgcccagaagacaaaggaggaagtggtttcccgctgcggagtaatagcatgtaccagacactgctctaagtgctttgtgggcactcactcaactcttcacagccatgctctatatgcaayacgggtattgttcgcatgttgtggagggcaggattccagcctggaaatctagctgtcgaatatgtacctttagccaccaggagcacctttctttggttgaaaggaaaacagcccaccttgagctggtttgagataaaaaataagaattggggaatttcacagaactcaggaaaaagaagcagaggaggggaccccactggtcttagaaagtcaaggatagggaacagaaaaagccccggagacgggcggtttcctcgctctgttcctctctcctctttcttctctctgcagtcaagtttcttgtgtttccaggcacaggcagaacatgactgccctcaggactacagtccacaggttctactccagccagggaaagtatggattcccagcacaactgggca

SEQ ID NO: 781669 - DNA, 630 bp, Homo sapiens
tggttccctgttggcctcagacagagcttgcccagaatgttattttcttggctgtgttttcaaattgttgtcatgtttatcctaaggtcataattttattctgcctcataattttccacctgaaggggctgcccaaaacctaactacatgcctgggcaacatagcaagactccatctctacaaaaaactataaatatgagccaggtgtggttgtgtgcctgtagtcctagctgctccagaggctgaggtgggaggatcacttgagcccaggagttcaaggccacagtgaactataatcatgctactgcactccagcctgggccacagggcaagacctagcctcagaaaaaacaaaataaaaataaargtgttttatatgtacaaaaattcttcttaatcttttgatccaaggaaagcatcccctaaccttttaaaataagttcaaaacagtatttttgcaaatctgagtgcagtccgatttctactagagttccaaagtcttggtgaaccacccattcttcttaatcaagttatcatatacataattactagaataacagctctcaaaaattaaaattcacttaacaagaaaattatattgaacacaatacattctttctccagtgactc

SEQ ID NO: 781670 - DNA, 626 bp, Homo sapiens
tttaatttttatttttgtaggtacatagttgtatatatttatggggtacatgacatgttttgatacagacatgcaatgtgtaataatcacatcatgtaaaatggggtatccatcccctcaagcatttatcctttgtgttacaaacaatcaaattatactcttagttatttcaaaatgtacaattaaatcattaytgactacagtcactccgttgcgctatcaaatactaggtcttattcatgttttctatttttttgtactcattaaccatacccacacctccctgcccaccacctgtcaactatccttcccagcttctggtaatactccttccacttactatctctattagttgaattgtttcgatttttagatcctacaaataagtgagaacatacaatatttgtctttctaggcccgacttatttcacttcgcagaatgacctccagttccattcatgttgttgcaaatgacatgatctcattcttttttgtggataaatagtactccattgtgattaagtaccacattttttaaatccattcctctgccgatggacacttaggttgcttccaaatcttgactattgtgaacagtgctgcaacaaacacgggagcgcagatcg

SEQ ID NO: 781671 - DNA, 626 bp, Homo sapiens
tttaatttttatttttgtaggtacatagttgtatatatttatggggtacatgacatgttttgatacagacatgcaatgtgtaataatcacatcatgtaaaatggggtatccatcccctcaagcatttatcctttgtgttacaaacaatcaaattatactcttagttatttcaaaatgtacaattaaatcattactgactacagtcactccgttgcgctatcaaatactaggtcttattcatgttttctatttttttgtactcattaaccatacccacacctccctgcccaccacctgtcaactatccttcccagcttctggtaatactccttcyacttactatctctattagttgaattgtttcgatttttagatcctacaaataagtgagaacatacaatatttgtctttctaggcccgacttatttcacttcgcagaatgacctccagttccattcatgttgttgcaaatgacatgatctcattcttttttgtggataaatagtactccattgtgattaagtaccacattttttaaatccattcctctgccgatggacacttaggttgcttccaaatcttgactattgtgaacagtgctgcaacaaacacgggagcgcagatcg

SEQ ID NO: 781672 - DNA, 626 bp, Homo sapiens
tttaatttttatttttgtaggtacatagttgtatatatttatggggtacatgacatgttttgatacagacatgcaatgtgtaataatcacatcatgtaaaatggggtatccatcccctcaagcatttatcctttgtgttacaaacaatcaaattatactcttagttatttcaaaatgtacaattaaatcattactgactacagtcactccgttgcgctatcaaatactaggtcttattcatgttttctatttttttgtactcattaaccatacccacacctccctgcccaccacctgtcaactatccttcccagcttctggtaatactccttccacttactatctctattagttgaattgtttcgatttttagatcctacaaataagtgagaacatacaatatttgtctttctaggccygacttatttcacttcgcagaatgacctccagttccattcatgttgttgcaaatgacatgatctcattcttttttgtggataaatagtactccattgtgattaagtaccacattttttaaatccattcctctgccgatggacacttaggttgcttccaaatcttgactattgtgaacagtgctgcaacaaacacgggagcgcagatcg

SEQ ID NO: 781673 - DNA, 562 bp, Homo sapiens
tctattatttctgaggcctgtttgtgcttagctttcaaatttcagtctatgacctgcttcccatagctttccaatcttgtgtactattacataagtagaagctgattctcagataagacaagttgtccaaaatcacacagataataaatagatgaattaggattcacatctctgttagactgaatccacattcataatcttaataaattcattatactgttcctatgatcacatctcaaatggaatttgyaaaaagcccagtaacatttgtttattgccttagcctaccacttagaaattacaatgaaatgttaactatatctgctattttgctattcgcaagtgacagatgacttggaaagcatgtccactttagtcctctaagcacatttacattttcatattgccttcacatgacatttctgtggctacacttgcaatccagactagtctttcatcctctgttgacaatgatctgtttcattttcagagaaaactacccaataagtctctttaacgttatggatatagtctttctaaggaataggaagaaaatattttt

SEQ ID NO: 781674 - DNA, 562 bp, Homo sapiens
tctattatttctgaggcctgtttgtgcttagctttcaaatttcagtctatgacctgcttcccatagctttccaatcttgtgtactattacataagtagaagctgattctcagataagacaagttgtccaaaatcacacagataataaatagatgaattaggattcacatctctgttagactgaatccacattcataatcttaataaattcattatactgttcctatgatcacatctcaaatggaatttgtaaaaagcccagtaacatttgttyattgccttagcctaccacttagaaattacaatgaaatgttaactatatctgctattttgctattcgcaagtgacagatgacttggaaagcatgtccactttagtcctctaagcacatttacattttcatattgccttcacatgacatttctgtggctacacttgcaatccagactagtctttcatcctctgttgacaatgatctgtttcattttcagagaaaactacccaataagtctctttaacgttatggatatagtctttctaaggaataggaagaaaatattttt

SEQ ID NO: 781675 - DNA, 631 bp, Homo sapiens
  misc_feature 170, 173: n = A,T,C or G
aaaaacctcttggcatatttgtacattcagaattactaagaaattcatttcaaagcaaaatcatgtctcagcgtggaaaatacttattatctgaaaatatcaaattttattctgttgccttctgcatggcaaactaagtgaaggaggaaagagaaaaacatcctgaatantcngtacaaaattcatatgcacacaatcaggagtgaaacttttaacaacataaagataacttcccargcatttcaccaatacttgttattcccactgcaaaagaataaagctcctattgaagtctataggaggaaagactacaactcagtggtcagagggaaataaaacaactccaccaatgacactggtcaatgatctgcaagctggtatttttcccaagagaaaatgctatttcaggtcctaatattttttaaaaaaaatttgtaagtgtatctataatataaatttaattaaaacgcacaacttgaatgatctccaagaggtaaagcaacaaagtcagtctcaaatcctcacatatcttacttccacatcacaaaggcaccactcaatctactattaaaattcacaacagataagctgaaaaccaagtgcccgtgatattcactgggctcattttaga

SEQ ID NO: 781676 - DNA, 562 bp, Homo sapiens
taagaacattcataatgcatgggaggtcaacatgaacatagtttagaagaagttgattccagccctcatggatgactttgaggggttcaagacatcagtggtgaaaaaagcaggaaaactagaattagaagtaaagcctgragacgtgactgtattgctgtaatctcatgatcaaacttgaacagatgagaaattgctttttatgggtgagcaaagaaagtgatttcttgagatgaaatcaactcctagtgaagatgatgtgaacattgttgaaatgacaacaaagaatttggaccattataccaacttggttgataaaacaacagcactgtcaaagacgattaactctaattttaaaataagttctactatgagtaaaatgctattaaatagcattacattctacagagaaacctttcattaaaggaagaatcaatcagtatggcaaacttcatttttattgtaagaaatcgccacaaccacccaactttcagcaaccaccaccatgatcagtcagcagccatcaacattgaggcaagaccttcccatttttattgttcac

SEQ ID NO: 781677 - DNA, 604 bp, Homo sapiens
aaaatacattaattcaacgcatatttactccacactcacatgttgcaccacagctccaagtgtgaatgaggcagagaccctgcactcgagttaggaagacacagccaactgaactgatgacttaaacgcaaagggacagagcacaggctatggcaggattacagaaaaagggctcctcatcaagccttgagggaatcagggaaggcttccaggaggaagcaaactgatatgatttccaagaaggattcatccaggggggaaaaatggacagaattagggaaatactaytgcttaatcatagaagttcacctaaaccccatgaaagtcagcaatagtacagtttctacctgaaatacagtcagcccaggattagaatatgttcagctctcatgtcataaaatccctaaagaactttctgaaaagctaagcccactgataagaataaaggaaaagcatagcaccccacaaactaaaacatattttccattacaaatacattttcaccaactctgaaaaaccaagtggacatttaacagatcctagaagactttgctccctaattgcctcccaataaccctcactctcattaaactacagcatgacc

SEQ ID NO: 781678 - DNA, 552 bp, Homo sapiens
agtctcattctcctatatcctttagtctatatagtgaactactcaaagcctgccaataatttttttttttttttttttttttttttttgcttaagctaaatagaatctacttttgtttgcttataatcaaggcaatgctaactgttactggtaaaaacactgtaacacactactgacaatcatggatctggagccaggatatgatatttctgtttctcttttatttagtcatttatttaatccaccttgtgcttcggttgctaagtctgtgaaggaaaaaatgtcggaaaagcctaccaattacagatgcctagtaggtccagagggttgctattacagtttcttaytcatcaattcaccccaaaagataagtaattgaatcttttttaatccccctgagatttatctagctcacccacttgttaaggaggatgcatgtaacttctgagttaagaaatataggcaagtttagataatattcaatggaataggatatgcaaatgtacatactatattttttaaattttatttatttttatttattgttgccca

SEQ ID NO: 781679 - DNA, 627 bp, Homo sapiens
aaaaactccctattgccagtctttgctgtctcatccttacaagcagcccaccctgaattctctgtctctcagggtgtactgtctattccgcacttaactttcaaaatatgcttttcttttgcagtaaatgactctgtgctgcatatcctttgctgtgycttgtttaatttcttttaaactaagaagaactgaggtctcacaacagccttcaaaaattacacactgttaacttaaataacaacttgacagttcaaatttaaagagaactattcctgtttaataatcaatcccctttttactaagacaatgggaaaataacattcatgctgatcaccaactaaccacattgttgggttaaatcaaacctctgcaattcctttgagaacataatgatgtccgtggtacccagaacaccaaaattgcctagactaccttctagaacactgtacaatctagttccatcacctcagctgtatgtttaccaggaaaatatcaattcccaaacccatcatacttttagtgtatttacatgatttaagaatataagagactgatgaaatatgcggaagaaaatagagccattgcttccattacttttttcgaaagatgagataaatcgaattggtg

SEQ ID NO: 781680 - DNA, 659 bp, Homo sapiens
ggtatcaagtttggcacacatcctaaccaattaattggttttcataattatcaagtgttaagatggagtcaaaaaaaatcacacaaaaaaacttaggtctaaaagcaaacaaaaaataattttagctatgtgtacagtatcaagtggtatcaactgatgtccaaaaaataaaaagaagagcattttctgtatgtggtaggcactgtgccaaggatattacataaaatctgctcatcttcacagtaactctgarttaaatactgtcataatcctcattcttacggataaggaaaatgaagcagagagtgggtaagtaatttagtcaaggtagtaagcagagagagacaacctgaactagctctctggatgcaacattgaaagctcttaaccgcattgctttactggcctcctggacagcattgatcattttccctgcactttaagaatgtaactacggattatggacacgtgcctttcctagctattcttaaattctgagcttaatataaaattaatgacatcctgggagccatgattcttccctactacatctcactaagaacatggtttatgaaatctttatagctagttgaaatgtgtttactaagtcttgccaggaagctcattttatagggatatcacacacaggcaatataaat

SEQ ID NO: 781681 - DNA, 659 bp, Homo sapiens
ggtatcaagtttggcacacatcctaaccaattaattggttttcataattatcaagtgttaagatggagtcaaaaaaaatcacacaaaaaaacttaggtctaaaagcaaacaaaaaataattttagctatgtgtacagtatcaagtggtatcaactgatgtccaaaaaataaaaagaagagcattttctgtatgtggtaggcactgtgccaaggatattacataaaatctgctcatcttcacagtaactctgagttaaatacygtcataatcctcattcttacggataaggaaaatgaagcagagagtgggtaagtaatttagtcaaggtagtaagcagagagagacaacctgaactagctctctggatgcaacattgaaagctcttaaccgcattgctttactggcctcctggacagcattgatcattttccctgcactttaagaatgtaactacggattatggacacgtgcctttcctagctattcttaaattctgagcttaatataaaattaatgacatcctgggagccatgattcttccctactacatctcactaagaacatggtttatgaaatctttatagctagttgaaatgtgtttactaagtcttgccaggaagctcattttatagggatatcacacacaggcaatataaat

SEQ ID NO: 781682 - DNA, 530 bp, Homo sapiens
tgctgtatttttttttttttttttgagacgaagtcttgctttgttgcccaggctggagtgcagtggcgtgatctcggctcactgcaagctccacttcccaggttcacgccattctcctgcctcagcctaccgagtagctgggactacaggcacctgccacctcgccgggctaatttttttgtrtttgtagtagagacagggtttcatcatgttagccaggatggtctcgatctcctgacctcatgatccgcccgtctcggcctcccaaagggctgggattacaggcatgagccatgtacaatgctgttttaaaagcagcgctcgtctttgctgcctttcaactttacatgctttggtttctcatagagaaaataaaaattgtttttaatccttaaagaacttctgacaggagagaaaaatgacttgtgtgtcccaaagcccccaatcccaaagacatccaagcaaaaccaagttgggggtgggggtggagaatttaaatagcagtaattatcatatctcaatttgcaaga

SEQ ID NO: 781683 - DNA, 530 bp, Homo sapiens
tgctgtatttttttttttttttttgagacgaagtcttgctttgttgcccaggctggagtgcagtggcgtgatctcggctcactgcaagctccacttcccaggttcacgccattctcctgcctcagcctaccgagtagctgggactacaggcacctgccacctcgccgggctaatttttttgtgtttgtagtagagacagggtttcatcatgttagccaggatggtctcgatctcctgacctcatgatccgcccgtctcggcctcccaaagggctgggattacaggcatgagccatgtacaatgctgttttaaaagcagcgctsgtctttgctgcctttcaactttacatgctttggtttctcatagagaaaataaaaattgtttttaatccttaaagaacttctgacaggagagaaaaatgacttgtgtgtcccaaagcccccaatcccaaagacatccaagcaaaaccaagttgggggtgggggtggagaatttaaatagcagtaattatcatatctcaatttgcaaga

SEQ ID NO: 781684 - DNA, 576 bp, Homo sapiens
agccaacttccttttgttggatcctttctagctccaagaggccatggtgggcaagtgctaggctctggagctacactcccaggtgcaacttctagggccaccacagagtagctgcacaactctgaacaagttatctgatctttccatatctgtttccttatatataaaatgrgattgtgatgataaaaatagtaacccaactcatagggtagttgtgaggatgacgttagttaatgtatataaagtgcttaaaaacagtgcctggcttttagtaagccctcagtaagtgctagctattgtggtcattattttgctggagcatattcttaagtaatcttttcagacagagtaccaggaaggtaaaacttttagtctttttatgcatgaactgccattattttgtcttctcgtttgattgacagattgctagacataaagatccatggttaaatcacttaccttcagaactttgaaggcattatcccactgttttctagcatccagtgttactgatgaagaatccaatgcaaatctgatattcatccctttgtaggtgttggttttttgtatttgtga

SEQ ID NO: 781685 - DNA, 625 bp, Homo sapiens
cagccaacttccttttgttggatcctttctagctccaagaggccatggtgggcaagtgctaggctctggagctacactcccaggtgcaacttctagggccaccacagagtagctgcacaactctgaacaagttatctgatctttccatatctgtttccttatatataaaatgggattgtgatgataaaaatagtaacccaactcatagggtagttgtgaggatgacgttagttaatgtayataaagtgcttaaaaacagtgcctggcttttagtaagccctcagtaagtgctagctattgtggtcattattttgctggagcatattcttaagtaatcttttcagacagagtaccaggaaggtaaaacttttagtctttttatgcatgaactgccattattttgtcttctcgtttgattgacagattgctagacataaagatccatggttaaatcacttaccttcagaactttgaaggcattatcccactgttttctagcatccagtgttactgatgaagaatccaatgcaaatctgatattcatccctttgtaggtgttggttttttgtatttgtgagtttttaggatcttctctttatgtctagtgttctgaaatctcacaaaa

SEQ ID NO: 781686 - DNA, 576 bp, Homo sapiens
agccaacttccttttgttggatcctttctagctccaagaggccatggtgggcaagtgctaggctctggagctacactcccaggtgcaacttctagggccaccacagagtagctgcacaactctgaacaagttatctgatctttccatatctgtttccttatatataaaatgggattgtgatgataaaaatagtaacccaactcatagggtagttgtgaggatgacgttagttaatgtatataaagtgcttaaaaacagtgcctggcttttagtaagccctcagtaagtgctagctattgtggtcattattttgctggagcatattcttaagtaatcttttcagacagagtaccaggaaggtaaaacttttagtctttttatgcatgarctgccattattttgtcttctcgtttgattgacagattgctagacataaagatccatggttaaatcacttaccttcagaactttgaaggcattatcccactgttttctagcatccagtgttactgatgaagaatccaatgcaaatctgatattcatccctttgtaggtgttggttttttgtatttgtga

SEQ ID NO: 781687 - DNA, 653 bp, Homo sapiens
gtgtctggtgagagaccaaggagactggtatcacaggagtgagggaagattccatttgttacccctccagccacagactgcgatttaacgagtctccttaggcaatacagtgactccaggggtcattataatagtggaaatagtatataraacgcacactagagccttggagctgtccttaaaggcatgctgtatcaacacccaccctcttgccaagctcgattgtctgcctgttactcccgtctatgccttttccttggccaaacaaacttcttccagatccctttgatcattttctctttccttgccagaaataaactttgttatccactgcgtctggaacatcctcctactttccaaaccatactgtttttcatttctgcattgatttcagtctccctccttcgggtggggttaagggtgtcatgacatcgttgcccatatgcttcgttaagatggtggtttttaaaaacaaatgtgtcattttgaaaaagccagagaaccatatagtcatccactttattgtaacctgtgcattggaccaggctgcagaaaagacctctccggagagattcctggaactccttgatcagaatggttttggttaagccaacccatctgggtaggaatgatttgcagaggtaatactggag

SEQ ID NO: 781688 - DNA, 613 bp, Homo sapiens
tttggagaagtttactagactgagctatgtttttgggtttgtcccaaaaacatatgtttttgggtttgttcagtaaatgaacaaagagaccatttttatttctattgtgaagcaggtcttttgttagaacaaataagatcttatttctttgattttaggtagcagtgtactaaaacattggatgagcctgtgtccttgctctgaaagacaaaacaagaaaatcctagcatggtwaacttatgagggtcaaaatatctgaggacaaaaatgtttacacttaaaaatagaagtaggcccactatgagtgaatctgttaatttttcagaggaaatgagaggggtggttaagagtttatgcccaggatccagagtgctcgggtttcaatctttgttctgtcacctataagattttgagcaaggaatttaacttctgtgtcccttaattatctaggatgcaaaatagtaaaccctcactagattgttgagaatttaagtgagttaatatatgtaagattggtgcagtgcagaaggtcagtggtcaataaatattagcaatttctatttgtaataataatctttcctcacaaatgaaggaaataatgtatatagtggtc

SEQ ID NO: 781689 - DNA, 650 bp, Homo sapiens
tctggtgagagaccaaggagactggtatcacaggagtgagggaagattccatttgttacccctccagccacagactgcgatttaacgagtctccttaggcaatacagtgactccaggggtcattataatagtggaaatagtatataraacgcacactagagccttggagctgtccttaaaggcatgctgtatcaacacccaccctcttgccaagctcgattgtctgcctgttactcccgtctatgccttttccttggccaaacaaacttcttccagatccctttgatcattttctctttccttgccagaaataaactttgttatccactgcgtctggaacatcctcctactttccaaaccatactgtttttcatttctgcattgatttcagtctccctccttcgggtggggttaagggtgtcatgacatcgttgcccatatgcttcgttaagatggtggtttttaaaaacaaatgtgtcattttgaaaaagccagagaaccatatagtcatccactttattgtaacctgtgcattggaccaggctgcagaaaagacctctccggagagattcctggaactccttgatcagaatggttttggttaagccaacccatctgggtaggaatgatttgcagaggtaatactggag

SEQ ID NO: 781690 - DNA, 644 bp, Homo sapiens
aactagttcttggatccctgcccactctccccagggctgcccctcccatctgccccttacctccatcccaggggaagtagagactgagaatgtgggtacaataggcacagaggttgtgcagcccacgcaggtggacctgcagcttcccactgggcagctttgcctgcagcagcagggccaagtagctgaagacgaaggcgtccaaggaggcagggctggagcagagagagaagggtgggatggaggagaaccactggggtagaaggggtaaagatggagctggaggaagagtcagccttgggaggtgggctctgggcagcaggcggccaccagggaaggacaggacacacagttctagacctggtatggggagagatccccaggtggcgccagctggccctgaatagggctctatcccagggctgcataaagggcacaytcagtgccccacagctcttcaggcccttcctgtgcctggctgccctcccaccctacccttttgtacctctgagaaggctctggccccacgcacagccccactgtcaccagggccagtatctgtctcagggacctcctatccagagcctgagccagccccagccccagccccagctccagctgctccatctgaacctgtatcttct

SEQ ID NO: 781691 - DNA, 644 bp, Homo sapiens
aactagttcttggatccctgcccactctccccagggctgcccctcccatctgccccttacctccatcccaggggaagtagagactgagaatgtgggtacaataggcacagaggttgtgcagcccacgcaggtggacctgcagcttcccactgggcagctttgcctgcagcagcagggccaagtagctgaagacgaaggcgtccaaggaggcagggctggagcagagagagaagggtgggatggaggagaaccactggggtagaaggggtaaagatggagctggaggaagagtcagccttgggaggtgggctctgggcagcaggcggccaccagggaaggacaggacacacagttctagacctggtatggggagagatccccaggtggcgccagctggccctgaatagggctctatcccagggctgcataaagggcacactcagtgccccacagctcttcaggcccytcctgtgcctggctgccctcccaccctacccttttgtacctctgagaaggctctggccccacgcacagccccactgtcaccagggccagtatctgtctcagggacctcctatccagagcctgagccagccccagccccagccccagctccagctgctccatctgaacctgtatcttct

SEQ ID NO: 781692 - DNA, 530 bp, Homo sapiens
attcattttcaagttgccctaaaaaaggtacttagcctgccgaaaggcagactttcggtgccagcgagaggaagaggaaggatgctgtctttcctatgaacgttctcgtgcctccacggcctgggtcttcagtttcacttcccagccctgcggggtacaggaaaccaccagctaacttaagtgcaaggcaattaagcggggagggaattgtggacaaatctatagaactctgaagccacaggtgagccaagcattgactttactggggaaaaaccaggtggargaaggttgaaggagcttgggttggtcagaagatgccaggatttgggacctgagccagggaggtgggcccaggaagtgggattgggcttggggatggggaaggagaggaagctgagagcgataactagtatgcaatcagaaattttttttattcttagttttagcttctctgcctctgccaccaaagctttgttttggtttttgagacaggctctcactctgttgcccaggctgtagtgcagtggcac

SEQ ID NO: 781693 - DNA, 601 bp, Homo sapiens
gggagggagagcattaagggaaatagcttttgcatggctgggcttaatacctaggtgacgtgtcgacaggtgcagcaaaccaccacggcacacgtttacctttgtaacaaatctgcgcatcctgcacatataccccagaacttgaaaacaaaacgaaacaaaacaaaacgaaaaaagaatagcaaaacgctagcggcaaaataaagtttcaaactgagaaagtgacagaccaccttttggttcaaatcatggttcccaayccaggtgccataaagtcaggacaaagaatttgattacatattgtaaataagacatacagcaaatgactagaaaaattattctcaacatacatgtgtcttctaattcaatgatgacgctatctaccgggacatagcattagattccaaagggctcagtcccgcaagactggcctcccactctaagaacagtgggaagccctacgttgttttacctgtgcttcctagcaactggctataaatcaggtttccaccactccctgatttagttgcatgaatttgctggaagtgctcacagcacgcagggaaacacttccatttaccattgtatgatagcggatatt

SEQ ID NO: 781694 - DNA, 491 bp, Homo sapiens
gtaagcaaaagtttcaaagatagttcagagagttctcctgtacctttcacccagattcctccattgtcaacatcttgcattatgatggtacatttgtcacagctaagaaaacaactttgaggcattactgtcggctaaactgcagatactaattgtatttcacccgctttcccattacatcctcactgggctccaagatctaatccaaggcaccacattgcatttagttgtcatatctctttggtctcctacagtttgtgagaatttcttggtctttccttgtttttaatgatcttgagagccttgaagagtcctggccaagtatcctgtaggatgagcccctgmtctatttttttctgtttgctttcctcatagggtcatgggatgttggaaagaataggacagagaggttaagtgcccttctcctcacattgtattaggagagacatgctatccacatgacatcacttggtagagtggtaagcattgtg

SEQ ID NO: 781695 - DNA, 491 bp, Homo sapiens
gtaagcaaaagtttcaaagatagttcagagagttctcctgtacctttcacccagattcctccattgtcaacatcttgcattatgatggtacatttgtcacagctaagaaaacaactttgaggcattactgtcggctaaactgcagatactaattgtatttcacccgctttcccattacatcctcactgggctccaagatctaatccaaggcaccacattgcatttagttgtcatatctctttggtctcctacagtttgtgagaatttcttggtctttccttgtttttaatgatcttgagagccttgaagagtcctggccaagtatcctgtaggatgagcccctgctctatttttwtctgtttgctttcctcatagggtcatgggatgttggaaagaataggacagagaggttaagtgcccttctcctcacattgtattaggagagacatgctatccacatgacatcacttggtagagtggtaagcattgtg

SEQ ID NO: 781696 - DNA, 638 bp, Homo sapiens
aagaagtccatttgaaagtttctgaggaagatataagaatccactttggaaaaatatcttccagcatctaggaggtgcttggttaatgctcacaaataactcatatattctttggtctgctacaattacaggttctagatatrttcatccaaacaattacaacttggtatttaacgtcactcatttcaaaaaattgaatgacaaaagagcactattttttttttttttttttttgagacagagtctcactctgttgcccagcctggagtgcaatggtgtgatcatggctcactgcaaccttcacctcctgggttcaagtgattcttatgcctcagcctcccgtgggactacaggtgtacaccaccacgcccgactaatttttgtatttttggtagggacagggtttcaccattttggccaggctggtctcaaactcctgacttcaggtgatctgcctgcctctgcctcctaaagtgctgggattacaggtgtgagccaccacacccggccaacactaacatttttaaattagatttttttctcttatgttttaaattaagactccaaggtttcaaaatcatatctgaaaagttttattatatgatttaatatttcacttcactttctcaattttttgt

SEQ ID NO: 781697 - DNA, 638 bp, Homo sapiens
aagaagtccatttgaaagtttctgaggaagatataagaatccactttggaaaaatatcttccagcatctaggaggtgcttggttaatgctcacaaataactcatatattctttggtctgctacaattacaggttctagatatattcatccaaacaattacaacttggtatttaacgtcactcatttcaaaaaattgaatgacaaaagagcactattttttttttttttttttttgagacagagtctcactctgttgcccagcctggagtgcaatggtgtgatcatggctcactgcaaccttcacctcctgggttcaagtgattcttatgcctcagcctcccgtgggactacaggtgtacaccaccacgcccgactaatttttgtayttttggtagggacagggtttcaccattttggccaggctggtctcaaactcctgacttcaggtgatctgcctgcctctgcctcctaaagtgctgggattacaggtgtgagccaccacacccggccaacactaacatttttaaattagatttttttctcttatgttttaaattaagactccaaggtttcaaaatcatatctgaaaagttttattatatgatttaatatttcacttcactttctcaattttttgt

SEQ ID NO: 781698 - DNA, 671 bp, Homo sapiens
ccacaggagtccattgcccactcaaattcttgcatggggttggatcccgtgagtctgtctggatctgcagatttgtttcattcttactaaacattggatatgaaattgagaaatctattctgcattgaatgtgtcatccatttaatagcaaaatgcaccaaatgtttctgattcaactatttggggaaacccccaattcatgtccrattgaatttcaatatgatggaatgcaatggtccactcatcagctgccaatgaacggttggtttatgtttgtggaggcttcatcatctaaaaattactgctagaattcttaataaaaaacttcagtatgcctagaaattactaagacaaacatataaattgaaggcgggaaatgtttgacattctgggaaaattccaagtatcagtagctctcaatttttaaatattatgctagcaaatcttcctggtttgcttatttatttatatgtttttgaggatataaggtatcatacacataagagatatactagaaaatgaacagcatccccttttagtccaataggaaagataggttgcataaaagttaccagatttttttgtaatttggtaatttggctccaatttccttgtggtggcggaagcccaatacagcccatctttctcactggttacaactaaaaactctg

SEQ ID NO: 781699 - DNA, 671 bp, Homo sapiens
ccacaggagtccattgcccactcaaattcttgcatggggttggatcccgtgagtctgtctggatctgcagatttgtttcattcttactaaacattggatatgaaattgagaaatctattctgcattgaatgtgtcatccatttaatagcaaaatgcaccaaatgtttctgattcaactatttggggaaacccccaattcatgtccaattgaatttcaatatgatggaatgcaatggyccactcatcagctgccaatgaacggttggtttatgtttgtggaggcttcatcatctaaaaattactgctagaattcttaataaaaaacttcagtatgcctagaaattactaagacaaacatataaattgaaggcgggaaatgtttgacattctgggaaaattccaagtatcagtagctctcaatttttaaatattatgctagcaaatcttcctggtttgcttatttatttatatgtttttgaggatataaggtatcatacacataagagatatactagaaaatgaacagcatccccttttagtccaataggaaagataggttgcataaaagttaccagatttttttgtaatttggtaatttggctccaatttccttgtggtggcggaagcccaatacagcccatctttctcactggttacaactaaaaactctg

SEQ ID NO: 781700 - DNA, 671 bp, Homo sapiens
ccacaggagtccattgcccactcaaattcttgcatggggttggatcccgtgagtctgtctggatctgcagatttgtttcattcttactaaacattggatatgaaattgagaaatctattctgcattgaatgtgtcatccatttaatagcaaaatgcaccaaatgtttctgattcaactatttggggaaacccccaattcatgtccaattgaatttcaatatgatggaatgcaatggtccactcatcagctgccaatgaacggttggtttatgtttgtggaggcttcatcatctaaaaattactgctagaattcttaataaaaaacttcagtatgcctagaaattactaagacaaacatataaattgaaggcgggaaatgtttgacattctgggaaaattccaagtatcagtagctctcaatttttaaatattatgctagcaaatcttcctggtttgcttatttatttatatgtttttgaggatataaggtatcrtacacataagagatatactagaaaatgaacagcatccccttttagtccaataggaaagataggttgcataaaagttaccagatttttttgtaatttggtaatttggctccaatttccttgtggtggcggaagcccaatacagcccatctttctcactggttacaactaaaaactctg

SEQ ID NO: 781701 - DNA, 671 bp, Homo sapiens
ccacaggagtccattgcccactcaaattcttgcatggggttggatcccgtgagtctgtctggatctgcagatttgtttcattcttactaaacattggatatgaaattgagaaatctattctgcattgaatgtgtcatccatttaatagcaaaatgcaccaaatgtttctgattcaactatttggggaaacccccaattcatgtccaattgaatttcaatatgatggaatgcaatggtccactcatcagctgccaatgaacggttggtttatgtttgtggaggcttcatcatctaaaaattactgctagaattcttaataaaaaacttcagtatgcctagaaattactaagacaaacatataaattgaaggcgggaaatgtttgacattctgggaaaattccaagtatcagtagctctcaatttttaaatattatgctagcaaatcttcctggtttgcttatttatttatatgtttttgaggatataaggtatcatacacataagagatatactagaaaatgaacagyatccccttttagtccaataggaaagataggttgcataaaagttaccagatttttttgtaatttggtaatttggctccaatttccttgtggtggcggaagcccaatacagcccatctttctcactggttacaactaaaaactctg

SEQ ID NO: 781702 - DNA, 601 bp, Homo sapiens
agactgatataaacagttcaaaattactttctagggtttttactagaaattagggctactaagacttaaaattatagttaatctttgtaattaaaactattagacatgagagaaacaattctgtatacacagtgtataaacaaaagcaagggccaagcatggtggcttgctcttgtaatcctaccacttggggaaactgaggtgggcagattgcttgagcccatgagtgtgagaccagcctgggcaacatggtaaaactctctctacaagaaatacaaaaattagctgggcatggtggcatgagcctatagtcccagctacttggtgaactgaggtggaagaattgcttgagcctggggaggttgaggctgcagggagctgtaaacacactactgcactccagcctggatgacagagtgagaccctgtctcmaaaacacaaaacaaaacaaaaacaaaaacacgacatgctttagatgggggaagttatgaaggcataaaaatgggtgtttgctaaaaaaaattgtctagtttgaagttacttaaagatttcaaattgaaggagtaaaaaaaagataaaactagataaataaagaaagtta

SEQ ID NO: 781703 - DNA, 613 bp, Homo sapiens
tgttcaccttttgagtaaactgcaaagagaaagacagagataaaagagaagaaacagaatttgtctcatgctgtctgagatcttttgattggaaaactgagtctcctctctcaaagagtacaggtttttgtttaaaaaatcttttaattatcactttggctaaatgaatgactattattttatggtgacttgtgatcttattttggtaaagtgttttaaaactttgacatatttgattggcytcctaaaaatcaaatttcaacttcaaaattaagtcttttttgaccttttaactttgggatgctacaaaggtcccctgaagcatccataagggagataaacaggattatttgacatgtgaaattacatgggaagcattgtctaacaagaaaggatggtttaaccttcttaagttatatcttaaagaatatgttattaatatatgttccaaagttatatgggatttctaaaatcctaatatgtctgggtatatgctatcggtcataattctggttattatgttgagttattgtaaaccacagaaataaccaaatttccttttcaattgtctttatgaccatttaaagtcatttccacagttaattccttaatt

SEQ ID NO: 781704 - DNA, 524 bp, Homo sapiens
tgtcagcttctttccaggatgacattgagtaaggaaattcatttttaaaacttttagctgttaaaaatgtaaaccaaggcccaaatttttactttaacaggtctcagcaagctgagagggtgacccaacagtgcagcgctgctctcagctgccacgacccrcacagtcgctgggagggagggtcctgtggaggacgcattgtccacggttgcactgcaaggtgaggtctcaaagccattgttgtccaaggttgcctgggcattgaaggcctggggagcaggatgtggtttctccacgttgtctgatcctgagggcaagcatttgatgtgtgagtggctgctggaaagcactggaattccctaagcagatacaacacactggggagacaatggccatgaaggtgaaaaagtaatagccaaggaccgaaaagctccctggagcagagaccccgaggagccgagacttaaccagttaaatccatcagtggaggaggcagcacctgtagatgggagacttgtatttgt

SEQ ID NO: 781705 - DNA, 533 bp, Homo sapiens
ttgcaggccctctgccgaccatgcttccagcagctgcaagaacccagggaggtctcagtggatcatgacgggatctgcagcacgggctaacaagccaggccccagagacacacactgttcccttcccttccacgaagttcagagccaggcgtagctagactactgcagcmcgagtgttgggtgggtgggcacaggttctgcctggcaaacgtcacatgcctttaccaaggtggtgaccatgtgagtgagtgccttgtgtttacactttgggtattttcttatttgtgttaaacttcaaaaaatgtgaaaacattcgaaagaagacagtgtctcctgggatctgggcagcaggctgggtctgaactctcgcttacctcttgtggatgttaacacagcctggaatttcctggtttgttagtcaaggaatactttacccaggtgcaatccatctgctttcatttttttagtcagtaaattggactcctttctttttatctgcttgaaatgactaaagcaatgtgtgtgttgttttt

SEQ ID NO: 781706 - DNA, 533 bp, Homo sapiens
ttgcaggccctctgccgaccatgcttccagcagctgcaagaacccagggaggtctcagtggatcatgacgggatctgcagcacgggctaacaagccaggccccagagacacacactgttcccttcccttccacgaagttcagagccaggcgtagctagactactgcagcacgagtgttgggtgggtgggcacaggttctgcctggcaaacgtcacatgcctttaccaaggtggtgaccaygtgagtgagtgccttgtgtttacactttgggtattttcttatttgtgttaaacttcaaaaaatgtgaaaacattcgaaagaagacagtgtctcctgggatctgggcagcaggctgggtctgaactctcgcttacctcttgtggatgttaacacagcctggaatttcctggtttgttagtcaaggaatactttacccaggtgcaatccatctgctttcatttttttagtcagtaaattggactcctttctttttatctgcttgaaatgactaaagcaatgtgtgtgttgttttt

SEQ ID NO: 781707 - DNA, 631 bp, Homo sapiens
cagtaggacctgtggcccatactttttccaaagagggttttgagggcctcaatacctaaaggagaaaagcaggcaggaggggaaggaggaaaggaaaaaaagatttttttctgtagaaaaaaatcagacaagaagttgcattcttgtgaggctttgattagtgctcagtgaatccacaagctgcaggtgaaaggaggggagaggaacagcggagtatgtggctgtctctcactcagtgaatctgcactttgcacgagatgaagtacacacagagtggaggaagaagtcgaacaggcattcatctcagggtgggtggtgggacaatttattgtcctgcactcacaaagataaggtgttaatttacactgtcagggtgagagaggccacctggggaggtccctgtttaacagaaggaaagggagttgtttgtggctcagtttccaagctcaactttcccttttggcrtagtgagtttgggatctgagattttattttccttttgcagttgcaatgtacttattatcaaagttagggcatccatctactccagagtaattttgcttttaggatgaatcaaaataatgcctcatatctgatattttgaaaagctcttcacagcaagaaggaattt

SEQ ID NO: 781708 - DNA, 530 bp, Homo sapiens
gcggtggctcacgcctgtaatcccagcactttgggaggccgaggtgggtggatcacaaggtcaggaaatcaagaccatcctggctaacacggtgaaaccccgtttctactaaaaatacaaaaaattagccgggcatggtggcaggcgcctgtagtcccagctactcgggaggctgaggcaggagaatggcgtgaaccggggaggtggagcttgcagtgagcagagatcgcaccactgcrctccagcctgggcgacagagcaagactctgtctcaaataaataaataagtaaataaataaataaaggaatgaagtgctgatacatgctataccatgaatgaatcttgaaaacattatgctgagggaaagaggctgcatcttgtatgatttaatttatataaactgtctaaattaggcaaatccacagagacggaaagcgtattactgattgccaggggctgggggtgctggcaggaaatgggaatgactatcaatgtgtatgggatttctttgggggttggtaaaagcatt

SEQ ID NO: 781709 - DNA, 636 bp, Homo sapiens
aaacaagttcttcttggcctatgaaaagatttagacaaccagacgataatagtgggaaatttcaacactccactgacagtgttagacagatcattgaggcagaaaactaacaaagaaatgctggacttaaactcagcacttaaccagttgaaactaatagacaaatacagaacactccacccaaaaggaatgcttatacattgttggtggaaatgtaaattagttcaggcactgaggaaagcagtttggagatttctcaaataatttaaaacagagctaccattccacctagcaatcccattattgattatatatccaaaggaaactagatcattataccaaaatgcactcatatgttcatcaccatgcaattcacaatagcaaagacatggaatcaagcraggtgcccatcaatgatggattggatgaagaaaacatatatgctatggaatactacacagccctaaaaaaagaatgaaatcaagttgtttgcagcaacataaatagagctgaaggccatagtcctaagtaaattaatgcaggaacagaaaaccaaatactacatgttctcacttacaagtgggaactaaacattgagcacacatgaacataaacatgggaatgattgacactgag

SEQ ID NO: 781710 - DNA, 576 bp, Homo sapiens
actcaaattaaaccacctggcaacaccaaatgctggcaaaaatttggagtcccagaacttacatatattgttggtgaaagtggataatacaaccaatttgggaaaataatagtttcttataaaactaaacccctatgatcatctaccccatgagccagcaattatactcctaartatttacttaagagaaataagagcatacatctacaaaaaaagacttaaagcagaatgtttacagaaagtgatttcatcattgcgaaaacctggagacatcttgaacgtccatctacaggaagtggctaaacaaagggtagtatatccacatggtgacatattccactgccacaaaagggaatgaagtactaatacacacaacttgaacaaatcttaaaaacgttattctgagtgaaagaaactttgcatagaagagtgtatgatgttattccatttatagaaaattctagaaaagaataatttataatgaaatcagaactctggttgcctctaaggggttagcagtggggaaaactaaaggtatgagaaaacttggagataatggtaatattctataattta

SEQ ID NO: 781711 - DNA, 582 bp, Homo sapiens
ccagggcaattaactcaaacttctcaggaagacagtgtgaataccagtgagtatttaacactctacctctggtaactgtagagtgtatagacagagctgagaaccgctgcctacacgaagaactctcaaacctgagtatgcgtcaaaaccacctgcaggcttattaaagcacaaatcactgggtcccatccccaaggttctgatcagcgggtgggggtaaggaccaagaatttacatttctaacaagttcccaggagatgctaatgctatggctacccttggattagattacacagaagggtggtgctcactaggccaagaagggagggaggaacargcgctgtgcgcagttagcaaagacctggggtgaagaatgctgggaaaactacgaggagctctttgtgcccacagtgctagtgactgtggagatttgtgggaaagaggctgggaaggcaggttgaggagcagcctctggtgggatccctttgactcttccccaccccactaccaccagcctctgaagcagaaaggtcctgggtctcacacctgcactgacccacatccctctcctgcccatgcaat

SEQ ID NO: 781712 - DNA, 628 bp, Homo sapiens
gcaaaagtggattataaatacgatttgagaggtacgtgagccagcccagagtagagaatatattggcctgtgccgttaggaaccctctcatttgaccagaaattgggatgcctttttcaatttccttcccaggcaaatgtgtgtcccctccattcattcctctgataatgctcactcactcctcctcgggcatagattctgctcccagaatgatatctgcttctcctttccttgctctgcacctacaaacttctgttagaaakgcccaggaaaacggtctctcaaccactggatatgagtcccctcttctctcaactagtgtgatcaccacgaatagttcatattcagctcccaaatattaattccactcagattagtgcccacagcaggggacagcaaaacagcatgtttactttaagaaatgcaaataagggcaatgattttttttttacattgaagacaaacccaaaataaaagttcttatgatcatcgtcttgtttatattcatcagacccctggctaagccatttactggaacaaatccacatttttattcatattgctaacagagaaccctaaccagaaagagaaaaagggaggggacactggaatatgtcatctggagtgt

SEQ ID NO: 781713 - DNA, 499 bp, Homo sapiens
ttacactacctgacttccagatttaagataaagtcacagtcttcaaaattataatgtactggtgaagacaacacaataaatcaatgaaaaagattccaggaataaacccacacatatatggtcaaataatttgttccacaaaaacccaaaagcaattcaataggaaaaggaaaacaatttttttcaaaaaataatgtggaaacaactagatatccayatgagggggaaacaaacctcaacccttacttcacaccctatataaaaattattccaaagggatcataggcctactcataaataaagtaaaactagaaagcttttagaagaaaaactaggagaatatctttatgactttgggtgtggacataaatttgttaaggaattgacagaaagcactggccacattgtttcaaaaaaattgagttcattaaaatttaagtcttctaaccatcaaaagacactattaagaaacagggaaatctcagactgagagaaaata

SEQ ID NO: 781714 - DNA, 499 bp, Homo sapiens
ttacactacctgacttccagatttaagataaagtcacagtcttcaaaattataatgtactggtgaagacaacacaataaatcaatgaaaaagattccaggaataaacccacacatatatggtcaaataatttgttccacaaaaacccaaaagcaattcaataggaaaaggaaaacaatttttttcaaaaaataatgtggaaacaactagatatccacatgagggggaaacaaacctcaacccttacttyacaccctatataaaaattattccaaagggatcataggcctactcataaataaagtaaaactagaaagcttttagaagaaaaactaggagaatatctttatgactttgggtgtggacataaatttgttaaggaattgacagaaagcactggccacattgtttcaaaaaaattgagttcattaaaatttaagtcttctaaccatcaaaagacactattaagaaacagggaaatctcagactgagagaaaata

SEQ ID NO: 781715 - DNA, 666 bp, Homo sapiens
ttccagttctagatataaattcaaaggatatgaaatctgtatgttgaagaaatatattcactcttatattccttgaagcattattcacacagccaaaatacagaattaacctaggtttccaccaatggatgactagatgaagaatatatgacttatattctgtatatgtatatatatattctctatatgtatatgtatatacatacacacacacacacamaaaaaaaatggaatactactcagccatacagaaaaaggaaatcatataatttgcaacaacatggagacattatgctaagtgaaataatccaggcacagaaagacaaataatgcatggtctcacttattcatggaatccaacaaagtcaaacccacagaagcagagagtagaagggtaattgccaagcactgggatgtggtttgaggaagggaggcatgggaaatagggaaatgttggtcaaaggtacatgttttaatcagaaataagttcaagagatctattatgcagcgtgattactatagttaataatatatttactcttgaaaattgctaagaatgtagattttaaatgttcctaccaaaagaagtcaaaaccaaatggtaagtatgtgaggtaatgcatatgttaattagcttgatttaattattccacaatgtatacatat

SEQ ID NO: 781716 - DNA, 621 bp, Homo sapiens
ccatacataatagaagataattaagtttgtagatagtttagtgtgctaattagctaaccttgaggcaggaagattatcctgacttatgcaggtgggctcagtgtaaacacataggtactcagaagtgactatggtgagagtgatgtgagaacyttacctgctgttgccacctgaagataatgaaaggggccatgagtcaaggaatatgggaggcctctagaagctagaagagaaaaaaaaaaacaaaacaaaaacatattctctcctagagcctccaaagagcaaagtgccaatgagacccatcctggacttctaaccaaaagaattgtaagataataagtttgtgttgtttttaagccactaagtttgcagtaatacggtacagcagtaagagaaaactattataaggctctatttcgaagcagctgaaaaaaggcagctgatgaaggaagtcgcgctgggaagtagcctaagaggcaaaagtacaaagacaggagtttgaatcagatgatgccacttttaagggtggatttgtcagagacatatgaaccagagcaactccatcttaagtaggagctgggtaaaataaggttgaaacctactgggctgcattcccagata

SEQ ID NO: 781717 - DNA, 544 bp, Homo sapiens
cccatcataaatgatgtcgatacattgtcaaaaaattggcaaaccaggcgcggtggctcatgcctgtaatcctaccactttaagaagcagaggcagacagatcaccagaggtcagaagttcgagaccagcctgtccaacatgtttaaatccatctctactaaaaatacagaaaaaatgagctgggcgtgggggtgcacatctgtaatcccagctacttgggaggctgaggcaggagaatcacttgaacctggaagtcagaggttgcagtgagccaagattgcatcactgcactccagcctgggtgacagagcgaracaccttcgcaaaaaaaaaaaaaaaaaaaaaaaaaaaaaaatggctaaacagcccaggtttggtctgatatgttcagaaaaaagcaaaacagtcacctctcaccttttcttttcccgcagtgatgcagttgcatacaacaatggctgtaggtatgctgcagaaatatcattcaagtgaaacggaagggctttcctggccagacacagtggtcactcctgcaatcccaac

SEQ ID NO: 781718 - DNA, 497 bp, Homo sapiens
tcacttgaggtcaggagttcaagaccagccgggccaacatggtgaaaccccgtctctactaaaaatacaaaaattaaccaggcatggtggcgggtgcctgtaatcccagctacttgggaggctgaggcaggagaattgcttgaacctgggaggcagaggttacggtgagccgagattgcrccactgcactccggcctgggcgatagagcgaaactcagtctcaataaaacaaacaaacaaaaaaataaccctaagaactctgccagtttggtatttgacagactgaagtctaacgtggttaatttttctgtttgctagtttaggtatgcccctatgtatttcatgatctgctaactaaattaaaataagaaatgttaaaaaaaaaaaaaaaaagaaaaagagaaaggaaggaaggaaaggaaggaagaaagaacagttgggcacagtggctcattcctgtaactcctataggcccagcactttgggaggaggtcaag

SEQ ID NO: 781719 - DNA, 497 bp, Homo sapiens
tcacttgaggtcaggagttcaagaccagccgggccaacatggtgaaaccccgtctctactaaaaatacaaaaattaaccaggcatggtggcgggtgcctgtaatcccagctacttgggaggctgaggcaggagaattgcttgaacctgggaggcagaggttacggtgagccgagattgcaccactgcactccggcctgggcgatagagcgaaactcagtctcaataaaacaaacaaacaaaaaaatarccctaagaactctgccagtttggtatttgacagactgaagtctaacgtggttaatttttctgtttgctagtttaggtatgcccctatgtatttcatgatctgctaactaaattaaaataagaaatgttaaaaaaaaaaaaaaaaagaaaaagagaaaggaaggaaggaaaggaaggaagaaagaacagttgggcacagtggctcattcctgtaactcctataggcccagcactttgggaggaggtcaag

SEQ ID NO: 781720 - DNA, 576 bp, Homo sapiens
cggctaattttttttttttttttttttgtatttttagtagagacgagttttcgccatgttggccaggctggtctcaaactcctgacctcaggtgatctgcccgcctcggcctctcaaagtgctgggattacaggcgtgagccaccacgcccacccccacagtcttaactcattacagcattttggtcacaaccatcgaacaagtctctaagaagttccaaactttccctcatcttactgtcttcttccatgccccccaaacgcttccaagctctgaccgttgggccctagatctcctcaaccagcatatccagcctcaggtccacaggtycaaaccccaccacacacatgcccttagctgttcacaggcaccttcgtgcttaccagaaccgagccagccagctgcccaccccttcccccacagggggccaggcccgggcctccccacctgggttctgtacagcgatggggtccacagctctctctccagctccttctgtgtcctcgccccagagccctgtactccagaggttgaagaacttgccgaagatcgtgaaattcataaaaggcagggcca

SEQ ID NO: 781721 - DNA, 576 bp, Homo sapiens
cggctaattttttttttttttttttttgtatttttagtagagacgagttttcgccatgttggccaggctggtctcaaactcctgacctcaggtgatctgcccgcctcggcctctcaaagtgctgggattacaggcgtgagccaccacgcccacccccacagtcttaactcattacagcattttggtcacaaccatcgaacaagtctctaagaagttccaaactttccctcatcttactgtcttcttccatgccccccaaacgcttccaagctctgaccgttgggccctagatctcctcaaccagcatatccagcctcaggtccacaggttcaaaccccaccacacacatgcccttagctgttcacargcaccttcgtgcttaccagaaccgagccagccagctgcccaccccttcccccacagggggccaggcccgggcctccccacctgggttctgtacagcgatggggtccacagctctctctccagctccttctgtgtcctcgccccagagccctgtactccagaggttgaagaacttgccgaagatcgtgaaattcataaaaggcagggcca

SEQ ID NO: 781722 - DNA, 592 bp, Homo sapiens
catgcacccatctcccagctaaaggacctggagcccagagatcacagcaggctgggacataaacagcccagggagagcatctcctcgcccacctcccattctgtagagtccacagtgggactccgggagagaagtctgggctgtcccaggtcacgtggcaggctggttgcagggccagggaggcccaggtgtctgatgcatgtcaaagctgagtggctgcgaggagagctgcactgctgctgaactctggcctcaggagtgactyagggcccagccatctcttctttggtagctcatgtcacgtgtccaggtccgggccctcctgcagccagcctgcaccccggatggccccacccactccttgccacacccaccctgccatttgccttggccatgctgaaagggaatattccgtgcccattgtgcggaggcacctcctcatcgcttcctgtcacctgcagggtgccgctgagcaccgcctggagaagatcccagagcccatcaaagaggccactgccctattctacggtaaggagaggcctgacccatgggaggagggaggaggagggaagaggagacaggtgataccgcc

SEQ ID NO: 781723 - DNA, 602 bp, Homo sapiens
ggtgcagtggacggcgcctgtaatctcagctactcaggaggctgaggcgggagaactgcttgaacccgggagtcagaggttgcagtgagccgagatcatgccactgcactccagcctgggtgacagagtgagattctgtctgaaaaaaacaaacaaaaaaaacaaacaaaaacccagactatattgtttagggatacttagttgacaaaataacagacacaaacaggacataattaccataaaaatcaggacctggkgggcggttggggggggagatttaagtggaaagaatggagcggtgacaatgtgtgtcaacctgggaggtggtgaccctggggttcgctttgtaattcctcaaaatgagcatttatgtgctattcacttttcacagggcagaatctctgaactaacatgtttacgcagccatatgcaaaaaaaaaaaaatggataatttgtattctaattaaaatatttaaaaattggagacaaggcggccgggcgcggtggctcaggcctgtaatcccagcactttgggaggctgaggcgggtggatcacaaggtcaggagatcgagcccatcctggctaacacagtgaaaccctg

SEQ ID NO: 781724 - DNA, 602 bp, Homo sapiens
ggtgcagtggacggcgcctgtaatctcagctactcaggaggctgaggcgggagaactgcttgaacccgggagtcagaggttgcagtgagccgagatcatgccactgcactccagcctgggtgacagagtgagattctgtctgaaaaaaacaaacaaaaaaaacaaacaaaaacccagactatattgtttagggatacttagttgacaaaataacagacacaaacaggacataattaccataaaaatcaggacctggggggsggttggggggggagatttaagtggaaagaatggagcggtgacaatgtgtgtcaacctgggaggtggtgaccctggggttcgctttgtaattcctcaaaatgagcatttatgtgctattcacttttcacagggcagaatctctgaactaacatgtttacgcagccatatgcaaaaaaaaaaaaatggataatttgtattctaattaaaatatttaaaaattggagacaaggcggccgggcgcggtggctcaggcctgtaatcccagcactttgggaggctgaggcgggtggatcacaaggtcaggagatcgagcccatcctggctaacacagtgaaaccctg

SEQ ID NO: 781725 - DNA, 606 bp, Homo sapiens
ataatttggtttataaatccagtaaattctgcctctttaataagtctttatcttttttcttaatccttatagtcactaccttattttgaagcaccattatctctcagatggattactttaagtttctgaacccctctccctgcttttctaattcacattcaccaagtcaacagagtgttctttctaaactgcagatctaaacatatctctcctcttaaaccagggaagcatactctaaacctccagcttgatagtacactactttgacccactctgtacattaggcttattgaactgcctgcctatctctggtcctgcctggtatgtcccttaatattttttatttgtacaaatttaaggggtacgagtgcgattttgttatatggatatattgcatagtggcaaagtctgggcttttgcccctcgatttttaagagttcttcatatattagatagatctgtyctttctctgtgttatatgtcgtaaatattttctaccagtttgtcactcatgttttgattttgttatggtgcatttgttatgcacattcttaaaatgtaatcaaatttaatagacttttattgcctctggattttgagtcatgg

SEQ ID NO: 781726 - DNA, 616 bp, Homo sapiens
gatcttccttattctttttttttttttttttttacagctgtatggaatgccactgagctgatgttgcataatttatttaaccacttttctatgttcaggcatttaagttgtttccaatattttgcaattacaaactatgctgcaatgaataactttgkgcatatgtatttttgaattgtaaaaaaagttcatattcgaggatagtttcttagaactgggatttctgagttgaaaggttatgttagctgttgccaaattcctcctcaaagagttgtaccggtttgcattctcagtagcaatgagaatgcctatttccctaagactcatcaacagaattggcagttacacttttgggtgtctggtcctttgacacttagtcttttaaaatttccaattactctttatttttatagagttgctaatcacaaattatgcctgagatttgatattcttgtgaaagtatttcagatcaaattaaatgtcttttcagtggctatgattcaccatgattaaatccaacatgtttgaccaagttgttaattgactgttcttaattctggtggaagttctggagatcagcaacaattttggaataggttcagcagcctgggtaatt

SEQ ID NO: 781727 - DNA, 616 bp, Homo sapiens
gatcttccttattctttttttttttttttttttacagctgtatggaatgccactgagctgatgttgcataatttatttaaccacttttctatgttcaggcatttaagttgtttccaatattttgcaattacaaactatgctgcaatgaataactttgtscatatgtatttttgaattgtaaaaaaagttcatattcgaggatagtttcttagaactgggatttctgagttgaaaggttatgttagctgttgccaaattcctcctcaaagagttgtaccggtttgcattctcagtagcaatgagaatgcctatttccctaagactcatcaacagaattggcagttacacttttgggtgtctggtcctttgacacttagtcttttaaaatttccaattactctttatttttatagagttgctaatcacaaattatgcctgagatttgatattcttgtgaaagtatttcagatcaaattaaatgtcttttcagtggctatgattcaccatgattaaatccaacatgtttgaccaagttgttaattgactgttcttaattctggtggaagttctggagatcagcaacaattttggaataggttcagcagcctgggtaatt

SEQ ID NO: 781728 - DNA, 505 bp, Homo sapiens
tagctgttgccaaattcctcctcaaagagttgtaccggtttgcattctcagtagcaatgagaatgcctatttccctaagactcatcaacagaattggcagttacacttttgggtgtctggtcctttgacacttagtcttttaaaatttccaattactctttatttttatagagttgctaatcacaaattatgcctgagatttgatattcttgtgaaagtrtttcagatcaaattaaatgtcttttcagtggctatgattcaccatgattaaatccaacatgtttgaccaagttgttaattgactgttcttaattctggtggaagttctggagatcagcaacaattttggaataggttcagcagcctgggtaattctcatcacagtcaagccagatagggactgagattctattactgaatgaaactcttataagggcttgggagtgcagatagggggagttctcaagaaattttacaagaaagtgttatgtattatgaagcatgg

SEQ ID NO: 781729 - DNA, 432 bp, Homo sapiens
caagccagatagggactgagattctattactgaatgaaactcttataagggcttgggagtgcagatagggggagttctcaagaaattttacaagaaagtgttatgtattatgaagcatgggttattgtttgtttgtaagtaaaaaaaaataagagagagagagagattaagcaaaataaacattaagcaaggagaagctgctctaaccatttaaatgakacttttaaaatgaagattaacagcctttggcagactagaagaaaaaaaataaaagaaaaatgtcaagcagaaaacagttaccacagatttgatcagtatttactatcaactgtaagaccgttctaggcaggtggggtctatgggaaatacaaagataaatgagagagaatcccctaaaaccaataatattgctttatgtttaatttatcactt

SEQ ID NO: 781730 - DNA, 517 bp, Homo sapiens
taaatctcagactcgtgatttttgtggactctgaggttgttgaagacaagacaatcagatgaaattattgattgctcctaagttgtatcggctttgagacacagactgaattaaagttagctttcagatctgagttaacttttgattagaaagactttaggaggttctggaaattgttgagttaattaagaatacccttgtaggctccactatttcttgagattttcaggaattgtctaggcttctagagtattttcagaataagataaaatagcttttctggaaaaagtagttkaactttagtttccaggaccttcgtattcaaaatacagtatgttctttactagatctacatgtggcatgctagagaaaatgctatcttttattaagaaaaaggaatcttaagtcctttacctggacccagatggcttcattgatcacatcagtatgaggttacgcagacaaagggctatttttgttgttgttattgtcatttcattggttgttgaagaaggcc

SEQ ID NO: 781731 - DNA, 517 bp, Homo sapiens
taaatctcagactcgtgatttttgtggactctgaggttgttgaagacaagacaatcagatgaaattattgattgctcctaagttgtatcggctttgagacacagactgaattaaagttagctttcagatctgagttaacttttgattagaaagactttaggaggttctggaaattgttgagttaattaagaatacccttgtaggctccactatttcttgagattttcaggaattgtctaggcttctagagtattttcagaataagataaaatagcttttctggaaaaagtagttgractttagtttccaggaccttcgtattcaaaatacagtatgttctttactagatctacatgtggcatgctagagaaaatgctatcttttattaagaaaaaggaatcttaagtcctttacctggacccagatggcttcattgatcacatcagtatgaggttacgcagacaaagggctatttttgttgttgttattgtcatttcattggttgttgaagaaggcc

SEQ ID NO: 781732 - DNA, 517 bp, Homo sapiens
taaatctcagactcgtgatttttgtggactctgaggttgttgaagacaagacaatcagatgaaattattgattgctcctaagttgtatcggctttgagacacagactgaattaaagttagctttcagatctgagttaacttttgattagaaagactttaggaggttctggaaattgttgagttaattaagaatacccttgtaggctccactatttcttgagattttcaggaattgtctaggcttctagagtattttcagaataagataaaatagcttttctggaaaaagtagttgaactttagtttccaggaccttcgtattcaaaawacagtatgttctttactagatctacatgtggcatgctagagaaaatgctatcttttattaagaaaaaggaatcttaagtcctttacctggacccagatggcttcattgatcacatcagtatgaggttacgcagacaaagggctatttttgttgttgttattgtcatttcattggttgttgaagaaggcc

SEQ ID NO: 781733 - DNA, 552 bp, Homo sapiens
ttgtgcatgtatatacatgtctagatgtgtttatttgtatgtacatttattaggttatatgttgtgtcttccaaattggcttataattgagagtgcttaaattaaaggagcacataagttaaataaatatgtcctagcatttttcaarttcacatgacttgaatatatcttctttaataaacaagctggctttaaaattattggtaaaataaaaatagaaatgtctttaaaattgtcagcatacatttttgtctggattttacatttgtccatgctagatactttgaggtgtcaggatttggcacgaaaggttataaaactataaatctagccaaaaccaaaatgatctctgtttgtgtgacttttgacaaataagaccaatttaatgttgttggtttcacagctgaatcttctgaattattggtaaaaatacccatgtatttaacttaaagattcttacttaggtgcacacctactatgcacaggttataaaaatgaaatgacgactagctttgtctaatatctcagttctcataagttatgtagataaac

SEQ ID NO: 781734 - DNA, 538 bp, Homo sapiens
cctccattaacacagtacaggttcatttctctctgatataccagtctggatggaggcagactaggattctgcagtcttcagtgacccagactccttgctgtttgttgtgccattgctaggtttttccctttatcctcatagcccaagacagctgctgaagattcagccatcacatccacactccaggcaacaggagagaagaataaatcaagaaggaatatttcttctctttaaggacacttttttttttttttttttgagatggagtcttactctgtcacccagactggagtccagtggcatgatctcggctcactgcgacctccacctcccaggttcaagcgattcttttgcctccgcctaccaagtagctgggattacaggcgcccgccrccacgcccggctaatttttgtatttttagtagagatggggtttcaccatgttggccaggttggtctcgaactcctgacctcaagtgttggcttcccaaagtgctgggattataggtgtaagccaccacgcccagcctcgttttgg

SEQ ID NO: 781735 - DNA, 579 bp, Homo sapiens
gttttttttttttttttagacacagtctcaatgtcacccaggctgtagtgcagtggtgcaatcatggctcactgcagcctccacctcccagcctcaagtgatcctcccacctcagcctcccaagtagctgggattacaggcatgtgccaccacacccagctaatttttgtatttttgtagagatgggggtctcactgtgttcccatactggtcttgagctcctgacctcaagtggtcctcccaccttggcctcccacagtgctgggattacagatctgaccgtagatgttawataatcacaccagcaagtgtaagcatctgcagtgaccaaggggcgccatgcaggagacacatacagaagtgcgcgaccctgtaaccaggggccctgacccaacaagagagattgaggaaggcttcctggaggaggggaggcctggcggagacctgaaggatgcgcaggttggagttaaccatgaaaggggtgggaagggtattccgtgcaaatggaagagcctgtgctgagggaagcatgagtgaaagagctgaggccagggggctgaagtaggggagggaagggaa

SEQ ID NO: 781736 - DNA, 615 bp, Homo sapiens
tcttcttcaagctacactgactttacatccaacagtacctaacccgtccacattgttggggttgccgccagctgagaacagctggttcacctgcttggacctgaaagacgctttctttcctatcagattagcccctgagaggcagaagctgtttgcctttcagtgggaagatccggagtcaggtgtcactactcagtacacttggaccgggcttcccaagggttcaagaacttccccaccatcttcggggaggcgtgggctcgagacctccagaattttcccagcagaggcctaggctgcgtgttgctccagtaggttgatgaccttctgctgggacaccccacggcattygggtgtgccaagggaacagatgccctacaccagcacctggaggacggtgggtagaaggtgtccaagaagaaagctcagatttgccgacagcaggtacgttacttgggatttactatccgacaggggtcggaacgcagcccgggatcagaatgaaagcaggtcatttgcaatctagcggagcctaagagcagaaggcaggtgagagaattcttaggagctgtggggttttgtagactgtggatcccaaactttgcagtattagcc

SEQ ID NO: 781737 - DNA, 612 bp, Homo sapiens
ggggctactttcctttctcaactttgaaatattctaaaacatgttcaagagaggattcataactaaaactggagactcaggatactagattgtggccaatctatcatttttcccactgtttgccattccctgagggtatgaggtgtacacttgtcagggctgttgactttrgagtccgacatgtaactggcagccaaggtcgtgatagcagaatgtctggaacagaggttttaaatgtttttgtgtggcttggcttgtctctgacactgctgtgatctgcctgagaagagaaaaccccacatacttactagcataagggagaggagaatcaagtagggccaatctggaccaatctggtacctggaggcaagtccaacctaaaccggttgagcatagccaatatccagccacctggagcacccatgagcaagagagagagatgcttttagattcaggggctatttgttacactgcattattgcagtaatggctgactaatacatattctatttttaaaaactggggcatagcataaaatatttacaaaatgaataagaactgatacaattatctgggcctgatcctcttatctggtagatgagaacactgagg

SEQ ID NO: 781738 - DNA, 560 bp, Homo sapiens
gtggcacaatcatacagaggagtttctgtagcctgaaactcctctccctttctgcctcagcctcctgggtagctgggactacagacacaagccatcacacccagcacaaacatacttttaatggaatcactaggtcataggtcttttgacaaattagggtgaggaaaacccgtcattgaagacattacacatgtctagtgtaggtacaattaagatccaatctaggacaggacagaggttgagaacagagctgagtaactgtgagattcagtttgtatgacttggcaggacatggcasgacttggcaggatgtagaaaggaaaggcttaaagggcacccaacatttcatgtttgcatctgagggatgagaaggaggaagatgttgataataataacaagagccatttggaaggaagaggtggtggagagttcagtttggtatccgaccctgttgttttgaagtgccaactaaatttctgaaagaaagctggttgacacacttgtctgacattcaggaaggacgccaaggctgtaagtacagattcagagcttattttcag

SEQ ID NO: 781739 - DNA, 523 bp, Homo sapiens
tttcccccttttaagttccccgtgtggttgacagggaacatttatgatttctaaatggtcaagtaaaatttattcttattattcttattccttttttttttttttttttttttttttttgagacagagtctcgctctgtcgcccgggctggagtacagtggtgccacctcggctcactgcaagctccgcctcctgggttcacgtcattctcctgcctcagcctcccgagtagctgggactacagactacaggcgcccgccaccacgcccggstaatttttttttgtatttttagtagagacggggtttcactgtgttagccaggatggtctcagtctcctgacctcgtgatctgcccgtctcagcctcccaaagtggtgggattacaggctcgagccaccacgcccggctaaaatatattatttttaagacaaatggtattagattcctaagaagaagctaagctaagagtttttacctctcagatcattagaacaagtatctgcctagggaaaaagtaaagt

SEQ ID NO: 781740 - DNA, 585 bp, Homo sapiens
attttcccttttatcttatgcaacttgagtcatggtcaaaatatatgaaatagtgatttataaatttggaaaacatgcagggaagcctgaaataaggaaagcgaacaaagtgaaatctctgcttttccagagatgacccaaccagcctgatggtctcttctctgagttgagagcacagtttcaacgctgaagaggccacagagctagaatgtaggaaaaagtactagaggaatcctagtgagaggtggacagatcmtgagttttacagagggcccacccctgtcttttattgagttattctgataatgcatgtgggaagattagccaaggctacggcaagaacaagaatcactggagctcatacagaggtgggaatagtttgtatccctgcaagtcagtgaaagtatgtctgaatatttgagaaatcaagtagaaaccacagaattgtattaatattaccttagtaagggagccaatcagttctagactggaaccatgcaaacaagaactgtgcaaacaaggcttaaagcaaggcttgatggaatcatattgaggccaagtaactcaactgcatcccagtaaact

SEQ ID NO: 781741 - DNA, 539 bp, Homo sapiens
tgtccctggtttgtttcaagatcccatccaggatcccattctacattctgccatcatgtcttcttaagctcctctgtagcagtttctcagactttctgtgttcttgatgactgtcagtcttgaggaatgctggtcaggaattatgtagaatacctctcagttggggcttgtctgttgtttttctcatttttaggctgaggttatgagagttttgaaggggcaaactacggaggtaaagtaccattctcatcacatcatatcaagggtaaatgctatcaacagggcttatcagtgtcgctgttgaccttggccacctggctaaggtggtgcctgccaggtttctccactggaaagcttctctttccatgtcgtcmtttctggaaggaagtcgctctgcaaagcccacacataaggagtgagagttatgcttcatcttcttgaggtggtatatctacataaattacttggaattctttcgtcaggaaaatttggctattgttaccatttattcaatcatttatatcagtgtgggcttattt

SEQ ID NO: 781742 - DNA, 539 bp, Homo sapiens
tgtccctggtttgtttcaagatcccatccaggatcccattctacattctgccatcatgtcttcttaagctcctctgtagcagtttctcagactttctgtgttcttgatgactgtcagtcttgaggaatgctggtcaggaattatgtagaatacctctcagttggggcttgtctgttgtttttctcatttttaggctgaggttatgagagttttgaaggggcaaactacggaggtaaagtaccattctcatcacatcatatcaagggtaaatgctatcaacagggcttatcagtgtcgctgttgaccttggccacctggctaaggtggtgcctgccaggtttctccactggaaagcttctctttccatgtcgtccyttctggaaggaagtcgctctgcaaagcccacacataaggagtgagagttatgcttcatcttcttgaggtggtatatctacataaattacttggaattctttcgtcaggaaaatttggctattgttaccatttattcaatcatttatatcagtgtgggcttattt

SEQ ID NO: 781743 - DNA, 533 bp, Homo sapiens
tcatgtgtatgtctatggaataacatttgtagagaaatctggactgatcctttctgagtaaagagagctgtgggtacaattaaggggagattgaaaggaatccaaaagcatagcagatgctgtgcctcactggaatggttgccgatctcctccaaactatgaagtgtttgaggctcaactttaatataattaagatacaaagacagaatgagagaaagagagaagggagctcactggaagaacactcaagattccttactactcattctctaaaattacaattgttctagatggaaaagaaaaaaagcttctctgttaaaaaaggagcttgtgctatagraggtttaaaatatacttctgacccatctccaacattctaaatccttcccagaaaagtatgccaatcccaagaaatattcaatcaaattgctggaaagaaaaatacaaaatattaaaatgtattaggaagcgacagtaattaaatcagaactggagcaggaatagaccagcagatcaatgagacagacatcaag

SEQ ID NO: 781744 - DNA, 580 bp, Homo sapiens
aagtttattttttgttgttgtttttaatagactgtactttttagaaaatttttagatttacagaaagattgagaggatagtacagagagttcccgtatacctcacacccagtttctgcaattattaacctcttacattcatgcggtacatttgttacaattaatgagccagggccggccgggcacagtggttcaggcccctaatcccagcactttgggaggcagaggcaagcgaatcacttgaggtcaggagttcgagactagcctgaccaacatggtaaaccctttctgtactaaaaatacaaaaaattagccaggcatggtgctggttgcctgtattcccagmtactcaggaggctgaggcacaagaattgcttgaaccagggaggcggaggttgcagtaagccgagatcgtgccactgcactccagcctgggcaacagagcgagactccatctcaaaaaaaaaaaaaaaaaaaagaaggaaggaaggaaggaaaattaatgagccaatattgagacattattattactaaagtccatgctttatgcagattttcttagtttttacctgctgtcattt

SEQ ID NO: 781745 - DNA, 657 bp, Homo sapiens
ttctggaaataaaaggacatgaaaagtaactaaggaccggatttcctagccgtctttctctcctgcatgcgcaatttatccccagatataaaattgcctgctttgataattataccctctaaatgaggggcaagtggctaattatgcccacatgtggccgattgcactccccattagccaattatgtgctcaattatttgtgcacatgaataattgcactcatggaaaatagcggccctcctttcaaatcctcstgcttggagtggctgatggagtaattgtcacactggaaatgcacttggtggggagggaaagagtatcagataccaggaaacgcataagtgaccagagctcgcagatgttcactgccacaaatggccttaggagccagagagagcgggaaggaccacaggatggaacgggccagcctgtgagttaggaagcctgcttctgaagttgcctgggcagctcatgtgcggtgaccttgggcaagtcattaactttccttcaggtctaactggttctgcatacacaatgaggatggtaataacgcccaattcccatcactatcgtgggatggatcagactatttaaaaggatttacaatctgcttgggtaaaagctttacataaatatgaggcattatcatgtcgcttg

SEQ ID NO: 781746 - DNA, 623 bp, Homo sapiens
attgcatttccacatgaattttaggatgtacttgtcaatttgtgtaaaaaagccatcgaatattttaataggaattgcagtgactttctaaatcaatttggggagtattgacattgtaataatattgtcttctgatctacgttaatgaggtgtttcatttaggtcttttttacttttcccagtgatgtgttatagttttctgaatacatgttttatgtttctttcgttaaacatatttctaaacattctatttttttaatgctattgtaaatggaattgatttctagatttgatttttaggttgttaattgaaactgtatagaaatacagctgaaatttgtaaattgatcttgtatcctgcaatcttgctcaaattgttagttttaatagtttttagtggattcctcagtgttttctrtatacaagatcatttcatttgccaataaatagttttacttcttccttttcaatctgaatgtcttttatttcttttcttgcccaattacctggataattttttttcttttttacaattttgactagaagtggtaagagcagacatccttactgtgttcttgatcttgaggggaaaatattcagtctttcactattaaatattatgt

SEQ ID NO: 781747 - DNA, 623 bp, Homo sapiens
attgcatttccacatgaattttaggatgtacttgtcaatttgtgtaaaaaagccatcgaatattttaataggaattgcagtgactttctaaatcaatttggggagtattgacattgtaataatattgtcttctgatctacgttaatgaggtgtttcatttaggtcttttttacttttcccagtgatgtgttatagttttctgaatacatgttttatgtttctttcgttaaacatatttctaaacattctatttttttaatgctattgtaaatggaattgatttctagatttgatttttaggttgttaattgaaactgtatagaaatacagctgaaatttgtaaattgatcttgtatcctgcaatcttgctcaaattgttagttttaatagtttttagtggattcctcagtgttttctatatacaagatcatttcatttgccaataaatagttttacttcttccttttcmatctgaatgtcttttatttcttttcttgcccaattacctggataattttttttcttttttacaattttgactagaagtggtaagagcagacatccttactgtgttcttgatcttgaggggaaaatattcagtctttcactattaaatattatgt

SEQ ID NO: 781748 - DNA, 580 bp, Homo sapiens
ttgaagtgtttgatggttccccacatttgctaagactgtgaatttttctttattctttttttctgttcttccaattgcatcatctctatccacctatcttcaagtttgctgattctttcttctactagctcatattgacttttgagcccctctagttaatttttcattttggttagtgtaattttcaactctagaaatttcatttggtttgtttcagcaatttatatctctgtcgatattctctatgtgatgagacattgtaaacatatagacctttactgttttaaagcatggcttctttagctctttggaaatatttataagagaatctttgatgttttcatctaagtccamaatttgagtctcttaaaggtactttctgttgcctggtttgtattttttattttctgtgtatgtgtcactctttcctatttttgtttttgaatgatctttctttttctttctttctttctctctttctctctctttctctccatctctagctctctctctctctctcactaaaacatggacatcttagataatatattgtagcagctttcgacaccaacctccctcc

SEQ ID NO: 781749 - DNA, 614 bp, Homo sapiens
tttattttctgtgtatgtgtcactctttcctatttttgtttttgaatgatctttctttttctttctttctttctctctttctctctctttctctccatctctagctctctctctctctctcactaaaacatggacatcttagataatatattgtagcagctttcgayaccaacctccctcccctgaggcttgttggtgttatttgtttttttatctgtttagtgactagtgacttggctggaccagtttagtgaagtctgtttcctctgcagtgtgtcacctttgatattgctcctcacagggtactgacttggacatgcatgacaacagttttagccaggctttctgtgaccaatctcttcgtgtgatctccccattaagctttgggctgttttcacggtgttgagatcacactcaactattatcttccacttattgctagctgattgcactattgttttttgcactgccctggggcatacattgccccaccttctaatccaattaaaatcaggcccttttgcagaggtagtttttgaggctttctctgactccagatgactcttcttaactgattctccccatggttctttctgataaacttctagcttctc

SEQ ID NO: 781750 - DNA, 614 bp, Homo sapiens
tttattttctgtgtatgtgtcactctttcctatttttgtttttgaatgatctttctttttctttctttctttctctctttctctctctttctctccatctctagctctctctctctctctcactaaaacatggacatcttagataatatattgtagcagctttcgacaccaacctccctcccctgaggcttgttggtgttatttgtttttttatctgtttagtgactagtgacttggctggaccagtttagtgaagtctgtttcctctgcagtgtgtcacctttgatattgctcctcacagggtactgacttggacatgcatgacaacagttttagccaggctttctgtgaccaatctcttcgtgtgatctccccattaagctttgggctgttttcacggtgttgagatcacactcaactattatcytccacttattgctagctgattgcactattgttttttgcactgccctggggcatacattgccccaccttctaatccaattaaaatcaggcccttttgcagaggtagtttttgaggctttctctgactccagatgactcttcttaactgattctccccatggttctttctgataaacttctagcttctc

SEQ ID NO: 781751 - DNA, 569 bp, Homo sapiens
tataacacaaaacaggtgaaaaaacagaaaacgagcaataaaataatcttagacccatatatatcaatcaataattccattaattataaatggactaaatggccacattttatttgtttttacttaagtttttatttatttatttattatttccataggttttagggggacaggtggtatttggttacactagtaagttctttagcggtgatttgtgagactttgatgcacccatcacccaagcagtatacagtgaacccaatttgtagtctttyatccctcactcccttcccaccctttcccactgagtccccaatatcattcttatggctttgcatcctcatagtttagttcccacttatgagtgagaacatatgatgtttggttttccattcctgagttacttcacttagaatagtgtccaatcccatccagactgctgcaaatgccattaattcattcctttttatggctgagtagtattccaccatatatatatgccatagtttccttgtctattcgttgactgatgggtatttgggttggttccacatttttgcagttgtaac

SEQ ID NO: 781752 - DNA, 569 bp, Homo sapiens
tataacacaaaacaggtgaaaaaacagaaaacgagcaataaaataatcttagacccatatatatcaatcaataattccattaattataaatggactaaatggccacattttatttgtttttacttaagtttttatttatttatttattatttccataggttttagggggacaggtggtatttggttacactagtaagttctttagcggtgatttgtgagactttgatgcacccatcacccaagcagtatacagtgaacccaatttgtagtcttttatccctcactcccttcccaccctttcccactgagtccccaatatcattcttatggctttgcatcctcatagtttagytcccacttatgagtgagaacatatgatgtttggttttccattcctgagttacttcacttagaatagtgtccaatcccatccagactgctgcaaatgccattaattcattcctttttatggctgagtagtattccaccatatatatatgccatagtttccttgtctattcgttgactgatgggtatttgggttggttccacatttttgcagttgtaac

SEQ ID NO: 781753 - DNA, 554 bp, Homo sapiens
aggagtgaatatgagccaatgcccagaggtaggacagcatgaagggtctaacgagagtgagtggacaggccttgctggactataagtgaaaagtagtatcagaaatgatatcagaaaagtagattggggcccaattgagaagtcccttgaatgccatagtaaataaagctttaattatttatcttacagacaatgtggagcccttggttttaaagaagagcatcaaaattaaatttcttctttcaaaattttattctccccagattaacgaatattattcaagttatascttcagtttcaccaaaggtcatgtctcaatccttctcctctacaggaaagcaattctaaaaaaaaaaaaaaaagggaaaagaaaaacctcagataaaactggttttggtaggactactctcaggcaggacagcataagatacaagaatcaaatgactggcaatagaagacttattaagattaaaactgtactggtcatcagataagtgactagatctgatttgttcaaattagagtttgtaatttattttgaatacaaagcaagg

SEQ ID NO: 781754 - DNA, 561 bp, Homo sapiens
gagcttatttccaagcatctctttggatgggaggttttctgttcctttcagtcaccaatatctgtgcaaacattcagtttgtttttgtttagtgtgtccatttttatccaatagtatgtttggctctgtagggcttctagaatgttccatktggtgatgggtctgttacccacctctgatttcccggactcctgatttgtcttaaatatatcaggcatacgtgagtgcaggtggcctgaggtttcccatgcaatcccatgtctggcaaaggtatggactatggaatgtcccctgttaatggccaccactagcctggagccattccagacacatgtatcacctctcccaggaaggtcagcttctcctccgccctgcatctgtctcccctggggtggcctacagaggcaggtaaaggaaaccgctcttggtgcttggccccgccacccaaagttctgacccacgagtccttccctgcggtcctgctgctgctcaaagcacgcccagtcaacttcagacggaaggaaatcagacttcggactgcagcccagcatatttttggct

SEQ ID NO: 781755 - DNA, 561 bp, Homo sapiens
gagcttatttccaagcatctctttggatgggaggttttctgttcctttcagtcaccaatatctgtgcaaacattcagtttgtttttgtttagtgtgtccatttttatccaatagtatgtttggctctgtagggcttctagaatgttccatttggtgatgggtctgttacccacctctgatttcccggactcctgatttgtcttaaatatatcaggcatacgtgagtgcaggtggcctgaggtttcccrtgcaatcccatgtctggcaaaggtatggactatggaatgtcccctgttaatggccaccactagcctggagccattccagacacatgtatcacctctcccaggaaggtcagcttctcctccgccctgcatctgtctcccctggggtggcctacagaggcaggtaaaggaaaccgctcttggtgcttggccccgccacccaaagttctgacccacgagtccttccctgcggtcctgctgctgctcaaagcacgcccagtcaacttcagacggaaggaaatcagacttcggactgcagcccagcatatttttggct

SEQ ID NO: 781756 - DNA, 561 bp, Homo sapiens
gagcttatttccaagcatctctttggatgggaggttttctgttcctttcagtcaccaatatctgtgcaaacattcagtttgtttttgtttagtgtgtccatttttatccaatagtatgtttggctctgtagggcttctagaatgttccatttggtgatgggtctgttacccacctctgatttcccggactcctgatttgtcttaaatatatcaggcatacgtgagtgcaggtggcctgaggtttcccatgcaatcccatgtctggcaaaggtatggactatggaatgtcccctgttaatggccaccactagcctggagccattccagacacatgtatcacctctcccaggaaggtcagcttctcctccgccctgcatctgtctcccctggggtggcctacagaggcaggtaraggaaaccgctcttggtgcttggccccgccacccaaagttctgacccacgagtccttccctgcggtcctgctgctgctcaaagcacgcccagtcaacttcagacggaaggaaatcagacttcggactgcagcccagcatatttttggct

SEQ ID NO: 781757 - DNA, 567 bp, Homo sapiens
taaaaaatattttcttcttttctttgacctagagcttaacaaaagacaaaactcagatgatgaagtacttaacatcttccttctttctttcctgctgacttgatgactctgctttggagcagtgggggcctcaaggtcgcagtggagaaagccatgggccagtgggaggtgaaacggagccaaaggtgggagagggctcgagggaagaggccatggataaaaggaacaccctttacacagaggtcrggggaagatggccttaggaaaagccatttgatttgatatttgagagatgtttggtgaccttcaagagcatatttttgggagaattccagaaagaaaataaggttgtaaagagtaagaaggtcagtgaagactgtaaggacaggaaatgtggaaaagctcagtatcagccacttacttttatgggatcctagtaaataaagggggagacagacgatggaaactttagggcatatagggaacatttaggtccaagcagggtggaggaaagatatttttagggtgagggagacttgggtatcatggttgacagaagagaaagag

SEQ ID NO: 781758 - DNA, 621 bp, Homo sapiens
ctttttttttttttttttttttttttttttttttttttgagacagcgtctctctctgtcacccaggctggagtgcagtggcgcaatctcggctcactgcaacctccacctcctgggttcaaacaattctcctgcctcagccactggagtagctgggactacaggcacgtgccatcacatccggctaagttttgtgttattagtagagacagggtttcaccatattggccaggctggtctggaactcctgacctcatgatctgcctaccttggcctctcaagagaacgagatcttataaggacatgagtcccatyacgagggctccattttgaggaccttatgacctttcaaaggcttcatctctaaataccatgacattgggagtgagggcttcaacatagcaatttcgggggaacacaattccgtttatagaagctagaaaataatgtgctagttgtgaaaaggaatgattttcacactataatttttttattttaatggagtggttgtggtcaactgaagttccaccagaagtaaggaaaacagccagtgaggttagcagtaagcctcagcactcactgaattgtgacgtgcagctgaagtcatcctgagaaagttgca

SEQ ID NO: 781759 - DNA, 537 bp, Homo sapiens
acacgcccagcgtctggttgtccaggcccggccggaggttgtaacccaggatgtcggccttgccggactggtaggggcgcaggcgcgggtctctgatctgcgtgtggttcttgagcgcgccgccgtcctgcaggcacaggctcgcgagttcgcgcctccgggcgcgcagccgctccacctccccgcgcagccgccgcggccccagctcggcgcgcagctgcgcccagagggtgcggttgaaatgctcgtacaggcgccagtccagcgcgcaccagctccgcgcgcgctcccgggtctcgggcgacaggcgggccacggagcgcgcgctgcgggagttgagcctgaaggccaccaygttgtccagcgcccagcgcagccggcgccgcagcagcaccagggattcgtccaggtgctcggcgatgagcaccagccggaagcgccgttccacctcggcgatgcgcgcgcgcacgtagccctcctcgcactgcgcgttggggtcgaagccgaagtcgaaccacatgttgttcttggcgtaga

SEQ ID NO: 781760 - DNA, 537 bp, Homo sapiens
acacgcccagcgtctggttgtccaggcccggccggaggttgtaacccaggatgtcggccttgccggactggtaggggcgcaggcgcgggtctctgatctgcgtgtggttcttgagcgcgccgccgtcctgcaggcacaggctcgcgagttcgcgcctccgggcgcgcagccgctccacctccccgcgcagccgccgcggccccagctcggcgcgcagctgcgcccagagggtgcggttgaaatgctcgtacaggcgccagtccagcgcgcaccagctccgcgcgcgctcccgggtctcgggcgacaggcgggccacggagcgcgcgctgcgggagttgagcctgaaggccaccatgtygtccagcgcccagcgcagccggcgccgcagcagcaccagggattcgtccaggtgctcggcgatgagcaccagccggaagcgccgttccacctcggcgatgcgcgcgcgcacgtagccctcctcgcactgcgcgttggggtcgaagccgaagtcgaaccacatgttgttcttggcgtaga

SEQ ID NO: 781761 - DNA, 538 bp, Homo sapiens
tgtattgatttttttccctgtttatcctgcttgggattcatttagctttctgcattgtaagttatagtttttaccaaattcggaatttttttagtccttattcaagtgctttttcttcctctgtgactctaactatacgtttgttagaatgctagatactgttccataggtcagtgaggttctgggtttttcctcagttttttttttcccatttgtctttcattttggatagtttatattgctgtgtcttcagattcatggatcttttcttctacagctaagcttatttgttcaatttttcctttcagatgctgtatttttctgctktagaagccatattggtttctattttgtattttccatttttctcatcatataaatattttcagtgaaatcttttaaaatatttgtaatagcatttaaaaggctgtttgtctgctacatctgtcttctctgtcatttctgggactctttgtctattaatcatttttctccttgttaggtttctgtgtctttttatgtgcagtaattttttatt

SEQ ID NO: 781762 - DNA, 627 bp, Homo sapiens
ttggatgctgaaaacagaggctcatttccccctacatcctcctagtccaggaagaatcttattcctgaatattatagtaaaactcttgttatctagagaggtttaaatgttcagatagaaggggaaagctgatgacgggtaaaatcacataaawgattattatattcttgtgtgatttctccaagacttttcagtatctgtttgaaaaaaaaaaagcatgtgaaaccttggcacgcattagaataatttgattaatgtatacaatgagttgattgctatcaataatcacactattttgtgccatcatgtcaatgtttcttaagatggtttctatgaactaaccttgccaacacgaaaaaagctagattatggatttcttttcagcatgaagtagaattataattggaaagtaatacagttaaattataaaaccttaaaatcttagataaggaagtcatcttacagatactagagtttactgcctttcagtttagaaggagtgagtaaactaaaacaaagagaaaggaaggatctgaccaggttcataagtaggtacgttagtgctaccaccacagccccattcagtcgccttaacacacacgtctccttctttctgtttcaagcaac

SEQ ID NO: 781763 - DNA, 627 bp, Homo sapiens
ttggatgctgaaaacagaggctcatttccccctacatcctcctagtccaggaagaatcttattcctgaatattatagtaaaactcttgttatctagagaggtttaaatgttcagatagaaggggaaagctgatgacgggtaaaatcacataaatgattattatattcttgtgtgatttctccaagacttttcagtatytgtttgaaaaaaaaaaagcatgtgaaaccttggcacgcattagaataatttgattaatgtatacaatgagttgattgctatcaataatcacactattttgtgccatcatgtcaatgtttcttaagatggtttctatgaactaaccttgccaacacgaaaaaagctagattatggatttcttttcagcatgaagtagaattataattggaaagtaatacagttaaattataaaaccttaaaatcttagataaggaagtcatcttacagatactagagtttactgcctttcagtttagaaggagtgagtaaactaaaacaaagagaaaggaaggatctgaccaggttcataagtaggtacgttagtgctaccaccacagccccattcagtcgccttaacacacacgtctccttctttctgtttcaagcaac

SEQ ID NO: 781764 - DNA, 627 bp, Homo sapiens
ttggatgctgaaaacagaggctcatttccccctacatcctcctagtccaggaagaatcttattcctgaatattatagtaaaactcttgttatctagagaggtttaaatgttcagatagaaggggaaagctgatgacgggtaaaatcacataaatgattattatattcttgtgtgatttctccaagacttttcagtatctgtttgaaaaaaaaaaagcatgtgaaaccttggcacgcattagaataatttgattaatgtatacaatgagttgattgctatcaataatcacwctattttgtgccatcatgtcaatgtttcttaagatggtttctatgaactaaccttgccaacacgaaaaaagctagattatggatttcttttcagcatgaagtagaattataattggaaagtaatacagttaaattataaaaccttaaaatcttagataaggaagtcatcttacagatactagagtttactgcctttcagtttagaaggagtgagtaaactaaaacaaagagaaaggaaggatctgaccaggttcataagtaggtacgttagtgctaccaccacagccccattcagtcgccttaacacacacgtctccttctttctgtttcaagcaac

SEQ ID NO: 781765 - DNA, 618 bp, Homo sapiens
taacttttatcccagattaagcactgcagggtaatcgaaaaagcacaggctttgcagttaggaaaacctacttaaaatcttgattttgctacttgctaattgtgtgaccttggtcaagagtagttctaaaatctgaaaaatggtggtttctacctcattttgttgtaagaattaaaaaagaaccatatgtaaagtgcttggtgggatgctagccagttcaagtagctggtgtttaatgcagttataataagcatctattaaggttaacatattaaagtgctcaatttagactcaagattcttatcttaaratgcatctaatcctgatacattataattgactagggcaaccattcccatgccctttatgttagaaaaattccatggtgattttactggtgcatgattattggatggttattgttaatttccattcatgggtcataattcattaaccacaggtgccattttgaatgaccttttgacttccacatcgcaaacaatgccagcatgaagcaaagtgaggtctgttgatcataagcgataagtacatttttgaggtactttgtgattgccaaagctgagtgcagtctcagtgactcttaggttatcaaaaccc

SEQ ID NO: 781766 - DNA, 586 bp, Homo sapiens
aatacatgtttgcattattatatttttgagccataatttagtaaaaattaaaaaatggtaatctttttagcagctgatacttcaaaaacaaacacctggtttactttccttttctacttctacctgtactataggcatttggatttgagacccttaactcagtgatttgccttagcaaatgacaagaagaaatctggctttgctgtctacatgcttttaaaataatgagtggaagctgatgatgactgacttctctggctgggtatagacagattactatatttggcatgacagtagtctttggctaggtagagactatttattttttcattcaccttttctcagaattctaaaatttttggtgcccctttcaagaggctacccattttaaataatttagagcaagacttgaataaaatrtaaataaatattatattatgttcccagctaagataagcatattcaacttttgtgttttctaaaaaatatacatatagtcatgttcttaatattatgacagtatctcctgtcaaagttgtttgtgcttaattgtcacaattattgatagcaattatgattttcttga

SEQ ID NO: 781767 - DNA, 632 bp, Homo sapiens
gagattagcaagttcacaggatccaaattctatacaccaaaagtaattgtattttcatatagaataaatcattgcaagatgaactttctgaaagtatcgtttacagtaccaaaaaaatgcttagggacagattaaaacagatgtctgagcctctacagtgaaactacaaaacaatgtggaaagagtagatctaagtaaatgaatagacattttacatgcatggattgaaagactgaatatttttaagatgtcagttcttcacaaattgatttttagattcagcacaataattctagccgatttttgggatagaaattgacatgctcagaggactgatgtatctgacttctagacttcctgcatagtcctgacttaccattttttgactagatggtagtacaagagtgatagacattcagtagaaagcctactttgaattttgttctyttccctggctagtaatgtgcccatagaatactcaatcttgcaatgctgggcagcagcagcaagccgtagcttcccgtcagccacagcatcaagagggtaaaaactgattcttgctctttgtgaagaacactattcctgctaaaccatcaagtattgatgcccttagtgccttcaaccaatgcttc

SEQ ID NO: 781768 - DNA, 637 bp, Homo sapiens
actaccttttgtttatccattttctcatcaattgggcacttgggttatttttaccttttgactaatgtgattaatgcttctatgagcatatttgtacaaacatctctattagacactactttaaattattttagttatacacccagaaacagaattgctggatcatatggtaattttatttttaattttctgagaaactgccatactgttttccatagtggctatatcattttactttcccaycaacagtgcacaaaagttccaatttctccacatcctcaccaacactgttattcaaatgtaatggcaaaatagaagcatttttcgcacacaaaaagaataatacaatttattgtccacataactgaagtaaaagaactattaaagtttgtgctttagcaataagacagtgaactcaggatgaaggtgagggtctaagaatttctgagttgaactacagttttagaacatgtattggtaaatttactttaacattaatcataaaaatataaatacccctttttaaaagggaaaaactagaactatgagcaataacaagattttgtgggaagtgttcaatggatagttaaagcattctatggaaattctcaggataacaaaagagataatgagtagc

SEQ ID NO: 781769 - DNA, 618 bp, Homo sapiens
tctgaatcatggacaatgtacgtttgtattcagaattgtttctgaagcatatatctagttgagaattgattttctaaacagagaaacacaggacagtgaccccaaatgggtgctgagacaaggggagctactgacttagacctaatcaccgtttttatatgtttgttgtaattaaagtctaaaattactgatactgatcttttttctgtaagagaacagaaatctatcaacaaaataatatctacagcacctgctagttctaaaagtygagcatatttctagtagacaaggaagcagtagtttctccaagaatatggctctctttggcatccacatttaaaaagttcccttgccaagagcctgaagagttggtctttagctttttactttatggatgaattctgggaatttggtgaaaatattaatcatatcacgattccaccaaaataagtgatttggttatatttaaaacttcacaagaacttacgactgtgtgtatttgaaggttacctatgtacagacacaaacatatgtagtatactcaatgggacagggtagagatgtcagctgaataaacattcttatccaaataataaaatactagcctgtcaaatttta

SEQ ID NO: 781770 - DNA, 582 bp, Homo sapiens
gatttaaatgaaaaaggtataatgtaaggtggtattcgacggagtaccaaaattagcaggagcattatagcgtatgcctcggagttcttagttctggacaacagaattcagtctagttcattgaaagtctgtaagctgtagggtgtcaggtagtgtgtggaaattcaaagaggttcagagagctatgcttgtgtgcaacacagcaggaggaacacccacccacagcatggaactattacaggagaaacctcatgcctgccacagctgtgtgtgtttcttgggtgctcctagggagctcccttccaagtctcccctgggtgactgcctagaacatagctactgaccagagagaacctgagctgctaatgagaatggaaaacatagttttcaccaaawttgcagataaaggtcactagaagggatgatagtgggtaaggagtgagtccacttgtatctgcaaaccggccgcaggacttggttgaaggtggaaataaatgggggctggagtggttgagggagaccttaaggtggagccatgcatgagttgaaataaaaggtcttggattgttcagagaaggaaca

SEQ ID NO: 781771 - DNA, 606 bp, Homo sapiens
ccgtgttctgcccagactgttttctgtggacgactgtgtagtgtgttggttttgtttcctaatgtttaatgaacgttataaatgacgctcactaaacaagacctcacaccaaccaaattttctattattttgaaattttctatcctttttgccataaggcctttcatcttttgcttgattagaatatacgcatgagtgttatgcttttccttaaattcctgtaggtcatcaagtgtctgcccccagtttctccttttgatggacagatgcctgcttcctttctacctctgacatagagtgccgcttccagactattggcaagaaaggccacataaagaaaccattgccggccgggcgccgtgactcacgcctgttaccccagcactttgggaggccgaggcggrcagatcatgaggtcaggagatcgagaccatcctggctaacacggtgaaatcccgtctctactaaaaatacaaaaaattagtcgggcgtggtggcaggcgcctgtagtcccagctactcgagaggctggggcaggagaatggcgtgaacccgggaggcggagcttgcagtgagccgagattgcgccactgcactccagcctgg

SEQ ID NO: 781772 - DNA, 637 bp, Homo sapiens
ttgctggaatattttgcagtcattttaatggagtgagtaagaaatttgtagtcacatgcaaaatcaaaagcaggagtagagttggataagctttatgattcaacttttattaaaatgtgtatagaaaaatacaattgaaaatacatccttttttcagggattatcctgaaataatttggtcatgactattattttctacattctgaatattttatcccattggctgtttctaaagtccttatttattcagaagacttctagcccttgcagatcatgttctttgctttcctttcatcttttccttaaaattatactttttcctgtataacagaaccatacctaccataagcacaccaggaatactgcattttagctatacttcaggcatttcagcttcctagtgggctacatggcttttccagagctcgctctctctctttttttttttttttttgtagcaagggctcaatgacycacaggtctatattcatgccccatctcagagctggtgtgggaactcagatggtgcgtctttgctgattgcatttatgtagcccttaaaacacttgccacgtggcttcaccaagaaaggttttcccaagtcccattttataattgttcctatcctgggagctgg

SEQ ID NO: 781773 - DNA, 632 bp, Homo sapiens
tctcttgcttttctaactgaatggtcaattattaagtattccattctcccagatgtactttagcgtttaattaccatgtttccaaaaatcttactggatttaaacaaaattaattatgcctattaattatttgggggaagaattttaatatttatatttcttttctaaaatataatttgtcacttctttcatgcggttctttttcatccctcagttaagttttgtaattttctttttctaataacttgcctctttttccaccatatttatggactgtgactcgccwctaaagcgtatttttgcaatgccagaacatttagaacaatttttaaaaatagtgattatagaaggtatcatgtatttttcagatattaatatggatatctctggtgttttagcattaaagaccactggctaatagtgaacaatagtggtctttatcatcttaagacatatagatgtctatctttattaaaagactgagaaaatcagtatcagatgctatatacatgtcaaatacattttggtctctaataaattaatacccttgagcatcttctcttttgacctaatgcagtgaattcttttgaaatttccatagtaaataattttttcattcttagaggaaatta

SEQ ID NO: 781774 - DNA, 624 bp, Homo sapiens
tctggaaaatgttaactaatgctatttttagcatcatttttattggtgtgtcattgacatcaaatgaccctgggcaagctcttgcattcccaggagagtatcttgaagctttagagggatatctcaaagcattccactcccccaaatgcagaagagaatgaagaggaaattgggactctaactatgaaacagtctcctctcttgctgagtttataatcttaaaagatcttatttgataaggtgaacatcaattctctgattctcaggactcaagagagaaacttcctagtgccaaggacaagttaggaattagggaattggagcagctgagtcctagccctggstctgctggtagctgctgtagagatcacctttcccttccatctgttagatgagaatggtaaagtcagtgagccccagtgtctcatttgctgttaaaatataaatatattcatgatatgatgataaacaatagatcacatctatctagatggtaaaatattgaccaacaatctagatggtaaagtattgatacctatctagatggtaaaatattaacaataataactagttattattactaataataaaatagttaacatttgctaagcacttactctgacc

SEQ ID NO: 781775 - DNA, 579 bp, Homo sapiens
tccctccagccccgctccaggaggctgccctgcctattctgtctccacggacttctagagagggaggggcccttagtccagcctcctggctcctatctgcctcagtgccttcctcctgtccttagctgttccttaaggaacacctataccagctgctggagagtatgcgagagcatgtcctgaatctggcagccctcactctgcagcgctgcctccgtggcttcttcattaagcggcgattccgctctctgcgccacaagatcatcctgctgcaaagccgggcccgtggctaccttgccaggtgaggcacagaaaaggcaggattcstaggagacctatggtcaggctcgggagaggtcacgcctgaacttaggtggtgagctccctatccctggaggcatgcaagctgagggtggaggcctctgcaggagaatgatcagattctctgtgtctctgcttttgaatgcccttcccagccaaccccaggcccttgtgactggtgggtgggaatccattcagccaagaggggccttaccctgcatttcagggacctgagattataagctgttgggaaataaa

SEQ ID NO: 781776 - DNA, 652 bp, Homo sapiens
tgtctggtgagagaccaaggagactggtatcacaggagtgagggaagattccatttgttacccctccagccacagactgcgatttaacgagtctccttaggcaatacagtgactccaggggtcattataatagtggaaatagtatataraacgcacactagagccttggagctgtccttaaaggcatgctgtatcaacacccaccctcttgccaagctcgattgtctgcctgttactcccgtctatgccttttccttggccaaacaaacttcttccagatccctttgatcattttctctttccttgccagaaataaactttgttatccactgcgtctggaacatcctcctactttccaaaccatactgtttttcatttctgcattgatttcagtctccctccttcgggtggggttaagggtgtcatgacatcgttgcccatatgcttcgttaagatggtggtttttaaaaacaaatgtgtcattttgaaaaagccagagaaccatatagtcatccactttattgtaacctgtgcattggaccaggctgcagaaaagacctctccggagagattcctggaactccttgatcagaatggttttggttaagccaacccatctgggtaggaatgatttgcagaggtaatactggag

SEQ ID NO: 781777 - DNA, 452 bp, Homo sapiens
gataagggaaaagtgggcctggcaactcgaccatccctccaaccccaagagtccccacccccaccccaacaggaattcccggaatcctcctcggccccccttccagactcccgcctcactctgcctggcagtccagggacaggagccgcctaactacttccagatgtggacacagccacgaggcggtaggggggagggggtggagagatggagggagctgcagtggcgatggccctctgattgaacctggaggccaggctccgcgagytccacaccttagccctgcccctgttccaaactacttcagattctgactcccaagtctccactcactgccccctcctccccctacaatccctctcgaattccttcctggaatccagctaccaggcaagttcaggagcttggctctctcttgggttctatggggggtcaaggatctgggtgggtgg

SEQ ID NO: 781778 - DNA, 511 bp, Homo sapiens
ttccacagtggctacaccattttacagtctcacaagcaatggtgggaactctgatttctctacatcctacatcctcaccaatacttgttaatttctgggttttctttttggataatagctatcttaatgggtgtgaagtggtatattatcttagtcatcttgagctgttataacaaatatattatagaaagagtgayttaaacaacaaacatttattgctttggttctggaggctgggaagtccaagatcaaggtgctagcatgtttggtgtctggtaaagacactcttcctggtttacagatggctcacttctctgtgtattctcacaaagcaaagaggagagagagagagagagagagagagagagagagagaaagagagagagaaagagagagagagcgagagagcgagctcatgcgtctatcctcatcaggacactagtcctattcatgagggctccaccctcatgacctaatcaccttccaaagttaccatctcttattatacact

SEQ ID NO: 781779 - DNA, 619 bp, Homo sapiens
tctaaaagcggaacataaatttgtaaaggtatccccctcctttctctaccaagaagggcaagtgttaatcatcagagacagctctagacccttatcagcctgtgacggcaccaggggaatcaacaaaccttattaactagcccttatctaccattagkttttccatatatttgtcttcccacaatgtgtcctcccccttgaaactcaaagcccttttctcttgtcttgtcacttctctacaaaattgactgttcttttgttaaaattctatgtaaacccaagttctatccacccctgtgagttactcatccctgagtgctcctcatgcatggttaagatgcacacattagtaaacttctgtctgctttcctcttgttaatctgtccttcatcagtgccttagtccatcttctgctgctataacagaatgccacagacaagataatttatttcaaaaaagagagattgatttagctcacagttctggaggccgggaagtccaagtgcttggcacttgcatctggccaaggtgggcccatggcagaaggcagaagtgagcatgtgagacaagcagaggaaattagactgaactcattcttttcatcaggatcccacttctg

SEQ ID NO: 781780 - DNA, 619 bp, Homo sapiens
tctaaaagcggaacataaatttgtaaaggtatccccctcctttctctaccaagaagggcaagtgttaatcatcagagacagctctagacccttatcagcctgtgacggcaccaggggaatcaacaaaccttattaactagcccttatctaccattaggttttccatatatttgtcttcccacaatgtgtcctcccccttgaaactcaaagcccttttctcttgtcttgtcacttctctacaaaattgactgttcttttgttaaaattctatgtraacccaagttctatccacccctgtgagttactcatccctgagtgctcctcatgcatggttaagatgcacacattagtaaacttctgtctgctttcctcttgttaatctgtccttcatcagtgccttagtccatcttctgctgctataacagaatgccacagacaagataatttatttcaaaaaagagagattgatttagctcacagttctggaggccgggaagtccaagtgcttggcacttgcatctggccaaggtgggcccatggcagaaggcagaagtgagcatgtgagacaagcagaggaaattagactgaactcattcttttcatcaggatcccacttctg

SEQ ID NO: 781781 - DNA, 619 bp, Homo sapiens
tctaaaagcggaacataaatttgtaaaggtatccccctcctttctctaccaagaagggcaagtgttaatcatcagagacagctctagacccttatcagcctgtgacggcaccaggggaatcaacaaaccttattaactagcccttatctaccattaggttttccatatatttgtcttcccacaatgtgtcctcccccttgaaactcaaagcccttttctcttgtcttgtcacttctctacaaaattgactgttcttttgttaaaattctatgtaaacccaagttctatccacccctstgagttactcatccctgagtgctcctcatgcatggttaagatgcacacattagtaaacttctgtctgctttcctcttgttaatctgtccttcatcagtgccttagtccatcttctgctgctataacagaatgccacagacaagataatttatttcaaaaaagagagattgatttagctcacagttctggaggccgggaagtccaagtgcttggcacttgcatctggccaaggtgggcccatggcagaaggcagaagtgagcatgtgagacaagcagaggaaattagactgaactcattcttttcatcaggatcccacttctg

SEQ ID NO: 781782 - DNA, 433 bp, Homo sapiens
ggttttccatatatttgtcttcccacaatgtgtcctcccccttgaaactcaaagcccttttctcttgtcttgtcacttctctacaaaattgactgttcttttgttaaaattctatgtaaacccaagttctatccacccctgtgagttactcatccctgagtgctcctcatgcatrgttaagatgcacacattagtaaacttctgtctgctttcctcttgttaatctgtccttcatcagtgccttagtccatcttctgctgctataacagaatgccacagacaagataatttatttcaaaaaagagagattgatttagctcacagttctggaggccgggaagtccaagtgcttggcacttgcatctggccaaggtgggcccatggcagaaggcagaagtgagcatgtgagacaagcagaggaaattagactgaa

SEQ ID NO: 781783 - DNA, 592 bp, Homo sapiens
tacacctcaccccttcccggcctagaccatgtgctgtccactcagcatgcgtttactgagggtccattctgtggctggctatgggctaggcactgctggggtcatggaagtggaggaaactcagtttcggcctctgcatgacttacaatccatttggggagcccatatgtctaccagcatattagggtgttccagagaaacagaacaaataggayatctctctcctttctctctctctctcttttaacgaattggatcatgcaattatgagagctggcaagtctgaaatcttcagggcaggcccattggctggagagccagggaagagttgatgtctgaagatgattgcctggcagaattccgtcttcctccagggacctccatcttttctcttatgaccttcaatggattgaatgaggcccactctcattatggagggtaatttgctttactcaaagcctgttgacttaaatgttaatcccatctaaaacatatcttcacagtaacgtctagactggtgtttgacctaacaactggtcaccacggcctagccaagttgacatataaaatcaaccattgcaaccagtaacta

SEQ ID NO: 781784 - DNA, 590 bp, Homo sapiens
gtgcacagaaaacactctggctttctgggctggtcctgccgtgttatttggaggccattcaataccttcacagtgaggtttcattttccactcacgaagggcccagagctccccaagctgcagggtaacacgtctgctattgttgaaaggacaagacactcattgaacactcaacccttgggtaraaacactacctcacaggctgcgggtggagcacaggggcaggccccagcaggaggtcccatcccaagcatggtgtttagaatgacagttccctggcagggggctgtgctgaggttggcaagcttggctgtggtactcactgacttggaatgtcaacctcccaaggggggctgtgcctcccagcacacacaggggggtcggcagtgtggggaggggaggagagacctgtggaaatgaccacatggctgagctggcctggtgcgtcttgggttcagggttcactcgtgggggcatctgacatctgctctgttatccctcctgggggtgcctttggcagctaaaaaacactacctgaacagtcttctcgtgttcaggtcttatggtctgcagagggcaatttatatcta

SEQ ID NO: 781785 - DNA, 594 bp, Homo sapiens
tattataataatttgatccacactatactcaaaaataaccgtctcaaaaattaaataaaaattttttaaaaaaccttgcaaagtagttatagaagcttattgaacagtaaaaccatctgtccacatagacatttgggatttaattgcactgcattaatctatcatacaagaacaaagcattcgtcaagttacagacgtatacagaagagatgatgacaatcaaattcaaactgccagactagaaagcttcgctttgagaagaatggatctccaagcattgcttagggtttaaaatgacastatacatttatgtttgttactaagctgattataacaatgcagctattaatttaaatgagttaaaaccttaccttaaccaaacccttcaagcttctggtagaaagtataggcttaaaagcttccactgtgattaggtctaatttcatcacatcagtataacacaagtacagaattgctgggattttccatacttgacagtagcttagaactatgaatacacaagaaaaaaaaacgatgtaagttttctattatgttacttttaaattaaacacctttaaataataaaggctgttg

SEQ ID NO: 781786 - DNA, 594 bp, Homo sapiens
tattataataatttgatccacactatactcaaaaataaccgtctcaaaaattaaataaaaattttttaaaaaaccttgcaaagtagttatagaagcttattgaacagtaaaaccatctgtccacatagacatttgggatttaattgcactgcattaatctatcatacaagaacaaagcattcgtcaagttacagacgtatacagaagagatgatgacaatcaaattcaaactgccagactagaaagcttcgctttgagaagaatggatctccaagcattgcttagggtttaaaatgacagtatacatttatgtttgttactaagctgattataacaatgcagctattaatttaaatgagttaaaaccttaccttaaccaaacccttcaagcttctggtagaaagtataggcttaaaagcttccactgtgattaggtctaatttcatcacatcagtataacacaagtacagaattgcygggattttccatacttgacagtagcttagaactatgaatacacaagaaaaaaaaacgatgtaagttttctattatgttacttttaaattaaacacctttaaataataaaggctgttg

SEQ ID NO: 781787 - DNA, 552 bp, Homo sapiens
aatccaaagttcttatgctggatcactcaaagggataaaaatacatttctactcattcttttcttccctaaaggcaatgtcttgtttatccttccttgtctctaaatagataatttaatcaaaatgaactagccagatgatctacaataatcaacattagctgtgaaaattgtttatggaactactcgctacccagcacagatgtattcacatttccttcatagtgcctggattctactagacatcacagaagcacaktccctacaaattagtgattatatatattcattgttttttttttgttttgttttgttttttttgccaaatgctttctagattgttgccctatttgttgtttaagaaatgctgacccttttcacaagacagtgctgaaagcgaagaaagaagttcctgcccctcctaaagccaaagccaaagcaaaggctttaaaggccaagaaggcagtgttgaaaggtgttcacaaccacaaaaaaaagaagatccacacgtcccccaccttccggcggcccaagacactgcaactccggaggc

SEQ ID NO: 781788 - DNA, 642 bp, Homo sapiens
cttgccgcgaaaatggtctttgtattgcactttgtggctgacagacaccgtccgttacctctcagcattgtttcaatacacacacattaacacacactcgcgcacacacacacgtacacactcgcacacactcccacatgtacacatatacacgcacacccacacatgtacacagtcacacacaaactcactaacacaaacatgtatacattcactaacacacacaaactcacgaacacgtgctaacatgtacacactaatacactcatacatacacacgaacacattcacacacacatgcacattcactaacatgtacacactcacacattcacacatgcacacctactaacacatgtatatrctaacacactacatgtacattcactaacacacacgtgtacacacacgcactcagtaacacacatgcacactaacacacatgcacactaacacatacatgcacattcactaacacactcacactgtagcaggacaagctgcagacaaaacctctcagacactgagttaaagaaggaagggctttattcggccgggagcttcggcaagactcacgtctccaacaacagagctccccgagtgagcaattcctgtcccttttaatggctcacaactctaagg

SEQ ID NO: 781789 - DNA, 642 bp, Homo sapiens
cttgccgcgaaaatggtctttgtattgcactttgtggctgacagacaccgtccgttacctctcagcattgtttcaatacacacacattaacacacactcgcgcacacacacacgtacacactcgcacacactcccacatgtacacatatacacgcacacccacacatgtacacagtcacacacaaactcactaacacaaacatgtatacattcactaacacacacaaactcacgaacacgtgctaacatgtacacactaatacactcatacatacacacgaacacattcacacacacatgcacattcactaacatgtacacactcacacattcacacatgcacacctactaacacatgtatatactaacacactacatgtacattcactaacacacacgtgtacacacaygcactcagtaacacacatgcacactaacacacatgcacactaacacatacatgcacattcactaacacactcacactgtagcaggacaagctgcagacaaaacctctcagacactgagttaaagaaggaagggctttattcggccgggagcttcggcaagactcacgtctccaacaacagagctccccgagtgagcaattcctgtcccttttaatggctcacaactctaagg

SEQ ID NO: 781790 - DNA, 624 bp, Homo sapiens
cttccgttgccatcttggttttggtgggtttggccagcttctttactgcaacctcttttatcagcaaggttgttatgacctatatcttctgctgacctcctatgtcatcctgtgactaagaatggcttaacctccggggaatgcagcccagtaggtctcatccttattttacccagcttctattcaagatggaggtgctctgcttcaaactcctctgacaaaaccatcagaaaccagagagaaggcagacgcctcaaggtgacgctggccaagacccagacaggcatcatgtgtcccagtggagactggctcgtgatgacacctgagccacagacgatccctctcacacytagatgctatctaaggccgatggcaaccggatgccaccctgagcatgaggtaggaggcaattaacccctggttggctgaattgacccagagaacggagttgaccttcagttatcaatgttgaacattcttctaagaagacgtgaggagagcttgagatagaaattaaattcagacatactcagcatgtaaaaataagggatgttccatctgttgcccacccgaggataatggattgacacttcagggactttagcaatatgccaggcactgtgc

SEQ ID NO: 781791 - DNA, 521 bp, Homo sapiens
ttgaataaacaagggccacctttaatagttggttttatgagattctgcatacctcaccatggccaaacttctccacacggatggtaaccttcatccatgcagcagaggacacgaaggtgtagccctccctcctctgtccctggacagctacagattcaggccagttcagacgggtccaagaagagtttcagggtctccatcttgtccttcctgggcatggaactgagcccagtactggcatcccargggatgccccccatgcatgcttgtccatttaactgggcgtctgatcagatttctgcttggttttctgccaggcctagagcctgatcctgaatcctggttacagtgactttgaaaagctgcctgggctttatcagcctctctccccgggtgaccgggatactgatgaggatggagtccctccttgtacctgacagacgtctgtctccctgactataacagccttgttcctgggtcccacccaagcttcgtggccctgcataaacccaggtttgcag

SEQ ID NO: 781792 - DNA, 666 bp, Homo sapiens
aatacccatcatatgggttagggatcccccaatgacctcactgaaacttartgtggagcctgtctccaaataaggtcacattctgaggtattggtggtgaggactttaacatgggagttttttgggaggaggccctcacccacagtagtagaacttgtgactttgtcaccaaaagaaatcacttattttcacatcgcaccgtagtagcagtggacatctccaaataccggcgaagctagtcctgcctgcaaagttaaggcagttttttttatcagatctagagctggaaatcattgttaaatgaggcgatgaggaagtgtgtatattattctggctcacttttaaaaatattttgatccatttatttcaacataattgatttcccctgtgattctgtatgttttgtattatacatgtaaaaacgttattcagaggagttcacaggcttcacccgactgtgttgaaaggacccatgatgtaaggatgtttgttgtggggggtgcttgtggctccttaactggctctggaaagagcctacttcccatagtgaaccctgtgaggtccaattctgttcctccccctggagctccaagagaaggtcattgtccttgtagcagcaggtgcccccccaagctgggttctcactgcaggtgccagcgggctctc

SEQ ID NO: 781793 - DNA, 662 bp, Homo sapiens
gacttgttcagttttaaaattaatttggccaatactaccatgactttagtctctatctttaggaagtaccaataaattatatagctttcccttcattgtaggatcacagaaaatcctctactgaagagcacatacgtaggatctgtgactctgaacactaattcaaagtccatccctccttgacctaccagcaaatgcactaagaaaaaaaagtctgccctcctctataggagatagcagcagaacataggtttgaagcagtcacactgtgccagaaattagtttcttcataactcaaagaagaaagggaaggcatcatactaaacctctactgagcctcgggtgccccaaactaacagacatattgcattttacatgaatggattcattaccactatcatgaccaaagagcagttacaaggcatcctcctggggtaccagtacaaaacaaacagagaataygcccctaccctagggcagcttgctgaagactcttctaaggtctggccagttctaaatcactgctcatcacaaaacaacgacatggagcttgacacaagtaaagaaaacaaaggaaaacaggctaccaattaactaccatataaccagctaaaatagaataattacaaagtgaatagggacacagaagaggaagaatataa

SEQ ID NO: 781794 - DNA, 570 bp, Homo sapiens
ttaaaaaagtcaataacctttgttatttgtaaagtcacctacctactcttgttaaaaaacttttgttaaccaccccctcaccccaaatcaatacttgcagcccttccatggtcatgtgcatgcatctacagagcaggaaaaaatgttgagttgcatcacatgtacactccaagctgaggtcactctgtcttcttgtttcagctctaatgccgtaaacaactgtttttccggtctacttagtgccacatattttacacctttgtgctttttactgatgattttgttgtttaaaatggcccccacgcatcttgttcaagtgctatctaatgttgctcaattcaaggctgtgatgtgccacayagagaacgtatgtgttggagggctttgttcaggtacaaattacagtgctactgggtagtgagttcgatgtgaatttaacatacattaaggcatgtctaaacagaaatacacatgtaacaaagtcacgtattttcagttgatgaaaatgttgtgatcagaggtttgtaggaacccaatcctgtacttcccctatgtgaaaacggtttcata

SEQ ID NO: 781795 - DNA, 615 bp, Homo sapiens
gccatgggttcaaacttcctcctttagctctgagtcgtttgatcatctgaagccttcttctctcaactcatcaaaatcatcttccatccagctttgttctgttgctggtgaggagctacgtttctttggaggaggagaggcattctgatttttagagtttccagttcttctgctctgttttttccccatctttgtggttttatctacctttggtctttgatgatggtgacgtacagatggggttttggtgtggatgtcctttctgtttgttagttttccttctaacagtcaggaccctcagrtgaaggtctgttggagtttgctggaggtcctctccagaccctgtttgcctgggtatcagcagcggaggctgcagaacagtggatattggtgaacagcaaatgttgctgcctgatctttcctgtggaaattttgtctcagaggagtacctggccgtgtgaggtgtcagtctgccccactggtgggtgcctcccagttaggctactcgggggtcagggacccacttgaggaggcagtctgtctgttctcagatctccagctgcatgctaggggaaccactactctcttcaaagctgtcagacagtgacatttaag

SEQ ID NO: 781796 - DNA, 643 bp, Homo sapiens
gcattatagtttcatttcgagtttaatttaggtctttttgtatcatatctacttaaatttttgaacatatacagttataataccactataatacaattataactactttattgcccttgtttgcataaatctaatgtctgtgccaattatgggtgaattttgattgattgatttcttcttatgaattatgttttcctggaaatttttatgacagctttattgagatgtcattcacttttaacttcaacaattcagtggctcttagtatattcacagagttatgcaacccttaccactatctaattttagaacattttcatcaccctgaaaagaaactgcacgcccrttagcagtcattcccaattttccccttcccctaccctgcccctgacaaccactaatctatgttgccatcgatctgcctattctgaacattttaaatgaagagaatcacaaatgtgtggtttcttataattggctcctttcacttagcataatgttttcaagatttatccaagttatagcatttatcagtacttcattcctttctattatctcataacactctgatatggcttggctccatgtccccagccaaatctcatctttaattatatagctcccataattcccatgtgttgtg

SEQ ID NO: 781797 - DNA, 605 bp, Homo sapiens
tgtgcattacttaatttaacctttcaaccaacatatgaaagaagtcttgcttttgtaaccaagatgtagagaggtctgtgtagctttccaaggtcacagagacaggcgcagaaccaggttccccacctggccacactcaccgccatgctgtctgtctccaatgacagctagcacagcagcaggccacctgcttccacaccaacaggctgcttccaagaaaccctcaaccagaagttatccaagcttttgagtgcccatggaaacaccctgaggcrggctccgaggctgcctcttttcaaacctggctatgtttgttttggaaggtgtttgctggcatgagtcccaggacaaccctttcttgtggtctggataaactgcctgactctcagcacatagcccagctgcctcctgccgggaaggcagtggtaagagaccaggtgggcagaacacctgctccatcaaccatcacccttctgctgccccacccaccactggagacatcttgacctaatggctcctaaattctaaggcctgggttctcctggctgaagtcacatttggtccaggcatagcagcacttaaagattggtcaagtgcaaagtggc

SEQ ID NO: 781798 - DNA, 574 bp, Homo sapiens
agaaacttaaagaagaataaaaatgagaattttcaaaacttatgtaagggactgggtaattttctggaaaagactcattagcatttaaataacaagcttcacttatttaagctccacttatcaagtcgatagtgcctggaagacatttagcctcttccccatcataatgtttttctgtctttttgagggcctctttcctagcatttcggtgaagaaacccaattatcattcatacctggttgtgtagagctccaacataactcatttacattctcatcaaggacaaaaaaaatctaatgaagtcttccrtggaattgtgcaagtaagggatgaaatgtgtcttaaaatcaatgccccagagaatatttaccaagattgagtattctgatgatttaggagatcttaaaatctatctctttggctgccatcttaacgcacctctccagcgacacagaatgatagattagattcaaagtcgaattaactagaaacttgcagtgaggaaatctcccgtttaaaaacaaagtcattgcaccttcccagtgttagcctttcacattccaacatggaatta

SEQ ID NO: 781799 - DNA, 574 bp, Homo sapiens
agaaacttaaagaagaataaaaatgagaattttcaaaacttatgtaagggactgggtaattttctggaaaagactcattagcatttaaataacaagcttcacttatttaagctccacttatcaagtcgatagtgcctggaagacatttagcctcttccccatcataatgtttttctgtctttttgagggcctctttcctagcatttcggtgaagaaacccaattatcattcatacctggttgtgtagagctccaacataactcatttacattctcatcaaggacaaaaaaaatctaatgaagtcttccgtggaattgtgcaagtaagggatgaaatgtgtcttaaaatcaatgccccagagaatatttaccaagattgagtattctgatgatttaggagatcttaaaatctatctctttggctgccatcttaaygcacctctccagcgacacagaatgatagattagattcaaagtcgaattaactagaaacttgcagtgaggaaatctcccgtttaaaaacaaagtcattgcaccttcccagtgttagcctttcacattccaacatggaatta

SEQ ID NO: 781800 - DNA, 640 bp, Homo sapiens
cctccataaagcaagactctttgcttagcttttcattatttcattcatttcagcatttatgtcagtgtgtaaaggatacagcaacctgttgacttagccagcacattttctcagcttagatactggtagttaacagtattatttatctcgtcttgcatgatgtacctctaagaggtttgttcatcaccaccatttcaccacagcccttctccctgttagcttagctggggtttccaaacgtcaatataacagattaaatttctttgttaaatatgaaggtgagtgagctgaagtatgacttgtcccaaaatgtaacaccttatgagacaggcctagaacctaggtcttccataccctttcatgctgcctgagtatctcagtgtggttggcagcctattaaaacacagacataactgattcaactcagggtcacaaatgtacrtatcagggaactttgttttatttcgtttggtcatatggatgctgagagaaggtagtgtaaggaccactgcttaccgttctcagctgttctcttcctaagcgcaagtagtgggaccctcacagccctggatgcattgttgtttttttttatctcgaagtaaatgactgaagaatcagcaggagttttccagaatgaaaa

SEQ ID NO: 781801 - DNA, 604 bp, Homo sapiens
ggcaaaagtagctatagttctatgagaacatcatagaacttagtctttcttaggtgaatctcagagataaaataacatactggaagaagaaataaaccacagctctatttgtcttaatctttgatttgtaataaacagaaacaatcaagggagattcttttttctgtatttgccctgctgtgtacgtcaggtgttgactacccatgtgtaatcctaaactttcaaatggaatttccctggtaacgagatggtaacataactgctaacagacccctgcatatcagtgaaccatgcataactttaacaaatgcaatgcaaagggtggtggtctgcatggattatttctatcaaaaatgaatttatgcattcaccattagaagcagatgcaagactatagcttaaaagcaaattagarttcaagctggatttgcaaacattccagtttaacatttggatagcaaaggaactcagagtttataaaatttaaatataagatagacagtcacaattctgtgcaagcagtcagggttaattcagatcgtttcctctgctcttgcattccctgatttcaagcacggcgaggctggggctgtaattacggaat

SEQ ID NO: 781802 - DNA, 607 bp, Homo sapiens
cctctctcctttgtccccaacatgcactgatcaggaagatgaaaccaagtgaaagccacttcctgtgtgggtcttaaaattcaataaaaataatatctcagaaaaaagccagaacacactttctgttcagatggaaaaatgcatgtttccctccccaccttcacctacaagctgagttcatgttatttcaacagcacatcatggacccagatgcaaatggacagtatctgaaatgcagtcccgagcaggagaaatgtagtttcatcagcgagtcatttttaaggcttgatttctatttgtatttaaacatactatcaaaaaataaatacttgcatattttgtggaatgtctgttgaaaatatgtgcccaaagtgtctaacttgggacaaatstgacctcagtccctggaaggctaccttcgatttatgcctcttgatatggcttggctgtgtcctcaccaacatctcatcttgtagttcccataatccccacatgttgtgggaggagccaggtgggaggtaattgaatcatgggggcagttacccccatgctattctcgtgatagtgagtgagtcctcatgataactgatggttttataaggggctt

SEQ ID NO: 781803 - DNA, 607 bp, Homo sapiens
cctctctcctttgtccccaacatgcactgatcaggaagatgaaaccaagtgaaagccacttcctgtgtgggtcttaaaattcaataaaaataatatctcagaaaaaagccagaacacactttctgttcagatggaaaaatgcatgtttccctccccaccttcacctacaagctgagttcatgttatttcaacagcacatcatggacccagatgcaaatggacagtatctgaaatgcagtcccgagcaggagaaatgtagtttcatcagcgagtcatttttaaggcttgatttctatttgtatttaaacatactatcaaaaaataaatacttgcatattttgtggaatgtctgttgaaaatatgtgcccaaagtgtctaacttgggacaaatctgacctcagtccctggaaggctaccttcgatttatgcctcttgatatggcttggctgtgtcctcaccaamatctcatcttgtagttcccataatccccacatgttgtgggaggagccaggtgggaggtaattgaatcatgggggcagttacccccatgctattctcgtgatagtgagtgagtcctcatgataactgatggttttataaggggctt

SEQ ID NO: 781804 - DNA, 565 bp, Homo sapiens
cttagatccagaatttaagatagaagtcactatgaatatatttttcccaccaccaaaaaggtgtaaaatttataaactgatcaataactatgcaacaagtgtatattttaaatacatgaaattacttttccagtttcaccatttttcttgaaaagaaagtaatcatccatatccttactagcaagaaaagctttgtttttaaaaatctcaatacaaaactaaaaacacttaaatattttgataaaacaagagagaaacattcatcttatgtcaacaagtcaaagccagtaaaaaaagcacaagaaattcaggaaaatacacatgttcaggaccatmaactaagcatgtgcagagtcctatcaaagtcatgcatcaggcctcgcggagcccagaggttctgcatgttttgcatctgaaatggacttcaggctttcatggaaaaggtttactggagaaccctgggaggcacggccagcaataggatgttcaggttttctctacttagcgatggaattgtgtcgaattcagtaaaagaggaaatgcttgagacttcgattgccgtatt

SEQ ID NO: 781805 - DNA, 622 bp, Homo sapiens
ttttccagtttcaccatttttcttgaaaagaaagtaatcatccatatccttactagcaagaaaagctttgtttttaaaaatctcaatacaaaactaaaaacacttaaatattttgataaaacaagagagaaacattcatcttatgtcaacaagtcaaagccagtaaaaaaagcacaagaaattcaggaaaatacacatgttcaggaccatcaactaagcatgtgcagagtcctatcaaagtcatgcatcaggcctcgcggagcccagaggttctgcatgttttgcatctgaaatggacttcaggctttcatggaaaaggtttactggagaaccctgggaggcacggccagcaataggatgttcaggttttctctacttagcgatggaattgtgtcgaattcagtaaaagaggaaatgcttgagacttcgattgccgtattgttcttttgtttgcttgtttttttgtyttgttttgttttttaatttttaaaaatttttttacttagaggcaaggaatagagtagattcagcatcagaggaattgacttgatggggacacagtgtgggacacagactgacatggaaagttcgaacacagaatttactgaccttgaataaatcc

SEQ ID NO: 781806 - DNA, 625 bp, Homo sapiens
cttggtacatccttggctgcttttgaactgtatgtaaaataccatcaacctttctgcattcatttgtgtctggcttctttccttccaccttatgtttgcagatatctaccatacatgtatagtacctgttgtttctttccttttatacacagagttattatacagccctgaaccagcatcacctgggaacatgctagaaatgcacactctggggtcccacaacctgtctgaatcatcccccacctgggggctgctttacatctgttctttgtggcatccctcccctacccgtcacccagagccttgttttctagtaccctgcgtgcatattgcagaagcagctcaggctttggaatcagcagagctaactttgaggttttttggctctgccaattgataagctataaaattaggtgggtatttatgttctgratcatctatcaaatgggtgcaagggtgatgcccacctcaatagagagaagcaacacaattaaatacatgcaaagacctttgtagattataaagtgcttataaggttagttttttttctagttaatatttgtgttcatgacttggttttctaattacattgtacattcctgtacggctaaagagcttttcatat

SEQ ID NO: 781807 - DNA, 613 bp, Homo sapiens
ttttttatatgcttgttggccacatatatgtcttcttttgagaagtgtctgttcacgtcctttgcccactttttaatggggtggtttgtttttttcttgtaaatttgcttaagttcctgattattagacctttaccagatgcatagttttcaaatattttctcccattctgtaggttgtttactctgttgatcatttcttttgctatgcagaagctctgaagtttaattagcttccacttgtcaaattttgcttgtgttgcaattgcttttggtatctttttcatgaaatctttgccattcctgtgtccaggatggtattgcctaggttgtcttccagggtttttayggttttgggttttacgtctttaatctttcttgagttgatttttgtacatgttgtaagaaaggggtccagcttcaatcttctgcatatggtcagccagttatcctagcaccatttcttgaatagggagtcttttccccactgcttgtttttgtcagctttatcaatgctaagatgattgtagatgtgtgaccttatttctgggctctctattgtgttccattggacgatgagcctgtttttgtaccattaccatggtattttggttg

SEQ ID NO: 781808 - DNA, 636 bp, Homo sapiens
catgggaattatgggagctatataattaaagatgagatttggctggggacatggagccaagccatatcagagtgttatgagataatagaaaggaatgaagtactgataaatgctataacttggataaatcttgaaaacattatgctaagtgaaaggagccaattataagaaaccacacatttgtgattctcttcatttaaaatgttcagaataggcagatcgatggcaacatagattagtggttgtcaggggcagggtaggggaaggggaaaattgggaatgactgctaaygggcgtgcagtttcttttcagggtgatgaaaatgttctaaaattagatagtggtaagggttgcataactctgtgaatatactaagagccactgaattgttgaagttaaaagtgaatgacatctcaataaagctgtcataaaaatttccaggaaaacataattcataagaagaaatcaatcaatcaaaattcacccataattggcacagacattagatttatgcaaacaagggcaataaagtagttataattgtattatagcggtattataactgtatatgttcaaaaatttaagtagatatgatacaaaaagacctaaattaaactcaaaatgaaactataatgc

SEQ ID NO: 781809 - DNA, 619 bp, Homo sapiens
aacacttaaatgtcactgtctgacagctttgaagagagtagtggttcccctagcatgcagctggagatctgagaacagacagactgcctcctcaagtgggtccctgacccccgagtagcctaactgggaggcacccaccagtggggcagactgacacctcacacggccaggtactcctctgagacaaaatttccacaggaaagatcaggcagcaacatttgctgttcaccaatatccactgttctgcagcctccgctgctgatacccaggcaaacagggtctggagaggacctccagcaaactccaacagaccttcacctgagggtcctgactgtyagaaggaaaactaacaaacagaaaggacatccacaccaaaaccccatctgtacgtcaccatcatcaaagaccaaaggtagataaaaccacaaagatggggaaaaaacagagcagaagaactggaaactctaaaaatcagaatgcctctcctcctccaaaggaacgtagctcctcaccagcaacagaacaaagctggatggaagatgattttgatgagttgagagaagaaggcttcagatgatcaaacgactcagagctaaaggaggaagtttgaacccatggc

SEQ ID NO: 781810 - DNA, 592 bp, Homo sapiens
gctatttctgagttacatcctttatttgaaactgataatactaagtaaagtgatttcctgagttttgtgagcagttctagcaaattatgaaaactgaaaggggagattcataggttccccttgactttgtattcaagttggactgaagtgtgggtagcctggggatsagctacttgcacctggcatcagaagtgagggcaatctcggggaatggagcccttaagctgggggtggggaagtctgcactacctctgggtagtgagtgtcagaactgatctgaaatgtaggatatgcatttgctcttccagagagaattggttggtgtgagaaaaaagtctgcccatttggtatcagaaatgctgtaaataaaaaatagtgcagaatgcaacagatttgggtttgaatcatgactctgtcactttctagccatgtggcctttgtgatctttcatacattagttaatatctgtcctccttcttaaaataggactaatctctaccctataaggtgctggtggttgttctttgagggctaaaggatgcaatgacatttcaaatctcttagcacagtgtgtctggaatgtaggtgggta

SEQ ID NO: 781811 - DNA, 590 bp, Homo sapiens
gccactctaaaaatcatgttttctggtttggttttttcaatttttgatcatagttttaattctggaagaagtatatgaaagtaggtcattaagattttatagaacacaacaaaaaaagaaacaggaaataaatgttataaccaaagacatgttagcagagttgtcttgtttttgtgtggctgtgacttaargatctgattactgaacctcaatctatctaaatgttaagtgattacaaaggaacacgattcagtttataaggctttagatgagctccaaggactacacggcatacctagcccaagcacatcttattatgagaattttaaataatctgcagcaatgtttagatcaaaggtgttttaagtggggatttggacctttaaggagctggaaacagaactgtgtgtgtcctttttgttcatgacagagtgcagcactttcttctcattcttaaagggttctgagcccaaacacagtcactgcttaactgacaacctagcaccaaatcccagctctgttcctcacgacagagttcaaagtttatatggtttctcatctctgacataaaaatagcagcaatagcagcc

SEQ ID NO: 781812 - DNA, 636 bp, Homo sapiens
aggacatttgtgttaaaaaggaaattagagttgcagtaaactttcaatgctgcacacaaaaaaaagacatttgatttttcagtagaaattgtcctacatgtgctttattgatttgctattgaaagaatagggttttttttttttttttttttttttttaaatgtgcagtgttgaatcatttcttcatagtgctcccccgagttgggactagggcytcaatttcacttcttaaaaaaaatcatcatatatttgatatgcccagactgcatacgattttaagcggagtacaactactattgtaaagctaatgtgaagatattattaaaaaggtttttttttccagaaatttggtgtcttcaaattataccttcaccttgacatttgaatatccagccattttgtttcttaatggtataaaattccattttcaataacttattggtgctgaaattgttcactagctgtggtctgacctagttaatttacaaatacagattgaataggacctactagagcagcatttatagagtttgatggcaaatagattaggcagaacttcatctaaaatattcttagtaaataatgttgacacgttttccataccttgtcagtttcattcaacaatttttaaatttt

SEQ ID NO: 781813 - DNA, 636 bp, Homo sapiens
aggacatttgtgttaaaaaggaaattagagttgcagtaaactttcaatgctgcacacaaaaaaaagacatttgatttttcagtagaaattgtcctacatgtgctttattgatttgctattgaaagaatagggttttttttttttttttttttttttttaaatgtgcagtgttgaatcatttcttcatagtgctcccccgagttgggactagggcttcaatttcacttcttaaaaaaaatcatcatatatttgatatgcccagactgcatacgattttaagcggagtacaactactattgtaaagctaatgtgaagatattattaaaaaggtttttttttccaraaatttggtgtcttcaaattataccttcaccttgacatttgaatatccagccattttgtttcttaatggtataaaattccattttcaataacttattggtgctgaaattgttcactagctgtggtctgacctagttaatttacaaatacagattgaataggacctactagagcagcatttatagagtttgatggcaaatagattaggcagaacttcatctaaaatattcttagtaaataatgttgacacgttttccataccttgtcagtttcattcaacaatttttaaatttt

SEQ ID NO: 781814 - DNA, 625 bp, Homo sapiens
ttaaactacaagaactgagagaaatccaagaaaaatgcattgttagttcatatatggaaaaggaagccaaagtggtatataactagaatggaacttctcatcacaggcagagcacgttcccagagcatactgcaaagtaaagaacagaaagagaaatagatctcaaaggactatagatattaaaattaatgctaaccctggaaggattatgttactatgctgttgattttggaaagtgagggaaatttcaagcctcttgaaattataaaagacacagtggtatattaacaagaacccggtggaattgacatacttgagtcagaattcaaggtttgccacttaaccagcttgtaacctcattacttaaaggtctcttgccctctgttttcttatctataaaatagaaagatatgctttctttgaatgactatascgttgaatcatccaaaaagcacatatacacatacatgtatgtacatatatatgaatatatgtatatatacacagacatatgtagcatcaggcataagtgaatcctgagatggttaggaaaagctttcaaaagaaatggaattggatcttgaaagattaatttactaattaatatgtattgaatacttaccac

SEQ ID NO: 781815 - DNA, 565 bp, Homo sapiens
tctcagcaaggaagaattggaacactgagagactaagccagttaggtatcacaggtgaagttggggcaggctggatcttaagagaccaagtacaagttaaagttttgagggagaaaagactgagaaagcagaggacagtggatggtaagaaagagaagaaaacagatgtgctgagaaaagcagagaagtcctaacacattaagtggccatggttcctattggttcccaagctccagttctcatgaggcaccaggatgtattayagtttaccgtctttgggaatctatgagattcctatgtattctcataatattaatcctttgtatgtgtcaacttgagtgttcttgcaatcaaaagacctggcctaagatatgggcaatgtgggaaatccacatttaggcaggcagtggaaactttaaaactctgtctttagtgccagccagttacttttaatttgttttcctcatcataggaaaccttatagaattggagtgtgaatttcttggtgcaggatgggaatgcccagagcttgaggatttagggtttactggcagggctgagatct

SEQ ID NO: 781816 - DNA, 534 bp, Homo sapiens
cctaagtgaggttgccttctaactgcagagaccatgggggtgaatgaagatgagccgtgcgtgaggtcaccttctaacagcagagaccctggggcttggggtgcattagccccggctgtacctgcctgagcccaagttagcactgctgtgagccctatcaaactggggctggattttccaccaagtgtctcataccaaacaggcctaggatatttcagaaccttgtcttctagctctgctgaagtgcacaactcattgctgcaagctgcagccgccctgccgtgcagtagaaccccagagcttcctctccccatccrattcacttgcttgtctgactgtggctgggactgagtgagctgcggaccccagggacagaacggatgtccattaaagtggctttgctccatttcccatgtttgtggtgggtcacagtccctcatgtggggtcgaggtttctttgtatcttgcccctgcgagaggtgtggctgtgggagtgaggaggtggtggcaggagccaacaggtgctggccgtgg

SEQ ID NO: 781817 - DNA, 619 bp, Homo sapiens
ttgctatgcatggaaactatgctacgtcttagttttgtaacaaagagtgtttaatgcgtgtctcatttaaaacggttccctattgcagcacgtccttcactgcagttcagaaaatcactctgttgtgtatttacggtgtatttggattaaatatcaagattgtatcacaaatagcaagttatttagcctttatctagacataaatcatatataaactggtaagagagagaagagggggcagagaagtcagatacccgaacaagctcagttgttccggatgatctttagtgcctggcatggagccagcacaggctytgccgtcaggattcacctccctcctcagtcaccagatggggactgattggttttattttggggattgactctgctttcacattttaacgtgcatacctatcacggcggcctcctgtgttgctgttgtgttgagtgctgattgtatgtatgtaggcatgtgcgtgtatgcatgtgtatgtatttgtagtgcacatacgtgtgcatgtgtgtgtgtatgtgcacgtgtgtgtacgtgtgtgtccatatatctgtgtgcaggtgtgtatgcatgtatgtgtgagcatgtgtgtgcgtgtgtgcaggt

SEQ ID NO: 781818 - DNA, 628 bp, Homo sapiens
aatcttgaatttataaatcctggtcaaaagcgagttaaagagatttttaaacaattacacaaagtaattcttgtgttttatttattcagtttatattgagttttttgcagctcttactctcctcttcttttgtgtttgaaaatttaaaaagtgatgctgtttggacacgagatttgttttgtaaacatgaaatttagaatgtctggggattctattaacactttttgaaaagatattgccttgttctagagttcttgagctattatataattgaagtaaatagcctgagaacatarggatttggtgtggaatacatggaagataaagtgatcaagcaagtttaaaatatacaattagtacctaaaataaagtgagtattgttttacatcttcaatctagtagtcggcaaataataaaaaaaggtcaaaagtcccaattatatagtaactatcgaactggaaaaagaaatgaatttgactcttactacttaaaacttttagctgtttatagtaatttaaaccaattgaaaataaatgttccagccagcaaaaatcctttctaagaactatgtgtggtaagaggatacaataaactaatcaaacaaagtttctgaagtctcattaaccac

SEQ ID NO: 781819 - DNA, 518 bp, Homo sapiens
tgtattgatttttttccctgtttatcctgcttgggattcatttagctttctgcattgtaagttatagtttttaccaaattcggaatttttttagtccttattcaagtgctttttcttcctctgtgactctaactatacgtttgttagaatgctagatactgttccataggtcagtgaggttctgggtttttcctcagttttttttttcccatttgtctttcattttggatagtttatattgctgtgtcttcagattcatggatcttttcttctacagctaagcttatttgttcaatttttcctttcagatgctgtatttttctgctktagaagccatattggtttctattttgtattttccatttttctcatcatataaatattttcagtgaaatcttttaaaatatttgtaatagcatttaaaaggctgtttgtctgctacatctgtcttctctgtcatttctgggactctttgtctattaatcatttttctccttgttaggtttctgtgtcttttt

SEQ ID NO: 781820 - DNA, 637 bp, Homo sapiens
ttggatgctgaaaacagaggctcatttccccctacatcctcctagtccaggaagaatcttattcctgaatattatagtaaaactcttgttatctagagaggtttaaatgttcagatagaaggggaaagctgatgacgggtaaaatcacataaawgattattatattcttgtgtgatttctccaagacttttcagtatctgtttgaaaaaaaaaaagcatgtgaaaccttggcacgcattagaataatttgattaatgtatacaatgagttgattgctatcaataatcacactattttgtgccatcatgtcaatgtttcttaagatggtttctatgaactaaccttgccaacacgaaaaaagctagattatggatttcttttcagcatgaagtagaattataattggaaagtaatacagttaaattataaaaccttaaaatcttagataaggaagtcatcttacagatactagagtttactgcctttcagtttagaaggagtgagtaaactaaaacaaagagaaaggaaggatctgaccaggttcataagtaggtacgttagtgctaccaccacagccccattcagtcgccttaacacacacgtctccttctttctgtttcaagcaacccctactgga

SEQ ID NO: 781821 - DNA, 637 bp, Homo sapiens
ttggatgctgaaaacagaggctcatttccccctacatcctcctagtccaggaagaatcttattcctgaatattatagtaaaactcttgttatctagagaggtttaaatgttcagatagaaggggaaagctgatgacgggtaaaatcacataaatgattattatattcttgtgtgatttctccaagacttttcagtatytgtttgaaaaaaaaaaagcatgtgaaaccttggcacgcattagaataatttgattaatgtatacaatgagttgattgctatcaataatcacactattttgtgccatcatgtcaatgtttcttaagatggtttctatgaactaaccttgccaacacgaaaaaagctagattatggatttcttttcagcatgaagtagaattataattggaaagtaatacagttaaattataaaaccttaaaatcttagataaggaagtcatcttacagatactagagtttactgcctttcagtttagaaggagtgagtaaactaaaacaaagagaaaggaaggatctgaccaggttcataagtaggtacgttagtgctaccaccacagccccattcagtcgccttaacacacacgtctccttctttctgtttcaagcaacccctactgga

SEQ ID NO: 781822 - DNA, 637 bp, Homo sapiens
ttggatgctgaaaacagaggctcatttccccctacatcctcctagtccaggaagaatcttattcctgaatattatagtaaaactcttgttatctagagaggtttaaatgttcagatagaaggggaaagctgatgacgggtaaaatcacataaatgattattatattcttgtgtgatttctccaagacttttcagtatctgtttgaaaaaaaaaaagcatgtgaaaccttggcacgcattagaataatttgattaatgtatacaatgagttgattgctatcaataatcacwctattttgtgccatcatgtcaatgtttcttaagatggtttctatgaactaaccttgccaacacgaaaaaagctagattatggatttcttttcagcatgaagtagaattataattggaaagtaatacagttaaattataaaaccttaaaatcttagataaggaagtcatcttacagatactagagtttactgcctttcagtttagaaggagtgagtaaactaaaacaaagagaaaggaaggatctgaccaggttcataagtaggtacgttagtgctaccaccacagccccattcagtcgccttaacacacacgtctccttctttctgtttcaagcaacccctactgga

SEQ ID NO: 781823 - DNA, 622 bp, Homo sapiens
tctgaatcatggacaatgtacgtttgtattcagaattgtttctgaagcatatatctagttgagaattgattttctaaacagagaaacacaggacagtgaccccaaatgggtgctgagacaaggggagctactgacttagacctaatcaccgtttttatatgtttgttgtaattaaagtctaaaattactgatactgatcttttttctgtaagagaacagaaatctatcaacaaaataatatctacagcacctgctagttctaaaagtygagcatatttctagtagacaaggaagcagtagtttctccaagaatatggctctctttggcatccacatttaaaaagttcccttgccaagagcctgaagagttggtctttagctttttactttatggatgaattctgggaatttggtgaaaatattaatcatatcacgattccaccaaaataagtgatttggttatatttaaaacttcacaagaacttacgactgtgtgtatttgaaggttacctatgtacagacacaaacatatgtagtatactcaatgggacagggtagagatgtcagctgaataaacattcttatccaaataataaaatactagcctgtcaaattttatcag

SEQ ID NO: 781824 - DNA, 641 bp, Homo sapiens
tcttttaagctcactctgggtcgagagctctgctgccacttcaatcttgccactcaagataattataccattcggatggttaagtaccaccagctggcctctatcatgtcaggattctattatccccagtcctatctgggaactcaattccataacagcatcttttatcatcaaccatgacctacagaggagacctaccactgagcttctcagtgatgctggtacccttctcaccagagaattccatgtctctttaataaatggcacatctgaactggaattttgacatctggggggtttccagccstacataatatggccactgtagcatacccatttccctgagcagtttgatccctacttctaccatctgccatggcagctgtggcatttttacttctcttagcgtgggccaccacttttccacaaacttctaaaagccgtcatagaagcatgatagcaatgtttcccagagtccttgctggaatgttcgatcctctctccctggagactgctctcaaatcaataaactctctcatacaaatttactttccactctccttttgttcagcatcctcagaaggcagtcccatcagtactgtcttgttccagctgcttcatgttggcagggttctacagct

SEQ ID NO: 781825 - DNA, 641 bp, Homo sapiens
tcttttaagctcactctgggtcgagagctctgctgccacttcaatcttgccactcaagataattataccattcggatggttaagtaccaccagctggcctctatcatgtcaggattctattatccccagtcctatctgggaactcaattccataacagcatcttttatcatcaaccatgacctacagaggagacctaccactgagcttctcagtgatgctggtacccttctcaccagagaattccatgtctctttaataaatggcacatctgaactggaattttgacatctggggggtttccagccgtacataatatggccactgtagcatacccatttccctgagcagtttgatccctacttctaccatctgccatggcagctgtggcatttttacttctcttagcgtgggccaccacttttccacaaacttctaaaagccgtcatagaagcatgatagcaatgtttcccagagtccttgctggaatgttcgatcctctctcyctggagactgctctcaaatcaataaactctctcatacaaatttactttccactctccttttgttcagcatcctcagaaggcagtcccatcagtactgtcttgttccagctgcttcatgttggcagggttctacagct

SEQ ID NO: 781826 - DNA, 585 bp, Homo sapiens
gattttgggaaggtgggttggagtgtaattgggagagttctcaataccaaaataaggagtttaatgttaattctgaaagaaataggaagtatttttgtatagatttccattgaaggtggaacaaagaatgcgacttgattggaaaggttagtgacaacaagatggatgataaaaggagtgccattcaggaggatttgatttttcttttagcaggtggctagattgcatgggagataaagtagaagacatttagaagacaataagatcaacaggccttattgatttgatgagagtatttttagatgggatgaagagtctggatgataataccaatgagattaagaacactggagggaaaatagatttagaaagaacttactaggagaacatttttgttagtattatgaatgacttacyttataaaagttcatatgtacatggatagcaaacatgtctaatgtatatatgtgtgtatattcatatatatctagaaccagcgtacatttattcacctgacagacacttactaatgacttttgggtagcaggccctatactcatgctcaaagcacagaggtggacaaga

SEQ ID NO: 781827 - DNA, 596 bp, Homo sapiens
tagagtttttccatctctacagtttcttggaataaagatgggaatctaaaatatgggaatgcctacttaggaggctgaggtgggaggatcatttaagcctgggagatcaaaatcagtctgggcaacaaggcaagaccccatctcaaacaaacaaacaaacaaagactggcttgctccacttgctctggagcctgaggaggtgatcctgggagaactgacaaaagctggcagaaggcaggaattcttaacaaagccagttatcctgggtctctgtctacagtgtctggttgagagaggaagacaaaaaacttttccttattccttcctttccaaattcagattggcagaagaaaaatgtaacaattggttctttgawttgtgacccttttgaatttggatctggctactccttggtcactgatccacacattcaggaatggttcttgttttccttgtttctcttttgtattatttgttataaggagaaaattcacagtaagattctccttttattttcttttatgtcttgagagctcagctttgtgactagtgaaaatattatctctggtctctgccagccattgggggtgcaagtt

SEQ ID NO: 781828 - DNA, 591 bp, Homo sapiens
aaatcttttgttactctggtatggtttcacagttaattgtgatcctcttttatcaagtgtttaaacattttgacatttttgacaactttctgaaatcaaatttttcttttcttttttcttttgagaaggagtctcgytctatcgcccaggctgaagtgcagtggcgcaatctcagctcactgcaacttctgcctcggggtttaaggattctcctgcctcagcctcccaagtagcagagattacaggtgtccaccaccacacccagctaatttttgtattttagtatagacggggtttcaccatgttggccagggtggtctcgaactcctgacctgaagtgatccacctgcctcagcctcccaaagtgctgggattacaggcgtgagccactgcacccagccagaagtgttcaaaatgggaccctgaaatgtctgaaaagcatttatcctctcaccttataaaaagagagatcctaaactaattagacttatttgggatgctgaacgtacatgggatgcactgttaaataagagattatatttaacccttctttgagctatatttgttatgttattaatatgactatttcca

SEQ ID NO: 781829 - DNA, 555 bp, Homo sapiens
tgcgcccagccgtatgttcgagaatattcttaacagcagtgttgaaattataaagaattagaacaaatttaatcatttggggactgattaaattgtggcacattcattagaatataattcacacttttaaaataatgaagtagatgtacaagtagtggaaggatatctgtgatatgttactgaataaaaaagcaagttgcagcataatgtattagttatgatacaatatggttaacaaaaataacgtatgtctgtattttacaatgaaaggtatagcagggtagaaactgaattgttaaaaatggtcacatcttgctgggtgtggtggctcactcktgtaatcctagcactttgggaggctgaggtgggatgatcacttgagctcaggagttcaggaccagcctgggcaacatagtgagaccctgtctctatttttaaaataaaacaaaccaaaaaaattaaagaaaaagaaaaaaaaggttacatctaaggagggaaagttgcagggaaaagtaaagaaacatcataattttggtaaaatttagtaattttcaa

SEQ ID NO: 781830 - DNA, 548 bp, Homo sapiens
cttgaccacccgggctcaagtgatactcttgcatcaccctcctgagtatctaggactataggcaggtgccaccgcgccttgctaatttttgctttttttttttcgtagagactgtgtttcgccatgttctcaggctggtcttgaactcctgggctcaagcgaccggcctatctcactctcccaaagtgctgggattacaggcataagtcaccatgcccggcctgacagaaacatttttagaagtgagaaaaktacattcctaaatgtgttgcatggatagaaattgatttgagaaaaatctcaagaagatcaagttaaggagacagagttgcaaaacatgtagtccaattgtctcacagttaaaattcttcccatctgaagatgctatcttctgtttacctgattttctcattgaaattattgaactgtaatttatatataataaatttcaatcagttttaagtatacaataagtttttacaaatgacagaaacaccactatacatttagttttaaggcttctgtgtcactcttgctaaggatctgat

SEQ ID NO: 781831 - DNA, 463 bp, Homo sapiens
agttacccagttaaattttgtattttttgtagacagggttttgccatattggctaggctggtctcgaacttctgggctcaagtgttctgcccgtctcggcctcccaaagtgtggggattacagatgtaagccatggcacctggcctaggaaatgacattataaacatctatttcatttgaccttttttccccaagcagcctgtattacttttgcaactttttgtattaaaaaaatcactttaagacaaaaagagtaagatggaaagtcacagctatttcaagggaatcatttgccagatsttgactttatcttcatgtgaactctttcccaagagatctttaccatggctcatctccctcattacaaaagaaaggcaaatttctcaatcatcctgaactttactataatgcttcaagtataaacacctccagcgtacaaaacgaagggaaaaactgaagtagt

SEQ ID NO: 781832 - DNA, 552 bp, Homo sapiens
actacttttttgaaaatctagttctatgtaatatatttctgtggcatcaaattttagttgattgtattagtcaataggaagtggtggaaaatttctaaataaattcaactattaaataaatgcaagttccactaaatcttagtgtttggaacactgaagaacccagaatgaaacaaaattagactgaatgtaaatgtcatttaaaaatctaactgggggctgggsacagtggctcacgtctgtaatcccaaaacttcaggaggccgaggcaggtggatcacctgaggtcaggagtttgggaccagccccgctaacatggtgaaaccccatctctactaaaaatacaaaagttagctgggcgtggtggtgtgtgcctgtagtcccagctacttgggaagtgaggcacaagaatcgcttgaacctgggaagcagaggttgcagtgagctgagactgcaccactgcactccagcctgggcttcagagcagaactatctgaaaaaaaaaaattaaaaatctaactcggttacagaggctgcttgttgcatagagcc

SEQ ID NO: 781833 - DNA, 622 bp, Homo sapiens
acaggatccaaattctatacaccaaaagtaattgtattttcatatagaataaatcattgcaagatgaactttctgaaagtatcgtttacagtaccaaaaaaatgcttagggacagattaaaacagatgtctgagcctctacagtgaaactacaaaacaatgtggaaagagtagatctaagtaaatgaatagacattttacatgcatggattgaaagactgaatatttttaagatgtcagttcttcacaaattgatttttagattcagcacaataattctagccgatttttgggatagaaattgacatgctcagaggactgatgtatctgacttctagacttcctgcatagtcctgacttaccattttttgactagatggtagtacaagagtgatagacattcagtagaaagcctactttgaattttgttctyttccctggctagtaatgtgcccatagaatactcaatcttgcaatgctgggcagcagcagcaagccgtagcttcccgtcagccacagcatcaagagggtaaaaactgattcttgctctttgtgaagaacactattcctgctaaaccatcaagtattgatgcccttagtgccttcaaccaatgcttctactc

SEQ ID NO: 781834 - DNA, 622 bp, Homo sapiens
aacttttatcccagattaagcactgcagggtaatcgaaaaagcacaggctttgcagttaggaaaacctacttaaaatcttgattttgctacttgctaattgtgtgaccttggtcaagagtagttctaaaatctgaaaaatggtggtttctacctcattttgttgtaagaattaaaaaagaaccatatgtaaagtgcttggtgggatgctagccagttcaagtagctggtgtttaatgcagttataataagcatctattaaggttaacatattaaagtgctcaatttagactcaagattcttatcttaaratgcatctaatcctgatacattataattgactagggcaaccattcccatgccctttatgttagaaaaattccatggtgattttactggtgcatgattattggatggttattgttaatttccattcatgggtcataattcattaaccacaggtgccattttgaatgaccttttgacttccacatcgcaaacaatgccagcatgaagcaaagtgaggtctgttgatcataagcgataagtacatttttgaggtactttgtgattgccaaagctgagtgcagtctcagtgactcttaggttatcaaaacccctttc

SEQ ID NO: 781835 - DNA, 585 bp, Homo sapiens
atacatgtttgcattattatatttttgagccataatttagtaaaaattaaaaaatggtaatctttttagcagctgatacttcaaaaacaaacacctggtttactttccttttctacttctacctgtactataggcatttggatttgagacccttaactcagtgatttgccttagcaaatgacaagaagaaatctggctttgctgtctacatgcttttaaaataatgagtggaagctgatgatgactgacttctctggctgggtatagacagattactatatttggcatgacagtagtctttggctaggtagagactatttattttttcattcaccttttctcagaattctaaaatttttggtgcccctttcaagaggctacccattttaaataatttagagcaagacttgaataaaatrtaaataaatattatattatgttcccagctaagataagcatattcaacttttgtgttttctaaaaaatatacatatagtcatgttcttaatattatgacagtatctcctgtcaaagttgtttgtgcttaattgtcacaattattgatagcaattatgattttcttga

SEQ ID NO: 781836 - DNA, 486 bp, Homo sapiens
catcatgtaagtctggtgtgatatacagttcagatgagctctcagaaaatttccagtctgtgatcacagtagtatcactttagcaatcattaagaacaattaatctatactcattggagaataaattaaaatacaaaagaatgtagtagatataaasaagtcattgcttttcatatgataaaatacagtttataattagcatctttgttatttttcctttgattttgtttcatgtgtaaattgggttataaattggatcttgagttataaattagatcttatcaggtttttctagcccacatgacacgtagtataaagtagatatgggggcaatagagcaatctcctttctttacatcagtgagaaaatagaaatctgttgtcttttgtttagacatatgactgattttatgtgaagactgggatcaaatatgaccttcagtttcattcagacacaattatgataatagtgtagaatactgctaca

SEQ ID NO: 781837 - DNA, 518 bp, Homo sapiens
aatggcggccatgaaggaattggtcaataaattggagctatactattattagctaaagtgggggtcttaagtgaaatagttaaaatgtaaatctggtcatgtgacttttagaatcaggtctaaattccttaccacagcctgcaagacctcatgtgatctgattcttggccaccatgcttcactccactccaccaaagcaaactcacatcttaggctyaggctcttgctgtttcccctgcctggaattcccctctcctcaatttacacatgactttctatttcattttattcatatttatgtaaaacattacctcctcagaaagatatttcctagccatgcagctaaaataataaccaccatcacattgtcccctaagtctggtttctatttgatgcaaagcactcaccaatctatagaattatacactgtctgtctctcccaagagaatgcgagccccttgagggtaaggaccttgtgatgttccacagttgtatcctcagcatctaaaaatatgcct

SEQ ID NO: 781838 - DNA, 632 bp, Homo sapiens
ggaatgttgaccattttagagtttgtcacctgacctaagctacttcatgttccttttagggggcctacccctgcaaaaaaggcttttgatcttttcttctgcacttgcagtggggaggttatgaatcagaggctgctgtagctcttctgatcccccacggatgaatctggctgtgttggaagtcatcaagtgagagaattgagagaaagcaagtmtggatgatactttatggaacccaaattgagccatgcctgacgaaaactctttaccttggatcaaaggagatgacactttgagtgaatgaattacctctttcactagagctattttgaattggtaattttttaaagaaagggtcctaactgacatctaaaaattctgttcgagagtatcagaactttctggatttttctttcctcattcagaatgttttctagtagatttatagttaaaaggtccaaccagcgtaaaagcttctctttttaaaaaataaaacttggcaaagatactcatttcaaatggtgcctcaggtcactcaactttttaggaggtctcatttcacagcagttacaaatatccatgcatttgaaactgcaggcaaactttttttttcttttctcttttcttttttg

SEQ ID NO: 781839 - DNA, 634 bp, Homo sapiens
gaagagtttttcctgggttttcttctggaacctttacagtttccggtcttacatttaagtctttaatccatgttgagttaatatttgcatacggctagagataggattcagtttcattcttctgcatgtggctatccaattttcccagcacaatttattgagcaagatgtcctttccctagtgtatgttttttgtcarctttgtcaaagattagttggctgtatgtatgtggctttatttctgagttctctattctgttctattgatctatatgtctatttttttacacaagtaccatgctgtttctgggtactatagccttgtagtataatttgaagtcagttaatgagatgtttccaggtttgttcttttgcttcagattgctgtcattctttgggatcttttttcggttccatatagattttaggattgtgttttctaattctgtaaaaaatgacatcggcattttgatagaagttgcattgaatctgtaaattaccttgggcagtatgatcattttaaagatattgattcttccaatccatgaacttgggctgtcttttcatttgtttgtgtcatctacaatctctttcattcatgttttgcagtgtttcttgtggacacctttcaccta

SEQ ID NO: 781840 - DNA, 634 bp, Homo sapiens
gaagagtttttcctgggttttcttctggaacctttacagtttccggtcttacatttaagtctttaatccatgttgagttaatatttgcatacggctagagataggattcagtttcattcttctgcatgtggctatccaattttcccagcacaatttattgagcaagatgtcctttccctagtgtatgttttttgtcagctttgtcaaagattagttggctgtatgtatgtggctttatttctgagttctctattctgttctattgatctatatgtctatttttttacacaagtaccatgctgtttctgggtactatagccttgtagtataatttgaagtcagttaatgagatgtttccaggtttgttcttttgcttcagattgctgtcattctttgggatcttttttcggttccatatagattttaggattgtgttttctaattctgtaaaaaatgacatcggcattttgatagaagttgcattgaatctgyaaattaccttgggcagtatgatcattttaaagatattgattcttccaatccatgaacttgggctgtcttttcatttgtttgtgtcatctacaatctctttcattcatgttttgcagtgtttcttgtggacacctttcaccta

SEQ ID NO: 781841 - DNA, 564 bp, Homo sapiens
aggattctactgaaatccttcaggagtttcctagtgctctgcctataaaggccccaatccgtatatggcctaaagagctctgcatgatcaaaaacagtgactcttacctgggggcgatgatttcacccttgcccccaccagggaacatgtggcaatatctggaaatattttcagttgttataactgaagggaagggatgtgaatggcatctagtgtgtagaggccagagggtgctgctaaaattgtgcaaagggccactccccacaacagagaatcatccagccccaaatgttaatcaacagtgccaaggtagagaacctcgatattagcccctttctttctctggtttcttctcatatccctcactccttcctgtactgtgttcctattttattttcctttccrttctttaaatgggcccctatccttcccacaacttggactttgccattctattcctgctgccagaagctcctcctccagattcctctccctttcctggttaactattatttctccagctctcagcaattaaagcaattttttcagactgtctcgccccat

SEQ ID NO: 781842 - DNA, 625 bp, Homo sapiens
aggaatattcataattgatccaatggatctactcaaaaatggctgtgggtttttctagggagtgtttgtcctctgtaataggaagacacagtgacacagccattccttcttttaacaaaatttattcaccatctactgagcaccaggcactgtgtttttttcgagatatttggacatcagtgaaatgcagtagtcctgcctttttaaaaggaagccaaatgaatgctaaccctccctgaattagccacacgttgtgtaattgaagactatgttgtccttcaatttcaataagaactgcaatgggtcattgcagagcatgacatttctccctatgagatattaycataaaaaccatgacaggaacatgaaatgccagtggccttaatttctcccatgcacactatatccacacataaaacgctttgggtagaagtcatacagatgtgaacccacagcaggatgattttgaagtttctgtcaaaggaaaagaaagggagataattgttttcccatttacgggcagcctgtccttgggtggtctcaaatccagcctctgagctacagctgggcagggcagggccaacccatgtccactgcaggaacaaagcccattgtgctggccttc

SEQ ID NO: 781843 - DNA, 597 bp, Homo sapiens
acatttctaggaaacaaatttaggaactatatgtcactaagaaacagtaacccacactatgggcaaatcatgtaacctcttcaggcaacagtgttttcattggcaaaggagttttgaaacagctattttgcagaggtcttataagtaataagtgacaaaaatgggagtgaggattgcatagtrggaagaactcagaatctggtttcacacagcactggatctgagtgctagctatactacttactagtttcatgatcttggaaaaattacatgaatcctgcgaatttaatgaggaaatgcttacaaagcatgaagcacagtgcctggcaaaaaacaaattccctgtgtttggtagctgtttattataattattattacaaaaagtatgtgaaaatatctgacacaacatatgttacatagaaacacaaaaatagtgttttcttccttttctagtttttttccctccttttttcctaatgtatattaaggttttgacattggaaaatgtgtcatggcaaatgttctaactagtaccctcagtgtctcctggtgcaggaagcaaaaatcagattatcagttctatcttgacaaggacaa

SEQ ID NO: 781844 - DNA, 624 bp, Homo sapiens
aaacccctacatattttgtcacagaagtcttctgtattattatggtgtaagagaacaggaaaaatgcatgttgactgttttttccacactcccagtccacaaaagttttctccacttatgaacaaataatgtgtgtgtgtgtttttttgtttttttgtttttttgtttttcctgagacagggtctcactctgtcatccaggctggggtgcagtggtgtgatcatggctcactgcagcttcaatctcccaggtccaagtgatccttctacctcagcctcccaagtagctgggaccacaggtgtgtgccaccatamccagttaatttttaaattttttgtagagacagggtctccctatgttgcccaggctggttttgaacttctgaagcgatcctctcacctcagcctccaaaagtcctgggataacaggcatgagccactgtgcctggccatgaatacaaagaattttaacagacacaagatgcagatatgaaggaatagatgaatgaatagacgcgtgctggacaggatggagtgaagggatgtgtgaaaaggtaggaatgagtgggtaagcggaggaggacagtgctgctcacagaagttcatgagctaaatggtaaagtga

SEQ ID NO: 781845 - DNA, 642 bp, Homo sapiens
atgggatcccagtatttattgagtttcctcattcataaaatggggataataatagtaaatgagttgacacgcgctaagacagtggaatagtggctggcacagataagccctcggtaaatggtagccaataatgatagagtatgctgtaagatatctttctctccctctgcttctcaacaagtctctaatcaattattccactttataaacaaggaaatagaactcaaagacattaagcacttttcccaaaggtcgcttagcaagtaaatgggagagaccctatgaccaggatgaaagcaagaaattcccacaagaggactcattccaactcatatcttgtgaaaaggttcccaatgcccagctcagatcaactgcctcaatttacagtgtgagtgtgctcacctcctttggggactgtatatccagaggaccctcctcaataaaacactttataaataacatccttccatggatgagggaaaggagrtaagatctgtaatgaataagcaggaactttgaagactcagtgactcagtgagtaataaagactcagtgacttctgatcctgtcctaactgccactccttgttgtccccaagaaagcggcttcctgctctctgaggaggaccccttccctggaagg

SEQ ID NO: 781846 - DNA, 520 bp, Homo sapiens
ggggatggagtgggaagatgatcttcccctggagttcagccatccccggcttatctgctttccaaccgtcctcagccgaactcctcctgacattcagatgctccttctcttctctcctctgccatgccattttgctactctgctgctcttctgttcctctgcttgtagagcttggggtttatatgggcacaggataggggtgtggcaggccagagtggtcttggaaaaggcaacatttgggcatgaaaatgggaatgcttgctcccatttagggccatggatttccaggcttcagggtgggcctttgttggggaactgccctcttctacccagtatttccttgcctgtatctgtatcatttccmccctctaagaggcccatctaattgccattagaatatggacaatgacctatcttagctacttcctgctgacagaggacattgtttttggggaaaacagaagtcagattcctcccagaggtctatctaaggatccctggggaaagggagtcatcatcc

SEQ ID NO: 781847 - DNA, 559 bp, Homo sapiens
ctcatggtgtatctgtaccacattttcttatccagtcgacactgatgggcgcctaggttgattccatgtctttgctattgtgaatagtgctctgatgaacatacgagggcttgtgtctttttctgtacaatgatttttattaatatatatccagtaatgggattgctgggttgaatggtagttctgttttaagttatttgagaaatcaccaaactgcttttcacagtggctgaactaatttacattcccaccaacagtgtatatctgttccctttttctctacagcrtcaccagcatgttatttttttgactttttactaatagccattctgactggtgtgagacagtaactcattttgggtttgatttgcatttctctgatgattagtgatattgagcattttttcatgtgtttgttggctgcttatatgtcttcttttgaggaacgtatgttcatgtcttttgcctattttttaatggggttgtttttggctgttcaactgtttaaggcacttacagattctggatattagacctttgctggatgcatagtttgcaa

SEQ ID NO: 781848 - DNA, 643 bp, Homo sapiens
cccattgagtcaaaggctcttgaatccactgctgacctgcggtcacatagtcaaattcatctcagcctttactgcatcctataagctttcctgactcaaacccacattcatcccctatccatctcaaagctatgggattttgtgaatagaacccatggtaattttttcaaacactccatctatagagatctgtgtacctgaagaagcagtagaactacagggagcctgatagggcaggataactccaaagttagttaagagtgaaatcagggctaccaaagtttaagtcagcccaagacagactgaccatgcccaacctgtatatgatgaccctgtacgtctgagcacagggccgctcaccatcacccctccatctcagtgcctgagccctccatcacctgagcacygtgcttctaaccattattgcacccccagaccccagtctgccttcagtctggcattaaacaaagagcactacatcttttcccgatggccaaccacacagatccaccctggcacatgcacacctgaaaggtaaggcccctgagtcaacgctgaataagctcttatttccctaatgcgacttgacctcagaagtccttttcaccaatgcagcttaatgtttttgtaaatagttcccagt

SEQ ID NO: 781849 - DNA, 643 bp, Homo sapiens
cccattgagtcaaaggctcttgaatccactgctgacctgcggtcacatagtcaaattcatctcagcctttactgcatcctataagctttcctgactcaaacccacattcatcccctatccatctcaaagctatgggattttgtgaatagaacccatggtaattttttcaaacactccatctatagagatctgtgtacctgaagaagcagtagaactacagggagcctgatagggcaggataactccaaagttagttaagagtgaaatcagggctaccaaagtttaagtcagcccaagacagactgaccatgcccaacctgtatatgatgaccctgtacgtctgagcacagggccgctcaccatcacccctccatctcagtgcctgagccctccatcacctgagcactgtgcttctaaccattattgcacccccagaccccagtctgccttcagtctggcattaaacaaagagcactacatcttttcccratggccaaccacacagatccaccctggcacatgcacacctgaaaggtaaggcccctgagtcaacgctgaataagctcttatttccctaatgcgacttgacctcagaagtccttttcaccaatgcagcttaatgtttttgtaaatagttcccagt

SEQ ID NO: 781850 - DNA, 596 bp, Homo sapiens
cctatgtccatcctggctgcctgtgggtgagggtccctgaatgtgctgatggaggagggaggaagggagcccctgagagtattgttgacggcagtggccccttcagttaagggaggagtacagtttatcacggggatagcttccatttagccaaatggaaattcacactcttacttgttactgctctagagtgataagaaattcatctgggcaaggtsgtgcacaaacagtacaccaagttccagagcctttccagaagcctcggaggacatcacctgagtgcatctgacagtcatctgtccaaccagtgcacccctcctactgcaccccgtttgtaaattgagtacattttagttactgggatcattcgcttctactgttaacttcattttctgatggtgctgtttaaattagatgttgtgattggtatgacccaatttttccatttccaaaagttgttttgcattttgtgtacatagacatatggaattattgatgatttctatggtgcctccacattttcaagcagtctgagccgagggaggaattgcatgctgccttgatgctgatggacatgatctctgctctatcgactg

SEQ ID NO: 781851 - DNA, 598 bp, Homo sapiens
  misc_feature 132, 170: n = A,T,C or G
aaagattggtcgctcttggtgacagtgaaaggcctgactgaccctccattgtccatgtctggtacagaagaaggatcactggagaaagtcaggaggcctgggcctggtgctgaccccctcaccacctccagncttggaaaggtcctcagtctcgtcatctgtaatgcaanttgaggtgattggggtaaataatttcctagacctctctggcttctaactctctaagactagcttcccccatttgttaaataggagcagcagcactggtacctattgtacagaggtggtttaggaaactcatttcatttagctcacatttcctgagtgcctgctgtgtatcaggccmtacactaggctctttaacctgaattgatgcaaaacagatatgaggtgtgaaaagaaggcatgacccatagtcataccaaagatgtgactttgctgctgaccttctccacctttcttggcactgtttgtttttgttttagatcaccaccattattgaatgcttgctacaatttttaagccagccgtatttgagagggtacttttctgacaaattttacagggttcagtcctataatgggagaaggaaaatata

SEQ ID NO: 781852 - DNA, 589 bp, Homo sapiens
  misc_feature 197: n = A,T,C or G
gcattctccaatgcaccaagtatcagatggtaagttgaaagccctcttcttgtctgtggtccctttctgcataggtgcatgccctttagccctcaccatccctggccgcctgtgggctgaagctggaagagcaggacctggcctcaggacatgctcttagcttgctctgggcatgggcttcaacagcctatcattgntggtccctctgcttctttttccaccaccttctcagaatctgcttctgaagttgctgggtgtcctgcctggggtgggtgctgcttccctactgcacactacagtcacaccctaggcctcttaccatgtccccccgcccaccacstgctccctcctctcagccaacacagaggagtgctcagagcatgcccaccgtgccatctccgttcatacagttccaccttgaagcttcaagcatctggaggctccttctcgtctgccacatctgttcatcacttttgattccttcctgtcatgcctgttccacctcttcatcccaccttttccccatcccagtcaggctgccttcatgaggttccttaggtagcagagtaattcacgctactcatgtctt

SEQ ID NO: 781853 - DNA, 602 bp, Homo sapiens
ctgcctttgctgcatcatacatatcaccagggaagtggggaaaaccagcagtgacaggtgtcacccagcttccatgcagccagaaaggccagtctcactcccatcatgacccaccaatagcactgagtttatgtccaggcagcaggrctgagatcttcccccaggctaccagcctccccactgagaaagcaagcagggctatcaggtcttgcctctccctgcctgccttattacagaggtcagctagaagcttccttcaccctttggcccctccccaattctgctggctgcctttcccaaggatccctgtgagataaggccagggatggcttccctgggcttggactggagaccaggggtgcctacagggctctttctattgcttcttctacttttatattttgctcggttccttaaatctgctttagctctaggtaaggttaaatccttctctcccatgatctgattttcaggttccctagtggggatgtgggtttggaggcagacttttctccctctcacacattgaaaactcagtttttcagctgccttgcagagtttgcagcggcaagctgcttctttcaaagggtatgtgaattctt

SEQ ID NO: 781854 - DNA, 634 bp, Homo sapiens
tggatttcctaacatctttacaaagaaagaaaaacacgatgcaggaaggtagtgtgaattctccgaaacgatctcaggattttaagagtcacaaaacccatctgatagtgctttgacaattggagcagcaatgcgatcagagaccactggacacattcttggtaactggagaaaagacccaaatcacctcaggatgtcagagaaaaggcatttactggcaagccaggagatagctcatcaccagaaatggaatttggttgacaggaagtaaaatagcctgggagagytgctgtctactcccagaacccacccaaggctcttctgtggatagcaactaccgcagcgtgcaaggcaagggactttgaaatttacaagtcgtagccactgagagggtgggaataattcgatcattcataaaaagtatattaataatcattaaaaaaataatataggtaatatgttaacatttaaaatctccaatgaaaaacactaaaacccattatattactaccactctttgaaaaccactgcaatagctcagagtttccttctgtttattatatgtgtatgtggtaacagtgagatcatattttaagtatacagttttgtctttccttttacttactgaatatct

SEQ ID NO: 781855 - DNA, 537 bp, Homo sapiens
ctttttgtttcttttgggctcaactattgatttaatttattttaagtattctggcctactgctttatttttctctatagccaaactaagtatctcagatttattttttcttctttataaaaatgtttatgccttttacactcattatcttctatttcaattatgggtaaaatttgaataaactctcctctccatatgacagttaataaaagttaatgttgattttatttgttatttcttgaatctaaagttcccaacaaaaataagatttgatttgtacatatgaacaacttgctctctgatagggtagcacatagaattttaagatcctttaattctatatttctgtaaatgtttctctaaatatagcatgtatctgatttctatggaaaaatmtgttaatgtgcatatttctgagtcccaaaacaaaggattctgattcaataggtaggtctcaggtggagcctagaagctgatgttctttaatcaatatcttgggtcattttgatgaatatatgccatgacaaagactaatcat

SEQ ID NO: 781856 - DNA, 490 bp, Homo sapiens
acccccatatcatgcaggctctgagatagagaatgggaagaaggtagttcctggacccaggataatccaagatgtaacattttatctttctgttatcttccaaagctatcacttaataataacttctgtccctcaccacatgattcatgcatgccatggtcagcatgaataactagagaactatcttgcagtaatggtccaagtgtctggagctaatcagacagaactctacaaagagaagtttcaggaaatttctcaargcatttcagtacattgatgaccaactactaaagagaattcactgagagagaaaacatcaatactcttccatagactttgtaatttcccatcagtttgtgtctctatagatcacattctttccagcacacttctgtgcttacaaatagacttattctcatgtgtttatttaatgacataaatggatccttagtaaaagagatgaagaaaaaattacatatttcaatgacat

SEQ ID NO: 781857 - DNA, 657 bp, Homo sapiens
ggagggagcaggaaggagggagagtgttcagaccttgatgcacacctgactccagtgaaaggagacagcaaggaaagattgagtaggaagagcctcctctgcagcccagctctgagaaagtctcagccaggctgatgggaagtccccaagcaagagttgattgttagaggaatcctgaattggatgggaatggattggcatgagtactccaatgtgcttggttgttggctggaagcagctttgggggagtggccgcaatgtgaatgcagtgatggatccaaaaggtggtagctgtgctgttgtcaactctgctctctgtggcatgtcctcttgaaagagatctcagtggtgcacttccatggctrccctcataggggagggccaggccacccagagagcaatgaggcatttgctgaaacacagcgagaggggagggagagcaaaacatatttttccagacccggggacagctatagtgaactgttgtctgtttattcgccagaaactcagtgtccaagcaagtgggatttgctcagctcatgtgagcatgttatctgagtttgctggcagcaggcccatagtagcagatccctcttcattacctaaggataccctgatgtgtctgttcctgtggtctcttctaccttacctccagct

SEQ ID NO: 781858 - DNA, 634 bp, Homo sapiens
ggaaaaggttaagaagcaccagcattagttgttcgccacaattagcatgttctctccctgaattgtaggttgtactctccaagaagaggtgcaagtatttcatcctaagagtagggtatgctttccttgaggtctaggaactctgttggtgagaagaccgtcagccagagtaaccttgactgtaagtcacaaaaaaatctccaactcacattggcttgagcaatagggaatttattttcttaaacactcgaggtcagagcaagagtagtccccagggttgaagatgatgccaaaaagkcccaggcttcttttcagatgtccacagtatagcctatggtcaccagataacacgatgggagctggcgatatttgcggctacctgtctctgtttttctacacagcaagtggaggtcgagggaggatatttagagtgtgagcctgagagacttcccaccaatcacagtatagaaagactccacttcagtctgatcgggcaccttgggtcatgcctccacctgtagcccagtagcagtcactgaggactggagtgagggctgctgcatggagtgtgtgtgaaggtggagaggtagggaaggagggcaggatgcagtcgggtagacaatcctcagcctct

SEQ ID NO: 781859 - DNA, 581 bp, Homo sapiens
tagctggcagttggccgcttctcgctatgtcctctcttggtgttttctctttgcacgtgcgtccctggtgtctcttctgtgcgtccaaatgtagtctttttataaggacaacagtcagattggattagggcctgccctaacggcctcatgtaaatttagccatctgtttgaaggccctatctccaaaggcagtcatattcctcggaattggggattaggyttcaacatctgaattttttttttaatttttaaaattttctttctttctttttttttttttttaagagagagggcacaattaagcccatgacaagccccagtgaattctgctgtatttttatttatttattcttagtttccacgtacaacactgaattcagctttattttgtctacagtttggttctaaaagtttaaggccaacatataatattgtatattgaatatttaaatctactaaaggctttatcaagctgtgtgttagaattgcattcccttcacaggacttctgtagcaatggaggaggaatattcctagggtgatgtaaatggattatttccccacattctaaaatcatgccac

SEQ ID NO: 781860 - DNA, 581 bp, Homo sapiens
tagctggcagttggccgcttctcgctatgtcctctcttggtgttttctctttgcacgtgcgtccctggtgtctcttctgtgcgtccaaatgtagtctttttataaggacaacagtcagattggattagggcctgccctaacggcctcatgtaaatttagccatctgtttgaaggccctatctccaaaggcagtcatattcctcggaattggggattaggtttcaacatctgaattttttttttaatttttwaaattttctttctttctttttttttttttttaagagagagggcacaattaagcccatgacaagccccagtgaattctgctgtatttttatttatttattcttagtttccacgtacaacactgaattcagctttattttgtctacagtttggttctaaaagtttaaggccaacatataatattgtatattgaatatttaaatctactaaaggctttatcaagctgtgtgttagaattgcattcccttcacaggacttctgtagcaatggaggaggaatattcctagggtgatgtaaatggattatttccccacattctaaaatcatgccac

SEQ ID NO: 781861 - DNA, 616 bp, Homo sapiens
gtttcccttcagtccagggagtggagatggtgatctaacttttctcccctttgactgcctcctgtgactttgcatttgtttctcaggaagaggaattgtgaattgccccttggtaaggcctgtgaggtttgctgcaagtggacacctgtcccctcacactgtgtatccttcatttcttgggctgatgcccattttccttattactatgtttgttacatacgtggctatagagaagtttctatgttcctatgagtctcagtatgaaacaatcagtaaaatgttatccttttttaaaatgtgaaacattcagaaatattttataatccaggaaagcttacaattgacttttaaatmaggaaagtcacagtatgtgcctcaaaggcttgttgtgaggattgaatgagattagcctggtgctgcacatggtaaactcttggaaaattctagctcttatcatccatagtgggtattattaattttcgtgtttatgccattttattcagctttttttctgtccacatggccgctgttcctggaaatccataattaagatcttagtttggcctgctttgatgctgcctctgttgttggtgggccacttgtaaattcatatgcc

SEQ ID NO: 781862 - DNA, 645 bp, Homo sapiens
tgcctgtctctctctttggttattgagaggaatgtcatcatgaagctgagggcggtggtgtgacagctggaggtggtaacttgtaataacttgtaatgtggtctagtcaggcctaaatactgtgttcttttacacttagtagtaccctaaatcccaagccatcatcatcaccaccaccatcagacttttacatttggacaatgctttatatcaaagaagcaaagcaaaacaaaacaatgtattctcatctgagctgtgcacaaattattatttccattttagagttgattaaattgctgatttgtccaaggtcacacatctggaaagcagtggagcctaggccagaactcatatcttctgacacccatgccaacattagaacaagtttctttagtagaatataaaatccagtctcaatgagcatgaaaaataaaagtaggyggatcatagtcatatcaataaaaataactggtatttattaactactcactagatgcttggcactgtgccaaaactttacagagttctctcatttaatcatcttcacaaccctttgagatgacacttttgtggaaagtgcaattgagcacagaggcacagggaggttaagtaccacacacagcttggaggtggtggaatgaagac

SEQ ID NO: 781863 - DNA, 599 bp, Homo sapiens
tggccaagatcaagtagactgtgtagtgaaagatagtcttgttcagttacaatgacattggtataacaatgggtggtctgtaccatttaacatggaactttccctccctcccttctgccctccttccctatctctctctctctttcccttccctctatctctttctctctcttttcctttccctccctccctccatttmtttctttctttctttttctttctttctttctttctttctttctttctttctttctttctttctttccttctctttctttctttttgtccttccttccttcctttgtcccttcctccttcctttcctctctctctctctttctttccttctttctttttcttcctttctttctatcctatctttctgtgtttctttatttctttcttgaattttaggctttattactgataatttggtagccactccatgaaatagttccatcaagggtcacttattgacttggaagtaaatgtacaaatcagaaaaattctgagtattgttgtattagtccattctcatgctgctaataaagacataccggacacagggtaatttataaaggaaataggtttaattgact

SEQ ID NO: 781864 - DNA, 588 bp, Homo sapiens
ttccgtagtggttgtactagtttacattcccacctgtcgtgtaaaagtgttccctttttaccacattcctatttttgattttttgattatggccattcttgcaggagtaaggtggtatcacattgtggttttgatttgcatttctctgatcattagtgatgttgagcatttttgcatacatttgttggccagttgratatcttcttttgagaattgactattcatgtccttagcccatttctcaatgggattgtttgttttttacttgctaatttgtttgagttccctgtagattctggatattagttctttatcagatatataaattgtgaagattttctcccattctgtgggttgtctgtttactctgccgattgtttcttttgctgtgcagaaactttttagtttaagtcccacctattaatgtttttgttgcatttgcttttgggttcttggtcatgaagtctttgcctaagctaatatctagaaacatttttctgatgttaccttctaggatttttatggtttcaggtcttagatttaagcccttgatccatcttgagtttatttttgaataaggtgagagat

SEQ ID NO: 781865 - DNA, 588 bp, Homo sapiens
ttccgtagtggttgtactagtttacattcccacctgtcgtgtaaaagtgttccctttttaccacattcctatttttgattttttgattatggccattcttgcaggagtaaggtggtatcacattgtggttttgatttgcatttctctgatcattagtgatgttgagcatttttgcatacatttgttggccagttggatatcttcttttgagaattgactattcatgtccttagcccatttctcaatgggattgtttgttttttacttgctaatttgtttgagttccctgtagattctggatattagttctttatcagatatataaattgtgaagattttctcccattctgtgggttgtctgtttactctgccgattgtttcttttgctgtgcagaaacyttttagtttaagtcccacctattaatgtttttgttgcatttgcttttgggttcttggtcatgaagtctttgcctaagctaatatctagaaacatttttctgatgttaccttctaggatttttatggtttcaggtcttagatttaagcccttgatccatcttgagtttatttttgaataaggtgagagat

SEQ ID NO: 781866 - DNA, 600 bp, Homo sapiens
atttttgaataaggtgagagattaggatccagtttcattattctaccagtagcttgccaattatcccagcaacatttgttgaacagggtgtcctttaccctctttgtttttgcttgctttgtcaaagatcggttggctgtaagtatttggctttatttctgagttctcaattctgttccattggtctatgtgtctatttttataccagtactgtactgttttggtgactatggctttatagtataatttgaagtcaggtaatgtgatgcattcagatttgttctttttgcttagtcttgctttggctatgtgggctcttttatgkttccatatgaattttaggattgtcttttctagttttgtgaagaatgatggtggtattttgatgggaattgcattgaatttgtagattgcttttggcagtatggccattttcacaatattgattctactcatccatgaacatgggatgtgtttccatttgtttgtgtcatccatgatttctttcagcagtgttttgtagtgttccttgtagatgtcttttacctctttggttaggtatattcctaaatatttaattgttttgctgctattgtaaaa

SEQ ID NO: 781867 - DNA, 639 bp, Homo sapiens
gcatataattcttattgtaaattgccttgatttcttttgggaaaaaggcattgtagtagtgtttatattcttttttactctacccaaagtgtatctttatataacgacctttagaagatgtagagtttaaatttagctaccttgattttggatccctttggcctgtaattgttacatctcattataaattagaaatgccatgaggtaacttagtacataattgtaatttattcaacattttgttgattttatttgggcatttttccaaagcagaagtagagatggagagcaggtaaaacttcatagattgctacctagaaattaggcatcttttttgataaaagaatggggccatttttttctttttctttgctgagtgccctctgtcatttctatcatggtctctcttttagactaatggcaattccaatggccttgtaccgatgctgagagtatataacaacacagctmgatatgtggatcaaggtgggaacaaggtatgctccatgaattgaaagtactggaaatcagaactaaaggtgatttagtcatatacacttaagatggttcatttatgtgtagtttctaattaccttttttttacttgtaaaatcaatttgaggaggtataattatttta

SEQ ID NO: 781868 - DNA, 558 bp, Homo sapiens
gatgccaatatggtgctggaactccagccctcatgtctgtggtaggcagaatattggtcccaaagatgtctacatcctaatcattgggacctgttgatacgctcatttacatgtcaaaggaaaatgaaggttgctaatcagctaaccttgagatggggacataaccctggattatcccggggggcccgaagtaatcacacaagtccttaaaagcggaagaagaggccgggcacggtggctcacatctgtaatcccagcactttgggaggccgacgcgggcggatcacgaggtcaggagatcgagaccatgctggctaacacggtgaaaccccgtctccactaaaaatayaaaaaattagccgggcgtggtagcgggcgcctatagtcccagctagtcgggaggctgaggcaggagaatggcgtgaacccgggaggcggagcttgcagtgagccgagactgctccactgcactccagatgttgctggatttgaagataaaggagaagacctcaaactaaggaatacagtggcttccaagaaccacactgggaaaagtga

SEQ ID NO: 781869 - DNA, 558 bp, Homo sapiens
gatgccaatatggtgctggaactccagccctcatgtctgtggtaggcagaatattggtcccaaagatgtctacatcctaatcattgggacctgttgatacgctcatttacatgtcaaaggaaaatgaaggttgctaatcagctaaccttgagatggggacataaccctggattatcccggggggcccgaagtaatcacacaagtccttaaaagcggaagaagaggccgggcacggtggctcacatctgtaatcccagcactttgggaggccgacgcgggcggatcacgaggtcaggagatcgagaccatgctggctaacacggtgaaaccccgtctccactaaaaatataaaaaattagccgggcrtggtagcgggcgcctatagtcccagctagtcgggaggctgaggcaggagaatggcgtgaacccgggaggcggagcttgcagtgagccgagactgctccactgcactccagatgttgctggatttgaagataaaggagaagacctcaaactaaggaatacagtggcttccaagaaccacactgggaaaagtga

SEQ ID NO: 781870 - DNA, 570 bp, Homo sapiens
aaattatttttaacatactaatgaaaagagggaagtttttaatttattgtggtaattacagcttagatatggatttaaatgttagttatcaccactcgtgtgtggtgccactactgtcttgggatggagagcatggtagggtaggagagttttggactcggaatttatcactaycactgtgccaataataatattgaaagttaatttttattgaatttaatatgtaccagttactttatatgcattatctctttaaatcttcacagaaatcctgtgaggtactataatcgttactcacctttttcagatgactagttggagttacaggaaagttaagcaaactgacaaaaattagtagccaataagagccaaagctaggattcaaatcaagtcttttaattcataagactgtgctcctcagaatttaatgttctagtgtttaggtttgtttttatgcactattatcaacaatctgtgtatttttctctctacatataaaactcttctctttttatgattgtctgccttatgctaatccagttttattttacttgagatcgagaaaaattt

SEQ ID NO: 781871 - DNA, 570 bp, Homo sapiens
aaattatttttaacatactaatgaaaagagggaagtttttaatttattgtggtaattacagcttagatatggatttaaatgttagttatcaccactcgtgtgtggtgccactactgtcttgggatggagagcatggtagggtaggagagttttggactcggaatttatcactaccactgtgccaataataatattgaaagttaatttttattgaatttaatatgtaccagttactttatatgcattatctctttaaatcttcacagaaatcctgtgaggtactataatcgttactcacctttttcagatgactagttggagttacaggaaagttaagcaaactgacaaaaattagtagccaataagagccaaagctaggattcaaatcaagtcttttaattcayaagactgtgctcctcagaatttaatgttctagtgtttaggtttgtttttatgcactattatcaacaatctgtgtatttttctctctacatataaaactcttctctttttatgattgtctgccttatgctaatccagttttattttacttgagatcgagaaaaattt

SEQ ID NO: 781872 - DNA, 557 bp, Homo sapiens
aaagctgaagcaaatgaaggaacagccacataaatatgcaagtcatttaggaaactttacatttatcaaaatgtttttcaagtggtgaatgctttacacaaagtaaagtgttatgttatttcattatgatataggagaatattttcttatgtcagtttgaggaataattttttccatcttggcacttgtgtcaaattactacatttcaaagttagatttgaaattrcagtagggatatatttttattttagtgcttctttaagttataaagcttccctgataaatataccaaatttatcaataaactatgtagagtgtctagataaaaaccttttggtaatgtaattcattctgatcttatatcccaaagctttaagatttgcataaaatcaacatatcttctcactcttaaagtactattttgtgtcattctaaaagtagtgaaaatattcttttatataaaaggaattgtagcctcactgaacaatttaagtaaaccacttttcttcattctctactggcaaaatattttacgttatctttaacactctcacaat

SEQ ID NO: 781873 - DNA, 538 bp, Homo sapiens
tctacaatgttgatattgtccaaatctctgccaatcactaggagaatatcaagctaaaaatttactaaatgatttttaaaaagtatattgcttatttgtctcttgagtagcatgtcaaaaggggacttaaattaactcagggtatttcattaatcactagagaaaaatgcctaggactcattttattgtcaacattttgatgatacagaattctagaaaattcaycatcttatttatgtttcaaaacttatacgacatatttaaaatattaacatactacaatggtattttgctcctgtaggaaacaatatatttcaatacggaagtattcacattcatatatatatatatatatatatatacacgtacacatacaaacacacatatatgtaaagagagacacagacagagggaagtggactcctcaaacacaatgctttaatatttatccttaagactagcattgtttttgacatgaccctatgattaatcaaatgctcgacagaagtagaccacgttgctttgagtttcattagcc

SEQ ID NO: 781874 - DNA, 706 bp, Homo sapiens
acatctgcttggatccttaagtccccattgtaggaaaccctgtaaatttgtattgagtgttttgtgggtgcaaaaaaaataagcccttgtggctgtaagccattgagatcagggtgttctttgttacgggagcattattaaaccacactgacacatctgcctttaaattacttgccaaataaataaatccctattgttaagccaccttcatttgaattatttatattttttattgtamgagaatccaaaaggatgaaatatgttttttacataatttctaaagaaatataggtgatgcacccaaaagtatcatcaaaaaatgactgtcaattaattaatgaagactttagtgatagaaaattcttcatgtatatgtgctcattttcaatccatctattctgttaattcttttccacgctatatacatgaatccagaaacacacacacacacacacaaacacacaccttccttccttatgtgcaaccatagaggatcagcctatctgtgtccagtgctcagagctgactgaatacactagaacttgatctggcatatccaaccagaccttgtaagcaattaagattcacagttgctctaaacgtacaccaactatctagcggttaaatttaaatttgatacaactaaatcattaattcattcatccaatcattcatcaattatttattgagtgcctatcatgtaata

SEQ ID NO: 781875 - DNA, 622 bp, Homo sapiens
tgcgcgctccccacggagcgagctcgagggaacccgcgtgggaccgcggagctggctggcaaggctgagctctctcggggctcctcagtgctgtcgctagcccatcacggctcctcctcctcctcttccatgggccgcagaccgcggaggatcagcgctctctggctcccggagcccagagaccagctgaggaaagttgctgccccgatctgcaggaacgtctccctcattcgtcctttggtcagatgcaaaagtcgggggataggcacagacagaggagggaaaagggggaaagaagactaacgaagaaggagagagggtacagggtgagttggtgcaggggctctgagcaagcctgatgagctccagcaggttaactgggagcggagccacgttccggcttctctgaatctttgctttcctcctcccctcgctggccccaccctttatttactgcccgccccaaccccactgatcaagatrctcgcgcgcgcgcgcgcacacacacacacagacacacagacacacacacagacacacacacacacacacacgctcttttttctctccctcaactttgcgctctgctgctgggaagtcgatcgagtgttgcattctcaag

SEQ ID NO: 781876 - DNA, 667 bp, Homo sapiens
atttcagtcggtcagtgcactgtcctttgtaaagtaaagagtataatttcttagatataaaaagaaagcagaaatctaccagcaggaaattgaactgaggcactgggaaatttaagagaaaattgtattatttctttctgttttaatacaatggataaaccaatcatgagaaataacattctcttggggccaagtagggaaaggatagctatgtaaaagtacwaagtcagatgatcagtctctagaaatgcttatgatacacagagacagacacacgtcccctggcttatttgcagatgttaattttaggttatttttatgcagtatagctccttttatttcctaaccaatttactcaactctgggaaaagtccctatgtacagtggaacaattattaggataattatagtaaaacatatactaaataaattttctgctaggcagattaaaaataagatccactctgatttgccattgttgcctgtgaattataagtttataaacatgaaagttggatattttgataagtatatatttaatagataatgcacacatatacatgtgtaatgttgcatatatatatatatttacacagacactatcataagcccacaaatctcacatcatgagaaatcagacaaatattacattaaattctaacgtgtc

SEQ ID NO: 781877 - DNA, 601 bp, Homo sapiens
gaaatcttcttaattggaaaacagcttcagttcccttcttttcttttctttttctttttttttttttttgagattgagtctcactctgcccccagaccagagtgcagtgacacaatcttggctcactgtaagctccacctcccaggttcacgccattctcctgcctcagcctcccgagtagctgggactacaggcacccgccaccatgcccggctaattttttgtatttttagtagagacggggtttcaccatgttagccaggatggtctcaagtctcctgatctcgtgatccgcccgcctcggcctcctaaagtgctgggattacaggcgtgagacaccacgccctrcccagttcccttattttctaatgctatgttttcaaggttgttgttaaggttagttaaactaatttatatgaaacacctggtgaatatagtgcctggcacagcagtatttatttacatccttcttaagtctttggaatcatagattatactatcagcagataaacttgacagatgcatagacatgatcagaaagagaatggaaggaagatgtggagagggagaacagaagtcagaaaccagaacaaaggaagac

SEQ ID NO: 781878 - DNA, 548 bp, Homo sapiens
cagttggaacagaggtaaaggaaaccagacatctgttgaagatcagtgtagagaatcaagtgctgtttctttattttgctctttttttttttttttttttctgagacggagtctcactctgtcactcaggctggagtgcagtggcacgatctcsgctcactgcaacctccacctcccaggttcaagctattctcctgcctcaaccttctggatagctgggactacaggcacctgctaccatgactggctaatttttgtatttttagtggatacagggttttaccatattggccaggctggtctcaatctcctgaccttgtgatccacctgcctcggcctcacaaagtgttgggattacaggcgtgagccactgcatcaagtgctgtttctttatctccctctttttctaagttgaggtttctgatctggctggctttatggatgtgagacctgtgcagttgcatggggcttgcacatcggaggacgctgagcttggtttcatgccctgctgttgctgtcttgaacttcttaataatttttgaaacaag

SEQ ID NO: 781879 - DNA, 612 bp, Homo sapiens
tctgttggccattgctctgtgctccccacaccaataaaaatgtgacaaaaattaatctctagtttttcgggtcagttactggtgggtgaataagttattctgaaacagatatgacctcacagatggaaatccttgacccagagtcccaacttcaatgaagcacttgctggcttgaccacttytaagagatcattggcttctggtccttcctgagttattcctctaacactcttactcttaaccagagggcttttcgaaaaaaagggaattatactaattcaaaatgatttgggaaaatattttaaggtcctcttccttgaaatcttctatttcgaattgtgagataatgcccccaagaaaataagtcttcctatttggtctgagtacatggtgatctcacagataggctacccagctgagcacagggcaagctcagcttaaggatgagtatctgaaaagaagcagaaatgttctgtttttctaattcattgagaattacttttacaaaggtgacatatttgcttttaatccccaaagcgacaaccatttttgtactttatcctcagaaaaatatgtcacatttctttgactctgcatgaaatgcctgtgata

SEQ ID NO: 781880 - DNA, 597 bp, Homo sapiens
ataaacattaatattttgtctgtcatatattttgcaggtttttttgtttgctttaaaattttatttcactgtgcatatacatattttgatgtaatcgacaggttagtcttttcccttatgtttcagttttcctgtatttttagttttatttactccacatattataagcatatttggtaactattttattatagtccttatatggttttattttttagcattaaaatttttcaatccatatcaaatgaactcagtgagatcagtaacatagggttctggcttatatttttccmgccccttttattgactggtttgttgttttacacataatgctgcatttatcttatactatattttatgtatacttaggtccattaaaaaattctctattcatttccacacatttattacttaggctatctttcttataattttaactttattgactttgaaaacataaaacaatcacatgactcaaaattctaaagagtccaaaggatacacagaaaaacgtttcttttactattaccatatcaatcagccctatgaacaaactgagccccgactgttgtttttttgctctttgttttttttaga

SEQ ID NO: 781881 - DNA, 626 bp, Homo sapiens
catctgggggtgatgggagacagtgacagatcatcaggcagtagattcttacaggagcctgtagcctagatccctcacatgcacaattcataatagggttcacactcttatgagaatctaatcccgctgctgatctaacaggaggcagagctcaggtggtaatgtgagaatggggagtggctgtaatacagatgaagtttcactcactcactcacggctcccctgctggtgtgtggcccagttcctaacaggccacatggcccattggttggggacctctgttacagaccactgaaaataatgggtttacttcaaatgaactggaaagccattggaagtggctatgttaaaccttacctgagacctgtgctccttaatatcagcaatgatgaaagaaatccctgtactctttgtcttattagaaatggcttactgcaagaaccacccttccccatatgacttagataaggkttgggaatgacttccttgtttacctagggcaaggccagatgcagaccttccaaattcccattctttgtctcatacacgattagctgaactattggtccccactgaccaatcagaacaaaatgcttgttaatttgacttaaccaaacttcaattaa

SEQ ID NO: 781882 - DNA, 622 bp, Homo sapiens
tgcaaatttatgtacaaaatgttttaaaaagacctcatgagaataaaaggactgtgttttcatagtccaacaacaaaaacctgattttacttcaaaaagtgaccccgattagtcatttaattttaccaaaaataggattttgtttgataagataattataacttgtttttcccctaatattccagacatttcataatgatcaaatgaaatgaccacatatgaaagcaatttctttaaaaacagcctgtaatttaattccctaacaatttagtgcatagaaatcatcaattattaaattaatggagaaaaacgtatatttttaaatatcgattttaaataactgactcagwagcacatctcactaaaatccagatctgtacatgtcactgtgttagagaaacattatctcacttttaaaagcccagcaaatattttcacaaccttaaaatactacttgaggaagttactttgggtttacagtcagctattatagttctataattgtcaagctatgaaacatcatcatcatggttaaaagtaaatggaagcaaaatgtacctcgttccttgtggatctgtgagttaaccagaacatgggacctgctttctgaatagtacctagg

SEQ ID NO: 781883 - DNA, 617 bp, Homo sapiens
tgaacacagcagaacagtgtgttcacaatcagcatgatgtcttaagtctgtctcaacaattcttcaagggatgagttaaagcttcttttaaaagctattgttcatgacctggtaattaactgtatttatggagagccaatgatgtatgaaggatcctgatggcatgccaacaaactgccccttccctgtggcggctgtggggtgtgagaaagagacatgtaactgcaggtacacattcttggtggcagtacaactttggtctgattcttstgtccttctaagcaactgtaacttgggttgtgatggaaccaggaaggcaagtgaggacggtcattctggaggaggcttacatgctacattcttcctcttacagatgtttccatagggtcaggttgcttgtatctctgtcttgctcatgtaatccttccttcatatagccagtcaagtggcctgcatagttgatctcagaaaggttcttattctaagatagaggatctgctctatggtgacattctttaaagaataatttttaaaatctataattataaaaaaacatagcaacaaagcagaaaattcaagaacaaatttgttgatacatatttatatacaacaaagca

SEQ ID NO: 781884 - DNA, 634 bp, Homo sapiens
taaatagcattacatatctctcccttaatattatcactctgaattatagagttctgatgtacttttttgttttacagatttgtttttggtttcctgaaaagaggctagttaatctgaactccttaaaacttcttatactggtttaccaatgagacaagatagcattgacacataatgtttaaaatgaagatttaaaattatatgtaattatgttgagttagaattttggcaaaatttttatataaacagtttttacactttataaggtatcagttgacatggaatttccatgtttctattacgtttcagatcgtgagctaatgtaaaatcaagaagttaactggtggataatcttgggatatctgggttgcttctcattaagagataatattggcatgatgattaccattagtgtgtgtatgtctgcttatacctataaatgtctatatacgtcttattatttctatatgttacagagaaactgtaacttakagtcatgttaatgagcattttggttttgccactttgaagatgatgttcaaagaatgtatgtgtctctagggggttgttttatgcaagctcatgtgtataaggtaatggggtatatttttgtttacaaagtgaaaagaaaata

SEQ ID NO: 781885 - DNA, 495 bp, Homo sapiens
cgatcttggctcactgcaacctccgcttccgggtttcaagcaattctctctgcctcagccgcccaagtagctgggattacaggtgcccactaccacacctggctaatttttgtatttttagtagagacagggtttcgccatgttggccaggctggtcttgaactcctgatctcaggtgatctacccacctcggcctcccaaagtgctgggattacaggagtgagccactaygcccggccaaagatacctatttttcactcagcatttcttaagtttatctgacctggaaccatttttcctataatgctgattagtatctcgtcactttgagaaaggaggttcaagtccaaattgctggtaatctatataatctgtcacacgtcatggttaccaaactcagtttaaagtaacttttcaaacttcaaatctcattatttggaaaaataaaaataattttatatatggcaaggggacttctaatttaaaaaactgaac

SEQ ID NO: 781886 - DNA, 652 bp, Homo sapiens
aaattagtagcattgtcagcttgattgtcttgtgtttgtctaacaatcagagtctatgtggcaaagctgtcattattcccaaccaaggtcaaacttcttttcaccaacagccctcgttggtttcttgagtgatgctaatatgaggggagattctccctttgcctttcagagagctctaaggagctgtcaatagtaataacatctccacgtattcagctgcaataatttagctcctgcttcattggaactctctcttgggtgagcctttaagagaggaagaagctgtttcctgttatctccaggctgcatgacaacaagatgataggctgattctagggcccatttcagttttccatacaacaagytgtgaaactagagagtgagatggatggtgggaggatcccacaagacccacactaaaaagatgtgttgggatttggatatttctatggattacctaaagagttctcttgaaagtagatgtttatgttgttgtggaacaatttctgagagatattgttaagtaaaagatgccccaaaaaaacccaacccactgtagattatgctccccttcatataaaaaggggaggaggaatatatgtttgtatgtgcatagacagtcctgagaagggtgagccacacacctatgcaa

SEQ ID NO: 781887 - DNA, 625 bp, Homo sapiens
actggtccctcctcttatattcccactgtcctgcagtttagctagagtggtcttgtaaaaatgtgtatcagtcatttcacggtcaaaccctttaatggatactcgttgcacttaagataaaaaaacaaaacaaaacaaaacaaaacccaaatccttaacttagtcctgtgtcatctgggtcttctctgcatggccagcctcatttcacacctgtcagctattgtagttgatttaagtgcggtccctttattatatgcactcgtttcttttttcacattttccttatcacttcaatcacagtttgtaatcatatgtttgtgtccttatttagtttcatctctctgaccaattgcaagctgcagaaatggctcttctcctccctggagackggcactttgtaggtcctcagtaagtgttggttaaatgaatcctcaggtgtgaggagtgggggatgatgtattcaacctgcaggaaatgcccaagaggctttgatgcatgggacttgtgtataccaggctgtgggctggagctggagatttggaagttcttagcattgaggtgctaaatggaagcccaacactctaagagagggttttagagtaagaggagagggcttctgacggaa

SEQ ID NO: 781888 - DNA, 593 bp, Homo sapiens
tgcaaaacagaccctgtccttgtcatcatggagctacggtttagtgggggagtgagataatatcacacaagtagatttgtaattccaaactgtgcttggttccatattggaaaaatacctgagatatttctctcctttcctctagattgttcatacagccactcactytaagaaacctgcttgcttttctcttcaggagcctgcagacagggggatttgcctgggaaggagaagtagaaaacaacgtgtacagccaggctacaggggtggtcccccagcacaagtatcaccccacagcaggcagctatcagcttcaatttgccctgcagcaacttgaacaacaaaaacttcagtcccggcagctcctggaccagagtcgagcccggcaccaggtaattcaagataagtcttttccatgtgttatatcttcctgctgttggtaaaaaaaaaaaaaaaaaaaaaaaggtcagtgaatgagaaatgtaggattagttttccaaccccgtgccatcctggcttggacagctcatggggagtctactcttgaggaaaaactgttctggagccataacactggctttgcttgaaagtga

SEQ ID NO: 781889 - DNA, 593 bp, Homo sapiens
tgcaaaacagaccctgtccttgtcatcatggagctacggtttagtgggggagtgagataatatcacacaagtagatttgtaattccaaactgtgcttggttccatattggaaaaatacctgagatatttctctcctttcctctagattgttcatacagccactcactctaagaaacctgcttgcttttytcttcaggagcctgcagacagggggatttgcctgggaaggagaagtagaaaacaacgtgtacagccaggctacaggggtggtcccccagcacaagtatcaccccacagcaggcagctatcagcttcaatttgccctgcagcaacttgaacaacaaaaacttcagtcccggcagctcctggaccagagtcgagcccggcaccaggtaattcaagataagtcttttccatgtgttatatcttcctgctgttggtaaaaaaaaaaaaaaaaaaaaaaaggtcagtgaatgagaaatgtaggattagttttccaaccccgtgccatcctggcttggacagctcatggggagtctactcttgaggaaaaactgttctggagccataacactggctttgcttgaaagtga

SEQ ID NO: 781890 - DNA, 593 bp, Homo sapiens
tgcaaaacagaccctgtccttgtcatcatggagctacggtttagtgggggagtgagataatatcacacaagtagatttgtaattccaaactgtgcttggttccatattggaaaaatacctgagatatttctctcctttcctctagattgttcatacagccactcactctaagaaacctgcttgcttttctyttcaggagcctgcagacagggggatttgcctgggaaggagaagtagaaaacaacgtgtacagccaggctacaggggtggtcccccagcacaagtatcaccccacagcaggcagctatcagcttcaatttgccctgcagcaacttgaacaacaaaaacttcagtcccggcagctcctggaccagagtcgagcccggcaccaggtaattcaagataagtcttttccatgtgttatatcttcctgctgttggtaaaaaaaaaaaaaaaaaaaaaaaggtcagtgaatgagaaatgtaggattagttttccaaccccgtgccatcctggcttggacagctcatggggagtctactcttgaggaaaaactgttctggagccataacactggctttgcttgaaagtga

SEQ ID NO: 781891 - DNA, 620 bp, Homo sapiens
gtggctcacgcctgtaatcccagcactttgggaggcagaggtgggcggatcacgaggtcaggagatcgagaccatcctggccaacatggtgaaaccctgtctctactaaaaatacaaaaaaaaattagccaggcatgctggcaggcacccgagtrgtaccagctactcgggaggctgaggcgggagaatggcgtgaacctgggaggcggagcttgcagtaagctgagatcacaccactgcactccagcctgggtgacagaacaagaccccgtctcaaaaaaataattaattaattaaaataaaaaaactggccaggtgcggtggctcacgcctgtaatcccagcactttgggaagccgaggcgggcagatcaagaggtcgggagatcgagaccatcctaactaacatggtgaaaccccgtctctactaaaaatacaaaaaaaattagccgtgcatgatggtgggcgcctgtagtcccagctacttgggcggctgaggcaggagaatagtgtgaacccgggaggcagagcttgcagtgagccgagatcgtaccactgcactccagcctgggtgacagagcgagatcagagagttctcacgtaccacttgcccagtgttttt

SEQ ID NO: 781892 - DNA, 614 bp, Homo sapiens
agaaaaaagaaaaaagaattgactttaacaggggattggagtaataaggcctggctagaaagaagttaagagaactcttgaaaaatgcaggaatggcagatagaggcacaaccatcactcttagggctgagataaagcaccccagaagaaggtccctgccacggctgagatccagacctgatgggagagatcgtggcagagaagtcactgaggtgccaggttggcagaagcagctggaaatctgctctctggggtatcagaggaatcacccacagtgacacgtcatgtctcagaacagtctgcaaagccacaggagaaaatgcaggragaagcaattcccaggacagtgccctagtggccacaaactcctgcaaagctgcccagggggcttccagagaaagctactggtgcctgggaattggagttggtgctgcagaagccacacatgctgctggagctgccagacactgcagaagccgggtgccttgcaggagcaggtgtagagaaacctcatgggcagcaggagcctcccaagaggagtgcaccagacagtgaagagaaacccctttctcctcccgtgtctcttcagcgccctctactgacaaagcttgaca

SEQ ID NO: 781893 - DNA, 614 bp, Homo sapiens
agaaaaaagaaaaaagaattgactttaacaggggattggagtaataaggcctggctagaaagaagttaagagaactcttgaaaaatgcaggaatggcagatagaggcacaaccatcactcttagggctgagataaagcaccccagaagaaggtccctgccacggctgagatccagacctgatgggagagatcgtggcagagaagtcactgaggtgccaggttggcagaagcagctggaaatctgctctctggggtatcagaggaatcacccacagtgacacgtcatgtctcagaacagtctgcaaagccacaggagaaaatgcaggargaagcaattcccaggacagtgccctagtggccacaaactcctgcaaagctgcccagggggcttccagagaaagctactggtgcctgggaattggagttggtgctgcagaagccacacatgctgctggagctgccagacactgcagaagccgggtgccttgcaggagcaggtgtagagaaacctcatgggcagcaggagcctcccaagaggagtgcaccagacagtgaagagaaacccctttctcctcccgtgtctcttcagcgccctctactgacaaagcttgaca

SEQ ID NO: 781894 - DNA, 592 bp, Homo sapiens
taaggagtgcaaaatgttatttcattgtgattttgattcccaatttcttaatggctaatgatgttgagcatctttttatgtgcttgttggccattgtcttctatagagaaatgtctattcagatcctttgaatattaaaaaagttgggttgtctttttattatttgatcttcatttttatttttgagatggagtttcactcttgtcgaccaggctggagtgcaatggcacgatctaaactcactgcaacctccacttcccaggttcaagcaattctcctacttcagcctcctgagcagctgggattacaggtgcatcccaccacacctagctaatttttgtattattagtagagacggggttgcwctatgttgcccaggctggtctcgaactcctgacctcaggtgatccacctgcctcagcctcccaaagtgctgggattacaggcatgagccactgcacccagcctatttgatctttagagttctttgtatattctggatctaagtccccgctaagatacatgatttgcaaatattttttcccatagagcgaattgtcttcacatttttttttgagacagggtcttgctc

SEQ ID NO: 781895 - DNA, 421 bp, Homo sapiens
gcctccgcttagctccgccccgtcgcggctccgccccgcggtaaccacgcccacacaaccgtatccccgcccacagctggcttcgccttggccccgcccacaaccctctttccaagcggcggcggcggcggcggcgcgaaggcgacagcggcggcgggggcggggctggcctcacccggaatgaaaacaaacggcggccgctgccgcatccgggcactctgctggtcgcggcgggagtggcgtggcgcaggtgaggacacggcggccgagtgtccycgaccccagcctcagcagcactgcttggcgccccggttcccggtccgactgggcacctctcctggccaggggtggagcggccgcggggcgggggtgagcagccatgcgtggagctgggccggggccggggccggggccgggagcg

SEQ ID NO: 781896 - DNA, 613 bp, Homo sapiens
attagacacttgaaactttccaccctcccctccaacctctgggaaggggagattgagctgatgactaatactaatggtcagtgatttaatcaggcctgcataatgaaacttccatacaaacccctaaatgacagattttggacagcttccaaattggtgaacacatccacatgtcgggatgtacacccccaactccatgggacagaggcttctatgctcaggacccttccagaccttgccttagtacctcttcatgtgaatggttatttgtatcctttgtaatgaactatattcataagtataccattttctggagttctgtgagttgttctagcaaatcatggaacctgaagggggtgcttgtgtgaaccctcgactttgtagctaagtcagacaaaagtatgggtaacctggggaccagatacttggtaactggtatctgaagttagggcttttttgtggrctgagcccttaaacctgtggagtctaacgctaactctgggtagttagtgtcagaattgaatcgtaggacttccagttggtgtcagaattggctggtgacaggaggaagaaagaaatcctcactagttaggttttctagaaaattatagaa

SEQ ID NO: 781897 - DNA, 634 bp, Homo sapiens
gctcctgtcatgccctgtcctgggttctgctagaggcacagtgtttgaccatggagcatcaagtgaccaagtgaccagtgccccgtcatgagctgcatcgggtcacacccacaaagacataggcaagtgagcccagaagaaattcatcataaaacagaaatggtgcatgtaggtttaggcaagaacaaatccagcaggtacaagtaagytacatgagcaggtggcccagaccacatatcttctattattgtgttggcacctctcccccaactcatccctctagccacattagcttaaagttgatgctgcttattggctgggagtccaacagggtgatcaactggagccctcactgtggcttctccgtgtggcttgggcttctcatagcctcatggcttattccaagagggatgatcccaagtgcaaacattccaggcctagctgcaaggtttcttatgacccagccttgaaagtcatgtggtatcacttcggtagcacactactaaccacagaagtcacagacctggcccagattcaggaggaggggaaatagactttccctctcaatgacatctcagtgggaccagtagcaaaaaaatctgtagccattttaaatttaccacaggtgctgttt

SEQ ID NO: 781898 - DNA, 634 bp, Homo sapiens
gctcctgtcatgccctgtcctgggttctgctagaggcacagtgtttgaccatggagcatcaagtgaccaagtgaccagtgccccgtcatgagctgcatcgggtcacacccacaaagacataggcaagtgagcccagaagaaattcatcataaaacagaaatggtgcatgtaggtttaggcaagaacaaatccagcaggtacaagtaagctacatgagcaggtggcccagaccacatatcttctattattgtgttggcacctctcccccaactcatccctctagccacattagcttaaagttgatgctgcttattggctgggagtscaacagggtgatcaactggagccctcactgtggcttctccgtgtggcttgggcttctcatagcctcatggcttattccaagagggatgatcccaagtgcaaacattccaggcctagctgcaaggtttcttatgacccagccttgaaagtcatgtggtatcacttcggtagcacactactaaccacagaagtcacagacctggcccagattcaggaggaggggaaatagactttccctctcaatgacatctcagtgggaccagtagcaaaaaaatctgtagccattttaaatttaccacaggtgctgttt

SEQ ID NO: 781899 - DNA, 634 bp, Homo sapiens
gctcctgtcatgccctgtcctgggttctgctagaggcacagtgtttgaccatggagcatcaagtgaccaagtgaccagtgccccgtcatgagctgcatcgggtcacacccacaaagacataggcaagtgagcccagaagaaattcatcataaaacagaaatggtgcatgtaggtttaggcaagaacaaatccagcaggtacaagtaagctacatgagcaggtggcccagaccacatatcttctattattgtgttggcacctctcccccaactcatccctctagccacattagcttaaagttgatgctgcttattggctgggagtccaacagggtgatcaactggagccctcactgtggcttctccgtgtggcttgggcttctcatagcctcatggcttattccaagagggatgatcccaagtgcaaacattccaggcctagctgcaaggtttcttatgacccagccttgaaagtcatgtggtatcacttckgtagcacactactaaccacagaagtcacagacctggcccagattcaggaggaggggaaatagactttccctctcaatgacatctcagtgggaccagtagcaaaaaaatctgtagccattttaaatttaccacaggtgctgttt

SEQ ID NO: 781900 - DNA, 628 bp, Homo sapiens
tgaagtcagttaatgtgatgcttccagatttgttctttttgcttagtcttgctttggctatgtgggctcctttttggtttcatatgaattttaagattgcttttttcagttctgtgaagaatgatgatggtattttgatgggaattgcactgagttcgtagattgcttttggcaatctggtcattttcacaatattgattctatatctatgagcatggggtgtatttccattggtttgtgtcgtcgatgatttctttcagcagtgttttgtagctttccttgtagaggtctttcatgtccttggttaggtatattactaagtattttattttttttcagctattgtgaaaggagwtgatttcttgatttgattctcagcttggttgctgttggtgtatagcagagctactgatttgtgtacattaattttgtatcctaaaacttttctgaatttatttgccagttctaggagctttttggatgagtctttagagttttctaagtatatgatcatatcatcagcaaacagagacagtttgacttcctgtttactgatttggatgacctttatttctttctcttgtcggattgctttggctaggacttcagatgtgtccattttaaataa

SEQ ID NO: 781901 - DNA, 628 bp, Homo sapiens
tgaagtcagttaatgtgatgcttccagatttgttctttttgcttagtcttgctttggctatgtgggctcctttttggtttcatatgaattttaagattgcttttttcagttctgtgaagaatgatgatggtattttgatgggaattgcactgagttcgtagattgcttttggcaatctggtcattttcacaatattgattctatatctatgagcatggggtgtatttccattggtttgtgtcgtcgatgatttctttcagcagtgttttgtagctttccttgtagaggtctttcatgtccttggttaggtatattactaagtattttattttttttcagctattgtgaaaggagttgatttcttgatttgattctcagcttggttgctgttggtgtatagcagagctactgmtttgtgtacattaattttgtatcctaaaacttttctgaatttatttgccagttctaggagctttttggatgagtctttagagttttctaagtatatgatcatatcatcagcaaacagagacagtttgacttcctgtttactgatttggatgacctttatttctttctcttgtcggattgctttggctaggacttcagatgtgtccattttaaataa

SEQ ID NO: 781902 - DNA, 597 bp, Homo sapiens
ggcttttgggaagacaaacgagtcatttctgcaggctctgagacaaggcaaaggatgctggagcccctccagatgggcatgcccctcaatagagacacagacgcagaagagttgtgccttggagtactgcagactccataagagctgggggagctcttttgagccttgttgtgggaccatttctaaagttaccactaaaagattacacaagctcacatgttcagtattttggtttttctttgaggcaatatgactgtttcatgatagattaatccccaaagaaaccacactcctagtaatgcagaatccaaggtgtattggaggcttggtaggttgagtatggaggtaggatgggacagacatcacaggagacagagkaatgagagaacggagtccatttggttttgcaagagtcagcatttgcttttatccaaaagacaggtaataacaagtcctggagaggatgtggagaaaacggaactattgtatacagttggtgagaatgtaaattagtatgaccactatggaggacagtttggtggtttctccagaacaaaaaatagagctaccataggatccagcaatcccactgctggg

SEQ ID NO: 781903 - DNA, 554 bp, Homo sapiens
ttggttctgagccttagctatttttctcagaaaatacttgcttctggaagacaagttatttttgccacatctaagtattgcttaacacagaataagaaaagatgcattttcctagaattgtttggcacattgcagaaataaacaaagacygcccacccaaatgagaacaaacagaggctatttattcagggcttggtacagcaaggaagtcaattgtcatcaccttggcctgtctaatactcaagggcaggcagtggagcaggacagatttatggtaaaagaagagacggcttcagaaatgctctgattggaggttgttggcctgggaaagctgaaagtccactcacttagaaacatggtatcttatgtaactggttttggcgccatatttggctttctctggttggtctggagtaggaagcaggagaacaaatagggaagctaacagtcacctagcaagtcctgaccattctggaccaattgctgcagaggttgtgggtaaaacttctaaaaccataaatcctggccattgtcatttgtgtattaaatcctgt

SEQ ID NO: 781904 - DNA, 597 bp, Homo sapiens
ggcttttgggaagacaaacgagtcatttctgcaggctctgagacaaggcaaaggatgctggagcccctccagatgggcatgcccctcaatagagacacagacgcagaagagttgtgccttggagtactgcagactccataagagctgggggagctcttttgagccttgttgtgggaccatttctaaagttaccactaaaagattacacaagctcacatgttcagtattttggtttttctttgaggcaatatgactgtttcatgatagattaatccccaaagaaaccacactcctagtaatgcagaatccaaggtgtattggaggcttggtaggttgagtatggaggtaggatgggacagacatcacaggagacagaggaatgagagaacggagtccatttggttttgcaagagtcagcatttgctttkatccaaaagacaggtaataacaagtcctggagaggatgtggagaaaacggaactattgtatacagttggtgagaatgtaaattagtatgaccactatggaggacagtttggtggtttctccagaacaaaaaatagagctaccataggatccagcaatcccactgctggg

SEQ ID NO: 781905 - DNA, 614 bp, Homo sapiens
atttctcactttgtcctctgggaaacaaaccaaccgaccaagagtgtgctcatgcaaaatgccaagtgatacaacagtaaatctaactgaggtctgcagagggagagaggtcccaggaacaggggagtgaagtggacctagaagatgcctagtccagattagagcaggaagacaagggatttggagggaaaaggtaaaagagtgaagcaaagagtttggttaggaaagcggtsatctatggaatggtgatgtcatatcttcttttgtaccaaaaatcctagaaaaaaaataacagctttctaaggaagttagagcctaggttaaagcaaactaaaacatagcaagattttgagcacgttgtgggtgtaagaaaataaaatctcttttatctgtgtttttggaacaatttattttgtatgacacttttaatagcacagattacatttcctccttgataaggccagtttaactacttgattctatggtagccagtctttgcactatcaatattataaataatataatcaatattataaataatgctgtgttgatttttcataattggaaacaatttacagagaaagcctgagagatttaatatttacacattattt

SEQ ID NO: 781906 - DNA, 614 bp, Homo sapiens
atttctcactttgtcctctgggaaacaaaccaaccgaccaagagtgtgctcatgcaaaatgccaagtgatacaacagtaaatctaactgaggtctgcagagggagagaggtcccaggaacaggggagtgaagtggacctagaagatgcctagtccagattagagcaggaagacaagggatttggagggaaaaggtaaaagagtgaagcaaagagtttggttaggaaagcggtgatctatggaatggtgatgtcatatcttcttttgtaccaaaaatcctagaaaaaaaataacagctttctaaggaagttagagcctaggttaaagcaaactaaaacatagcaagattttgagcasgttgtgggtgtaagaaaataaaatctcttttatctgtgtttttggaacaatttattttgtatgacacttttaatagcacagattacatttcctccttgataaggccagtttaactacttgattctatggtagccagtctttgcactatcaatattataaataatataatcaatattataaataatgctgtgttgatttttcataattggaaacaatttacagagaaagcctgagagatttaatatttacacattattt

SEQ ID NO: 781907 - DNA, 516 bp, Homo sapiens
tgccctctctggcattggaccagtatcagtctctttgctgcaggtcttctctttctagctccctgtgctgctcgttgagggctaatcagtctaagagtaaaaagcccttggaaagagagcagaggtaggaggaggctgaggtcaggctacgtattccattggctccctctctgtgggtctagctgtgcccctgtactgaaatatccaatcctttcatgaaggtttgccctgcaggatttcttgccttctagaactcagtaacctcttcttcaacttgttccaactggctcaggacgaggactgatacacagctgctagccctgggttccttcctcttctgctttccttacactctgtccrtgcctttgtaattagtccctttgcaaatgaacactctacaaattttccaagattcatttccaagattttgacagggaccctgccaggtacaaggatctccttgttaaattctttaacctaaagaaacaacacaaattgtgggatttcaggcaccac

SEQ ID NO: 781908 - DNA, 578 bp, Homo sapiens
gtccaatctttctggtgggaaagtgtacctgctaggattataatcctgtgtagagtcccaaataacagttcttcaataagacagacatgattcctctctcatataaacacccaggggtcagaagtctggggctattctgttgcacaaaatcctccaggctctagagtccctctatctttgcttcactgtttgaagcctctatttccaagttacctcacagtctaaaaggctgctccaactccagccatcacatctgcttcccagacagcctgaaagagtacaggaggaaggagaaaaggacaaaggctcacgcaggctctctcttraggagattatttgcggcagctgcccaacacttgtatttacatctcactgatgagaactaagtgatgtagccacagttagctgcaggcagtccaggaaatgtatttttttttaaaattttgggcagccaggtacccagctgagtcaagttttcaagcattctctcacaatgggagaaggaggggatgaatattggggtactcctgggagtctcggccagattagcaggatccccccacgttgcttccctttat

SEQ ID NO: 781909 - DNA, 472 bp, Homo sapiens
acatgattcctctctcatataaacacccaggggtcagaagtctggggctattctgttgcacaaaatcctccaggctctagagtccctctatctttgcttcactgtttgaagcctctatttccaagttacctcacagtctaaaaggctgctccaactccagccatcacatctgcttcccagacagcctgaaagagtacaggaggaaggagaaaaggacaaaggctcacgcaggctctctcttaaggagattatttgcggcagctgcccaacacttgtatttacatctcactgatgagaactaagtgatgtagccacagttagctgcaggcagtccaggaaatgtatttttttttwaaattttgggcagccaggtacccagctgagtcaagttttcaagcattctctcacaatgggagaaggaggggatgaatattggggtactcctgggagtctcggccagattagcaggatc

SEQ ID NO: 781910 - DNA, 627 bp, Homo sapiens
ttggatctcccaaggttggaggggcaccatcatcacccagtaacccaacctagaaaccttggtcattcttgatttctccctgtcctccacctgtttgctctcaaggggtgggaacggttggctctggaatggcctttgattacctcttccctctgtctcccagacctccagaggcccttgatggctctcccagtgtcctctctcctccaggaacgggctacctgtgcaggctgatggccaccgtgtccaccagtccccagatggcacgctgctcatttacaacktgcgggccagggatgagggctcctacacgtgcagtgcctaccaggggagccaggcagtcagccgcagcaccgaggtgaaggtggtctcaccaggtaggaaaggtctatatccggggatgggaaggacattccccagtagatttactggttctcaagggctggctctgcagtctgagggactctggtttgaatcctggctcaccctgccagttgctggtagtgtgacttggggcaaggggcttaccttcctgagcctcattttcctcccgtctacagtggggctgctccaccacctgagagggctgtagtggagatgaaggaaatgatgctctgctgggcccct

SEQ ID NO: 781911 - DNA, 560 bp, Homo sapiens
gggcataagatgtggttcaggacttgtgttgggtgctaagtgagaagctgggttgaaatcaggcccatgggcaatagttactgttggagtttcaataaagagtgaatagagctggaggagttgaggggcagacagtaagtgtgaaaggtgtgagcaggatattaatgcttgaaggttgtgagaactgttgagggtaagtggagcatagcttgtgcttttgagggcttccagaggtattaaagcggcagctgctgcygcatgcaaacatgagggcaccccagaattgtgaggtcaagttgtttggacaaaaaaggctacagggcgcagtcctggttcttgtgtaagaattccgaccacacagttcagtacttcagctgtgtgtaatgaaaagggttgggatgagttagggagagctagtgtggggagcagcttctagggctgtttttaaagaatggaaagaggagtggggaaaggatttaggatctatggggtcagctaggtttccttttgtgagtttatataatggtttagtcaggataggaaaaccaggtatccaaagg

SEQ ID NO: 781912 - DNA, 615 bp, Homo sapiens
catccttaatggttttggatttcttacagaaaaaagtaccccccctctttttttttgatgcagtctcgctttgttgcccagactggagtgcagtggcgaaatcttggctcactgcaacctccacctcccaggttcaagcgattctcctgctttggcctaccgagtagctgagattttaggcacccgccaccacccccagytaatttttatgtttttagtagaggtgggatttctccatgtcttccaggctggtcttgagctcctgacctcaggtgatccacccacctcggcctctcaaagtgctgggattacaggcgtgagccaccgtgcccggccataaagtccatatttttaggatgacattcaaggctcactccagtccacgtttctagcttccgtcttccctcccctgcacatactactgcatgtacctccacagtcttcccttttgctttgctggcatctcatgtctttgttgcctatccaagctccctgttgaaattctatccatacttataattaacatgtcccttgattcatacagactttatcagcctgcccttagtttctgtcagacagaattaagtcctctgttcccatataaagcagatcttt

SEQ ID NO: 781913 - DNA, 667 bp, Homo sapiens
ttttaaacaaagtttagatcaccttttctacagatttttttttcttctggtgctctggttaattttcagtaattagcacaagtgattttaacgggaaggggaaatccttctgatgccttctgagtcattttaatgaatagattgttaaatagttaaagaaattttaggacaaaatcacctaaaatgtgggcatttattgctaaggaaagcattagttattttctttagttctgctacctgtattcttctatatctgcaccttggctgcctgtcactctttgcaactgttgtaaccagtgcttctagggcaaattccagacgcttggttgaaatacccagactctgaggttcagaaaagttatggtgaacagggagcaattattaccttacccttcatagcagggttgttttgagaattgaatgggagagtgggtatcaygggtctttgtaaactataaaccacacatagcagttgttatttaggaaaatgttgcaatcctagaagtaccattttcacaagtgaaagttgatagaagaccaagaagacaaactgggatgtaggtaaagatgaagtgaggaaggaaacaggaagggaaggaaggattgggaagcaggaatggggataaccaaaggaagagagttaaatctacagagctttaccacctgt

SEQ ID NO: 781914 - DNA, 669 bp, Homo sapiens
acaagggagttaacgttctaaggatgtgagtacaattagctaagagcataagtggcaccataaaggctgatggagacattatggggagaaagatagtgaatctgatgtgtggacattcaaggtgatagataaaaagataacatgagtttcaagtaagaacagtactttgaagccttgagcacttagcagcttcccgaggatatgaatacatcaaaattggagattggcactggcatttataacagcaattattaggaaagtgagtagagggggctggaatagagaaatctctaaagaagaggcagagatgatgacctgtgtgtggaaagaagcagagaattatttttgtgctactattaagacaaaatgctagacaaggttcaattgttgttataaatgtaatttctctatataatttcatcatctaaaatcaaattagcaagtactttttatttaaggggtaataagartagtcatcacactatctagatagccacacactatcaaagctttaactcttcatgttgactctgactacgtttatataaaagaatgaaattcacatctataactttctttgccttagaaaaggcattttccagtttttattagttgtgtgcaaaatggagcaaaagaatgagcacatggctgacatgaagatatttgtct

SEQ ID NO: 781915 - DNA, 599 bp, Homo sapiens
cttctggccatggagtactagaggctggatttatcttcctgctgtaaacaataggaaactggacaaagtacataaacaatgacttttagacattgaaccacggggaatgccagactgtgctgcctgaaggcaggttgcaggctgctgcacagggaaggagggcccagtcttgccagctgaggacatctgagattggagtggagagtggtcagttgagatcagagctggggaggctgcgggggctagaatttgttgggcagtgtacaggagcagggaggtgsggtgcgatgagagagctttagagatctgctgaagggtccctttgaactttgggaagggtactgatttctatacgcatgaaaagaaactagcagaggctggggaaaagatccatcagaaagcaataggccaaacaattcctgcactcacatggagctgggaatagtttgtatttttgtccaccaaaatataaagatcttataatatgtgggttatctaacagagtcctcagaaggggactctactcctatcaccttagtagtggagataaatgaaccctagactaaaaattggtctgaacccaccctaaccttaaaagc

SEQ ID NO: 781916 - DNA, 599 bp, Homo sapiens
cttctggccatggagtactagaggctggatttatcttcctgctgtaaacaataggaaactggacaaagtacataaacaatgacttttagacattgaaccacggggaatgccagactgtgctgcctgaaggcaggttgcaggctgctgcacagggaaggagggcccagtcttgccagctgaggacatctgagattggagtggagagtggtcagttgagatcagagctggggaggctgcgggggctagaatttgttgggcagtgtacaggagcagggaggtggggtgcgatgagagagctttagagatctgctgaagggtccctttgaactttgggaagggtactgatttctatacgcatgaaaagaaactagcrgaggctggggaaaagatccatcagaaagcaataggccaaacaattcctgcactcacatggagctgggaatagtttgtatttttgtccaccaaaatataaagatcttataatatgtgggttatctaacagagtcctcagaaggggactctactcctatcaccttagtagtggagataaatgaaccctagactaaaaattggtctgaacccaccctaaccttaaaagc

SEQ ID NO: 781917 - DNA, 599 bp, Homo sapiens
cttctggccatggagtactagaggctggatttatcttcctgctgtaaacaataggaaactggacaaagtacataaacaatgacttttagacattgaaccacggggaatgccagactgtgctgcctgaaggcaggttgcaggctgctgcacagggaaggagggcccagtcttgccagctgaggacatctgagattggagtggagagtggtcagttgagatcagagctggggaggctgcgggggctagaatttgttgggcagtgtacaggagcagggaggtggggtgcgatgagagagctttagagatctgctgaagggtccctttgaactttgggaagggtactgatttctatacgcatgaaaagaaactagcagaggctggggaaaagatccatcagaaagcaatrggccaaacaattcctgcactcacatggagctgggaatagtttgtatttttgtccaccaaaatataaagatcttataatatgtgggttatctaacagagtcctcagaaggggactctactcctatcaccttagtagtggagataaatgaaccctagactaaaaattggtctgaacccaccctaaccttaaaagc

SEQ ID NO: 781918 - DNA, 439 bp, Homo sapiens
gtgggcacctgtaattccagctacttgggaggctgagacatgagaatcgcttaaacccaggagacggaggttgcagtgagccaagatcacgccactgccctccagcctgggtgacagagcaagactgtttcaaaaaaaagaaatacctatagcagaatgcttaaccatattatctacttagaaaaaaaaattcaayctctccaatgttatgcccccaaattccacataaatttaaataaaaaatatatcgcaaaactcccagaagaaaacatgaaagaataacattatgatctgagaatgaggagggtattgtgtaaaatccgaaagtcgtaaaacagtaagtgtggcaacaaaaacattttcatgagtctgtacaggaagacactgaaaacaaagtcaaaaatataaaaatagtgcagtctgggcatggtgaatcact

SEQ ID NO: 781919 - DNA, 502 bp, Homo sapiens
catcagaaccacatatgagaggaatactggaataatcagactgggaatttaaaataactatgactgaggccaggtgaggtgactcctgtaatcccagcaatctgggaggccgaggtgggaggattgtttgagcccaggaattcaagcttgggcaacaargtgagaccccagtctctacaaataataaaaaaaactagccaagcatggtggcatgtgcctgtggtccagctactcgggagaggtgggaggatcacttgagctcgggagattgtagctgcagtgagcagtgatcatgccactgcactccggcctgggtaacaaagcaagaccctgtctcaaaaaataaaataactatgactaatatgctaaaggatctaatggataaagtagacggcagactacggaagcagaaagatggaagttccaggaaccaaaaataaatactactcattaaaaacactgtgacagatatgaagaatatctttgaggcccctattagtag

SEQ ID NO: 781920 - DNA, 623 bp, Homo sapiens
gtaaatctacagagacagaaagtagattagtggctgccgagggtggggagggtggatgaggaaggagtgactgctaatggttcatggtttctttttcagaagagaaaaacattacaaaattaaattgtggtgctggctgcacaactctgtagatatactaaaaaccattgtatcgtacactttaaataggtaacctttatgatatgtcaattatktaaaaagactactgctgtcctgtgcccagcaactaacacaaaacaatgaaatacagtgctctttattttttattcttcttattttttttagacaatctcgctccattgtccagggtggagtgcagtggtgcaatcttagctcactgcaacttccacctcccaggttcagatgattctgggggagctaagtagtgctcttctgtatgtatgtatgtatgtatgtatgtatgtatgtatgtatttatttttagacggagtttctctcttgttgcccaggctggagtgcaatggtgtgatcttggctcactgcaacctccacctctctggttcaagtgattctcgtgcctcagcctcccaagtagcagggattacaggcatgtgccaccacgccccagataattcttgtat

SEQ ID NO: 781921 - DNA, 593 bp, Homo sapiens
aattcttgtatttttagtagagaccgggtttcaccatgttggtcaggctggtctcaactcctgacttcaggtgatccgcccgccttggcctcccaaagtgctaggattatagacgtgagccgccgtgcccagccagttgtgttctttttaaatgtagaatcatacacagaattaaagaagacaaaccaaacaatcaatcccctagcttaatgcaccaaaatgacaggkaccagaatattcttagtacgctacttttttttttttattttgagacagtctctattgcccaggctggagtgctgtgacaagatctcagcttactgcaacttccgcctcccaggttcaagccattctcctgcctcagcctcccaagtagctgggattacaggtgcccaccaccacgcctggctaatttttgtatttttagtagagatggggtttcatcacgttggccaggctggtcttgaactcctgacctcaggtgatccacccacctcggcctcccaaagtgctgggattataggtgtgagccatcgcacccggctgtacgctactttttgaaggaggccaagaataaaatccctctgggaatt

SEQ ID NO: 781922 - DNA, 568 bp, Homo sapiens
gagactccatctcaaaaaaaaccaaaaaaacaaaaaaaatcatacctcggcctggtgcgcctgtaatcccagcacttttggaggccaaggcaggccaatcacctgaggtcaggagttcgagaccaacctggccaacatggtgaaaccccatctctaataaaaatacaaaatttagccgggcgtgatgacgggcgcctgtaatcccagctactcgggaggctggggcaggagaatcgcttgaacccagggggtggaggctgcagtgagccgagatcgcgccattgcactccagcctgggtgacaagagcraaactgtctgaaaaaaaaaaacaaaaacaaaaacaaaaaaaaaatcatacctcaatgaaattcacctgcaaatgtattttctaactcctacccgttaaatttccctattacattctataccacaacaattttgtcttataagtcgtttacattgctaggaaaacgacaaactattccactgcttataatgagctgactgttatcacttcctccctcacacaattatttctttaaaagtgaaaacaaatcttttgatctg

SEQ ID NO: 781923 - DNA, 630 bp, Homo sapiens
cagagtctggagcttcctatttcttcatcttactgataccaatctgagacagatgtcaatttttattgctattagatgtgagtgcattcctttcctacgatacacccactctttctagtttgctatttcaaatctgcagacttgagaaaccagataacttggctttttaagaaggttatgacttatacacataaatggtttataaaaacaaaacagtgttcattcagggtacaactttaaactacaaaaacaaaacaaaaaagaacagaactgagaaactaaggatgaagatttcagaccactatttccagaggttcacttactgttggtgctggatgtgtttccttggcgcaagattaacaaagtcagacttctgaatacataaggtatactttcgttgctatatgacagccttatatttgttctgtatttctgtaaaaaccagtgtcttaaagctctggattttgcttctaagcaacataagtcacwctctatttaagccttctctcctggttgaaagagcattttctcttagtgcctgatccttccaaatataaaatgccacctgcaagtttcatatattgttttctcccagtcatattgagtaccaccaataggtttatgcatcct

SEQ ID NO: 781924 - DNA, 577 bp, Homo sapiens
tttgaggctctgcacatctccaagggactggaaccttccccaggatccagatgctgggatttgggttttgactgggagtgaaggaggagcctgggaaatggtaacacaggagaggggaagagacacacatttcccagrcccacccctgtaccagaaaacaaactgctccttcctctctgctcccaaatctttagggccttctttgcagtgcagtgctcacatgggttatgcgtgtctttcccccatgggacctgagctccttgaggacatggaccaagcctcaggctgctgacatcccctgtgccagcaccatggccaggcacatgatgcaggctcagtaggctcttgctgtgctgagtgcaacccttatctgcaaggttggtctccctgccttccttgcagggtgcaagtaagaccaacagacacagactcagagtgtgcaggtggacgcctgccccatgcccagctgcctggaggagcaatgctggagttctgcacactgacccatttctgactgcactgcatccccctctccagacagagcctgcccaggagcctcccaagagtaaccaaggaa

SEQ ID NO: 781925 - DNA, 632 bp, Homo sapiens
aagttttattcctggcatcaaggagatgagttttttcttccagatgagattgaaattgagccagtacgacagagcagcgataaaatgctctactgtgaggccgaatccccgccgactgttgaaaaagtgaaaccagcccgggagaattcggaaacagacctggagattgaaggcgagcatgggcatttgggggcagtcagggcagcttctcctcagaaactggagaaatctggtttccaggagctgtcatctcactcctttccagagtctgccctgcggatggcctgtggaggaaatgtggcagaaaggcctgctcgattttgcctggagtcctcctccgggctggcaggggagagcagytgcagcttcccacgcttgtcacctgcctcaggagcagtgccctcacgtcgtcttgttaaaagcggaatcaatacacaaacaaggttttctaatcttctaaatgtttccacgtggggcatcctatgcaatctttgcaatagtcctaggaggtaggcatctttgccagttttcaacagaagaggaactgggccttaaagagattataggcattgcccagggacagcgggagtttgcccagcacgttggctgatcccgtgtttgactcactctga

SEQ ID NO: 781926 - DNA, 561 bp, Homo sapiens
agggctgtgcacagggtctgcacacaggctagagtccttgttttgctgaggacaagcagcggtgctcccatcactgccagccctcggcgttgcccttctcggtctgggcctcacctccactgccctatggcagatagccgaggcaggggtgacaggatctgtgtggatttggacctaaggtaggaacagtgtggggggcaggggagtcactgaggaacacagatctcagtcccagcaagggggctgaggccaagacccctgggyccatcggaatctgggctggaggtgtggctggtgggagcacatgtggacagaactggttttgtgttcatgggtgtgcagttgtgaatgaaatgctgcgtgcaccgtgtgatgacgccctgggagggaccttgcagtcaggttttcttctaagcagatgccatcattggcgagacggcagcacggcctaaagcagcggcttagaggaagaaggcagggccctgggagccccagcagccaagggaggccagccaggcttgcgggtgtggggtggctgctccacgggccatcggagtcttt

SEQ ID NO: 781927 - DNA, 561 bp, Homo sapiens
agggctgtgcacagggtctgcacacaggctagagtccttgttttgctgaggacaagcagcggtgctcccatcactgccagccctcggcgttgcccttctcggtctgggcctcacctccactgccctatggcagatagccgaggcaggggtgacaggatctgtgtggatttggacctaaggtaggaacagtgtggggggcaggggagtcactgaggaacacagatctcagtcccagcaagggggctgaggccaagacccctgggtccatcggaatctgggctggaggtgtggctggtgggagcacatgtggacagaactggttttgtgttcatgggtgtgcagttgtgaatgaaatgctgcgtgcacygtgtgatgacgccctgggagggaccttgcagtcaggttttcttctaagcagatgccatcattggcgagacggcagcacggcctaaagcagcggcttagaggaagaaggcagggccctgggagccccagcagccaagggaggccagccaggcttgcgggtgtggggtggctgctccacgggccatcggagtcttt

SEQ ID NO: 781928 - DNA, 631 bp, Homo sapiens
tagtagagaaagagtttcactctgtcgcccaagctggtattgaactcctggcctcaaacgatcctcttgcctttgctatttcaagtgtgagccaccatgcacagtcacattttttttttcctttttttgagacagtttagttctgttgcccaggctggagtacagtgacaagattatggctcactgcagcctcaacctcctgggctcaagcagttctccctcctcaaaccccagataactgactacaggtacccactatcatgattggctaatttttgtattgtttgtaaagatggggtttcaccatgttggccaggctgggtttaaattcctgggttcaagcattccacctgccttagcstcccagagtgctaggattactggggtgagccacggcacccaacctggccaaaaaattaaagtctgtgatgcttattagtttttgggaaataggcactcttacattacttgtgaaagctaataaattttcaagagcctttatcgagattattttagcaatattgctggctgtgatggcttacatttataatcccagcactttggaggcagagacaggcagttaccttgaggccaggagtgaaagaccagcttggtcaatgtactgagaccc

SEQ ID NO: 781929 - DNA, 487 bp, Homo sapiens
agtctcaataaattttaaaaaattggaatcatatcaagtatcttctcaaatcacagcagaataaaactacaaatcggccgggcgcagtggctcacgcctgtaatcccagcactttgggaggccgaggcgggtggatcatgaggtcaggagatcgagaccatcctggctaacaaggtgaaaccccgtctctactaaaaatacaaaaaattaggcgggcgcctgtagtcccagctactcgggaggctgaggcaggagaatggcgtgaacccgggaagyggagcttgcagtgagccgagattgcgccactgcagtccgcagtccggcctgggcaacagagcgagactccgtctcaaaaagaaaaaaaaaaaaaaaaaaactacaaatcaataccaggtggaactttgtaaactatacaaatacatggaaattaaacaacgtgctcctgatgaatctttgggtcaatgatgaaatgaagatggaaattata

SEQ ID NO: 781930 - DNA, 614 bp, Homo sapiens
taaagttctgaattagcaggccaaatattaataaattatctctgaataccagatacattagcttttctaataatagacagtggtatcagccatttaccctttttcccaaggtaccagtcactctctctttgattatgaatcccttgagtaaacaaattcaggggtcctcattctcaaaatacatgtattcattattaatattatcatgagtctgtagtttcagtagatctttttaaactacttggtccattttttgagggttggcttaattaaaactgtattaatctacaaaatccaatcaatagatactcataaatgatagtgtaacacaatgccctgtaagtggccaagggaaagtgggtgccactgtcagtcagtcatagagtaacttcctctcagtttcagaatacatcacattctattcatgacttgtgaycatttgaaacaaggatggaataagtaactggtgtcagtctgtaagatttgtataactaccacagagccaagatacaaatattaataaatcacaatttctcttttatttttgttgagaaatgagtataagtagaaatctaacattttcttcccacaccccagcagatactctggcaccc

SEQ ID NO: 781931 - DNA, 662 bp, Homo sapiens
ttccttttttgttatcttctgtaagttttatagttttatgttacatatgtaatctgtgatccaccttgaattcattttttaataagatgcaggacttaagtgctgaagacactggctattgtgatttcacagctatactatatctaactgagtgtaaataaaaagtagtttttgagtaattaatactaaatgtaactcaccatatttttatgtatcattttgctatacttcttttaataacatgtaatcagaaaattattataaatataaaaaatgttcaaagaaatcagtaatagagaagttgaaacaacagggaaattaaaacaagaaatgtgagagaaaataagtgggaaaaatttttattgaagacactcctctccttagaataaagtggtaggggaaaggagagagaagcaagctgctgcctcagtattgctaagaaaaaaagagactaatctattccatcaattatagaaccatcaagtagaartaccttaatggtcaactagttctctgatacttcactgcaacaatccctgtctcccaaagcagttatcctgtaacagggagtcttaacatccttaattgaataattgtgacattttcttaaatgatcaaccaaaattccttcctggttgcttccacacattgatcctagttca

SEQ ID NO: 781932 - DNA, 596 bp, Homo sapiens
tttatgttttcattgcatttctactctctagagcagtgcctgacatatgctcaatgttcactgtcaattctggaatgagtaaatagtaaatatcatcattacatttcttgttggggagggggtacatcagcaagaagtcacgaaacttaacaatgttgataatgctgtgtaaggcaattgtgtgtgtgtgtgtgtgtgtgtgtgtgtgtgtgtgtgtgtgtgtctytcttagcagagtgtgccgaggatttcagctaagccactacttttacatcctaatttctctgctaccccattgggaatttcctcaatgttttcaagtgaaaaatttacagtctcaaaggataggttggcttttcttgaaggaaaatttgcctgtaagaggtactaaattcactacagttcactcactggtactgtatttttctatattaacataccaaatgctttatttttttaaattcaaaaatatttaaggatgcatttttgtatattgtcattgaattgaaatataattatgccaaaatttgagtttacctggatgcaaacatacaaaaggttttctccgagtccctgaggacagtctgtatgaagcc

SEQ ID NO: 781933 - DNA, 526 bp, Homo sapiens
aaaatgtcatagcttcattttaaagatgagggactgagactcagagagaccaaataacttaaattcacatggcttcctaacatccatagagtcatcatttacaaccaggtctctgggattctaaattcctgatatttcctctgtatcactccgcctccttgtgttagtagacattattctaatgatcagagagactgaacttgtcttatatataacatacctaatacgtaaatgtctgtccactaaactgcatattccttgaggacagcatgtcctactcatttttggatttcgcatacctaacaaagtgygtggcacacagcaaatgctcaataagtgtttaataaattaaaaaaaaattttgagtatatagatatatctaatatttcaaacaaagcgtactttaaaacatttttagtttttctcagtcaataaaactcttgaccaaataaaatctctgtcaagctacggttttcacaaaatataaaactttctttgtttcctaatagctgagctacaagtaact

SEQ ID NO: 781934 - DNA, 588 bp, Homo sapiens
tagagtttttccatctctacagtttcttggaataaagatgggaatctaaaatatgggaatgcctacttaggaggctgaggtgggaggatcatttaagcctgggagatcaaaatcagtctgggcaacaaggcaagaccccatctcaaacaaacaaacaaacaaagactggcttgctccacttgctctggagcctgaggaggtgatcctgggagaactgacaaaagctggcagaaggcaggaattcttaacaaagccagttatcctgggtctctgtctacagtgtctggttgagagaggaagacaaaaaacttttccttattccttcctttccaaattcagattggcagaagaaaaatgtaacaattggttctttgawttgtgacccttttgaatttggatctggctactccttggtcactgatccacacattcaggaatggttcttgttttccttgtttctcttttgtattatttgttataaggagaaaattcacagtaagattctccttttattttcttttatgtcttgagagctcagctttgtgactagtgaaaatattatctctggtctctgccagccattggggg

SEQ ID NO: 781935 - DNA, 595 bp, Homo sapiens
aaatcttttgttactctggtatggtttcacagttaattgtgatcctcttttatcaagtgtttaaacattttgacatttttgacaactttctgaaatcaaatttttcttttcttttttcttttgagaaggagtctcgytctatcgcccaggctgaagtgcagtggcgcaatctcagctcactgcaacttctgcctcggggtttaaggattctcctgcctcagcctcccaagtagcagagattacaggtgtccaccaccacacccagctaatttttgtattttagtatagacggggtttcaccatgttggccagggtggtctcgaactcctgacctgaagtgatccacctgcctcagcctcccaaagtgctgggattacaggcgtgagccactgcacccagccagaagtgttcaaaatgggaccctgaaatgtctgaaaagcatttatcctctcaccttataaaaagagagatcctaaactaattagacttatttgggatgctgaacgtacatgggatgcactgttaaataagagattatatttaacccttctttgagctatatttgttatgttattaatatgactatttccaaaat

SEQ ID NO: 781936 - DNA, 583 bp, Homo sapiens
tgcgcccagccgtatgttcgagaatattcttaacagcagtgttgaaattataaagaattagaacaaatttaatcatttggggactgattaaattgtggcacattcattagaatataattcacacttttaaaataatgaagtagatgtacaagtagtggaaggatatctgtgatatgttactgaataaaaaagcaagttgcagcataatgtattagttatgatacaatatggttaacaaaaataacgtatgtctgtattttacaatgaaaggtatagcagggtagaaactgaattgttaaaaatggtcacatcttgctgggtgtggtggctcactcktgtaatcctagcactttgggaggctgaggtgggatgatcacttgagctcaggagttcaggaccagcctgggcaacatagtgagaccctgtctctatttttaaaataaaacaaaccaaaaaaattaaagaaaaagaaaaaaaaggttacatctaaggagggaaagttgcagggaaaagtaaagaaacatcataattttggtaaaatttagtaattttcaactattttcatcatcataaaaatattttt

SEQ ID NO: 781937 - DNA, 556 bp, Homo sapiens
actgcagccttgaccacccgggctcaagtgatactcttgcatcaccctcctgagtatctaggactataggcaggtgccaccgcgccttgctaatttttgctttttttttttcgtagagactgtgtttcgccatgttctcaggctggtcttgaactcctgggctcaagcgaccggcctatctcactctcccaaagtgctgggattacaggcataagtcaccatgcccggcctgacagaaacatttttagaagtgagaaaaktacattcctaaatgtgttgcatggatagaaattgatttgagaaaaatctcaagaagatcaagttaaggagacagagttgcaaaacatgtagtccaattgtctcacagttaaaattcttcccatctgaagatgctatcttctgtttacctgattttctcattgaaattattgaactgtaatttatatataataaatttcaatcagttttaagtatacaataagtttttacaaatgacagaaacaccactatacatttagttttaaggcttctgtgtcactcttgctaaggatctgat

SEQ ID NO: 781938 - DNA, 483 bp, Homo sapiens
gtgtggtgtttcacgcctgtagttacccagttaaattttgtattttttgtagacagggttttgccatattggctaggctggtctcgaacttctgggctcaagtgttctgcccgtctcggcctcccaaagtgtggggattacagatgtaagccatggcacctggcctaggaaatgacattataaacatctatttcatttgaccttttttccccaagcagcctgtattacttttgcaactttttgtattaaaaaaatcactttaagacaaaaagagtaagatggaaagtcacagctatttcaagggaatcatttgccagatsttgactttatcttcatgtgaactctttcccaagagatctttaccatggctcatctccctcattacaaaagaaaggcaaatttctcaatcatcctgaactttactataatgcttcaagtataaacacctccagcgtacaaaacgaagggaaaaactgaagtagt

SEQ ID NO: 781939 - DNA, 625 bp, Homo sapiens
ggctacaaaacaagtctcaacaattttgtttaaattgaaaacatatcaggtataatttctgaccaccatggaataaaactacaaatcaaaaccaagggaacttttgaaacaaattaaaaacacagaaattatgcaacatgctcctgaatgaccaatgggccaatgagaaatttaataagaaaatatttaaaatttcttgaaataaatgaaaatataaacataatatgtcaaaacctatacacaaaccaatagcagtactaagaggggaatttataagcacctacatcaaaaacatagaaatatttcaaataaacaacttaacaatgcacatcgagaatgggaagaacaaaaataaaccaaacccaaaattagtagaaggaaaaaaataatawaaatcagagcataaataaatgaaatggacactaaaaaaaattacaaaggatcaacaaaacaaacagtcagttttcagaaaagataaacaaaattgacaaaccattaggtacactaataaagacaaaaagagagaagacctatataaataaaatcaaaaatatgaaaggaagcattacaactgatagtgcagaaatacaaagaatccttagagattattatgaacaactattca

SEQ ID NO: 781940 - DNA, 549 bp, Homo sapiens
acttttttgaaaatctagttctatgtaatatatttctgtggcatcaaattttagttgattgtattagtcaataggaagtggtggaaaatttctaaataaattcaactattaaataaatgcaagttccactaaatcttagtgtttggaacactgaagaacccagaatgaaacaaaattagactgaatgtaaatgtcatttaaaaatctaactgggggctgggsacagtggctcacgtctgtaatcccaaaacttcaggaggccgaggcaggtggatcacctgaggtcaggagtttgggaccagccccgctaacatggtgaaaccccatctctactaaaaatacaaaagttagctgggcgtggtggtgtgtgcctgtagtcccagctacttgggaagtgaggcacaagaatcgcttgaacctgggaagcagaggttgcagtgagctgagactgcaccactgcactccagcctgggcttcagagcagaactatctgaaaaaaaaaaattaaaaatctaactcggttacagaggctgcttgttgcatagagcc

SEQ ID NO: 781941 - DNA, 359 bp, Homo sapiens
atcaacttacatgtcgggtctcagcttaagtacatttcctccacaaggcctttctgaattctcggacaaaattaaaggcctcttccccatatgttccaatagttctctctacttcccctttcataatattacctctcctgtaattaactgtttaatcctctgactttatcstttacattgtaaatcccatcaaattcactgttgacatttagcagctggaatatttctggacatgtggttttaaagaattgacacataaactctctttgttctgttttgttcactggagataatacacaccactcagtgtaagattattttagtaatagtgctatgagaaacaagaagctgcatacaat

SEQ ID NO: 781942 - DNA, 589 bp, Homo sapiens
ggagttgattccaacccttatggatgactttgaggggttcaaaacttcagtggaggaagtaacttcagtagtggtagaaatagccagagaactagaattagaagtggggtctgaagatgtggctgaattgctgcaatctcatgataaaacttgaacggatgagttgctttttacagatgagcaaagaaaatgatttyttgaatagaatatactcctggtgaagatgccatgagcattgtgaaaatgacaagaaaggatttagaatagtacataaactcattgataaagcagtagcagggtttaagaggattgactccaattttaaaagaagttctactgtgagtaaaatgctatcacacagcattgtgtgctacacagaaatcttttgtgaaaggaagagtcaatcaatacagcaaactttattgttattttattttaagagatgccaaagccaccccacctttcagcagccaccaacttgatcaatcagcagctatccgcactgaggtaagactcttcatcagcaaaaagactgtaactcattcaaggctctaataatcattagcatcttttagcaataaaatatttt

SEQ ID NO: 781943 - DNA, 632 bp, Homo sapiens
gataggaccaggaaaaataaccaacgggtgctaggcttaatacctgggtgacaaaataatctgtacaacaaacccctgtgacacaagtttacctatataatgagcctacacatgtacccctgaacttaaaagttaaaaaaaacctaaaaaaaaaaaaaagaaaaacaagtcacatgtgggaagaatatgttggttaaacacttacctgataaatcacttgtatgcagaatatataaataactctcacaactcaataattagaaaacaaatgcactgtatcttaaaatcggcaaaagcattgaacctatacttcaccaaagaagatatacagatggtgaaaaaaaaaatcatgaaaagattcccattgttgttagtcaccagggaaatttaaattataatcacacccatctattcaaatggctaaaattttaaaaattgaatgatcctaagtgcttatagtaatgttgagcaagtggaactatcataygttgccaatgccaatgcaaatttttactaccagtttggaaaaacattttggcagttacttttaaacttatacatacatttaccttatgactccaaaatctcactcatagaaatttaatcaaaagaaatgaaaacccttgtctgta

SEQ ID NO: 781944 - DNA, 604 bp, Homo sapiens
acaaggccagatcaatcattcctccacttattcagagacgtctgcataattgattcttcctttattccctttttctcttcaaacattcaccttattctgtgtacacaagaatgtaaccttgtgagactttagttagtgcccrgtaaatctataaatttataaggagacttatgttcaccttactgcctgcctgtctctctttctacatgtcttccctcatttaaggaagtgtacaaatactaaatctcctgaaaactttttcagaaaagcagccacatatgcatctgtggcttgagtttttcctagacataacctaatgctggcttaatcaacctcaattgattgatatctttgcttcaatcactcatttttattttcatctacatattgtatccattgtataccactataaactgaaatgtacttactgttgctaatgtgaacaaaaatgtatctgagacaaatctcaatcagtttagaggcttattttaccaagcttaaggacatgcctgtgacgcagcctcaggaggtcctgaagacatgtgcccaaggtggttgggctacagtatagttttatacattttagagagacataagacatcaa

SEQ ID NO: 781945 - DNA, 637 bp, Homo sapiens
tcatgggtgctagtcacagattaatttatgtctgcactgtggattccagaccttttctcatcctgctctgaaaatcagcacttgttattttccttgattgttctttccatctcctttaatcatcttcttctgcaaaactccatatcctgtgccaagactcacctcaaatgttatctcatttgtacaaacctttccaccttatctaggaaaactgatggtgttattttatattcccccgaatcttgtctgtatcttggttattatcatattttccaatgcttattaagaactcatgacatgccatgtaatttactgttcstcatatagactaccttattcaactctcacacatcccctgtaagatagatattgtcttattatgtcacatgaagctaaaaacttatccaaggttttacaggtaggagggagccaggacttgaacttggatgctttgactctaaggccactggaaagcaccacactccgtggggaaatcgcagatactaacttcttttatagtaattttatgtgagctgatccagtctcatggcttcaaatactatcttattgtatgttgattatgctgaaatttacaacttttctctgaaaaccagatttgtatcatcactggggtttc

SEQ ID NO: 781946 - DNA, 363 bp, Homo sapiens
gacaggatggagaccagagtgggggtggaggtgggacttcaagtttaaagttgcctggaagatgagaaaccagttgaggaggctaagatggagagtagggaaggcaggaggagaccaggagcgtgtggcgtcatggaagcccaggaggagctyggctctttacagaagagggtgatgttagttgtgacaaatgcggctgagagattgagtcaggtgaggccataaaagtgaccactggctttgatgacatggaggtcattagaggccatgacagaagtagtttctgaggagaggtggaagcagatgtatgtggtctagacagagtggtctaaggagggctggtagtgagaacgagggactatg

SEQ ID NO: 781947 - DNA, 608 bp, Homo sapiens
ttaggtcatttctggtattttgcaattacaagcaatgttgcaatgaataatgttgtgtatgttcatatttatggaggtgtagcttttgggtaaattctcagaagtaggattgctaggtcaaaagctacgtgtgtatgtagttttgtcacggattgccaaatttccctccagcaaggttgtacaatttgcatgcttaccagcaacacatgagagttcccgtttccccacagcctggccaacagggtgtcatcatactgtttagtttatgccaacctggaaagtaagtaaataagaaatggtatctcagcatagttttgattctatcttattataagtgaggttgaactactgttccatctttttgtatgattgagaacaatttttatawgtttttataacttgtcattctatatcttttgctcattattttctctctcagatttttgggctttttactccttctaattttaagaattcttttgatgttaggaccgatggccccctttatctgcgttttgagtcataggaagtatttccttatatggaagtttttttctggtgcttatatcttatatggtttcatttatttgtctttctaggttttattc

SEQ ID NO: 781948 - DNA, 622 bp, Homo sapiens
atattaatcctaaaccagcccatccattccattcaatgaactccagcattagacatgaaattgtttgcagaaggcaattatctgatccaggtttagggaaaattacctactatttgcagataatactttataaagtaaagatgctgaactagataatgtctaaagtctttttcagctcctatattccatgttaaatgtctggtccttccattgatcarctattttaacattgaagagaaatctccaaccgttgttcctactggtgcctgctacactaaatccccatctttcaattaacttttttcctgttgtgttgcaggggtgggtatcaacaagatctgcaaaacaacagctataatacaatttattttggattattgaatacaaattatgataacttaattgaaatgtggaataaaccccattccaaaaagggttttgtaaaaaactaattcagataatatagaaaaatatcaaagcccatttttctttgaagagatattgttgtatatatatacatcatgccatgatgtgtccacagtagcatatgacccaaaggaaagaaaaaaaaatcagtctggaagaggatgcaaagagatccaacaaaggatccatatggaaa

SEQ ID NO: 781949 - DNA, 510 bp, Homo sapiens
caggaaaaatggttatagcagagcacgaaattggaatgagtcagggtggagcaggtaatcggaatgactcggggtggagcagatgattgaaaaaggttgctttatgaggaagttaagtttaaaagtagagggcaaagaattgarcacactgacatattgattctttgaagagaaatttagaattcatatctaacaggaccaaacacctactgaattctcaacaaaatagaaaatagaagaccttcaccaagacacgttatcataatacttcccatttttggagcaaataaaataaaaatttaaacacagttcagagagaaaagaatcaagaatgaaaatggcaccggagtttgtcaacccaagtctgagaagtaggtggtgccagagaaatgctttctagatcctgagggcagatattttcaatctggtattccatacccaggaaaactaatatttgacttgaatgtacctcagaatttgtagacttgcaaggtctaagacatttatatc

SEQ ID NO: 781950 - DNA, 607 bp, Homo sapiens
gatatctgcacagacagtgggttgcatatgggctaggaaccctgagcttagggaacttggatcttttataattgacagtaagctcgctctttgctctggagaaatacattgtctctatcttccaaggctgtgcgctatacaaacatcttgtaaaaatagcctggatcaaagagcagttaatgcctcagttgctctatttgtgtagaaatacaagagtcccacagacatttatctgtcaacatcacaactagctttggtatattcataaaatggaaacttttgttttgctttgttttgttttgagacagagtctccctctgttgccaggttggagtgcagtggtgtgatctcggctcactgcaatctccgcctcctggttcaagtgattctcctgcctcagcctccccagtagctgrgactacagacgcacaccaccacgcccagctaattttttgtattttagtaaagatggggattcaccttgttggccaggatggtctcaatctcctgacctcatgatctgcccgccttggcctcccaaagtgctgggattacaggcctgagccaccgcgctggccagaaaagttacttagcaattaaaaaaaaa

SEQ ID NO: 781951 - DNA, 607 bp, Homo sapiens
gatatctgcacagacagtgggttgcatatgggctaggaaccctgagcttagggaacttggatcttttataattgacagtaagctcgctctttgctctggagaaatacattgtctctatcttccaaggctgtgcgctatacaaacatcttgtaaaaatagcctggatcaaagagcagttaatgcctcagttgctctatttgtgtagaaatacaagagtcccacagacatttatctgtcaacatcacaactagctttggtatattcataaaatggaaacttttgttttgctttgttttgttttgagacagagtctccctctgttgccaggttggagtgcagtggtgtgatctcggctcactgcaatctccgcctcctggttcaagtgattctcctgcctcagcctccccagtagctgagactacagacgcacaccaccacgcccagctaattttttgtrttttagtaaagatggggattcaccttgttggccaggatggtctcaatctcctgacctcatgatctgcccgccttggcctcccaaagtgctgggattacaggcctgagccaccgcgctggccagaaaagttacttagcaattaaaaaaaaa

SEQ ID NO: 781952 - DNA, 642 bp, Homo sapiens
tcccaaaatcctacctctccaaactccgctggtatatctttctttcccaccacagccaaagatgccccacttctgagaccaatcattgactttcattttgcattgatttgtttaatcagcttcctctgtgaagaatgctcctctccctggctgcccgaagaaatcaagttartaatttaaatctcactcaaatgtaactctacagtatcttctcctgccactcccttgccaccccactgagctccatggcactttgctcttatggctaaccaatatcataaggcttctggctatgctcaaggtgacttacaaaagttacaaaattgtaatccagcaacccaagtcttctggtttctttggctccttgttctagtctctttccacagacacttctaaaaataaataaataaaaaataaaaaaaataaaaaaaaacccaagaaactaaattaccccaggatctgtgggagactctgatgaatacccaagacattcatttcatgtttaataaagctaatctacccagccattctaataaaattgtagaaatgcaattgactagacctcatggctggctctgtctcttcagataaggcaaagaaagctgagtacggtgcttccagaaaataaacaaaagcaagaat

SEQ ID NO: 781953 - DNA, 613 bp, Homo sapiens
gacaattagatcaactagtctctaaagtccctccataaaaatattgtgactttataactattatctgcaaacatgaagaccatgaaatcctaaccctaaaaataggacagcattttgagctccaaccaatgataaaaaaagagcctgcatttccattcttcttcactacaggctctgaaaatcaaaattaaatttaaaaaaamcatccttacagtgaaaactggaaatttagcagcggtccactgtagtatttagccactgaaataccatggtgacaaatactgtgttagaataataagaaaaatattctgttaaactgctaagagaaagtagggaagcagttttatatgaatgctattataacaaatgaaaatgtaaaagtaaatagaaagaggtgtagaaggaaaatcattaacatactaagagtaattgtgctaaagtcatgggattaagggttattttttcctcctctttgtctaaatgttctacttatatggtttattttattgccttttataatgaagatgtgaatatatatgtgtgtttaatctttcaaatgtttaaactaagagatttatctccaactagaaccaatactttatggtctttcaat

SEQ ID NO: 781954 - DNA, 690 bp, Homo sapiens
atacaggaactgatagcccgaatagccagtttaaagaggaaaataactgacctgatagagctgaaaaacaccatacaagaacttcacaatgtaatcacaagtatcaatagcagaatagaccaagcagaggaaagaatctcagagcttgaagatgatctttctgaagtagacaggcagacaagaatagagaaaaaaagaatgaaaagaaacaaacaaaacctctgagaaatatgggattttgtaaagagattgagtctacaattggttgaggtacctgaaagagacagggataacrgagccaaattggaaaacatacttcaggatatcatccaggataattttcccaacctaataaggcaggccaacattcaaattgaagaaatgcagagaactccagtaagatattccataaaaagatctaccccgagacacataatcatcagattctccaaggctgaaatgaaagaaaagacgttaaggacagccagagagaaaggccaggtcacctacaaagggaagcccatcagactaacagcagacctctcagtggaaaccttacaagccagaagagattggggggccaatattcaaccttcttacagaaaataatttccaacccagaattttgtatccagccacactaagcttcatcattgaaagagaaataagatccttttcagacaagcaaat

SEQ ID NO: 781955 - DNA, 631 bp, Homo sapiens
agcatcaggcaagcaaagagccaaattatgaatgaactcccattcataattgctacaaaaagaataaaatacctaggaatacagctaacaagggaagttaaggtcctcttcaaggagaactaaaaaccactgttcaaataaatcagagaggacacaaacaaatagaaaaatatttcatgctcatgaataggaagaatcaatatcataaaaatraccatactgcccaaagtaacttacagattcagcgctattcacattaaactaccattgacagtattcacagaattagaaaaaaaaatttaattcacatgaaaccaaaaaagagcctgaatagccaagacaatcctaagcaaaaagaataaggctggaggcattatgctacctgacttcaaactatactacaaggctatagtaaccaaagcagcatgctactggtacaagaaaagaaacatagaccaatgcaacagcatagataactcagaaataagacttcacaactacaaccatccaatctttcacaaacccgacaaaaacaagcaatggggaaaagatttcctatttaataaatggtgctaggagaaccagctacctaaatgcagaaaattgaaactggactgcttccttacaccat

SEQ ID NO: 781956 - DNA, 631 bp, Homo sapiens
agcatcaggcaagcaaagagccaaattatgaatgaactcccattcataattgctacaaaaagaataaaatacctaggaatacagctaacaagggaagttaaggtcctcttcaaggagaactaaaaaccactgttcaaataaatcagagaggacacaaacaaatagaaaaatatttcatgctcatgaataggaagaatcaatatcataaaaatgaccatactgcccaaagtaayttacagattcagcgctattcacattaaactaccattgacagtattcacagaattagaaaaaaaaatttaattcacatgaaaccaaaaaagagcctgaatagccaagacaatcctaagcaaaaagaataaggctggaggcattatgctacctgacttcaaactatactacaaggctatagtaaccaaagcagcatgctactggtacaagaaaagaaacatagaccaatgcaacagcatagataactcagaaataagacttcacaactacaaccatccaatctttcacaaacccgacaaaaacaagcaatggggaaaagatttcctatttaataaatggtgctaggagaaccagctacctaaatgcagaaaattgaaactggactgcttccttacaccat

SEQ ID NO: 781957 - DNA, 631 bp, Homo sapiens
agcatcaggcaagcaaagagccaaattatgaatgaactcccattcataattgctacaaaaagaataaaatacctaggaatacagctaacaagggaagttaaggtcctcttcaaggagaactaaaaaccactgttcaaataaatcagagaggacacaaacaaatagaaaaatatttcatgctcatgaataggaagaatcaatatcataaaaatgaccatactgcccaaagtaacttacagattcagcgctattcacattaaactacmattgacagtattcacagaattagaaaaaaaaatttaattcacatgaaaccaaaaaagagcctgaatagccaagacaatcctaagcaaaaagaataaggctggaggcattatgctacctgacttcaaactatactacaaggctatagtaaccaaagcagcatgctactggtacaagaaaagaaacatagaccaatgcaacagcatagataactcagaaataagacttcacaactacaaccatccaatctttcacaaacccgacaaaaacaagcaatggggaaaagatttcctatttaataaatggtgctaggagaaccagctacctaaatgcagaaaattgaaactggactgcttccttacaccat

SEQ ID NO: 781958 - DNA, 618 bp, Homo sapiens
caactgacatttaatgcactttaaagttgttaaaaccaagagcaggaaatgttacacttgtagtatcaagcctggctcatgagaaagttccatccactattctggaaaaaaaatagaactagcctgcaggacacaaagctacctgtggtgatccgaactatgcttctcaaaaatctttcttttgtttggccacctttataataggagttctccaacagagaaagagctgcttacagcttcagagtacagatggataattgttgctgtgccatctctgaacatcttagattgagggtcccagagaacctcatgtatgtgaatgttagcacagtacaaaagatgggacagagctttccagagcagtaacagacagctgtgcccagcactttcttctaaaagttggagatgctggatggaaaatttgtcattgtttacatagcacccacacacacamaaaaaatcctgactcactagcttctgtgttgtcatttttttgtccatggttctattgctgcctaattttcatacgggaccctcacagtggttagtctgcacagtaaggagtcaactgtgacatcctcatccttgaatgctagactccccactttctcagctcaa

SEQ ID NO: 781959 - DNA, 542 bp, Homo sapiens
tatatatgttttctgtgtggacacagcaatcaaagaaaaattgcagtatacaatacttttcaatgtgtgtatgagagaaaatgtcagctacgtctggtgctttctatgagaatataccctaaccacatttccagatggatgttaaagaccagtgtagcagaatcctggaaggctagacttcttcattttctatcattttcatttcccagatgtcaagcaatatattgatgcaaaatctaaaagaagttttcggagaggctgctyggataacaggatattatggtacacaactgaagctacgaaattgtttatttgtggaggtgacatcagtttctggacttatcagactctgttagttcagtgtgtaccacagagacacctgtcactgtcatctcagattagataggaggactttaaggagggattgaagctattgctcaatttggttaaaaaaaaaaaaaagtcatattgttctcgaagcaccttggcttaatgaaaagaagagggcatcagaacttctatccctaacttaaaaattcaag

SEQ ID NO: 781960 - DNA, 490 bp, Homo sapiens
tcccgcctcagcctcccaaagtgctgggattacaggcgtgaaccaccacgcccggttgggagttctctatactacttttgcaatttttctctaagtttgaaactatcaaaatgcagttatcctgaaaaaaagacaaggagtaaataaggataaaagttctagtattttcttcctgcacccaatggcctgccttggatacccactttggtgtccactgagcaaaaccagaygttagaaagtgtccaaaactggaagataaggtacatcactgatacgcatataaacaaagttcctttgggctgttactgatttttggatcttccatgctgtttagaatagaataggctcacaataaatacttactgaataaataattgaagaaaaaggtagctcagagatacagtaatttatgttttaaaaatgaggaaatagaaactgaaagtgctccatttaaaggaaaaagtcacacagctaataagagtgagccaga

SEQ ID NO: 781961 - DNA, 577 bp, Homo sapiens
aagatttattccttcttgagctataaatttctcagctttgcttggcaagccttggagatcaatgctgctttatttaagagcccctcaatccattccttttcttgagaagaaaagggaaaatggtggaaatatggttgtcaaggttggcagactgtggtgaacatttgatgcaccacacagacccccctccagggatgaagaacatattgtctcaactgctggcagtgctgctagtggatgacccttgtctcccacccttctcsaggattctgttggttaagaaaattgcctcacttaatatggtttggctgtgtcctcacccaaatctcatcttgaattatagctcccataatccccatgtgtcatggtagggagccagtgggagttaattgaatcttgggggtgagttttttcctgtgctgctcttgtgacagtggctaagtctcatgagatctgatggttttataaaggggagttcccctgcacatgctctcttgcctgctgccatgtaagatgtgcctttactccttctttgccttccaccatgattgtgaggtctccccccaaccccccatgt

SEQ ID NO: 781962 - DNA, 584 bp, Homo sapiens
tctctctcaaaaaaaaaaagttgaacaaattgggttatgatgttttgcctcatcttccatgttcacctgacctcttgccaactgactaccagttcttcaagcatcttgacaactttttgcagggaaaacgcttcacaacmaacaggacgcagaaaatgcttttcaagagttcattaaaaccctaagcatggatttttatgctacaggaataagcaaacttatttctcattggcaaaaatatgttgattgtaattgtaatggttgctattttgattaataaagatgtgttgcagttatgtttgcaccaacctcaggttgcagtttatttattataaattaatatctcaggaaggcatttatttataccttcctgagaatgtttccccttacattctgttgcttttgtacccattgtcttctggccactaaagagacagtctagtggagtggttgctatagactgaattgggtctcccacccaaattaatctgttagagtccaaatccccagtacctcagaatgtgactgactgtttttggggacagactttttaaagaggttattaagggccaggcttggtggct

SEQ ID NO: 781963 - DNA, 584 bp, Homo sapiens
tctctctcaaaaaaaaaaagttgaacaaattgggttatgatgttttgcctcatcttccatgttcacctgacctcttgccaactgactaccagttcttcaagcatcttgacaactttttgcagggaaaacgcttcacaaccaacaggacgcagaaaatgcttttcaagagttcattaaaaccctaagcatggatttttatgctacaggaataagcaaacttatttctcattggcaaaaatatgttgattgtaattgtaatggttgctattttgattaataaagatgtgttgcarttatgtttgcaccaacctcaggttgcagtttatttattataaattaatatctcaggaaggcatttatttataccttcctgagaatgtttccccttacattctgttgcttttgtacccattgtcttctggccactaaagagacagtctagtggagtggttgctatagactgaattgggtctcccacccaaattaatctgttagagtccaaatccccagtacctcagaatgtgactgactgtttttggggacagactttttaaagaggttattaagggccaggcttggtggct

SEQ ID NO: 781964 - DNA, 584 bp, Homo sapiens
tctctctcaaaaaaaaaaagttgaacaaattgggttatgatgttttgcctcatcttccatgttcacctgacctcttgccaactgactaccagttcttcaagcatcttgacaactttttgcagggaaaacgcttcacaaccaacaggacgcagaaaatgcttttcaagagttcattaaaaccctaagcatggatttttatgctacaggaataagcaaacttatttctcattggcaaaaatatgttgattgtaattgtaatggttgctattttgattaataaagatgtgttgcagttatgtttgcaccaacctcaggttgcagtttatttattataaattaatatctcaggaaggcatttattyataccttcctgagaatgtttccccttacattctgttgcttttgtacccattgtcttctggccactaaagagacagtctagtggagtggttgctatagactgaattgggtctcccacccaaattaatctgttagagtccaaatccccagtacctcagaatgtgactgactgtttttggggacagactttttaaagaggttattaagggccaggcttggtggct

SEQ ID NO: 781965 - DNA, 584 bp, Homo sapiens
tctctctcaaaaaaaaaaagttgaacaaattgggttatgatgttttgcctcatcttccatgttcacctgacctcttgccaactgactaccagttcttcaagcatcttgacaactttttgcagggaaaacgcttcacaaccaacaggacgcagaaaatgcttttcaagagttcattaaaaccctaagcatggatttttatgctacaggaataagcaaacttatttctcattggcaaaaatatgttgattgtaattgtaatggttgctattttgattaataaagatgtgttgcagttatgtttgcaccaacctcaggttgcagtttatttattataaattaatatctcaggaaggcatttatttataccttcctgagaatgtttccccttacattctgttgcttttgtacccattgtcttctggccacyaaagagacagtctagtggagtggttgctatagactgaattgggtctcccacccaaattaatctgttagagtccaaatccccagtacctcagaatgtgactgactgtttttggggacagactttttaaagaggttattaagggccaggcttggtggct

SEQ ID NO: 781966 - DNA, 603 bp, Homo sapiens
tcagagtttctcacaccttgagcagcatggccagcctgcagctctgggcttctgttttctctccctgaaatttcttactttccatgccttgccctggtcctgccctgccaatgtctgctccattacagtggtttcacctcccagaagacaggtttgctccaaccctccaatgtccctggcagttctgcaccccagagggatgaatacccttctctccaggayaactcatttcttagacaggaaaaaatttaatttcatcttctctaatctaactcttcctgaaagatgcgtagctgaatcagaatgattccaggcatttcctctcactttcttaatagaaaactgtaccataaagacacatgcacgtgaatgttcattgcagcactattcacaatagcaaagacatggaatcgaactaaatgcccatcagtgacaaattggattaaaaaatgtggtacatatacaccatgaaatataatgaagccataaaaaagagcaagataatgtcttttgtgggaacatggaaggagctggaggccattatccttagcaaactaaactaggaacagaaaaccaaatacaacatgtcctcagctatgagtt

SEQ ID NO: 781967 - DNA, 603 bp, Homo sapiens
tcagagtttctcacaccttgagcagcatggccagcctgcagctctgggcttctgttttctctccctgaaatttcttactttccatgccttgccctggtcctgccctgccaatgtctgctccattacagtggtttcacctcccagaagacaggtttgctccaaccctccaatgtccctggcagttctgcaccccagagggatgaatacccttctctccaggatawctcatttcttagacaggaaaaaatttaatttcatcttctctaatctaactcttcctgaaagatgcgtagctgaatcagaatgattccaggcatttcctctcactttcttaatagaaaactgtaccataaagacacatgcacgtgaatgttcattgcagcactattcacaatagcaaagacatggaatcgaactaaatgcccatcagtgacaaattggattaaaaaatgtggtacatatacaccatgaaatataatgaagccataaaaaagagcaagataatgtcttttgtgggaacatggaaggagctggaggccattatccttagcaaactaaactaggaacagaaaaccaaatacaacatgtcctcagctatgagtt

SEQ ID NO: 781968 - DNA, 542 bp, Homo sapiens
tttcagggcactgacaaaggctcttttagacaagtgatattcgcaggaggtggtctattgatacaactggagggagagagagactttacattatgaacaactatagaattggctatctccatccactagcaaagaagtaaagcataagagaataaatagtaagtcatgmttgcagttcctgccagtctggaatacaaccttagactcttctttcatgcaaactcctggtaaagatttgtttaaagaaaaactgattttaaaaactgataagtaattttaaaagaagtcaaaataacttctaaaccaagatactacaggaagagatggggtttgaaaaagcaaaaataaatggcaggcaaagaatactcaccagaaaatggttgttacaggccagacaaaagttattataaaatgccttccatgaattaaaaaaatttagtcaatttgactctgaagctagaacactaaacaaagacagagaaagtcaggtgagtgataacaagacaacagaaaaagattaaatgtgagttgggctggcagat

SEQ ID NO: 781969 - DNA, 542 bp, Homo sapiens
tttcagggcactgacaaaggctcttttagacaagtgatattcgcaggaggtggtctattgatacaactggagggagagagagactttacattatgaacaactatagaattggctatctccatccactagcaaagaagtaaagcataagagaataaatagtaagtcatgattgcagttcctgccagtctggaatacaaccttagactcttctttcatgcaaactcctggtaaagatttgtttaaagaaaaactgattttaaaaactgataartaattttaaaagaagtcaaaataacttctaaaccaagatactacaggaagagatggggtttgaaaaagcaaaaataaatggcaggcaaagaatactcaccagaaaatggttgttacaggccagacaaaagttattataaaatgccttccatgaattaaaaaaatttagtcaatttgactctgaagctagaacactaaacaaagacagagaaagtcaggtgagtgataacaagacaacagaaaaagattaaatgtgagttgggctggcagat

SEQ ID NO: 781970 - DNA, 516 bp, Homo sapiens
acataactaacttcatttttgtttaagggacctttacctattcccacggataggcaaggataattatagagcagtgagatcatacacaaaaacagcaatcatgtagtttttcagaaagaactctgagtttaaaggacaagtaactatgttttgttaaagatttatggaaatactgtgacctgaccagggaaaagaagttcccaacatcctcacaccctcrctggtgcccagatatctgcagtcatcagttacctcttgccctgagccctccatcttcctcctgccgttgacataaaaagagccaaaaatttggaatgacttaagatggtactttagcatgatagtgtgccatcatctgggtttgctggctttctgaataaacgtgcttttcctcccaccaacccttgtctcttgagtttggcctttcaagcagtgaggagccaaacttgggtttagttacaggggtactactgtacatattatacaaaatagctataattttatatatatcttaat

SEQ ID NO: 781971 - DNA, 592 bp, Homo sapiens
tttctgcttgtatttcaaccttacataagaaaaatatattttgttgtcatattaaattctttagttcttgcttaatgtgacctttctcatcttcaattggaaatgttttgatttcagaaattatagcgcatgttgaaagaagttactgatttttgtcatcatatgtatgcttatctgtctaattaggatgatmgtactaaatttactaagatatgtgtgcatttcaatgcaatattaggctttaattttttttcctgggaaagaatgatgaaaaattgccacaaaattgcattgccggaaagataaattctatttgttttaataaagcacgttttaggcaatttggaaatgactcacccctcactgttcacttcgtgcactggttatgatgaccaacattatgaaggtaactaacctcatgaaggtaaacttttagaagagaggagtgaacatcaacactgaccttggtcttatatttaattctctgtcttctttgagccaatattaccataagttgtttactgaatcacacgtttacctaaaataaatcctttttatgccgcagttgttgcaggtgacatagtatacacct

SEQ ID NO: 781972 - DNA, 650 bp, Homo sapiens
aaagtgggaaaagcctcttataaaaccatcagatctcggccgggcgcggtggctcacgcctgtaattccagcactttgggaggccgaggcaggcagatcacgaggtcaggagacagagaccatcctggctaacatggtgaaaccccatctctactaaaaatcaaaaaattagccaggcgtggkggcgggcgcctgtggtcccagctacttgggaggctgaggcgggagaatggcgtgaacccaggaggcggagcttgcagtgagctgagaccgcgccactgcactccagcctgggcggcagagcgagacttcttctcagaaataaataaatcattaaaattaaattaaaaaaccatcagatctcatgagaactcactatcacgagaacagcatgggggtaactgcctccatgattcaattacctcccactgggtccctcccaggacacatggggagtataggaactacaattcaagatgagatttgggtggagacacagccaaaccatatcaggctgctttgtgttcttatcattcatgtgttcactggagtagcacttttaatgtcctttaagaacttttccttttacattcacaacttggtgaactggcacaagaggcctagctttcagaagagcttggcttttgaca

SEQ ID NO: 781973 - DNA, 633 bp, Homo sapiens
agcttttctcttaagtatctaaagcaaatcaccagacttttacatagtaccctcacatagctagataagaaagtaaaagtaaaataatgaaagcagactctaaacagcagaagctccaaactccttagtttctctgttgtgctcaatcctttagcaaattacaggcctgaaaacaaggagtagctctatcacttaacaagtgactaaggaatgactttgttaattagaagtccaagrgtgagaggctcctttccaccaaagctctgaataaacatcaacatcaggtcaaccagagttgtcttggtcccaggagtagcttaagcggatgactcaaattcccagcagaattctagtttaatatttattggaactccgagcttagtcacacagtgacttggaatttaagacacatggggtctcttctttccatccttaaagatatttttgctaagtgacacaaagttaaagaggcaagatgggttttaatttagagtttttattccctgaggtgtaagaaattaaaattttattttctggggagagtgaaccatactagctctgaatttcaaacacaactattaaccctgtcagataattctattatcaagttttacaaaactgtttactattatt

SEQ ID NO: 781974 - DNA, 633 bp, Homo sapiens
agcttttctcttaagtatctaaagcaaatcaccagacttttacatagtaccctcacatagctagataagaaagtaaaagtaaaataatgaaagcagactctaaacagcagaagctccaaactccttagtttctctgttgtgctcaatcctttagcaaattacaggcctgaaaacaaggagtagctctatcacttaacaagtgactaaggaatgactttgttaattagaagtccaagggtgagaggctcctttccaccaaagctctgaataaacaycaacatcaggtcaaccagagttgtcttggtcccaggagtagcttaagcggatgactcaaattcccagcagaattctagtttaatatttattggaactccgagcttagtcacacagtgacttggaatttaagacacatggggtctcttctttccatccttaaagatatttttgctaagtgacacaaagttaaagaggcaagatgggttttaatttagagtttttattccctgaggtgtaagaaattaaaattttattttctggggagagtgaaccatactagctctgaatttcaaacacaactattaaccctgtcagataattctattatcaagttttacaaaactgtttactattatt

SEQ ID NO: 781975 - DNA, 633 bp, Homo sapiens
agcttttctcttaagtatctaaagcaaatcaccagacttttacatagtaccctcacatagctagataagaaagtaaaagtaaaataatgaaagcagactctaaacagcagaagctccaaactccttagtttctctgttgtgctcaatcctttagcaaattacaggcctgaaaacaaggagtagctctatcacttaacaagtgactaaggaatgactttgttaattagaagtccaagggtgagaggctcctttccaccaaagctctgaataaacatcaacatcaggtcaaccagagttgtcttggtcccaggagtagcttaagcggatgactcaaattcccagcagaattctagtttaatatttattggaactycgagcttagtcacacagtgacttggaatttaagacacatggggtctcttctttccatccttaaagatatttttgctaagtgacacaaagttaaagaggcaagatgggttttaatttagagtttttattccctgaggtgtaagaaattaaaattttattttctggggagagtgaaccatactagctctgaatttcaaacacaactattaaccctgtcagataattctattatcaagttttacaaaactgtttactattatt

SEQ ID NO: 781976 - DNA, 601 bp, Homo sapiens
tggtgctatgatatctacatgcagaagaatgaaattggactccttcttcacatcatatacaaaaatttactcaaaatgaaatgtagacctaaatgtaagaactaaactattaaactcttagaagaatatattgcagtaaatccttgtgacctctgttaggcaaaaccttcttagctatgacactgaaagcatgaataacaaaaaatagataaattggactgaagtcaaatttaaaatcttgtgtgtttcaatggataccatcaagaaaatgaaaagataacccatagaataggagaaaatatttgcaaatcatatatcaggtaagggacccatatctagactatataaaaaactcttacaactcaataataaaaaggcaaatacccagtttttaaaatgagcaaagtgtctgmatagacatttctccgaagaagatgtacatcaagcacatgaaaagatactccataggattagccattagggaagtgcaaatcaaaatcacagtgtgatgctacttcacactcaaggcaaatgactataatagaaaaaaaaagatgaaaacaagtgttggtgagcatgtagagtcattggaacactcaat

SEQ ID NO: 781977 - DNA, 601 bp, Homo sapiens
tggtgctatgatatctacatgcagaagaatgaaattggactccttcttcacatcatatacaaaaatttactcaaaatgaaatgtagacctaaatgtaagaactaaactattaaactcttagaagaatatattgcagtaaatccttgtgacctctgttaggcaaaaccttcttagctatgacactgaaagcatgaataacaaaaaatagataaattggactgaagtcaaatttaaaatcttgtgtgtttcaatggataccatcaagaaaatgaaaagataacccatagaataggagaaaatatttgcaaatcatatatcaggtaagggacccatatctagactatataaaaaactcttacaactcaataataaaaaggcaaatacccagtttttaaaatgagcaaagtgtctgaatagacatttctccgaagaagatgtacatcaagcacatgaaaagwtactccataggattagccattagggaagtgcaaatcaaaatcacagtgtgatgctacttcacactcaaggcaaatgactataatagaaaaaaaaagatgaaaacaagtgttggtgagcatgtagagtcattggaacactcaat

SEQ ID NO: 781978 - DNA, 543 bp, Homo sapiens
tgataaaaagaaacttaagatgacaactatttcagcaaagaatgataagtgaagcaccagatgctacatattttcaactgcaaaaatatcatgggaagccagctgtatcttctaaaatttcatgatgtcattgtatggcttcaggatctatttagctgctttataatcttattagcttatctctgcttccagtcatgcactaggccttaattgcataggtttgtttataatattgttagtgttctggtrtcatatttcaagcaagaagcatcttgcttacaggctagtgcacaaaaacttgccaccctgagcaaaacctagtgatccattgcaaactgatatcactgtcccatttttctgaagaggtcatcgtttcctggcattgagctatcatgctagtgactcagagttttttattttattcaacttttcccaaaagttcgagtctaggatgatgatttcaaagtgtgatggaagcgaagtgtttcagttcagtgagtttcaatgtcacagtgaaatttaccacgttttccaggaatcagt

SEQ ID NO: 781979 - DNA, 644 bp, Homo sapiens
caatagaatggatactaaaatctgtcatgtatttacttcaacaaaaccatcatatatacctattgttagtagaatgcagtttttgaaacccataatgtctgcatatggtgctacattcaagagacagacaaggcatacagggaaggtaagtctttctctgtccttcagttacccagttctcctttccagaaaattgctgttacctgtttcttatgtatcctactacagacaatgttagcatttgcaaacatgtgtacctctacaaacataaatgaatttttatatacatacctagtaacacattattaagcaccttactttttcacttattaacatatgtcagaaatctctaatggttaaattacaaacaaggatgttgaggaccaggtttctaatataaattctgacattttgaagagtsgtattgtaattgctatgatggtaggcataaaataagccaaaacacccccttggcccccggaataaacatatgaaaagaaatgtaaattcaaattcaaatgagaaaatcattgctacctatcaaataagcaaatgataacaacaatgaaatagttgttatttcaatataaaatcgataatgcctatggccaattgctgaagccagaaacctcagcatcatttct

SEQ ID NO: 781980 - DNA, 601 bp, Homo sapiens
ttccctgtcctccttcagtcaagtgtgcatcttaacaagagggaaaagatagtttggcatctattccaaaccagattctggaataccttttgatcaagttcaacttatcccattaccttttcttgttcaagttcaatgcaaaagtagtcatttgacagaaaaatatcaattgtttatgaatgctggttcattaacagaaagcaatagatctctgctttytaggtaataatcgataaaagtagctgcttcaacaaaataagctgtgaaaaaggtttatagttgctaggatgtgtttattaacctttgttaatttcaaatttcttagcgtgctgtgctaaattaattaatttacatacaaaaaattataaatcctcctaaacgtgtatttcttaaaaaaaaaaaaaagaatagctatagttttcttatatggaactttttcagtttcaaaataccaagtatgtaatctttgcagcaaaaaaattggtaataaatatcaaatgccctatatatccatgaaaagatttacacaacaatgcccaaagtagatttatttttaatagtcaaaaactggaaacaactgaaatgcccatcaataggtgaa

SEQ ID NO: 781981 - DNA, 601 bp, Homo sapiens
ttccctgtcctccttcagtcaagtgtgcatcttaacaagagggaaaagatagtttggcatctattccaaaccagattctggaataccttttgatcaagttcaacttatcccattaccttttcttgttcaagttcaatgcaaaagtagtcatttgacagaaaaatatcaattgtttatgaatgctggttcattaacagaaagcaatagatctctgctttctaggtaataatcgataaaagtagctgcttcaacaaaataagctgtgaaaaaggtttatagttgctaggatgtgtttattaacctttgttaatttcaaatttcttagcgtgctgtgctaaattaattaatttacatacaaaaaattataaatcctcctaaacgtgtatttyttaaaaaaaaaaaaaagaatagctatagttttcttatatggaactttttcagtttcaaaataccaagtatgtaatctttgcagcaaaaaaattggtaataaatatcaaatgccctatatatccatgaaaagatttacacaacaatgcccaaagtagatttatttttaatagtcaaaaactggaaacaactgaaatgcccatcaataggtgaa

SEQ ID NO: 781982 - DNA, 580 bp, Homo sapiens
tggacttggcttttaaaaattcttatctgagatgtttcatagaatagagttccatcaaagccaattaaagcctacatgaaaaataattattcttgctgcactttatgcaaataatcaggccaagtacagtaagactaaagttttattttgtaaactgtaaatcagttctatcattatttgttttttttttaaaaatggagactggagagagaaaaattatgcctcaaaagaaaaactatagtacactgttgttagctgttcttgaagttttttcctgccatttagactaaattctaaattctttgtaggctagaagtctccaaactaatgctttcaaatctttgcttttaaaattgggaattgtactcctcatcctaggactcattatttaccttatagtatacagttcacttaaatamtgtcctaaaactgtagatggaagtaataatgtttttaccatgctagccttgaaagcccagccatgcctgcatgagtatgctcaggcaattgcaaagtagttccattcttctcaccttgtggccagagcgattgatggccttttcccatcttcatagcatac

SEQ ID NO: 781983 - DNA, 498 bp, Homo sapiens
tattcgttgaaaatgaggatttatcttcactcaattttaacataaaatctaaagattacttagaattataaaacataatttaaataaaataaaaatatatataaaataaacattaaaatcaatataaaaggcaactaggaaagtttaacaatttctaacatttcaaagacttcttttttcccttattgttttttccttattgtttgtcaatttctaatttaaatacattaagaattagggccaggcatgctgactcatgcctgtaatcccagcactttgggaggccgtcacggccagatcacgaggtctagagatcgagaccaccccrgacaacatggttaaaccccgtctctactgaaaatataaaaaattagctgggcgtgatggcacacacctgtagtcccagctactcgagaggctgaggcaggaaaatcacttgaacctgggaggtggaggttgcaatgagctgagattgtgtcactgcactccagcctgggc

SEQ ID NO: 781984 - DNA, 631 bp, Homo sapiens
gctggaaaaactagatattcacattcaaaaagaataaaattggatccttattttatatcatgcacaaaaatcaactcaaaatagattaaagacttaaacataagacatgaatttataaaactccaagaaggcaacatagggtaaaattttcataacatttgtcttrgcaattaattcttggatatgacaccaaaagcacaagtaacaaaagcaaaaatagacaaatggatttacatcaaatgaaaaagccagaaactaaaaatcttctgcatagtgaaggaaataatcaaccgagtacaaaagcaacctacagaatgagagaaaatatttgtaaaccatatatctgacagggggttaatataaaaatatacaagaaactcaatagcagaaaataaaaataaaaataactatcttcaaagaagagatacaaatgaccgacaggcatatgaaaagacattcttcactaatcattagagaaatgcaaatcaaaaccacactgaggtatcatctcacactcattatgatggtcattataaaaaattaaaaattaaaaaaataaagtgttggcaaggatgtggaaaaatttgaaccgtgtgcactactggtaagaatataaaatgatgttgccact

SEQ ID NO: 781985 - DNA, 631 bp, Homo sapiens
gctggaaaaactagatattcacattcaaaaagaataaaattggatccttattttatatcatgcacaaaaatcaactcaaaatagattaaagacttaaacataagacatgaatttataaaactccaagaaggcaacatagggtaaaattttcataacatttgtcttggcaattaattcttggatatgacaccaaaagcacaagtaacaaaagcaaaaatagacaaatggatttacatcaaatgaaaaagccagaaactaaaaatcttctgcatagtgarggaaataatcaaccgagtacaaaagcaacctacagaatgagagaaaatatttgtaaaccatatatctgacagggggttaatataaaaatatacaagaaactcaatagcagaaaataaaaataaaaataactatcttcaaagaagagatacaaatgaccgacaggcatatgaaaagacattcttcactaatcattagagaaatgcaaatcaaaaccacactgaggtatcatctcacactcattatgatggtcattataaaaaattaaaaattaaaaaaataaagtgttggcaaggatgtggaaaaatttgaaccgtgtgcactactggtaagaatataaaatgatgttgccact

SEQ ID NO: 781986 - DNA, 708 bp, Homo sapiens
cacattcaaaaagaataaaattggatccttattttatatcatgcacaaaaatcaactcaaaatagattaaagacttaaacataagacatgaatttataaaactccaagaaggcaacatagggtaaaattttcataacatttgtcttggcaattaattcttggatatgacaccaaaagcacaagtaacaaaagcaaaaatagacaaatggatttacatcaaatgaaaaagccagaaactaaaaatcttctgcatagtgaaggaaataatcaaccgagtacaaaagcaacctacagaatgagagaaaatatttgtaaaccatatatctgacagggggttaatataaaaatatacaagaaactcaatagcagaaaataaaaataaaaataactatcttcaaagargagatacaaatgaccgacaggcatatgaaaagacattcttcactaatcattagagaaatgcaaatcaaaaccacactgaggtatcatctcacactcattatgatggtcattataaaaaattaaaaattaaaaaaataaagtgttggcaaggatgtggaaaaatttgaaccgtgtgcactactggtaagaatataaaatgatgttgccactataaaaaaaacagcatagagattgatagaaaaattaaaaataaaaactaccatttgatccagcaatcccacttctgggcatttatccaaaagagct

SEQ ID NO: 781987 - DNA, 611 bp, Homo sapiens
ttgtctggcacatttccagatatattaatatgtgtcactgccttagaaagttgagtagaatgctcttgcaataaaggtacttgacaatccatccgccctatggcatgtcatctatcaatgtcatttataaagtcattcagaggtgctactcaggtgaaacagacggcgataaatctgtgaacgttcaaaagatatggcttctaaaactgctttcatgggtaaatccttgatactggctaaggcaagcaggaaatctggttatagttcaatgattcagaaagtgtggttgtcttatcaaaagtggtgtcgaaattctcctcccatctcaatttgataaaaacttctggcaatatagacattaggtcttcctctaattcctgaaatggaaagtgctatgtgcgttatgttattggggttctgtgcctcagggtcttcattgtaaaawaaaatattgatagtatttatttcacagagctcttattcaggtcatgagaataaagtacttggattgaaagagcttagtaaaaagtggcacaattagacaaataagattagttgatagaaatcactacaagtacctccacttacagtttttatcccactgaggatgt

SEQ ID NO: 781988 - DNA, 611 bp, Homo sapiens
tcagaccagaatatttcttaataacccccataacttcaaaacaaagttattaaacttagagttactagattgaagataaacccttttcatgtattattataatcatatattgatgtcatagattatatccaaagtttattagcattataagaaaaaattgataatgatttcaattaatctgagctagttaataaaactaagtatttttttgtagaaagttgaaaacctatagaaaagcatagaaamcaaaatagaaggggttacctataatcccaccatctagttataacagtgattactattttggtcttagccttttttcctatatgtatatgtatgtatgcatgcatgtgtatatatggatatatataactctgtttatgcatgtgtgtgcatctgaattttttagtagaacatacttctatgcagatggttttttacatcacagttaccactgttttgtgtggcttgagaacatatctcaataatacatgatattttaaagcttcagttctgaattctgactgcctgagatggagtgctgattcatcttttgctagttgtgtggacttgacaaggtaaagggtctttgaaccctcagattcttattt

SEQ ID NO: 781989 - DNA, 633 bp, Homo sapiens
agttattctgtccttggcatccttaattcctggaggggctgtctcgtcagctgtagcaagtgtctttttggaccaataacgcccaagcattgatgttttatcagcacttgttctggtgccagattttcatcagtgatgactttggcaaactcatcagttaataaatttccctgctgcttcatrattggcagatgctttatcaccacaaatctttaacaatttaatgctgtgtcttttcttaaatttctgcagccagcttgttgcatgtatttttaattccttccaaatttcagttcaccatgatagaactttgcttgtttcatgatcagtataccattaagtggcatgtgttcactgcagtgttgatggatcactctttcaacacatgatcaagatattaatttttagctttattcagtttttttttatttttcattaatttgtgttcattactatcagcatagaacttcaatggttcatctttctgtttcttcagtttgtgtatggtggtcattccaacaccatgttcttctgtaagatgtttcacgcttacactggtgtccagtttcttcaacagcttgactttgtgtgctacagataaacataaatgcttcctctttttcttatcaatct

SEQ ID NO: 781990 - DNA, 610 bp, Homo sapiens
ccgtgttctgcccagactgttttctgtggacgactgtgtagtgtgttggttttgtttcctaatgtttaatgaacgttataaatgacgctcactaaacaagacctcacaccaaccaaattttctattattttgaaattttctatcctttttgccataaggcctttcatcttttgcttgattagaatatacgcatgagtgttatgcttttccttaaattcctgtaggtcatcaagtgtctgcccccagtttctccttttgatggacagatgcctgcttcctttctacctctgacatagagtgccgcttccagactattggcaagaaaggccacataaagaaaccattgccggccgggcgccgtgactcacgcctgttaccccagcactttgggaggccgaggcggrcagatcatgaggtcaggagatcgagaccatcctggctaacacggtgaaatcccgtctctactaaaaatacaaaaaattagtcgggcgtggtggcaggcgcctgtagtcccagctactcgagaggctggggcaggagaatggcgtgaacccgggaggcggagcttgcagtgagccgagattgcgccactgcactccagcctgggcga

SEQ ID NO: 781991 - DNA, 587 bp, Homo sapiens
cctaggcaggtggatcacgagatcaggagttcaagaccagcctggccaacatgatgaaaccccatttctactaaaaatacaaaaatttgccctacgtggtggcgggcgcctgtaatcccaactactcgggaagctgaggcagagaattccttgaaccagggaggcggaggttgcactccagcctgggtgacagagcaagactacgtctcaaaaaaaaaaaaaaaaaaaaaaaraaggatgggcgcggtggctcacgcctgtaatcccagcactttgggaggctcaggcgggcggatcacctgaggtcacgagttcgagaccagcctgaccaacatggagaaaccccgtctctactaaaaatacaattacccaggcgtggtggcgcatgcctatgatcccagctactcgggaggctgagtcgggagaatcgcttgaacctgggaggcggaggttgtggtgagccaagatcgtgccattgcactccagcctgggcaacaagagcgaaactctatctcaaaaaaaaaaaaaaaagaagtagagaaataaaatatgattatgcctggggtgattgagaaatgtttctagaa

SEQ ID NO: 781992 - DNA, 635 bp, Homo sapiens
gcaattcttgtcaatcttgggacagtttcaatttactctattgaaagtttttattaatattttgataactggaatttgatttcgatgcaattttttttttttgagacggagtcttgctctgtcacccagactggagtgcaatggcgtgatctcggctcactgcaacctccgcctcccggttccagcaattctcctgcctcagcctcccaggtagttaagattacaggcgccgaccaccatgcctagctaattttttgtttttagtagagacagggttttgtcatgttggccaggctgctctcgaactcctgacctygggtgatccacctgcctcggcctcccaaagtgttgggattacaggcgtgagccactgcgcctggccgatttgtttttgtatgtatattttttaaattttatgctttactagaatgccaaagggatctgtggcacaaaataactaagaaccactgctgtaacctctctctcccctcacccctttgagcctgggagtggaaatatcccctgcagttctcttacataacactcccacctttgtgtgtgcgtgtgttttgtttgttttgttttgtttttgggatggagtctcgctctgtcacccaggctggagtgcagtgaag

SEQ ID NO: 781993 - DNA, 448 bp, Homo sapiens
gagtttaagagatctcccacctcagcctcccgagtagctgggactacaggtgcataccaccatgcctggctatttttttgtagagacagggtctcactatgttgcctaggctggtcttgaactctagagcttaagtgatccacctgcctcagcctcccaaagtgctagggttacaggcatgagccattgcactcagcccctcctctcttcttgtaccccatgcccggagcagccctgatytgtgagaggagagaagaccaagccattggctgccccaccagcagccccttcctgggaccttatttaccataatagatggtgatcaccatgcacagggatgagctgctgatggtacacttctctgagcctgaaatgcatcctacagaagggtcttctacgaggcagaagtggcacgtccggatgtcgggaacaggaactggggaggcag

SEQ ID NO: 781994 - DNA, 545 bp, Homo sapiens
aatgtgtccaaaccctaactacaggcagggcaggtagctcatgcctgtaatctcagcactttgagaggccaaggtgggcggatggcttgagcccaggagttcaaaaccagcctgggctacatggcaaaactctgtctctacaaaaartacaaaaattagccgatgtggtggcacacgcctgtagtcccagctactagggaggctgaggagggaggattgcttgagcctgggatgtcgaggctgcaatgagccctgattgtgccactgcactccagcttgggcgacagagactctgtctccaaacaaacaaaacaccaccaacccctaactgctatgtctgttttttcatctgtaaaattggcaaatcatcaatcttataggattaaatgaaataatgcacataaagcccttagcaaagacttgcacatggtaagtccaaagtatatatttgctataattaatagtaatgtttgcaaagcacttagtttctggtgggtaataagttctcaaataataggcagtaagaattgccaaataggttgtcc

SEQ ID NO: 781995 - DNA, 497 bp, Homo sapiens
ttaatcaaatttaactcttataagatacctaaggttacataatatatttgcttagagtgccgtaacaaagtaccacagactgggtggtttaaacggcagaaactcgttttctcacagttctgcaggctaggggttcgagatcaaggtgttggcagagttgattccattcagaggcttctcttcttgtgttgtagatggctgtgttctcacacgatcttccctctgtacatgtttgtatcctaacatcttcttaaaaggacaccattcatattggattagaacccatcctaatgacctcatgttaattcaattattctctttaaaaaccttacctccacataaagtyatattctgaggtgcaagaggcaaggacttcaacatatgaatcctggggggagacaattaagtccattgcacgtaggtggtgaattaagggtctgaggtttaaacaatgttttttttctgactcaaagaccagattttttcactggacgaaa

SEQ ID NO: 781996 - DNA, 640 bp, Homo sapiens
aggaaagaagaaaagctcacatttgctaaatccagaatgacggagtggattcagaagtgctctctcaacaaagtggtttacactctggagctaatgcaaactctctttgtttcaatgtattgctcgcaaatattgattaatcatttttctttattagcttatgccctcttggtggtataatgcatttgactttccttctgtcttccaggagagtgggatattataaacctgagctgacacttcagcaaaagggttccagaggtttctagagatggggamacagatgattaatgtcagtctcctctaataaaaaataaacgttagagagagagggtgtgttttttcttacgtcctttaaaaccttgtgctatgagtatgcgacagtagtgaggcagaagacactatggtgaaatcattcagttcaggaggctcattcttctattaattccacagtgcttcctggacacagttttctgtgccttttaaagaagggccagaggcctattctaaaacctgtatggctgtcaaataaatatcactgtgccggcaaaagagagattctggttgaggcctttccctcttaactacctaaggactgtatatttttaggtacaaaggaaagaattaagctgccttttgt

SEQ ID NO: 781997 - DNA, 643 bp, Homo sapiens
aatgaaacaccaaactagaaatttattgccattcctcaaactgacatcattcaatgatcaaaataaaatgcatccataatatcctagaaaatttacatgtcccattcttaaaaagaaaggcaaactatttttaacgtttaacgtgacatgcatttgtttttaaatgtctcagttttatataaccatatactcaaggtctttatcattcaaggtacaggaaggttgtgcgtttaatctttagcatggttgtaggagatatgattcacagagtagaaaatagataaaaataagcatgcagccagtatggtgccaaatcatcagaactcgacatcttattgacaaatggaagtcattcttctttatttcttgagcaaagcagtttcataaaagataaatagctttcagtcagaatagcctaacctgcaatatgcatctttttgacatgtatattctaatactactctagaccataagattaaaataagaaaaatctyagagtagtgtgttgacaagaagcactggttgaatctgtattttttttttccatttttcatctcccagaatttggctctgtgtatgtttgtaccttactggctgtcattaagtaatcaacttctagtgaccttcaagcatcattttctaa

SEQ ID NO: 781998 - DNA, 654 bp, Homo sapiens
tcatattattattattaaacgttattttttgtttatcaaagttgacattaactccttatgtccatttttaggataagaaaattagcactcctccacatttttctcctccttctgctccatacctttatggatctattaggtatggcattatttgaacttgattaagtttacactctttaaatttcagactaacacggctaattaaatatttaataatttacattctaaaattcagaaccaataaatattttcaatattacagttacagtaatttagaatcatcatggagctgagtrgaatgatgtaatgctacttcactaaccttggtccacttgacaaacgatgttctaagagtgaaggtcaagtgggcctttttctttacactccacaagtagctcaaaacattccacactgcagtctttgtcagatttggtccgtggcttcctgatacaggattttgctcttctttgagtttccagttttcttttttaatttccctattgacagaagaagcttaagccttttattcagtgccacaataatcccgtcttttaactctactatatgtcaaagttaatccatttcttctagagaacattgtagttagtatcctctatactcatgttccagttttgaccattttttttttctcac

SEQ ID NO: 781999 - DNA, 529 bp, Homo sapiens
ttctctgaattactggcatttataaaaatgagactaaaattttcatgaatgtgaaaattggctaatcttagaaggaaagcgctttactaatggctaacagaattaactagcaataataacgtctatggaagaaaatgactttaaatactgtttttcaaatgaggaagcatctgttgaacatcaactgtaccctgcattttggaggtcatacaagacgtgtaagattttgaacttcaatrctaaatgattgcttaggatagtgtatataaagtctctaacatattccattgcttacaacacgtcagttaatattgttttttttttttttccttattctctgtaatgagcttaagatccggttggggaaacgtgactaacacatctgaaatatacataaactagtgaaatataattagtatatgatgtagtttggatatttgtccctgcccaaatctcttgttgaaatgcaatccccagtgttggaggtggggcctggtaggaggtgtttggatcatgcgggtggatccct

SEQ ID NO: 782000 - DNA, 629 bp, Homo sapiens
aaaataattatacaactcatcataatgtagaataagctcagtgggagccctgagcttactgtcctgcaactagacagtcccatctagggttggtgggagacagtgatagatcatcagacattagagtctcaaaaggagcacgcaacctagatcccttgcatgtgcagttcacaatagggtttgtgctccagtgagaatctaatgstaccgctggtgtgacaggaagtggagctcaggtggtaatgtgagcagtggggagtggatgaaaatacagatgaagcttcactggcttgcctacagctcacatcctgctgtgtggcctggtttctaacaggccactgtaccaagtctatggcccaggagttggggactcctgctctagacattcaacttagatatttttaaatatcttctatgtctccacttagtattttgcacatatggaacacagtcacatatgttttaatacccttttctgctaattctaatacctgtatcagttctgggtcagtttcaattgagtgactgaacttcactattggttgtattttcccatttcttgcatgttggtaatctttggttgtatgtcagatactgtgaattttaccttgttccatgcttgttatgtg

SEQ ID NO: 782001 - DNA, 629 bp, Homo sapiens
aaaataattatacaactcatcataatgtagaataagctcagtgggagccctgagcttactgtcctgcaactagacagtcccatctagggttggtgggagacagtgatagatcatcagacattagagtctcaaaaggagcacgcaacctagatcccttgcatgtgcagttcacaatagggtttgtgctccagtgagaatctaatggtaccgctggtgtgacaggaagtggagctcaggtggtaatgtgagcagtggggagtggatgaaaatacagatgaagcttcactggcttgcctacagctcacatcctgctgtgtggcctggttyctaacaggccactgtaccaagtctatggcccaggagttggggactcctgctctagacattcaacttagatatttttaaatatcttctatgtctccacttagtattttgcacatatggaacacagtcacatatgttttaatacccttttctgctaattctaatacctgtatcagttctgggtcagtttcaattgagtgactgaacttcactattggttgtattttcccatttcttgcatgttggtaatctttggttgtatgtcagatactgtgaattttaccttgttccatgcttgttatgtg

SEQ ID NO: 782002 - DNA, 568 bp, Homo sapiens
tccaatgatatccatagctagggagaagaggaagtgtccttatatcatctaattttttttcattttctttcgttacgttttccagtttattcagatgcctcgtttctatacatgttagaactatagagagagagaggttgatgttactttcctctcaaacaagattttcccttttctcttatgcaggtagactgagaacgaatcatctcagtacaactgggaatttagccacataggggttggattccaccgcaagtaaaaagttagtccttctctaaagtacagacatgccctgtgtttgttgcagacycctccctctagagggactttatcttttaagcatttcaagaaacaggagttccttctctgctttgcaccaccttagcactcatgtctggggctcctttagattcccctgccagtgtccaccgaaagctctgagggtttctgtttctcctagaggagttctttgcttaaatcaagcttaatctttactatgtgcacagatttggcaaatgctgccatgaagaaaactgttggtctcatctttcccaagaaatattccatc

SEQ ID NO: 782003 - DNA, 612 bp, Homo sapiens
ggagtctgagtcaccattgtgccccaccctctgtggctgagctcctacagggtcgtgtccatcctggggtcatgttgctgctgtaccatgcccctcagagccagagttcccactgtgtcctgacataccagggggcttagcacaactgagctccatccttcgtagccctttctgtggcaatactctgccttcacagagactggagtcaccaccgtgctgcacttggctctcagggcctgagctacagctgtaccccacaattccatgggccttactgccactgtgccctggcctttggggcagagctgctgtggagccataccaaccctgaagcctaagtcactgttatgtccacaagtccctagggtctcactgctgctctaaggcctgggccaacacagtaatgtgtctccccaggtgcccaagtgctactaygctgctccctgccccttgggccagaatcacggttgtgccctgacatccatggaactagagttgctgctgtgccccaccctccaggacctgagtggccagaggacccctttacccctaggctgtgctgcttctgtgcctgtctctcagggttcaagccaccattatatcatatatccc

SEQ ID NO: 782004 - DNA, 606 bp, Homo sapiens
atgtagaggtctcaaattatagcaagagaaacatccatatatacatgaatctccgtatctctgcatgtcacatgtacatatgaaggctaaattcacaccaattcagtgaaattatgttacagctttagagtagatgcaataacctttgaagaacattttaagtgagtaaatagcatttctataacatataaagyatgcaattttagtgtccataatattacttatgtaaagccttaattttaattaactgtcagtaaatatagaaagagtttataaccaaagaaacagattatgaacagttttatcataaagatttttttcctgattggcttttgtttagagtggtctgcagttgttagaatattaatcttccctgatatattgctgcttcacattttttacatttaaaaaatttttaatttttaaggcttattaagtgcaattgcaaattatgtttccataagtaaggtgagcctagaaataaaaatctataatttctgggtttttttgtttttttcttggtagaactcagctctcttatggaacctgatttaattgagagcaggctatattcactgacatcatcatagctcatttatatttttt

SEQ ID NO: 782005 - DNA, 606 bp, Homo sapiens
atgtagaggtctcaaattatagcaagagaaacatccatatatacatgaatctccgtatctctgcatgtcacatgtacatatgaaggctaaattcacaccaattcagtgaaattatgttacagctttagagtagatgcaataacctttgaagaacattttaagtgagtaaatagcatttctataacatataaagtatgcaattttagtgtccataatattacttatgtaaagccttaattttaattaactgtcagtaaatatagaaagaktttataaccaaagaaacagattatgaacagttttatcataaagatttttttcctgattggcttttgtttagagtggtctgcagttgttagaatattaatcttccctgatatattgctgcttcacattttttacatttaaaaaatttttaatttttaaggcttattaagtgcaattgcaaattatgtttccataagtaaggtgagcctagaaataaaaatctataatttctgggtttttttgtttttttcttggtagaactcagctctcttatggaacctgatttaattgagagcaggctatattcactgacatcatcatagctcatttatatttttt

SEQ ID NO: 782006 - DNA, 632 bp, Homo sapiens
caaatgatattagattaattgaacattcagatgcaaaaaagagaagattttaaggaaaaagtaaaactataaaacttttaggaaaaaagtttacaatttgtggcttgggtttttggcaaataattcttagaacacccaaattatgacctaataggataaaaattgataaattgaactacataaagattaaattttttttgcttagaaaaggacacagtaaaggcaatgaaatgactttactaggtcagactaggagaaaacatttccaaatcatatatctgataagaagcttgtatgaatatataaataactaaaaataataataaaagtcaacaatccctgaaaaaatgtgcaaaagatttgaacaggaagttcatcaaatatgaatagcaagtcagcacatgaaatagtgctyaacatttatagttattagggatttgccaattaaaccacaatgagatacccctgcaaaccaaccaaagcaaaacaacaatgacaacaaagtgcttcaagataccaagggctgatgaagatacaaagcaaccagaactcacatgcattcctggtgggaattcgaaattgcccagccccttagaagaaccacttggcaatttctttgacatagttaaacc

SEQ ID NO: 782007 - DNA, 624 bp, Homo sapiens
tgatgcattacctgtggctgaaaatcttagatcctacttcccaattcaagaatatcagcaagactgtaacttcaaacatacgttaaatttttagcctgtgccaggcactgtgccagacaatttacatacaactacatagttcttattatgttattctacatcataaagggtwctatcactttcaccattttacaattgaggtgagtattaatggagccaagacatttgcgcttggtttaatcagtgagtagcagaggtgggatgcaagataagcgtacatgactccaaagaacacaattttatccaccaggatgctctgcctcctattccctaatgaagtgcttggtacctgataagcactcaagaactatgtgttgaataaagaaaggagtgcatgatagagagtacttcaagaatatgatagaagtatgaaaaaacttgtatgacatcaatgtggttaaaaaaaatctgtctgtgcatcagggaagaacctttgcagtgctggcaaaataaacaaactcttggaattttcgaaacgggatttgccctgcatgtattttgagtagaaagtccttagggcattcctgcaaatgtgcatccgcccaaacttgaaagtcgagtcag

SEQ ID NO: 782008 - DNA, 624 bp, Homo sapiens
tgatgcattacctgtggctgaaaatcttagatcctacttcccaattcaagaatatcagcaagactgtaacttcaaacatacgttaaatttttagcctgtgccaggcactgtgccagacaatttacatacaactacatagttcttattatgttattctacatcataaagggtactatcactttcaccattttacaattgaggtgagtattaatggagccaagacatttgcgcttggtttaatcagtgagtagcagaggtgggatgcaagataagcgtacatgactccaaagaacacaattttatccaccaggatgctctgcctcctattccctaatgaagtgcttggtacctgataagcactcaagaactatgtgttgaataaagaaaggagtgcatgatagagagtacttcaagaatatgatagaagtatgaaaaaacttgtatgacatcaatgtggttaaaaaaartctgtctgtgcatcagggaagaacctttgcagtgctggcaaaataaacaaactcttggaattttcgaaacgggatttgccctgcatgtattttgagtagaaagtccttagggcattcctgcaaatgtgcatccgcccaaacttgaaagtcgagtcag

SEQ ID NO: 782009 - DNA, 634 bp, Homo sapiens
atacttttgtttcttcttttctttccttattctgcacttgggaacatctgactaatcctctaagccctgacttgagctcctctcacccacagatcaagctttctcaaatttctcatgattatcatagaggtctaactgtaaaatgagctttcctctcaaaatcatccctcaaaaaagaggaaggataccttaattctttacaaagtatcttcatattgtggggagttctcttaatttctattttgagtaacaatttactgcttggggagaagtcatattaacaagaaattactactttcggtgctgagggatgtccctgatgaaactggtttttaaaagctggcaaatacatttacatcaatttataaattatttttctactytgatttcatacctgaaaataagatactttgagaaaagccttttaatgatcatttaacaatgaaatacaggaagaggttattatgtggagatcatatagtatagatgtagaggatactttaaaaaattctaatatttatttacataactttgaataaaatttccaatgacaatacctagattagacaaatgtctatctccaacaatttgacagaatgaagatgacaggctttaaaatacagtttggcaagtt

SEQ ID NO: 782010 - DNA, 598 bp, Homo sapiens
aagaatattacggcatccaaaaagaaactattgtagaaaaagaagaaatacttgaaacttgaaagtgtgatagctgaaattagtaattcaatagaactggttgaatgctaaatcaagaattctctcagaagtagaacaataaacagaaggtggatgataaaaaaaagaaaataattaaattagaagctcctgtccaggagatgcaacacccaataaataggatctcacacaaaagataaaatggtggtgataagaaacagggaattttcaaagcaataatataaaaaaattttttgatgctgaagggcataacccttctactgaacatccagactaataagtgagaaaaacaacggcaaatcattgtaaagtcttaragtatcagaaatggtaaaaatatatatcctaaacatccctagggattaaaaaaattagtcacagatcctagggaatccaattgatatcagtattctcaagggcaatcttgaccaatagaatatgataatgtattaaaaacttcctaatgacatgaaattcaacctaaaatgctctagtcattcagtccatcaggcaagggtagaaaaatgacaatttcaaa

SEQ ID NO: 782011 - DNA, 646 bp, Homo sapiens
tgagaaaggccaggatagtgagacatctggagactaagtcaaaggactgctggctcaaagaactagagatttttttgctgggctagggaaaggggtctggattagagatattaggaagaggcaggggagatttcttcaaataattaaaggaactgtattgggaaaaattgaggtttgtttgattttagctaatatattatgaaaccttgtaatttagaattaaaaaaaatggggraacgttatacagaggatgaccgaggcttattttcagaaagagctggtttaacaatgacaaatgcctaacaattgtcagggctaacttagcacagagctgcctgttcccagaggtgttcagagagaagctgaatgacagaatgacagaatcacagcatggcaaggacgtttcctagacattttctccaatgagcaacagattggactcagagtctataatggaatcttccaataataacgtcccatgattttaagtgacagtgagatagagatttaatagctgagtgtgttggggatgaagtgggggaaggtgtcatctcgtgtcttgcaatttggatttaatgtaaatcacatattaaaaacagtccaagagcaatgcagagataattactctttgatctaccaattattg

SEQ ID NO: 782012 - DNA, 659 bp, Homo sapiens
atctacaaggttgagggagggattcccagaattcttggtatttctgaatgaagggcgaacactgataaaatgatcttttaaaacacaaatctcatcatgcattttcaatagcccttttctttttaatgtcaaaacccaaatcttcaatgtggcctgccaggtctaatgtgacgtagctgctgctccatggcctcttctggagccagcctctcccagttttattcactccagacttagcagcctcatgcgggccctcgagcaggccacgctcttcttaactcaggccctctgcctaggatgctctctctttctctctgaagttcccctctagaaatattttaagtaatgtgtattgacttgactgattatacgtgtaatgaatgctcttaagtaaaatttagaaaatactgagaagttgagaggaaaaaaaagtgaagattataagctcacaatmcagagtcaactattaatatttgatgatgttctttctccctgtgaatctacttcttaatacaaatcgtgatcatcttgtatttgctcaaatattttctagtgagtggaagatacaggtttcttttataatcctacttataattgcttttggaatttctggaaacattttttaacatgtatttcctaaatgagcaaaatcagacata

SEQ ID NO: 782013 - DNA, 633 bp, Homo sapiens
cagtgactatgtactggcatgtagggcaagctgatgaagctctcttcaatcaattttcaatcgtactaaattctttctgagtccacattcctttcaatcgagtgctttttgaaatgaggatgagtcaagatgcctcagaagrgctgtgtgtcatcaaaacaccaaaggttaaatttcaacctctaacttgcctattcatttgttccctctgtctgctaagttccatttctgcaaattaaaatcaaaaagcaattattatgttatttgtaaaaacaaaaacaaaacacaactccagtttaaaaaaaaaaatcacctcatcttctaaatgtgtatctgtctctgttttagccatgcatcttttccaatgaaggctgttaaggccttcctttttttttttttttttttttacctgaaaaggaacagaattataaattgcagccattccatccaaaatcattagagaacccttacacatatctgccagcagtgacgcaattaaattgcattgagtaagctccttctaagttgaatcacacatatattttcttcgatgaaagtgaaattcatataacttaaaatcaaccattttaaagtaaacaattcagtggcacttattaaataaatttacattta

SEQ ID NO: 782014 - DNA, 633 bp, Homo sapiens
cagtgactatgtactggcatgtagggcaagctgatgaagctctcttcaatcaattttcaatcgtactaaattctttctgagtccacattcctttcaatcgagtgctttttgaaatgaggatgagtcaagatgcctcagaagagctgtgtgtcatcaaaacaccaaaggttaaatttcaacctctaacttgcctattcatttgttccctctgtctgctaagttccatttctgcaaattaaaatcaaaaagcaattattatgttatttgtaaaaacaaaaacaaaacacaactccagtttaaaaaaaaaaatcacctcatcttctaaatgtgtatctgtctctgttttagccatgcatcttttccaatgaaggctgttaaggccttcctttttttttttttttttttttwcctgaaaaggaacagaattataaattgcagccattccatccaaaatcattagagaacccttacacatatctgccagcagtgacgcaattaaattgcattgagtaagctccttctaagttgaatcacacatatattttcttcgatgaaagtgaaattcatataacttaaaatcaaccattttaaagtaaacaattcagtggcacttattaaataaatttacattta

SEQ ID NO: 782015 - DNA, 633 bp, Homo sapiens
cagtgactatgtactggcatgtagggcaagctgatgaagctctcttcaatcaattttcaatcgtactaaattctttctgagtccacattcctttcaatcgagtgctttttgaaatgaggatgagtcaagatgcctcagaagagctgtgtgtcatcaaaacaccaaaggttaaatttcaacctctaacttgcctattcatttgttccctctgtctgctaagttccatttctgcaaattaaaatcaaaaagcaattattatgttatttgtaaaaacaaaaacaaaacacaactccagtttaaaaaaaaaaatcacctcatcttctaaatgtgtatctgtctctgttttagccatgcatcttttccaatgaaggctgttaaggccttcctttttttttttttttttttttacctgaaaaggaacagaattataaattgcagccattccatccaaaatcattagaraacccttacacatatctgccagcagtgacgcaattaaattgcattgagtaagctccttctaagttgaatcacacatatattttcttcgatgaaagtgaaattcatataacttaaaatcaaccattttaaagtaaacaattcagtggcacttattaaataaatttacattta

SEQ ID NO: 782016 - DNA, 633 bp, Homo sapiens
cagtgactatgtactggcatgtagggcaagctgatgaagctctcttcaatcaattttcaatcgtactaaattctttctgagtccacattcctttcaatcgagtgctttttgaaatgaggatgagtcaagatgcctcagaagagctgtgtgtcatcaaaacaccaaaggttaaatttcaacctctaacttgcctattcatttgttccctctgtctgctaagttccatttctgcaaattaaaatcaaaaagcaattattatgttatttgtaaaaacaaaaacaaaacacaactccagtttaaaaaaaaaaatcacctcatcttctaaatgtgtatctgtctctgttttagccatgcatcttttccaatgaaggctgttaaggccttcctttttttttttttttttttttacctgaaaaggaacagaattataaattgcagccattccatccaaaatcattagagracccttacacatatctgccagcagtgacgcaattaaattgcattgagtaagctccttctaagttgaatcacacatatattttcttcgatgaaagtgaaattcatataacttaaaatcaaccattttaaagtaaacaattcagtggcacttattaaataaatttacattta

SEQ ID NO: 782017 - DNA, 547 bp, Homo sapiens
aaatatattataaatattataaattacacacatacatataattcttgagagaaatgaataagataaaatacaaaaaacataaaaacacttatagtgtctagcatatgacaattactcaacaaagtaatagaaataattattgttctttgctcttaaactccaggcacactgacactataactgtctttttcatttaagatgtcttttaaaaaaggacccaagtatgtaacacaaaatatccaccattttactcattcttttgcagatttcaatagcagtttacttaagaaatttggtttatgaaaagttaarctcctaaaataaactattatttatcagttatataggtgagaggttggttcaataaatttttcttgactaggcctggctttgtttcaagggctggaaattttaccagtaaacaaaacaaagtcatggagtttacatcctattaggtgtggggaaagacaactaatgaaaaattcctaccttaatgagaggtgaagctggctgggcttctaggttgagtggggacttggagaacttt

SEQ ID NO: 782018 - DNA, 621 bp, Homo sapiens
agctatctgaacaaggaaccactaagttagaaaatacatgaacagttttcattttatatccaaatataacctacaacaaagttaatctgacacatggttagtgcaccatcagtattgcacagtgtgataataaagggtaaccaacaagtagatggttacatatttgtctatattggtcacatatttggtgatcagtattatgtttatagcaaatccaagcccttcctgtggtcagttagctggggtaagggtgggtgtggtagggagagagaagtacacagtgaagccagaaaaattataaatggaattattcagatagtcttgtasttgaaatgtataacctggacataaattgaagaaattcattaaaaaatcctaacatggtatcttttattactatcaagttagaacatgacttacattcaactgggttcatacagtcgctctgactgtacaatattcttaagcgaatcaacacttccttgcagggaaggcagccttacagaactccattctatgcatccatgcagcccagcacaagaggttgaaaggaatggtcataatatatactggtcattaaaccagctggacagattatgctgcataatggtgctgaatatt

SEQ ID NO: 782019 - DNA, 603 bp, Homo sapiens
agcaatctattatttctagaattctaggtcagggatagcacagctgagaaaaagacaacattaaactcacataaatctcacctgtatatctgacagaataattaatagcatttttgttcctaaatgatcttctcccatattctttgcaaaacaatagagttttccatgtgccacacaatatccacccaacttgcatatagtaaggtagagagttttcagaaagtatgagtggagaattacttttgtgaaaacatgggcagagaatcacgactccttaagcgcatgccagacaatgrtacacagaagttctttgcaggagaatgaatcaggcctgtcatctgaataggagtactgggatgacaacaaccatcacacattctcagactgttctctagtttgttcctgaatggaaattattttaatgggaaattctaaaaagcattaaattatctgtattttcccttgatttaaaaagcaacatatactgtttcagaaaacaattgaaaatacagcaattagaaagtagaaaattaaatccacaattctatcatttagagagagaaaaacataaacatatccttaaatacaaacacacatatagac

SEQ ID NO: 782020 - DNA, 581 bp, Homo sapiens
atttatttatatattttcaaattttcagaaagtttctttatagagccagcctttcctgagtgctattatatatgagacgttatactagagctttacgtcggtattctgattttttcctcccaacagctcattgctataagtactactattactctcattgaaagctgagaaaactgacacttggagacttttaagaacttgctgaaygtaacctctctagcaaatgggcaaactgctttggaatctatggcttttgaattctaaatcacatatagcccactcttttcattgggtttctgtagtgaactttagtaaaagtgtaaggttaggcataatatctatgtgaggttgttagctatttctctggggagctagaatatagattaaaaacacgcagataaagcatcagtgaaaataggtggacatgggtcctcaaattttagtattagtattacctggagagtcgttaaaacacagctttctggacatcacccacaggatttttgtttcagtgagtctgaaacaaaaatttgcatttttgcccaagaatttgcatttctaacaagttgtcaggcgatgcc

SEQ ID NO: 782021 - DNA, 638 bp, Homo sapiens
tcttccgaattctctaattctattaaatcatactaataatttgccagttacccaggttgcaaatgtttaaatatggttttgttgccactctctcatttatcccttataagttattcttttatttattaatttttgcatccagaaaatgcctattaatcacctgctgccttttctgttgctgtacatcctccctctttcaatcgcatctctgcatttcaaagcaggctctgctccrttttatctccctgtttcacactctgctcctctggctttggcatctatcttatatctctcagcccagacgttgacctgattgtatcacttcttgcttagtctgcttttctggccccagtgcctcttgtctctgataagaagcgctcctttgttcctagtctgtgccctgtaggaccccctcctccccatcccaatggtcagctgggccttctgagccaatttgttagcatccccatttccatgatggcaggaaaggctcagatgctacaagtgacactgaggatgttacctaattttaataaatatcattttctcattttaaaaatgagacggatatacctcacagggctatcgtgaaatgagagaacacatgactggcacagaggaggtactcacaacctaag

SEQ ID NO: 782022 - DNA, 645 bp, Homo sapiens
cctcaagtttacacaagatgatatagttaatataaaaagcataaaatttggaactagatatccctggactagattccagaatttaccattttctagttttgaccttggcaagttacttattcttctgagcctcaattttcttatcaaaaaacaaaacaaaacaaaaaaaagaacatttttaaggttgtttttttttttggagtgagacaatatgcaaaagtcmttaatttcaaaacttagttcgaagcgcacagtaattaaaacagtgtgatactggcatagaaacagacatgtagaccaatgcaatagaatggagagcccagaaataaaccttcatttatgtggtcaaatgtcagcaaatctgtcaagaccattcaatggggaaagtacagcctttcaacaaatggtgttggacaaatggaatatacacatgcaaaacaataaagttggacccttacattacagcatatacaaaaagtaattcaaaattgacaaagtcccaaagagataaaagtataagttattagaagaaaacattgggaaaaatcatcctgacattggatttggcaatgatttatttgacaccaaaagcacaggtaacaaaaacaaaagtagataatttagagtttatcaaattaaaaagaa

SEQ ID NO: 782023 - DNA, 507 bp, Homo sapiens
aattttatgtgtggctagtgtaaataggattactttttaatttcttttttatattgttgcctgttctcatagaaatgctactggtattttatgttgaaattgtatcctgcaackttgctaaatttgtttattagttctaacagttttcctgaggaatttttagggttttccaaatcatatcatatcatctgcaaacaggtataatttgacttcttcatttctaatttggatgccatgtatatctttccttgtctaatttctctagctaggacttccagtactatgtggaataacactggtgagccaggttatattccagatcttagaggaaaggctttcatcttttccccagtcagtatgatactagctgtgggtctattgtataaggcttttattatgttgaggtatgttccttctagactcagtttttttaggtatttttttatcatgaaggaatgtcaaattttttaaaatgattttttagtataaattgatataataatattg

SEQ ID NO: 782024 - DNA, 507 bp, Homo sapiens
aattttatgtgtggctagtgtaaataggattactttttaatttcttttttatattgttgcctgttctcatagaaatgctactggtattttatgttgaaattgtatcctgcaacgttgctaaatttgtttattagttctaacagttttcctgaggaatttttagggttttccaaatcatatcatatcatctgcaaacaggtataatttgacttcttcatttctaatttggatgccatgtatatctttccttgtctaatttctctagctaggacttccagtactatgtggaataacactggtgagccagkttatattccagatcttagaggaaaggctttcatcttttccccagtcagtatgatactagctgtgggtctattgtataaggcttttattatgttgaggtatgttccttctagactcagtttttttaggtatttttttatcatgaaggaatgtcaaattttttaaaatgattttttagtataaattgatataataatattg

SEQ ID NO: 782025 - DNA, 633 bp, Homo sapiens
atcccagagatgctctccacaccaggccgcaggtgccacggtaggggaggagtggcgtcggagattcgggactgttttttctatctcttcagtgcctcttttagtgatttgatgttaaaaccaggtactatgagtgctcacctgaattttgattcttatgagggtgttgtttttctgtgtagatagttgttaacttggtgtccttattgtggagaaacgatcagtggagctttctattctgccatcttacttcgcctcctctgccattgaaactgctactttacagttgagaaagctaagtagagcagactgtatttcttataaagggaggtggtaccaattagagacatacatgtaactcaartctgtaaccaacacagtttattggtgtctcaaaaggcatttatttagttttttgagcttaatgtcttcaacatacctcttgaggaattccctcattgtgtgcctgcctctgcaacacttaaactcttgtttaaattcttggctctgtaataatggtggtaatagtaattcctggctgtgtaataattcctggctttactgtattgttcactgttgaaagttagcatactgtaaactcttaatccctatgcccaggataatttaaataaa

SEQ ID NO: 782026 - DNA, 598 bp, Homo sapiens
aactttttctttttttaattttaaaattgttttattttattatttcatattttagttgacacaataattgtacatatttggggagtatacagtggtatttcaatatatatcatgtatagtgatcagatcagagtaagtagcacgtccatcatctcaaatatcatttctttgggttggtaacactcaacatccttattttagctatttgaaactataatatattattgttaatcatcctatagttctatggaacactagaagttattctttctatccagcataatttgtaacctttaatgaaatgattttaatctcctatcccattgattggatgctgttgtgtttcatcgtgtatatttgtctttgttttaattgatatttttaagtcttattgcagaaatttctttctattmctataaaaataatttcagctcctggtaccatcctgtctattgctggactagagcaaactttgtctcactttttgggtgaggatattcaacatggaaggagaaatggtgctccccagacaagggagaagtctcaggaacacaaaccccttttctgtatcacatttcctagaatcacttatcctcgt

SEQ ID NO: 782027 - DNA, 609 bp, Homo sapiens
aaattaaaattccttgagggcatctgattttagtaagtcaagaaaaattaatcgtggatcatatcagaaaaatactgacacaatttagagaaaaataatgattttgttgaggcactcagctcagaatcccatgggttctggaaagattactgccctacaaacaggcttctaaggttctgtaacttcctatacccttattactccaaggtggtctgcgtacccgtaggcatcacctgagtgcttagtaraattgctaatcttgggcttcacctccagcctatggataagaattcgcatttttatcacatactacaagttctgtgactttacaaaaataacttcattttattctgtttttcactttcctcaactgtgaaatgagaaagctgaattattctacctttaacatctcttccaaagcacacaggagtgggaaactatgtcctgtggtcaagtctggttggcaagctaagaatgttttttacatgtttaaatggttgggaaaaaatcaaaattataatatttggtgacatgaaagttacaacaaattcaaatgtgagtgtccataaataaagttgtattcgtgcacgtgcacatgcacatttactt

SEQ ID NO: 782028 - DNA, 681 bp, Homo sapiens
atttgttccattgccatcagctagaacaccaaatggcacatacataagtatttgttgaaagggtggataaataactagagactgaaagaacactgaaaagtcttctgatccatcatttcttttattttttggccattgagacttaatatatttcatttaaatgagtataattttttaagtctccaagaaaagctaatccagaagcactgaaacatactttgaaatccatttgctatggggtatacatatctctgaatcctaaagagcatatttgcctgtgtatagtatcactatgcactcagtaaatagcttaagaaaagcttaaaatgtaaaaattaataaatattgttgtaaacttaatcattccctttcccctacagtaaatcaattttccttatttataagatcactkttaatataatatctaaattgaacctcttgaaatttctgtaagccaattttgggaaaccattccttctttttctccctaaaaaaagaattccagtccctataaatatttgtttacaaaattgtttttttaaaaaattataagttgcagcagctcaaataaagaatacagcagagcatggtgctgcacgcctatagttccagctactaggaggtcaaactgggaggatccattgagctcaggagtctgaaaccagcctgggcaacatagca

SEQ ID NO: 782029 - DNA, 681 bp, Homo sapiens
atttgttccattgccatcagctagaacaccaaatggcacatacataagtatttgttgaaagggtggataaataactagagactgaaagaacactgaaaagtcttctgatccatcatttcttttattttttggccattgagacttaatatatttcatttaaatgagtataattttttaagtctccaagaaaagctaatccagaagcactgaaacatactttgaaatccatttgctatggggtatacatatctctgaatcctaaagagcatatttgcctgtgtatagtatcactatgcactcagtaaatagcttaagaaaagcttaaaatgtaaaaattaataaatattgttgtaaacttaatcattccctttcccctacagtaaatcaattttccttatttataagatcactgttaatataatatctaaattgaacctcttgaaatttctgtaagccaattttgggaaaccattccttctttttckccctaaaaaaagaattccagtccctataaatatttgtttacaaaattgtttttttaaaaaattataagttgcagcagctcaaataaagaatacagcagagcatggtgctgcacgcctatagttccagctactaggaggtcaaactgggaggatccattgagctcaggagtctgaaaccagcctgggcaacatagca

SEQ ID NO: 782030 - DNA, 681 bp, Homo sapiens
atttgttccattgccatcagctagaacaccaaatggcacatacataagtatttgttgaaagggtggataaataactagagactgaaagaacactgaaaagtcttctgatccatcatttcttttattttttggccattgagacttaatatatttcatttaaatgagtataattttttaagtctccaagaaaagctaatccagaagcactgaaacatactttgaaatccatttgctatggggtatacatatctctgaatcctaaagagcatatttgcctgtgtatagtatcactatgcactcagtaaatagcttaagaaaagcttaaaatgtaaaaattaataaatattgttgtaaacttaatcattccctttcccctacagtaaatcaattttccttatttataagatcactgttaatataatatctaaattgaacctcttgaaatttctgtaagccaattttgggaaaccattccttctttttctccctaaaaaaagaattccagkccctataaatatttgtttacaaaattgtttttttaaaaaattataagttgcagcagctcaaataaagaatacagcagagcatggtgctgcacgcctatagttccagctactaggaggtcaaactgggaggatccattgagctcaggagtctgaaaccagcctgggcaacatagca

SEQ ID NO: 782031 - DNA, 681 bp, Homo sapiens
atttgttccattgccatcagctagaacaccaaatggcacatacataagtatttgttgaaagggtggataaataactagagactgaaagaacactgaaaagtcttctgatccatcatttcttttattttttggccattgagacttaatatatttcatttaaatgagtataattttttaagtctccaagaaaagctaatccagaagcactgaaacatactttgaaatccatttgctatggggtatacatatctctgaatcctaaagagcatatttgcctgtgtatagtatcactatgcactcagtaaatagcttaagaaaagcttaaaatgtaaaaattaataaatattgttgtaaacttaatcattccctttcccctacagtaaatcaattttccttatttataagatcactgttaatataatatctaaattgaacctcttgaaatttctgtaagccaattttgggaaaccattccttctttttctccctaaaaaaagaattccagtccctataaatatttgtttacaaaattgtttttktaaaaaattataagttgcagcagctcaaataaagaatacagcagagcatggtgctgcacgcctatagttccagctactaggaggtcaaactgggaggatccattgagctcaggagtctgaaaccagcctgggcaacatagca

SEQ ID NO: 782032 - DNA, 559 bp, Homo sapiens
atccatagctagggagaagaggaagtgtccttatatcatctaattttttttcattttctttcgttacgttttccagtttattcagatgcctcgtttctatacatgttagaactatagagagagagaggttgatgttactttcctctcaaacaagattttcccttttctcttatgcaggtagactgagaacgaatcatctcagtacaactgggaatttagccacataggggttggattccaccgcaagtaaaaagttagtccttctctaaagtacagacatgccctgtgtttgttgcagacycctccctctagagggactttatcttttaagcatttcaagaaacaggagttccttctctgctttgcaccaccttagcactcatgtctggggctcctttagattcccctgccagtgtccaccgaaagctctgagggtttctgtttctcctagaggagttctttgcttaaatcaagcttaatctttactatgtgcacagatttggcaaatgctgccatgaagaaaactgttggtctcatctttcccaagaaatattccatc

SEQ ID NO: 782033 - DNA, 577 bp, Homo sapiens
aatctcccacccctcataaaaacataacctacaattgtcttgaagaaagagattctcctctctctgccatagtgacaggtatatgcccaactaactgtggaaaacagttctttctttcaaccttactcatcaccctcacggtctgtttatgaggctctcctccaccagccagaaaggatgacgtgccatacctgcaaaacttatacagcatcaacagaatgaatctttccaacaagccgaaacattgagtattgtggcacagaatatgccccacccattactcaatctagatatccttttattccaccgtctcatgattttctttttcctggaaaacaaaagtatttctttcatagcccagctagcacgataaatcagcragtcagaattctagctttgttgtaaggttttgcgaatatctgatcctcttattttgtacttttctatttcctaggcaaatctgagtatttcacccagttttccttaactaggcattgaaaactcagtttttttcttacaaaccttcatgtcttcctgctcatttgcacagtcttatcttgcacctcctataaaatgg

SEQ ID NO: 782034 - DNA, 634 bp, Homo sapiens
tggatcttggaaagccaagtacaaattgagcagtaaatggtaactgaacttgcagcagagtttagctctgtagaactcagtccacatacaggattagaggggctgtcccagtcctaattctagaggcagtatgtgctgcctccaatatggaataaagatacagaagaatctagaaactggtttgaatgctaacacttgttttgttatatagtccatatggaacaggattttattccatgattagagcattggagtttagacatgagatgtaggtggatttacaaacataaaagactaaactgccatgaaagagtgaatgyagaagcataaaatgtggagcacggatcactttcagagcaataaaccactctgtgtgatagtataatcgtgaatgtatgtcattatacatttgtacaaacccacagaatgtacaacaccaagagtgaaccctaatgcaaactatagacttcgggtgataatgatgtgtcaatgtggtttcatcggctgtgacaaatgtacccctctgtggaggatgttgataatgggggaggctatgaacatgcaggataaggagtatatgagatttctttgtacctttctctcagttttgctgtgaacctaaaactgctctaaa

SEQ ID NO: 782035 - DNA, 515 bp, Homo sapiens
aagagaaggaataacaagaaggggatggatgaggagaattagacttaagaaatagggaaaatacagccatgagcattaagactactaaattgtcttcatttattcatatatgtaaaatgcttcattcttcctaagtaccatcatgggttgaggctactaatcaaaataaaattcatgcaaatatatgtacatgatttgcagatgagccatggcctccaggtttytggaaagttgccagtattgtccttgataaagcaaacttcaggccgttccaaagctctaaaattgtcttttattgtcttttctttgttaaagatgcagaggtcacagtgtgaggggaaagaatgaggtaggagggatattagcccagacataatctttataagagatatgtgctgaagtctttacaccccatgataattctgacactgggatatctaatattttcagacaaagaaggatcaattcagcacaaaatctttagaaaagtgtatgatcttctttcatagatttaa

SEQ ID NO: 782036 - DNA, 651 bp, Homo sapiens
tgataagaacactagtaaaaattgtcagaatcaactttttcaaaactctgtaagtaaccaaaatagtaccaatttgaagaatgtttattccattaaaaaaaaaatggctgaatctgggtaaggaaagctgtctttgttgtatttcaatgtgaattaatcccatagctatctctctacctctgaagtgaccctgaaaaaataaataggtgtacaataaagttagatataagaactctagcctagcagccactgaytggggcaaaagaggtttagaactgttttaaacccaaaagtcttattcccagagaaatatcattattggacctgtctggctgctctccggaaacctccactcacaggacttgtctttatttaacctggttcagagctcactcactgtgaataacattttcctaaggtttgtcagaaaagtaaaacagtggcaactgtctaacacaacacctgcttaaagcagggataataactggagcaaataagaggctcaaaagaaaaaaaaataaaaggaaaagctgtgggatgagatgctcataggggaatttgaaaaactctgacatattcttaggaatttaaatggtcatgaaaatatgtaaggctgtgcccctgcctaggaaagacatggaaagtccctat

SEQ ID NO: 782037 - DNA, 656 bp, Homo sapiens
ccaaaaaagccccaaaatgcaagaaattaaaactgataggattgaagagagacatagacaattaaagaaaatgcaaaatccaatgcctcattttcaataatgggcacaactagtacaaaattcaaaactgaaatgcgagaatcgaacaacaccataaaataactggatttaatagctagagatcaataacagaaggaaatttggaaaatttacatttatgtgaaaattaacacactcccaaataacaaaccagccaaagaatcaatcacaagaaaattcagaaaaactttgagatgggtgaaaataaaaactaatctagcaaaatttatggaatacagctaatgtggtgcttagagagaaactgatatctaaaaaatgatcatattttaatcstattttaaaagaaaacctaaaatcaaaaacctaaacttatccgtttaaaaaattagataaatcagtggaaataaacaaaaataagcaaaagaaagtaaagattacagcagaaataaatgaagaatagaaaaacaatagaaacaatttttaaaaagaagttgtattttgaatcatgtggttccaaagactgacatttcctgacttcaaaacttactacaaagttacagtgctcaagatactgtggtcttggcataaagatagat

SEQ ID NO: 782038 - DNA, 586 bp, Homo sapiens
ctcaagatactgtggtcttggcataaagatagataaatagatcaagataaaaaaaaaagatcaagaaaatggcaaaactttagctagattaatcaagaaagagaagactcaaattactaaaccagtaatgaaagacggaacattactagttaccttacaaaaataaggagaattaaagaatataattcacaatyatatattaatgaattaaatgaaatggacaatattctagaaagacacaaaaatgtaccaaaactgactcaagaaaaaataaaacatctgaatcaacctccaacaagtaaggattaaattagtaatcaaaaaattttttacaaagaaaagcacagcctttgatggttctactggtgaattctgtcaaacatttaaagaagtaagaccaattcttcacaaactcttgcaaaaaaagatgaagaggaaacacttcccaacttactctctaaggcctgtattaccagaattccaacaccaaagactagaacaactagatatccacaagtaaaagaaagaagttgaaccccaatcttacatcatataaaagaagtggttcaaaataaaccatagattt

SEQ ID NO: 782039 - DNA, 686 bp, Homo sapiens
gtaagtgcttagtaaataccagctattgttatttattcagaacactattcactttcttttttctacctttcttctaccagttcaaacgtcctaaacttcttcagaggtttatttatgtgcaaagcaggccatttatgtgtttcacatgatccagacttctgtcaatgacttgtttgatagtataacattctcaccacgaaaattttttaaatcttaaaattttaacctactattgtcttagaactaaggtagttatcttttctatagatagtcaaatagattgtcacagttaaaatatatttgagcatatggaaccagatgatttatgctattttctgaatgccatgtcttaccctcagagcacagatacaagaagacatatttctaagcacaaggtcagcagtgacatatcagaatgtccgaagacattgagtagcaatatactggtgtagggccaagcacatggtgggtgggagtggcaggggagggtctgttttaatcacctcctattcacccactgatgagggagygattcccactttagggtaatgggatgaccagacatacaataactgaaactggacttacgatattgacaatcatttattagtcacaaatacttacagtccagaggaacagaacgtcacatgccacgcaaggtcattcatgaatagagtgaacagcct

SEQ ID NO: 782040 - DNA, 645 bp, Homo sapiens
ttacaattttgaacgtttaagggagaataagttcaagatatctgttgtaaatcatggtgactatagtaaaacaacaatgtattttaaagaataaaataaaagctcttatagcatgactctgttttacatatccagaatcattgagatatttgcataaagtgtcataatttcccctctccctttggctttcttatccaggcrcacttgatttccactgatatcaactcctttagcctattatgagtgcatctatacccctctttctctgacactctattcccagccttttctctttccgacatgctccttttccagcattctctgccttgctttggcattctttctccaagcccactctcttctcttcctctctcttcaaactcccatatacctcctccgttctcatttctgctgaattgctgatgggattttcagctcccattcaacaatttttgtttcttttctttctgccaatctagatatgaaatttggcctcttttttcttgaattttacttaaataataataaacaaaaacacccacaaatacaaagtatatagtagatattattgaatgttttggtgtcagagttctatatcaaagtcatgcaaataccttaaaattaaatatgacatatccccactct

SEQ ID NO: 782041 - DNA, 645 bp, Homo sapiens
ttacaattttgaacgtttaagggagaataagttcaagatatctgttgtaaatcatggtgactatagtaaaacaacaatgtattttaaagaataaaataaaagctcttatagcatgactctgttttacatatccagaatcattgagatatttgcataaagtgtcataatttcccctctccctttggctttcttatccaggcgcacttgatttccactgatatcaactcctttagcctattatgagtgcatctatacccctctttctctgacactctattcccagccttttctctttccgacatgctccttttccagcattctctgccttgctttggcattctttctccaagcccactctcttctcttcctctctcttcaaactcccatatacctcctccrttctcatttctgctgaattgctgatgggattttcagctcccattcaacaatttttgtttcttttctttctgccaatctagatatgaaatttggcctcttttttcttgaattttacttaaataataataaacaaaaacacccacaaatacaaagtatatagtagatattattgaatgttttggtgtcagagttctatatcaaagtcatgcaaataccttaaaattaaatatgacatatccccactct

SEQ ID NO: 782042 - DNA, 587 bp, Homo sapiens
tgacttctacatgctagaagccagtagccctccccacctctagttgagacaacgaaaaatgcctccagatattgcccatgctctctgggaggaaaaaatgttgttggctgagaaacactctcttggatggatgagattttttttgtaatggcattaaaattacctgggatgtcttttaaaaaagactctactcccaattttctgattcagtggatattctttgaagcttcctaatttgttttcattaagtcccttgtataattctgacacatacccaagtttggaaatcattatatcatacaaaggctaaattacccagcagtcaagatggagcctgtcacttasacaaatgataaaagggaaaaagctagaagcacttggaaccaggcttggagagacaacctctgttgaggtcacccacaaaggagcacagcaaattgtctaagtcatggtgtccaaaggaaaaaggtgctctcaggatagtacttgtagctgagtagtactctaaaacactgagagttattacaatagctattcaatctttctgaacacaattggacaagcatcaatattatacatttacaatt

SEQ ID NO: 782043 - DNA, 571 bp, Homo sapiens
tccacttttaagaacctgtgtgattacgttaggcccacctaggtaatcttcctatttgacgatccatgaccataatttcatctgcacaattccttgtaccatgcaatataacatgcatacaacatagccctagaggttgaaaattatagggttaaacttctccctaccatattgatatatattcaaaactatttacagcaccactgttggcaatagcaaaaataaatgaaaacaatctaaaaatcctccaaaaaggacagattaaggatattatgggaactcgtacaatggaacattattcaattgtgagtaaaaattgaggaagagccctatttycaaatacaaaaagctcttaaggactcgttaagtgaaaaaagcaatgagcagaactatgcatactatgctacagaattttttttctagataaacaaaaggaaaagaaaagtaaatataagatttttgtttaaaactgagactgattctttcaagcagaataaaagatatttaacagacttgtaattttcataacatgtaaacttatttcaaacaaaatttttaaaaagagagttaa

SEQ ID NO: 782044 - DNA, 615 bp, Homo sapiens
aaactaagtattgatgggacagatctcaaaataataaagactatttatgacaaacccacagtctatatcatactgaatgggcaaaaactggaaacattcccattgaaaactggcacaagacagggatgccctttttcaccactcctattcaatatagtgttggaagctctggccagggcaatcaggcaggagaaagaaataaagggtattcaattaggaaaagagtaagtcaaattgtccctatttgcagatgacatgattgtatatttagaaaaccccatcatctcagcccaaaatctccttaagctgataagcaacttcagcaaagtctcaggatacaaaatcattgtgcaaaaatcacaaccrttcctatacaccataacagacaaacagagagccaaatcatgagtgaactccaattcacaattgctacagagagaataatacctaggaatccaacttacaagggatgtgaaggatgtcttcaaggagaactgaaaaccactgctcaaccaaataaaagaggacacaaacaaatggaaaaacattccatgctcatggataggaacaatcaatatcgcgaaaatggccatactgcccaaggtaatttataga

SEQ ID NO: 782045 - DNA, 643 bp, Homo sapiens
aatttaataaaattattaattattttctaaagtcaccaatatattttttaaatacaattttttaaaattatcaatatttgaagaatttgttaatctgattctgaagtttctagtagggtagcagaggaatcttacccttcattttttgggtagttggtaacttctccaaaaagtataatataaaacaagatgtagaaacaaataggagtgcagtatttacrggcatcgatttcttagcccagtgacaattgtagcaatcttcaatatatagagtttagcttatttgaagataaccaaagttttgcatcttaaagaataaaattacagatctatgctcactagaaaattagtttttaaaacaatattcatggtattttaacatcgttgtttaaagcatgcatcctatagctgcacactaaataaagacgaaatgatcagatagaacgtttgaaatgtcatttttcctttgctcttccctaacatggcattctgctaattttagtgcatgttttatatcaaaactctctaactctaatctcccagaaactgattaatctgcattaatagcctttctgggaagttgtaagtttaatcaatttttatttgataagggtctctaatgcttttagcgatgggtgactta

SEQ ID NO: 782046 - DNA, 564 bp, Homo sapiens
cgaccccaaacactctgctttctctcaaatccacatctgtatgcctttacacctagtatttctttccctctttgtcttgcagaactaagtccccctcttccttccagatgcaggccaaatgtcagctcttctctgattcccacctcaggcaagatcaaggagtaaatcactccctgccatcccaccctttactgccctcaattattgcagagcaagataagatctgtgctgtaagtggctggtcttaggagagattataacactgaagtgcttgaagaaaatgaagaaaaccattctgtttgacattatytaaataagctgtttcaatgaagatttactgccctgtattcaacagaaaattttagtgcccgagtaacatccctttgtttaagaattaaaattaaaagactaactccagaatggaaggcaaaaagagtgttccaatgctatagaaccactttttagtatcatgcaatttccacattgctatgattttaatatggcttggccaaaacctcatgtcgaaaatttggtccccaatgtggcagtgttggaagtgggata

SEQ ID NO: 782047 - DNA, 601 bp, Homo sapiens
agaatgtagaaagcacaaacatcaaggctagagaaataatttactaggtttcaagggttactagtacaaataatgagaataattaaaaagtaaaacaagagctgcctcctctatttaaaaagtagctgaaaaactacactaacttgaatgtggtctaggatccaaagcagaagtcttaggagtagagtctaacattatataatactcatgttaaaggaggcaaaactgcctacctagggaccaataacaattcatctacatttcctagataygtttttttgactcatcagcatcatattcttttatgaataataagttcaactaatttgttatcaattctttccactattggaaaagtctgttggatatattaatgttggaatgacaagcagcttgtgctcttctctgggcatctaaaaatatcgccagatgcattgtgagcaatttaaaagccataattagcttacttccaatgataaatgaataacagctccacgtacccttaagagtctccaatgttgttcattagaaatatgtgaagagccacatacgtaattttaaatttcttggtagctacattttaaaaagtaaaacaaacagg

SEQ ID NO: 782048 - DNA, 601 bp, Homo sapiens
agaatgtagaaagcacaaacatcaaggctagagaaataatttactaggtttcaagggttactagtacaaataatgagaataattaaaaagtaaaacaagagctgcctcctctatttaaaaagtagctgaaaaactacactaacttgaatgtggtctaggatccaaagcagaagtcttaggagtagagtctaacattatataatactcatgttaaaggaggcaaaactgcctacctagggaccaataacaattcatctacatttcctagatacgtttttttgactcatcagcatcatattcttttatgaataataagttcaactaatttgttatcaattctttccactattggaaaagtctgttggatatattaatgttggratgacaagcagcttgtgctcttctctgggcatctaaaaatatcgccagatgcattgtgagcaatttaaaagccataattagcttacttccaatgataaatgaataacagctccacgtacccttaagagtctccaatgttgttcattagaaatatgtgaagagccacatacgtaattttaaatttcttggtagctacattttaaaaagtaaaacaaacagg

SEQ ID NO: 782049 - DNA, 601 bp, Homo sapiens
agaatgtagaaagcacaaacatcaaggctagagaaataatttactaggtttcaagggttactagtacaaataatgagaataattaaaaagtaaaacaagagctgcctcctctatttaaaaagtagctgaaaaactacactaacttgaatgtggtctaggatccaaagcagaagtcttaggagtagagtctaacattatataatactcatgttaaaggaggcaaaactgcctacctagggaccaataacaattcatctacatttcctagatacgtttttttgactcatcagcatcatattcttttatgaataataagttcaactaatttgttatcaattctttccactattggaaaagtctgttggatatattaatgttggawtgacaagcagcttgtgctcttctctgggcatctaaaaatatcgccagatgcattgtgagcaatttaaaagccataattagcttacttccaatgataaatgaataacagctccacgtacccttaagagtctccaatgttgttcattagaaatatgtgaagagccacatacgtaattttaaatttcttggtagctacattttaaaaagtaaaacaaacagg

SEQ ID NO: 782050 - DNA, 529 bp, Homo sapiens
gcaagatagattggacttacagatgaacggtatggatcctttttgatccacaactatcagtacttgatttaatttgcctccttctctttttaccattttaatcactcctaggactccaacttttacctcaaagtaaaagtcatctaaacttacgtccttggccatctctccctgcaaagctcccattctccttttccagctacctgttctacctcaaactgagcagtgcaaatcttggctccccattttacaggttattttttytatatttttggatgcctcccaaaccccactttccaccttctgttgacccatctcggggcaggaatttgctacttgttttccatagttaaagctttggcctcgtattcaacaattctcttgaactttaaaaataagttggttgcatccaacctctttcagttctacctttgaaatgaatcatgaatccattcattcttttttattccaatcactgatggcatagtctggaaattcagttcttcctactctgcagcaataggttctt

SEQ ID NO: 782051 - DNA, 529 bp, Homo sapiens
gcaagatagattggacttacagatgaacggtatggatcctttttgatccacaactatcagtacttgatttaatttgcctccttctctttttaccattttaatcactcctaggactccaacttttacctcaaagtaaaagtcatctaaacttacgtccttggccatctctccctgcaaagctcccattctccttttccagctacctgttctacctcaaactgagcagtgcaaatcttggctccccattttacaggttattttttttatatytttggatgcctcccaaaccccactttccaccttctgttgacccatctcggggcaggaatttgctacttgttttccatagttaaagctttggcctcgtattcaacaattctcttgaactttaaaaataagttggttgcatccaacctctttcagttctacctttgaaatgaatcatgaatccattcattcttttttattccaatcactgatggcatagtctggaaattcagttcttcctactctgcagcaataggttctt

SEQ ID NO: 782052 - DNA, 529 bp, Homo sapiens
gcaagatagattggacttacagatgaacggtatggatcctttttgatccacaactatcagtacttgatttaatttgcctccttctctttttaccattttaatcactcctaggactccaacttttacctcaaagtaaaagtcatctaaacttacgtccttggccatctctccctgcaaagctcccattctccttttccagctacctgttctacctcaaactgagcagtgcaaatcttggctccccattttacaggttattttttttatatttttgsatgcctcccaaaccccactttccaccttctgttgacccatctcggggcaggaatttgctacttgttttccatagttaaagctttggcctcgtattcaacaattctcttgaactttaaaaataagttggttgcatccaacctctttcagttctacctttgaaatgaatcatgaatccattcattcttttttattccaatcactgatggcatagtctggaaattcagttcttcctactctgcagcaataggttctt

SEQ ID NO: 782053 - DNA, 529 bp, Homo sapiens
gcaagatagattggacttacagatgaacggtatggatcctttttgatccacaactatcagtacttgatttaatttgcctccttctctttttaccattttaatcactcctaggactccaacttttacctcaaagtaaaagtcatctaaacttacgtccttggccatctctccctgcaaagctcccattctccttttccagctacctgttctacctcaaactgagcagtgcaaatcttggctccccattttacaggttattttttttatatttttggatgcctcccaaaccccactttccaccttctgttgacccatctcggggcaggamtttgctacttgttttccatagttaaagctttggcctcgtattcaacaattctcttgaactttaaaaataagttggttgcatccaacctctttcagttctacctttgaaatgaatcatgaatccattcattcttttttattccaatcactgatggcatagtctggaaattcagttcttcctactctgcagcaataggttctt

SEQ ID NO: 782054 - DNA, 589 bp, Homo sapiens
gaatagaatttttagtatttcatagagaatgatatcaatgaatttatactactgtatgtataatacatatagtgatagtgaatttatactacatataaataaaatgttcattatatttgtgtttatgtatgttatagtgaatattttatatatatagtataaatacatttttatatagtataaatgcaaatacatataatgtccattgcttacagtctaaaagaataagaaactactytgaagaaaatcatactttgggcccaagtaagccttactaaattttcacaattgcttgttttggaagacttctgaatatacttattcaaacaatatacatcattgaatgtgaacttgagagaagtcctttagcccagaaaatgttattaggaaaaaaataaagaaaaatttaaaaaaattttaggcatgaatttattaaactatttccaaggccttaataaaataattgtttttgaacctcttaaaacatgatcaagttactataaaagcacttttaaaccttaatttaacttacaaggtaactttggaaagatactactaatgaggaaaagttgtaagagaggaaagttat

SEQ ID NO: 782055 - DNA, 452 bp, Homo sapiens
aaggcacccattccacatgtaagggtgaagccctcatggcctgccaccttttaaagactccacctcttgatactgtcacaatagcaactgcatttcagcatgagttctggaagggacagtttccaaaccagaggagcaattgcctatcagaggttgcaagaaagaggtattttactattatttgagctaccatttttagctttatccatacttttagaaataggtgttttattgaactccaattatccagtttgagaatgtcataattttytattaggagtctggctgatctagtcattaaaaaagacacataataaatgtataagcatgtttttaaatggacagtttataagttagttaataatattagtgttaattactgttaccactaaataaataaaccactacattttatgttctttcaacaatctgaaaaaaatattttgtaaaaa

SEQ ID NO: 782056 - DNA, 443 bp, Homo sapiens
tactctgttcttacattgctaataatgacctatctgagagtgggtaatttataaagaaatgaagtttaattgtctcacagttccacatggttggctaggcctctcaatcatggtggaaggtaaatgagagcaaagtcacgtcttacatggcagcaggcaagagagcttgtgcaggggaacacccacttataaaaccatcagataccatgagacttattcagtaccacaagaacagtatgggggaaaccaccccccatgattcaattatctccacctggcyccacccttgacacatagggattattatagttcaatgtgagatttgggtggggacacagccaaaccatatcaaatagcatcacatataaaactgtctacagactattgacaaatcttgttagtataaacagccaaaacagtttggctgttgttagtgatctcta

SEQ ID NO: 782057 - DNA, 622 bp, Homo sapiens
acaaagctgtcttggggtgacagtttgtagattaagacatgcaaagacctaacattttttcttctattccttctgaagaaacatctataatttaaaaaattataaccttccaaccagaaaaacaaatattaattttacatttattatagaacagacattgtgctaggagctttcatgtatgtgatttcatttcccttctcacatcaacccagagagagaaggggaacattaacataaattcaaagacaagtaaattgaagctcggagataactggaaacaggcctcaggtgacatttaatatacagtgcttcaagagtagaatgatggtttccatgggctggggkgtagagaaatgaggagatattggtcaaagaatacaaatttccagtcttaagatgtatgcattctgggggtctaaagtacagcatggtgactgtagttaacaatattatgcggtggctcatgcctgtaatcccagcactttgggaggccgagttgggtgcatcacctgaggtcaggagttcaagacaaatctaactaacatggtgaaaccccatctctactaaaaatactaaaattagctgggcatggtgatgggcacctgtaatcccagctactcag

SEQ ID NO: 782058 - DNA, 633 bp, Homo sapiens
agattgaccagccctgaacatgcaaaaatatcagaagaagagtgcaaatggaaaataaaagctacatattatagcaagagttggccctgtgagtttggaatgagggtccccggctctggaacacagatgtcaagcatagctgaccagctctggaagttttcagaaatttctggctggtttgctggggcctggctggctgtcctggaggggctgttctttgggttctccctggtcctgagaatagtcagcatagccagctggcttctacatctagccaagctggcagacarattgattctacatttgggggaccaacagtcgacaaggcccatgatcagccaacccacgagcaaggaagaaggtgataaattagctgaggaattccagtcacaggtggagaaccgagtagcatgaacggatgcctgtcttcaccagtactgactcaggtaccactgaacttgcatattaatgcacttggtaactgaggcccaatagagaatgaatgggcttaaagtgtcataatatggacatgacaaagattattcctttgaccaaactctaggtagtctccattgggccttcctcttggctataaaaactcttgatcttggcctataaaaactctcagcatag

SEQ ID NO: 782059 - DNA, 629 bp, Homo sapiens
aaaaacaataactaggtagtacaggaatctatacttttagttcctgttgcttttgcccttctattaatttatttatttgaaaaaaaaactgagaggaaaaatttgcccttgcttcaaatccccaggtaaatcttgtttgttcaacaactgttgctgttactggaatagtgattattctcattgctttaagaaagatcccttagatcaaagcttggcttggtgacagcatgttttctactaatcaaatgaggtcaaagrgtagacagtatttacaatgatttcatggattaggactgtgacagaatgaaatctgataaggttaggaaaaacagagtggatagagcaaatgtggtgcatctgagaaacctgaaaattatccattaaatagtcttatttagacactcacttcagcctggttggctgctaggcatattgctgtggaagtcaaaataaccagctcctctcctgaggatggcaaagaatgtcacaacttttaataaaataagagatagaatgtcaagcgatcatgaacagaaaacaagataatctaaaaaaaatcatatgtactggttaggaaaatacaataattattagaaatgggcttgtgccttttttttatgctataataa

SEQ ID NO: 782060 - DNA, 629 bp, Homo sapiens
aaaaacaataactaggtagtacaggaatctatacttttagttcctgttgcttttgcccttctattaatttatttatttgaaaaaaaaactgagaggaaaaatttgcccttgcttcaaatccccaggtaaatcttgtttgttcaacaactgttgctgttactggaatagtgattattctcattgctttaagaaagatcccttagatcaaagcttggcttggtgacagcatgttttctactaatcaaatgaggtcaaagggtagacagtatttacaatgatttcatggattaggactgtgacagaatgaaatctgataaggttaggaaaaacagagtggatagagcaaatgtggtgcatctgagaaacctgamaattatccattaaatagtcttatttagacactcacttcagcctggttggctgctaggcatattgctgtggaagtcaaaataaccagctcctctcctgaggatggcaaagaatgtcacaacttttaataaaataagagatagaatgtcaagcgatcatgaacagaaaacaagataatctaaaaaaaatcatatgtactggttaggaaaatacaataattattagaaatgggcttgtgccttttttttatgctataataa

SEQ ID NO: 782061 - DNA, 628 bp, Homo sapiens
acatagtctttgagctggaacaccccaggtgggaccagatcacgcagcaatgtccttctccccttcttcctcttgggcattttctggaattgctgttccagaggcaactgtctccacaaagttaagagtacttcattgggctgcttatcaattttctgtttctcaaccctggccaaaatcaaatctatccacatctttgagtgtgttactggttggggtcccctattttcccatgggcatcttccccttctttactgcacagacccctcggtcccaccaatggcctccaggcctgcattcacagcagcctctaattcctttttcaagctctgtagccaggcttccagggggtgcctggaggtccccattcatggcagcttctaattctttttctgaactgtgtagccaggcctccaggtgcctcgcctatgyctgcaaagcccttacgtctgtggcatccctcagggactgggtgtgtactccaagcgcagtcaaaaatgcccatccaattctgccagcaaaggctccttccttctcagtgctctgtgcttccagcaacttcagggccttctccatgctcacaagggacccacctaccaccgcccagtctccaccagagcccatcctc

SEQ ID NO: 782062 - DNA, 628 bp, Homo sapiens
acatagtctttgagctggaacaccccaggtgggaccagatcacgcagcaatgtccttctccccttcttcctcttgggcattttctggaattgctgttccagaggcaactgtctccacaaagttaagagtacttcattgggctgcttatcaattttctgtttctcaaccctggccaaaatcaaatctatccacatctttgagtgtgttactggttggggtcccctattttcccatgggcatcttccccttctttactgcacagacccctcggtcccaccaatggcctccaggcctgcattcacagcagcctctaattcctttttcaagctctgtagccaggcttccagggggtgcctggaggtccccattcatggcagcttctaattctttttctgaactgtgtagccaggcctccaggtgcctcgcctatgtctgcaaagcccttacgtctgtggcatccctcagggactgggtgtgtactccaagcgcagtmaaaaatgcccatccaattctgccagcaaaggctccttccttctcagtgctctgtgcttccagcaacttcagggccttctccatgctcacaagggacccacctaccaccgcccagtctccaccagagcccatcctc

SEQ ID NO: 782063 - DNA, 541 bp, Homo sapiens
acaaaattatgcatgaaaaacatttaaacataattgtataaagaaaataaatacagtattttaagtcattcctttgctgacatttaatatggggggggcatgcctaggctatgttgctatgtaggaaaatgatacaaaatcttatttggcctccagttctcatcctttcacaaaaattcttcttatcaaggtcatccataacttctatgctttcaaattcaatggactcaccttttgaattattatagatactttattatctcagcactgaatagaatggcccctttgttgaaacatcttcctctcctggcttgcctgattctacacttttctgaatttccttctgctttacttatctattcttctcctctttcacagtttcctattccttttttgtgtgatctygaaagggtgacatgccctgggggaatgctgggatttcttctctcccagttttgtatactctccctcagagttctcattccatcctatggtttgaaatttgttctaaattgctgtttctgaatctcctcaaaacttt

SEQ ID NO: 782064 - DNA, 573 bp, Homo sapiens
agtgggttatgtccaagggatgcagaggtggtttaatatatgcaagttaaaaaatgtgatacatcacatcatcagaattaaaaacaaaaaccatatgatcatctcaatggatgcagaagtgactgacaaattttagctctcctttatgaaaaaaaaaaactctcgacaaactagacatagaaagaacctatcttaaaataataaaatccatatatgacaaacccacagtcaacatcatactgaatgggaaaagttgaaagcattttctctgagaaattctggtctctgagaccagaaaagacaaaaatacccacttttaccatttctattcaacatagttctggaagtactaaaaagagcaattaarcaagaaaaaaatatggggcatccaaattgaaaaagagaaagtcaaactactgccatttatagacgatatgagtgtagtacatctagaaaattctaaagactcctccaaaagattcttagatttgaaaaacaaatttaataaagtctcaggttacacaatcaacgtacacaaattagtaacactgctatatatcaacaacaacccag

SEQ ID NO: 782065 - DNA, 596 bp, Homo sapiens
attaaatgaaaaatcttctgcacagcagaagaaatactcaccagagtaaacagataacccacagaatacgagaaaatatttgcaatctatgcatctgacaaagaactagtatccagaatctgtaaggaactcaaacaccaagaaaaaaatcaaataattcctttgaaaagtgagcataggaaatgaatagacatttmttgaaagaagatacacaaattaccaacaaacatatgaaaaaaaagctcaacatcactaatcattagggaaatgcaaattaaaactacagtgagataccaccttattcctgcaagtaaggcgattattaaacagtcaaaaagcaatggatgttgccatggatgtgggaaaaagcgaatacttacaaactgctggtgggagtgtaaattagtacaacctttatggaaaacagcatggagattccttaaagagctataagtagatctaccattcaatccagcaatcccactactgagtatctactcaaaggaaaagaagtcattatatgaaaaagacatttgcaaatgcagcacaattcacaattacaaagatgtggaaccaagttaagtgcccattgacta

SEQ ID NO: 782066 - DNA, 620 bp, Homo sapiens
attaaatgaaaaatcttctgcacagcagaagaaatactcaccagagtaaacagataacccacagaatacgagaaaatatttgcaatctatgcatctgacaaagaactagtatccagaatctgtaaggaactcaaacaccaagaaaaaaatcaaataattcctttgaaaagtgagcataggaaatgaatagacatttcttgaaagaagatacacaaattaccaacaaacatatgaaaaaaaagctcaacatcactaatcattagggaaatgcaaattaaaactacagtgagataccaccttattcctgcaagtaaggcgattattaaacagtcaaaaagcaatggatgttgccatggatgtgggaaaaagcgaatacttacaaactgctggtgggagtgtaaattagtacaacctttatggaaaacagcatggagattccttaaagagytataagtagatctaccattcaatccagcaatcccactactgagtatctactcaaaggaaaagaagtcattatatgaaaaagacatttgcaaatgcagcacaattcacaattacaaagatgtggaaccaagttaagtgcccattgactaatgagtggataaaaaaatgtgtta

SEQ ID NO: 782067 - DNA, 659 bp, Homo sapiens
aagcctgagatataatgacttcattgctgaattttacctaacatttaaagaataccaatactactcaaactatttagaataacagaagaagagggaatattttcaaactcattttatgagcccagaattactttgataccaaaaccagacagacccatttaaaaaaaaaaacaaaactacaggccaatatccctgatgaatcttgattcacaaatgcttcacaaaacactagcaaactgaactcaataacacatcaaaaagatgatttatcatggccaagtgggatttatctcagaggtgcaaggatggtccaatatatgcaaatcaaccaatttgatatawcaacagaataagacaaaaacaatatgataatttcaactaatgctggagaagcatttgatataattcaacatcccttcataataaaaaccctaaaaaaacagtatagaaaggacatatctcaacataataaaagccatatatgacagatccacagctagtatcatactgaatggggaaaaactgaaaaccttttctctaagattgagaacatgacaaggatgcccagtttcactgctgttattcagcatagtactggaagttctagctagagcaatcagacaagataaagaaataatgagcgtccaaattggaaagga

SEQ ID NO: 782068 - DNA, 607 bp, Homo sapiens
tcatgcttcagcctcttgagtagctgggactacaggtgcacgccatgatacctggctaatttttgtatttttttttttttttgtagagatggggttttgctatgttgcccagtctggtttctaactcctgagctcgggtcatccaactatctcggcctcccaaagtgctgggattacgggtgtgagccactgtgcccagccaaaagttgcatgtgcatggggagtcagcacccctaactcctgcattgttcaagggtaaactgtgtgtgtgtgtgtgtgtgtgtgtgtgtgtgtgtgtgtgtatagtgtatatatatactatatagatatacactatatactatatataaatactaattaatctctctgtatacactatatactatatatatatatatatatagagagagagacggagatttaacatctataccraaattattacttacagagatctgttatttaaagataattattataagggattggctcatgtgattatggaggctgccatctgcaatctggagaaccaggaaagctggtggtatagttccagtccaagcccaaaaactgagaatcaggggagtcagtgatgtaagtctcagtt

SEQ ID NO: 782069 - DNA, 552 bp, Homo sapiens
ctgtgccccagcctggcctggcttttctctctaggcctcagggagatgtgtcaaggaaccacagtcagtgcggctgggcgccctgctcagccaggagtttgtctgcagagcaggcctcttccccagagcagcggcccagcctgttggagaggtgggtcgtttagggctcaggtccctagagttgtctttggctctttgcttccaggctgtgaaactttagataaagtyttaagcagagaaagtgacatccttgctaattagtcctcttaagactctcagataaaggggcttctaattctaactgtcttactaccaacttggtgagacagactaaagaattaggctttgttgaacagggcgcggtggctcacacctgtaatcccagcactttgggaggccgaggcagatggatcacttgagcccgggagttcgagagcagcctgggccccatagtgagaccttgtctctaaaataaataaataaataaatatttttttaaaaaaagaattaggctttgtaaacggtaagcccaaccagctagtgctggagaaa

SEQ ID NO: 782070 - DNA, 552 bp, Homo sapiens
ctgtgccccagcctggcctggcttttctctctaggcctcagggagatgtgtcaaggaaccacagtcagtgcggctgggcgccctgctcagccaggagtttgtctgcagagcaggcctcttccccagagcagcggcccagcctgttggagaggtgggtcgtttagggctcaggtccctagagttgtctttggctctttgcttccaggctgtgaaactttagataaagtcttaagcagagaaagtgacatccttgctaattagtcctyttaagactctcagataaaggggcttctaattctaactgtcttactaccaacttggtgagacagactaaagaattaggctttgttgaacagggcgcggtggctcacacctgtaatcccagcactttgggaggccgaggcagatggatcacttgagcccgggagttcgagagcagcctgggccccatagtgagaccttgtctctaaaataaataaataaataaatatttttttaaaaaaagaattaggctttgtaaacggtaagcccaaccagctagtgctggagaaa

SEQ ID NO: 782071 - DNA, 552 bp, Homo sapiens
ctgtgccccagcctggcctggcttttctctctaggcctcagggagatgtgtcaaggaaccacagtcagtgcggctgggcgccctgctcagccaggagtttgtctgcagagcaggcctcttccccagagcagcggcccagcctgttggagaggtgggtcgtttagggctcaggtccctagagttgtctttggctctttgcttccaggctgtgaaactttagataaagtcttaagcagagaaagtgacatccttgctaattagtcctcttaagactctcagataaaggggcttctaattytaactgtcttactaccaacttggtgagacagactaaagaattaggctttgttgaacagggcgcggtggctcacacctgtaatcccagcactttgggaggccgaggcagatggatcacttgagcccgggagttcgagagcagcctgggccccatagtgagaccttgtctctaaaataaataaataaataaatatttttttaaaaaaagaattaggctttgtaaacggtaagcccaaccagctagtgctggagaaa

SEQ ID NO: 782072 - DNA, 552 bp, Homo sapiens
ctgtgccccagcctggcctggcttttctctctaggcctcagggagatgtgtcaaggaaccacagtcagtgcggctgggcgccctgctcagccaggagtttgtctgcagagcaggcctcttccccagagcagcggcccagcctgttggagaggtgggtcgtttagggctcaggtccctagagttgtctttggctctttgcttccaggctgtgaaactttagataaagtcttaagcagagaaagtgacatccttgctaattagtcctcttaagactctcagataaaggggcttctaattctaactgtyttactaccaacttggtgagacagactaaagaattaggctttgttgaacagggcgcggtggctcacacctgtaatcccagcactttgggaggccgaggcagatggatcacttgagcccgggagttcgagagcagcctgggccccatagtgagaccttgtctctaaaataaataaataaataaatatttttttaaaaaaagaattaggctttgtaaacggtaagcccaaccagctagtgctggagaaa

SEQ ID NO: 782073 - DNA, 642 bp, Homo sapiens
atgtcttttaatttatttgtaccttcttcaatttcttttatcagtttttttttagttttcgtggtagacacctttcacattcttaattaaatttattcctaagtatttttgtagctattacaaatggatttgcttttttttatttttwttttttgaaatggagtcttgttctgtcaccaaggctggagtgctgcagtggcatgatcttggctcactgcaacctctgcctctggggttcaagtgatccttttgcctcagcctcctgagtagctgggtttacaggcatgtgccatgacattcagctaatttttgtatttttagtagagatgggggtttcaccgtgttggccaggctggccttgaactcatgactttaggtaatctgtccgccttggcctcccaaagtgctgaaataacaggcatgagccaccatgacaggccttgatttctttcctggctagcttgttattagtttacagaaaagtatgttaaattttatcaaatgcttttcttctgcaactatggagatgatcatacagtttttgttctccattctattgatgtgttgtatacatttattgatttgcatatgttaaaccatgcatacatgcgtgttacaaaccccattagtcatggtgtgttc

SEQ ID NO: 782074 - DNA, 580 bp, Homo sapiens
tgcatcattaggttgtttatttgaaatctttctacttttttgatatatttataattattaattgcttcttctgaatcccataggcttttgtatgtcacctttctatttgcatttgtttttaagacattttaaaattttattcctaaattccgtatagactcgttggttgttcagagcatgttgtttaattgccatgtatttgtaccattcacaaagttcttctggttattgatttctagttttatttcattgtggtcrgagaatatacttatattatttccatgatttaaaattttttgagacttgttttgtagcctaacatatggtccatcctagagaatattccatgtgatgagaaataaatgtattctgtagctgttggatgaggtgttctgtgaatgtctgttaggtccatttggtctagagtatagtttaactgatgtttctttgttgattttctatctaaatgatctgtccaatgctgaaagtggagcagtgaagttcccaactgttattatatggttttctatctttctctgtagctctaataatatttgctttatataatctgggtgctcca

SEQ ID NO: 782075 - DNA, 580 bp, Homo sapiens
tgcatcattaggttgtttatttgaaatctttctacttttttgatatatttataattattaattgcttcttctgaatcccataggcttttgtatgtcacctttctatttgcatttgtttttaagacattttaaaattttattcctaaattccgtatagactcgttggttgttcagagcatgttgtttaattgccatgtatttgtaccattcacaaagttcttctggttattgatttctagttttatttcattgtggtcggagaatatacttatattatttccatgatttaaaattttttgagacttgttttgtagcctaacatatggtccatcctagagaatattccatgtgatgagaaataaatgtattctrtagctgttggatgaggtgttctgtgaatgtctgttaggtccatttggtctagagtatagtttaactgatgtttctttgttgattttctatctaaatgatctgtccaatgctgaaagtggagcagtgaagttcccaactgttattatatggttttctatctttctctgtagctctaataatatttgctttatataatctgggtgctcca

SEQ ID NO: 782076 - DNA, 574 bp, Homo sapiens
tttctcatcacaaatgaagcctgtaaggtgatggtatgtagcaacatagcttattatcagtttattctctgtttattatcacaccaaatttatttataactgcttttaaagaatattataacaaagtaccaataatatatttggggatattttcaaaatttttttagaatttgaatacaatacataatatagttggacactgtaacgtaatttctgttagtgtctctttaattgcatttgcagtattcacagggaagtgttccgtttggataattactcattgggtgaagatcagcaatttggctcatgagcacttcagaaaatgactcaaaattttgyaagaagagaatttcctacaaataccccaatcaaaaaaaaaaattcagttaagtacttctttcgtacggtttccaccagaatatgttaaagatttcctccaactatttattctcctttaggttattcataagagtaccatttttagtaaagagagagccaacttttttttaatgtgttcaatgtattatgccatacacttttagaaattataaatgttatgacttaggagaaatta

SEQ ID NO: 782077 - DNA, 521 bp, Homo sapiens
cagttttattcttgttattttctgggaatagtgacatctaaacaaaactcttgatgataaaaaagcaagcattgccatcagtagatatatcttacttccttttcaagaaatatcccttgcctattttagctataatgctgcctgccttcaccactctgcccccagtgtgtatatctatacagcagctagagtgtctcatttaaaacttaagttgaaacgattcgtttctccagtggcttctctctttcctactcaggaataaaagccagtaccttacaagctatttgagagcacctcacttagttgttcttttggaaatgtatgtccagccacccctgcaagcttgcaattgcttcaaccctccrgacaaactctgcctcagtattctcacctcagatatgggccaggcttgctgtcttacctatcccaatctgtttctcaaatgtcattttaagaatctgagcttccctgatgaaaaccataaatcaatagaccacaaccccacccctaaattctcctca

SEQ ID NO: 782078 - DNA, 621 bp, Homo sapiens
ttgaagtagtgttttccttctcctagtatcatttattattggtaccacaagcaagaatcttttctatgccttgttcgatggttatgtatctttctaagtttggatcagcttccaacattttattctttactcttttaatatcatggaatatctgcaagcgtttatttaatgtttttttttgtgtgtgtgttggtgttacttcatctggaatgtttacrtctttatttgcaagtgtttatttaatgtttagtttttttgttggcgttacttcatctggaatgtctatatctttatttgttacaaccggatttctcatttatgccaatgtcagccttaaccaattttctctgactttctatcttaaagcctctgtaatggagacagtgtcaacatccctaagccagttatttcttccataactccatttacctttgatttcaatttcacttacagcatcatcattttagtttatcccttgaacttttatttttgtcggccaattccttctttcattatacgtttttggtaaacatcacgtgggtttttcactgggaaacaaagaggtaaggcaaccacaggctttcccttctgcacgtgaattgaatacatgctcagcagcca

SEQ ID NO: 782079 - DNA, 335 bp, Homo sapiens
aagtgtttatttaatgtttagtttttttgttggcgttacttcatctggaatgtctatatctttatttgttacaaccggatttctcatttatgccaatgtcagccttaaccaattttctctgactttctatcttaaagcctctgtaatggagacagtgtcaacatccctaagccagttatttcttccataactccatttacctttgatttcaatttcacttacagcatcatcattttagtttmtcccttgaacttttatttttgtcggccaattccttctttcattatacgtttttggtaaacatcacgtgggtttttcactgggaaacaaagagg

SEQ ID NO: 782080 - DNA, 586 bp, Homo sapiens
ccaagtggaattactgacttaacatttagcttgggatcctgagacttccatcacacagttttctcattgattcgcagccaataatatctgttttaaaaacatctcaggccgagcgctgtggctcacacctgtaatcccagcactttgggaggctgaggtgggcagatcacctgaggtcgggagtttgagaccagcctgaccaacatggagaaaccctgtctcttctaaaaaaatacaaaattagccaggcgtggtggcgcatgcctgtaatcccagcactttgggaggctgaggcaggagaatcgcttgaacccaggagacggaggttccggtgagccgagatcgcgccattgcactccagcctgggcaacaagagcaaaactccgtctcaaacaaacaaacaaaaaacatctctctgctccttggggccggstgccagctctgctattggaggcactgagcgaccttgaagcaggcatgtcactcctctgtgccccagtttactcatctgtaaagtgggagagctggggcagacagtgagctggctgagggcaggactgtgtctcctcaagcccatggcccaggg

SEQ ID NO: 782081 - DNA, 589 bp, Homo sapiens
aagggagacattttcaggatcctgtcatggtgtccagaaaacaaagaaccgggagcacagggaccggaaaatcggggaagcatttcttcctatttctgtcccagttcctacctggaaggatttatgatcctgttcacctttcaagatgcacaattaaacatgcctatattgtcatatgttatatattttgcacagaaagagaatttattatacatagtgttaacattgtatgcatagatattataatttcttaaatgcttggaaacaacaaatgtcaaattatggttgattgtattagrtccacacatatatgatgaaataaaaatgcagagaaaaaataaataccaaatgaaatggcccttcctaccttaaaaatggggaagataattagatcaaatgcaataaaattgaattgattaggttgagtcagtgctaacctaattagcccccgattcctgaggtagcaaaaagtctcggtggaaaaactttcccccattctcacccttcctcagtcatcctgggagcgccattgtgttctgtgggctttattcagccctccctagtgaaaatggacttggtctcaaacagg

SEQ ID NO: 782082 - DNA, 597 bp, Homo sapiens
tgacctcaggtgatcctcccgcctcggcgggatccaggcgtgagccgcggtgcccggccagttcagtgttctttagatgtctgttagatcaactggtagagcttgtgactatgcatatcttctgtgtccttactgattttttactaatgctacagtgtattgakagttatgttaaaatctccagcggtaattctagatctgtctacttgagcagtttttgcttaaagtattttgaagccgtcatgtgtacacatttaggattgttaagtcttccttataaattcagtctttcattttcataacattttaaccttatttctgttaaatgtcttgatgcctagtcaaattatttgaccacccttttgctcctgtcaagcctgggcctttgttagtttgtgcttatttattagggttttgctcgtagacttagacagtgactcttagtctaggaaaggttcatcctcatgggcctcagccacatgttctaggtatacttagtgagttctctccactctgctgtgtcccaaatttgtgtgatctctggcatctccagtcagccctcagaagtgccagccactctgcagaggccttgtggag

SEQ ID NO: 782083 - DNA, 585 bp, Homo sapiens
agcaggaagatggcataagtaatcaaaaacccagcaacaaagaaaagcctggaccagatggcttcactgttgaattctacccaacgtttaaagcagaattaacaccagtttttctcaaactttttcaaaacgttgaagaggaggtaatgttttctaacttattctatgaggccagtattaccttgacaccaagccagacaaaggcaccataagaaaactacaaacaaacatcccttacaaatgctgatgcaaaaatcctcaacaaaataccagcaactcaaacttagcagtacactaaaaggattatacactatgaatgagtataattgaytcctgaaataaaagtatattccaacacatgaaaatcagcgtaatatcacattaacataaagaaggaaaaaagcctcatgtgatcacattttaatcaaagaagaaaaagcatttgtcaaaatttaacccacattcatgataaaatgtacttaataaactataaaaagaaagaaaacactttaacataatgtcatacaaaaaacaaaaacacagctaatgtggtgaaagactgaaagcttttaccctaagagcaaa

SEQ ID NO: 782084 - DNA, 600 bp, Homo sapiens
tggctgcagcagagctcaatttctccttgagagtattgaaggtttgcttgcagttctcattacgttctaggagctctaaatctttccctttagtgtatcatataaaggcttggctacatgtccaaatctgggcaaccataagcagcagtacccagccatctcctaaaagagcccacagtcatttgttggactgggacccttcggtgactaaaataacttttttatcttctagggttgttgatcagttccagtggttaagacagattccaaatatttaagtctttgagtcaaaatctgagccctgtatggggataccgtatatctgcaacttcccaggaaacttaccaacttaacagtattattatttgagtcttctttagttgggctagcaatgagcaagtcamctacatactgaataattgtgtccctttccagttgtagatttcttaagtccttagctagagcattttcaaataagtgggggctatcccagaacccttcagagacgactgtccaggttagttttgaggctgaatgtgtatctggattagtccattcaaaggcaaacatattgtgaatctggatgcattgagatgcaga

SEQ ID NO: 782085 - DNA, 637 bp, Homo sapiens
aaacataaatgatgtagcatcagaacacctggtgtggatgatgccaccacttgcctacccagttattctccacttcttgccctgagtttttctttctctctctctcttttttaacttagataaaaaataatcagcttcttaacctcccttgcatctaggagtcatcaaaaagatatcggttgatcaataagatcaataagaatttgataggcagggcttccaaaaaagtctgttgaaaagggaagactcagataacacagtttgttagtgtttgccttttgcccawgatccttccctctttcttctgcctgtgatgcccagggatggagtagtcagtttgtagcctatgaggacaaaagtcccatggcaaggcataaccatgcagaaagatagaaggaactgtgtcccgctggcactttgaacttcttgaggcatcttggggaaaataagcccctccttggtctagcagtatgtgacagttaatttcaggtgtcaatttggctaggccatggtatccagatacttgttcaaacatatctggatgtcactgtgaaggtaatttttagatgagattcatcattaaatcagtagactttgagtaaaacagattaccctccataatgtgagtgggcctcat

SEQ ID NO: 782086 - DNA, 611 bp, Homo sapiens
ctcaggctgtgtcccatgacttcagtgttaatgaattagctatatgttaaataaggcatctttaaataaaagtaaacatttamaaagtttacatattaatcaattaacaaaaatgttgtgaagaaacagccagtagcacgtgcctgtagttctggtttctcgggaagctaaggtgggaggattacttgagcccaggagttcgaactgcagtgcactatgattgcaccactgcactccagcctgggcaacagagtgagaccctatctcttaaaaacaaaaaaaatattgtaatcagaggctctcaggaactcaaccctggatttcccctaggggcaatggttcattatttgctaattcagcgtttgtggagactttatacaacaatttcctatgaaaaatcaggatcaactatatatatacatagaatgtatatgtgtatatatattttacatatttgtgtgtatacatgcacatgtgtatatatgtatgtttagtagtttttaaccattttggtgttatacacctgttgtaaaaatttaaggaagacgtggatactaggggctgagggttgccacaaagggaggtatgtacatatatacagccctgtgcta

SEQ ID NO: 782087 - DNA, 424 bp, Homo sapiens
agaatgaaccctaggacaattaaatatcctttaattttgagatgtgtagtctggaaatacctacatggccgtcctaggctttaggttcattttctttgagaggctcaaccccatattatatcagatatatttacaggtcaaaaggcaarattgaaacaaatttagtttaaagatcttaactggcttttatttgtgattctagaatcagacaaaacctcactgtataaaaaagaatgagtgttccaatgagctgagcagaggaggtttcctttacagctggaaaagggatgaagaaagcagaaacaaagaaccaaaagcaaattggttgtttccaagttactttccttgtaaaggttaaagcagagggacatccttatcatattggctacaactggtctagttgaggatttggctactagttctc

SEQ ID NO: 782088 - DNA, 625 bp, Homo sapiens
tctgccacccaggttggagtgcagtggcacacaggtattggcacaaacacaaccttctatagcctcaacctcctgagctccagccatcctcctgcctcagcctcctaagtagctgggatgacaggcatacaccaccaggcctggttcatttgttgttgttgaggagagatgaggtctctccatatttcccaggctggtcttgaactaggctccagcaatccacctgcctcggcctcccatcgtgttgggatgacagtcatcagtcactacacccagccacttactagttttaagagttggttttgtgttttttcgtctttgtagatcacttagtgttttctgtgtagaaaatcatgacatcagcaaatattaacagttttctttctttccatctgtatgcctttcatttccctttcttgccttattgcaytgattagaacttcctgcactatgttgaataggagtggtggaaccagccttgcactgctggactagactccatttcgtcgtggtatattattcttttagcctgaatcctgtttgttaatattttgttcaggattgttgtgtctctatttatgacagttattggtatatatttctcttttttgcactgttttttctg

SEQ ID NO: 782089 - DNA, 617 bp, Homo sapiens
ttactttttttgcttattgttgaaatccccaaactgttgagaaaacactgaagacaattgtagagaagaaaacaaaacaagtgagaatagctactacgtacaaagcaaacattttataacatgttaattgtagaagtcatcaaggatataatttttttaagtacaagtgatcgaggatataatttttttaagtacaggcataccttgttttactgcactttgtttcattgcacttcacagataatgtggttttacaagttgaaggtttgtggcaactttgcatctagcaagtctattggcaccatttttccaacagcacgtgttcatttcacgtctatgtatcacaatttggtaattctcccaatatttcaaactaattcattattattatgtctgttgtggtgatctgtgatcagtgatcttagatgttcctattgtaagtgttatggrgcccaatataagatggtgaactttatcagtaaatgtttgtgtgttctgactgctgcactgactagccatttttccctctcctcaggcttccctattccctgagacacaacaaattgaaattagtccaactaataagcagacaacagcttctaagtgttcaagtgaaa

SEQ ID NO: 782090 - DNA, 667 bp, Homo sapiens
  misc_feature 53: n = A,T,C or G
atggtgtggctctgtgtccccacccaaatctcatcttgtagctcccataattncccttgtgttgtaggagggacttggtggaagacaattgaatcagggggggtgggtctttctcatgctgttctcctgatagtgaataagtctcacaagatctgatggttttaaaaacaggagtttccctgcacaagctctctctttttgcctgctgccatccacataagatgtgacttgctcctccttgcctttcaccttctgccatgattgtgaggcctccccagccacgtggaactgcaagtcaaataaacgtctttgtttgtgaattgcccagtctcaggtatgtctttatcagcagcagtaaaaagractaatacactcaggaaaaaaaaatggcatctatactgaatatgtacagacattttattgtcattattccctaaacaatacaactatttatatagcatttacactgcattaggtattataagtagtctagagataatttaaagtagtctgtaggttacatgcaaatattatgccattttattccagggacttgagcatccacaaattttggtatctggaagcaatccttcacagataccaagggacgacagtacttggtgatttagatcaggctgcacattcttttctctctccattggtttgg

SEQ ID NO: 782091 - DNA, 624 bp, Homo sapiens
gtgttgttttgagaagtgtctgttcatgtattttgtccactttgtaatagggctgttttttgcttgttgaattgttgaagttccatatagattctgggtattagacctttgtcagatgcatagtttgcaaatattttctcccatcctgtaggttgtctgtttctctgttggtagtttcttttgctgtgctcaagctcttcgattaggccctacttgttaaattgtgtttatgttacaytgcttttgaagactttgtcataaattatttcccaaggctgatgtccagaaagacatttcctaacttttcttctaggatttttatagtttaaggtcttacatttaaatatttagtcaattttgaggtaatttttgtatatggtgaaaggtaggggtccagtttctttcttgtgcatatagttagccagctatcccagcaataacaatagggtgtcctttttccattgcttaatttgttgactttgtcaagatcaggcagttggaggtgtgaggttttatttctgggttttttattctgttccattggtctttgtctgttttcacgccagtaccatgctgttttggttaatgtagccttatagtacagtttgaagtcagataacatga

SEQ ID NO: 782092 - DNA, 626 bp, Homo sapiens
caccagataagcagagctggtttctgcattgctaactgggagcttcctaactaaaagagcctcacaaacagttaattctgctctagatgctgtaaaagagggggacgggggtaggggcagggagagagagagattacagtgataaaatgaaaatgctgtttcagccaggaagttttttctcccccatctcatatattaaaatgggcctgattttctaacttcagcataaaagcccagtaagaaatattagctcttcagttaatgtcattcacacaaggaatttatcagcagagtttgtgtttgaacttttcatgtcatctcaygcatctcagagggtattaaactccataaaacacaatcccaaaagtgaaatatttcccacttttactctataagtgagtcttagggaacggaaaaaaaaattccatgtctggcttattcctaaagagagagtaaatagagatatttcttgggccaaataatgagaagaatcacaacccttagggtttatgttccaaaggcctccaaatcccaacaggtccagcaaagcagaacagagaaaggggctgaatatacatgaagagaataacagaagcaagtggttaatggtttccttaaatgcggca

SEQ ID NO: 782093 - DNA, 626 bp, Homo sapiens
caccagataagcagagctggtttctgcattgctaactgggagcttcctaactaaaagagcctcacaaacagttaattctgctctagatgctgtaaaagagggggacgggggtaggggcagggagagagagagattacagtgataaaatgaaaatgctgtttcagccaggaagttttttctcccccatctcatatattaaaatgggcctgattttctaacttcagcataaaagcccagtaagaaatattagctcttcagttaatgtcattcacacaaggaatttatcagcagagtttgtgtttgaacttttcatgtcatctcacgcatctcagagggtattaaactccataaaacacaatcccaaaagtgaaatatttcccacttttactctataagtgagtcttagggaacggaaaaaaaaattccatgtctggcttattcctaaasagagagtaaatagagatatttcttgggccaaataatgagaagaatcacaacccttagggtttatgttccaaaggcctccaaatcccaacaggtccagcaaagcagaacagagaaaggggctgaatatacatgaagagaataacagaagcaagtggttaatggtttccttaaatgcggca

SEQ ID NO: 782094 - DNA, 613 bp, Homo sapiens
cccatgccacttctctaacttcatgtcctgtattctctcccttattatgttttaaactcctttgaagagcaaagcatcaaaagttcttatccctagacagacacaaattaaaatttgcttattcattcattcattcattcattcagcaaatgtctggattttagaaatgagtttctgtctcaaaggtatttaatacaacacctggctcagcttcatggactagagacacattatcactgaggtcacgttgttactgtttttgctactcctgctaactgttccaaaggggraaaaaaaaacaacatgcactttaaaagcatgatgttcttgttggcagaaattacaatagtttcttctcttggtgtttactcccccaacactttcctcagctctttatttctgatattcaattaccctttttctgcctggcttttctcactttcccagaagacttaccctgggaaactttactgttttcactggtgtacatttgcactagttggtttaattaccaagtgaatctacagcctctcagaacatttgacacgtctccctttcactggatccaagacatgaagcaatgaaaacgaatgggtgaatgttacagcaaact

SEQ ID NO: 782095 - DNA, 593 bp, Homo sapiens
gcagatctcttgagctcaggagttcaagaccagcctggtcaacatggtgaaaccctgtctctccaaaaaaaactacaaaaattagccaggcatggtggctcacatctacactcccagctactcaggaggctgaggcaggtgaatcgcttgaacccaggaggcagaggttgcagtgagctgagatcccgccactgcactccagcctggggaaagggagtgaaacctggtctccaaaaaataataaaataaaataaacgcccattagcatagacaaagasaaagacaagaaagtaaaaccttagcttatgttattccctattagcatctctgataatggatttgttcattaacaagttaggaactaattgaactggagattcaaaataatctaaaaatttcagttcttgatgttagtactgctgtctctatgcactatcaagtgcacggaaagtatagaggtcaatgtatggcacatctgctttccattaccatgaaattcacttcaacacatcactgtcataaaaaagtcctatactaagcattctgttgttggtattgatccttcccttccatgttatgaagatagttattca

SEQ ID NO: 782096 - DNA, 634 bp, Homo sapiens
ccaaaatcttaaaaaatatattagtttagaatgagaactgtgcctcaggaggtgccatggaattcactaggaggtaaacctactgcaaattacattttaaaaagcaatctcagcaatatattcttctctaaaaccacaaattcattttgaatcaatatttgttatgagtccttttcaacatttttccaggagcaacacagcactgtgtcttcaggggtcgaagagggaatctacaggacttaaaaaagcatagggagtgaatatggggtcatagcttctgtcattgttgaaaagagatgccagtaagttctatgcattaaaacagaccacgcaaagcacatctgatggaataagataaataacataacagattcactcttgcatgtccaagcgtacttytgagatggtgaaatgcatttgatgcactgaaacatgaaaccatcaaaatctacagctggaagggacctcagagatgaatcatttgaaagccctccagaggaacccaggttccaggaaatatgaagaacgtgaccaaggtcacaagttagctggcagcagaacttgcaccagaatactgatctaattttattatatacacttttagtttctaaacaccaagaggcatgaatttaca

SEQ ID NO: 782097 - DNA, 522 bp, Homo sapiens
agtcactctcatctaaaatggcctttgcttgtcatcaaactcatatagaattcctaaaatctgtcagtgtagtagcttctaagtgatatgtcaacaaatatattcactgagaatacttattctgcctagagccaatgtttttagaaaaacatcctaaagagtcaactgttaaatcactaaaatgaatgttttgagcaggtgtttggaattgtgctgatttatccatattttccagtttaatttccacgtttaccaacaaacttcagcaagaaaacataaaatgtacctggaaggattatgttcatcataaakacaaggacagttgcgctaaacatatctgtactggtaacagtgattcataaaccatattcattaacctaaatccttaaagttttctgtttaaactgtagtgattggaacgccaagtgtcagagtttaaaatggtatttttaagctattagcagttgacattttaattaggcatatttatgacagacatggggggataaaaaagaaggtaag

SEQ ID NO: 782098 - DNA, 597 bp, Homo sapiens
cctgtaatcctagcactttgggaggctgaggcaggcagacagcttgagccccagagttttgagaccagcctgggcaacatggcaagttcctgtctctacaaaaaaatataacaacaaaaaagtcaggcacagcagcacaaacctgtagtcccagctacttgggaggctgaggtaggaggatcacttgagcctgggagcttgacactgcagtgagctatgatggcaccactgcactgcagcctgggtgacagagtgagaccctgtcttgatcaatcaatcaatcaatmaatacttgtccaaatgagttgttagttcctccttttattctctataaatgctgccagtcgggggcagtgtgtaaaaagcagaaaaacaaagtcaaaaaataatggagggttaaaaaaaaaaaaagaaaaaaaagaaaaaacaatggagggttccactcctttaaaagatattctgtccatgacaactccccctctgcccatttcctgaaagaataaaaaggatatgtagttctttctctctgacatcttctgaataaagtatcaccttcaattcaaacaggtaaaatatcttgaaaaagtggtcagagga

SEQ ID NO: 782099 - DNA, 624 bp, Homo sapiens
ggccattcagaggaagagagatgctacactgggtagataatcagaagaaaagaatcatttaacaaccaccctaccccccaaaaaaccctttctctctgcaaaatggaagggccatctagaaagaaacagaatcattcatacatatttattttaaaaccaataattaaccacctattgcagtactgaagttcatggcctacatgggatttattatactgattagtccacttctgtgtatatttaacctatctcataactttttttaaacagtcaatactaataaatagctgagttcatctaaaatatattggatctaagactacccaaattttcctcaaacatcctaactagaccccagttaaacttcttttggagtctcagggagaaaaaaaaaaaaatagaatgstttagaaattcttgattgaattttgttacattagctcagcataagcattacagccaccaaaaccactcttaccagtaagttctccatagcaagagatggctgcctgtcccaggattgcccacatatgtcttcttaggatactccaggaacaaagaggagaaaaataatcttggaaattctgtagactgttttgactttttaacccattcattcaatcc

SEQ ID NO: 782100 - DNA, 624 bp, Homo sapiens
ggccattcagaggaagagagatgctacactgggtagataatcagaagaaaagaatcatttaacaaccaccctaccccccaaaaaaccctttctctctgcaaaatggaagggccatctagaaagaaacagaatcattcatacatatttattttaaaaccaataattaaccacctattgcagtactgaagttcatggcctacatgggatttattatactgattagtccacttctgtgtatatttaacctatctcataactttttttaaacagtcaatactaataaatagctgagttcatctaaaatatattggatctaagactacccaaattttcctcaaacatcctaactagaccccagttaaacttcttttggagtctcagggagaaaaaaaaaaaaatagaatgctttagaaattcttgaytgaattttgttacattagctcagcataagcattacagccaccaaaaccactcttaccagtaagttctccatagcaagagatggctgcctgtcccaggattgcccacatatgtcttcttaggatactccaggaacaaagaggagaaaaataatcttggaaattctgtagactgttttgactttttaacccattcattcaatcc

SEQ ID NO: 782101 - DNA, 563 bp, Homo sapiens
tttatggcatgcatttcagaactctaataccttaactctgtctacaagtgaggtgggattcccgaaggaccaccatcccacctctgaaaatattttcattacccaagtcagaggaagtgaagaaatgaaagcttcctgaatctggccagctaaatagcttgattcaagtgtgttatgttttcattatttacatttcccttggaatttgagggctgtcttcaaattttgtgacacctgtrtttttttcacctacttctgttcagtgatttcctggaagaaggaagaacacggctgaaatgaacaatcaacgaacactgatttaatctataccacatttacctccaattaggtaaatcatggatcactgtttaaaaatatttttacaaggccattggataaaaacaagtattaggtatcagtcagtgctctgatttgggaagagccatttacggtctctaagcttatgtcatctcatctgtagaatgaaagtgactgattccccacatggcttccaactccaagaacttctggaatgctgtactgacactcatacagagctgatt

SEQ ID NO: 782102 - DNA, 613 bp, Homo sapiens
acggagttttggagactcctagcctgagaataaatccaagtccacaatgaggaagaaggaaggttgggttgggacgggaggatgctgaggacattccacaaaccatccaagccctagatacccccaatatcccacgtccgaggactcctacaaacctcccttaagcacccccacctaatttcccagctactgggtgaggcaagcttcattaaaacaccaggaccaccaacagagccagggtgcaaacaatgtcagttgaataaaaaaaagaaatcaataaataatcaggaaggctaatgaggaaaagagagtagctggggagtaagaagatgaggtatgtggcagtyaccattcctgggatgtccttgacccagacccccagtgacagccccaagatggccagcagggacttgaccctgagctcaggcccttggggaaaatgctgctggcagcctcctgtgtggctttggaggttacgggcaccatattgaacagtctgagaatgagaatgtacgttccattctgacgcactgctgggtggtgttgagtatcctcagagcttcgttgcaattcaggtgctggctcaggaaaccagaaaagatgttcccagcta

SEQ ID NO: 782103 - DNA, 589 bp, Homo sapiens
tcctctgccaaatggcagtcatttcccagccacatgctcaatacgaggaggcatgaagcacctgcacacaacagagcttagcggggtcaccagcacaagactgacaaatgtcagcacacttttggggactgaaaagtaagaatttccctaaggagagtccctaatgaagataaaytcctctggcaatagggagttgaggggcaatgaccagagactgagagaactgtgtgaaactcctggaaacacaaatgaaggaaccacacggggttttgaacctgtagtaaatacccactgaacgggatggtagtaaatacccatcacaggctgggatgccctcccagcccttcacacagcccctggcactatggtcactagagaaatgcctgagcgaactgtgcaggctgttggcaaaattgacgctttcaatacagagtggccacaactttcctcatgtgatccccaagccaccaggagaggtgggtaacccttacgcttgtctccctgaaatgaaaaactaaaacccagagaaggcaagtgacttatccaaggtcacacagcaaaatggtagcaaaggcagactcctgccttc

SEQ ID NO: 782104 - DNA, 644 bp, Homo sapiens
cttaccactgaggtaactgaggcccaggaaggggaagtggcttgttttgggtccgggaccactcttcatttcttatttgagccaaagcttccttctggcgtctgtctctgtttcacaagttcccctcgcatgggggctgggtactgcttggaagaactggcttcttccttgatacaggggctcgttcaccatcacctccctccctcacgtctcttctgcctctctgcagcctcaggccctcctcctgcaccaggggggcagactcaacccgggtgggcactgcctcccastccgtggccagaggctggagggctagggagactgaacagccccggcagctccagacataacaacctatgttgaggagtcagggcaggaagcgaacccagctgagaaatctgcgaaggtcaggaccagagccagacgcttatcaagagcaaagttaatggtttttgtgaaccgagcagtcagctgtttccccgaagataataatagacacatcatgttgggcattcaggaggcatctgaaaaaaaaattgtgcagtggaattgattggaagcttttccctaatgcataaaataggccagaaaagactatcaaatgtaacagcaccgatcaaacccaatagatcaagcaaggactg

SEQ ID NO: 782105 - DNA, 538 bp, Homo sapiens
gcccattggtgcagcctttgcctaaatggctacttacgtagccacatttcctcgtctgtgttcaggtgaggactggttcctgggcagactgcctgggtttgcatcacgggtgtccatcttgtcgaagctcatgtggtcacccaagtgtgactgagccaggcttgcccacggggtgctctgggccccattttcggcagcaggcagcgtcccctggaggcctggccctccccgggagcatggggagtagcgcctatgggcaagcagcctgcagcctccatccctgccygggggctcccccgccccagcctcacagcttctccaaaagtgtttgtctccttgccgcatcctctaggcctgagctcagacggtggaaaagaagagctggaaggagagttgcctttcagtctctctgccttctgaggtctcctgagacatagagcctgggcctgcctccctttctaggaggcgccgaggggtggtaagaataggggatgagtgagatgtgaattaggatccccacagcaagccctgcctcgta

SEQ ID NO: 782106 - DNA, 632 bp, Homo sapiens
atatatatatatatatatataccatagaatacttctcagctgtaaaaaggatgaaataatggcattttcagcgacctggatggaattggagactattattgtaaatgaagtaactcaggaatggaaacccaaacatcatatgttctcactcacatgtgggagctaaactatgaggacacaacggcataagaatgatacattagactttgggaacttaggggaaaggatggggtgtggtatgagaatraagtccacacattgggtacagcgtacgctgcttgggtgatggatgcatccaaatctcagaaatcaccattaaagaacttactcatgtaaccaaacaacacctgttccacaaacctattgaaataaaaaaatcaataacttgtatgaatgcaaaaaatatatatacaaattaattatatctggaataattaccttaatattaaaatgatgaaaactacaaaagtgttacaataaaatatataaatagagttttatgtgtggggaagactttctgaaggaaaagcatgtaagttcaactacaatgaattaaaaaattctgtatgccatagaaattataaagtttaaaaaacaactgggtagactaagagaagatatttaaaacatct

SEQ ID NO: 782107 - DNA, 613 bp, Homo sapiens
tcaatctgatttagcagaatttctaacacttcttgctggccactgtggacgaactcatttatatctctaagcttttgctcctactgttttttattcaaggaatattggtcttcttttattccacctactcaaacccagcccattcttcgagggcaggattaagtctcacctcccttaggaaacccttttccgatgccatttagtgaacgttttagtgcatattgattgctgttattacatgctgtatctccaatggataaaaatcctacagtcgtgagacttgggcaaaaccatggcaaatgacagatcccacattactyttcaagttaaatgtcaaaaatcttacatctcacagttacacaaaaataaattagaacttaatcatgttgcaactaatgacaataatttgttgatgtttaaagaccataagggtttgcatcatgtaatttaacataaatacactaagtggcttctatggctcaacttagtactcagagtaagggctgtcggtatgaataaataagaatcaaccgtgagagaaatgtatactatattagtaccatggaccaaatcattccaaaccataagagctaaatagaatcctgttcaaatg

SEQ ID NO: 782108 - DNA, 507 bp, Homo sapiens
acaaaagccaaaataaacccactaaactgtaggccagattctgtcacttctcaaacatctttcaacactagctaaaattattttaatggcctagaacgccttcagtgatccagctctttgcggcggctcttcccgctatgcactctgccccactgcttctcaaacacaccagagacagtcccatttcaaggcctttgcacttgctcttccctctgcccagagtacagtttccttcaccaatcccaagaccagctccttcactttcttccagtcctttttccaatgtcccattctcaccaaggcttctctagttcttcatatttyaaatccttcttttctgttaatttttttttcttcttggcacctatcattatctagcatactgtatatattacttatttatcctatttattgtctgtcatctccagcaaatatggtatcttttgttcaccttggtatcgccagtgtattgtccataataagcatttaatagacatttgttgcgtt

SEQ ID NO: 782109 - DNA, 629 bp, Homo sapiens
cctcaatcttttgctcttaattttgtgattttgcttgcctcaatatcaaatccaaattgtgattatcatcttcacatttctacaatattgttcttttctatatttctaaatgtcatttaaagttttgcaaatataaaaatgcttacactaaaaaagttagaaaacacaagcaccctctcccatccttctytattcctagacttcctatttcaactctttttctgatccttccaatatttaaaaaaaaaatgtttctagttggttagatttatttttctagataatatattttcttgatttatgcattaggcattatctatttattcctttttttatccttgaggattttgtactcttcttacttcccaactaccttataattattttgttaaatcattagtcactattaacattatcatggtataaataatattattcatggctgagttaaatattgtttaatgctttatgttcctcttttgcccatttttggaattaataactgtctttctttttatatgattggttctctatatattgttaatatttcaccaataaatactctgacaattatttcaagtgatttgtttcaaatatttaatttcaaacatcatacttgtcattgcaaa

SEQ ID NO: 782110 - DNA, 581 bp, Homo sapiens
attctcttccacattacacagtaaaataaatgaattcattttggccgactgctgttttgggttatttccccattttgctgttttgggttatttccccaatttccttagatgtgtacaaaaaaattagtgctgatgatatttttaatcttaaccctcatctgcttttttgatagatttttttcccagattttttctgttaacccaagcccacacagccagcaaaactcccaagaactcttgcaaccaatttttccttttcaattgtataaagctttgaaagttattgattctgcaaatgtgaaaaattaacttatcaaaaaatagcacacataaaatgggaactgrccaaagaaacacaaagaatattgttttaactggaagttctatcattaactgctacaactactgtattcctgatatggctttttgcaatatatttatcactatatgggaacgatttaatctgctccatagagagagcagtaggagctctcagtggcctcaaaatatgatggttcttaccaaaaacaacgaatctaaatttcttgcagatagtaggcctaacttttttttttctaaaa

SEQ ID NO: 782111 - DNA, 579 bp, Homo sapiens
cttgcttagcttcctcattgcttttagggaagacacagcaaaacagcataacctgtaagaccatatgtggtctgactccttcctcaggcttaccttatcccacatctccgtgttttctctcccagctattatgaattctcattgyccttattatcagttagttaactcttctcttccatcacatttgaactctatcatcactacccatgaaagcattttctgactcctcgcctattattggccttcacagaaccatgtaacaatcatagctcttatcaaagctggcatttcatgtttatttatgtgattaaatatatttttgtttctaattagactataaggttcacaataatctgtttctacccaacagtttatcctccttaactggcatgatgtaaatactcaaaacaaattgttgagtaaatgaataaatcagttcttgattttaacgtatcttgtgccctggataaaaaatcctttctatgagtgagacatgggcttccactggggttgggcttgaggtgagctgcaataaagccatatttctaatccaattattcatcactatggttgtattta

SEQ ID NO: 782112 - DNA, 638 bp, Homo sapiens
aatctcaaatccctgggctcaaggatcctccccccttggcctctcaagtgctggattacaaccctgcgctaccgggctgggctggtggtttctcttctatcaagtcactgtagggaaactcatgcatgccccatgacttcaatcatcatatccattctaytgactcaatcttgacctacagcccatattttctttctgaatttcaccccttccctgccactgcctctgctctgccctgctccttcctggatgcccccttctgaccatcctctacttgatttcaatatgtctcaaataaaacaaatgaatttttgctcagaattttctgctactcaactgttttcatttttctctgccctttcaagtttagcatttgatatatttgatgtttctctttccccagtcctcacatccaatttttcatagccaagtttttttttatcatttgaccccacctaacattcccactgaatactcctgccagactggaccaatagctcttcactggcctcctctgaactttttcaggtgatattccttctgcccagaacagcttacagtaataataggttaattttttttatgagtgtgaagataaagtcacagtgattctcctttctctgggaattgctcccaac

SEQ ID NO: 782113 - DNA, 628 bp, Homo sapiens
gagagcttgtcctggtcaagctgtttcctgcctcattggatttcccccaacaccggaatgtgctcttcagcatccgtcagcgtggggagtgccagatccgcagcagctgcacagccagctgctgaaggattgcaggcaatatgggtgaggaccttgtcagacctggcttcacagccatcaccatcaaacaccctctcctgttccacgaggctgttatgtgctgtgctgctctacttggcagtcgctttaatttyttctcagcagcagacaccattgttcagtgacagataaatgtcttgaaatgagtctttgggcagccctgctcttgagtgagaaggcacatccacttggagttctttcacccggaggggaagcagggcttgacaacttcattagcacttagaagccaccacagggcttggggatcagagctgggtgaaggcatggacgaacaaaaagaatgaatggaagtggggatattcaaaaagaaaggagagaactaaagatcaaggagggcggtaaagaagtcatgtgacttgcagaagtataggaacatgacctacatgtgcatggggtctcttattctctctctcagttgcaatcattcacagccttttcactcatgttt

SEQ ID NO: 782114 - DNA, 628 bp, Homo sapiens
gagagcttgtcctggtcaagctgtttcctgcctcattggatttcccccaacaccggaatgtgctcttcagcatccgtcagcgtggggagtgccagatccgcagcagctgcacagccagctgctgaaggattgcaggcaatatgggtgaggaccttgtcagacctggcttcacagccatcaccatcaaacaccctctcctgttccacgaggctgttatgtgctgtgctgctctacttggcagtcgctttaattttttctcagcagcagacaccattgttcagtgacagataaatgtcttgaaatgagtctytgggcagccctgctcttgagtgagaaggcacatccacttggagttctttcacccggaggggaagcagggcttgacaacttcattagcacttagaagccaccacagggcttggggatcagagctgggtgaaggcatggacgaacaaaaagaatgaatggaagtggggatattcaaaaagaaaggagagaactaaagatcaaggagggcggtaaagaagtcatgtgacttgcagaagtataggaacatgacctacatgtgcatggggtctcttattctctctctcagttgcaatcattcacagccttttcactcatgttt

SEQ ID NO: 782115 - DNA, 622 bp, Homo sapiens
gcttttctaacctgttaactgttacgtgaacaacagagaaactttagttttgtttaaattataaaaatattggggtttatggaagctagagttaccctgaataattcactatactttattcataatgtgatttatccttttaaagaaactttttattcatttattcacaagcaaatttcaccaaaatttttctataaaaggccagctagtaaatattttagatattgtaagtcatatagtctccgttgtcaccactccactctgtcattgtaatatgaagcaagccatagatgacacataaaacaatggtcatggctatktttcaataaaactttatttaccaaaagaagagggaggtaggctggatttggcccataggtatattttgctaactcctttgatagatgataggtaagtaaaactagaaccatacctttatgatattggctggggtcactcccacaactgcattcaacagagtatttgatggtgtctgaaattttaagatagtttcattcttacatctggtgctttatccactgtaactgaaacatctgggggctctctgagctcaaacttcttcacatggtgctggatcccaagagtcaaccatgggagctgc

SEQ ID NO: 782116 - DNA, 611 bp, Homo sapiens
taacaagaggtcccagcttctattaagatcctggaagggctatagccaaaacaaaccaaatcgtcttttctaaaactaaaacccaacttcagatcagctcagtcacagactgcttaaggctaatcttcacctactttaattctctgccaaaaagaaaaagtaaattcttgctggggggaaaatacattagcaagatccccaaataatccctaaaatatttcatttcaattatctgacattcaataaaaagttaccagacatacaaggaaaactgaccaaatgactaaattgagagaaaaatcagaatgaatgaagtccagaaagaagaactactagaaatagaccttacagtaattacaatacatctatttagtaaaacagatgayaagatgtagaatttcatttcccaaacactggaatgtataataaacatttagttctagacaatggtaataaactaattgtaggactagccctagaaaaccatcctgaaaaatacaattactgaaaataacatatcaataggtgagtttaacaacagaccatctatgatagagaattaatgagctaggtgataggtaaaaataaaaagaagcaaaaaagtaatttat

SEQ ID NO: 782117 - DNA, 624 bp, Homo sapiens
cctctacatgaacaaccataatctgtaagtgttgagtcttaaagtagagcaatttaaaaatgcgttattttggcaggcaaataaaaaacttttaaacatttttctctatatttcctaaaaaaaattatcttaactttctaatgggctatggagataataacaagaggtcccagcttctattaagatcctggaagggctatagccaaaacaaaccaaatcgtcttttctaaaactaaaacccaacttcagatcagctcagtcacagactgcttaaggctaatcttcacctactttaattctctgccaaaaagaaaaagtaaattcttgctggggggaaaatacattagcaagatccccaaataatccctaaaatatttcatttcaattatctgacattcaataaaaagttaccagacatacaaggaaaactgaccaaatgactaaattgagagaaaaatcagaatgaatgaagtccagaaagaagaactactagaaatagaccttacagtaattacaatacatctatttagtaaaacagatgataagatgtagaatttcatttcccaaacactggaatgtataataaasatttagttctagacaatggtaataaactaattgtag

SEQ ID NO: 782118 - DNA, 448 bp, Homo sapiens
atttgtagagatcactaacaacagccaaactgttttggctgtttatactaacaagatttgtcaatagtctgtagacagttttatatgtgatgctatttgatatggtttggctgtgtccccacccaaatctcacattgaactataataatccctatgtgtcaagggtggrgccaggtggagataattgaatcatggggggtggtttcccccatactgttcttgtggtactgaataagtctcatggtatctgatggttttataagtgggtgttcccctgcacaagctctcttgcctgctgccatgtaagacgtgactttgctctcatttaccttccaccatgattgagaggcctagccaaccatgtggaactgtgagacaattaaacttcatttctttataaattacccactctcagataggtcattattagcaatgtaagaacagagta

SEQ ID NO: 782119 - DNA, 520 bp, Homo sapiens
ccaaaatgaaattctaatttgtctttttaatctaaaattgactttggaattcacagttggaccactggaaagattaaaaggatgtatctctcattaggcttattagatatggtggtttgtattaaaagcattatcaaataaaaaaagcaatactaaataktatttaaattatatttatatggctatgttattgatgtgaaagtactaaagattatataaaatttataaaggtctactggtcctgttttgatgtatcattcatgattctggttgttgtcttaaaattttgtatgcaatagaagctcctgaattttcctgtttattgcagaattctcattatattgtaactatggctttactaagaaaaatcatctatagtggtgattcatttctaaaggcaattgcaatcagattcataaaaaagtctctaacaagtactcataaatatgtttctaataactttaagaaaagtggactaaataaaaatttccaaaactaataaaaaaagatggattaataa

SEQ ID NO: 782120 - DNA, 520 bp, Homo sapiens
ccaaaatgaaattctaatttgtctttttaatctaaaattgactttggaattcacagttggaccactggaaagattaaaaggatgtatctctcattaggcttattagatatggtggtttgtattaaaagcattatcaaataaaaaaagcaatactaaatattatttaaattatatttatatggctatgttattgatgtgaaagtactaaagattatataaaatttataaaggtctactggtcctgttttgatgtatcattcrtgattctggttgttgtcttaaaattttgtatgcaatagaagctcctgaattttcctgtttattgcagaattctcattatattgtaactatggctttactaagaaaaatcatctatagtggtgattcatttctaaaggcaattgcaatcagattcataaaaaagtctctaacaagtactcataaatatgtttctaataactttaagaaaagtggactaaataaaaatttccaaaactaataaaaaaagatggattaataa

SEQ ID NO: 782121 - DNA, 610 bp, Homo sapiens
ctacaaggaactcaagcaactctacaacaacaacaatgacaaacaaccatattaaaaagtgggtaagggatacaaatagacactgctcaaaagaatacaagtgaccaacaaagatatgaaaaaaaggctcaacattactgatcatcagaaaagtgcaaactaaaaccatagtgagataccatctcacatcagtcagaatggccattattaaaaaactgaaaaacagcagatgtttgtgaggatgaagagaaaagggaacacttatacactgtttgtgggaatgtaaattagtacaacctctgtggaagacaggatgggtatttctcaaagaactgaaagtaggatctaccatttgacccagcaatcccactgttgagtatctacccaaaggaaaataaatcattttatcaaaaagacacctgcacttgtatgtttattgtgacactattcacaatagcaaagtcgtgaaatcagcctaagtgtccatcaatgaatgattggataaagaaaacgtggtatatatactcccgtgaaatgcyactcactcataagaaagaataaaatcatgtctttgcagcagcatggatggatttggaggccattattctaa

SEQ ID NO: 782122 - DNA, 601 bp, Homo sapiens
ttagaaggatgatggaaatcataatctagcgtgagccactagactgttattcttcctagcttaagaacccaccccaactaccctgcccaattagggagactcccacttccatggatctcagcaaagcaaagggctacattggctttatycaggaaggtagacagcaactctgcatagccaaaaagcctgccctataaccctgcatagacagggagattctcgcctctgcagatctcagaaaagttaagtggctctacaccagcctaacccagaaaggcaagcagtggctctgagcagttaaaaaatcgacccaacaatcctgcccaggtagaaagattctcacctctgtattttttggagaaatgtaacagctagtcctgcttgatctgaaatgtcaaacagccacttatctaagccaaaagctcaccctacagctccacccagacagcgggacaatccccaattacacatttctaaggagcatagcctcaggtctcacctgcccagataagtgtctccatctaactttagggcccaacctgcagccatgcccaactgcagattccaaatagtggaaatgcccaagcagggggtatatctt

SEQ ID NO: 782123 - DNA, 601 bp, Homo sapiens
tctagatgcaatctgtaagttggttttatttgcttttttcttttagtaccaggtattagataacctaaaggtatgcacaaagttttgtccttggataataaagtgctggctgctgggtttatcggttttcactgtaaaatgccaaaaaaaaaaacaatctagaaaacatccaaattattttactgtgaaattttgttaaaatgaatatattgctgtaatcacatacccttacattttaccaagcacttaacgtagtcctataagaatgcccaaaactagttgttgatatactggttttttttttgcagatgaaaaagcaggctcaragtggtggcgtgagctgcttcaagtcacatagtaactagccaatgtcttaaatgagcccttggagcatctacacggtgttctgtgatcaaaggcctcagggagtttttacagatttcctttctgttgcttccctttttgtttatgagactatccttgctgcacgcctccgttctcagtgtcagtttttttgctggcccaggcttcttctattcatagccagaatggaagtcccagcaccagttcctgccctgtgtgtaaagcagggtcgtttctt

SEQ ID NO: 782124 - DNA, 606 bp, Homo sapiens
ctctctcctttgtccccaacatgcactgatcaggaagatgaaaccaagtgaaagccacttcctgtgtgggtcttaaaattcaataaaaataatatctcagaaaaaagccagaacacactttctgttcagatggaaaaatgcatgtttccctccccaccttcacctacaagctgagttcatgttatttcaacagcacatcatggacccagatgcaaatggacagtatctgaaatgcagtcccgagcaggagaaatgtagtttcatcagcgagtcatttttaaggcttgatttctatttgtatttaaacatactatcaaaaaataaatacttgcatattttgtggaatgtctgttgaaaatatgtgcccaaagtgtctaacttgggacaaatstgacctcagtccctggaaggctaccttcgatttatgcctcttgatatggcttggctgtgtcctcaccaacatctcatcttgtagttcccataatccccacatgttgtgggaggagccaggtgggaggtaattgaatcatgggggcagttacccccatgctattctcgtgatagtgagtgagtcctcatgataactgatggttttataaggggctt

SEQ ID NO: 782125 - DNA, 606 bp, Homo sapiens
ctctctcctttgtccccaacatgcactgatcaggaagatgaaaccaagtgaaagccacttcctgtgtgggtcttaaaattcaataaaaataatatctcagaaaaaagccagaacacactttctgttcagatggaaaaatgcatgtttccctccccaccttcacctacaagctgagttcatgttatttcaacagcacatcatggacccagatgcaaatggacagtatctgaaatgcagtcccgagcaggagaaatgtagtttcatcagcgagtcatttttaaggcttgatttctatttgtatttaaacatactatcaaaaaataaatacttgcatattttgtggaatgtctgttgaaaatatgtgcccaaagtgtctaacttgggacaaatctgacctcagtccctggaaggctaccttcgatttatgcctcttgatatggcttggctgtgtcctcaccaamatctcatcttgtagttcccataatccccacatgttgtgggaggagccaggtgggaggtaattgaatcatgggggcagttacccccatgctattctcgtgatagtgagtgagtcctcatgataactgatggttttataaggggctt

SEQ ID NO: 782126 - DNA, 565 bp, Homo sapiens; identical to SEQ ID NO: 781804

SEQ ID NO: 782127 - DNA, 622 bp, Homo sapiens; identical to SEQ ID NO: 781805

SEQ ID NO: 782128 - DNA, 605 bp, Homo sapiens
ggcaaaagtagctatagttctatgagaacatcatagaacttagtctttcttaggtgaatctcagagataaaataacatactggaagaagaaataaaccacagctctatttgtcttaatctttgatttgtaataaacagaaacaatcaagggagattcttttttctgtatttgccctgctgtgtacgtcaggtgttgactacccatgtgtaatcctaaactttcaaatggaatttccctggtaacgagatggtaacataactgctaacagacccctgcatatcagtgaaccatgcataactttaacaaatgcaatgcaaagggtggtggtctgcatggattatttctatcaaaaatgaatttatgcattcaccattagaagcagatgcaagactatagcttaaaagcaaattagarttcaagctggatttgcaaacattccagtttaacatttggatagcaaaggaactcagagtttataaaatttaaatataagatagacagtcacaattctgtgcaagcagtcagggttaattcagatcgtttcctctgctcttgcattccctgatttcaagcacggcgaggctggggctgtaattacggaatg

SEQ ID NO: 782129 - DNA, 633 bp, Homo sapiens
tttatatcatttctgggtctacctctattgattgatatttccctcttattatgggatgtattttcttacttctttacatgtcaattagaaaaaagtagtttcactgaaaagggaaagataatttttttcatttcatatgaatgtttcactcatttaactactactttttagtggctttgcaataagatacaatgatttcaccttacatctcaaatattctatattattcatctttaaatattttagattactcaaacataagtaaatataacaatataaacatgcaatctgtaaactaagtattaayaaatacttagagccatacagtaactacttaaagttcatttcttatctcaacattcatctgaaaaatgaacaaattcatgccttttactgatacagaagtaaagctaaaggtagtaagaaattttcccacaccataaaaagcaaaattgtgtttgagtttcatttctttcttccacttataatgttcctatattaaaaaataagagatttttaaagccaacaataacagtgacaataattgttcctattttaactaaaaggaaatggctattttgactgaacataaaagtaatctatttttccttaatgtctatagcttttatgtca

SEQ ID NO: 782130 - DNA, 511 bp, Homo sapiens
acctggccctgatttttttttttttaaacagggagggcatttcgattccaccctgccccagtcatgactgcgaattttaggggctgaagtcatcttggctctcctgccagcctcctcctcagccccctgctaacacagcactccaatgctcactaaagcagccgccaccragtgacatcacccctaagaagatgcccgtcaccctgacagtgctgctccagggtaaggtatagaggggaggtggactttcagagtctcacaggagtcgcctgaattgcatctgccctggagaagagcttgcccatcaaccccagcacaggacaacatgagtgtcacagagatggtgccacattgagtctctccactccccaagggagttccaggttttgttccagggcctgtttgttctttgaaggggtctttagagaccaggaccttcatttttctggggtgattagggaaggggtgagtaagtgaggccccagagcagagcctaccactagccccagtc

SEQ ID NO: 782131 - DNA, 625 bp, Homo sapiens
ggaggggcagtcacgaggcgcatgaggcagccgcccagccctcaccgccctccgtctgtctgtccgtctgtctggcccaggcctacatgaacttttactacaaaagcactgagggctggagcattggcaacgtgctcctggacttcaccgggggcagcttcagcctcctgcagatgttcctccagtcctacaacaacggtgagtcagccagcgggctgctggccaccctgcggctggggcatcgggcggggccagccttcccgggacyttccagccagggctccacccccacctgggatccaagccaatccagcccccaaggagagacccacctaggggccttcgtagctggaggctttgtggttttctgggacccccaccgcccaccaccccacaagctccagctgcctcaggagctgccaacctaacaccagcttctgtcccccggctgctaacagaccagtggacgctgatcttcggagacccaaccaagtttggactcggggtcttctccatcgtcttcgacgtcgtcttcttcatccagcacttctgtttgtacagaaagagaccggggtatgaccagctgaactagcacccagggacccagtgtacccagcctctggcc

SEQ ID NO: 782132 - DNA, 622 bp, Homo sapiens
tgtactttttaaaaaatcgtgttttcctactcactgatggtgggaggatcccttgagtcaaggaatttgagtctagcctgggcaacatagcaagatgccatctcttaaaaaaaaaaaatctctcacaaagtcaaacagataccccaaaatctgtgttcaagccttaataatccatagaataggtctgcagtatgcttcaagccaaaattattagagagagtcatatttatggatgaaattaaaaataacattgatacttctaccacttccytgtccttttcctagtcccaatggtggctcctgggaacgtgcgtgtgaatgtggtgaacagtaccttagccgaggtgcactgggacccagtacctctgaaaagcatccgaggacacctacaaggctatcgggcaagtgaaaggggaccttttgtggctttatttagtaagggctgcagcgaatgccacttgtcatgcataccacaggaggtggggcttatttgtttcattgctttgtgaacttgtggactgaagagttcatttcgctcattgcctcaggtagccactgccagagttgacttgaaatctcactgcatccaaaattaaaaaaaaaaaaaaagttttctccattt

SEQ ID NO: 782133 - DNA, 587 bp, Homo sapiens
ggtgaacagtaccttagccgaggtgcactgggacccagtacctctgaaaagcatccgaggacacctacaaggctatcgggcaagtgaaaggggaccttttgtggctttatttagtaagggctgcagcgaatgccacttgtcatgcayaccacaggaggtggggcttatttgtttcattgctttgtgaacttgtggactgaagagttcatttcgctcattgcctcaggtagccactgccagagttgacttgaaatctcactgcatccaaaattaaaaaaaaaaaaaaagttttctccatttttcccactgatgatctaacattctaccaactaagtatgtatacaaaatggggaaaattaattttttaaagacctagaatattaccaactctagctagctttaaagcaatatggaccacatgtgttgaacacacaaaattatcctgataatcatttaggcatttttaaaataattcagaatatactttaagaccatatactcttagctaggtcattcttataaatatccattatctttgttcttgagaagtactgaaagataaatatccattatctttgttcttgaga

SEQ ID NO: 782134 - DNA, 647 bp, Homo sapiens
tatgatttttttaaaaaattagaagacacagagaaaaggaaaactcctagtactgaggtgataggaaccataagaactataaagataatttttgggagaaaagggcaagaactggaaattatttaggtaaatatggaaaggttgtaatcaaggggaaagaaaaatwaaaagagtctttactaagattagtcagatgacagagaaaatcattgtgctatagtgcttctttaatcattcaggaaaattctaattttgatgtcagactttatgctcgttttggtaagaaaaaatgaatatgaaatttaaaaaatgaaaaaaaaaacaccagtctttgtctccaaagaactcacaatctagtcatggatacaaacatataaatataatagaaaattataatacaaagtgataagtacagaattagcgggatgattgatttaaaatgctggggaatttaagaggctaaatctgctgtggggaaccaggataaacttcatggatagggtttgaaggatatataagagtttgccagaggaaaagcatgcttggcaaagagaatcacaacaaattgctgtaaaatattaactacattagcttttccatttataagccatctttcttcaattaataattcacaaagccataaacat

SEQ ID NO: 782135 - DNA, 647 bp, Homo sapiens
tatgatttttttaaaaaattagaagacacagagaaaaggaaaactcctagtactgaggtgataggaaccataagaactataaagataatttttgggagaaaagggcaagaactggaaattatttaggtaaatatggaaaggttgtaatcaaggggaaagaaaaataaaaagagtctttactaagattagtcagatgacagagaaaatcattgtgctatagtgcttctttaatcattcaggaaaattctaattttgatgtcagactttatgctcgttttggtaagaaaaaatgaatatgaaatttaaaaaatgaaaaaaaaaacaccagtctttgtctccaaagaactcacaatctagtcatggatacaaacatataaatataatagaaaattataatacaaagtgataagtacagaattagcgggatgattgatttaaaatgctggggaatttaagaggctaaatctgctgtggggaaccaggataaayttcatggatagggtttgaaggatatataagagtttgccagaggaaaagcatgcttggcaaagagaatcacaacaaattgctgtaaaatattaactacattagcttttccatttataagccatctttcttcaattaataattcacaaagccataaacat

SEQ ID NO: 782136 - DNA, 422 bp, Homo sapiens
agctcaagggatcctcctgcctcggccacccaaagtgctgggattacaggcgcaagccactacaccgggcctgtaatctcttttctatagtatattaagtgtatatcagtcaagaagagtcccttgaactgatgcacctcaaattcactttgattcattattttcctttctttagaccttgtgacattgacaaacctgaggataaactttaccaagctccacacccttggggatgctttgcttggaaggaggcaaaatgattcccttgmtaaatactactatgctctgtacgagatgattgttcggggaagctgcttttgcaatggccatgctagcgaatgtcgccctatgcagaagatgcggggagatgttttcagccctcctggaatggtgagttactaatccgaaagaacagtgggctg

SEQ ID NO: 782137 - DNA, 590 bp, Homo sapiens
gtatcactacatcatgccagggatcatcagtgcatgtcacccaccacggccctcactgccagccaaacagtaaattatctacctccagaattgcatcttaggatctacttttaggtaaactgtctggcattaattatgtcaagtcaggtgccctaggagagcctaagatgggattcaactgcaagtgatttattaaggaaatgttcttcaggaatactcttaagagagtgaaggagaaaagatagagaaaaggaaagagcagagcgagacatggtctcaggtaaaacaaaccttgaattgatcctcagaggagctcaggggcatacactggaggcaaagttgtcctgccccttgagacaacctggtcagccttgtatcagtcagtcattggctgtgagctcccagaggytgtgttggctggttagggagggagatgtgaaagagcaatcctccagagcaagggtcaactgtgagctgtcagcagccacacacagagcaactgggggatgggtgcaccaaacagctaaaggagatctgggaggggcacctacagtgtctactgcaattgcaagggtattttattttatttt

SEQ ID NO: 782138 - DNA, 584 bp, Homo sapiens
cttagaactgacagatcaacttgacaaaagtgttcagctgtcatggaccccaggcgatgacaacaatagccccattacaagtatgtggtattatttgctctatttccgatcaactaaatggccatgtttgaagcactttgtaacagtcagctgaatttcctcacaaaggtatttactgggattctctgcttcattactgatagaataaaaatatttatttatgtccttcctctcttcagagctgaaactattcctggttacaccttctagaataggacaccccttaattgctgaagatgttgactaatsaaatacactgtcatttgtgtttaagatccataaaaatcactttaaatatctaccatgtaggaagatacaccttaagttagttgtttattttgcccatttcttctgggagaaaatgttaggaggagcaagtgctgaatagctctgtcttcctattaggaaactgatacttgatgagtaaagtaacttttcaaccccctgttggtaacagaactgggcgtagataacaggttctaccttaacttccaacctaggtctctttctttccattagtccct

SEQ ID NO: 782139 - DNA, 576 bp, Homo sapiens
cttctccctccttgtcctggacatgccctcaggctgtcctccaaaccctccccaccaggcttagcccaggcttggaactgtctctgcctttctctcaccagcagctttcccactgcctacctccctcagcagaagctgaatccatcacagccaccttttcatgcatcactcacccaatgaatgttgagtgcctacaacttcgagtgtctgcaagcacagtacccaaaagctgccacacctagtttgcatgctagcctcaccagcgcctagttacttgaagtccctaagaagcttcggtttcctaatctttaaatgggcataaggagagtgcccaaacctctggggactgctgcaaggattaaagagtgcctggtacacagtgggtgcccaataaatgatggctgctatcacgaccatgtgcmgggcaaatcaaataaaatgagaaacaccacgatgcagacatcttgtggtttaggtaggcaccggaagggggtgccactctgagagtcatggctggccccacaaacggggcatgtgagctgattcccaaagatgcctatggtttttccaggcaga

SEQ ID NO: 782140 - DNA, 633 bp, Homo sapiens
ctttctctcaccagcagctttcccactgcctacctccctcagcagaagctgaatccatcacagccaccttttcatgcatcactcacccaatgaatgttgagtgcctacaacttcgagtgtctgcaagcacagtacccaaaagctgccacacctagtttgcatgctagcctcaccagcgcctagttacttgaagtccctaagaagcttcggtttcctaatctttaaatgggcataaggagagtgcccaaacctctggggactgctgcaaggattaaagagtgcctggtacacagtgggtgcccaataaatgatggctgctatcacgaccatgtgccgggcaaatcaaataaaatgagaaacaccacgatgcagacatcttgtggkttaggtaggcaccggaagggggtgccactctgagagtcatggctggccccacaaacggggcatgtgagctgattcccaaagatgcctatggtttttccaggcagagcagggaagaaatgtgctccaggcagaaggaatggccccagcaaaggcgtggcagcgagaaactgtatgacatcttcatggctgaccaactgaaagcatctccatgaagctgtgcctaagagcactgcttcagcatgacaataa

SEQ ID NO: 782141 - DNA, 633 bp, Homo sapiens
ctttctctcaccagcagctttcccactgcctacctccctcagcagaagctgaatccatcacagccaccttttcatgcatcactcacccaatgaatgttgagtgcctacaacttcgagtgtctgcaagcacagtacccaaaagctgccacacctagtttgcatgctagcctcaccagcgcctagttacttgaagtccctaagaagcttcggtttcctaatctttaaatgggcataaggagagtgcccaaacctctggggactgctgcaaggattaaagagtgcctggtacacagtgggtgcccaataaatgatggctgctatcacgaccatgtgccgggcaaatcaaataaaatgagaaacaccacgatgcagacatcttgtggtttaggtaggcaccggaagggggtgccactctgagagtcatggcyggccccacaaacggggcatgtgagctgattcccaaagatgcctatggtttttccaggcagagcagggaagaaatgtgctccaggcagaaggaatggccccagcaaaggcgtggcagcgagaaactgtatgacatcttcatggctgaccaactgaaagcatctccatgaagctgtgcctaagagcactgcttcagcatgacaataa

SEQ ID NO: 782142 - DNA, 542 bp, Homo sapiens
gctcgtttacgatgcaaaacggggatccaaatgccactgagagaccagcggtatactgggataaaggaggatggtcaggtggtggagaggcatgtttttgtgtaccagcccttcacctctgctgaccttctcaactgggaaaacaataccccatcctacagcgaaaagccgcaagccctaattgatttgctccagactgttatccagacccacaaccacacctgggttgattgccatcggttgctcatgttcctctttaacagagatgaaaggcaaaaggcggagagggctccacgcagcaactaagtggctagaggaacatgcaccagaccagctgattatcaaaacccccaagagtatggaaggactcagttaccaggaaccgamcacctgttggacccacgtgaaagagaggatatgcaaaggctaaactgagaccgggaagctctcttggaagcattaaagacgggagctcaaaaggccacaaacgttaacaaggtctctgaggtcattcagggaaaagaagtccagcacaattctac

SEQ ID NO: 782143 - DNA, 542 bp, Homo sapiens
gctcgtttacgatgcaaaacggggatccaaatgccactgagagaccagcggtatactgggataaaggaggatggtcaggtggtggagaggcatgtttttgtgtaccagcccttcacctctgctgaccttctcaactgggaaaacaataccccatcctacagcgaaaagccgcaagccctaattgatttgctccagactgttatccagacccacaaccacacctgggttgattgccatcggttgctcatgttcctctttaacagagatgaaaggcaaaaggcggagagggctccacgcagcaactaagtggctagaggaacatgcaccagaccagctgattatcaaaacccccaagagtatggaaggactcagttaccaggaaccgaacacctgttggacccacrtgaaagagaggatatgcaaaggctaaactgagaccgggaagctctcttggaagcattaaagacgggagctcaaaaggccacaaacgttaacaaggtctctgaggtcattcagggaaaagaagtccagcacaattctac

SEQ ID NO: 782144 - DNA, 625 bp, Homo sapiens
atttgtgcttgcttaatcaagctacactgactttacatccaacagtacctaacccgtccacattgttgggtttgctgccagctgaggacagctggttcacctgcttggacctgaaagacgctttctttcctatcagattatcccctgagaggcagaagctgtttgcctttcagtgggaagatccggagtcaggtgtcactamtcagtacacttggaccgggcttccccaagggttcaagaactcccccaccatcttcgggaaggcgttggctcgagaccatcagaagtttcccaccagagacctaggctgcgtgttgctccagtaggttgatgaccttctgctgggacaccccattgcagtcgggtgtcccaagggaacagatgccctacaccagcacctggaggactgtgggtataaggcgtccaagaagaaagctcagatctgccgacagcaggtaccttacttgtgatttactatccgacaggggtcggaacgcagcccaggatcagaaagaaagcaggtcatttgcaatctagcggagtctaagagcagaagtcaggcgagagacttcttaggagctgtggggttttgtagactgtggatcccaaactttgcagtactagc

SEQ ID NO: 782145 - DNA, 625 bp, Homo sapiens
atttgtgcttgcttaatcaagctacactgactttacatccaacagtacctaacccgtccacattgttgggtttgctgccagctgaggacagctggttcacctgcttggacctgaaagacgctttctttcctatcagattatcccctgagaggcagaagctgtttgcctttcagtgggaagatccggagtcaggtgtcactaatcagtacacttggaccgggcttccccaagggttcaagaactcccccaccatcttcgggaaggcgttggctcgagaccatcagaagtttcccaccagagacctaggctgcgtgttgctccagtaggttgatgaccttctgctgggacaccccattgcagtcgggtgtcccaagggaacagatgccctacaccagcacctggaggactgtgggtataaggcgtccaagaagaaagctcagatctgccgacagcaggtaccttacttgtgatttactatccsacaggggtcggaacgcagcccaggatcagaaagaaagcaggtcatttgcaatctagcggagtctaagagcagaagtcaggcgagagacttcttaggagctgtggggttttgtagactgtggatcccaaactttgcagtactagc

SEQ ID NO: 782146 - DNA, 618 bp, Homo sapiens
ttaggatccacggtggactcacagcctgtttaccatattgtgagtaatatcatctccccctctggagattatgaactgtttcacagacgggtgtacacactcggtgtacagagggtgtacacccgtctgtactgggagtaatatcatcctcttcctccctgaatattaagaacagtatcacaagggtgtttctactccctgcgatatcgcgtgtcatatcctcctctcccacgttgcaattagaaacaatatcagtgggggcgagtccaccttctgtcatattgaaagtaatatcatcttcttccctccaggatcgtgggaaaaatatccctggggggtttccactttctgccatacatgtagtcatatcaccccctctgccttggaatattattaaggaccatctcacacgggggtgaatacttactgccatattgggagtaatatcaacctctcggcctctgaatattaggragaatatcacagcgtgggtgtacacatcgtgctctattatggggagtcatatctgcctattatggcgagtaatatcatcctctgcctttcaggatattaataaacaattcacacgctgggtcaacacaaactgcgatgcttgga

SEQ ID NO: 782147 - DNA, 578 bp, Homo sapiens
ttaaaatggagcttctttgaaaaaaaatctaatgatgtatgaatgcaattaaattaactgtcttcaataaacatcttagtatcgatcaacataattttacatagccaataccagtgatcaaagttgcttatagatatatgtaacactataatagtggttattccaaaatgtataatttcttgaacttttacaaagattttagtatggctgctaatgaaggagtcattagttcaaacaactgtgtcctttaaagatttgtttcttgtcagtacatagaagtacatcttttaaagataaaaaatgtatttattgttatyttcaccaagtcttccgaaagcacctgatgcattttatttgaacaaaaaaaactttcaattttaccagaaattaagtatcttatggtcagatcttctggcatactctggatttagtgaaagcagatcagttctccctatgaacatacgaggattgtatagtaaaatttctcataagatacagaaaacctatcagagaaaaatgccactaattcaatgccctacaaattgaatttgaatgaaattttaaggacttctaaattc

SEQ ID NO: 782148 - DNA, 578 bp, Homo sapiens
ttaaaatggagcttctttgaaaaaaaatctaatgatgtatgaatgcaattaaattaactgtcttcaataaacatcttagtatcgatcaacataattttacatagccaataccagtgatcaaagttgcttatagatatatgtaacactataatagtggttattccaaaatgtataatttcttgaacttttacaaagattttagtatggctgctaatgaaggagtcattagttcaaacaactgtgtcctttaaagatttgtttcttgtcagtacatagaagtacatcttttaaagataaaaaatgtatttattgttattttcaccaagtcttccgaaagcacctgatgcattttatttgaacaaaaaaaactttcaattttrccagaaattaagtatcttatggtcagatcttctggcatactctggatttagtgaaagcagatcagttctccctatgaacatacgaggattgtatagtaaaatttctcataagatacagaaaacctatcagagaaaaatgccactaattcaatgccctacaaattgaatttgaatgaaattttaaggacttctaaattc

SEQ ID NO: 782149 - DNA, 627 bp, Homo sapiens
cttcccttactgaataactatatcatttctattttaacagtttcttcttaagatgactagaacttaacactgaatcacctaaatgaaatgaataaggttacacacacaaaaaagataaaaatcctatatcaaaagacaggactcacaaagaaatgaggaagaaataatctaattcattaaggttagccttccatcaaaatgatgagaaaatggtttatgcccatatgttaacrccagggtgagcgattaggaaaatggcaacattttaaatagcaagggaaccaagataaaatacttaaaagtgaatagatctaaatacattagtattttaaaaattaacttatttttcaaaacaaaaagaagctttagctctagttgatttattgttacattgaagagatataatgggtcatagtttaaagactactcaaccagcatctttagtggctgggagaaaatatgacttaattaaattatcatctttctaaaatttcagttccttcttctacccaagaacagatacttagaacacttatgactcatgactccttatgctgaatagagcccttaataatatacattgcaaagactgttaaactgctaaaacttcaaagaaatctctgaaag

SEQ ID NO: 782150 - DNA, 580 bp, Homo sapiens
gacataagtcattttcataacagactgtgatgttggtgaaattatttaacctctaaaaccccttcaaccctaatgaccataatacttaactacattggggtggggataaaagatcttaatttgtaaacaccagcaaatgcttttatagggaaaatcttaaagcaattaaaatacgtaatcacaacaatgaacayagtcattagttttggcaactctattttaaactttatcatcctactacatagcaatatccttcatgcagtctaccttacccctggaaaagttcaaaatgcccgttagagtaagtctactatgaattgccattttagatgatgggctaaaagtgaagttgagaaagaggaggtaaagaatttaaaggagaacagcaaagctcaaaattgctattttaagtcctctatttaattgtgagattaaaaattgacctctggggctatgtaatagtgagcaggcctacattacattattctccacctgaacagcccatataatgagaatgcatattatacgccaagatatttaggcaggttaaaaatatatgtagctttcccaaaatattcta

SEQ ID NO: 782151 - DNA, 580 bp, Homo sapiens
gacataagtcattttcataacagactgtgatgttggtgaaattatttaacctctaaaaccccttcaaccctaatgaccataatacttaactacattggggtggggataaaagatcttaatttgtaaacaccagcaaatgcttttatagggaaaatcttaaagcaattaaaatacgtaatcacaacaatgaacacagtcattagttttggcaacwctattttaaactttatcatcctactacatagcaatatccttcatgcagtctaccttacccctggaaaagttcaaaatgcccgttagagtaagtctactatgaattgccattttagatgatgggctaaaagtgaagttgagaaagaggaggtaaagaatttaaaggagaacagcaaagctcaaaattgctattttaagtcctctatttaattgtgagattaaaaattgacctctggggctatgtaatagtgagcaggcctacattacattattctccacctgaacagcccatataatgagaatgcatattatacgccaagatatttaggcaggttaaaaatatatgtagctttcccaaaatattcta

SEQ ID NO: 782152 - DNA, 647 bp, Homo sapiens
gggtggggataaaagatcttaatttgtaaacaccagcaaatgcttttatagggaaaatcttaaagcaattaaaatacgtaatcacaacaatgaacacagtcattagttttggcaactctattttaaactttatcatcctactacatagcaatatccttcatgcagtctaccttacccctggaaaagttcaaaatgcccgttagagtaagtctactatgaattgccattttagatgatgggctaaaagtgaagttgagaaagaggaggtaaagaatttaaaggagaacagcaaagctcaaaattgctattttaagtcctctatttaattgtgagattaaaaattgacctctggggctatgtaatagtgagcaggcctacattacattattctccacctgaacagcccatataatgagaatgcatattataygccaagatatttaggcaggttaaaaatatatgtagctttcccaaaatattctatttgtattaattttcattgctgagatataagacattccatctgtaaaaatcataaatttctactcttaattaaccgtatttccttctaaataaaacaaatctaaatgctttgctttcttagaaaatgtgtttacttttataaaaataggagtgcactatttctg

SEQ ID NO: 782153 - DNA, 647 bp, Homo sapiens
tctcttaaacatattactttaaaaagagttgccgtgctaaatcatatattaaagggacaacttttttgtgacaaaacatctctagttttaaatactataacttatgaaatcaactcatgttatcaactgaaaaattctcccctacagaaagcaatactagaagttgaagtgttacaaattaaaaagaaggatctaaacttccttatgttgttttttgtttatttattttaaaattaacgaagaaatcaagagataaatcctgtcacctacaagttaaaatggccacctcacatccagtcatatatcaactattttctttayctaatattaggtacactggaaatctcaaggcaaaatgaagcagttggatacaaattatatgaatcaatatagctcagtcattgcaaaatatctcttgtggaaaaatttcagaacagccctactaaaaatactaattttcatgatatggccttactaatatggacttctagaaaaggaaattaatacagagggtataaaaagcatgtccgtaacaagaattaatttaaaaataagcttgatgatgtaaagaaggcaaaaacttgatagggatccacgtatagctactgtcttaaagttcataatttaagaaaaacataaaggcctca

SEQ ID NO: 782154 - DNA, 647 bp, Homo sapiens
tctcttaaacatattactttaaaaagagttgccgtgctaaatcatatattaaagggacaacttttttgtgacaaaacatctctagttttaaatactataacttatgaaatcaactcatgttatcaactgaaaaattctcccctacagaaagcaatactagaagttgaagtgttacaaattaaaaagaaggatctaaacttccttatgttgttttttgtttatttattttaaaattaacgaagaaatcaagagataaatcctgtcacctacaagttaaaatggccacctcacatccagtcatatatcaactattttctttacctaatattaggtacactggaaatctcaaggcaaaatgaagcagttggatacaaattatatgaatcaatatagctcagtcattgcaaaatatctcttgtggaaaaatttcagaacagcyctactaaaaatactaattttcatgatatggccttactaatatggacttctagaaaaggaaattaatacagagggtataaaaagcatgtccgtaacaagaattaatttaaaaataagcttgatgatgtaaagaaggcaaaaacttgatagggatccacgtatagctactgtcttaaagttcataatttaagaaaaacataaaggcctca

SEQ ID NO: 782155 - DNA, 645 bp, Homo sapiens
ctgatgggtccaccattttccaacatctcaaatacactgttctttttacaagaggtggaggcatttgccggggaaaaatcagacaactttgtttccagtgtctctgggataattgttacctttctccttttcaactttaaaagaaagcagtgtctattttgctcagggcagctgtttaaagcgcctgctgtcagaatcttttcacctgagtagatttaggattatttaaaaatgattattgtatcacactaagctttctactgctgttaataagtgaatatgcaaaaggccatacgctgcatgataattagcccaggatatccattcagactaccttggtgtgtatgtatatacataaacatgtatttwacataggtgattacaaatggtttgacttaatacaaaagttagacaaatattttacgtagaatgtaacatctattggtagtctgagatataataacaattattaaaatacttggccttatatttatagatctgaaattcatatttcaaaacaaatacattctgaaaacaatattcatttaaaacagagagacttctggaagttgatccatgctattaactttattgtgctatgcaatatgttattgtaacataatccctgaatattagcaaagaggt

SEQ ID NO: 782156 - DNA, 658 bp, Homo sapiens
tggggtttcgccatgttggccaggctggtcttgaactcctgacctcaggtgatccgcccgccttggcctcccaaagtgctgggattacaggcgtgagccaccacgcccggctgaggctgggtaatttgtaagtaaatcacactacctaacttcaaaatgtgcaaacaccatggtactggcataaaagcagacatgtagaccaatggaacagaatagagagccaagaaataaatctgtgcatttacagccaactgattttcgacaaaggcaccaagaatacatatgaggaaaagtttcttcaacaaatgatgttgacaaaactggttacctatatgcagaagaatgaaattagatcctatatatcttagatatataggatctaatatatacataaattatctcaaaatgaatcaaagacttaaatataagacctgraattgtaaaagtataggggaagaaaaacataggggaaaagctccacgacatttagtctgggtaaagactttttggaatatgacctcaaagtacagacaacaaatgcaaaaatagacaaatagaattgcaccatactaaaaagcttctgtacagcaaatgagactcaacagagtgaggtgacagcttaaagaaaaagagaaaagattggcaaactatacatctg

SEQ ID NO: 782157 - DNA, 559 bp, Homo sapiens
tgggataataaatctttttggttagagctaagctagtaggcatgtcatggtctggggctagaactcattttacagtggcagcgatgaggtcagaaaaggcctcagattggcagtataaaaattagttccgcaatttacagctcacagctcaccagttgtaggactttaagaaactsacttaattagccaggcatggtggcaggcacctgaaatcccagctactcgtgaggctgaggtgggagactctcttgaacctgggatgttgtagttgcagtgaactgagattgcaccaaggcactccagcctgggtgaaagagcaaagctccgtcttaaaaaaaaacaaaaacacacacacaaaaaaacaaaacacacacacatacacacacacacacacacacacacaaaatcatttaacttctctgagtctcagattccccatctgtcaattggaaactataatagctctagattatgaagagtcaccagttgaggtaagatgtgtaaaagattgtgcctaagttcccatttatttctggaacaaaaagtatattgataaata

SEQ ID NO: 782158 - DNA, 650 bp, Homo sapiens
attaaataggaggagacaacgaccctttggaatgaaggttttccatttgtctgtagcttttccaaccgcttcactgcgctgtgtccgcatggttggagacagcctttcaggctggccaaggaagttaagacttcctgcctcaataggccagtctttgttgttctgtcagggccaaagatcctgagagtcagcaaccactagctctggccactttggtgtatgctcagtccctggtgagctagagcaaggtcactgggtcagcttacacggtgacactgttagactgtgccccagccaactctggccggggatacataaatatacaagactaaaaaaggaggatggcrctggggtttccagacgcatcttgtaaggcagacagttgcccagcttaaaagtctgcaaaatctttctttaaaaacgtatgttttaatttgaggatattaattgcacggaaattatttgactgtatgatttataaccccgccagaattctgcggtctttccctccacatgtgctgttgccattttcccttttgtacacctatcatttcccattgtttatcttccctgattgatgttcgggctcgggatgttttccattatgagattcataattatcactggtaatagagaaggcttccctatta

SEQ ID NO: 782159 - DNA, 641 bp, Homo sapiens
cccactcaccccccactcctctccagtccctggcaatcacttatctgttgtctttccttttcttctcttttcttctcttttgagatggagtaccactctgttgcccaggctggagtacaggggcacgatctgggctcactgcaacctctgactcccgggttcaagcaattctcctgtctcagcctcccgagttgctggggattacaggtgtgtgcttaccacgcccgggctaactttttgtattttttagtagagatggggtttcacwatattggtcaggctggtctggaactccagacctcaggtgacccatctgccttggcctcccaaagtgctgggattacaggagtgagccaccgtgcccagccatctgttttctatttttataattttctaatttcaagaacattatgtaaatggaatcctaccaatgtaatcttttgggattggctttttcactcttttatagtacatttgcagccaaagaaaatattcttattgtgtatacgtgtaagtctcaacattttaagatgcaactgtgtctttagttctctaagaatcaacatgcaggagcgcctaaagcctcctctgaagtcagctcttctggttcctggttcactgtcactctgcaacgccatggc

SEQ ID NO: 782160 - DNA, 525 bp, Homo sapiens
tcctagggatgttttctgagttgacatgtaatatttgatagcttatatgaactgccaatacgctgtcattctcaaatgttaaaaacaagtgtggctgcatgtgtccacataaatataccggctgatcatatgaggcagggtaggtgattgggcagaacatgatatttcatagctaagctgccatttaacagatccaggtggaaattgcagatcagctgagaataagactgtgttctgatagaaatgttttgaaattttcagtgtagttttgaaaatgtataggcaaggggtacccgtcactctgaagaagaatattaaaggaccatttaacagaactgtatgagggctcctcttccccatactcttaattcactggtttaggtytggaaatttccatcaagggctgaaggattaccaggaagcataaaaatggaaacttcaacatttttcctttgatgaatccatgttcttggtgtttctattggtgctgagatttgccagatgaacaggataccaagggtcccc

SEQ ID NO: 782161 - DNA, 582 bp, Homo sapiens
tttatgtgacttgctcaacaatacacaaatggtttatgatagagcctctgttagttcccattctcttgacttccagaacaccgctggctgtatgaaagatctcaagagaagctttaatgcataaaacatatttttgcctttcttgattcctaaaagctttttctctaggcatttggattctgagaactkgaattcttttcctcttcttctttttctattggcataacagctaactctaatttaagctctttcagccccagttataggaaacgtattatgcatccactgagccagttcaattctcagacaattctcagtgtttggaatggattccagagtctcccagcatttgactatttatttataataaggaaggggaggctgggcacggtggctcacgcctgtaatcccagcactttgggaggccgaggcaggcggatcacgaggtcaggagttcgagactagcctaacaaacacggtgaaaccccgtctctactaaaaatacaaaaaattagccaggcgtggtggtgggtacctgtaatcccagctactcgggaggctgaagccggagaattgcttgaa

SEQ ID NO: 782162 - DNA, 582 bp, Homo sapiens
tttatgtgacttgctcaacaatacacaaatggtttatgatagagcctctgttagttcccattctcttgacttccagaacaccgctggctgtatgaaagatctcaagagaagctttaatgcataaaacatatttttgcctttcttgattcctaaaagctttttctctaggcatttggattctgagaactggawttcttttcctcttcttctttttctattggcataacagctaactctaatttaagctctttcagccccagttataggaaacgtattatgcatccactgagccagttcaattctcagacaattctcagtgtttggaatggattccagagtctcccagcatttgactatttatttataataaggaaggggaggctgggcacggtggctcacgcctgtaatcccagcactttgggaggccgaggcaggcggatcacgaggtcaggagttcgagactagcctaacaaacacggtgaaaccccgtctctactaaaaatacaaaaaattagccaggcgtggtggtgggtacctgtaatcccagctactcgggaggctgaagccggagaattgcttgaa

SEQ ID NO: 782163 - DNA, 582 bp, Homo sapiens
tttatgtgacttgctcaacaatacacaaatggtttatgatagagcctctgttagttcccattctcttgacttccagaacaccgctggctgtatgaaagatctcaagagaagctttaatgcataaaacatatttttgcctttcttgattcctaaaagctttttctctaggcatttggattctgagaactggaattcttttcctcttcttctttttctattkgcataacagctaactctaatttaagctctttcagccccagttataggaaacgtattatgcatccactgagccagttcaattctcagacaattctcagtgtttggaatggattccagagtctcccagcatttgactatttatttataataaggaaggggaggctgggcacggtggctcacgcctgtaatcccagcactttgggaggccgaggcaggcggatcacgaggtcaggagttcgagactagcctaacaaacacggtgaaaccccgtctctactaaaaatacaaaaaattagccaggcgtggtggtgggtacctgtaatcccagctactcgggaggctgaagccggagaattgcttgaa

SEQ ID NO: 782164 - DNA, 594 bp, Homo sapiens
tctatagtttaatacaatccccagtgattactattatttgaagtttgaaaagattttttataacacactggcccctgggtcagaaagacttgatttcagagcttgccagtgccattatctggctctatgactttggctaagtcacctaacctatctgagattcagtttctttatctgtaaaatgggtacaagaattgttacctcttaggctctcagaaatgcccttccttgtcactttattttaaatgaaccctttytaatatatttaccttggtcttttattattgttttttccttgagaacagttattacaattttgatttatttttgattatactgtttgaatgtaagttccatgaaggtagagaccacgcctgtcttgtttattctagcatccctggggcttagcacagtgcttggtacctaatgagtggctcaatatttgttgaataactgaatattgtaagtattaaattagatgatgcaagagaagctcaaggtctaacttagagaaaaatcttcactaagtgacagctgtcaacaaaattgactgtgtgatgtgtactgcaaaaatgaaaatgagagacttttgct

SEQ ID NO: 782165 - DNA, 598 bp, Homo sapiens
cttgtttttgtttgtttaaggaatgtttaaataatacataacttttgttttgtaccttttaactgaggcctaattcacaaacagtgaagtaaacagatcttaggcataggattcaataaactcttacatctatgcacacttatgggattatcatgcagatcaagacatagaacatttccagtgccccagaaggcttgttcatgactcttactaccaacacacaccacctggaaggacatctctagcactatggtttagttttgtgattttgaatttcatagacatggattcatacagcatgaagctgattgtgtctagtttcttttgtctaatactctccgtgagattcatccatcctgctcttggtatttctagttaggggatatgatgacagagctgctgtgaaataagcacaccttttggaggggtgtatacacaggattggaactgacragttatagagacatatatgtttgctttaatagatactaataaacagtgttaaaagggtattaatttgtggttcctctagcagtgtccgcagattctggttgttctttatcttcacccaaacttaattttgttagtttttaaaatt

SEQ ID NO: 782166 - DNA, 594 bp, Homo sapiens
tccgcagattctggttgttctttatcttcacccaaacttaattttgttagtttttaaaattttagttatccttatgtaggtgtggtagtattaggttggtgcaaaagtaattgcagtttttgccattactttgcattttcttgacgactaatacatttatttgttaatttacatttgtgtattctcttatgtgaattaccttttaatgtttttacttttgaaaaaaattggattatttgtttttctttttattaatttgtagtaattctttacatatttacatgttctggctaagagcattttgtaggatatatttattgcattatccttacaatttctatagaaattgcaaaaatggctctgctttttttccctygatattatgtcttctatcttttttttcttcatcagtgttgtttggggtttaacaagttgttaatatttttaaaacatgtgtttttttgcctttgttgattttttaattgcttttctgttttctagctcactgatacctacttttattattatttccttttttctacttactttagatttaattttacttcttagtgtcttaaaaatgaaagtttagaa

SEQ ID NO: 782167 - DNA, 629 bp, Homo sapiens
ctggcttgagtatttccaaatggacttccaaggcttcttcctcctggagatgtttttgccccagtggttttcatgattgcattttcttctttaaggaaggtacttctgcattggcacacagtgcattttcctccctggtgagcactgaaaaaacacattcttccattttttctgtaatgtccaactcctctggcaaacgaccactcttcctatcttggcaaaaccctgatgagtccttagttggcctcttattccttttatagtagaaaaaaagttgttctattatctgtcttaacttctaataaaatcttcattttattctcyagttcacttttcttatcattttgaagcactcccttcacctcccagtaaacttccccttcctcttgggtaaagtacctgatgtgtatacttttataactccagtggctttttcttatctctgattacttcacattgaattagctcaatctggctgggggcactcacacacatgattgctttagtgatatagtaaccttgctggaaaggtctcctagtattgctgatgaactatctgaaaaatgctgactttagcctggtgtgtgacccatgtcagggatgggaatgggatgcatccctgtcttcag

SEQ ID NO: 782168 - DNA, 629 bp, Homo sapiens
ctggcttgagtatttccaaatggacttccaaggcttcttcctcctggagatgtttttgccccagtggttttcatgattgcattttcttctttaaggaaggtacttctgcattggcacacagtgcattttcctccctggtgagcactgaaaaaacacattcttccattttttctgtaatgtccaactcctctggcaaacgaccactcttcctatcttggcaaaaccctgatgagtccttagttggcctcttattccttttatagtagaaaaaaagttgttctattatctgtcttaacttctaataaaatcttcattttattctccagttcacttttcttatcaytttgaagcactcccttcacctcccagtaaacttccccttcctcttgggtaaagtacctgatgtgtatacttttataactccagtggctttttcttatctctgattacttcacattgaattagctcaatctggctgggggcactcacacacatgattgctttagtgatatagtaaccttgctggaaaggtctcctagtattgctgatgaactatctgaaaaatgctgactttagcctggtgtgtgacccatgtcagggatgggaatgggatgcatccctgtcttcag

SEQ ID NO: 782169 - DNA, 543 bp, Homo sapiens
aaataactggtctgtcttctcaggatccagagatgcagtgtttgaccaagtccttctcagagagcagggcctgggagcagcatggctaaacgggggtgcctccatctggcaaggggagaatgaaaaaagtgcagagcctcattactgagacagcttgtcagaccccatgttggtttccaaaaagaagtcttagctgggctgggaccctgcctaacctccctggtccagggtcatgctcaccacctttgcagccacctgttgacactgcagtgctctctycagaagcgagggttcattttcatcactggcatgtgttttgagcctcctctattatgtactgttatgaacttatattttttagagtcggggtctcagtgtttcacccagactggagtgcagtggcatgttcatagctcactgtagcttcaagctcccaggctcaagtgatcctcccttgatcctacctcagcgtcccaagtagctgaaactacaggagtgcaccaccatacccgattaaagtgatcctcccactgcagcctccta

SEQ ID NO: 782170 - DNA, 628 bp, Homo sapiens
tgaaaggataggaattgtgtttcaaatcaacatacagccagccgtgaccatatgcaatagttcgtttcccgttaggtttattactttgaagactgcgccaaagaaccagagacaagttggagaaactgagactgagtctaaaccctctgattctccttgatcaagttcccatcacagagtctggagaaaggctgttaacttttatcttccctggcaggcaaagtgtcagaattagtcccagacaaaggactatgcaaaaacactagatgatgtaaaccccctccatgggttgagttgaccagagcattagacaattccagtttgaggctggtgatacctgtacaaaccggataggttttagtttytacaaagcctggggtattaggaaaagacttgattacctgtggcttagtttgaattagaaggcaaaacaattacacaaaagccctcatttaacttttaagtggtattaggcccacactaactttatgacactaggttgcttaaaacgaatggcagtttctcacatgccttagaaaaaaatgtggggcttatatgtttttccaaattatgaggcactgtgcccaagacaggcagatagaaagggtacattagacaaaaccaaatg

SEQ ID NO: 782171 - DNA, 634 bp, Homo sapiens
ctaataatagattctaaacctccaaatatgagaatctatagaaatgtactctgcctggtggtagaaatttgaattaagggatactaaggaaagttgatattagttcattaaagtatctgccatgctatcactacagacaaggaatatacgctaatataactgaccaataattttatagaatctgcagttccacaaaaatgttttagtaaatagtgtgaaacatgagaggaaatggtaatttttaattttcttcttctttactagaggggctgaattactcatggcgtcccaaatctctcttaatgcatagtatgaggtctgtagttgttaaractgactcaacattttcttaaaagaattctgaattgaatctttctgaagaagaaaaaaaaaagatcacttaccatttcattatttttcatcctcattcacctctgaacttcctggttctgtctggggccaaagtaaaaatgccaaaacaccacgggaaaggctgctctcacagtatttctggctcaccaaaaatttctggagaaagccagtttccatgagatttcagttccaattttatagacccaagaaaactcaagatagttcagataaagttcagataagcattcaaatttttcagtta

SEQ ID NO: 782172 - DNA, 577 bp, Homo sapiens
aaatggcagaaggtcaggaacctgccttcccaaagcccacttcaaagtcctctctcccacacctggacatccctcagggtgctctgtctaacccacctgtacagacatcaataacagatttcagttctgcgctccctgtgccctgcctctgggtagcaaaggttttctaatgcgtggggtattgctttatgagcatttgctcagcaggacacacggatgcacactccacagccccgacagacagagagtaagtgaacaagatcctgattccattaaaagaataaagagagcctctttccttgtacagattatctcagctataaaggatctaaggatctgtttacaattacacaaatgttgcctgttttgttccagacagggctctttaaaacatcataagcaagccgcaaagggcccaragggtggccccatttctccctgagtattaaacaactctgtgagcttctagagtacaagagggactcctttcatcagtagctacagagaaaaaaaacatctaccagtttggtgcatatgactgaattacagttcgaatataccccaaaaaacagactga

SEQ ID NO: 782173 - DNA, 436 bp, Homo sapiens
tagtatgttaaataagaatttgagaaaaagcatgttgtatgaaaatgccttatgtaaagaacttcgtataacaaaatttgaacaaagctattacaacatgtcatctgccaaaaaaagacatttgttactttaaaatatcaatgttgattagaatttatccatttttttaatggcttwtgttttattttgtaaaaacaacccattgtttaacatgaactttgcaaaaatttattcatctctacttttatatgatcaactgtaaactattattgcagttgacagagacatagaaacaacagtgtgacacaaactagctacttgctcatttaaatctttttccttttcttctgaacaaactgctaatttcattttctggatttccttgcggtttccagattccttacttatgatcattcattctgcttcttcctttgtt

SEQ ID NO: 782174 - DNA, 568 bp, Homo sapiens
atatttacataatttcaaagtaactccccatgaactatgtactcattccaaggagatgaaagcagcattacagtggagaagcctggcagaaatcttcttcaccaatttatcaaagctagcatcactaagaatgggataaattgaaattccactaactcttgacactatgcaatgagaactcagaatcaaatcacttcagttatatttctgtcaaagatgtgtaacccaagtctgatgaccaggaaatatcgaactatcctaaaataaagaatattctacaaaataactgtgctgtaattctcaaaaacatcaaactcatgmaagtcaaggaaggactgtatagaacagttccagattaaaggaatttaagagacatgagaacaagatgcagcacttgattctgaattggatcctttacttataaatcacagtattggggcaattggcaaaattcaattgggatctaagaattaaatgatatcagttaattttctgattttgacacttgtgctgagtgtatgtaggagaatgtcacttgtcggaaatactaaagcatttgggaatgatg

SEQ ID NO: 782175 - DNA, 600 bp, Homo sapiens
tagtttgcaaatggtttttaaatacatgcaacttgtgatcacttaagaataagggagatagagagaagactaggactgtggatggagccctggggaaataaatagaaataggtaatcagaggaggagccatcagagtggactggaaaggaagattcattgaagaaggaggaaaagaggacagtgaactgtcaactctggtagccaaatgaaaataagttgggcaaggagggattttctttcacttatgtcaaacgctactattaacaaactaacaaaaaaataaaattctcttaaatgtttttaatgttttttccatgtttttttttctgcttgaaaaaaatgcagctttgtactggaagactcaacacattgtacataagcttatttttttaaggagttttacattcaatactgacacttctctcckgtcttcttgtcccacttctttcatctctaaatctagtttgttttcttatcacagtgactctattctgtcacttgagtatacaaaaatattctatttgtgaagatttttaggaagagttattttcatttcattcaccttcgtatttctatttttataacatcaaacaccagag

SEQ ID NO: 782176 - DNA, 578 bp, Homo sapiens
agaaaataacttatcttttatttcaagatttcaaaattatgaagtaaaagtaatttgtgacttgtgttgagatttatgccctctattagacgaagcctgaaatacgtaagagaaatctagatcagtactgtacaataaaaataggatgtgaatcctgaaggtgagacacattacggaatatgaaatttttcagtagccacatttaaaaaargtaagaggaagcaggtggaattaattttaatacaatatttaacccaatatacccaaaatactattttaaaatgtcaataaaatagtttctgagatgttgttttacattctacttttgtacaaagtcttcaaaatacaatatactttttatatttacagcatatctcaattcagactaggcacatttcaagtattcaatagccacatgtgtccagtagctgctgtactgcagtgaagtctgtagattatcagttctggttgtcagaacctatctgtccctatgttttctctgtaatatgggctgtcgtttagacagatgtttcctacttattattcatttattctacatttaataaatatatgttagt

SEQ ID NO: 782177 - DNA, 578 bp, Homo sapiens
agaaaataacttatcttttatttcaagatttcaaaattatgaagtaaaagtaatttgtgacttgtgttgagatttatgccctctattagacgaagcctgaaatacgtaagagaaatctagatcagtactgtacaataaaaataggatgtgaatcctgaaggtgagacacattacggaatatgaaatttttcagtagccacatttaaaaaaggtaagaggaagcaggtggaattaattttaatacaatatttaacccaatatacccaaaatactattttaaaatgtcaataaaatagtttctgagatgttgttttacattctacttttgtacaaagtcttcaaaatacaatatacwttttatatttacagcatatctcaattcagactaggcacatttcaagtattcaatagccacatgtgtccagtagctgctgtactgcagtgaagtctgtagattatcagttctggttgtcagaacctatctgtccctatgttttctctgtaatatgggctgtcgtttagacagatgtttcctacttattattcatttattctacatttaataaatatatgttagt

SEQ ID NO: 782178 - DNA, 584 bp, Homo sapiens
agaaaataacttatcttttatttcaagatttcaaaattatgaagtaaaagtaatttgtgacttgtgttgagatttatgccctctattagacgaagcctgaaatacgtaagagaaatctagatcagtactgtacaataaaaataggatgtgaatcctgaaggtgagacacattacggaatatgaaatttttcagtagccacatttaaaaaargtaagaggaagcaggtggaattaattttaatacaatatttaacccaatatacccaaaatactattttaaaatgtcaataaaatagtttctgagatgttgttttacattctacttttgtacaaagtcttcaaaatacaatatactttttatatttacagcatatctcaattcagactaggcacatttcaagtattcaatagccacatgtgtccagtagctgctgtactgcagtgaagtctgtagattatcagttctggttgtcagaacctatctgtccctatgttttctctgtaatatgggctgtcgtttagacagatgtttcctacttattattcatttattctacatttaataaatatatgttagttgttag

SEQ ID NO: 782179 - DNA, 584 bp, Homo sapiens
agaaaataacttatcttttatttcaagatttcaaaattatgaagtaaaagtaatttgtgacttgtgttgagatttatgccctctattagacgaagcctgaaatacgtaagagaaatctagatcagtactgtacaataaaaataggatgtgaatcctgaaggtgagacacattacggaatatgaaatttttcagtagccacatttaaaaaaggtaagaggaagcaggtggaattaattttaatacaatatttaacccaatatacccaaaatactattttaaaatgtcaataaaatagtttctgagatgttgttttacattctacttttgtacaaagtcttcaaaatacaatatacwttttatatttacagcatatctcaattcagactaggcacatttcaagtattcaatagccacatgtgtccagtagctgctgtactgcagtgaagtctgtagattatcagttctggttgtcagaacctatctgtccctatgttttctctgtaatatgggctgtcgtttagacagatgtttcctacttattattcatttattctacatttaataaatatatgttagttgttag

SEQ ID NO: 782180 - DNA, 564 bp, Homo sapiens
ttttattaggcagttttcaccaatgaacatatgctacataatcttactaaaaccaggacctgtcttctctttgaataatttccacacataaaaccccaatatattctttccaattcatatcactatgaatcagaatgaagttgttgcaaatgatggtcagtgaagaagaatagaagggaggttggaaaaagtgaggcttattgcctctaacatttctgccattcttacagtgattggtatgctcgatgtattacaatttgtcctcactttgttagaatcaactttgttatcttaaacagccaatcatatagccaaataacaacatcaacaacaaaaagaagtgttccaaaaccactagccyggtagcaattctaatgcaggtggtaaagaggtatttgatcatgtttattctttggtttcatttattttaatgcagtctgtctcagacattttctgttgctataacataatacaattgactgggcaaattataaagaaaagaaatttatatctcacagttctggaggttagaaagttcaagagcagagcacggtactggcaccc

SEQ ID NO: 782181 - DNA, 564 bp, Homo sapiens
ttttattaggcagttttcaccaatgaacatatgctacataatcttactaaaaccaggacctgtcttctctttgaataatttccacacataaaaccccaatatattctttccaattcatatcactatgaatcagaatgaagttgttgcaaatgatggtcagtgaagaagaatagaagggaggttggaaaaagtgaggcttattgcctctaacatttctgccattcttacagtgattggtatgctcgatgtattacaatttgtcctcactttgttagaatcaactttgttatcttaaacagccaatcatatagccaaataacaacatcaacaacaaaaagaagtgttccaaaaccactagcctggtagcaattctaatgcaggtggtaaagaggtatttgatcatgtttattctttggtttcrtttattttaatgcagtctgtctcagacattttctgttgctataacataatacaattgactgggcaaattataaagaaaagaaatttatatctcacagttctggaggttagaaagttcaagagcagagcacggtactggcaccc

SEQ ID NO: 782182 - DNA, 536 bp, Homo sapiens
tttttgtttcttttgggctcaactattgatttaatttattttaagtattctggcctactgctttatttttctctatagccaaactaagtatctcagatttattttttcttctttataaaaatgtttatgccttttacactcattatcttctatttcaattatgggtaaaatttgaataaactctcctctccatatgacagttaataaaagttaatgttgattttatttgttatttcttgaatctaaagttcccaacaaaaataagatttgatttgtacatatgaacaacttgctctctgatagggtagcacatagaattttaagatcctttaattctatatttctgtaaatgtttctctaaatatagcatgtatctgatttctatggaaaaatmtgttaatgtgcatatttctgagtcccaaaacaaaggattctgattcaataggtaggtctcaggtggagcctagaagctgatgttctttaatcaatatcttgggtcattttgatgaatatatgccatgacaaagactaatcat

SEQ ID NO: 782183 - DNA, 582 bp, Homo sapiens
acaggcctatttttataccagtaccatgctgttttggtaactatagccttgtggcataatttgaagtcgagtaatgtgatgcctccagatatgttctaattgcttagtattgctatggctctatgggctcttttttagttccatatgaattttggrattgtttttttctagttctgtcaagaattgtgatttcttgttagacatgggagcctgtctttttgttttgacctgccactcaggacctctatcctctagtttcctcattgtcactgtagttagtggcaaaccccaaagaagaccatttatttttcctataactagtagactgacactacctgataattacaaatttctagtcatgccagaatgattcactcctttactggggcaagacttctttttctaccccaggaaccagggccttcctgagcctgactctgagggagaagtcatccccagggtcagaccaggagacatgatttacatgaaaacatgaaaaaaaggtcaccagatgaccaacttctaacaaaataggaagatccataccaagtgtttctgagtacttcaaacataaactaccag

SEQ ID NO: 782184 - DNA, 583 bp, Homo sapiens
cttcagtagaatgtgtatgctgttgttgttgggtagattggtctatatatatgttagatacagttggtttatcatgttgttcatgttcttatttcctttcttatcttctatctggttgttccatttattaaaacagtgggttatggaagtctccaactattattgtaaaattgtctatttattccttcaattctgtcagtttcatttaaacattttcttgttatttggattgtaaakttttattattgttatatatttttgcttatttatctcatcttttctttaaagtatatttttcttgatattaatatagccatccctgctttcttttggctactatgtgcatagaatatcatttctcatctatttactttctgtctatttgtatatttagttctaaagtgagtctcttgtaaattatatttagttagatcattggtctcatacattctgccaatctgtattttgactggagagtttaatccatttacatttaaagtcattactgataagaagggacttacttatttactttagctatttgttttctatgtagcttatagctattgcattcctcatggta

SEQ ID NO: 782185 - DNA, 564 bp, Homo sapiens
tttaatttaatgaaaatgtacaacatttgtttttctttacatttaaagaataatgaaactgaaagttagattagaaaatgaattttttattacctgattgaatgaatgaaatagtgaaaataaccattaatatttaaaacaaagcaaaataaaacaaaaaaactatattataggctgttaatctttctattttatgctacttaagaacagatactgtacagagccaagtcaaaattatttatcagaaaaagtaatgttaagcatgtgaagttagtttgatgcaacgggaacagcacaaaggggtatgtctatattaagaagtggtcagctagattcaaactagaaagttgctgtccagctataatggaggatctcaaatgagactagatctaaatcatagamacaacaatagcatgctggaaaaggaaaatcacgtactccacgttagtggttaaatatgaaatagtatttcttgagaaaaaggcaggttttggtacaaacccaagcaagatactactgaatagtttatttcaattaaaattagatgaaacaaaagaaaatgta

SEQ ID NO: 782186 - DNA, 433 bp, Homo sapiens
cctgcacatggtctcttgcctgctgccatgtaagacatgcctttgttcctccttctccttccgccatgattgcgagacctccctagccctgtggaactgtgagtccattaaatctctctctctctctcttttttttttaatataaattacccagtctcggatatytctttatggcaatataaaaatgaactagtaaagtaatttgatactgcagagaatggggtgctgatgtaaagatacctgaaaatgtgaaagtgaatttggaactgattgggggttggaacaatttggagggctcagcagaagacagaagagtgtgggaaagtttggaacttcctatggacttattcaatgtccttgaccaaaatgctgacagtaaagtccaggctgagatggtcttagatgaggaagatgttaggtgcaaaggtgactc

SEQ ID NO: 782187 - DNA, 633 bp, Homo sapiens
agaaaacatattaatataacagcatagtaaaaggtcaaaagacaaaaaccataaatcactccaaaatacgccatgaaggtttttccaaaattaaaaataattcttgatttaaaaaaataaaaataaatgagtatttccttatgatgagagaaaagataaatgagatcgaaaagccatcaccttacttaatgataaaacactcaccacattctcattaaaattacaaacaacaggctggcatggtggctcatgcctgcaattccagcacttttggaggtcaagccaggtgggtcacttgagctcaggagttcgagaccagcttgggcaacatggtgaaaccttgtttytacaaaaaatacaaaaattagccaggtgtggtggtacacgcctgtggccccagctacttgagaagctgaggtgggaggatcatctgagcctgggaggtcaaggcttcagtgagccctgaacgcaccattgcattccagtctgggtgacagagtgagaccctgtcttgagggaaaaaaaaaaaaaattacaaacaacgaaaagatgcctgccatttaacattgttctagaactactaagcaatgtaataagataagcaaataaaattgaaggtctaaacatttaaaa

SEQ ID NO: 782188 - DNA, 538 bp, Homo sapiens
ctggatccacgtgggctaggcttgaccggctaggtgctctctcaagctagttagttcacatctggggcctgccctgcccattctgctggagcagcctcagtccacaccacatcactctgctggcagatgaggctctcggcgttaagccaaggcctccctttcccaaggtsaagcatgccatgctccctgttggggtgggtccatgaaacaaccacgtccagtgaaaaccaaaaaccctcccgatcttcctgtaactggacttgtttataaaccaggcttcctgcagcaaggcggccagcctcacccagcagcgtgggctcaaggatggtcaggggttgttcccaagtgcccaaggtgggcctcttccagggggatagccagaaacctgggctctaggcctgggtttaccaccaaccacttgtgacttaggaggccatgtgggccctctgggtggagtcctcatatggcaaccaaggctgaacagaaaatctgtctgggatggctgagacggtgccaggcaggaccactctgtgtgggg

SEQ ID NO: 782189 - DNA, 576 bp, Homo sapiens
tctgggaaatgtaataaataaatgatggaaatataccagaagcaggaggctttaacttacctttgtcagcaaatgacagctctagtagacaaaaacaaaaacagtataattaataaagctatatcaaattctcttttcttaaaaccatgaatacatcttttagtcagtcagcaactatggaacattagtaatcactggccataatattaggccacagagaaaagtttaataaattccaaaaagtagaatggatacagaccacattctttgaccataatgcaataaacataaacatggactttttcttttttstttccctttcttttttttttcttttcttttttttttgagacagagtcttgctctgtcacccaggctagagggcagtggtgtgatcatggttcactgcagcctctgcctcttgggctcaagtgattctcctacctcagcctcctgagtagctgggactacaggcgtgagccaccacacccagctaactttttgtatttttttgtagagacggagttttgccatgttgcccaggctggtcttgaactcctgagctcaagcaatcct

SEQ ID NO: 782190 - DNA, 575 bp, Homo sapiens
gaggtttgcagccagaccactcctgaggcctacctggggaacttgtgggggttgggttggggggatggactcagtggcctctggggtcccttccagtccagactctcctctgtggctggcatgctctgacctcagaggtccaatctscaaaatgggacgataaccccatgtgggctgagagggcaggaaggtggatgtattcttcagggttctgtgagttgtaagtggcagacactccagtcaaaccagcttaaggtaaaagggaataattactcaggtaatggaagagacctgggacagagtgagctttggccatgcacagcgtgtctgaggactctctctctctgtccaggaggtctgatttatctttgagagcttggccctcggcaggctctcccaggtggtggctgcctcgcctatccctaaacagcaaggagtcccagaggacagcaaagcctctttcccttcagttccagctttagatcatgtggcctggcttgagtcacacccattcctgaccctgtggtcacaatgacagattgctctgattggctggtctagtcatgagtccactc

SEQ ID NO: 782191 - DNA, 563 bp, Homo sapiens
aaatggttatattaatattaaaatacagtgattccaaaaatgccacacgcaaactgaataagtatgtttctggatatttcttggcttcctatgtttcaacaaatttcctacagattttcaaagaagacatgacagtttatttttaaaattccagtagacatgtagcaaagaggatgattatgaaacttcaaaggtaataracagggtggttccaagatggccgaataggaacagctccagtctacagctcccagcatgagtgacacagaagacgggtgatttctgcatttccatctgaggtactgggttcatctcacaggggcttgtcagacagtgggtgcagcccactgagtgtgagccgaagcaggacaaggcatcgcctcacctgggaagcacaagggaccagggaatcctctttcctagccaagggaagctgcgacagatggcacctggaaaatcgggtcactcccaccctaatactgcacttttccaacagtcttagcaaacggcactccaggagattatatcccacacctggctcagaggatcccatgcccatggag

SEQ ID NO: 782192 - DNA, 563 bp, Homo sapiens
aaatggttatattaatattaaaatacagtgattccaaaaatgccacacgcaaactgaataagtatgtttctggatatttcttggcttcctatgtttcaacaaatttcctacagattttcaaagaagacatgacagtttatttttaaaattccagtagacatgtagcaaagaggatgattatgaaacttcaaaggtaatagacagggtggttccaagatggccgaataggaacagctccagtctacagctcccagcatgagtgacacagaagacgggtgatttctgcatttccatctgaggtactgggttcatctcacaggggcttgtcagacagtgggtgcagcccactgagtgtgagccgaagcaggacaaggcatcgcctcacctgggaagcacaagggaccagggaatcytctttcctagccaagggaagctgcgacagatggcacctggaaaatcgggtcactcccaccctaatactgcacttttccaacagtcttagcaaacggcactccaggagattatatcccacacctggctcagaggatcccatgcccatggag

SEQ ID NO: 782193 - DNA, 535 bp, Homo sapiens
ggtgtgggatataatctcctggagtgccgtttgctaagactgttggaaaagtgcagtattagggtgggagtgacccgattttccaggtgccatctgtcgcagcttcccttggctaggaaagaggattccctggtcccttgtgcttcccaggtgaggcgatgccttgtcctgcttcggctcacactcagtgggctgcacccactgtctgacaagcccctgtgagatgaacccagtacctcagatggaaatgcagaaatcacccgtcttctgtgtcactcatgctgggagctgtagactggagctgttcctattcggccatcttggaaccaccctgtytattacctttgaagtttcataatcatcctctttgctacatgtctactggaattttaaaaataaactgtcatgtcttctttgaaaatctgtaggaaatttgttgaaacataggaagccaagaaatatccagaaacatacttattcagtttgcgtgtggcatttttggaatcactgtattttaatattaatataaccattt

SEQ ID NO: 782194 - DNA, 571 bp, Homo sapiens
aaggattgacgttgaaaacactatccttaagtgaaaaaagccagtgaaaaaagaccccatttgtgtaacgccattaatataaaatgttcaaaacaggcaaatttacagaaacagaaaataggtaagagtttgtctagggcttgggagaagagctgttagggggaatggaggttgactgctatggggtgtgggaggttttcttagaaagatgaaaatgaaagtgtgaagttgattgtggtgatggttgtacattctgtgaatatactaaaaataaattgtacattttcaatgaatgaattgtatggtatgygaattatatctcataaagctgttacaaaaaagaagtctacgtgagatttaataccttaacatttttactttttatatttaaatattatatccatttggaatttattttgatgtaaaatgtgatataaggagtttgcctttgtctagccagtttttcttacatcatttattgaataatacagttttattatgcagatttgaaattccacttttattgttttgtaaactaccagacctgtatattgactcaatgttgtagctt

SEQ ID NO: 782195 - DNA, 616 bp, Homo sapiens
aataagtttttgatagcttattgtcaacaaacttttaaatatattcttgtgtggatttaaaaaataactatatctcaagaatacttattcttcaaaaaaacataaaagtataaggtaaatgattcattaagaagaaaaagggacaatggaagataaatttttgaaggttctgtttgctttggagattctgaagatatctgagaatttttaacttgggatttctttagtttctacaaggatgccttaaattatcacaagattattacttccacatgtatggctagtatttctgaaataatattttaagggtcttgaaagaggctcatttcagaaaacaatagtgatcctgagttaatgaaagtcttcaacggttggaaggtagggaatttttactcgtccctccaactctattattgatytggtatgcaaccttcaggaaattggtttatcctttcgccttcttactggtaaaaatgactgccttagaggtcttataaaaacaaacgttggcttgatagtgctaaataaaagcagaactgtgttggcagttcataccatcatgttcttatatgcagttccttataattactgccggtgacatgagaatagttcacat

SEQ ID NO: 782196 - DNA, 575 bp, Homo sapiens
tatgatttctttcagcactgtttcacgtccttagttagatatagttctaagtattttattattttattttattttattttattttatttgcagctatggtaaaggcattgagttcttgatttgattctcagcttgcttcctgttggtgtatagcagtgctactgatttgtgtacattgattttgtatcctgaaactttactaaattcatttatcagatctaggagctttttggatgagtatttagggttttctaagtataygattatatcattggtgaacaggaacagtttgacttcctctttacagatttggatgtcctttatttatttctcttgtctgattgctctggctaggacttccagtactaggttgaatagaagtggtgaaagtgggcatccttgtcttgttccagttctcaggcaaaatgctttcaactctttcccattcagtataatgctggctatgggatcttcatagatggctttttaacattaagatatgtcccttctattgctgagggttttagttttaaagtgatgctggattttgtcaaatgcttttcctgcatctgttg

SEQ ID NO: 782197 - DNA, 575 bp, Homo sapiens
tatgatttctttcagcactgtttcacgtccttagttagatatagttctaagtattttattattttattttattttattttattttatttgcagctatggtaaaggcattgagttcttgatttgattctcagcttgcttcctgttggtgtatagcagtgctactgatttgtgtacattgattttgtatcctgaaactttactaaattcatttatcagatctaggagctttttggatgagtatttagggttttctaagtatatgattatatcattggtgaacaggaacagtttgacttcctctttrcagatttggatgtcctttatttatttctcttgtctgattgctctggctaggacttccagtactaggttgaatagaagtggtgaaagtgggcatccttgtcttgttccagttctcaggcaaaatgctttcaactctttcccattcagtataatgctggctatgggatcttcatagatggctttttaacattaagatatgtcccttctattgctgagggttttagttttaaagtgatgctggattttgtcaaatgcttttcctgcatctgttg

SEQ ID NO: 782198 - DNA, 444 bp, Homo sapiens
taattgacctaatatcatactgatccatcaagatttcccttttttccccctttataaatccttttatctttctctcttaagttttagaacagtacttcactgagcaaagaaaaatatatccatattcatgataatgtaagcactattgattcacttttcaagatcaacctgtaaacacatagatttgcttatggttacaaaactcaatataacagtgctcacaattgtgcaataaaagtacaactggcaaaatttgagacctggaaatgggaatgaaagaagagatgaagrtaaaggcaatgcaataataaactgtatcaaaggatactgaggaaagttgacaatataagaagtagagatttaactttatcgaagttactaaagttactgaagaagaaacgaaacaatagtgggggaagacagagtaaaatattgcaagtaaac

SEQ ID NO: 782199 - DNA, 593 bp, Homo sapiens
tttgacaaaggcactaagaacatacattggagaaacgacagtttcttcaataaatggtgctgagaaaactggatatccatacgcagaagaatgaaactaaacccctgtctctcatcatatgcaaaaatcaaatgatagtggattaaagagttaaatgtatgacctgaaactatgaaactacttgaagaaaacatttggaaatgcttcagaacattgttctcggcaaaaattttttkgtaagacctcaaaagcacaagcaacaaaggcaaaaatagatgaatgggattacatcaaacgaaaaagtttcagcacagcaaagtaagcaataacagtgaaaagacacccaaagaataggagaaaatatttgcaaactacccatctgacaaggaattaataaccagaatatacaaggaactcaacagtcagaaaacaaaaaatttgatttaaaaaaattgagcaaatgatctgaacagacattccacaatagaagacatacaaatggccaataggtatacgataaaatcttcaacatcattaatcatcagacaaatgcaaatcaaaaccataatgggatatcattttaccccttaaaa

SEQ ID NO: 782200 - DNA, 585 bp, Homo sapiens
agtccatgttcaaatttcactgattgtctcaattaagtcttttttttttttttcttgagatggagtcttactctgtcacccaggctgcagtgctgtggcacaatctcggctcactacaatctccccttctcaggttcaagtgattgtcctgcatcaccctcctgagtagctgggactacaggcatgcaccaccatgcccgggtaaattttgtatttttttttttaagtagagatggattttcaccatgttatccaggatgatctcgatctctttacctcgtgatctccccatctcatcctcctaaagtgctgagattacaggcatgagccactacgcccagccttcaattaagacttttatagataattgtttttctgattcaagatccaattcaaaaactgtttctgggctgggtgtgatgactcatgcctgtaatcccagtactttgggaggccgaggcgggtggatcacttgaggtcaggagtttgagaccagcctggccaacatrgtgaaaccccatctctacaatagatacaaaaactatctgggcatatcaggggaacctgcccccaatatttcaacat

SEQ ID NO: 782201 - DNA, 736 bp, Homo sapiens
accagaaacatttaagagcaaaaatagctaaaagtaagcaggagaaaggaaataaataagcatcagagtggaaatcaatgaaatagaagaaaatagagaaaattaatgaactgaaaagctggtcatttgagaagagaaataaaattgacaagcctccagccagagcgattaggaaaagarggaacaaacaaatgactaatatcaggaataagagtggcacgatggctcacgcctgtaatcccaacactttggaaggccaaggcaggcggatcacgaggtcaggggttcaagaccagcctgacaaacatggtgaaaccccgtctctactaaaaatacacaaattagctgggggtggtggctcacacctgtaatcccagctactcaggaagctgaggcaggagaattgcttgaacccaggaggtggaggtttcagtgaaccaagatcatgccattgcactccagcctgagtgatagagccagactctgtctcaaaaaaaaaaaaaaaaaaaaaaaaagtacagattcttcagaccttaaaattaagcaaggggctgggtgccgtggctcacgcctataatcccagcactttgggaggctgaggtgggtggatcacctgaggtcaggagtttgagactagtctggccaacatgatgaaaccctgtctctactaaaaatacaaaaatctctccaagattgggaacaagacaaggatttccactcacaccacatctgtact

SEQ ID NO: 782202 - DNA, 623 bp, Homo sapiens
atgtaccacattttctttatctgtttatctgtgaatggacacttaggttgattccaaatcttagctcttgtgaacagtgctgcagtaaacatgggagcagagatatctcattgatgtactgatttcttttcttttgggcatatacctagcagtgggattgctggatcatatgatagctctatttttagttttttcaggaacttccaaactgttctctttcagccatatgaagtgaaaaccatgctctgtaagtgctcacctgacttttagttcctgtgaaactgctgcttttgtgtggatagttgccaatcttagtcttcctgcggggggagtgggtatgatcggtggtgttctctattccaccatcttgctccacccatcctaaaaatgttttcttaggaaactcataacataatgaacaacrtaggttgataaagtatataaaaagataaactgtacaaacattaatcaaaacagagtgacactattaatatcaaatacagtagactccagagcaaagaaaattattagacaaaaggaacattatataatgataaaaggatcaatccaacaaaaatgcaatgatcctaaatgtgtctctagcaaacctcaaagtacacaaa

SEQ ID NO: 782203 - DNA, 524 bp, Homo sapiens
cataatagtttttagggcacctaacaataatttatagatgtatattgtggaatgtaaagctttaagaacttaaacaaaggtaataattaaaataacctcacaagaagtttaatgagtagagagaattcccatgtacacttcaccaaacttcctctaaggataatgtataatcatagtatatggtcaagtccaagaaatcgatgttaccttgctggtagatagagacttagtcagattttactatggtttgcatgcactctgtgtgtgtgtgtacgtgtatgtgtgtgtgtgtggttatatcaaacttttaygacttttacatttgagtaaccatcaacacgattagtttacagaactgaaaaggaatctgagatctgtactgtatcaggattacaaaggatttagcctcaagtagttccctttttgtattaataaccacacgctttctgcaaccctatcccttgcatccacttgactatgaagtttttttaaagcacagataaattgaataatcagggcaatag

SEQ ID NO: 782204 - DNA, 504 bp, Homo sapiens
aattgaattgcttttgtacatccttaatatattttaaattatggtaactgtgacctgaaattaaggactagtatttttggttctcttgacatctgaagccaatagggcctcaaatgacctaacctcatttccatccccactctgcttccacaggtgaggtaacttagcagacagtcctccttgtcaggggggccaggcacaattcctgcttattcctaagtagtaagatttgcttccctgccagctcttggaattatcaccaaacccctcacatcctcccacagcaaacagtggtcactgtactctggataatacagstgctcgccacaacccctccttttccactctgctccctagtcgaaccctgtgtggctcttcccagcatgtggtgtccttctcacctttctgagagttggtgtgactgacaaactcacctagatcttatctgtccagtgtcaggcgttcagtgttcaacctttctatagcattggggtggggatcctt

SEQ ID NO: 782205 - DNA, 628 bp, Homo sapiens
aaccactttattttgttcatggttcacagggctaggaagacagaaaagctggcttattgctgcttattggttttggggactgcagagaagactcattggctggagttgaatccacagcaaagggttggcatcatctggaagtgacttcactcacatgtctgcaraggacatggggcttggctgcaggacctataggagacctcccaggtactctgggattccaggtagcagagcagtctcaggacattcagagctttgacttggtgatcaatagcaccataggtgagtgacctgagtgaacaaggcagatgcccatggcctttttaaacataactttggaagttacagagcatcactttcatgtcatgtgtcagtgacaagttagcactagtgtctagtctgttaagggtgggcatagccccccaaatctcaaggggagaatagcaaaaaaattgcaaacatgtttaaaaagccacatgcacattctagtttaaaactactcaggttttatctctcctgggctttccaccacagctctggggtgaccttagggcttatgtttcctcctcaacttggaggcagcagagaaagggaccttggtagtggttgtggccaagggtcttttgct

SEQ ID NO: 782206 - DNA, 612 bp, Homo sapiens
tgctggtcttgaactcctgaccttgtgatcctcctgccttggcctaccaaagtgctgggattacaggcatgagccaccgcacctggcccattttgttttctagtagtgttcagaaagtatttgttttgttttcatagttaggcaaatattaacatttaattttggaatgctctttttttagtctgtgatttttttttttttttttttttttgagatggagtctcactctgtcacccaggctggagtgtggtggcacaktcttggctcactgcaatctctgcctcctgggtgcaagcaattctcctccctcagcctcccaagtagctgggattacaggcgtccacagtcaggcatggctattctttgtctttttagtaaagatggggttttaccatgttggccaggctggtcttgaactccaaaccttagatctcttccaagcttcagaatcatctctgtagccttccactggatatgctcacttccatgacatgaagacattccaagagcagcatggcctgcatgtgtcttattgtcactctgcactctcccctcctgcaacacccaccctcctggttctaatttccagacgttctaaggcctctatgcagg

SEQ ID NO: 782207 - DNA, 525 bp, Homo sapiens
ctgacctcatgatccgcctgcctcggcctcccaaagtgctgggattacaggcatgagccaccgcgcccagcctgcatatgtatgtttaaatgttccagtaccatttgttaaaaagactatcctttctctactgaattgtctttgcacctgtgtcaaaaatcaaatgaccacatttgtgcgggtttattcctgtgctttctatttattccrttgatctatgtgctacagtttggatgtgctctccaaagctcatgtgttggaaacttcatctccaatgcaacagtattgagagatgggacctattatagataattagaggcagggccctcatgactggattaagaccattaacttggtagtaggttcctttcaaaaagatgagttcagcctcctttcctgtctcaccatgtgcttattctgcaatgttatgttgcagcaagaaggccctcacaagatgcagccccttgatcttggacttcccagtatccagaaccatgagccacataaatttctgttcattataaa

SEQ ID NO: 782208 - DNA, 525 bp, Homo sapiens
ctgacctcatgatccgcctgcctcggcctcccaaagtgctgggattacaggcatgagccaccgcgcccagcctgcatatgtatgtttaaatgttccagtaccatttgttaaaaagactatcctttctctactgaattgtctttgcacctgtgtcaaaaatcaaatgaccacatttgtgcgggtttattcctgtgctttctatttattccgttgatctatgtgctacagtttggatgtgytctccaaagctcatgtgttggaaacttcatctccaatgcaacagtattgagagatgggacctattatagataattagaggcagggccctcatgactggattaagaccattaacttggtagtaggttcctttcaaaaagatgagttcagcctcctttcctgtctcaccatgtgcttattctgcaatgttatgttgcagcaagaaggccctcacaagatgcagccccttgatcttggacttcccagtatccagaaccatgagccacataaatttctgttcattataaa

SEQ ID NO: 782209 - DNA, 520 bp, Homo sapiens
aggatccttatgtccacttcatgaattaaccacttaataattatgtaatgtctctctttatacctagtaatactctttgttctaaacactactttgatattaatttagctcttccagttgtcttttatttacctttttccatacttttaatctgtttatatttaaagtgaatttctttttttttttttcttgagatggagtcttgctctgtcaccgaggctggagtgcaatggcacartcttggctcactgcaacctctgcctcctgggttcaagcgattctccgccttagcctcccgagtagctgggattacaggcacgtgccaccacacctggctaatattttgtatttttggtagagacgagatttcaccatgttggccaggctggtctccaactcctgaccttgtgatctgcctacttcggcctcccagagtgctgggattacaggcatgagccactgcacccagccatgaatttcttaaaatagcatgtggttggatgttgcttttataattcat

SEQ ID NO: 782210 - DNA, 461 bp, Homo sapiens
gggatttaattgaagttgacacagaatgactttaaaaccttccaagccaatggctaatgatgaaaatacatatgaaaattaatttgggggatcctgtgcagaggaaaacaaaatagttctattcaaccctcaaaggaaatgtccagaagtgaagatgaagttatctttcagagttccaatactcctaccccactacctgtttaaaatggacttttatgttacataatcctgaaaatgttaggagtcaaaattcctctagataaatgyggtacacatataccatggaatactatgcagccataaaaagaaaacaaaattgtatcctttgcaccaacgtgcataggaaatcttatcctttgcaccaacatggataggacatcttatcctttgcaacaaggtgctttcagaagcaggatgagcactgcaattgaaggctaagaggaaatggctcttggccaatt

SEQ ID NO: 782211 - DNA, 615 bp, Homo sapiens
ctattcaacccaactggaaggctcatccttctaatacttttatgactaatgtcttcttttcattccgatctttttttaaaaggaaacaacctcacagggacctccctcaagcacccatattaaaatcgcttctcagtcaattgcgtatcacttctgcacaacatttcttaacatccgacaagtttcttgtttgtttacagtctcagctgcccacaagaataaataaatgaaagcattgctgcttccacagaaatcttggacccctgatacaagcactgatttgtgtttagttcattggactataaagagttttgaaatctcaattgtcacctggactaggtctaatgcatgcactagcaacaaaaycagatattattgagaaattatgtaagcctaaatgatcatgaaaaatgtatctggctctatgattagcaaaagaaaaaactgtaaactatctttttatcccttgaagtcattagctttaagtcaaaaagactaatgaaataaaacaacttcaaacgctaacctatatgcaaactgtgtttaccaactggaattattgttgaccaatggtatttgaaagtcactaacaaaaatgatgtgacaattgtcaaa

SEQ ID NO: 782212 - DNA, 578 bp, Homo sapiens
agatccataaagctattttttcaccagcactctaagtcaaggaaagcataagaattgtttctgagcagatgttctctcccgtggaacttgccaggacagagtttctactgtctcgaaaaaaataaaacacacattttaatgtatttctcttaacgtctcattttcagtgctgtccaaacaaaaacctggctacaggttcagacttactgaaacaagtcaatgaaatctgcttggaattcatagttttagcataaagcacccaattttagaaaagtggttctgcacaktaggttaatacattaagttagttgttttctgcaatagggttattgtagatacctaaaaacagaggtttggcagcctagaattccttatgccaaggatacaaaatgctggatataaaatccaatttccacctgcttacttgaatatctattttgaccaggtatgtaaaagacatgtacttgctgaaaatgttgtcttttacgctcaccactcacttcatgctgcttaaatatccatctttaatgaactcacctggaaactaattcactttgaaagcaaatatttaccaaaaa

SEQ ID NO: 782213 - DNA, 515 bp, Homo sapiens; identical to SEQ ID NO: 782035

SEQ ID NO: 782214 - DNA, 511 bp, Homo sapiens
tagtgattaagttcacaggatttgcaacataggttccacttcacaagttcttttaaagggtattaatatttataattccattcagttaaacacatacgtttatattctcatagccttacataatttatggaaacaataataatctttcccataaacatagcataggaaatttagcaaactctaatgattagattagcaataaaaaattatactcaggtcttacataaaatatgcttgctgtgatagactgcaaaaatggctggacattcttctgcctttttatgcatccttccctttgtaatgttactttgcagctccattcrtcagaaggtggaaaccttttcactgtttcttgaatctgggcttggccatgtgacttgctttgggcaaagggacatatcaaaagtgacataagcagtggctaaaaaccaaaatgagacttctctctctgatcttgagaacgttgtaatcactgaatgagtccaaataaacctgctggatgaagaaacag

SEQ ID NO: 782215 - DNA, 604 bp, Homo sapiens
ttgtgtcagggttgccctcattatgcccaaccacttttcaactacacttggctgaggcttactctagaataacacagttctaaagttatctgtttgcatatggttgattcaggagggattcaaaggataaatttattgtgtttctaagaaagacaaccyttttccccccaaacctaaacatatatatatttttctgaatgcaccctcaaaatcagtgtctttctcaatctaatattatattggaagaggaagcattgtttagacacatagttatgtactactgactgttgctataaaaatgaagtttaatctgcacaatttccattgcttttcctttgaaatctggtgtttattgcaacagaacttcagattttgtaacatgatagtctgaaagacaggccaacacaggcagctctttggaaacaagagacctggtacttccaacagccaaaaagctggccaaacatcaggaacaagggaaagacacatcaggtaggttctgctgatttcccaggcctcttttaattattttatagaggatttcttttgacaaattattgacactattttgttcttatggttcatctgtgtttctgctaaccct

SEQ ID NO: 782216 - DNA, 557 bp, Homo sapiens
tatacagcatataaagacataacttgtgacatcaataacataaagtgtggagggttagaccataaaggagtagagttattttacgtgattaaaggtaggatgtttttggtttaaagtagaatgctataactttaagatattttatgtaattgtgggtatggactttcaaatgtgcaagataaaaagctytgaaaatctgtgtaacaaaaatgtaaatatgctcaacacatttgtccaacctggcgacagaatgagaccctgtctcagaaaaaaaaaaaaaaaaaaaaaaaaaaaaaagttaagatgttaaattttatgtttttaaaatataatttaaaaaataaactaaaaacaaaacaaaaatactaaacttccttgttttctacatgcaaacttttaactgtattattttcattatagaaaagttatttcattcagctatctaaaaatagtagactcaaattatattttataacaaataaaatatggggtaatttgaaataattaaggaagtacatatacttttaatttggccatatatcttcatatgattacat

SEQ ID NO: 782217 - DNA, 503 bp, Homo sapiens
tcaatagatgtttaaaaagtgttcagtaaaactcaaattcataataaataccctcaacaaactgggtgtagaacgaatatatctcaaaataataaaggccatgcatgacaaacccactactaacatcatactgagtaaggaaaaattgaaagccttttctgtaaaagcaggaacaagaccaggttgtgccctttcaccacttttcaaygtattatccaatataagactggaagtcctggccagagcaatcagacaactaaaagacgtacagggcatccagattggaaaggaagaaatcaaattagccttgttcacaggcaacatgatcttatacttagaaaaacttaaatactctgtcaaaaaaaagttagaactaataagttaatttataaagttgcagcactcaaaatcaacatataaaaatcagtagcatttatatacagcaatagcaaacaatctgataaggaaatcaagaaagcaatctcacttaatatagctaaaaa

SEQ ID NO: 782218 - DNA, 586 bp, Homo sapiens
agctaggtttccttttgtgagtttatataatggttttgttaggatggcaaaaccaggtatccaaaggcaaaagtatccaaccatgcctaggaaggaaaggagttgttgttttgtacaagggattggggtttgggagattagccagacacgatcaggagagagagsacatgtgttttcatgagaattatgctgagataggtaatatatgaggaagaaatttgggcttgactgaagtaatgggggctgtctgtgaagctttgctgcagtacagcctaggtaatttgctgagcttgatgaatgtcagggtcagtccaggtgaaagcaaagagaggctgggatgaagggtgcaaaggaatagtaaagaaagcatgtttgagatccagaacagaataatggattgtggagggaggtattgaggataggagagtatatgggtttggcaccatggggtggataggcaaaacaattgggttgataaggcatagatcctgaactaacttgtaaggcttgtctggttttaggacaggtaaaatgtgggaattgtaaggagagtttataggctttaaaaggccatgctgtagcaggc

SEQ ID NO: 782219 - DNA, 625 bp, Homo sapiens
ttatagaagtaatttcaatccaaaagaattaagcttttaaataagacatatttattgtgctaaaaaacttgtattttcatcttcctaatacactaaaatggcacacagaataatagtgtagcacacaatacaaactgatatgtgcaatcaataattctaaaaattgttgttttaagtctttctttggaagtccttaaatgcaaaagaagaaatttttaattttgtttaatttttaaaaacatttttcagggttttctaatcctggtttaaatagtttatgctgaaatcccagttaatctggcttattcactcaaaagaaaggaattgtttaaatcaactataattaagctgatggttgcatttcargctttgaattccgatcaagtttcaaattggttattattttggaggttgtgctttcatgttcctaggtatttctttgtttgactgtgaaaatatttaagtgtgaaaaacctagagagagagctttcttttaagtcactaaaatcggattcttttgatgttagaaaaaaaaaagactctagattgaaggaagaagcttaaattgatttgaaaaattaaagtgtgctttatatgaacttgtttcaacatcctcttgaaagac

SEQ ID NO: 782220 - DNA, 600 bp, Homo sapiens; identical to SEQ ID NO: 754557

SEQ ID NO: 782221 - DNA, 569 bp, Homo sapiens
tctagacctggcaataaaggaaacaatgaccactgttttcttctttgaatttttattaaccgaactaatacacaggaagaaaagctgaagtctgtcaacaaacctggacagaattttgtcacaaaccatcgtaggctcttcaggcccaatagattttgtcccaggccattatatgttctctaagcccattgaattcccctgaaaatcagttactaccctccaaaaatcatccacacttttccatttcccttccccagttacccaytgggatactgggtaatcactctgtggtttttctcctgtgcacactaataaatttggatgccatttctcctattaatctgcctttcgtcagtcgattgttcagcaaaccttcagagggcaaaggaagagttttaccttggctcttacaccttcaatactgcttccttctggagagaaaaggagaagagtctactcctcaataaaaatttgcagctgccatgttatctgccatgagatctgaggagcagaggaagccactgctgaagggaagaatgaagcacaacatgagatggagagcactgctg

SEQ ID NO: 782222 - DNA, 570 bp, Homo sapiens
gatggtgacactggctgtatgtactagcataaagaattgaaaacaatatgacctgaatgatactcaaaaactgatatattaaagactcatgttgagagacagatcatgagcagagccaattttgattttaagcataaaagtggatatgttgttatgaaagtttaagtttgagtatcacacttatgaaagttaagctttgaatgtcacaagatattggggtaaargaaactgaagagtcatctagtttaactcaaattcttaagtagagaagagggtatgaggcttcacaatgacaagtggtctagtttacaggtaattcttgtccctatttgtaggacttcctgggagggtcaggttaagatcccaaataacaaaaaaggaagaaatgaaatgagaaattgcttctgcgaaacacaattgtatagcagctaaattttctatggtttaaatgaggaatacgtaacacatgcacacaaggctataaattcttagccttccttgctaactttgtgtgaagaatagttatatctttttgtaaaaaatatgctttagcatcagaaccagaaagcc

SEQ ID NO: 782223 - DNA, 559 bp, Homo sapiens
ctcaattgttcacaacttctgtgggtaaaacatactttgggcaaagttggcccaggtaggggaaaattcctgactcttcattgttttagtggctgctgagaaagctcaaccatttcttttgtaaagccttctgagacccatcaagaagaggtgatcccttcctcctttgcacctttactagcgctttgacatgttcttgtttttgtatcaatttacaatctcctcccttcctagactcttatctcttcgaaggaaagatctgtttctttgaattcctaacacatttcatagttcctgacataaaattttgggattaaatatgggtggatgaatgaatggatgaatggatagggagagaaaaacaagactcagtaggctactgaagttgtctggcctggggctgctgaactagaactaactcaccccatgctcccaccrttgagtcaacttggagagaaaaaatgagggaagtaatctcaagcagttattatatgacatctgtgctacttgataggagtcgctactgagaggagaagaagcttcctccattttaaccaag

SEQ ID NO: 782224 - DNA, 644 bp, Homo sapiens
caatagaatggatactaaaatctgtcatgtatttacttcaacaaaaccatcatatatacctattgttagtagaatgcagtttttgaaacccataatgtctgcatatggtgctacattcaagagacagacaaggcatacagggaaggtaagtctttctctgtccttcagttacccagttctcctttccagaaaattgctgttacctgtttcttatgtatcytactacagacaatgttagcatttgcaaacatgtgtacctctacaaacataaatgaatttttatatacatacctagtaacacattattaagcaccttactttttcacttattaacatatgtcagaaatctctaatggttaaattacaaacaaggatgttgaggaccaggtttctaatataaattctgacattttgaagagtcgtattgtaattgctatgatggtaggcataaaataagccaaaacacccccttggcccccggaataaacatatgaaaagaaatgtaaattcaaattcaaatgagaaaatcattgctacctatcaaataagcaaatgataacaacaatgaaatagttgttatttcaatataaaatcgataatgcctatggccaattgctgaagccagaaacctcagcatcatttct

SEQ ID NO: 782225 - DNA, 606 bp, Homo sapiens
acacatggtgctatgatatctacatgcagaagaatgaaattggactccttcacatcatatacaaaaatttactcaaaatgaaatgtagacctaaatgtaagaactaaactattaaactcttagaagaatatattgcagtaaatccttgtgacctctgttaggcaaaaccttcttagctatgacactgaaagcatgaataacaaaaaatagataaattgkactgaagtcaaatttaaaatcttgtgtgtttcaatggataccatcaagaaaatgaaaagataacccatagaataggagaaaatatttgcaaatcatatatcaggtaagggacccatatctagactatataaaaaactcttacaactcaataataaaaaggcaaatacccagtttttaaaatgagcaaagtgtctgcatagacatttctccgaagaagatgtacatcaagcacatgaaaagttactccataggattagccattagggaagtgcaaatcaaaatcacagtgtgatgctacttcacactcaaggcaaatgactataatagaaaaaaaaaagatgaaaacaagtgttggtgagcatgtagagtcattggaacactcaattg

SEQ ID NO: 782226 - DNA, 598 bp, Homo sapiens
attggaccaaaagcaaaccacaagttgtttatatacgagaccagctcccagaacattcagttagttcatttcacttcagtgacaggagggaaacatgcatggggagcattttttatgataatcatagggctttttgcattggtcaaaggaatggaaaagtgtgtttccagtgttttttaattctaggcttagaaagtttttataagatataaattcatatttttggcatttaaaaaacagtttattagagttgccatattacaatgttctattttctgtggtaactgcactacacacaattttarcttctttaaaattaagagcttgtagcaagttgaatgtggcttaactttagaaaataaggtcccagagtccaggaagttcaataagcgcaaatgctctggacaggttaaaatcctacagcgatttactgttcattacacatgatcgtagccaaaaggctgagaaatgattattttagtgctcatttattgtagcctgagagctgtgttttagcagagacctatgcattcaaataacttaagatcaggtttgtggtacacgaactagtatacgatcaagtatgaaatcatatgaa

SEQ ID NO: 782227 - DNA, 603 bp, Homo sapiens
tctttttaaaacctgaataatattccagtgttgatactaagctcttaatcggcatgttatactctccagagaacttaggttctaatgacattcaaaaatagtgtgcttagttatcacgaagcaaacttagagtaagataatattcaktcttaaaaagtctgttgaaaggactatgaataggtttcctactctcattcctacgatgactcatccagggtcaagaactagagtttcacaagacagggacagagaccagaggtcaagtccaaggatgttgtaaaggcagggaggagcaggtgagtcctacatgtccaaacaggcccacaggtgcacagtccagggagtttaatttcaaaaatatgggtgaggacttacaggagaaatcacaagccagtctgagctacaatatttatgcatctaggcagagtccctgagcaacaaatgtggggtatcaaggttaataatgagcatgatggtgagccagagctctgcaatgtgatatgagccctcagaattccttcccaaatcctgtgatgacactaagacaagtcacatttaaagggagcagactacctgattgcagtggggaagtgaagggagcaa

SEQ ID NO: 782228 - DNA, 571 bp, Homo sapiens
agatggtgacactggctgtatgtactagcataaagaattgaaaacaatatgacctgaatgatactcaaaaactgatatattaaagactcatgttgagagacagatcatgagcagagccaattttgattttaagcataaaagtggatatgttgttatgaaagtttaagtttgagtatcacacttatgaaagttaagctttgaatgtcacaagatattggggtaaargaaactgaagagtcatctagtttaactcaaattcttaagtagagaagagggtatgaggcttcacaatgacaagtggtctagtttacaggtaattcttgtccctatttgtaggacttcctgggagggtcaggttaagatcccaaataacaaaaaaggaagaaatgaaatgagaaattgcttctgcgaaacacaattgtatagcagctaaattttctatggtttaaatgaggaatacgtaacacatgcacacaaggctataaattcttagccttccttgctaactttgtgtgaagaatagttatatctttttgtaaaaaatatgctttagcatcagaaccagaaagcc

SEQ ID NO: 782229 - DNA, 601 bp, Homo sapiens
ctttttaaaacctgaataatattccagtgttgatactaagctcttaatcggcatgttatactctccagagaacttaggttctaatgacattcaaaaatagtgtgcttagttatcacgaagcaaacttagagtaagataatattcaktcttaaaaagtctgttgaaaggactatgaataggtttcctactctcattcctacgatgactcatccagggtcaagaactagagtttcacaagacagggacagagaccagaggtcaagtccaaggatgttgtaaaggcagggaggagcaggtgagtcctacatgtccaaacaggcccacaggtgcacagtccagggagtttaatttcaaaaatatgggtgaggacttacaggagaaatcacaagccagtctgagctacaatatttatgcatctaggcagagtccctgagcaacaaatgtggggtatcaaggttaataatgagcatgatggtgagccagagctctgcaatgtgatatgagccctcagaattccttcccaaatcctgtgatgacactaagacaagtcacatttaaagggagcagactacctgattgcagtggggaagtgaagggagca

SEQ ID NO: 782230 - DNA, 623 bp, Homo sapiens
ttctctgcttttattattgacaaatgtttttaccttctggtttgttaaattccataaggaagtgctacctttttattacagatgagatgatgatgatgatgatagtggccacctactgtgtgacatacactgtgatagatatttaaatacattctaaactttaatcttcattaacagcttagtgaagtaagtattytaatacccaattgatccatgggccacttaaggttcagagagggcaaatgtcttgaccaagatcacatgacaagtaagaggcaacacagagggttgaaccctggtcagcctggctggaaagcaccttccttaactattacactattgccttctataatcgagtgccagatgccatctcaccagctcttgatgatcataactgtgagattatttttgctttttgctgtttcaagcatcctaataactttgttaccagtcgtactaaatcggtatgtagactcctctagccctaggtatgatttctggcttttttgccttgttttctcttgagaagcagtgaatatcccttccaatatggtttttctttgtcacagttggtggtattttttccttctcttgacatttccctttcagtccatatttatcat

SEQ ID NO: 782231 - DNA, 552 bp, Homo sapiens
ctactcttcctgaggaactcaggaataatctgcatgggatcacttaaaggaatatttacaaaaattgggctctcccatttcttgaatcgaactcagtttcagtccacaacctcatccacagacagaaagcaggatcagtatccaagagtctctgaacagttatctctttgcctacctttccagcatcccagaaggattttccccccaattctacccctgattctcattcartgctctcttatctggttggtgctgataaagagtttggtcagagaaatttgattagaaatccaattctctgtaagagtcatccatctggcactaatgaaaacatgtttggaatgaatttcttttgatctgcattcacagccagtttaagagcctcacccctgcactctagcctgggtgtcagaacaagactctgtctcaaaaaaaacaaaaagaacctcacccaacctttctactttgtggccttgcctcgtttttgaccccaaactattctttacattattaactgaactttgtttcaagtcatctctagtgaagggcaaa

SEQ ID NO: 782232 - DNA, 607 bp, Homo sapiens
ggccagagtccaagcatgttatgaccaatactctgtcagatcagccgtccagggacaggggagtgccaaccagctcactggagggtcaaggtggcagcctctgacctctcagcacccaggttcttgtccagcatccaggaagaatcaagtcacatgaactgtttgagaggttgatgaatgcagaagactttattgagcagtggttggctctcagcagaaaaggagactgaaaagcggtcgggaaaatgatctctctctccctgaagcccggctgcccctctctgaagcagccctgtctgaagttagccacatctatccatagtctccaacgttcagttgcttctctsctcgctgctcagccacttgtgttgctctgccagctgaagtcttctatgggcacaggataggagcatggcaggccaaaaaggtaacatttgggcagaaaaacggggtcagctgttttcacttggggccgcagtttcaggcatatgggtggggtttagctgggagcccagcccttctgtatcattgacagccaagtttcagataaaaaaagctgcttccttccctcaccctctaactctttaaaactttattacttcctcaa

SEQ ID NO: 782233 - DNA, 571 bp, Homo sapiens
tatttgccctaggtaaatagagctttcaaggactggctcacaatggatcctgggcttcttttgtctcttgctgcctatctgcaattaataaatcatttcatgtaactagtggcatatgagtgtgttatttcttaactcaggtaagttggtaaccagtgtacagtgaagctgctttgcattgtttaccaccattgtaaaatatttaggttccctgaactaaggattccttacctataagacaatcagctgtgtatacagatgtcatttgaccctctttgtattgctctgtaggaatcaggcagaaattggttcaaagaaatactgattctctgactattgctattgctgtgattaatatactcctttgtcttgaacccaggggttctgtgcctttttaccagtatctataaaactgtggaaggttgatttatcttataagcagggtacmatctcagaccacttacagttcttgacacaaaaatacttgaaagttttccagtaacctaaattgagtaccagaaaaaaaaaatcactttcctttaacagtcacatccatattaaaaaaaaaact

SEQ ID NO: 782234 - DNA, 656 bp, Homo sapiens
gcaagaggatggcttgagcccaggagtttgagactagccgggacaacatggcaaaaccccacttctacaaaaaaaaaactagctgggtgtggtggcacacacctgtagtcccaggtacttgggaggctaaggtaggaggatcgcctgagcccaggaggttgaggctgcagtgagccctggttgtgccactacactgcaacttgggtgacagagtgagacccctgtctcaaaaaaaaaaaaaaaaaaaaaaggaaatatactggtaaaatgtattacattaataattytgtttatcaaggcaccattacaaaaagactaaccacaatgtaagaaaagatactggccacacatatatttgaccaagaactcatatccagaatatataaatgattcctaaaaatcagtaagaaaaagaatgacaacccaacagaaatatgggcaagtgactttaacaggcactacagaaaagatctccaaaatgtctctgaaggccatttttgtcaaaaacaaaaacatctccaaatgttaagtaccataaaatggtgctcaacttcaatggtcatcaagtaaaaggttaatgtcaaaatgagataccactacattcgcatcagaatgaccaaattaaaaagattgacaataccacgtgttgaccacag

SEQ ID NO: 782235 - DNA, 656 bp, Homo sapiens
gcaagaggatggcttgagcccaggagtttgagactagccgggacaacatggcaaaaccccacttctacaaaaaaaaaactagctgggtgtggtggcacacacctgtagtcccaggtacttgggaggctaaggtaggaggatcgcctgagcccaggaggttgaggctgcagtgagccctggttgtgccactacactgcaacttgggtgacagagtgagacccctgtctcaaaaaaaaaaaaaaaaaaaaaaggaaatatactggtaaaatgtattacattaataattttgtttatcaaggcaccattacaaaaagactaaccacaatgtaagaaaagatactggccacacatatatttgaccaagaactcatatccagaatatataaatgattcctaaaaatcagtaagaaaaagaatgacaacccaacagaaatatgggcaagtgactttaacaggcactacagaaaagatctccaaaatgtctctgaaggccatttttgtsaaaaacaaaaacatctccaaatgttaagtaccataaaatggtgctcaacttcaatggtcatcaagtaaaaggttaatgtcaaaatgagataccactacattcgcatcagaatgaccaaattaaaaagattgacaataccacgtgttgaccacag

SEQ ID NO: 782236 - DNA, 554 bp, Homo sapiens
aatgattttatgtatcaccattacattacagtattctgaatgtaactctatacttccctttaccagggagtttcatactttcacgttttcatgttgctaattagcatcctttagtttccacttgaagtacttcaactttagtttcagttttagcatttcttgtgaggcaggtctagtggtgatgaactccctcagcttttgtttttgtggaaaagtcttcatctttccttttctgaatgacagctttgtgggtaaattattcttagttgggaggcttttcttttctttcagtattttgagtatatcatcccattctcttctggcttgcaaggtttgctgaaaaacctgctgaaagtcttataggagctcccttgtacatgacaagttgctttcctctgctgctttcaaattcttygtcattaacttttgaaaatttgatcacaatgtgtctcagtgaaaaaattttcatatcagacaggtaatgtgccagtgttttggcaaggtctgagaaaggcacatcttacacaatggtatgaaaacccaatcatcatgct

SEQ ID NO: 782237 - DNA, 521 bp, Homo sapiens
aagttcgaatgagaaaaatttaaataaaagttattgtttatagatatggaaaggaaaataatgtttttagttcaatatgagaaagaaccttttaaatgtagaaataaaatggggtgcctttctacatccattcttaagaatttggcagaagttatgaagaagttaaaaagaaggagttcctgctgatataagtcacgaggattatttgaaggaaatttatgtcacatctcgtaaaatcatcatattgacaattataaatatgtaaaactttatgtgcaatagttattactaaaaatactgagctactatttatagkgagatcattattaaataaatttaacagatagaatagcaaatcacatttattcattcagtatattcttaccaacaacctgctgtatgtcagtcattgcataagactgatgtgatgccataggtcttgcagggaatgtagacattaagcaagtaattacaataaagtatagtggcttatgatattataaaaacaaagcagtccttaa

SEQ ID NO: 782238 - DNA, 611 bp, Homo sapiens
caattctcactagctaagcttaggcttagctattatttaaactctccaaacctcagtttccttaactgtaaagtgggaataataataaacctcacctcaaggtcattgtgaggtaaaatgaaataatccatgcgaagggcttagctcmgtcaggcttcaagataaatgtgaactgtaattactctatctacctgaattgaatgagttccaacatgaattctggagtcaccacagaagctgctacaacaccaatattaataaattagttttcttttacaatcggccaaaatgtattttcttagattaaaattctttaagttcccaatgacgatgatgaggaggataatacatctagcactttgagcagcacacagttctcgtaactagaaggtaggtattacagttaacttcatttcagatgaagagactgaggggtaggcacattaagggatttgcccaaggatgtacaggtggcagctataggaggcagggtctgaaccaccttagtctgactccagtgccggtgttgttgattattatgctattccatctaacatggtgtgatttgtaatttcatggactcaggtaaatccagggttaaattaacttcg

SEQ ID NO: 782239 - DNA, 501 bp, Homo sapiens
ggttagttttggggatgtacctagaactcttcagttaatgtagtctactcttatttcttagttatcagtacatgaggggaccagactaaataacctcagagctcattcctataattgttttcatactccatattataactctcctagaattatcttcccatcatgaataccattgttttgggtttctccactatcacatttctaagtcttacagatataaatattttatgtttgagrtttgtcaaccaggattgtttgaataaatgtataattctctacaactgttaagtttactaatttatcaaaattgtttccatcactttttctggagaaaataatgaattctaaagtttagtttaaagttaaaataatgaattttaaagtttaatgaagtttaaggtttaaaaaatgatgtaatagtttactatgtaaatactatgtaaactattacatcattttttaaagcttgtcattttccaaataaacttcttatacattatt

SEQ ID NO: 782240 - DNA, 595 bp, Homo sapiens
gtacatatactgtgtatagtattttattgtgctaaaatagcatgggagtattttactgtattttatatgtacagggtacatatactgtatatagtattttattgtgctaaaatagcatgggagtattttactgtgctaaaatacatttagcatgggctgttatatcttatgactttgatctctagatatacctatttctaaacatatatgggtatacatttcaagatggtagaataaattagaaattgtaaagatgtctgttgagaccctttaaacttttataaagcctattctaatttattcaataaatatttattagatatctattatggacccagttttttaccaatagcttgaaagaaagtccctttcctcataatcttaaagaacaaatcaattrtggagtaatcaagttgggatggaaacttcagataaaaaatgatattttcccattttacctgccacctttatccccgtttgtttcagagctgcagtagcgacctgtatctgctagggtccaggcagaagacagaaaccacatcaactatttaaacagagagaattttacataaagagttgttggctgggagtggtg

SEQ ID NO: 782241 - DNA, 598 bp, Homo sapiens
gttgctttggacacattctatcctggaaacaaaatctaggcttcataatacattcggaaataatagattcatgttctttttttccagctggtactggtagagtttacacatttactcctgcaccataggaacagctgcttaaaaagctgaagtgtgtatttgattccattacattggcacaatagaaagtcaygtaaaagagggagactctctcagcttctccatatttggaaaattaattcttttaagtgctttaaaaaaaatctctacaggtggtcagactctatgaacttaggaccagaaatgacctcatcaccttcagctggtctaaagttgtctttggctgctgcacacttcacaaaatcttgttaattatgattgtttttcctagttataagtccttctggatacatttttatagcatttatttttatcgcttacataactacataaaatattttcattggtgtcaaaatgtcatgttattgccaaatagattccatttcaatttctagaaattattggaaagttaatacccacattttaatggcacccttgctgtggtattaaatcatgttttattgaaattcacaagaat

SEQ ID NO: 782242 - DNA, 602 bp, Homo sapiens
cactttgggagattgagatgggcgaggctagaggcaagcagttcaagaccagcctggccaacatggcgaaaccctgtctctactaaaactgcaaaaatgagctgggtgtggtagtgcatgcctgcaatcccaactacttgggaggctgaggtaggaggattacttgagcccaggagacaaaagggttcagtgagctgagatggtgccactgcactctagcctgggagatagagcaagactttgtctccaaaaaaagaaaagaaaaagaaaaacagaaaatttgcacaaactttataatttcaataagtaaataagtggcataaatgattattagtggaaggatttctctttaaattacttggatcatccctcccccmacccatcaccagttttttactttattttgtaggggctgccacactcatctaggggctgcatctactaattgatgtaagtattgaccacttgcggtgttttaatgaaatagtaacctctgaaaagtttccccacttcctgacaaatccgtgtacacttatcattgtggtataagtgtaccacatgcaccagaatctggtgcatgtgtttatctcaaatccaggact

SEQ ID NO: 782243 - DNA, 602 bp, Homo sapiens
cactttgggagattgagatgggcgaggctagaggcaagcagttcaagaccagcctggccaacatggcgaaaccctgtctctactaaaactgcaaaaatgagctgggtgtggtagtgcatgcctgcaatcccaactacttgggaggctgaggtaggaggattacttgagcccaggagacaaaagggttcagtgagctgagatggtgccactgcactctagcctgggagatagagcaagactttgtctccaaaaaaagaaaagaaaaagaaaaacagaaaatttgcacaaactttataatttcaataagtaaataagtggcataaatgattattagtggaaggatttctctttaaattacttggatcatccctcccccaacccatcaccagttttttactttattttgtaggggctgccacrctcatctaggggctgcatctactaattgatgtaagtattgaccacttgcggtgttttaatgaaatagtaacctctgaaaagtttccccacttcctgacaaatccgtgtacacttatcattgtggtataagtgtaccacatgcaccagaatctggtgcatgtgtttatctcaaatccaggact

SEQ ID NO: 782244 - DNA, 537 bp, Homo sapiens
gctgtgcacaccccacctatggctagatgggtcagaaaacacccagttcttgataggcagttcaggtcgcatggtgacttgatgacccataatctaacattcagtttctaccaaagcccagtaacaggccaagaactgtttctcaaaaggagagtagttatctgcagaagatggcagggccttactccaaatcctagaggctgccactgtgtttcacctacaggggcctgccaaaggctccaaacggcatccctatctgccaccgacacctcaagcaccattggatctgatgggtcatatggcccaagtgtaagaacagcttgcacagcagcctggacctgttgcagaaccttctcttgttctggaccccactgaaaaatggcagcctgtcaggtcactggataaatcrgccagagtaacacacttaaatgagggatgtgttgccttcaaaatccaaataggcccactaggagttgtgcctttttcttggttgtcggaggggccaaatgcagcaacttatcttttaccttagaagga

SEQ ID NO: 782245 - DNA, 609 bp, Homo sapiens
agtgtgttcactacttctcactcactggatccaatcagtataatgtcatcaatgtaatagaccagtgttatatcttatggaagggaaaagtgatcaaggtctctccaaataagacaatgacacaaagtcagagagctaatacaccctgatgtaggacagtaaaggtatactgctagccttgccagctgaagggaaattgcttctggttggccttatggacaggaatggagaaaaagttatttgccaagtacctggtacataccaggtaccaggagatgtgttaatttgctcaagcaatgaaaccacatctggtacagcagctgcacttgtagtcacctcttagttaagcttacgataatccactatcattgtccaagatccatctgtcttctgtacagtccaaacgggaragttgaaaggggatgtggtggcgatcaccatccctgcatctttcaagtacttgatggtggcactaatctctgcaatccctccagggatgagatattgtttttgatttactatttttctaggtagaggcagctctaatgacttccatttgaccttttccaccataatagccctcaccctatcagtcagggagccaatgtg

SEQ ID NO: 782246 - DNA, 562 bp, Homo sapiens
caaattttgttatattgtatttacattttaatgcagttcaatgtattttaaaatattctttgagtcttcctctttgatccatggcatcctaaagtgctgggattacaggcatgagccatgctggctctctctgttttccatttaagcacccaggggacacttaaagtatgtttagtttccaagagatcggaaattttccagttgtctttcccttatttatttctactttgattccatttgttaacaaaacacattctgtatgatttcaattcttttaaatttgtcagcatttgttttctggctcaggatatggtctatcttggtatatattccatggatgcttgaaaagaacatgtattctgctctgttggatggtatattctatraatgttgattagatgctactggtgttgagttcttttgtatccttgctgattttcaatctagttgttctatcatttgttgagggagaggtgttcaagtctccaactacaattgatttgtctatttctcctttcagttctatcagtttttgcctcacctattttgcagctctgttgtt

SEQ ID NO: 782247 - DNA, 626 bp, Homo sapiens
aagttgtgacagccaaacatgtctccagacattgccaaatgtctcttgggtggaaatggcagggagagcaaaattgcctacctgtgagaactattgggtacacaacataataatcaaaggggccgccatctttgaatacttacctactgcyaggccctgggccaggcattttacctgtgttgcctcattcagtgctcccaatacctcttccaatattagtagcccagcttttacagataagaaagctaagactccaagaaaagaaagttagtcaaagtcactcagctaatggatgatgtaactggtctttgatcttggttttatctgattctgaaacttctgatttttgtaagtcaaccttatcagattgaaaaatggaagatattttccacctatagtcattactgctatgtagctcatcttccttctctgctgcatgaatttgccaggactgtatgtatgggtggccttcccatatgtcacgtgatttcactcgacctacttacttaatagtcccctgggtattgttgggtttttttcctagcaaggacccataacttgccttgttgtgcatctcttcttgttagtctgaaactgtgtcaatgtgaaggaaactgttgtgctta

SEQ ID NO: 782248 - DNA, 425 bp, Homo sapiens
gtactgccatacctgccaaactcatcttcttgcttcagtccaacagtttttctatgatgcttctagagctgttatttaaaaggagattctgcctatgcaatgccccttaaatctcttcagtggttcttcattgctcttgggataaagcaccatttgcagtatcccagcctcccctctgggctctaacctcattagaccatatgttcctttggggctagaattgtrtcttatttcttattctattccagggccataggtactctttgacagaatgaataaatttctctagttgtctgggattctttgaaactatttcctaaaggtcttcagggaaggagattcttccaccacctcaattcctgtggtcaattttacaagccctgagacttaggaaaggtgttctgcaggggacagagggacttagc

SEQ ID NO: 782249 - DNA, 630 bp, Homo sapiens
tcatggggaaagctcagcgagtgtagaacatttctgtaatcatctttgttcctgctaaaaagtttcctgagggcccgaggccatggctgtgcaccagatgacagccaaagggggctcgacctgggacttgggggttgggagaaggggagtacaggtgtcactctctgaggttcgtaactcagggcaagtggctcggggcttccagcagcttcagacttgtgccaggaaaatcagcaagtggagacgatgccacagcccaggcccaaagctgccctgacctyggtagcaattgcgagcccacagcagggacaagtgtttgtgtatttttccctgtggtccttctttcacctaatgccttcatccccacttcacaaagagtttgcctgggagattggaatctggcagagctcggctctctctaatctatgaccagggtcactcggatctctctaatctagtgactagggtcactcggatctctctaatctagtgaccagggtcactagaatttctgctgcaatctttattccaattattttcattgtcctgtttttctttttaaataacaaaacatagggattattttctaaaaataaaaatcaaaatagaacagtaacccctacccaaaat

SEQ ID NO: 782250 - DNA, 637 bp, Homo sapiens
ccatcctatgtgcaatttactggaagtggaaagtgctttggagttctccttgttattgtgccagaaaaattaaggggtctccggtaactgagagtgtcactcctcagacatcactttggggccagctatgctccagatattgggtattaatgcctgctaatgggatattctacttcaaggrttttacagggctgttgggagaagggaacagaagattcaggaaagctgtagggtcaactgtgagttgcagaggggagctgggagatgtgcaaacacctttggaggaggtgagtttgtggggagcccttccccaggctggagcagcccctgtgtttcctcctccctccctcatatcctgagcagctgctgggtagatgtgagggtgaggtgacctggccaagtccagatgcaaagatggggacagtggcttctgttcttaaggagctcacaggctagatggggtgagagatacagagattattaaatacagcaggcctcctgtttgcccaccttagtggactgacagggattgtaggaacacagaatgtctccttagcatatccttttctgtttggtaaaagcttcattcaggtcacttgccacacagaagttaggactgacttctaataccagcccc

SEQ ID NO: 782251 - DNA, 630 bp, Homo sapiens
gttgtacttaattccctggatcagtgcaaaacacacttcagaatgaccccgccagctaggccaaggaacagggtgtgtacccagtggtgctgcagaggacttggctgacaattgcagggaggacagcagctcccaacccttccatcctgccactgtgccaagggcagctgtggctttckgcagctccctcagagccctgggcatagaacagcagttcatgttgcatacgtcatttccactcatcatctaagacctggagagaaatggcattttctccatttactgagggggagagtaaggcatagggactcaagggaacttcctcaaggttattcagctcaccagtagcacagcttgggtttcctttattccacgatcatatgatcattattcagatctgcttcactctgggaagtgggatgtagagatcctgatatctgcctcctgttaaggaagctcactgtctagcagaggggcaagggaaacacatggcctcctgaggcaagtgccactgtattggtacagctgagcaggccttggttcccctgaggctaggcaccatctgctgggaaggaccctgggagactccatccttatatcaatgcctccaggacctacagcagccattct

SEQ ID NO: 782252 - DNA, 630 bp, Homo sapiens
gttgtacttaattccctggatcagtgcaaaacacacttcagaatgaccccgccagctaggccaaggaacagggtgtgtacccagtggtgctgcagaggacttggctgacaattgcagggaggacagcagctcccaacccttccatcctgccactgtgccaagggcagctgtggctttcggcagctccctcagagccctgggcatagaacagcagttcatgttgcatacgtcatttccactcatcatctaagacctggagagaaatggcattttctccatttactgagggggagagtaaggcatagggactcaagggaacttcctcaaggttattcagctcaccagtagcacagctygggtttcctttattccacgatcatatgatcattattcagatctgcttcactctgggaagtgggatgtagagatcctgatatctgcctcctgttaaggaagctcactgtctagcagaggggcaagggaaacacatggcctcctgaggcaagtgccactgtattggtacagctgagcaggccttggttcccctgaggctaggcaccatctgctgggaaggaccctgggagactccatccttatatcaatgcctccaggacctacagcagccattct

SEQ ID NO: 782253 - DNA, 630 bp, Homo sapiens
gttgtacttaattccctggatcagtgcaaaacacacttcagaatgaccccgccagctaggccaaggaacagggtgtgtacccagtggtgctgcagaggacttggctgacaattgcagggaggacagcagctcccaacccttccatcctgccactgtgccaagggcagctgtggctttcggcagctccctcagagccctgggcatagaacagcagttcatgttgcatacgtcatttccactcatcatctaagacctggagagaaatggcattttctccatttactgagggggagagtaaggcatagggactcaagggaacttcctcaaggttattcagctcaccagtagcacagcttgggtttcctttattccacgatcatatgatcattattcagatctgcttcackctgggaagtgggatgtagagatcctgatatctgcctcctgttaaggaagctcactgtctagcagaggggcaagggaaacacatggcctcctgaggcaagtgccactgtattggtacagctgagcaggccttggttcccctgaggctaggcaccatctgctgggaaggaccctgggagactccatccttatatcaatgcctccaggacctacagcagccattct

SEQ ID NO: 782254 - DNA, 579 bp, Homo sapiens
ttaaaaaccttattcactttacatctgtattacctatatgagtatataggttatatctatagctctctctatatgtatctacatatggcatatctatctatctatctgtctatctatctatctatctatctatctatctatctttaaagaatcagtatatcaatagatttgggtatacaaagatttaaggctgggcacggtggctcacacctgtaatcccagcactttgggaggccaaggtaggtggatcacgaggtcaggagttcaagaccatcctggccaacatggtgaaaccctgtctctactaaaaatacaaaaattagccaggtgtggtggtgggcrcctgtaatcccagctacttgggaggctgaggcaggagaattgcttgaacctgggaggcagaagttgcagtgagccgagatcgtgctgctgcaccaggcaacagagcaagactttgtctcaaaaaaaaaaagtttcaaaaaaattatctgatttcccttgtgacaaagtctaaaaccccatagcctgagctttgaaataagcaaatgatgatatcatgaggagagagtgaaaacggaa

SEQ ID NO: 782255 - DNA, 612 bp, Homo sapiens
aatgatgatatcatgaggagagagtgaaaacggaacacaaactgagcaggtgcgcaaccactggttctgtgttgttgcagtaggagtatatggtgaggtctcctctgcagtgtggaggacaaggaggacaaatccagtaattgcagagatccaagtctacatctctcagatgccataggtgttcacttgcgcaaattgttataaataacttttaccttctaaagaaggctatgacagaattttgagtagatcctttagagaaacatctcaatattgcacagtctgagaagttctagcaccattgtttattcccatttcagaagtaaaatcaaatgaaagtgcaactcagtctttttgtctcacctttktgtcctagaacatggtagccccggggagacttgtcactttgagagccgttttccagagagttcagttcacacctctttaaacacaaacacctttaacatttttgccatgtcagatggacagaattctgaagtacagccatgcacctcaaaaagacactttgaccaatgaaagaccatgtatgtaatggtggtcccataagattaaatggagaataagattataagattaatgcataagattata

SEQ ID NO: 782256 - DNA, 612 bp, Homo sapiens
aatgatgatatcatgaggagagagtgaaaacggaacacaaactgagcaggtgcgcaaccactggttctgtgttgttgcagtaggagtatatggtgaggtctcctctgcagtgtggaggacaaggaggacaaatccagtaattgcagagatccaagtctacatctctcagatgccataggtgttcacttgcgcaaattgttataaataacttttaccttctaaagaaggctatgacagaattttgagtagatcctttagagaaacatctcaatattgcacagtctgagaagttctagcaccattgtttattcccatttcagaagtaaaatcaaatgaaagtgcaactcagtctttttgtctcacctttgtgtcctagaacatggtagccccggggasacttgtcactttgagagccgttttccagagagttcagttcacacctctttaaacacaaacacctttaacatttttgccatgtcagatggacagaattctgaagtacagccatgcacctcaaaaagacactttgaccaatgaaagaccatgtatgtaatggtggtcccataagattaaatggagaataagattataagattaatgcataagattata

SEQ ID NO: 782257 - DNA, 486 bp, Homo sapiens
cctggatgacaggttggtaggcgcagcacaccaccatggcacacgtatacctatgtaacaaaccagcacaaagttttgcatgtgtatcctggaacttaaagtaaaataaaataaaaatttaaataaaggtataaaaagactagctcctaataataattaaaaacaaaatttgatcatatctcgatgtcccaggctgtcagccagccctctcctgtagcatggggcttatttgcctccagactctgctatctgggctatttccctcaccttccatgtcacagggaatttgaaaggaactgaagactgagcaggggcaaaagaggcagcactgaccatcaggaaatggtgtggcaagcctagtgtcatccagartgggatccaggggagaacagtttgccagaaaggaaaatcggataatattattaatcggttgagttgtggcagccgccaacaagtggctgcctatcaaatgttgaagactgcaga

SEQ ID NO: 782258 - DNA, 654 bp, Homo sapiens
tttgcagatattagtaagcatttattttatttattttgtagtctgttaattccttatagaaggaaaccaggatgtttatctttaaaacctttgggcatagcacagtgcgtgatatgctatagtggaaattgcttagtaaatgattataggatgcataagtatctaacagaccatgagatataagaaaccctctcagggaggttctgagtcccctcttttactagcaaaatgcttgaactattcagatgaaaactattatatgatagcaatttatcatttcagaaaatttggaaagtactactttgagtagtccaactatccagtgaaagcatagcatcatttggcttagaaaaaatgttttcaaaggtgtctgattccatctttccctaattgtgatttaaaacacaaaatttatcccaaaagtaatgatgaccattttgaatgtcaraagaaatttctatcagaaaaagccttacactttaactttctttcaactttgagtgcaaattataagtaaaatgaactccagtcagatcttcatttaacttaagagtatgtttagaggtagctattattagtgctataattgatttttctcccttttgaatatatctggagcatataattggatggatcaatacttttagttatgga

SEQ ID NO: 782259 - DNA, 529 bp, Homo sapiens
ttcagctttagagacatgaattgataagatttaaagttgaaagaccatgactctagtacttcctgagtaatcaactgaagtatgctttacacatgtgttttccaaattgctgactgttaattgtaagtgcttgtgacttgaaaggaagcacttgatgttcagggrggaaattccttttaaattctgcaggtctacgctcaaagtttatgcagaggttcaattgcgtgtaagacacgggatcacccatagggttctgtttttagtccatttaataaaacccaaactgtagtgtgctttgtatgcctttagggtcatctgaataatctgttgctaagtcatgttcccaatcgttgtgtttctgttacaggtgaaaagcaatcacagtgttaaaagaagacacgttgaaatgatgcaggctgctcctatgttggaaatttgttcattaaaattctcccaataaagctttacagccttctgcaaagaagtcttgcgcatcttttgtgaagtttatttctagctttttgatgct

SEQ ID NO: 782260 - DNA, 619 bp, Homo sapiens
gcccggtggagacataattcttacatattggttttctatccagtggccttgtgaaatatgcttgtgaattctaaagtttacttctaggtcgttttcagtcttcaatatacagaaacatatcatcctggaataagagcagttttgtttccgccatttttttttcttttyccttttgtatttttttgtagagacggggttttgccatgtttcccgggctgttgttgaacttttgagtgcaagtgatgcacccacgtcatctcccacagtgctgggattactggcgtgggccaccgtggcgggcccgtcgttgccattgtaaagagttttatttccttttctgattttatggcattgcgcagacccacccgttacaatggtgacagtggacatccttgtcttatccctgatgagaaaccgaaaaatttcaacatttcaccatcctattcactctcctttttttgtagatggactttatcagagtgagtcattccattctgttccaaatttgctgagagtattcatttgaatatatgttgattttcatcaaacagtgcatctatttcgattaccacagcgttttttcccattcatgtgttaatatagtgaattcgattgataa

SEQ ID NO: 782261 - DNA, 619 bp, Homo sapiens
gcccggtggagacataattcttacatattggttttctatccagtggccttgtgaaatatgcttgtgaattctaaagtttacttctaggtcgttttcagtcttcaatatacagaaacatatcatcctggaataagagcagttttgtttccgccatttttttttcttttcccttttgtatttttttgtagagacggggttttgccatgtttcccgggctgttgttgaacttttgagtgcaagtgatgcacccacgtcayctcccacagtgctgggattactggcgtgggccaccgtggcgggcccgtcgttgccattgtaaagagttttatttccttttctgattttatggcattgcgcagacccacccgttacaatggtgacagtggacatccttgtcttatccctgatgagaaaccgaaaaatttcaacatttcaccatcctattcactctcctttttttgtagatggactttatcagagtgagtcattccattctgttccaaatttgctgagagtattcatttgaatatatgttgattttcatcaaacagtgcatctatttcgattaccacagcgttttttcccattcatgtgttaatatagtgaattcgattgataa

SEQ ID NO: 782262 - DNA, 619 bp, Homo sapiens
gcccggtggagacataattcttacatattggttttctatccagtggccttgtgaaatatgcttgtgaattctaaagtttacttctaggtcgttttcagtcttcaatatacagaaacatatcatcctggaataagagcagttttgtttccgccatttttttttcttttcccttttgtatttttttgtagagacggggttttgccatgtttcccgggctgttgttgaacttttgagtgcaagtgatgcacccacgtcatctcccacagtgctgggattactggcgtgggccaccgtggcgggcccgtcgttgccattgtaaagagttttatttccttttctgattttatggcattgcgcagacccacccgttacaatggtgacagtggacatccttgtcttatccctgatgagaaaccgaaaaatttcaacatttcaccatcctattcactctcctttttttgtagayggactttatcagagtgagtcattccattctgttccaaatttgctgagagtattcatttgaatatatgttgattttcatcaaacagtgcatctatttcgattaccacagcgttttttcccattcatgtgttaatatagtgaattcgattgataa

SEQ ID NO: 782263 - DNA, 542 bp, Homo sapiens
tcttatccctgatgagaaaccgaaaaatttcaacatttcaccatcctattcactctcctttttttgtagatggactttatcagagtgagtcattccattctgttccaaatttgctgagagtattcatttgaatatatgttgattttcatcaaacagtgcatctatttcgattaccacagcgttttttcccattcatgtgttaatatagtgaattcgattgataaatttgtacgtttttaggttcgattattaaaacttgagacagcgtctcactctgtcaccgaggctggagtgcrgtggtgttatcagagctcgctgcagccttgacctcctgggctcaggcgctcctcccacctcagcctcctgagtagctgtgagtataggtacatgccaccatgcccagctaatttttcgatggttttttgtttgttttttgtagtgatgagattttctgatgttgcttaggctggtctcgaagtcctgagctcaggtgatctggccagctcagcctcccaaaatactaggattacaggcgtgagcct

SEQ ID NO: 782264 - DNA, 542 bp, Homo sapiens
tcttatccctgatgagaaaccgaaaaatttcaacatttcaccatcctattcactctcctttttttgtagatggactttatcagagtgagtcattccattctgttccaaatttgctgagagtattcatttgaatatatgttgattttcatcaaacagtgcatctatttcgattaccacagcgttttttcccattcatgtgttaatatagtgaattcgattgataaatttgtacgtttttaggttcgattattaaaacttgagacagcgtctcactctgtcaccgaggctggagtgcagtggtgttatcagagctcgctgcagccttgacctcctgggctcargcgctcctcccacctcagcctcctgagtagctgtgagtataggtacatgccaccatgcccagctaatttttcgatggttttttgtttgttttttgtagtgatgagattttctgatgttgcttaggctggtctcgaagtcctgagctcaggtgatctggccagctcagcctcccaaaatactaggattacaggcgtgagcct

SEQ ID NO: 782265 - DNA, 548 bp, Homo sapiens
ttccaaatttgctgagagtattcatttgaatatatgttgattttcatcaaacagtgcatctatttcgattaccacagcgttttttcccattcatgtgttaatatagtgaattcgattgataaatttgtacgtttttaggttcgattattaaaacttgagacagcgtctcactctgtcaccgaggctggagtgcagtggtgttatcagagctcgctgcagccttgacctcctgggctcaggcgckcctcccacctcagcctcctgagtagctgtgagtataggtacatgccaccatgcccagctaatttttcgatggttttttgtttgttttttgtagtgatgagattttctgatgttgcttaggctggtctcgaagtcctgagctcaggtgatctggccagctcagcctcccaaaatactaggattacaggcgtgagccttggcctggtctggtttttcttatataggggtcttatctatataaagactaaagttaatctgtgcctttgtgcgggtgggctaagagcatgatgacttttatcattcta

SEQ ID NO: 782266 - DNA, 635 bp, Homo sapiens
atgccaccatgcccagctaatttttcgatggttttttgtttgttttttgtagtgatgagattttctgatgttgcttaggctggtctcgaagtcctgagctcaggtgatctggccagctcagcctcccaaaatactaggattacaggcgtgagccttggcctggtctggtttttcttatataggggtcttatctatataaagactaaagttaatctgtgcctttgtgcgggtgggctaagagcatgatgacttttatcattctattgatttaaagaaaactrtccttgacttaccagtgtgtaaggccatgaaagcataattctgttgaaagcatatattgttaatgggtgttgggaaccgtgcactttccgctgctgtgggagcatgtccttggaggtacctttcatctgttttctcaactccaaacatcttaggaccatgggttgtgactggtaggactatgtatcttgctgctttcaagacggagtatattttcacgtggtttcactctggctgtcctgtttccctaatactgtcacttcaccctctgtgattctgatgctacaaatgatagatatcgttttagcattttcttacgggtcctagcgattctattcatttttctttcagtctct

SEQ ID NO: 782267 - DNA, 635 bp, Homo sapiens
atgccaccatgcccagctaatttttcgatggttttttgtttgttttttgtagtgatgagattttctgatgttgcttaggctggtctcgaagtcctgagctcaggtgatctggccagctcagcctcccaaaatactaggattacaggcgtgagccttggcctggtctggtttttcttatataggggtcttatctatataaagactaaagttaatctgtgcctttgtgcgggtgggctaagagcatgatgacttttatcattctattgatttaaagaaaactatccttgacttaccagtgtgtaagkccatgaaagcataattctgttgaaagcatatattgttaatgggtgttgggaaccgtgcactttccgctgctgtgggagcatgtccttggaggtacctttcatctgttttctcaactccaaacatcttaggaccatgggttgtgactggtaggactatgtatcttgctgctttcaagacggagtatattttcacgtggtttcactctggctgtcctgtttccctaatactgtcacttcaccctctgtgattctgatgctacaaatgatagatatcgttttagcattttcttacgggtcctagcgattctattcatttttctttcagtctct

SEQ ID NO: 782268 - DNA, 620 bp, Homo sapiens
ttatcctcaatgaggatgggcatggagggtttggggcgtggcgctgggaacggcagccctccccagcccacagccgcgcatgctccctgggctcccgcctcagtgcgcatgttcactgggcgtcttctgcccggccccttcgcccacgtgaagaacgccagggagctgtgaggcagtgctgtgtggttcctgccgtccggactctttttcctctactgagattcatctggtaggtstgcaggccagtcatcccgggggctgaagtgtgagtgagggtggagagggccttgggtgggtcaggcgggtcccgcttcctggtctgtggcctccgagggagaagggccacgaggtcgtcctccttcccttcacaggctgcgaggccaccggcggcttcgtggtcgtgaaggggcctggacggggaggaaggtgggccgtggaggggaggcggtcaggggctcaggtgaagatggggtgagtgctgttggggggatggaagtcccgaggtgccgggaacccccgacgacacagggcagattccctgaatggggcctccggcgggggcgaggcgggcggtgaagaaggggcctggcacctgggaaggctgcggcctggtgagcgcc

SEQ ID NO: 782269 - DNA, 620 bp, Homo sapiens
ttatcctcaatgaggatgggcatggagggtttggggcgtggcgctgggaacggcagccctccccagcccacagccgcgcatgctccctgggctcccgcctcagtgcgcatgttcactgggcgtcttctgcccggccccttcgcccacgtgaagaacgccagggagctgtgaggcagtgctgtgtggttcctgccgtccggactctttttcctctactgagattcatctggtaggtctgcaggccagtcatcccgggggctgaagtgtgagtgagggtggagagggcctygggtgggtcaggcgggtcccgcttcctggtctgtggcctccgagggagaagggccacgaggtcgtcctccttcccttcacaggctgcgaggccaccggcggcttcgtggtcgtgaaggggcctggacggggaggaaggtgggccgtggaggggaggcggtcaggggctcaggtgaagatggggtgagtgctgttggggggatggaagtcccgaggtgccgggaacccccgacgacacagggcagattccctgaatggggcctccggcgggggcgaggcgggcggtgaagaaggggcctggcacctgggaaggctgcggcctggtgagcgcc

SEQ ID NO: 782270 - DNA, 620 bp, Homo sapiens
ttatcctcaatgaggatgggcatggagggtttggggcgtggcgctgggaacggcagccctccccagcccacagccgcgcatgctccctgggctcccgcctcagtgcgcatgttcactgggcgtcttctgcccggccccttcgcccacgtgaagaacgccagggagctgtgaggcagtgctgtgtggttcctgccgtccggactctttttcctctactgagattcatctggtaggtctgcaggccagtcatcccgggggctgaagtgtgagtgagggtggagagggccttgggtgggtcaggcgggtcccgcttcctggtctgtggcctccgagggagaagggccacgaggtcgtcctccttcccttcacaggctgcgaggccaccggcggcttcgtggtcgtgaaggggcctggacggggaggaaggtgggccgtggaggggaggcggtcaggggctcaggtgaagayggggtgagtgctgttggggggatggaagtcccgaggtgccgggaacccccgacgacacagggcagattccctgaatggggcctccggcgggggcgaggcgggcggtgaagaaggggcctggcacctgggaaggctgcggcctggtgagcgcc

SEQ ID NO: 782271 - DNA, 599 bp, Homo sapiens
cctccgccatggaaggtccgaaaacagtgggaaggagtgggcgaggcagtgcggtccaaccaaacttgttgtgagggggggtgaatggctctaggaagtgggagtgtgcccaaagcagcaatcacgagaattgtgattcactagggttttcgtggggagtgcacttgtgaaactaaacctcatcagaaatgacctctgtctgcggggcgcagtggcgctcgcctacgtagtcccagttactsgggacactgaggtgggaggatcccttgagcgggaggtcgaggctgcagtgagctgtgatcacgccgctgcactccagcctgagcaacacagcgagaccgcgtgtccaaaagaaatttagaaaaaaatgtcctctgccttttgccacacgccttaagatgattgctctgccagcctggccagcagaagtggctttgtaggcactcagacagcgtacacacgtatgcttaactctgggacttatcttgagagtattttcaaaagtaaaacggcaagtttacatttatccatggaagtgatcgaatatagcagccctgtggagcgcacgttcccaatcacggttgtctgttttcagtgtg

SEQ ID NO: 782272 - DNA, 593 bp, Homo sapiens
agttactcgggacactgaggtgggaggatcccttgagcgggaggtcgaggctgcagtgagctgtgatcacgccgctgcactccagcctgagcaacacagcgagaccgcgtgtccaaaagaaatttagaaaaaaatgtcctctgccttttgccacacgccttaagatgattgctctgccagcctggccagcagaagtggctttgtaggcactcagacagcgtacacacgtatgcttaactctgggacttatyttgagagtattttcaaaagtaaaacggcaagtttacatttatccatggaagtgatcgaatatagcagccctgtggagcgcacgttcccaatcacggttgtctgttttcagtgtgaaatatgagttggcgaggaagatcgacctatcggcctagaccaagacgctacgtagagcctcctgaaatgattgggcctatgcgggtgagtgcttaaacgttaattcgatgttttctattagtagaaattaatttttgtgatagcgttgttgcattagtgtggaaatgctgataaaggtctttcctgctcataaaaaatgatgatggcatctcatgaaggaaacattg

SEQ ID NO: 782273 - DNA, 593 bp, Homo sapiens
agttactcgggacactgaggtgggaggatcccttgagcgggaggtcgaggctgcagtgagctgtgatcacgccgctgcactccagcctgagcaacacagcgagaccgcgtgtccaaaagaaatttagaaaaaaatgtcctctgccttttgccacacgccttaagatgattgctctgccagcctggccagcagaagtggctttgtaggcactcagacagcgtacacacgtatgcttaactctgggacttatcttgagagtattttcaaaagtaaaacggcaagtttacatttatccatggaagtgatcgaatatagcagccctgtggagcgcacgttcccaatcacggttgtctgttttcagtgtgaaatatgagttggcgaggaagatcgacctatcggcctagaccaagacgctacgtasagcctcctgaaatgattgggcctatgcgggtgagtgcttaaacgttaattcgatgttttctattagtagaaattaatttttgtgatagcgttgttgcattagtgtggaaatgctgataaaggtctttcctgctcataaaaaatgatgatggcatctcatgaaggaaacattg

SEQ ID NO: 782274 - DNA, 620 bp, Homo sapiens
cgcgcccggtggagacataattcttacatattggttttctatccagcggccttgtgaaatatgcttgtgaattctaaagtttacttctaggtcgttttcagtcttcaatatacagaaacatatcatcctggaataagagcagttttgtttccgccatwtttttttcttttcccttttgtatttttttgtagagacggggttttgccatgtttcccgggctgttgttgaacttttgagtgcaagtgatgcacccacctcacctcccacagtgctgggattactggcgtgggccaccgtggcgggcccgtcgttgccattgtaaagagttttatttccttttctgattttatggcattgcgcagacccacccgttacaatggtgacagtggacatccttgtcttatccctgatgagaaaccgaaaaatttcaacatttcaccatcctattcactctcctttttttgtagacggactttatcagagtgagtcattgcattctgttccaaatttgctgagagtattcatttgaatatatgttgattttcatcaaacagtgcatctatttcgattaccacagcgttttttcccattcatgtgttaatatagtgaattcgattgat

SEQ ID NO: 782275 - DNA, 620 bp, Homo sapiens
cgcgcccggtggagacataattcttacatattggttttctatccagcggccttgtgaaatatgcttgtgaattctaaagtttacttctaggtcgttttcagtcttcaatatacagaaacatatcatcctggaataagagcagttttgtttccgccatatttttttcttttyccttttgtatttttttgtagagacggggttttgccatgtttcccgggctgttgttgaacttttgagtgcaagtgatgcacccacctcacctcccacagtgctgggattactggcgtgggccaccgtggcgggcccgtcgttgccattgtaaagagttttatttccttttctgattttatggcattgcgcagacccacccgttacaatggtgacagtggacatccttgtcttatccctgatgagaaaccgaaaaatttcaacatttcaccatcctattcactctcctttttttgtagacggactttatcagagtgagtcattgcattctgttccaaatttgctgagagtattcatttgaatatatgttgattttcatcaaacagtgcatctatttcgattaccacagcgttttttcccattcatgtgttaatatagtgaattcgattgat

SEQ ID NO: 782276 - DNA, 620 bp, Homo sapiens
cgcgcccggtggagacataattcttacatattggttttctatccagcggccttgtgaaatatgcttgtgaattctaaagtttacttctaggtcgttttcagtcttcaatatacagaaacatatcatcctggaataagagcagttttgtttccgccatatttttttcttttcccttttgtatttttttgtagagacggggttttgccatgtttcccgggctgttgttgaacttttgagtgcaagtgatgcacccacstcacctcccacagtgctgggattactggcgtgggccaccgtggcgggcccgtcgttgccattgtaaagagttttatttccttttctgattttatggcattgcgcagacccacccgttacaatggtgacagtggacatccttgtcttatccctgatgagaaaccgaaaaatttcaacatttcaccatcctattcactctcctttttttgtagacggactttatcagagtgagtcattgcattctgttccaaatttgctgagagtattcatttgaatatatgttgattttcatcaaacagtgcatctatttcgattaccacagcgttttttcccattcatgtgttaatatagtgaattcgattgat

SEQ ID NO: 782277 - DNA, 541 bp, Homo sapiens
tcttatccctgatgagaaaccgaaaaatttcaacatttcaccatcctattcactctcctttttttgtagacggactttatcagagtgagtcattgcattctgttccaaatttgctgagagtattcatttgaatatatgttgattttcatcaaacagtgcatctatttcgattaccacagcgttttttcccattcatgtgttaatatagtgaattcgattgataaatttgtacgtttttaggttcgattattaaaacttgagacagcgtctcactctgtcaccgaggctggagtgcggtggtgttatcagagctcgctgcagccttgacctcctgggctcaagcgckcctcccacctcagcctcctgaggagctgtgagtataggtacatgccaccatgcccagctaatttttcgatggttttttgtttgttttttgtagtgatgagattttctgatgttgcttaggctggtctcgaagtcctgagctcaggtgatctggccagctcagcctcccaaaatactaggattacaggcgtgagcc

SEQ ID NO: 782278 - DNA, 541 bp, Homo sapiens
tcttatccctgatgagaaaccgaaaaatttcaacatttcaccatcctattcactctcctttttttgtagacggactttatcagagtgagtcattgcattctgttccaaatttgctgagagtattcatttgaatatatgttgattttcatcaaacagtgcatctatttcgattaccacagcgttttttcccattcatgtgttaatatagtgaattcgattgataaatttgtacgtttttaggttcgattattaaaacttgagacagcgtctcactctgtcaccgaggctggagtgcggtggtgttatcagagctcgctgcagccttgacctcctgggctcaagcgcgcctcccacctcagcctcctgagkagctgtgagtataggtacatgccaccatgcccagctaatttttcgatggttttttgtttgttttttgtagtgatgagattttctgatgttgcttaggctggtctcgaagtcctgagctcaggtgatctggccagctcagcctcccaaaatactaggattacaggcgtgagcc

SEQ ID NO: 782279 - DNA, 633 bp, Homo sapiens
aggtgggattcccttatcctcaatgaggatgggcatggagggtttggggcgtggcgctgggaacggcagccctccccagcccacagccgcgcatgctccctgggctcccgcctcagtgcgcatgttcactgggcgtcttctgcccggccccttcgcccacgtgaagaacgccagggagctgtgaggcagtgctgtgtggttcctgccgtccggactctttttcctctactgagattcatctggtaggtgtgcaggccagtcatcccgggggctgaagtgtgagtgagggtggagagggcctcgggtgggtcaggcgggtcccgcttcctggtctgtggcctccgagggagaagggccacgaggtcgtcctccttcccttcacaggctgcgaggccaccggcggcttcgtggtcgtgaaggggcctggacggggaggaaggtgggccgtggaggggaggcggtcaggggctcaggtgaagacggggtgagtgctgttggggggatggaagtcccgaggtgccgggatccccgacgacacagggcagattccctgaatggggcccccggcgggggcgaggcgggcggtgaagaaggggcctggcacctgggaaggmtgcggcctggcgagcgccc

SEQ ID NO: 782280 - DNA, 591 bp, Homo sapiens
tactggggacactgaggtgggaggatcccttgagcgggaggtcgaggctgcagtgagctgtgatcacgccgctgcactccagcctgagcaacacagcgagaccgcgtgtccaaaagaaatttagaaaaaaatgtcctctgccttttgccacacgccttaagatgattgctctgccagcctggccagcagaagtggctttgtaggcactcagacagcgtacacacgtatgcttaactctgggacttattttgagagtattttcaaaagtaaaacggcaagttaacatttatccatggaagtgatcgaatatagcagccctstggagcgcacgttcccaatcacggttgtctgttttcagtgtgaaatatgagttggcgaggaagatcgacctattattggcctagaccaaggcgctatgtacagcctcctgaaatgattgggcctatgcgggtgagtgcttaaacgttaattcgatgttttctattagtagaaattaatttttgtgatagcgtcgttgcattagtgtggaaatgctgataaaggtctttcctgctcataaaaaatgaggatggcatctcatgaaggaaacat

SEQ ID NO: 782281 - DNA, 505 bp, Homo sapiens
gacgcacactgctgttggtactctagggctgaatataagcattatacatgtcctgtggtttatccttagattgtcatttaggagaaaggtctaaagctgggctgaatgccatgcactcatagtcccagctacttgggaggccgaggtgagaggattgcttgagtcctggagttcaagcccagcctgggaaacacagtgagacctcatcgctaataaataaataaatgrataaataaatacataaataaattcattaaataaataaagttttcatggtataggaaaacacagatgcaaagtttttgtgcctagtggctggtaatgttgcaaacgtaactccttagtgaactgtaccacttaaaaatagttaagatggtaaattttaggatatctgtattttgtaccacaattggaaattcctttcttcctaaagttcagtgcagttatcatatattcttttaaatttttcctgtatgtatcttcaagtcatagcattcatagaaaa

SEQ ID NO: 782282 - DNA, 505 bp, Homo sapiens
gacgcacactgctgttggtactctagggctgaatataagcattatacatgtcctgtggtttatccttagattgtcatttaggagaaaggtctaaagctgggctgaatgccatgcactcatagtcccagctacttgggaggccgaggtgagaggattgcttgagtcctggagttcaagcccagcctgggaaacacagtgagacctcatcgctaataaataaataaatggataaataaatacataaataaattcattaaataaataaagttttcatggtataggaaaacacagatgcaaagtttttgtgcctagtggctggtaatgttgcaaacgtaactccttagtgaactgtamcacttaaaaatagttaagatggtaaattttaggatatctgtattttgtaccacaattggaaattcctttcttcctaaagttcagtgcagttatcatatattcttttaaatttttcctgtatgtatcttcaagtcatagcattcatagaaaa

SEQ ID NO: 782283 - DNA, 639 bp, Homo sapiens
agaattcctttcatcttttaactttttgtgttaccgcatttactacaggttttccatctccagacatgcttactttacaagttgcaatttttgaatgcaggcagaataagatatattgatgaggggaaaaaagagggagcgagatatcaagatggactacaaaaagtattatatcctccctacaaaataagtatctctgttgtggaagaataagtacacagttttaaggtagactttgrgtctttaagacaagtactaaaatttatgttttttttttattcagtcctgctgatggtcaggttttctcagaaaacataatgatgtaatgtatcaatccagatccattgatcaagctgaactctttcatgattattttttgttatgaaaaaaatgaattattctgcacagagagagaatattataacaatcttccaaatatacatcattcaaatgataaacagtcttctaaacttgtttgatatctttttaataccttctttgtttcctcacatgtttttttcttttggtgataaaatgtctcaaaaatatctcagactttatggccttccacttttcatatgtaaatgtaatgtcatcatcatgcatagctaaaaatgtataataattccttaatatcca

SEQ ID NO: 782284 - DNA, 579 bp, Homo sapiens
tatgatatctacattttacataaagtggtacagtggtacagtgcaactcttaatagactgtgaaaagttacaattatatattataatctcttgagcaagagctaaaataatgcaaatagataaatgttatattgccaagattagttaaaatataattctaaataaatatactgttatttaaattaaggcaaaacaaggggaaaaagaaacaaaaagcagagggkaccaaaaaaattgaaatgctagacattatggatccatgtgcccccatgattcaattacctcccaccaggtccctcctatgacacatggggttacaattcaaggtgagatttgggtggggacacaaagcctaaccatatcattctgcctctggaccttcccaaatctcatgtccctttcacatttcaaagcaaatcatgtctttctaacagtacccaaaatcttaattcattctggcattaacccaaatgtccaagtttaaaatctcatctgagacaaggctagtccctcctgcctatgagcctgtaaaatcaaacacaagtgagttccttccaagatacaacggccatacaggta

SEQ ID NO: 782285 - DNA, 579 bp, Homo sapiens
tatgatatctacattttacataaagtggtacagtggtacagtgcaactcttaatagactgtgaaaagttacaattatatattataatctcttgagcaagagctaaaataatgcaaatagataaatgttatattgccaagattagttaaaatataattctaaataaatatactgttatttaaattaaggcaaaacaaggggaaaaagaaacaaaaagcagagggtaccaaaaaaattgaaatgctagacattatggatccatgtgcccccatgattcaattacctcccaycaggtccctcctatgacacatggggttacaattcaaggtgagatttgggtggggacacaaagcctaaccatatcattctgcctctggaccttcccaaatctcatgtccctttcacatttcaaagcaaatcatgtctttctaacagtacccaaaatcttaattcattctggcattaacccaaatgtccaagtttaaaatctcatctgagacaaggctagtccctcctgcctatgagcctgtaaaatcaaacacaagtgagttccttccaagatacaacggccatacaggta

SEQ ID NO: 782286 - DNA, 579 bp, Homo sapiens
tatgatatctacattttacataaagtggtacagtggtacagtgcaactcttaatagactgtgaaaagttacaattatatattataatctcttgagcaagagctaaaataatgcaaatagataaatgttatattgccaagattagttaaaatataattctaaataaatatactgttatttaaattaaggcaaaacaaggggaaaaagaaacaaaaagcagagggtaccaaaaaaattgaaatgctagacattatggatccatgtgcccccatgattcaattacctcccaccaggtccctcctatgacacatggggttacaattcaaggtgagatttgggtggggacacaaagcctaaccatatcattctgcctctggaccttcccaaatctcatgtccctttcacatttcaaarcaaatcatgtctttctaacagtacccaaaatcttaattcattctggcattaacccaaatgtccaagtttaaaatctcatctgagacaaggctagtccctcctgcctatgagcctgtaaaatcaaacacaagtgagttccttccaagatacaacggccatacaggta

SEQ ID NO: 782287 - DNA, 618 bp, Homo sapiens
aaaagcagagggtaccaaaaaaattgaaatgctagacattatggatccatgtgcccccatgattcaattacctcccaccaggtccctcctatgacacatggggttacaattcaaggtgagatttgggtggggacacaaagcctaaccatatcattctgcctctggaccttcccaaatctcatgtccctttcacatttcaaagcaaatcatgyctttctaacagtacccaaaatcttaattcattctggcattaacccaaatgtccaagtttaaaatctcatctgagacaaggctagtccctcctgcctatgagcctgtaaaatcaaacacaagtgagttccttccaagatacaacggccatacaggtattgggtaaatatgactgtttatttttgggagaaattggccaaaacaaagagtctagagggcctatgcacgtctgaaatctcatagggcagtaattgaaccttaaagttccaaaatgatctcctttgatgctatgtctcacatccagatcatgctgatcgcaagagctgggcttccacgaccttggacagttctgcacctgtggcttggcagggtacaaaccctctcctgggagctttcaccagatggcat

SEQ ID NO: 782288 - DNA, 576 bp, Homo sapiens
caaatactgaagacccaggaaagcctgtggtgcagttagaagacctgggacccagagagctgattgcatagattctagttctgatggcagtgacgacccaccttgagtagctgctgccatgacgctggcagcagtggaggaggtgcagccggtgctgcgtgctgcagggagccagtgggagctggaaacaggcaaaagccctgcccgcttctgaattggcatggtgggaacttcacgttccccaggtacagctgcagccacccagctacagctgttgacctgggcctccctatgctcttgggagctgggagcaggcaggagccccatcatcccaagtgcagctgcagctgcscaagccacagctgcagacccaggcatctctgcactctcagggggctcagaagtgcatgttcctgctgcctggcctctccccactcccagagcctgctcctatctgagcaaagttgaggccgagactgggtgctgtcacaacctggcccaatgtgcacatgcttggggcagcactgactctgtactttccgtgccaacgagcatgggagggaagccagggggatg

SEQ ID NO: 782289 - DNA, 444 bp, Homo sapiens
gttatccaacctggtagtgccagccaagcacagcctgccaggctgagtgggtggaacaagctcagtgggccaagcaaaaattgggcaaaggcaccactggctacagaggtttccagctggcgaagcaacaccccaagcatcctgtgacagttccagtctgaaggtctgagaaccaggagctccaagggcagggaaaratcagttttccagctcatactgtcatgcagagagagagagaattcaacctttctccatcttcttcttctatttcagactatcaatagattaaatgatgtctacctacatggggaaggaccatttactttattgagcgcaccaatttaaatcctgatttcttctgcaaaccccctcacagaccacccagaaataatgtttaacaaaacatctgagcatcccctggcccagtgaagttgatatataaaa

SEQ ID NO: 782290 - DNA, 593 bp, Homo sapiens
caggagattataatcacatatctttaaccaatagctctgtcatagacctattgatgctgcaatggttgctcccaaatgaatatttattaaggtacataatcacctcaaatataattcatggcctattttcagttaaagatttttgtgtgagattaagtttgcgttgtcaattagctatgatcgtcaggggactcaagggagtatttaaggaggtgaaaatccaatctagaaatctaagtgagaaatattaatcagatatcagggtgcctgcttgtttttgttttgatataaatgatgacttgyttaaaaaatgtccatggaaatgaaagctaaaataaggaagaagtgatgttgtagaagtaaaattaactgtggttaacaatttaaataatgtgggagaataagaagagtaaatgttaaaatctaaattttgaaatttattgacttggcatcttatttattcagtattaaaccattctggacaatagtacagaggttcttcacaaaattaaaaatagaactgctatgtgatctagtaatctcagcactgagtatataactaaaggaaatgaaatcaatatgttggagaaatc

SEQ ID NO: 782291 - DNA, 593 bp, Homo sapiens
caggagattataatcacatatctttaaccaatagctctgtcatagacctattgatgctgcaatggttgctcccaaatgaatatttattaaggtacataatcacctcaaatataattcatggcctattttcagttaaagatttttgtgtgagattaagtttgcgttgtcaattagctatgatcgtcaggggactcaagggagtatttaaggaggtgaaaatccaatctagaaatctaagtgagaaatattaatcagatatcagggtgcctgcttgtttttgttttgatataaatgatgacttgtttaaaaaatgtccatggaaatgaaagctaaaataaggaagaagtgatgttgtagaagtaaaattaactgtggttaacratttaaataatgtgggagaataagaagagtaaatgttaaaatctaaattttgaaatttattgacttggcatcttatttattcagtattaaaccattctggacaatagtacagaggttcttcacaaaattaaaaatagaactgctatgtgatctagtaatctcagcactgagtatataactaaaggaaatgaaatcaatatgttggagaaatc

SEQ ID NO: 782292 - DNA, 536 bp, Homo sapiens
gggatccacgcagcagctgaacactgggaaggaactggcacaaggggtccagacgtccaaaacttggtaatactagtctttggaatttgcccactccatttgagtggaaacgtggcctgatcacccacgacgtgcccatgtcggtacttcggttttggtcttaacttaaattgcttggtatttggttctggttttggttttgacttggctcrggtttctcgatactcagattttggttttaattattagttgtgtgtgtgcccttttactcgttcttcgttgtgtgaggtgtgtgtgtgtggtgagagtgtgagaaaaacatgggtcaggtgcaaagtaagcccaccccattaggaactatgccaaagaatttcaaaaagggatttaatggggattatggagttactatgacaccagggaaacttacttaaaactgtgtgaaatagactggccaggcttagaagtgagttggccatcagaaggaagcctgggtaggtcccttgtctcgaaggtatggcacaaggtaacctgtaagc

SEQ ID NO: 782293 - DNA, 653 bp, Homo sapiens
cagggaaaactgtaaagaaggcaaacgtcaggcccggcgaaacaccgacttactatctgcggctgctgaaacctgggaggcaaaascgagcccggacaacccctgcaaagtaactctgaggaagatgacaagcccagctccagtcatacctggaagctgactggtctatgcacggctgaagcatgaggaaactcatcgtgagactcatttttctagagatttggacttgtataataaaaacctcgactgattttccccaaatggaagattgctcccagtacctccatcaggttacagaggtagggaaacaaactaagactatctattccatagttattatgaatgcttgggaactttaaaaggaacatatttgtataacaacattcaatacaaagtgtgtagcccaggaaatgaccagccagacatgtgccatgacccctctgagcctcccatgttcacagtttttgaaataaggttaaggacctcatttcaaagagatacaagtaaagtactaactagggtagaagaaaggggagttcctaaaaacattattttaaagtttgatgcttgtgcagtcattcatagcaagaggttaggaataggatgcggatccctcaattgggaaaaaagctatacaccagaaaataagtata

SEQ ID NO: 782294 - DNA, 653 bp, Homo sapiens
cagggaaaactgtaaagaaggcaaacgtcaggcccggcgaaacaccgacttactatctgcggctgctgaaacctgggaggcaaaaccgagcccggacaacccctgcaaagtaactctgaggaagaygacaagcccagctccagtcatacctggaagctgactggtctatgcacggctgaagcatgaggaaactcatcgtgagactcatttttctagagatttggacttgtataataaaaacctcgactgattttccccaaatggaagattgctcccagtacctccatcaggttacagaggtagggaaacaaactaagactatctattccatagttattatgaatgcttgggaactttaaaaggaacatatttgtataacaacattcaatacaaagtgtgtagcccaggaaatgaccagccagacatgtgccatgacccctctgagcctcccatgttcacagtttttgaaataaggttaaggacctcatttcaaagagatacaagtaaagtactaactagggtagaagaaaggggagttcctaaaaacattattttaaagtttgatgcttgtgcagtcattcatagcaagaggttaggaataggatgcggatccctcaattgggaaaaaagctatacaccagaaaataagtata

SEQ ID NO: 782295 - DNA, 572 bp, Homo sapiens
catttagagtatttgtctgtgttggagagaggagaatgggaatagggattttgggtaaaggaggaaaaataaataaaaaatagaatagcctgtgctgactgatgatgaaagtgtgccatgatctgtgtagtatgaatagctcaactcctaattttgtaatgtctaaataggatacataaaacttaccaaaagttaagtttctgcacagyaaaggcaaccatcaacaaagtgaaaaggcaaactactgaatgggagaaaagatttgcagaccatacatctaataaggggttaatatccaaaatatataaggaactcacacaacacaatagcagaaaaacaaatagcccaattaaaaaagagcaaaggactctaatagacatttctccaaagaagacatacaaatggccagctggtatatgaaaaaatgctcaacatcacgaaccaccagggaaatgcaaatcaaaaccacaatgagacagcacctcacacttgttaggatggctactatttacaaaaaaaagaacaagtgctggtgaagaaattggaacccttgtgtactgctgatgagaatg

SEQ ID NO: 782296 - DNA, 604 bp, Homo sapiens
gtgtgcagatgagatcttactcaaactcattcacacagaagtacaggcatgtgtcacctaacaaccaggatacgacagggatacttccaagagatgtgttgtcaggcaatttcatcattgtgcagacatcatagagagcacggacgtaaatctaagtggcagaacctacagcacacctaggctatgtgggagagcctgggctcctgggctacaaacctgtgcagcatgtagcaactgcgacaccgtggaattatgtgtgtagctaatyatagaaagggtacagtaaaaatacggtataaaagatgttttaaaatgacacaggtgtatagagcacttcccgtgaatggagcttgcgggactggagtcgctgtgggagagtcagtgtgtggtgagtgtgagggcccagggcattactgtccactcgtatgtgactggcagtgtaataggtgtgttcacaccagcgtcaccacaaacgagtgataacgtgttgcactgtgacattacacgccgcaacctcactaggcaacgggaattttcagctgctttgtagtcttatgggaccaccgctggatatacagcctgtcattgacaaacttcgttatac

SEQ ID NO: 782297 - DNA, 615 bp, Homo sapiens
tgtgtaattaacacatcactagatgttttggatatattggtgaacaaaatagaaaaacaatgttttatcttgataggtaaattataatgggaaggagaggataaatactaaacaataaataataaataaatacagataatagaatattagaagctggcagttttggaaatagagtaaatcacagtaaagaaaatcaggggtatttgaagagggctgagaaggttacagtatttaatagggtattataattgactacattgagaatgtaaatcttaagcaaaaagatgatttgataaagaatttatgaaattatacagggatgcatttctggcakaggtaacagctggagaaaagacactaagttgaaagcatgcctgatgagtttaagtaatagcaaggggactgggagttgctggtgtgggccagttaaagagagaataataggagttgatgacagagaacattagcttgacagattatataagaccttgaggtccatcgtaaggacctaggacattcaaaattgatagattgagacaaagaggaggaaacaaaaagatactaaggaatagcaatcagtgagacaggagaaaaatgaagagaatcttgtatctt

SEQ ID NO: 782298 - DNA, 576 bp, Homo sapiens
tctttatatgttttcttccccagctacatgaaaagctattacacagctattattttgacttatacttgttttgctgctttttttttttttttttttgagacggtgtctcgctctgtcgctcaggctggagtgcagtggcrtgatcttagctcactcttgttttgcattttttatgtgactagcacacaatgcttacaactctagccacttaattcattttgcttcaaagtgtgaatgaatacaatttattaccatgtaaactggctaaataatcactcataatttttgtcctcataagggacaaacagctataatataaagttacgatatttcccatatgtccttgaagtgaaggtggccatgtgactcaacttggcccaaaggagcaatatggagagatagtggaaataatatgtcccgcctcaaggcaaggctcacataaacgtatgcatgattttcaaactcttttccttcctagcaagcttgatgttaatgataatgataaatttttggaagccatacattaaagatgaagaaaaatatggaaatagctcaagttacctccccaacattaaa

SEQ ID NO: 782299 - DNA, 600 bp, Homo sapiens
atcttaatttgctaaaaattcaataatatcccaatcaaaatcctagggagcttttgtttggtggaattaacaaatcggttctaaaatttatatgggaatccacagtatctacaagagccgaaatactagtgaaagtgaataacagagttggagaactaacrtaactaagaacttaacataatttcaagacatactacaaagccattataatcaagactgtgttatggttgttaagatagatacatagatccatagaacagggtagaaaatgaagcaaaaaaatatatatatatatacagacatatatgaacaactgattttcaaaagagtaaaagtttttcttctagggtttttatggttttgagttttacatttaattctttaatccatcttgagataatttttgtataaggtgtaaggaaggggtccagttttagttttctgcatatggctagccagtgtgcccagctatttattgaataggagatcctttccccattgctattgcttgtttttgtttttttgaaaatcagatggttgtagatgtgtggtgttatttctgaagtctctgttccattccattagtctatatgtctgttt

SEQ ID NO: 782300 - DNA, 600 bp, Homo sapiens
atcttaatttgctaaaaattcaataatatcccaatcaaaatcctagggagcttttgtttggtggaattaacaaatcggttctaaaatttatatgggaatccacagtatctacaagagccgaaatactagtgaaagtgaataacagagttggagaactaacataactaagaacttaacataatttcaagacatactacaaagccattataatcaagactgtgttatggttgttaagatagatacatagatccatagaacagggtagaaaatgaagcaaaaaaatatatatatatatacagacatatatgaacaactgattttcaaaagagtaaaagtttttcttctagggtttttatggttttgagttttacatttaattctttaatccatcttgagataatttttgtataaggtgtaaggaaggggtccagttttagttttctgcatatggctagccagtgtkcccagctatttattgaataggagatcctttccccattgctattgcttgtttttgtttttttgaaaatcagatggttgtagatgtgtggtgttatttctgaagtctctgttccattccattagtctatatgtctgttt

SEQ ID NO: 782301 - DNA, 573 bp, Homo sapiens
ttggaaaaactgcaacctggatttagttgcaaccgcagggaggaactgctgctgccagggtgaagaaacactgctatagtggaagctgcgggagcgagagaatgtaagcaagcctagaggaagaaaacaggaaggaggaagtcacttcctcccccagcctcagtctctcagtaccactttatcctggcagagtagaaagtggtttttcagatgctagtcctagcatcacaaagcaaagrtgaagttagagtggagagagaatagcttcataaatagcctactttttcactcctctaactccattcatttttacctctaatttttccttcttactttctatcatttcttttttcttctttttgaggtttttttttttcttagacggaatcttgctctgtcgcccaggctggagtgcaatggcgcagtctaggctcactgctacctcttcctactgggttcaagtgattctcctgcctcagcctcctgagtagctgggactacaggtacgtgccaccacacctggctaattatttttagtagagatggggtttcaccgtgttggccaggctggtc

SEQ ID NO: 782302 - DNA, 630 bp, Homo sapiens
ggctggagaccctgggatcctttctcctggcatggtagactaaaccacttgttggctctgttccccaccctgtgccgcctggagcaggggaagcagatggtttcaatacaggcagaaacagctgttcctcatatggggtgagctgaatcttgattgttttaggttctgctctttacattgacccctcaatggtcctagttctgaagtatataagcgggccctttaaaagactttcctaaggcctgaatgtcaaatgaatcataatctaggtagcaagattgctcctaaatggacatcacagtggctgaaaacaatcaagggatggctgatttagtagggccatgctcaartagggcaagtctctccccaaggtaaccagagacatcctcaatgcatcagcaatcttggaagctgtactcatctgaaagttcaggctttgttggacaacactcctgtccactggcacactcacacactcactgccatacaaccctttctcagactgagtccattagtagtatctacctgccgtaagcccctagaatcaaagatgctatgaggaaggcttggacccaaagacagcattggagacttggtcttaggtgagcaagggtttaatctgactaggac

SEQ ID NO: 782303 - DNA, 602 bp, Homo sapiens
acctagaacaattcttcatcaagaacaaagttcttgcaaaataataataattatcatagtaataagatatttaatatttgtttaagttgtgcagtgaaaaagacattggttgtttccaaatttctaaaatatactgtatctactgataagagccacattttacaaatgggttgacagaaagctaagagaaaagagttgtgaaaagagttataactttcagcagaagaaggaactaggaaacagacacgggaacaaaaattgcmgggagaggcaattcatacagcatttggagaaaggtattgagtttttcataagacatagctcaggaaactcaaagaaatttcattaagtctcaaaagatagtcaactgtctccataaagtctatctccagataatcagtactaggcctctattttattttgatattctcctctcttttggtgtttagtcctgccacaaattcctgttcactttttatcattgcagtttacctgatttttattcgttgttctataatcacctaaatcagacaggtttttattaaaatggacagtttttaagaggtaatctgctaagattaggtaaataatattttcacaaa

SEQ ID NO: 782304 - DNA, 572 bp, Homo sapiens
cggatcacaagttcaggagtttgagaccagcctggccaacatggagaaaccccgtctctaccaaagatacaaaaaattagctgggcgtggtggcacgcgcctgtaatcccagctactcgggggcctggagcaggagaatcacttgaacccaggaggcggaggttgcagtgagccaatatcatgccactgcactccagcctgggtgacagggcaagactccatctcaaaaaaaagaaagaaaaaaaacaygtagtctttgtccctgctacctggcacagaatttgtaaaacccttggaattttctcagtgaaaaggatgatggagtcttttatgccctgatgaggaaactcttagtgggcacataccttcagggcggaagctgattaccaaaaagaccaagaattggttaactataagccctactttccccaacctccaggaatgggaaaggatctgtagattgggctattcaccaatggctgaagaaaacctaaatgacagggtttagagtttctgggttggtgaatatatggaaataatggaagtgtgcacccagaaagagcgtggaagct

SEQ ID NO: 782305 - DNA, 645 bp, Homo sapiens
ggagagtacacaaaaattacaagaagaaacaataggttaggtagtacttctttctaaaatgaatattgactttctgctaaaatcttttaactttgcccaagatatttggaccaaagtctgaactctttggaatttcagatgattttcaagtattactcactaatctttcaaccattatatgttgacactccctgcttttcaccatgtatctcagccattctgatttcctttatttttcatttattttattattttyttttaagatggagtctcactctgtctcccacgctggagtgcagtggtgcaatctcgactcactgcaacctccacctccctgcctcagcctcccgagtagctgggattataggcacatgacaccacgtctggctaatttttttgtgtttttagtagagacggggtttcaccatgttggccagactggtctcaaactcctgacctcaggcaatccgccctcctcagcctcccaaagtgcggggattgcaggagtgagccaccacacccggcatcctttaactattttacagataatgtgtgccactgtggccagttctttgtacattctgttctgtaagattgtaatgctcttccctccatctttctactcgtttgtcaaatcacatctca

SEQ ID NO: 782306 - DNA, 554 bp, Homo sapiens
ttcatgtatgcacacgcacatacacacgcaggatttcaaggcttgttacagcttaaagtattgaatatgtggatttaaaacacatattgcttatatatataaatatagtcttaggatttcttcagaatttacatctgtagagttttgaacagacattctgatgttggtttaagacataaaaactgagtcaatttggggcatatgatttgagaagactggtcatgaggagatgagagagtatacctgtaatgcagtctaaataatctcagtaatataaacacttattggcatccagtttttggaattaggaccwgacacagaacaagtatgtattttattatagttacaatatgtcataagtaatattaaattcactgactcctttaatgatgtgactccttgaacctctcttagaaaaaatcattaaaaagaacataattttatatttccaaaaaggaaggtgcatattctcttccatgtccatttttcacccttgtaaaggtgaaatttcctaattaagtcaatagtccagcttttatttcctggcataaggt

SEQ ID NO: 782307 - DNA, 591 bp, Homo sapiens
ttcaggaggcacaggatccgggacccacttaatgaagcattttggctgcccctttgtggagggatgtgctgagctgtggggaatcccattcatctgaactgcctggattcctcaggaccagcagggagaaagactaggtctgctgatctgtggagaccacagcctcccctctccccagggrctcagatgcgggagatcagggttctgtccctaaaccccttgctagagtagctgaaattcctgcagggaggccccacctagtgaaaagagatgggtcagagtctggcctgaagaggcagtcaggccgtgttctgtgacagccagtgtgctgcactgtggagaattcctcctaggtctaaagcatccaatctctccggcaccagcaggagaaaaaaacggcaaactggacctgcagtgatggtggctgcccctctccctgggagctcattcattttaggcagcaggcagccacagtaatgatggccacccctccccctggaaactcgatagtcttaggcagtctccagccaagtggccattgagaatctgcacagctctgtgcttgggacccaaggccccggcggcgtgggc

SEQ ID NO: 782308 - DNA, 591 bp, Homo sapiens
ttcaggaggcacaggatccgggacccacttaatgaagcattttggctgcccctttgtggagggatgtgctgagctgtggggaatcccattcatctgaactgcctggattcctcaggaccagcagggagaaagactaggtctgctgatctgtggagaccacagcctcccctctccccagggactcagatgcgggagatcagggttctgtccctaaaccccttgctagagtagctgaaattcctgcagggaggccccacctagtgaaaagagatgggtcagagtctggcctgaagaggcagtcaggccgtgttctgtgacagccagtgtgctgcactgtggagaattcctcctaggtctaaagcatccaatctctccggcaccagcaggagaaaaaaacggcaaactggacctgcagtgatggtggctgcccctctccctgggagctcaktcattttaggcagcaggcagccacagtaatgatggccacccctccccctggaaactcgatagtcttaggcagtctccagccaagtggccattgagaatctgcacagctctgtgcttgggacccaaggccccggcggcgtgggc

SEQ ID NO: 782309 - DNA, 565 bp, Homo sapiens
gaaggcagctgccccatgcaacgaggcaaagggccagctgagctgctaacacaccaccgtccatcagactgcggtggcagaactaaaagagtactgtaacacccactgtggggttttggggtcgtgggcaccctcacctggattccgtcacattccccttcagatgacacacctggtctggccatgggcccctcatggagcatgctcctgtgtcagtgcctagagcagctggccagatcccccactcactcgttcacctgctccttcccacaaggggctgagcgcagtgggtcaagtagacggagagcccctgttgggartacggcaaagaggtcgagaaaaatcctgcaccagtatcattgaacattttctaatgtatttccaaataatgtatagaaaatctaagaggcatagctgcccgtttctagatgactatgaaaatgaccaaataatgcagtggaaatatgccttgttcttatcaccaagtggtaaaaaatgagatctagttacacttgtgtcttcattaaaagatgatgtgtcgataaaatactaaaaacacaatata

SEQ ID NO: 782310 - DNA, 642 bp, Homo sapiens
cgctgacttctcaaataagagtcaatttattaatttttccagagcttttgacatttctgaaaaagtcactttctcttcactttaaatatcattttcaccaggtaatcacttgtctattaatttaagggtaaaattccttcttgatgttctttataaaaaaaatgttatgttcttctattgccttgccctgaagatgtcataatttttatggcattctacaacatacttattgatgtattctccattttatctgtggcaagtagcaatctccttttttttttycccctgcaggcctactctttttggtttcaaatactttcttaaaattcacttattcaatacattctgaacactttcttaatgactttataattgctaacaaacaaaaaaaaacctctaaattggggccagattagtttttctatcacatgaaagttaatgacaatggaaaatatcttgccttgccaaacacgtgaagaaattgcccttcaaagtatctaataagtatttttaaatgctttgatgagccgtgtcatttctatatatgcaaaactatttaaaatatttataaggaaattactttcttccctatgtcccacattttatttgcatcaaattaagtctactttcctgaacatacaa

SEQ ID NO: 782311 - DNA, 618 bp, Homo sapiens
ccaatatttgaagcagtaatgactgtgaatgttttcaaattagcatcagccaccaaagcacagttccaggaaattctgagaacaccaagcagaataagttctaagaaatcgacacttaggcatatcgtattcaaactttagaagatgaagaaaattttgaaagcagacaaagggaaacagcacttcatctatagtggaggaaaaataaaaattacattcattttctcctcagaaaccacagaagcagagaatggcatgaaatctttaaagcattcagagaaaaaattatcaccaatcttgtatcctgtaaaagcatctttcaaaagtgaaggaaaaataaagatattctcagacaagcaaaaattaaggaaatttgttgcaagtaagctctgccttgcaagatatagtaaaggaggttcttaaggtttcttgccccctttttgtttgagttatttatttatttatttgytattgtgttacatgggttttttatacactttggatattaactccttatcatacacatagtctgtgaaaacattttgaattgacttttgtatatgttgtgaaataaaggtctgataattatttttctgctcatggatattcagttttttc

SEQ ID NO: 782312 - DNA, 582 bp, Homo sapiens
tatacctatgtataaattaaatgaccaatgatgatacaaaaggtgaaggaattagaaatatattgttaccatgaggtgcttgcattatctgcaaagcagtatactgttacttagaagttaatatgaattagttgtaaatatatgcagtgtaaattttagggcaatcactaagtaaggtatatatatatttgtgtatgtacgtgagtttgtgtataattgatgtgttaaagaaatgagaaaaaatagaatcttaaataatgctgaattaaaacccaaaagacataaataatgtagaagacgaaaacagaaacaaagagcatgggcaacaaatasaaatctgtagcaaatatggtagatatcaatgtaataataacaatcatcactttaaatgtcaatggtctaaatacaccaactaaagatcaatactgtcacagtgaataaaagaagatacccaactatgtaccacctacaagaaacccactttatttatttatatttttcttttgcaacttttattttagattcaggggttacatgtgcaggtttgttatatgggtaaattgagtgtcagggtttggtgta

SEQ ID NO: 782313 - DNA, 602 bp, Homo sapiens
caactagatatcgagcgtgatttgatattaagtgtgcagggatcttgctaaactgacttagcaggattcttgctaaaagtgaattttagaagaaagcaaacttaggtgaatactcagagcttgactaaagtttggtaaaggaagaacttatgtcactgtacaagtcagtgagtatccagcttcttcctacctggtaggcacttctaaatttcactataaacatgtgcgacttgaagttacagaaargatagaggtgcagcaatagctaccactgttttcaaagaaatagtaccctctgtcccaaacctcatttttggttgtatatactggctaaaagtggttggtggatgagagtcagagaacctgcttttagccactgttcagcaagtcctgctattgatgcttaaagaaactctcttgagaatgtcattgattgtccctagctttggaacttcagccaatattctgagttattatgaaaaatttgtcatttttttttacttgggagaaagactgaagctattcaaaaatgaactggttcttaaaaatatattaggaagtttgaaaacgcacctaagcagaaggctttacgcctcacattt

SEQ ID NO: 782314 - DNA, 496 bp, Homo sapiens
tccaagagtcctcccttaattgagtcacacagtatgtgcttaattcctccagcaataagctatgacaacacatgtaaaacattgtctaccagaaaaaactcattagagactcagtgcccagggttttaattgagggatgctcatggaagcaccctctacccagtatgttccaaaatttcagactcctagtaggaaagcaggtgttcagctgttgtttgtacaaacagattaggcagagtaagccattcttattagttctgcgaayggtggaaagcctccctaaatcccatatgccagctaagggcctctctttctagcaggcatttccaaagatagcagtttcaagcctgttatgttaactcttttctccatatagcccaatctagaccctgccaggtacagaaatccaaggaatttttaagggaagcaaagtgagtgttgaaagatgaagcatttgaatggtgcattgaagataaagaagaaaaaaaatgacagc

SEQ ID NO: 782315 - DNA, 638 bp, Homo sapiens
gttacattctctattctgcattctttctttctttctctcttttatttttttgagatgaagtctcactcttgtcccccgggctggaatgcaatggcatgatctcagctcactgcaacctctgtctcctgggttcaagcgattctcctgcctcagsctcctgagtagctgggattacaggcacctgacaccacgcccagcttacttttgtattttttgtcgagatgggggcttcactgtgttgtccaggctggtctcgaactcctgacctcaggtgatctgcccgcctcagcctcccaaagtgctgggattacaggcatgagccaccatgcccggcctatttatttcattcattgctgttctttattatttatttttcctttacgtagttttgattctttagatgaaaaattaaattgttgatttttaccctttgttctttctcatatatgcaaactggctatcatttttttctttaaacaatgctctagctgcatctcacaattttttatcttaaaatttagtggaataattttataattttatactgatttattcttttatccttgaattgtttacaagtatattctttaatttccaggaagtagaactgtttttagttataattttgttgggattat

SEQ ID NO: 782316 - DNA, 638 bp, Homo sapiens
gttacattctctattctgcattctttctttctttctctcttttatttttttgagatgaagtctcactcttgtcccccgggctggaatgcaatggcatgatctcagctcactgcaacctctgtctcctgggttcaagcgattctcctgcctcaggctcctgagtagctgggattacaggcacctgacaccacgcccagcttacttttgtattttttgtcgagatgggggcttcactgtgttgtccaggctggtctcgaactcctgacctcaggtgatctgcccgcctcagcctcccaaagtgctgggattacaggcatgagccaccatgcccggcctatttatttcattcattgctgwtctttattatttatttttcctttacgtagttttgattctttagatgaaaaattaaattgttgatttttaccctttgttctttctcatatatgcaaactggctatcatttttttctttaaacaatgctctagctgcatctcacaattttttatcttaaaatttagtggaataattttataattttatactgatttattcttttatccttgaattgtttacaagtatattctttaatttccaggaagtagaactgtttttagttataattttgttgggattat

SEQ ID NO: 782317 - DNA, 620 bp, Homo sapiens
actctgatgtttacataatgataacaactttattcataattgccaaaacttggaagcaaccaagatgttcttctgtagataaatggataagtaaatttccttacaaacgaacaataaaatactattcagcactaaaagaaatgtgctatcaagccatgaaaatatagaggagtaacttaggtacttatcgctaaacaaaataagtccgtttgaaaaggctacctaccatataattctaacaataagacattttggaaaaarcaaaactgtggagacaggagaaagatcaggaatttgtaaggttggagagaagggagggatgaataggtagatcacagaggatttttaagacagtgaaactactctccatgattaaaaagaaaaaagtggtggaaaaatgtcattataaattgttccaaacccacagaatgcacaattccaagaatgaaccctaatgtaaagtacagattttgagtgataatgatgtgtcaatataggttcattaattgtaacaattgtagcactctgttgagggatgttgttaagggcggagaccctgtgtgtgtggaagcagggaatatatgggaaatctttaccttcctctccaacttgaatcacaa

SEQ ID NO: 782318 - DNA, 600 bp, Homo sapiens
ggtaacccggaagcctttgggtcatcggaagggatttgtgttttacctggatagaactgagaactacctcaaggttttaagccaaggattgacatgacttacatcaccttatttactgacaagacattctaaaggcacaacggtgaaagaaggtcaacccatctggtggtctgtccagtaaaccaagctcacttcagggcagtcagattaggttgctacatcttatggggagtayggaggcaagaaaatagtttctttcagcaaaattatagcataagaactcatttctgtcactacaaaggcaaagaccctagtggcatcccaggtttcaaatatgaaaaatgagactttccaaaaagcgaaatagtgagcaaaatgacatccaggtagatgtgactttcaggggggacagtactagatataggtctaaggtcagaatggttcttcgtagctctggtcttgcaacaaattgctcagaaaggggagctatatgaaaaacttcagactccttttatttacttacttaagaatactgtccctaaattcatacacacacacacacatatacatatatatatatgtctttctgaagcccatgaa

SEQ ID NO: 782319 - DNA, 564 bp, Homo sapiens
cagcttattaatccagactgttatgccagatatactcgcaatgagatcaattaccaattatatatatgtgtgtggatagatagatgtggttatatttggagggttcattattcagcctaccatattatgtaaggcacatgataatctaataatctaaaagtaatagcatatcctgggaaaaggtatttctttttttttttttttttttttgagacrgagtctccctctgtcacccaggctggagtgcagtggcgagatctcggctcactgcaagctccgactcccaggttcaagagattctcctgcctcaggctcctgagtagctgagactacaggcgcctgctaccacgcccggcttatttttttttttttttttttttgtatttttagtagagacggggtttcaccgtgttagccaggatggtctcgatctcctgacctcgtgatccgcccacttaggcctcccaaagtgctgggattacaggcgtgagccaccgcgcccggccaggcagaggtatttgtttaccaatattccaggatcctttattactttttgcaaacatt

SEQ ID NO: 782320 - DNA, 564 bp, Homo sapiens
cagcttattaatccagactgttatgccagatatactcgcaatgagatcaattaccaattatatatatgtgtgtggatagatagatgtggttatatttggagggttcattattcagcctaccatattatgtaaggcacatgataatctaataatctaaaagtaatagcatatcctgggaaaaggtatttctttttttttttttttttttttgagacagagtctccctctgtcacccaggctggagtgcagtggcgagatctyggctcactgcaagctccgactcccaggttcaagagattctcctgcctcaggctcctgagtagctgagactacaggcgcctgctaccacgcccggcttatttttttttttttttttttttgtatttttagtagagacggggtttcaccgtgttagccaggatggtctcgatctcctgacctcgtgatccgcccacttaggcctcccaaagtgctgggattacaggcgtgagccaccgcgcccggccaggcagaggtatttgtttaccaatattccaggatcctttattactttttgcaaacatt

SEQ ID NO: 782321 - DNA, 483 bp, Homo sapiens
tttctctgaaaacattttgaaatgtagacatatcttgctttcactgggtcattatctactcacttttcaaactcttttttttttttttttttttgtgagatagagtctcgccctgtctcccaggctagagtgcaatggcgcgctctctgcttactgcaaactccgcctcccgggttcctgccattctcctgtctcagcctcccaagtaactgggactacagacgcccgccaccgcgcctggctaatttttttgtattttttagtagagacggggtttcaccgtgttagccaggatggtctcgatcttttgacctcgtgacccrcccgcctcagcctctcagagtgctgggattacaggagtgagccaccgcgcctgaccattacccatgctcttaatcatgatttgtgtttcctcttggccaaatcctgtgttggcctatctcacttataataagacggggactgctgtcctccagaaaatgt

SEQ ID NO: 782322 - DNA, 543 bp, Homo sapiens
agctgagatcccaactgatagctagtaccaaatcaccacctatgtgagtcaaccattttggtagtatgttctccagttctgagatcaattgctttaaactgacctcttgaatcaaaggcaagctccctactaaacccttcataagccctgcccgaggaatagatacagaaacaaaataattgttgttctttcaggtcagtaagttttctgattttcttttagcacacagcaatgaatcatacaatcagcgactaatatattgtgctttctgtgatcttttaaaaawttttttataaatggaatttactagaataatacccttgaaatgagtctttaaatgttaacagttgtccaatggtggaaggagacattcaaggggggaaaaaggaatagattatgaaacatttatttttggaggttgcaattatttaagaatagctaaagctggaagtcctaaataggacacagtaaaagatgacattggtggtagaagcagaaaccttatgatggaggttatctatctatctatctatctatctatct

SEQ ID NO: 782323 - DNA, 506 bp, Homo sapiens
ctgtagttgttcattcacttattcacattatatactcaattaaaaattattcacaaagcatcctcttccacagcatctctatagtgtttctaatttgatttccacaagaagcccaaattctcattctctgtacttccggtgcactcccctttcagttttccctatctctgttaccagcatcttcatgagttactcatcctaaaattgtaagtttttctcttttctgctcagtgtarattgaatcaatgttgatagatccagtctccatttcagggaatgtcgttcatcattgtcctcactagtgaaaaggaaaaagaaagaatgtatttgctctatagaaatgatttacttaccataaattaattaaatcactaagccacaaacaagctgaatcatgaggtgttaccaaaaatgtgtaaaatttgagttcaaaatttatacttgaataattagaaattgtctaaaagtttcattaggcatttcaaatatcttagatcttagagcct

SEQ ID NO: 782324 - DNA, 506 bp, Homo sapiens
ctgtagttgttcattcacttattcacattatatactcaattaaaaattattcacaaagcatcctcttccacagcatctctatagtgtttctaatttgatttccacaagaagcccaaattctcattctctgtacttccggtgcactcccctttcagttttccctatctctgttaccagcatcttcatgagttactcatcctaaaattgtaagtttttctcttttctgctcagtgtaaattgaatcaatgttgatagatccagtctccatttcagggaatktcgttcatcattgtcctcactagtgaaaaggaaaaagaaagaatgtatttgctctatagaaatgatttacttaccataaattaattaaatcactaagccacaaacaagctgaatcatgaggtgttaccaaaaatgtgtaaaatttgagttcaaaatttatacttgaataattagaaattgtctaaaagtttcattaggcatttcaaatatcttagatcttagagcct

SEQ ID NO: 782325 - DNA, 588 bp, Homo sapiens
ttttaaatggtatttgtccctcacaagaagaaaacaaaatcaaaacaaaaaaaccctcatcaccaatttaactattaaaaaatggttacagatgtgttgtttatttttagttgttaactatggtctttcatgtctgtatttaatgacagagctctgattaatttactctcaacaagtatgcgtcttatgtgktttttttttctattttgaggtctttcaagtgctcttgacaataacataaattctatctgcccatgtacattggagctctattatcatggactgtgagtgtaaaaagagaagcagtagatcctcattatatgcggattcagtatttgcaaatttgtcaatttcctaaaattatttgcagcccccaaattgatacttccagagctttgatgatcattcacaaaaatgcccagaacagcaaaaaacttgagccgtccaaattacacattttcagctaaggtcaaatgtaccactctctcactgaatacatttttgtattgaattttgtgcatgttttttgtgcatgttttcttcattttttgtgctttctgtttttgattttgctgtttaaaaatgttc

SEQ ID NO: 782326 - DNA, 567 bp, Homo sapiens
tgctgacaacaggcaattaaagttcaaggatatttgagagaggaagcccattttaaatatggaagagaaagttgagtgatagaagggttagataaattgagtccagcagtacaacctcaagaataagttctgaaaggaaatccttgtaaactgtttggttttcttttatagaatcacctaagttggtcaccatagagatgacacaagcaaagacagtmctctcttcctctaagcttgcaaatgcctttgtaagaatggacaccagcaaattccacccccaaaaagagagatataatagaaacagagcaatattgtcaaacaccaggacttctgatctatgtcccagcagtagtggtaaaaatgaatcaagacaacaaatgtaattttttttctttcttcctataatataattgtagataaacatgagaagtcatatattattaggtcagggttaagtaaaaatgatgcagcattcattttcattcaatttaattcaacaaatacttagtaaaagtcatgtggtagatactctaccaatattgtggatacacaaaaggagttaataca

SEQ ID NO: 782327 - DNA, 628 bp, Homo sapiens
tgtcacaggttgggtttcttgggaagcagactcagagtttagtgtgcaggacaggcaggatgcttattagcatgtgcccttgaaatcaacaactgtggaaaggaagggaaggaagcaggagtaagagggagaagctgagttgcgatgcagacccaacaacagccttggctgatcttatggaaagttctggatctgagatgtccattcatctgtctggagttgggcagaggagggtcaggttttcataccctcctgtcaatcagccattgaatgtgggttgccccraaagggtgtgtgaccttgggtgcggctgctctctgcagcagaggcagtgcccaaagggggctgacagctgaaagccgtcttctggcagcactcccagcagctgggggaataagtcctttattcatgattattcctggagggggatctcgggagcataccacagcgttcaccacaatgcttcagtgaaaagtgataaaaatcaactcataatcaatgctaagaacttgggaaaatgagaaggatagaggaaggtgaggataattacagtgtttgaactgacaagacttccatatggagggtcttggaggtgaggctgggctagagttttgaggagctgacacat

SEQ ID NO: 782328 - DNA, 628 bp, Homo sapiens
tgtcacaggttgggtttcttgggaagcagactcagagtttagtgtgcaggacaggcaggatgcttattagcatgtgcccttgaaatcaacaactgtggaaaggaagggaaggaagcaggagtaagagggagaagctgagttgcgatgcagacccaacaacagccttggctgatcttatggaaagttctggatctgagatgtccattcatctgtctggagttgggcagaggagggtcaggttttcataccctcctgtcaatcagccattgaatgtgggttgccccaaaagggtgtgtgaccttgggtgyggctgctctctgcagcagaggcagtgcccaaagggggctgacagctgaaagccgtcttctggcagcactcccagcagctgggggaataagtcctttattcatgattattcctggagggggatctcgggagcataccacagcgttcaccacaatgcttcagtgaaaagtgataaaaatcaactcataatcaatgctaagaacttgggaaaatgagaaggatagaggaaggtgaggataattacagtgtttgaactgacaagacttccatatggagggtcttggaggtgaggctgggctagagttttgaggagctgacacat

SEQ ID NO: 782329 - DNA, 601 bp, Homo sapiens
taagtggttcccaaggctcctttatctcctttttacattttattttctaatggcactacttgatatttttatatttttttgtctgtttgttgcctgtccccctactataatgaaaacttctttatgaaggcagtaaacctgtctgtaacgttctttattatacctagaagtttgcctgacacatactttaaatatggactcaatacatttttgcagcctaaaggcaatatagggaattggttttagaacataagttttggaaatcaggttaaaattctggctctctctgtgatcttgggctcctaatcaacttaggcaagtaccttaacttcactaagaccagtttattcatatgaaaaatgaggataaaaaatasaaccaacctcttaaggttatgaggattcaatgagatcagagtcatgtgagcattgtagtcaggacccagggacaggtaggtgcagatccacctctcaccatcaccactcaggaaacttcctacatctcagtttctcgatctgtattttacatctcttaccatctcatacagtaggaaaggatattaaatggtatgatgtacatacagcactcagcaccgggcctg

SEQ ID NO: 782330 - DNA, 612 bp, Homo sapiens
ttctttctctttagttgtttgagttccttatatattttggatattaatcccttaacagatgtatggtttacaaatattttgtcccattctgtggattgtctcttcactttattaattgtttcttttgctgtgcagaagctttgatgcaatttgatttgtctatgtttgtttctatcacttgtgttttcagggtcatatgtgaacaattacaagactcatgtcatagagcttgatatggtttggctgtgtccccacccaaatctcatattggattgtagctcccataattcccacatgttgtgggagggactggtgggagataattgaatcacaggggcagtttcccccatactgttcttatggtactgaataagtctcacgagatctgatggttttataagggaaaagccctgttgcttggttctcattctctctcttgcctgccaccatgtgaggcatgccttttgccttktgcaatgattgtgaggcctccctagccattggaactgtgagtccattaaacctctttttctttataaatttcccagtctcgggtatgtctttatcagcagcgtgaaaaaggactaagacagagctttttccctatgtttt

SEQ ID NO: 782331 - DNA, 620 bp, Homo sapiens
ctaagaataaaaagacaagctaccgactggaagaaaatgtttacaaagcatgaatctgataaataatttgtctctctaatatattaaaaaatctcaaaactcaataagaaaacaatgcagtaaaaatggaaaaaatagttgaacagacatttcaccaaagaagatacacagatgggaagtaattaaataaaaacacacttaatatcattagtcactagggaaatgaacattaaaaccacaataacatatcactactcacctattagaatgcctaaaattgaagtgattttaccataccaggtgttgatttaccacaacaactggaaagctcctacactgcaggctggaatgtgaaatgatccaactactttggaaaacattttggcaatttmttaaaatgttaaagaaaaacctacatatgatctagccattccactcctaggtagctaagcgaaataaaaacatggtccatacaaaaatttgtacacagctgttcatggcagctttatttgaaatagccaaaaattgtaaacaacacaaatgtctgttaacaggtgaatagataaacaaatgctagtatatttatagaatggataataagaaatgaactaatgatatgc

SEQ ID NO: 782332 - DNA, 619 bp, Homo sapiens
tgtttatgagtatagcagtatcctcagtataatgtaattttaaatccacacatacaaatggggaccaaatacgtgtaatatggtagttatgtatacatctctactattctgatgtaatgattatgtcatgttcacggtatacctttaggccatttggggagccagcatgtctttttaaatccctctcattttttcttttaacctttagaactctctttttaatgtgatctgggatagatccagatgatctctttgtactcccaagttgccttgagaagatcccagtgatcagcaccacaattggtcagaaataccccatctgtgatgacaagtgarcagtgctcatttctacctctgcgctatgtgagaacagaaatacagcaccaagaactagataaatcttgaatactaaccttttcatctgtgctgtccatttatacatttctttgagtcaaagagggatggatatatttttcccctttaaattggatagcaaatgatcagtgggctagaattcttcattattcatagatgtaataatttaaaaaatacaagtggcttattttcttaatttttgaaaactccaaacatgaaagtaaatatttaccatctgagtctt

SEQ ID NO: 782333 - DNA, 617 bp, Homo sapiens
agaataaaaagacaagctaccgactggaagaaaatgtttacaaagcatgaatctgataaataatttgtctctctaatatattaaaaaatctcaaaactcaataagaaaacaatgcagtaaaaatggaaaaaatagttgaacagacatttcaccaaagaagatacacagatgggaagtaattaaataaaaacacacttaatatcattagtcactagggaaatgaacattaaaaccacaataacatatcactactcacctattagaatgcctaaaattgaagtgattttaccataccaggtgttgatttaccacaacaactggaaagctcctacactgcaggctggaatgtgaaatgatccaactactttggaaaacattttggcaatttmttaaaatgttaaagaaaaacctacatatgatctagccattccactcctaggtagctaagcgaaataaaaacatggtccatacaaaaatttgtacacagctgttcatggcagctttatttgaaatagccaaaaattgtaaacaacacaaatgtctgttaacaggtgaatagataaacaaatgctagtatatttatagaatggataataagaaatgaactaatgatatgc

SEQ ID NO: 782334 - DNA, 612 bp, Homo sapiens
gaattgaaagaactaatattgataaattttctcactacccaaagtgatctttgaaaatacagagtcaatgcaatccctatcaaaattaaaatggcatttttcatagaaatagtaaaaacaattctaatatttgtatggaatcccaaaagacctagagtagccaaaacactgtttggaaagaagaacaaaactggagatatcacattctctaatttcaaactatattacaagactctagtaatcaaaagagtatggttctgrtataagaacagacacatagatcaatggggcagaatagagagaccagaaataaacccacatataaaataagctttaacaagggtggcaaggattgacattggagaaaggaaagtttcttcaacagtgttggggaaactggatattcacatgcaaaagaataaaattggacccttgtctgatatgatatacaaaaattaacttgaatcggattaaagttgtcaatgtaaaatctgaaactgtaaaactccttgaagaagacaggaaaaaagctccttgacattgattggcaagcactggcaagaatttcttggctatgaaaccaaaagtgctggcaacaaaagcaaaaaataa

SEQ ID NO: 782335 - DNA, 621 bp, Homo sapiens
aaaaaatataacccctttgagttaaatgtatacttgccatatgacccagcaattccatttgtaggtgttcatccaagagaactaaaaacatatatccacataaacacttctacacagttttcattttattcctaaaatccctaaactggaaccaatctaaatgcccattagtatagtatagccatacgatggaatactattcaataaaaaaggaacaaactactgatacataacacaatatggatgacytccaatattatgctgagcaaaagaagtcagagataaaagaggaaataaagcaagattttatttctatgaagttcaagaacagatgaaactactctctggaagaacacataaaaatagtagttttcaaggacaggtagtggggaaattgattgaaaagaagcacaagaaacttttgggttactgctgtgtcttgatttggagtagtggtcatgtgagtgtatatcaggaatttctcaatcttagcactactgacattttggtccggataatttcttcttgaggagggctgtcctatgtattattggatgttaagcagtgtctccagcctctaccccttttctattgtgacaaccaaaaatttcttcagaaatt

SEQ ID NO: 782336 - DNA, 583 bp, Homo sapiens
agcattctatcataagcacctgcccaatgcagggtatagaacccagggcctctaactcagcacccagcatcttgggcctgatccccaaaattacaatttgctaaaggcaaggcccaggggtctgcattttgagcaaacaccctggtgactttgatgctggtggttggcaggccacacttggagaaatcttagtatggagggagggtggcctcacagtccctgtgttgcctagttccatttatatcctaggtcctgactgccaattagctgtacagacactggtgactcacaagtggctaggagctcgtgaaatccsctgcagtgaattgaactaatatttattaggcatcagctctacatggaggaatgtcgtaggcactgggaacccactaaaggatgagacatggctccagtcatgaggagcttggactccttttctgtctatttacactaagtcaggactgtcattaatgtaatttaggaatatctgttttgttttgtgagtagtcctaggttggagaggaaatagacacaagacaatacagaggaatgatgcaatatctaatggtgaaagaggatgtac

SEQ ID NO: 782337 - DNA, 633 bp, Homo sapiens
ggtatttctctcttttgtcctccattggagagcatggttgtgccaaggctctctagccaggacagcccatcctcaggccacccagctccgtgagtgagttccctgcacagcctgtgactgactcaccgatgcagtggggctgatcttcacatggcaccccaagcaggcttttccagttcacatctgccaacaaggyagccaagggggtggtttaggaagtagagaaaaggtgaaaaggcagcggagggagccggctgtcctgtgtctcctctttttcctgcccccagtgacttgcattttctctgagacagctgccattctagtctcccagccattcttaggaagagacgtgcctgtctctgggaagaggcaacttctctgcatgtcagaggtaaggggaatcatgtgacatgtagatgggggaagagtgggagttaggggtgggagagggcccaatctaaagtcaacaaaaatcctatttttcttcccttaactttacactctgttgttttcccaggctgtgtattatctgcacacacacacacacacacacagacacacacaatgcaggaattctctccacagtgccccttgttgatggctatccggacacctgccttaaatacttccagt

SEQ ID NO: 782338 - DNA, 501 bp, Homo sapiens
caactcatgaaaacacagccagagtacagtgaggatcctccaacgaggacccagccaatgcttctgtcattgactcagtcacaggcaacaaggaagattgcttgcctcagcacagggacagctaaatagtcagggaatatggctttcccattcacttcctgtgcagaagaatacaccttgcagaggaaagaggtctggggacatgagttcagttggaggaccctggttggggaacccaggaaacaggcagttgtaaaagatgtgcgggattcttaataggaagtagctttaagaaaactcaagtcatataacaagctttatcactactggtagcatgaaccaccatgaggaccaagcccctkggctttgtggttaaacagggtttattagtaaatcacagatggggacaaatgtattttgccaaatcggagtatgacccctggaaatgtgagagggcaaattcagagcaacttaggtggcatcaccgggaaatggcagact

SEQ ID NO: 782339 - DNA, 565 bp, Homo sapiens
ttgagggctgcccctgtatgtgttgacattcctgaaattcccacctgggcatgcagtgtcctggactcataagtgccttggggcagagagcaaaggtgtggtgctcactcatggtgagacaggtgagtctaagctcacacagagctgtgcaccccagtcagctgtggaattagaagtatgaccgacaggatgtgtgacagggcacaagacatatgtactacaggatgtaagtytgccaaagtgcaagagaacaaggagatactatactatcactgggaagccaaaaatgaagggaacttggaaaaaagtcctcagaaaataagctggcatagaattattcaaactgacagaagtgaggaggcttaaaagaagagttgaggagggttacggggagttggatgggggatactgtcagaaaaaagggaagaaatctttctggatagtcagcatcctgagcattagagtgcacttgatacctgaaccagcagagacctcaacatggggtgataaaggaggtgaaactacactgtaatgagatcttctggatccaaccttaataaacctt

SEQ ID NO: 782340 - DNA, 535 bp, Homo sapiens
tattcaggaggaactgccctgtaatgaggtactctatatcagagcttccccaccagcatgctgcaaatggattatggatataaaaatacaatattcaaaatatgtgggacacagctaaagcagtgctaataggtaaatttatagcaagtgggttttaaattgggaatgcaagcctgtttcaatattcaaaagtcactcaatgcaatccaccacattgatagtcaaaagaaaagaaatcatatgattttatcaattgatgcataaaaggcatttgacgtaaacgatgagttgatgagtgcagcaaaccaacatggcacatatatacctatgtaacaaacctgcacgttgtgcacatgtaccctaraacttaaagtgtaataataaaaaaataaaaataaaataaaataaaaaaggcatttgacacaatttaaaattctctcatgataaaaacctttccacaaactagaaacattaggttggtgcaaatgtaattgtggtttttgcctttaaaagtaatggcaattgcatttgcacc

SEQ ID NO: 782341 - DNA, 327 bp, Homo sapiens
tgtctatgagtgaagtcagcctgtactttttcttccctaaatcatcctataatgccatttacaattatgaatcagtaaaaatttaattttttagagaaataatcaatttcatggtttttactcacatatattttaaaagaacatttacttackttataaattatactttcttctaattatgaccctgtttttgttttgttttgtctttcaggtatttttgttgtttttattttgtttcatttgttttgttttttggaaggaggaaggtaataggtaaaccagtgtttgatttagtacttgttttaaatctccattttctgtttcaat

SEQ ID NO: 782342 - DNA, 562 bp, Homo sapiens
agaaaccctagcacttaacacctttgaagataaaatctagccttgaaggtaaaatttaatgagacctaagttaaagctcacgctgacaaacacaaatgtcaccagcatcattgatttcaagagaaaaagcagaagcagcctgcatcaactatgctcattttcccctttcaattctcaggcataaatatatgcttagcagaagttatgtcacaggaaagttttgagagactctggaaaatatatctagctttctaaatgaaattgcactagagcatactaaaggagctttggagacagtggggtaacataatctttattcccacagtactttgcaaccattggccaattggagtcccccctccccacacacaattttcttctaaattttcaactataaatgaacrgtagccatattctccaacctaagacaatatgaccatacttaatatgataagactgcttacttccttctctaaataatcattagtcattgaaaccagtttgacaagtgtttatttctcctctatctcagtctaactatcttgtaatcaaagaatggaat

SEQ ID NO: 782343 - DNA, 622 bp, Homo sapiens
aagttttaactctgatataacattattaaaaatgtggcctttgggaagtcattaaggcataaggattctgccctcatgaatgaaattagtacccatataaaaggtagcaattgttgttgaggatgtggaaaaactgcatgcttcatacatggctggccagattgtaaaatggttcaatcactctggaaattagtcttaaactttcttaaactgttacacttactcagcaattgaaactgcctttgcaaattcattacagtacaaaatctgacatagttgtgaagcctgaacatctgagacagttctcagttaatttagaaagtttattttgccaaggttgaggacgtacacctgagacacagcctcaggagctcckgacgacatgtgaccaaggtggtcagaggatggcttggtttcacacattttagggagacgggagacgtcaatcaacatatgttagatgaacattggttaggtccggaaaggtgggacaacttgaagcaaaggcggaacaacgcaaatcggggaggagactcccaagtcattggtatataagagacaaatgattgcgttcttttgagtttcagattagcctctccaaatcagatatgcattcatctca

SEQ ID NO: 782344 - DNA, 578 bp, Homo sapiens
ggcacctgaattttgtgtttgccagtctccacctatgagcaataaatttctatgatactttatatttcagcccagatcaactaagacaacatgtcttctaaaatgctacatataaaatgtacttatttatttgtaaaaattgtattgattggttatctctctagaaagtaagttttatggaagaactttgtaaataaataagtgaataaacragtaaatgaataagctggttttacacttgttccctgaattatattgtaattttaagtataacttctcttacaattttgtttcatattatacgagtaagtaaaaataatctggaagcatataacttttcaatgaaactttaaacaaaaatattctaaattaagttaactggcaaggatttattataatggatgaaatatattgggatataattggtcaaaaaatataaaaattatgacagttatttaggaataaaaatacatttattaattatacattaaaataaaagaactaaaatagctatataaaaatcttttggaattaatttttactggctcatagtaattctaaatattacttacacaata

SEQ ID NO: 782345 - DNA, 635 bp, Homo sapiens
agatcatctggtttattcacataagcagaggatagtctttctctgtgtgcatggctgaagaacttcaacctgcctgtgatgtaaatgccaggtgagtcttgtagatgctggggtgatgaatgtgtgaggtaccctacctacagcagaggtaagaaaaaacttctgagacaacaaagtaactgtcattccagcacctgaaagacaggagcaatgtttgaagtgatgggccacatattaggttagataggaaataaattggtttctaaaagtagtaaatagaccaaaagtgaaggaagagacagaagacttggaaattccaatgaaattataaagtagttatagtgaaaatagcagaaagaaaaaattggaaagatatgattactagcaaataatgggatattgatctttaggmatgatcactatatgggcacacccatccacagaacaaagtgattgcttcaccccatgatgtgagaaaaattgcagtgggtgctttatttttctttctttctttttcttttttctttttcgtttttttgattgtgtgtgtgtgcgtgcatgtcttaatagcaggtggtgtatttttaagttatttgtaaaagctatgtgaaagcagcatttatgcgaaattggta

SEQ ID NO: 782346 - DNA, 597 bp, Homo sapiens
aattgcatagctaattcacagtgcacagcacaggaattttcaaggacaaaaacaattttctgggaaaacttcagaaaatattttttcttttaagcactggatgctgacagagaatgactgggttaagtgttggatgtcaatgtctaatcagatgtgatgtttaatagtagaaaagagcatgaaaaagactgtcaatttctatctcattaaaaaaaccaaataatgggcactttaaaacataaaatatccaatggaaatcagatgtagaatgcctttaaaatccaaaagytaaagtcacttgactttcaaaggcagccataacattaaaaaaatgcctaaaatacaggccaagtgtgtgtgtgtgtgtgtgtgtgtgtgtgtgtgtgtgtccatgtttaacatctatatatgctaaattgaaacaaagatagataaataacaataaattattacattaataaatgggatttttaaagaaggtttagagatattcctttaaatgttacattacactatacatttttagacttaaatgacttgtacaggaaaatgtttatagtcagcctgatattcaaaagtaataataatttgctatat

SEQ ID NO: 782347 - DNA, 626 bp, Homo sapiens
acttgtttgcctctgtcctccagatttaaggacccttgtggttacacttagcctccctgcataatttagaataattttcctagtttaacatcagctgattagcagccttaattccatctgctaccttaattcccctttatcatgtaatataacctagtcacaggtgtctgggaatagaacatagacatctttgggagaagagaaattactctgactatcacacttactaactgaaataagaaaaatctgtcttctgtattgagatttagagccttccaggacctcagtctctgacaaatatttttgctttggggcttggaataagaatattaatgacacaagcttcataaaaatctattcttaaaagaagattatcttaaaggttactccatcaaaatgatgaatcaaatcgtataactaatttcaaactgatatatagcttccatytgaattcccatcaaaagtaggcacttaagtaacccttgatcaggcagtttatgtggtagatattgctaggaagtacaagcaaggcacatgggattgtgatacgtgaaaaaaggaaagtaataacaggttcattaactaatagcaatgttaaaagcaactagggctcactcatgctgtga

SEQ ID NO: 782348 - DNA, 591 bp, Homo sapiens
caaaaggatcctttggtccaaagggaagttttgcagaattctagccactcagaaagccctggcagaggcatcgtgggcagaagaggcaaaaccacatgcaatatacgtatgaatcacaaaaagatgagttattgccttctccaggatgaaaggggttttaagtaattaactagacatcaagtggatggtctcttcaaagaatggtaccatattgagagttggggcagtctccaatactggacaggtcagatattcagyagtgggaataattttatcagtctcaatgtaagaagaagcacatgaggggatgcaatgctagtacagtcattcataacctccaaaccagccaccaagggttcactgtaggaggatagggtggctgaggacaaatgctggctggtgtacttttaatgcaccattatttccatttggtttttggtggctctgtgcagtagttactctttggtgggtggtgataggatacaccaagatccgcgtgcttttggtgccttcccctggtccattctcattccactttcacagacattattgttttcaaacttgctcctctcaggtacttggttattcagc

SEQ ID NO: 782349 - DNA, 624 bp, Homo sapiens
aggggatgcaatgctagtacagtcattcataacctccaaaccagccaccaagggttcactgtaggaggatagggtggctgaggacaaatgctggctggtgtacttttaatgcaccattatttccatttggtttttggtggctctgtgcagtagttactctttggtgggtggtgataggatacaccaagatccgmgtgcttttggtgccttcccctggtccattctcattccactttcacagacattattgttttcaaacttgctcctctcaggtacttggttattcagccatgtcatggccagtacccattcataactcagaaaaacaactagaaattgataggttgggtctaggaagatccacgtgtatttatgttctttagttagtagagaacaatgagtaattttcttttttgaatgtagataataacttggaaacatctacttttccccattggctattaaagagatatttattagaatagttgaagcccaaagcctcacactagaaaactactaaggtaaaatacatgaatttacataatatgtactctacaaataatattaactctaattattttaagaaaaagtatatgagaaaaggattgggaagccctgttacac

SEQ ID NO: 782350 - DNA, 624 bp, Homo sapiens
aggggatgcaatgctagtacagtcattcataacctccaaaccagccaccaagggttcactgtaggaggatagggtggctgaggacaaatgctggctggtgtacttttaatgcaccattatttccatttggtttttggtggctctgtgcagtagttactctttggtgggtggtgataggatacaccaagatccgcgtgcttttggtgccttcccctggtccattctcattccactttcacagacattattgttttcaaacttgctcctctcaggtacttggttattcagccatgtcatggccagtacccattcataactcagaaaaacaactagaaattgataggttgggtctaggaagatycacgtgtatttatgttctttagttagtagagaacaatgagtaattttcttttttgaatgtagataataacttggaaacatctacttttccccattggctattaaagagatatttattagaatagttgaagcccaaagcctcacactagaaaactactaaggtaaaatacatgaatttacataatatgtactctacaaataatattaactctaattattttaagaaaaagtatatgagaaaaggattgggaagccctgttacac

SEQ ID NO: 782351 - DNA, 651 bp, Homo sapiens
tattactaatatcttataataatttaacttatcttgcaatatttactctaaggtatgtaacttcaattttgctactatttgaggcataaaatgccattacttctatttcaaatcactaattttatagagagtttcatgaataatagtaaaaacaagttattcttaatatattagagagctgtaagatttgcattattgacaaggaacttaaatgaaaaatcttgacttgagctttaagaaattattcatcagttaaatcggtttttccagagtaagtaacrtaatttatacaaacatgcttgatacaaagtacatgggcaaagtctaaaggcatttctgaaaggaaaaaataaataaaagtaaaagaagataagctcgagataattaaacttcagtgttaataaatctaaaattttcagttattcaatttattaattattaagatcatgaattactaattctcttttttcttacaatagatggcattttcttccttttaccaaaaatcaactcattcatttttttctctcgatcccagtctttctctttctccggaatttgtaaatattccttatttctactaggtgttcaacctcactctcttacctgtttttatcctataatcacttaaagttcctagctttcccatcc

SEQ ID NO: 782352 - DNA, 556 bp, Homo sapiens
cattaaagatcaaaatgtatggaaatagcatgagttacaaagatgcctcagcatgcctgttacattgctgcagtgtcattttccaaaaatattctatttaaactcaagaaaatcgccactgtttctttctaacacctgtcagcaactgctcatagctcactgatgtarctgtttttgcattctgacacgtgaggtctactcacattttgtaagacatgtcactgtcaaaagctaaaaataaaaaggcaaatgtgacagccctggtgccgccatgcctaagagccacaggtaattgtgatcaagaggggtatttttaaatgctgcaaaaatatcaaacttctatttcttccttttaatttttttgtgatttttattgaatttcatcttttactattagccaaaaattgttctatgattgtaaccagtgaaaactacacaagattatttttctcaagaaaaaagactgatatagttttgaaatcttttgttgagaaagctgcactaaattgaaatcacttggcttagctacttctgaggaaaggccagacagcaactg

SEQ ID NO: 782353 - DNA, 556 bp, Homo sapiens
cattaaagatcaaaatgtatggaaatagcatgagttacaaagatgcctcagcatgcctgttacattgctgcagtgtcattttccaaaaatattctatttaaactcaagaaaatcgccactgtttctttctaacacctgtcagcaactgctcatagctcactgatgtaactgtttttgcattctgacacgtgaggtctactcacattttgtaagacatgtcactgtcaaaagctaaaaataaaaaggcaaatgtgacagccctggtgccgccatgcctaagagccacaggtaattgtgatcaagaggggtatttttaaatgytgcaaaaatatcaaacttctatttcttccttttaatttttttgtgatttttattgaatttcatcttttactattagccaaaaattgttctatgattgtaaccagtgaaaactacacaagattatttttctcaagaaaaaagactgatatagttttgaaatcttttgttgagaaagctgcactaaattgaaatcacttggcttagctacttctgaggaaaggccagacagcaactg

SEQ ID NO: 782354 - DNA, 612 bp, Homo sapiens
cataagtgcatgggagtcacataaggtataaaactcaagggctagaaggttgaagattaaatgtcctctttataggaaagaggaaagtagtagatataggcaattgtagtagaagagaaaatgatttctagaggagattaatgggtctgaagaacaaacagttgcctgggrtaattttcctccaggctctgggtacatggttacaatttacagaaaggtaaggggcaggactgcactgtgaacagaggttgtcttattgtggagataaagtctctcaggtaacagttctcataggaatagataaaaagcctgtttgggtgggtgtggtcatggtcttagtttccttttccatgattaatattccctggttagtgaggggaacaggggatcgaaggcaattgtgttttttggaagaacttcccttagtcagataagaaaacttcagagagagctcctgcctgtgcttggagggagaaattaagggagggccagagaaacttcaattctggggcagcttctaagtccttccaacttcctttaatacaaagtgctcagcatgcaaaagtgccgtaccttggggtatcattttctgctgactagcccaaaagaatg

SEQ ID NO: 782355 - DNA, 612 bp, Homo sapiens
cataagtgcatgggagtcacataaggtataaaactcaagggctagaaggttgaagattaaatgtcctctttataggaaagaggaaagtagtagatataggcaattgtagtagaagagaaaatgatttctagaggagattaatgggtctgaagaacaaacagttgcctggggtaattttcctccaggctctgggtacatggttacaatttacagaaaggtaaggggcaggactgcactgtgaacagaggttgtcttattrtggagataaagtctctcaggtaacagttctcataggaatagataaaaagcctgtttgggtgggtgtggtcatggtcttagtttccttttccatgattaatattccctggttagtgaggggaacaggggatcgaaggcaattgtgttttttggaagaacttcccttagtcagataagaaaacttcagagagagctcctgcctgtgcttggagggagaaattaagggagggccagagaaacttcaattctggggcagcttctaagtccttccaacttcctttaatacaaagtgctcagcatgcaaaagtgccgtaccttggggtatcattttctgctgactagcccaaaagaatg

SEQ ID NO: 782356 - DNA, 612 bp, Homo sapiens
cataagtgcatgggagtcacataaggtataaaactcaagggctagaaggttgaagattaaatgtcctctttataggaaagaggaaagtagtagatataggcaattgtagtagaagagaaaatgatttctagaggagattaatgggtctgaagaacaaacagttgcctggggtaattttcctccaggctctgggtacatggttacaatttacagaaaggtaaggggcaggactgcactgtgaacagaggttgtcttattgtggagataaagtcyctcaggtaacagttctcataggaatagataaaaagcctgtttgggtgggtgtggtcatggtcttagtttccttttccatgattaatattccctggttagtgaggggaacaggggatcgaaggcaattgtgttttttggaagaacttcccttagtcagataagaaaacttcagagagagctcctgcctgtgcttggagggagaaattaagggagggccagagaaacttcaattctggggcagcttctaagtccttccaacttcctttaatacaaagtgctcagcatgcaaaagtgccgtaccttggggtatcattttctgctgactagcccaaaagaatg

SEQ ID NO: 782357 - DNA, 666 bp, Homo sapiens
aatgacaaattttttagttgtttgtcacatattacaaccattctatatgttattcattttccaaatataaaagagttaccattactagatggaaaattatattcagaaatgcagacacgtccttggtaggaaaaagatagaaacgcacaacgagcttcactcactaaaccaaatttcttaaatttcaaaaagacccattattcacaggtcaaatttgtcccttgatcagtatacagaaaacaataaggtttagtcataaacagtaaagcagcatgtctggaaggaaagagactagaaatgaaacaaaatgagatatgggccrtctaaggctaccccagtcctcactttcaccccccttcacctagacgagtacatgctgaacaagcaccaaaaacaaccaataaatgaaaggaaactcaaaggtcacttggggtcattattttcacatacctttgaataatgagagcatcacatgtcagccagaggagaacaaaatgtcacattctccagctaaaggttggccttggtcaaaggtcacagaagggaggccaggaaataacctaagaggttaggctgggtgcacaaagaaaggtcaccaaatgtcaatgaaagcatgcagctgtttggagatgaaacaactgaggcacccttttgtgctgacatcgg

SEQ ID NO: 782358 - DNA, 611 bp, Homo sapiens
acaatgtgaaagggaaatgacctattttaaactaaagtattgaaaatttctaattattctcattccaagggaaaaaaatgaaaaaaaaaaaatcctaaagaaaaagaacaattccctcctataacctatcccttaaaggaatggacaatacttgggtaatgatgttcaacttatgcataagaagasaaaagggcatttttttctgtatggcttctttgccagagaccctttggtaatgtgaggtttttctaaaggcataagggacgatttctctatgtagttttgcaaggtccctttcattccttctgacatcttactttatccttttcctttttctctccctaaatgaaatggatgtctatgtacatatatattttctgaaatacaaatgtagaatggcatgtaagtaccataaacctgagatttaatttaaatgcaatatgtaagcaaggcctgttaggtcctgggtcccagtaagaaatgggattcacccttaaaatggtttaagtgaagatatgttaacggtagcactccaaaaaggcataggcagagttttaggagcaaataaataatttacccagggactagcaacattacaacctcttgggctg

SEQ ID NO: 782359 - DNA, 568 bp, Homo sapiens
tcagtgcaggattcacttgtttttgttcttcttggtggaagcccctaaccacagttgtttctagttggccattttagtccctcctcatttttaaaaaggagttgtttgtcttttgttgttgagttaaaagagttctttataaattctgcctataggctcttattagatacatgatttgcgaatatctgctcccattttgtaggttgtattgtcactctttgtagtgtgctctgatgcataaagggattttcagttttgatgaagtctaatttatttattttttttgcttttgttgtttgtgctttcaatgtcrtatctaacaatgcattgttaagcctaagattatgacgattaaccttctaaggttttaagagttttgtagtttttattctatttaggtcattaatcagctttgagttaatatttatatatatgaaatcaaggaacagctttattctttggtatgtagatatctggttgtcccaacacagtttattgaagaaactatatttccccattaaatggttttgacacccttattgaaaagtaattgtgcatagatgtatat

SEQ ID NO: 782360 - DNA, 627 bp, Homo sapiens
aaaataattatacaactcatcataatgtagaataagctcagtgggagccctgagcttactgtcctgcaactagacagtcccatctagggttggtgggagacagtgatagatcatcagacattagagtctcaaaaggagcacgcaacctagatcccttgcatgtgcagttcacaatagggtttgtgctccagtgagaatctaatgstaccgctggtgtgacaggaagtggagctcaggtggtaatgtgagcagtggggagtggatgaaaatacagatgaagcttcactggcttgcctacagctcacatcctgctgtgtggcctggttcctaacaggccactgtaccaagtctatggcccaggagttggggactcctgctctagacattcaacttagatatttttaaatatcttctatgtctccacttagtattttgcacatatggaacacagtcacatatgttttaatacccttttctgctaattctaatacctgtatcagttctgggtcagtttcaattgagtgactgaacttcactattggttgtattttcccatttcttgcatgttggtaatctttggttgtatgtcagatactgtgaattttaccttgttccatgcttgttatg

SEQ ID NO: 782361 - DNA, 613 bp, Homo sapiens
agttgccttttggcccaccatgcccccccatcttgtactcatataaaccccagatcccaggttccagaagcacacaaggcagagacgaacagaagagtagaagaatggcagaacagcacagcagagagaagagaaggaacatccaaatgccaagaagagtttggctgggggcggtcaaagagagattggctgctggatagccaaactccagaagatcatcttcccactccattccctttccagctccccatccatcscactgagagctacctccaccactcaataaaacccctgcatttatccttcaagtccgtgtatgacctgattcttactgaacatcagacaaggacctgggtaccaagagggcactgagttggttaacacttaagccatctgcagatggcaaagctaaaggagtgcactgtaacacatgccatgccaactttggcttcaggagttggagacacccacccctagatgctactgtgggattggagccccaaagtgcttgcccaagctcctgcacctacccatctgcatgctcccccttctgtaaagggtttgagtgcatagcagctgaacacacaagccacacccctgttgcacatcctgc

SEQ ID NO: 782362 - DNA, 614 bp, Homo sapiens
ttgacaataagattgtcatagtatggacatggaatagaatatattcaactggccagtggaattttatgtcagaataagcctatgccttcacttctccatgatgttgcataatacccactcctattactgtataatatttccagtagctatttacaaatcattctgaggaaaaataaccatttagggttttagatcatattaggaaatcacacctatttttaatataaaaatcttagaaaccacttcaagtagaacaattttaaatcaatatcctaactagtagtgattatagaataatttttgataggtcatttgctaacctggttcacaattaagaacaaaatatctggtgaatgaattgtggattgtacaaactgaacataaaaacagacctgtttcgcaactgaaaccccatgtggcttcactaatatattaatttcttctaagacagtatcaayatgtacttttcatcactactttaaagtaaaagatccaatggagtgattgtgtacaattctgtcacgtatatgtgccctttgtactttttatttagtcaatctgagtttagtgcccttcttgggtttaaactaaatgttgtaagctttgttggcatt

SEQ ID NO: 782363 - DNA, 619 bp, Homo sapiens
atacctcaggaatggcttggtgttgtcttcatggtagtgaatgagttctcactctacgagttcacgtgatgtactggctccctctttgccttccaccatgactgtaagcttcctgaggcctcaccacaagccaaacagatgcacgtgccatgcttgcacaacctacagaaacatgaaccaaataaaacccttttctttataaattacccagtctcaagtattcctttatagcaatgcagaatggcttaatatagtctccaatggtgtccatatcctaatctcaagaacctgtaactatgttaccttatttagcaagagggactttgcagattaagttaagaatgttggaatggggaactatgctggattatttgggtgggtccgagtaatcacacaggtcytcataagatggaggcaagaaggtcagagcgagagaagaaaatgtgaaattagaagtagcaaacagggagacaaggagaggaaaacacagatttgaagatgttatgctgttagctttgaagatgttatgctgttagctttgaagatgaaggaaggggccacaagccaaggaatactggtatcctgtagaagttgcaaaaagcaaggaaatagattctcc

SEQ ID NO: 782364 - DNA, 639 bp, Homo sapiens
caatgtacctgcagaaattctatgtctttaaattttcacaggtaacattaaagtatgtctgtcaacttggaaaatgaagctaccagcacaccatcagcaggccacttacttactttaaatggttttatttatttttattgaagaaactgcggtgcgtgctttaccctgatctcttatttgcccatctatccatacaaccaagtgtttgaagtactaatctcaggaacaatagccagtaaatgctaatctgagaaccagttctgctgttgtccaggtttagggcacgttctgcctgtgcagcarggacagtgacacatgctccttggcatggcacctgccactcatagtcagatacagacccaggttggggagactcaggaggctttagaggatgactccagtgtgctgaggagacagaggcaaattagcggtctagggaatgtgggtcagggcttttgtgatttcaattgttggaccaaaaatgtttcagaacaacttttctcttaacaataaagaacattaaaaacaactacttacttcctactattagcatcatttaataaaattaaatcactttaacactgaaaactaaaatctttaatgaaaatctctcatcatttttctgttgctttttgtctt

SEQ ID NO: 782365 - DNA, 639 bp, Homo sapiens
caatgtacctgcagaaattctatgtctttaaattttcacaggtaacattaaagtatgtctgtcaacttggaaaatgaagctaccagcacaccatcagcaggccacttacttactttaaatggttttatttatttttattgaagaaactgcggtgcgtgctttaccctgatctcttatttgcccatctatccatacaaccaagtgtttgaagtactaatctcaggaacaatagccagtaaatgctaatctgagaaccagttctgctgttgtccaggtttagggcacgttctgcctgtgcagcaaggacagtgacacatgctccttggcatggcacctgccactcatagtcagatacagacccaggttggggagactcaggaggctttagaggatgactccrgtgtgctgaggagacagaggcaaattagcggtctagggaatgtgggtcagggcttttgtgatttcaattgttggaccaaaaatgtttcagaacaacttttctcttaacaataaagaacattaaaaacaactacttacttcctactattagcatcatttaataaaattaaatcactttaacactgaaaactaaaatctttaatgaaaatctctcatcatttttctgttgctttttgtctt

SEQ ID NO: 782366 - DNA, 639 bp, Homo sapiens
caatgtacctgcagaaattctatgtctttaaattttcacaggtaacattaaagtatgtctgtcaacttggaaaatgaagctaccagcacaccatcagcaggccacttacttactttaaatggttttatttatttttattgaagaaactgcggtgcgtgctttaccctgatctcttatttgcccatctatccatacaaccaagtgtttgaagtactaatctcaggaacaatagccagtaaatgctaatctgagaaccagttctgctgttgtccaggtttagggcacgttctgcctgtgcagcaaggacagtgacacatgctccttggcatggcacctgccactcatagtcagatacagacccaggttggggagactcaggaggctttagaggatgactccagtgtgctgaggagacagaggcarattagcggtctagggaatgtgggtcagggcttttgtgatttcaattgttggaccaaaaatgtttcagaacaacttttctcttaacaataaagaacattaaaaacaactacttacttcctactattagcatcatttaataaaattaaatcactttaacactgaaaactaaaatctttaatgaaaatctctcatcatttttctgttgctttttgtctt

SEQ ID NO: 782367 - DNA, 579 bp, Homo sapiens
aaagatttatatatggatacatatacaaagcacatatttgcatataaggactacacccacagatccataaccgtaaagtctcaaagttactgactgttggcttttaaacttttaaacttttaaacacagatacatatctctgagtctagtctttatatgcaaatatatatgttttatatatgtatattttttgaatcattttatgtggtttatatttattcaatttttatatgcttggtttagaagcatataaaatgttcacttttcagaaaacattaggaattggttatattttagaaagaaacgtagaatatcacatttcaatttggactagcacttttcaagcggctgstaaccacatgtggatagtggctatcctatcagcatagagctacacgaagggcatatgactgcttattttactatgcttgcaatttctgtagctttgattttttttaaataaaatgttggccaggcacggtggttatgcctgtaatccgagcacttttggaggctgaggtgagctgattacctgagatcaggagttcgagaccaacctggccaacatggtgaaacccc

SEQ ID NO: 782368 - DNA, 579 bp, Homo sapiens
aaagatttatatatggatacatatacaaagcacatatttgcatataaggactacacccacagatccataaccgtaaagtctcaaagttactgactgttggcttttaaacttttaaacttttaaacacagatacatatctctgagtctagtctttatatgcaaatatatatgttttatatatgtatattttttgaatcattttatgtggtttatatttattcaatttttatatgcttggtttagaagcatataaaatgttcacttttcagaaaacattaggaattggttatattttagaaagaaacgtagaatatcacatttcaatttggactagcacttttcaagcggctgctaaccacatgtggatagtggctatcctatcagcatagagctacacgaagggcatatgactgcttattttactatrcttgcaatttctgtagctttgattttttttaaataaaatgttggccaggcacggtggttatgcctgtaatccgagcacttttggaggctgaggtgagctgattacctgagatcaggagttcgagaccaacctggccaacatggtgaaacccc

SEQ ID NO: 782369 - DNA, 527 bp, Homo sapiens
attttatagttgtttattgttagtaattagaaatgcaattgatatttgaatattagccctgtgtccagagactgctaaattcacttattagttctagtagttatttgtttgtgtgtggattacatgaagttttctttttttttctttttttgagacggagtctggctctgttgcccaggctggagtgcagtggtgcgatctcagctcactgcaagctcygcctcccgggttcatgccattctcctgcctcagcctcccgagtagctgggactacaggtgcctgccaccacacccggctaattttttttgtatttttagtagagacggggtttcaccgtgttaaccaggatggtctcgatctcctgacctcatgatctgcgcacctcggcctcccaaagtgctgggattacaggcgtgagccaccgtgcagggcccacatggagttttctacacacaagcacgtcatttgtgaataatgatagtttcacttctttttaattttagtgtgtcatttctttttctggcct

SEQ ID NO: 782370 - DNA, 617 bp, Homo sapiens
ttcttgagtcagcctttgttttcatggacttttctctattttctttcccctttctgttttattgatttatattctcatctttattttttcctatcttctcactttgagtttaatttgatcttctttttttgtttactcttacgtgtccctgcttggaagggacacttgtgaagtttaggtcagagctttctrttctccttggcttatatctgtggtctaggaaaatgatatttctatcaccttctggataaatcacactattatctatgcaggcaacaatagcacatattttctctacctttgccctcaagttaggttttatttttctagcagtctaaaggtcatgaaataaattataaaataaaaacagtgggtcttcaagctagatgatactgttttctttcttgcatggacaattattttaaaatattttggtttttctgcacttattatttaaatatgactccccacccccacttgaatctagggacattgtagttttctactgcagactttatttctggtttatactgggaatatattttttatcgttttcagtgaaagcattcactggttaaatttccttttaaaaataataatggatctttacaatttct

SEQ ID NO: 782371 - DNA, 555 bp, Homo sapiens
cctatttgaggagaagcaaagatatctgtgactcatgaagagcatgaaggtggtggagggacttgataattaggaaatcaaaatgggcaagaataatgtgtgcctacaaatgggacatgaatttgaaggaaatttaagttaaatttgctgccacacatgatgatcaggttcagtaataaagaattgtatttaaatcttgattcattaaacttttttgagagtcctaaacaatttttattaccaacacatagagacttctttctagagaaaaatcaagtaccaggtgccaaataacagatttacatgagaatttttagggacaacacattgtaatttgtagcgcaatcatagccaatttgaaccaaaaaaaaaaaaaatcgtgtatrcatttatgttgtttcttactatttacctttcaatcctttgcactgactccaatgaattgacatcagaaatctgtgctggagtcaacaatgaaaggggatgtcataatatatattggagatgggaggaattcaggtttgtgaaattcagtttcagaattattcatgggaa

SEQ ID NO: 782372 - DNA, 343 bp, Homo sapiens
atttgaaccaaaaaaaaaaaaaatcgtgtatgcatttatgttgtttcttactatttacctttcaatcctttgcactgactccaatgaattgacatcagaaatctgtgctggagtcaacaatgaaaggggatgtcataatakatattggagatgggaggaattcaggtttgtgaaattcagtttcagaattattcatgggaaaatagttttctggacactgattctaaaattctttctaaaaagttgggtcttaagtaagctaagtcatatttaccatatcttttagattcaaggaattttgttgttcaaataagttggtcatatcaccgctccatgtggcaaa

SEQ ID NO: 782373 - DNA, 675 bp, Homo sapiens
atgcatacagtggaaacatacaacaaggagacagacggccggacatttgtggagtttattctgggaagcctgcgtggccatagagagtggtttttaacaggatttccaattcttctcctagtagcctttgtaggtaacattgcttccttttctaacggagtgatataaaaaggagcaggtcataagagagctgctgcttcctatgttagtgtatttgtcactgttagttcctagtaagcagcttcttaaaggactcagatttcctgagtttgagagcctaccagattgacagaaaggaggagaaaatcctrtttgcaacatggaggagatagcagctgacaaggagcagtgaagccctgggcagaaaagaacagagctaatggaacatggacttgtccctcacactccagagctctgtcaacgtatgaggttggtgctaaaacataaacacaagcacaccacctcattggatgcagccgttccttaggcccacagctacttgcctgtgtcccatggacaggaaagactagcatgatgggtgaaaggaaagacttgacggagagatccaggaagtgggccatagatgggattaggaggaggaatgcctacccagtggagttgaatttaaaagaaattcacccacaaaaggctgtctgtcgtgcattggccagctcc

SEQ ID NO: 782374 - DNA, 574 bp, Homo sapiens
cacgtggcagacagaataatggccccaaagatgtccacatcctaatccccatgtgggagacagaataatggtcccaaagatacccatgtcctactcctcatgtgatacagagaataatggtcccaaagatgtccatgkcctaatactaggtagcagacagaataatggccccaaggatgtctacatcctaatccccatgtgggttgacagagtaagcacccccttccccccctcaaaaaaatatccacatcctaattctagaaatctgtaaaaacctgtcatggctaaaaagattttgcagatgtgattagtttaagaatcatgagatgaaatgaccctggattatccagctgggtctaagatcatcacaggatctttgtaagagggaggcaggagtgccagagccagaggaggtgatgttaggacaaaagcaaaggtcagagtcacagagaaattagaagatgctgcactactggctctgaagttcaaggaagggtccaggagccaaggaatactctagaaacattcccctagaagcaggaaatggcaaggaaactgattctcccccagaact

SEQ ID NO: 782375 - DNA, 574 bp, Homo sapiens
cacgtggcagacagaataatggccccaaagatgtccacatcctaatccccatgtgggagacagaataatggtcccaaagatacccatgtcctactcctcatgtgatacagagaataatggtcccaaagatgtccatggcctaatactaggtagcagacagrataatggccccaaggatgtctacatcctaatccccatgtgggttgacagagtaagcacccccttccccccctcaaaaaaatatccacatcctaattctagaaatctgtaaaaacctgtcatggctaaaaagattttgcagatgtgattagtttaagaatcatgagatgaaatgaccctggattatccagctgggtctaagatcatcacaggatctttgtaagagggaggcaggagtgccagagccagaggaggtgatgttaggacaaaagcaaaggtcagagtcacagagaaattagaagatgctgcactactggctctgaagttcaaggaagggtccaggagccaaggaatactctagaaacattcccctagaagcaggaaatggcaaggaaactgattctcccccagaact

SEQ ID NO: 782376 - DNA, 621 bp, Homo sapiens
tgggaagctttcatcctgagcctagaaataccacaggcacgcaactctgatccaagacagcagccatggtgactgtacactgcaaagccacagaggcagagctgcataaggtcttgggaacccaccccttgcacaagtgtgccctggatgcgggacatgaaatcaagaattattttggagcttgaaggtttaatgtctgccctactgggtttcagatttgcctgaggcctgttgcccctttcttttgcccaacttctccatttgggaatgggaatatttacccaacacctgtactgcattgaatattggaagcaaataagttggttttgatctcataggctcatagatggaggaatgtaccttgaagctcagatgagatttyggacttttgagttgatgctgaaacagcttgagatttttggggactactgggagaggataattgtattgtgcaatatgagaaggacatgagatttgggagccatagggatgaaatgacattgtattgtgcaatatgagaaggacatgagatttgggggccataggggtgaaatgacattgtttggatgtgtttaccctccaaatctcctgttgaatgtgatcttaaatgttggtggtggg

SEQ ID NO: 782377 - DNA, 621 bp, Homo sapiens
tgggaagctttcatcctgagcctagaaataccacaggcacgcaactctgatccaagacagcagccatggtgactgtacactgcaaagccacagaggcagagctgcataaggtcttgggaacccaccccttgcacaagtgtgccctggatgcgggacatgaaatcaagaattattttggagcttgaaggtttaatgtctgccctactgggtttcagatttgcctgaggcctgttgcccctttcttttgcccaacttctccatttgggaatgggaatatttacccaacacctgtactgcattgaatattggaagcaaataagttggttttgatctcataggctcatagatggaggaatgtaccttgaagctcagatgagattttggacttttgagttgatgctgaaacagcttgagatttttggggactactgggrgaggataattgtattgtgcaatatgagaaggacatgagatttgggagccatagggatgaaatgacattgtattgtgcaatatgagaaggacatgagatttgggggccataggggtgaaatgacattgtttggatgtgtttaccctccaaatctcctgttgaatgtgatcttaaatgttggtggtggg

SEQ ID NO: 782378 - DNA, 593 bp, Homo sapiens
gtctcaaactcctgacctcaggtgatctgcccgcctcggcctcccaaagtgctgggattagtggcgtgagccaccgcgcccagtctgtctatatacctttctctctctctctctccacacacacacgcacacacataattgtktttgtaagcatctggagaatacgtctaatcatctaatctcccatttcaatttgggatccattacttccacagtcaacactatccaattagcaatagccacttaaacacttcaggcatcttggaatgtctgtttttctaagccaagatctaaaaccttggatgtcagattttccagatctcctgttttggggactggtgtgaaaacgtcattcgatgacaggccgacccaggtggcccctgccttaacatcaaacgccatcaaactctccgaacacgcttctggctccaggcaggtgccgtttttctccccacagaaaggtcagctagagtcacccttaaaataatgcacttgtatattttttattgtgtggacaagaaattgggaacaggttcaggctgctcagaaaaacgtgttaagtttatttttgaacagaggtttattaaaaaaaa

SEQ ID NO: 782379 - DNA, 572 bp, Homo sapiens
tttttcaaacacccttgattttttttttaatctttaaatgtgtacagtaaccagccaggcatggtggcatgtgcctgtggtcccagctactctggaggccgagacaggaggatgacatgagcccagaagttcgaatccagcctgggaaacatctccagacctcatctccaactctaagaaaaagaaaagaaaaatgaagaattgttgcttgcatcccaaataaaataygaggtcttgaaactcgctgtgtcttctctctactcttcatttcctgcctttaaggggacctggaaacaaacatgaatggcacagaaccttggtggtagggacacagtggagagtgagtgttggggataagacagagaggagatgtgtgtaactggatggccccagagactgtgaggcccttaacagaagtctgccaggctgagggagcaggttggatggcacaggttatatatccagactgggacaggtttgagacacatgtaagtctaaatgtctaacagaaaactggaagagctagaatggaggtttcatgagggctggggttgtgtctgtctcatctctat

SEQ ID NO: 782380 - DNA, 550 bp, Homo sapiens
tggccttcactgtccatattcctttaagcattttggtcacagttacttaagtccttaagtctgtaagaagttccaaactttcctttaccttcctgtctccttctgagccctccaaactcttccaacctctacccattacccagttccaaagctgcttccacattttaaagtatctttatagcaatgccccactcctcgatatcaattttccatgttagtccattcttgtgttactataaagaaatacctaaagctgggtaatttataaagaaaagaagtatatttggcccaccgttctgcaggctgtgcaggaagcatggcaccagcatctgcttctggtgaaggcctcagkcctcttccactcatggtggaaaggaaggggagttggtgtgtcacatggcaagagcaggagcaagaatgagaggtgggaggtgccagcctcttttaaataactcgatctcgctgaactcagagtaagaactcactcatcaccacgaggatgatgacaccaagacattcattaaggatccacccccaagacccaaacacc

SEQ ID NO: 782381 - DNA, 636 bp, Homo sapiens
tgatagccaccacattggatccccaagcaatccttaactacaaatgccatccctagatacagggtcaagattatcatgcctgacttatttttccaatgattgaatcactcccagggaagcctctcagtctctcatgaataattttctgaaacctaccatatccaggtcaccaaccatctcagatatctctgaattttcattagagatgatattcaaaatatctaacagctggcatggagttatagtatgccgatatagtgctgtattcaagcaaggtccctcactaaactttatataacatatttactaatattttcttcacatagttttatgttttaactttttccttttaatttcttaatctatatggaattttttggtgcrcagtattagataggaatttaaatgtcttccccaataattaaccccagtcatttattgaatactgtactatctttttacttatttaaaataccagcatctttggtaataaatatttatttgtacttaattctatttctatgctttctattctgatccaaggatctattggtctcaatatgcaccatacagattaaatacttagggtgtaccatattgcatttctttttcaaaatactctgttgtaatcctata

SEQ ID NO: 782382 - DNA, 624 bp, Homo sapiens
aatatttatttgtacttaattctatttctatgctttctattctgatccaaggatctattggtctcaatatgcaccatacagattaaatacttagggtgtaccatattgcatttctttttcaaaatactctgttgtaatcctatatcttctttcaaatgagctataaaattatgttgwcattcccctagcctctaaaaatctatatttgtatgtgtattgggatttcccgaaacttaaagattaatgttaggaaattaaatggaaatctatgtaattccatctttctacccaagaacttgatatatctcttcattaattaagtctttttatttttttaagtctttctttatgtcttccagttaagcttatatttttcttcataaaaattttactctttttattaagtttatttctagatattttacttttaggtccttatgtaaatggcacaatggaactcagaattaagaaactaacacaaaactgcacaactacatggaaactgaacaacctgctcctaaatggctactgggtaaataatgaaattaaggcagaaataaagatgttctttgaaaccaatgagaacaaagacacaacataccagaatctctgggacacatttaa

SEQ ID NO: 782383 - DNA, 593 bp, Homo sapiens
catttaccctcttttctttttaaaaatattttggagatggcatttaactagaaaattagtctctggtctcaggtttcacctgatctttcatggctaggatggtttattcctagaagagcaaatagtggaagaagaagggagaaaaacamcaaacaaaagaacactcctggaaaatcaatataggccccactactctgaagtctataaatcagtagcaggtatgaaagtggcttatgcatgtaaataggtggctgttattttcttctgaactttaagttgtctagtttcagtttgcagggctttaagaaagcacagcttggttttcagtgactcccagttaggaaaaattgaaaaaaaaaaaaaaaaaagaaggaaaaaaaagaaaaaaaaaattgaaaacattattttgaagacttgtagtcaagagaaaattagaatttagcccaaactgtagaaataataaaaattgaaaaacattagacaagactagaatctaacaacaggtgtacaattgtttttgaaacataatttttctctctccagtttcccatttttgctaaagacaaatcatggtaggattggtttgctttatt

SEQ ID NO: 782384 - DNA, 593 bp, Homo sapiens
catttaccctcttttctttttaaaaatattttggagatggcatttaactagaaaattagtctctggtctcaggtttcacctgatctttcatggctaggatggtttattcctagaagagcaaatagtggaagaagaagggagaaaaacaccaaacaaaagaacactcctggaaaatcaatataggccccactactctgaagtctataaatcagtagcaggtatgaaagtggcttatgcatgtaaataggtggctgttattttcttytgaactttaagttgtctagtttcagtttgcagggctttaagaaagcacagcttggttttcagtgactcccagttaggaaaaattgaaaaaaaaaaaaaaaaaagaaggaaaaaaaagaaaaaaaaaattgaaaacattattttgaagacttgtagtcaagagaaaattagaatttagcccaaactgtagaaataataaaaattgaaaaacattagacaagactagaatctaacaacaggtgtacaattgtttttgaaacataatttttctctctccagtttcccatttttgctaaagacaaatcatggtaggattggtttgctttatt

SEQ ID NO: 782385 - DNA, 535 bp, Homo sapiens; identical to SEQ ID NO: 742296

SEQ ID NO: 782386 - DNA, 613 bp, Homo sapiens
aggaacaatgtcccagggtgggtgtacagcccctgcaatattaggtgtaatatcatcgtctgacaacatggatattgaggacactgtcacgggagggtgtacacctccttcgatattgggagtaatatcaccctctccccatggattgtaggaaatatatcgaaagggttttacaatttgtgccatattgggagtaatatcatcctctccccacttagatattaggaactatatcacgggacgctgtacagttcttgtgatattgggagtaatatcatcctctcccatcatagatattaagaacactatcacaggtgtacaccccctgtgatattgagagtaatgctctccccttctggctattaggaacaatatcacagaagggtgcacagttcctgcgatgttggcagtaatatcacaccctccccgcccsgatatcagaaataataatactatttattaataattaataattgattttaattaattctaattaagttgtaattatgaataatcaacacattattagttatttattattaataatcattgttacaataacattgataattattaattaatattgattataaatattaataaacatgacaat

SEQ ID NO: 782387 - DNA, 572 bp, Homo sapiens
tttcttttttgggtagtagagttagagattccatcctcttgaaagcacagttgccccgggaagagtaaaagggagcagaaggcgtaagccaggcacggctgttttcactgttgttcaccttttgtatccttacgaatatgaagatgtactaagttgtgtgttttgcgtgcatatataattttaagctacttgagttgtaggtccctccagtctgtgattcagtttgagatgggactgtatgggaattaacagtgccttgtcttcttaagsagtgatttgtgtatgtgctgatatagctcagtatgtctttgaaaccagttgtctggggctaggcctgcaatcagcttttggctaagaggtcccaggatggaacaagtagtgtgaaagaggactgataccttggcctcacacacagtactgctcttagactggggcaagtgaaactcctcacttcagagtgccccattctaggccccctcactcccaaaggggtgagggatcactggggccatgggaatgtgcttgttcagctctcgtgggctctccttctgtaccacgttctggacatctgg

SEQ ID NO: 782388 - DNA, 566 bp, Homo sapiens
gaagaatgaaattggttccctaatactcagcatataaaaaatcaactcaagatagatcaaagacttaaatctaagacatgaaacgatacaaattctagaggaaaacttaggaaaacctcttctgcacactggcctaggtaaagaatttacaactaagaccccaaaagcaaatgcaacaaaaataaaaataaataaatgagacataattaaactaaaaagcttytgcacagcaaaagaaataatcagagtaaactgacaattcatagaatgggagaaaatatttgcaaactatgcatctgacaaaggactaatatccagaatctacaaggaactcaaacaaaccagtaagaaaaataataatcccatcaaaaagtgggcaaaagacatgaattgacatttatcaaaagcagatataaaatggccaacaaatagatgaaaaaatgctcaacatcactagtcatcatgaaaatgcaaattgaaactatgataaaatattatcttaccccagccagaatgtccattattaaaaagtcaaaaagcaatagatgttggtttggatgtggtgg

SEQ ID NO: 782389 - DNA, 651 bp, Homo sapiens
cctcataaattgttcataaactctgatggcaagcttcagatttgtcactccctaatgtagcagtggctacagccagctgacatcaagctctggggagcgatgcagtaaatcattttcccttttgtgcaagaagaaaaagtagaaaattacattcttctcaratttcgcttttgagtgtgctggtgcctctgtcaagtgctccttcttgcaaacaagaaaacggtatgacccccagggagcaggcttttcaataggagctatctgtgtaatccccacacaaagagggagaatggtgagcagcaatcagaacctgttgtcccatcagatcacaagctagaggttaagttctctattctgcaagttggggactgagattcaggaaggttgggaattcactcaagtcatcccattcacctggaaagaggaagaggtgggcctgaaatctgagctggagttcagagtcgtgcactggcccagtggtccatttggtcctgggtgcaagtaaggactgagggccatcaacctatgtagggctaaaacccacctaagtaatgaaagtgcaaaacaatggtgctgctgaaaatgatgatgattataatcttttcattaactccttgggaaatcagagaaggaaattatacacgcagaaaa

SEQ ID NO: 782390 - DNA, 580 bp, Homo sapiens
aaaccgcccccatgattcaattacctcccacctggaccttcccaccacacatggggattatgggaactacaattcaagatgacattcaggtggggacacagccaaatcatatcataccacccctgacccctcccaaattwcatgtcctcacatttcaaaacacaatcatgcctttccaacagtcccccaaagtcttagctcattccagcattagtcaaaagtccaagtaaaaagtctcatctgagacaaggcaagtctcttctacctatgagcttgtaaaatcaaaagcaagtcaattacttcctagatacaatggaggtacaggcattggataaatacacccattccaaaagggagaaatttgccaaaacaaagggctacaggccccataccagtttgaaatccaatgaggcagtaattaaatcttaaagctccaaaataatctcctgtgactccatgtctcacatctaggtcatgctgatgcaagaggtgggctcccatggccataggcagatccacccctgtggcattgcagggtacagccccccctcccagatgtttccacgggccagtgttgagt

SEQ ID NO: 782391 - DNA, 685 bp, Homo sapiens
ctttagttatcgatgaacttttctcaaagctgcagatgggccaactattgcaaaattttttttttattttagtttatttttattttttattttattttattttaatttaattttaatttttttattttaatttgtgatggtagccataaaaattcaacaacaaaaagaaatagtttaattttttattggatggttttatccatgtctgaagaygagggaataatttttaaggtcttaagctaagtgcccttttcactcacttccccacattcttagacaactaattcacagtcacctctgtttaaacatccgatatcttctcctccattcttactttgcactgggaaaacagaaacaattagaaggcaaattcctcatgctcttaccatgtcatttatctacctctcataatctgtactcatataacttgcctcccatttctcagagctgtgtactgcgaactcatgttaatctctcaatttgtaccttgcattctactaaagagcagcccttcaacaagtctcacctctctctcctgcttcaccaacctttctttttctaccaattgatttccctctgttgacaaacatgctgtaatatcttctatcataaaaatatgcaaaacaacttttttgacttcccattccttttctgctttttgaagtgtatctctgcttctctttac

SEQ ID NO: 782392 - DNA, 658 bp, Homo sapiens
gagttcactctgtgttgcacagttctgtgggttttgacaaatgtataatgcattgtatccaccaatacagaatagtttcattgccctaacaatccccagtggcccacctacttaactctcccttttttcctccaagcccttggcaaccactaatytttttagtctttatgtagtattttccaaaatgtcataattagcactatacagtctgtagccttttctgattggcttctttcaattagcaatatacatttaaggttcctccatggtttttttttttttttggtggttcgatagctcattttttttagtggtgaataataatattgcattgtttgtatgtgtcacaggtcatcttggttgcttccaagttttggcaattatgagcaaagctgctataaacatttttgtgtaggcttttgcttgtaaataaactttcaaatcatttggataaataccaaggagtgttattgctggatcatatggtaaaagtatgtttagttttgtaaataactgccagactgtcttccaaactggttgtatcattttgcattaccagcagcaatgtacgagaattcctgttgttccacatcctcatcagcatttggtattgtcaatgttttggaatttagccactgtaatagatgaaagtggtatt

SEQ ID NO: 782393 - DNA, 658 bp, Homo sapiens
gagttcactctgtgttgcacagttctgtgggttttgacaaatgtataatgcattgtatccaccaatacagaatagtttcattgccctaacaatccccagtggcccacctacttaactctcccttttttcctccaagcccttggcaaccactaatttttttagtctttatgtagtattttccaaaatgtcataattagcactatacagtctgtagccttttctgattggcttctttcamttagcaatatacatttaaggttcctccatggtttttttttttttttggtggttcgatagctcattttttttagtggtgaataataatattgcattgtttgtatgtgtcacaggtcatcttggttgcttccaagttttggcaattatgagcaaagctgctataaacatttttgtgtaggcttttgcttgtaaataaactttcaaatcatttggataaataccaaggagtgttattgctggatcatatggtaaaagtatgtttagttttgtaaataactgccagactgtcttccaaactggttgtatcattttgcattaccagcagcaatgtacgagaattcctgttgttccacatcctcatcagcatttggtattgtcaatgttttggaatttagccactgtaatagatgaaagtggtatt

SEQ ID NO: 782394 - DNA, 621 bp, Homo sapiens
atcctcgatgaatgtcttcatttattcatgacaccacttctgaatatatttatgtgccagacgctgaagtttactaatattatggtgcccagtaaatacttgtttttactaatattttttatggcaataaaatgactttttcaggattatgtgatttaaaagattgacccttttggcaaaatacgtattcatgataggaaatatatacaaataaaaacaacatagttcacttaaacctcccaccagagcccagggttcactgttaccattctgaagtgactatggaatttcctagaagtggatatgccatatttttttaaccactcctattggatatttgttttttatttttttgagatggggtcccactctgcagtgtacaatatcatagttcactgtaacgtgtatctcytgggctcaagcgatcctcccacctcagcctcctgagtagctagtcttcagtagctagactataggtgggcgccaccacacctggctttttaaaaaattttttaaaaacttttttatgaacacgaggtctcactatgttgcccaggctgccctcaaattcctgggctcaagtgattctcccaccttggccttccgaagtgcagggattat

SEQ ID NO: 782395 - DNA, 608 bp, Homo sapiens
aatacatagtacaaacagcaactctttctgatatgcttgcatttaaaatcaggctttttctcccttttggaaaaacacagtccttgtttgctttagggaagagtaaaggtcagtgcgctgcattgcattaatttcgaagggaaagatgagaagacatcttgaaaggaatggctggctttctagagaatagtagaggcttaataggtgtcatagaaaaaccagggttggacagtggtagtaaaacggcaaaacagattttattcagaaaaactactgcagtaagaggagagagacctcggtacagaactgctccactgcgaatacaaagaaaagtaggaattgatggcgggggagccggatgtcagtggatggaaaattattacgaggaaacacaggggtgtgcrttcttgctgaaggcaggccagagttatcagacatcacctgagggatggagggggatgtggaacctaatcggctgtctagggtgatcagatactgaagttgggggattctggtcaaatcaatttagcaggattcttggtaaaactgggcgatgcaaagacagatgcgttgagtacaaagtccaggctttattgggaagaggattt

SEQ ID NO: 782396 - DNA, 596 bp, Homo sapiens
tgctactggcatctggtgagtagaggcccaggatgatgctgtgatcctcaggtgtgatcctgttgagaatgaaacactgtagactttatgaaaacatacaagaccctcatcatttttcctttgcctgagctccctccccagaggttacctctgttcatggttttgtgcatccgtctagtccccctrttacgcgtttacaggaatatggtttgcaacagtgttttcatctaaatagaattatacaaaatagcgatttctgatttctcttgcatattgcacattcttcttatacttcctccctacctttatctgacacagaaatgctgtatgtccagaacttctatcagaggcacctatggaagtctaagggaagaccacatcgcttttaaaaaccctaaaattttgtagtcactagatgaaaatattcagccagtgacccaaaaaattgctaccaatgagactctccattttgccatgtagccagaacttactttgatctatgtgcctggggtagtgaccaagtaggtgggtaggagtaatctcagggaaacttgaggccccagcctcatggctagggtcataatttgaacccaggt

SEQ ID NO: 782397 - DNA, 630 bp, Homo sapiens
acagaggagctgctgtatgtagcacagcattgcacaagagcttatttcagtctagtaaacatttataggagcctgtgtcatttaatcatcaagcctcgcactgtggctcacacctgtaatcccaaaactttgggaggctgaggcaggcagatcacttgaggtaaggagttcgagaccagcctggccaatatggcaaaaccctgtctctactaaaaatacaacatttagccaggtgtggtggtgcacacttgtcatcccagctattccggagcctgagacatgagcatcgcttgaactcgggaggtggaggttgtagtgagctgagatggcaccactgcactccagcctgggcaacagggtgaaggccctttctcaaacycctcaagtatttggcttcaactttatgccgggcatgtagatgaaaagtcggctatgacctgtccttgacaagcagatgtaactccttgattgaggctagtaggtttttaagacctgaataattgagtttgcagaaacctactgtgtgccttcaggtaaatggagagtggggtttggtctagcaacgaagcatctagaaggtccctttggccttaccggctctgttttaggtaagtccacgtctgagtacca

SEQ ID NO: 782398 - DNA, 629 bp, Homo sapiens
tttgaaactagcctggccaacatggtgaaatcctgtatgtacttaaaaatacaaaaattacccaggcatattggtgagtgcctgtcatcccagctactcggaaggctgaagcaggagaatcgcttgaatctaggaggctgcaggttgcagtgagctgagaaggcgccactgcactccagcctgggagacggaatctcactctgtcagtcacaacaacaacaaaaaaatagagcacagctatgttttgagttcttaagcaagggcaagcttaccaggcacttacagagaaggttgacgaggatgacagggaactaattgggggagggatgccatggttgaaaacatggctggggcagcgagaagttaagatgaagtcccaagagtcgcaagaacatgcagttccaggacrtgattctctgcagggacaaagagagacagcagctacaagtctataggcagtgacaaaggatctgagatcccatcagagtagacttcaagttggagaaaccttttattggcacaggcattccttgttaacttgacagggtgaagctgtaatttttcaaaaacagtaaaagctggtttctcctaaactattctccttgtggtagtagagatcagtgggtcag

SEQ ID NO: 782399 - DNA, 616 bp, Homo sapiens
tctacccccatctcgcccccaggactggcacgacaggcccacggcagattagatcttttcccagtactgatcggtgcgtggaattccagccaccacttctgattcgattccacagtgatcctgtcctctgagtattttaaagaagcctgggaataaaaagtaaggtgcttttaaagtgtgacaagggtcaaccaatatagtcagactcatccttaaaagaccttaagtcactcatccctggccactcctgctgtkggcccactagcacagtcctcaacaccacaaggcttctggagccgtggggcacacctccacgggcaagccccctgcccggtcacccttcccatcacaggatctggcgcgatgctgtgggaactgttgcaggcgttggctctgaagctgctcagagtctgccctcacagcaaaagggaactcctgactgcctggcacttaggaggagctgacagcctggccgtaggtccagggtttaaggctgtgcggtgggtagaacagagaaagccgagatggccacggggtgtggctcacaattcactgttcttggcaggaagggggcagccactcaccattgtcaccccagtcagtgttccaggagttg

SEQ ID NO: 782400 - DNA, 567 bp, Homo sapiens
aggaccttgggcctgctttataaaagcttttagagatcctttgagattgcaatgagattagtgttctgctcattagtgttctgcctctccagcttgcagaacacggcggttccctaattcaaccgcaggcgagattacaccagggtagttgaggctgacgcgaaggccagccacagaaaggcctagctctgggccgggcatgctggctcacgcctgtaatcccagtactttgggaggctgaggygggcgaatcacgaggtcaggagatcgagaccatcctggataacacggtgaaaccccgtttctactaaaaatacaaaaaaatagccaggcatggtggcaggcgcctgtagtcccagctactcgggaggctgaggcaggagaatggcgtgaacccgggaggcggagtttgcagtgagccgagatcacgccactgcactccagcctgggcgacagagtcagactccatctcaaaaaaaaaaaaaaaaagaaaggcctagctcttggatccagctaggtcctgttttcctcccttggggccctgggaacagatacccatctcgcaag

SEQ ID NO: 782401 - DNA, 637 bp, Homo sapiens
gatccagctaggtcctgttttcctcccttggggccctgggaacagatacccatctcgcaaggctgatggaagatacaaggagacactcttttgaaagtgcctaccctgcaccaggctcagagcagcgccatctgggagaaacttcctcagtcactgggagcgtgaaaagccatctccttatacataggacagccaacgtttgcatcccagagtcatcatttctattttcagaagtatcctaatttggatgaaaaataatggaaattgtactatcagtgacaaggccttaaaagttgatttgttctgctgtcttgactgccaaagcaaagcatgtcccaaacaccaggaaggctgagtgggttgggaatgggtggcaggtggcccccagcactctgatgtggtttgatgatacgcttccaaccctcgaatgggaaaagcctgtggctggcaccgccctcctgggacttgcgcaagccasgaagctgtgtgactgtgtgtgtgcacattctgccagagtccaggtcagcacgtcagagggtcatgagacagcccggccctccgggctcttagggcagaatatctagatgtcttctacagggctctctactggtcccgttaccatcttggccacattggg

SEQ ID NO: 782402 - DNA, 462 bp, Homo sapiens
gtgtgtgtcatatccgccgaccctcgtgggggtgtatcctgtctgccgaccctcgtgggcgtgtgtcccgtctgccgtccctcgcgggcgtgtgtcccgtctgcggtcccttgtgggggtgtgtcctgtctgccgaccctcgtgggggtgtgtcctgyctgccgtccctcgcgggtgtgtgtactgtctgccgtccctcgcgggtgtgtgtcctgtccgccgtccctcgcgggtgtgtgtcctctctgctgtccctcgagggtgtgtgtttcctgtctgccgtcccttgcggtgtgtgtcccctgtctgccgtccctcatgggtgtgtgcggcacctgcagctcccgggagcgggaacgtcggggacaagagctgaagggacgaaggacactggagatggccagggggaaactcggcgtgactctctcttagggctgtgtgagggttttcaaaccctcatcc

SEQ ID NO: 782403 - DNA, 462 bp, Homo sapiens
gtgtgtgtcatatccgccgaccctcgtgggggtgtatcctgtctgccgaccctcgtgggcgtgtgtcccgtctgccgtccctcgcgggcgtgtgtcccgtctgcggtcccttgtgggggtgtgtcctgtctgccgaccctcgtgggggtgtgtcctgtctgccgtccctcgcgggtgtgtktactgtctgccgtccctcgcgggtgtgtgtcctgtccgccgtccctcgcgggtgtgtgtcctctctgctgtccctcgagggtgtgtgtttcctgtctgccgtcccttgcggtgtgtgtcccctgtctgccgtccctcatgggtgtgtgcggcacctgcagctcccgggagcgggaacgtcggggacaagagctgaagggacgaaggacactggagatggccagggggaaactcggcgtgactctctcttagggctgtgtgagggttttcaaaccctcatcc

SEQ ID NO: 782404 - DNA, 608 bp, Homo sapiens
ttctccggtgtcagcctcccaatgtgctggcattacaggtctgagccaccaggcaaggccctggcacttttagcgctaaaaagggaaaagtctcaggcgggccaggatgggctggtcaccctagatccattgcgcccttgatttccagatgggacccctccccacccagccacacaccctgggggaggagacctcctgctgtctcatgccttcctgcgaraccctttgtcccctgcaggcccctggttctggcgcctccagccctccgggacagctggtgtccccgcggacccgcacggctgcaccgcttctgggaggggctgcccgcccaagtgagggtggtgcaggccgcctatgctcggcaccgagacggccgaatcctcctctttagcggtgagtggggccggcggcggggcgcgctggggccggcgcggggagcccacccctgacctcccggcctccaccctgcagggccccagttctgggtgttccaggaccggcagctggagggcggggcgcggccgctcacggagctggggctgcccccgggagaggaggtggacgccgtgttctcgtggccacagaacgggaagacctacctggtccgc

SEQ ID NO: 782405 - DNA, 608 bp, Homo sapiens
ttctccggtgtcagcctcccaatgtgctggcattacaggtctgagccaccaggcaaggccctggcacttttagcgctaaaaagggaaaagtctcaggcgggccaggatgggctggtcaccctagatccattgcgcccttgatttccagatgggacccctccccacccagccacacaccctgggggaggagacctcctgctgtctcatgccttcctgcgagmccctttgtcccctgcaggcccctggttctggcgcctccagccctccgggacagctggtgtccccgcggacccgcacggctgcaccgcttctgggaggggctgcccgcccaagtgagggtggtgcaggccgcctatgctcggcaccgagacggccgaatcctcctctttagcggtgagtggggccggcggcggggcgcgctggggccggcgcggggagcccacccctgacctcccggcctccaccctgcagggccccagttctgggtgttccaggaccggcagctggagggcggggcgcggccgctcacggagctggggctgcccccgggagaggaggtggacgccgtgttctcgtggccacagaacgggaagacctacctggtccgc

SEQ ID NO: 782406 - DNA, 526 bp, Homo sapiens
ttaggtgggacaattatgttcttcttgtccctaatgaggctctcagggaatctggtcccagtggccaaaggaggttcctacaaatgcctgctctgtgattgccccaaacatttacttacacagaggactaagaccatgagcccctactcctcacacactcaggacccgcctgtgtttccaagacattccaactcccacagtaagtagaagcattgaccagttatgtagaaatgaggaacaactgagagtgacagcaccaaccttctccaggaaaggtcgcagaggtgaamaattaagtatgtgttggctcagatgtgaagttcttttaggaatcttctttgctacatcatccagatacaggaagtaatgagtaatgtacagagaagtgaagtacaggagtcctgaatccatcagttgtcacttgagattaacccagtaatcatcagtcattcctccagtctctttatgagctgctaactagttgggtggggaactgaatgtaccagagacacacacattctcagag

SEQ ID NO: 782407 - DNA, 526 bp, Homo sapiens
ttaggtgggacaattatgttcttcttgtccctaatgaggctctcagggaatctggtcccagtggccaaaggaggttcctacaaatgcctgctctgtgattgccccaaacatttacttacacagaggactaagaccatgagcccctactcctcacacactcaggacccgcctgtgtttccaagacattccaactcccacagtaagtagaagcattgaccagttatgtagaaatgaggaacaactgagagtgacagcaccaaccttctccaggaaaggtcgcagaggtgaacaattaagtatgtgttggctcagatgtgaagttcttttaggaatcttctttgctacatcatccagatacaggaagtaawgagtaatgtacagagaagtgaagtacaggagtcctgaatccatcagttgtcacttgagattaacccagtaatcatcagtcattcctccagtctctttatgagctgctaactagttgggtggggaactgaatgtaccagagacacacacattctcagag

SEQ ID NO: 782408 - DNA, 608 bp, Homo sapiens
ttctccggtgtcagcctcccaatgtgctggcattacaggtctgagccaccaggcaaggccctggcacttttagcgctaaaaagggaaaagtctcaggcgggccaggatgggctggtcaccctagatccattgcgcccttgatttccagatgggacccctccccacccagccacacaccctgggggaggagacctcctgctgtctcatgccttcctgcgagaccctttgtcccctgcaggcccctggttctggcgcctccagccctccgggacagctggtgtccccgcggacccgcacggctgcaccgcttctgggaggggctgcccgcccargtgagggtggtgcaggccgcctatgctcggcaccgagacggccgaatcctcctctttagcggtgagtggggccggcggcggggcgcgctggggccggcgcggggagcccacccctgacctcccggcctccaccctgcagggccccagttctgggtgttccaggaccggcagctggagggcggggcgcggccgctcacggagctggggctgcccccgggagaggaggtggacgccgtgttctcgtggccacagaacgggaagacctacctggtccgc

SEQ ID NO: 782409 - DNA, 579 bp, Homo sapiens
ccaacaacccagagttgttgggaaaatgaagtaaggcccagtgtgtccaagtgcctggcagagaagagcccacaggcagggagtgcctaccttgtgttccagggcgacctcctcaatggggcgcacccggtggccttggtgctcctgactcagactgcagatgaggcagatgggctcatcgtgatcctcacagaagagcagctggacctgcttcaggtggcgcttacactgtggcaggggctgggggcttaggcttcccgggctcttcctttcatgggagtcctggcaccgggggcagccaggtgagcggctgcctgaggcctgggggtgcccagaaactgcctcggggaagctgcaggaatcacgcacacaggtaccgtcaactgggtctccttcctgggcgtggcarcggggactcgcagccgtgtctggtggccttcctggggacatgcagtggaaaaaccccctgaatggcaaacccaagttgcttacacagaggtatcacaaagcacagcggacacagcccttgcctgagatgtgcgagttctcagttagactctgcccacttcctagcttgtc

SEQ ID NO: 782410 - DNA, 564 bp, Homo sapiens
agaggtgcaatttaagctaaacatccccttaggggaccaattaacagtgattccataggaatcgttgcgcagcacctctgcctgttctgcaatgcaatcttcctaaacaagtacgttcattttttctggccaggttcaattttgtttacaaataggtttttaagggcggtatgcctcaattataggagcagattatggtaaatactgagatcagaaagcatgtgtaactgtgtcatagagtgattacatctaggcattattgccagccaaggttgataaatatgcccaataagtataattgttctstgtgtcagcccttgttgaaggaatactcacagcagtggtgataactgctatcatagctaccatgaaattactcattgtgactggttgtcccgctttcctcaggttttcttctgccatctgtgacagcttcttgatctgtccccaggtgggtggctgtgttcgacaggtgttgctcgtgacagttggggtcctcctcagcgtcagtctcaacatggctgcaactgggccgtcctcgggatcctcccggagtctcttcct

SEQ ID NO: 782411 - DNA, 633 bp, Homo sapiens
ggtgagcgcggggtccgcaggctcctggggtctgcagagagattgggagagggaagctgggcccggactcctgggtccggaggaggcaggggccagattccaatatccaaagagtgactgaggatggggtctgtgctcccggcttcttgggtctgtcgggaagtttggggctgggatttggagctctggaaaggagctgaggtgcggagctgaagtccagacaagactggcaaacccgggactgaagcggggacctatggaggggagcaggcaggcatccggggctggggccctgggctctgggtgcctgggaggggcagggctgccaggatggtggtgggcagagagagcccatacttttcacccagcccgcttcacatgccccctccgatgccctaggactggctgactcgctatggttacctgccgccaccccaccstgcccaggcccagctgcagagccctgagaagttgcgcgatgccatcaaagtcatgcagaggttcgcggggctgccggagaccggccgcatgggtaggtggcccccacccctacccagccctgcctctgcacccagcctgaccaccgcccaacagcctttagacctcagtgtgctcctggaacacggagctgtg

SEQ ID NO: 782412 - DNA, 665 bp, Homo sapiens
atgtagcctcaggatcctgtgatgattgcattatctgcacaaattgtttgtagagcatgtgtgtttgaacaatatgaaatctgggcatccaaaaggaacaggatggctgcaattttcagggaacaaaggagataaccattgggcctgactgcctgyggggccagacaaaacagagtcatatttctcttcttacaaaagtgaataggagaaatttcgctgaattctttttctcagcaaggaagagccctgagaaagagaatgcattcccagggataggtctctaaaatggccactctgggaatgtgtgtcttatacagttgtaggtatgggatgaaattagccctggtctcccgtagcacccccaggcctactaggattagaaaattcctgcctagtaaattttagtcagactggttgtctgttctcaaaccctgtctcctgataagatgttatcaacaataatgcgtgccctgtgggacatgacacttcatcagcatttctaatttcaccctagtccagtgatctcgctctgcccccatttgccttgtgatattttattgcccttgaagcttgtgatctctgtgacccacaccctatttgtacacccctccccttttgaaatccataataaaaacttgctggttttgtggctcaggaggcatcac

SEQ ID NO: 782413 - DNA, 604 bp, Homo sapiens
ttttgctgagagttttaatcataaagggatgttggattttgtcaaatgcttttactgcatctattgagatgatcacgtgattcttgttttaaattctgtttatgtagtgtatcatatttattgactcctgtatgttaaaccatccctgcaccccggtataaaacgcacttgatcatggtgtattctctttttgatatgttgttggattcagtcggccagtattttgttaaggattttagcaactatgttcaccaaggatattggtctgcagttttcttttttgaagattcattttggagctgatttccagttttattatactgtggtctgagagagtgcttgatataatttcaattgtcttaaatttattgaggcttatttttatggcctatcatatggtcartcttggagaaagttccatgcactgttggatagaatgtgtgttctgtggttgttggatgaaacgttgtgtatatatctgttaagtccatttgttccaaggtatagtttaaatccattgtttctttgttgactttctgtcttgatgacctgtctagtgctgtcagtggagtattgacatcccccactattactgtgctgctgt

SEQ ID NO: 782414 - DNA, 682 bp, Homo sapiens
taatacatattttccatgaagttttgaagatcctatgtatttaaatttattttcaccaattttatttctcttcctcatatcccagagttaactaattttctaaacttggtgttcagtactaccatttttgttatttcacacactacataaatatctaatacaaaaacactatcttgtattgcactgacaaaatatatacgtatttttagaaacttcttgtttttcatctttatttgtaataattgattcatgttgattcataaagctttgctcaggtatggttaaacaactgctaaattccagtattctattgtatgaaaacgccaaaatttgtctatctaatttttgactgatggtcatttctaattttgcctcatagcaaaaagtgctacagtgaaaatatttgctttatatacaagtctttatataaaagtgcagtggattcactaggctacatacctacacacacatacacatgtaattttttactttttgggttagtggattkttccctagatttgtgttgccaaactgctttctcttatgttgatactgatttatattcccatcagatatgggaatttatttcttttttcttttctacatctgtatcttcacctggtacagttacctttttaaattttgagggaaatggtttatcacgtgtgcttattggattttt

SEQ ID NO: 782415 - DNA, 627 bp, Homo sapiens
tttctaaaagtttgatctatttaaaaatgctaagatcttgattattggctctctaaatcctgcagttcaggacattttgaacaagctgcagaattctaaaagacagaatacgtattgagaagaatataaaatagccaaaagccaatggsttatccttatgccagtcatagtataaagtattcaaaaacacttgtttaatttatgttccagctaatatttgacagttattacatagaaacacataataatatgatttattttatatgtgaaaagataactttacaactttatgaacagcaggtaaattgaggaaagatgctactagcagtaaatatgctcacagtcagactgaaacctgagtctcctttgaaaattgattatgggctgggttcagtggctcacacctgtaatcccagcactttgggaaggtgaggtgggcaaatcacttgagcccaggagtttgagaccagcctgggcaacacagggagacccccttctataaaaaataaaaagagaagaaaagaaaaaagaaaattaattatggatagatatcaaattggaaattaccattgattaaatggattgttactgttgttgtcattgttttctcaattaattgcattaata

SEQ ID NO: 782416 - DNA, 593 bp, Homo sapiens
gagtgagttcatgtcctttgccgggacatggatgaagctggaaaccaccattctcagcaaaccaacacaggaacagaaaaccaaacactgaatgttctcactcataagtgggagttgaacaatgagaacacatggacacaaggaggcgaacaacacacaccagggcctgtcagggggtgggcggcaaggacagggatagcattaggagaaatacctaatgcaygtggggtttaaaaccttgatgactggttgatagatgcagcaaactcccatggcacatgtatacctacgtaacaaacctgcacattctgcacatgtatcctggaactcagagtaaaaaaaaaattttttaaaaaggactttgctctgcttagaaatgggaataattatgacagaacaatattaatggaaaacacatggtagatatgaatgaacactgtgaaacgttaggaagcagggaatgaaaaattgcctccttgacaatagtaaaatttcaacatgatccctgagaaccatcagatttttaaatagcattttctccccgctaccctgcatagggtttgagtttctagcaggctcctaggcgatgcgag

SEQ ID NO: 782417 - DNA, 478 bp, Homo sapiens
aatttggttaaaattctaagtttacttagtcaaatgtgtgacctggatccgtgagtctctttcctcatctataggatagggattataatgtatcattttaaaggtagttgtcaagagccaatgttttaaatatttaaatagccctatagagaacgtggagcttcatgaaagagaaaatatttctttctttgttttctatgcctatagcctactcagacattgagtttatgtatattttgtacttactattgaatcacacactggctcattgcaatatcattatatctgaaagaagagacactaggggatagtggtagagagaaaaaaaggaattttttttttktttttttgagacggagtgttactctgtcccccaggctggagtgcactggcaagatctcagctcactgcaagctctgcctcccaggttcacaccattctcctgcctcagcctcccgagtagctgggactacaggcg

SEQ ID NO: 782418 - DNA, 613 bp, Homo sapiens
ttgggaatatagaatgtcttaaaagttgaatctcaataaatcagttttatgcagtgttctgatatgttatactcattttgcttctaaaaccttctagaatcctgtataagactagttaaccaattgggaacaacgttagcaaatatttccacacacacacacacacacacacacacgcacagatggccagagttttgcttaaacatctttctattgcagtcagaactattccttcatagagaaactaatgtgtatatttttaataacaggtttatattattgaaatgactgtcacacatgctgacccagaggctgtgaggacaatagcagtcctacagttgtacagaatttaaaaaggaatgaaatattttatatcaaatatgaacttggttgtacttgttgcaatagatgracttaatttaaagccaaaagcatatttcaattcccttatttcctaacacaaagtaaaagaggcagatggatactgtcatataagaacaagtttgaccaaaatggtcttaactggaaggttaatgataataaattaaattaaatgtaaacaaccaaatgaaactgaatgttctgccagaagcagcaaaaatatatctcagag

SEQ ID NO: 782419 - DNA, 514 bp, Homo sapiens
tactaccagtcttcctccttaaacctctatatctgatctctcttacatttttctactgtggttgtccatctatctgtttgtgtagcagtgtctctatttgtgtctctttgttttcttttagttccatatctttatgttattattatgaccatcattatcatcttagtcataactaccattaataaaccaataattgtgctagaccccttatatatatatattaaaattgatcttcgacayatcactgcaagatatatgtatatgcaggtgtgagtctgagtgtatataaaataaacctttttagatgagataccatgctcaaggagattaaacacattgctcatgatcacgctgctaaatatctactagaatatatctcacagtggctagaaaaaaatgggcctactagggctgtgattctcaaattttaactgtgcatgcaaagaatctggggatctttttaaaatgcagattctgatgaaacgagttcaggtggttgcctcagatactgcat

SEQ ID NO: 782420 - DNA, 455 bp, Homo sapiens
gagagctttctcaatatgattaagaaacacgtcctcactggaactccttggatgaaaaagtagacaaaaatgtatattctcagtgaattgaaaagattttgccaggagaaagttaccctgctgtaaaagaggttccctttcttacttaggttttgagaaaggggcctgaagtttgtgctttacctctgtttacccaacatgatttcctttcagcagttataactcccttattaagagctttactgagatataattcttacacaatacaattcaatcatttaaartgtgcaatgcaaggattcatggtatattcacaattgtgtacaccgttactgtagctaattttagaatattttcatcaccgtaaaagaaaacctgtttagccatcattttcctacctctttatcccccaatccaaagtaaccacagatccactttctgtgcctatagatttg

SEQ ID NO: 782421 - DNA, 528 bp, Homo sapiens
aagcaggaaagaagctgaagtgaggttaaagtacaggtttaaaaagtatgcacatatatattttgttaactgtcctcatttgttcagagccaaacaggctgttagggagaaaactacaaaagaagggaaacacaaaagcacttatcttcaacagaaaataagtcaatccctgakaattatttcgtgatttacacagaacaatgcaggcatatagatacatgttccctttaatgtcgggtcttcgcaaaagctatgtgtttatactgccacaaaagtgacggtagccatgccacattaatcacgttttgtttaccagctaaatcctaatggcctttgagaaatggctcagtaagagcaggctctccttagggccacctctaatcaagtgattagactgattgggaaaatggcatgacccatcaaataaacccttggtatcacgtgtttgttttttaatcactcattgccaacacgagattattatttttcaattgtacatttttccctatgattatgtctgtcaaggac

SEQ ID NO: 782422 - DNA, 528 bp, Homo sapiens
aagcaggaaagaagctgaagtgaggttaaagtacaggtttaaaaagtatgcacatatatattttgttaactgtcctcatttgttcagagccaaacaggctgttagggagaaaactacaaaagaagggaaacacaaaagcacttatcttcaacagaaaataagtcaatccctgataattatttcgtgatttacacagaacaatgcaggcatatagatacatgttccctttaatgtcgggtcttcgcaaaagctrtgtgtttatactgccacaaaagtgacggtagccatgccacattaatcacgttttgtttaccagctaaatcctaatggcctttgagaaatggctcagtaagagcaggctctccttagggccacctctaatcaagtgattagactgattgggaaaatggcatgacccatcaaataaacccttggtatcacgtgtttgttttttaatcactcattgccaacacgagattattatttttcaattgtacatttttccctatgattatgtctgtcaaggac

SEQ ID NO: 782423 - DNA, 659 bp, Homo sapiens
aatgacaaattttttagttgtttgtcacatattacaaccattctatatgttattcattttccaaatataaaagagttaccattactagatggaaaattatattcagaaatgcagacatgtccttggtaggaaaaagatagaaacgcacaacgagcttcactcactaaaccaaatttcttaaatttcaaaaagacccattattcacaggtcaaatttgtcccttgatcagtatacagaaaacaataaggtttagtcataaacagtaaagcagcatgtctggaaggaaagagactagaaatgaaacaaaatgagatatgggccrtctaaggctaccccagtcctcactttcaccccccttcacctagacgagtacatgctgaacaagcaccaaaaacaaccaataaatgaaaggaaactcaaaggtcacttggggtcattattttcacatacctttgaataatgagagcatcacatgtcagccagaggagaacaaaatgtcacattctccagctaaaggttggccttggtcaaaggtcacagaagggaggccaggaaataacctaagaggttaggctgggtgcacaaagaaaggtcaccaaatgtcaatgaaagcatgcagctgtttggagatgaaacaactgaggcacccttttgtgctg

SEQ ID NO: 782424 - DNA, 640 bp, Homo sapiens
catcaaatattgcacggggcatatttctttaaaaattattggttatgaaacaggaaaagttcccttatcccccttgcagggtgtgcagtgggggtgtggctggcttcttcagtgccctgctgctcacacctctaggggaacatgcagatgggcaggttgcggggctccaaccccacagcagtgtccagaggtgaatgtttacagctgaagccccagtggatgtgtgttacagaggactrtttcagcttagccatctgtaggcggcttgtgttagctcaattagacccctgccttatcacaagcacagagggctttctgtatcccggggtttcttgccttggtgtactgaaagaattggatcgcacgtgggcttggagattgagtgcaaggttttactgggtggaagtagctctcagcagattggggagccagaagggagatggaatgggaaggtggttttcccctggagtcgcgctgctcagtggcctggactctcctcccaccaccaggaccaaactccacgttgttccgctggtcaatggcctgctggcctgctgaggcctgttggtgtgctcctacgccagtgggtccttctcgacatcccgccgcttgtgtgttcctctgcttgtgtgttcctctc

SEQ ID NO: 782425 - DNA, 640 bp, Homo sapiens
catcaaatattgcacggggcatatttctttaaaaattattggttatgaaacaggaaaagttcccttatcccccttgcagggtgtgcagtgggggtgtggctggcttcttcagtgccctgctgctcacacctctaggggaacatgcagatgggcaggttgcggggctccaaccccacagcagtgtccagaggtgaatgtttacagctgaagccccagtggatgtgtgttacagaggactgtttcagcttagccatctgtaggyggcttgtgttagctcaattagacccctgccttatcacaagcacagagggctttctgtatcccggggtttcttgccttggtgtactgaaagaattggatcgcacgtgggcttggagattgagtgcaaggttttactgggtggaagtagctctcagcagattggggagccagaagggagatggaatgggaaggtggttttcccctggagtcgcgctgctcagtggcctggactctcctcccaccaccaggaccaaactccacgttgttccgctggtcaatggcctgctggcctgctgaggcctgttggtgtgctcctacgccagtgggtccttctcgacatcccgccgcttgtgtgttcctctgcttgtgtgttcctctc

SEQ ID NO: 782426 - DNA, 572 bp, Homo sapiens
ggttttacctgtacttttgtacatatcagatgtgctaattaggaagtcacttatcttttccttaaagtaggtttcctaaggacatgtatttggcaatattggtttagcaagaattactgtatgtgcttgaaagtaactgtacttctttaaaaatatyacccgttcagaagtgttgccagtgaagcctggcctccccccactcctattagttctgattagggaggtttgatgcccgtcactggtgtaatctggaccttcctttgtgactcattctttctctcattttctcagagcaaatacaaatcgcccatcaaatgacaagtgaaagcacagggggaggcgaggggagggaatcagggccgaaatctgttagctatttggagtaattggttatttgctgtgtttgctggttgggaagcagagcacatacttcacggtctctcctgttacgggggctggagtcaccctccgatattggatcctcgttgccggagcccttggctcggggcgccttttccctgcttggcattcctgtggtctcctcgggagtgcacccctcctccctcgctgca

SEQ ID NO: 782427 - DNA, 564 bp, Homo sapiens
tctgtctcccaggctggagtgcagtggtgcaatctcggctcactgcaagctctgcatcccgagttcatgccattctcctgcctcggcctcccaagtagctgggactacaggcgcccgccaccacgcccggctaatttttgtatttttagtacagacggggtttcacagtgttagccaggatggtctcgatctcctgaccacgtgatctgccygcctcggcctcccaaagtgctgggattacaggcgtgagcaccgcgcccagccttaaaatgctattttttttttttttttttttgagacagagtctcgctctgtcacccaggctggagtgctgtagcgcaatctcggctcactgcaggctccgccccccgggttcatgccgttctcctgcctcagcctcccgagtagctgggactaccggcacctgccaactcgccgggctaattttttgtatttttagtagagacgaggtttcaccatgttagccaggggtcttgatctcctgactcgtgatccacccgccttggcttcccaaagtgctgagattacaggcgtgaccaccgc

SEQ ID NO: 782428 - DNA, 564 bp, Homo sapiens
tctgtctcccaggctggagtgcagtggtgcaatctcggctcactgcaagctctgcatcccgagttcatgccattctcctgcctcggcctcccaagtagctgggactacaggcgcccgccaccacgcccggctaatttttgtatttttagtacagacggggtttcacagtgttagccaggatggtctcgatctcctgaccacgtgatctgcccgcctcggcctcccaaagtgctgggattacaggcgtgagcaccgcgcccagccttaaaatgctattttttttttttttttttttgagacagagtctcgctctgtcacccaggctggagtgctgtrgcgcaatctcggctcactgcaggctccgccccccgggttcatgccgttctcctgcctcagcctcccgagtagctgggactaccggcacctgccaactcgccgggctaattttttgtatttttagtagagacgaggtttcaccatgttagccaggggtcttgatctcctgactcgtgatccacccgccttggcttcccaaagtgctgagattacaggcgtgaccaccgc

SEQ ID NO: 782429 - DNA, 490 bp, Homo sapiens
tccttaagcccttttaaatctgaagactatgttttttctaatttcagagaaatgctgttctattatttttcagaatcctgtctcttacctgtggatatgggatgttggaacttcttgctgtagctcccatttttaacttttttcctgtggtttctatgtctttgtgctttactgggtactgagagaattcctcagttctctcttagctttcatttacttttcacttctgtgtgttcarctattgtttaccttcagtgattcagtttttagtttctttgattctttaataaattttttttttattttttgagacagagtctcactctgttgcccaggctgaagtacagtggcacaatcttggctcattgcaacctccacctcctgggtgcaagcaattctcatgcctcagcctcctgagtagctgggaccacagacatgtgccaccacgcctggctaatttttgtaattttagtacacacggggtttcgcc

SEQ ID NO: 782430 - DNA, 600 bp, Homo sapiens
ttttcacttaataaatgatgtttaatgctgactactgataacatttcagtaaagataggtcattgcatgtggaaatgaactttcttatcagcattagttcacagtcgatagttgggctatggtttgaacttcagttaaaaagttcaaggcggggcatggtggctcatgcccataatcccagtactttgggaggccgaggcgggtagatcacttgaggtcaggagttcgagaccagcctggccaacatggagaaaccctgtctctactaaaaatgcaaaaattagccaggcgtggtggcgmatgcctgtagtcccagctactcgagaggctgaggcaggagaatcggttgaacctgggaggtagaggttgtagtgagccgagattgagccacttcagtccagtctagacaacagaccaaaactcaagtctcaaaaaaaaaaaaaatcaaagttcaaggtagattttgacctttaggtagactttgcttttttaggtttactctcatactcttaattaaaaatattcatggattcagaaacaccaggcatgaattctatgaatcatttttgtagtatcaaagttagttttggccagaatatg

SEQ ID NO: 782431 - DNA, 564 bp, Homo sapiens
gaagaattgtccatttcagcagtcgcagcttgagtttcagcaagcctcatcaccatgggctaaggggctctggggttctaaattaactttttttttttttgagatggagttttttgctcttattgcccagcctggagtgcaatattgtgatcttggctcactgcaacctccacctcccgggttcaagagattctcccgcctcagcctcccaagtagctgggattacaggcaccgactaccacggccagctaattttttatgtttttagtagagacagggtttcaccatgttgtycaggctggtttcgaactcctgacctcaggtgatccacccacctcagtctctcaaagtgctgggattacaggtgtgagccaccgcacacagccctaaattaactctaaatcctgtctaggtcacaaggactgcaacttctaggcaggtcctactgctgtgctggcctaagagccagtggacttggaggggcacatgaccagtcagggtggcaaaggcagtactcgcatcacccctcccccaacctcaggcagcacagtttgcagctccaaa

SEQ ID NO: 782432 - DNA, 564 bp, Homo sapiens
gaagaattgtccatttcagcagtcgcagcttgagtttcagcaagcctcatcaccatgggctaaggggctctggggttctaaattaactttttttttttttgagatggagttttttgctcttattgcccagcctggagtgcaatattgtgatcttggctcactgcaacctccacctcccgggttcaagagattctcccgcctcagcctcccaagtagctgggattacaggcaccgactaccacggccagctaattttttatgtttttagtagagacagggtttcaccatgttgttcaggctggtttcgaactcctgacctcaggtgatccacccacctcagtctctcaaagtgctgggattacaggtgtgagccaccgcacacagccctaaattaactctaaatcctgtctaggtcacaaggactgcarcttctaggcaggtcctactgctgtgctggcctaagagccagtggacttggaggggcacatgaccagtcagggtggcaaaggcagtactcgcatcacccctcccccaacctcaggcagcacagtttgcagctccaaa

SEQ ID NO: 782433 - DNA, 439 bp, Homo sapiens
gagagctttctcaatatgattaagaaacacgtcctcactggaactccttggatgaaaaagtagacaaaaatgtatattctcagtgaattgaaaagattttgccaggagaaagttaccctgctgtaaaagaggttccctttcttacttaggttttgagaaaggggcctgaagtttgtgctttacctctgtttacccaacatgatttcctttcagcagttataactcccttattaagagctttactgagatataattcttacacaatacaattcaatcatttaaartgtgcaatgcaaggattcatggtatattcacaattgtgtacaccgttactgtagctaattttagaatattttcatcaccgtaaaagaaaacctgtttagccatcattttcctacctctttatcccccaatccaaagtaaccacagatccactttc

SEQ ID NO: 782434 - DNA, 599 bp, Homo sapiens
aaatatataaatatgtgtgcatatattcacttatatgtacacatatatacacacgtattcaatatgttatatatatatctcctatctacacgatatattaggctctcatttattaaatgaactggggtgccagcacatctctarcatgatcttccagtgtttatcctggagtattatttcttcatcttctatctcaaggaagcgtacgtacatcctttctttacccaaacatgctgcctgatatacctaccctccccaacctgacgttctgatgttactgtcatatctgaaattttgcattctgagaaatttatgtccccaaactgcatttaggcaactactcttataggtgaaaacatctgattaggtggtagtggttgatggattatagtcacaagataatacttctttaaaatttgaagacttctgcatcttaaaaatatcactgttctgtgaagttgtctggagttttaccaatatgagctgacatatattgcttcccaggaaagagattggaaattcaccataaaactctaattactttttggttatcttatgtatctgaattttgtttgagatgtcatgacatgacaaaatcg

SEQ ID NO: 782435 - DNA, 584 bp, Homo sapiens
ttcaaaaaatagatacacctataggatccaaaacccaatcaagagagagaagatttcggttaccagaaagtttcaggaaggttttcaggtgtcttatttattgttttgggagacactggggtaacaatgtgaacacgaaaacattttttgattaataccttcctcagaacccagttaattttwcctgggctctaaccgtaaaaagtaaaaacaagatgacagagtctcttatttttattattttagaaggacttgttcctgtaaattgtaaggaactttataaactaaagttctgttctaatattttattatttatcacctaaaaaagaagagtgggtatacggtgcactttaacttgagagtgagtcacaatataataacagaatgtaattacaattatttgcggttttaaaaagtaaacccaaatgctgtactttttaaaaccaagaaaaaaaatatttctttttctactgcatggataaacagcagcattgtgtttgaatgaggagaattagagcatacattctgtcactgaaattttaaagtggtaccaatttctccaaaattaagattagtagtgtgaa

SEQ ID NO: 782436 - DNA, 595 bp, Homo sapiens
aagggttcatgaggtttaatagcacataacattctctcctagggaataaaactgtgaaaaggtatcctgagtggaaaatccactttacgattactttcaaggtagttttgatagtatattatccttttcccatcaatcagggataatatagatgtttatattgattttatttacactgaattactctcaaattctacttcataaaagaatgtcataattcattttgttttgcttttgaaagctcacatgtacattccaaagcatacctcttatccaaggcagccactgaaagacttggggaatcaagtaataaaakggaaataatatttaaattatttgttaattgagcattaggtttctctcaaactttctcataatggtatatgaattaactcaaattaaatatttcaaacttgtagtagttaccaatagtctaaaaaccagtcttctgatcatcttgatcagctaagaaaattgaaagagacaaaaaaaattatatatattatatagatagatagatagagctagagtgagtgaactaacaattgtattttgctgcattagcaaaatatatattgcccaggatgctactact

SEQ ID NO: 782437 - DNA, 604 bp, Homo sapiens
tggaagaccccgcctcagccctgcccttggggagtgactagaaacctgccctgagctgactcatcacagagctctgggggtggctctggtccctggaacgccggccggcccggcaaaaacctgcagcatgagctgaatggccccgcacagagagagggatgggtgcacgcaggtacaggctgcctaaaaaccctgacaagaaaagggaaggtgagacgctgccgcgcaggagccagggcccgtgctctggagctgcaattccaggtacactgggcaaggcaaccgccycgccagaaccacagccttcccagctgccacggtgctgcctgggctcttgcgctctaacaaaggggccccgggaacagacgcggtaaaccagcctcagtggaggaagccacacatggcagctacacagcacgcctgtgccgcaggcaactcacctggtccccagccctcaccaggtcagcagacacagaaccaggctcaccagagttgggccgtggggtgacacggttcacggggcacgtgttctgatggaccctaaggaaaatcagcatgagaccggcttttccgtgcacgccatcaacaagccttgattctcact

SEQ ID NO: 782438 - DNA, 609 bp, Homo sapiens
tgctcactaggtcctcaatataatggacaagtgtgatatcttgtggaaggaaaaggcaatcaagagccctgagaatgaaattataacatagggttagagagttgatatacctctgatttaggacagtgaaggtatattgctggcctttccagctgaaagcaaactgcttctggtgggcatatgggcagtgaagaaagaaaagcaattttatctgaggaatgtgagccattttaaattatcaggtccagagaggcattaaattgagacagcagtcataccctccttcccccattgagctatgtattcatctcttgaaatataaccaagcccttattataaagatcataagatgtttgttttatttattgtcttttttctttgtcctcttccttatccatgcatgcttgcttgtatctagtcatttctatagagggtrgacattagttattgataaacttgaaatcctgacccctggagctaccctcagaatcgatgaacttgtttttcttttaaagaacagtgatccataggtcatgcagacctccttgatgacatccacaagtttgattggaactgatgagatctagattccagggagtgcaaagagat

SEQ ID NO: 782439 - DNA, 591 bp, Homo sapiens
ttctgatttctacccacctataactatgtctgatttaaaacctgctttccagagaaaaggcctagtgggtagggtaagaggttttcatctcctgaaatctctgttttaactttctgtaagctgaggattctcaggaaaggaagatgctgtagaatttggttcaaagggctcaccactcggatgaaaagaaaccccaagccagagcgctgacctggcagctggaggagggggcatggcagacgagcagaccctgtscttctcatcggtctttgcctcttgtctatcttccaggccctggccgacttggtgcattcacacatccagtcaaacgagctgtgttccaagcagctgaccctgagctgtccgctctgtgtcaatcctgtctgcagggagactaaatccttcttcaccagccagcagctgtgacccccgccggtggaccccgtggcgttaggcaaatgcccaacctccagatacctccgatgtggagagggtgttatttagagatcaaggaaggaagtcatccttccttgatatatatacagcctttgggtacaaattgtgtggtttcttgaggattggactcttgat

SEQ ID NO: 782440 - DNA, 591 bp, Homo sapiens
ttctgatttctacccacctataactatgtctgatttaaaacctgctttccagagaaaaggcctagtgggtagggtaagaggttttcatctcctgaaatctctgttttaactttctgtaagctgaggattctcaggaaaggaagatgctgtagaatttggttcaaagggctcaccactcggatgaaaagaaaccccaagccagagcgctgacctggcagctggaggagggggcatggcagacgagcagaccctgtccttctcatsggtctttgcctcttgtctatcttccaggccctggccgacttggtgcattcacacatccagtcaaacgagctgtgttccaagcagctgaccctgagctgtccgctctgtgtcaatcctgtctgcagggagactaaatccttcttcaccagccagcagctgtgacccccgccggtggaccccgtggcgttaggcaaatgcccaacctccagatacctccgatgtggagagggtgttatttagagatcaaggaaggaagtcatccttccttgatatatatacagcctttgggtacaaattgtgtggtttcttgaggattggactcttgat

SEQ ID NO: 782441 - DNA, 591 bp, Homo sapiens
ttctgatttctacccacctataactatgtctgatttaaaacctgctttccagagaaaaggcctagtgggtagggtaagaggttttcatctcctgaaatctctgttttaactttctgtaagctgaggattctcaggaaaggaagatgctgtagaatttggttcaaagggctcaccactcggatgaaaagaaaccccaagccagagcgctgacctggcagctggaggagggggcatggcagacgagcagaccctgtccttctcatcsgtctttgcctcttgtctatcttccaggccctggccgacttggtgcattcacacatccagtcaaacgagctgtgttccaagcagctgaccctgagctgtccgctctgtgtcaatcctgtctgcagggagactaaatccttcttcaccagccagcagctgtgacccccgccggtggaccccgtggcgttaggcaaatgcccaacctccagatacctccgatgtggagagggtgttatttagagatcaaggaaggaagtcatccttccttgatatatatacagcctttgggtacaaattgtgtggtttcttgaggattggactcttgat

SEQ ID NO: 782442 - DNA, 570 bp, Homo sapiens
ccgtctcacatggccatcttcagtacttcctatatggcttcagtttcatttcactggctgtttaaggaccagtactcttcatatgacagctgagtatggcacatgatctcctcaattcaggtgggttcttcagacccactgccacctcctgtggggcccaggacaagggtatacttgaaggcacatatatggtatgtgggatatagcaagctaacaaactgggaaatatgttctgtcctcctatgttgacaatagaccttgwacacaacctggaaggatgagctcttgaactctctgagttcctgcacaagtgtagaggcctttggagagttgcctctgactgacatgctttcctgcttctcttcttgccgccggctctttctggccttgtggggagcctcacagacagcctggatggactctctggtcttcatgcccagttccactcttgcccctgcaaacagctatctatcccttggccaccattcaggtcaagacttgatccactgatggcacaacctccctcaggaggatggatctgaaaaaatgcctgcacagaccctgggagtg

SEQ ID NO: 782443 - DNA, 570 bp, Homo sapiens
ccgtctcacatggccatcttcagtacttcctatatggcttcagtttcatttcactggctgtttaaggaccagtactcttcatatgacagctgagtatggcacatgatctcctcaattcaggtgggttcttcagacccactgccacctcctgtggggcccaggacaagggtatacttgaaggcacatatatggtatgtgggatatagcaagctaacaaactgggaaatatgttctgtcctcctatgttgacaatagaccttgtwcacaacctggaaggatgagctcttgaactctctgagttcctgcacaagtgtagaggcctttggagagttgcctctgactgacatgctttcctgcttctcttcttgccgccggctctttctggccttgtggggagcctcacagacagcctggatggactctctggtcttcatgcccagttccactcttgcccctgcaaacagctatctatcccttggccaccattcaggtcaagacttgatccactgatggcacaacctccctcaggaggatggatctgaaaaaatgcctgcacagaccctgggagtg

SEQ ID NO: 782444 - DNA, 636 bp, Homo sapiens
catgtaacacactgagcacagtgcctagcaaatgaaaagcgccccaaaattgattgttttatattactatctcattgttatctacccactccactatgtgggtttatagaggaaggagtcatggcctctgcccttggsagctccctgtcctgatggaggagacacagtgctgcactcgacaacccactggttggttggaggaaacatgggtcttgcctcagggagctcccattttagtggaggagatgagccccagcctgttcttcctgagtcctctattttcctggatccttgctcatgagccgtggtatgccctcagcctgcccctctgccaccagtccacccatctcctcccttttcccctgcagccaggcctgccatctctagaaagcccccatctctcctttctgtgtccttgggcccaggtgtccttgggttactgggtgacttgcttttcaggtcctgcctgtgtgtgccaagcttgttctcaagaagcatctccccaggatgctagttcctctctaaacaccgcccagattgcagacacaaaaattagacctgtcggtttgcacgctgtctgccttaaatttgcatttgattaagaagcaccagcgtcctcccacccatggttcttcc

SEQ ID NO: 782445 - DNA, 601 bp, Homo sapiens
ctgtgagaatgcaataaaagttaaaaatgtatttcagaacacagtgcaaatgtgtctccgcatttgatggattgcttttgagtccaacacttccggcccgtgggcaggcaggccccacagatgggccgcggcatctacgagcagagcgagagtgcgtctataagggatggtcgtgggaggcacacacttatcagatttcatttctgttctcttctcttggcatagtagctggagagtggtaaaatgggagatggagagacagtgaaacagctgaagtagcagcctcaattatttacagaccagattgtcagcctcccaaaaaatgaaaattgacctcacatctctcttctccttttcacagstgggagggtcaggcacattactattggccactctcagcattggccattctcacctccccatccctctgcatcctcagctaagctcaatgcagaaattcaaacgcaaggaacaggccctgccctcagagagcccccattctgatgtgggagagagggcagaagagttcaagacccagatcgttaacaagggaaggcacaggcataggacagaatgtatgtagccgtgggcactgtaaggg

SEQ ID NO: 782446 - DNA, 501 bp, Homo sapiens
ctttagcctgagaaagtttgactccttcctgaaagctgcacttatttcagccaggctgggctcaggtttcagggctcagggactctttctctccctttctccttcccaagactgaaatgcagctgcccagaagtgctgaggaggacacagagtcggcttcctaggcacaggcccagctctgtcccctttccttgtgctgggaccttcagtggaggggaggagtcagggagcctcagggaggcaaagcaggccacacakcgagggaagcggctggggagagctgactcgcaggaaatagtttcaccccagtggtccaggctggggttcccggtagctcctccaccattctccccgcaacacccaaccagctctgcttttaaaaggtgaacacaatctttcagaagctgcagcccaagccctttctggccctggcgaaccttccccattcccctcttgccaaacatttttataccaaaataattagataattaataatcatgt

SEQ ID NO: 782447 - DNA, 612 bp, Homo sapiens
ttattattaacttggaagtccagactttatttggatttacctgggttttagctcatgttctttttctgttccaggatcccatctaggataacacattactctcagtcatcagatttccttaggcccctctaggctgtgacagtttcttagactttctttgttttcgatgaccttgacagttttgaagagtactggtcaggtattttgcagaatgtcctgcagtggktttaactgatatttttctcatggctaaacagggattatgtgtttgggggatgaagaccacagaagtaaaatgccattctcatgacatcctatgaagggtctataccggcgatccccaccctttttggcaacagggaccggtttcatggaatacaatttttccacggacaggggttgggggatggggtggagatggttttgagatgaaactgctccacttcagatcatcagacactagattctcataaggagtgtgcaccctagatccctacaatgcgcagttcacaatagggttcaccttcctatgagaatctaatgctgctgctgatctgacaggaggtggggctcaggcggtcatgcttgcctgcacactcatctcctgctgtg

SEQ ID NO: 782448 - DNA, 613 bp, Homo sapiens
ctgtagatgtatcctttgatgcacaaaagctttttatttagatgaaatccattttatctgtttttttcttttgttggctatgctttgagtgtcatatctaagaaatcactgcaaaatctaacgccatgcagcttttcccctacgttttcttctgagagttttatagctgatggggttttttggaaatacaaattctaagcctcagacttaccaatgcagaatctctgctacccagaaagccacatttttctaaagcttctcagtaattttagactagtccatgttcctatctagtacaataatcttatctacagtatccctgacagacagtctttcatccttggcttrcataggcacagtgatgggaagcttattccatatcatacagaattaagttataagaaagtttctaaatattcaactgaaatctgtttcgctgtaacttctacctattgattcaaattctgtcatctgggaaaaatagaataagggtgtaactcttcatccaaatatttcaacatgttcttaatatagctcaaatattctctagaccaaaaagaaaaagaaaaagtccctagcttatttcagtacttttttcaatgacccagttttt

SEQ ID NO: 782449 - DNA, 543 bp, Homo sapiens
acacggcaaaacctcatctttacaaaagatgcaaaaattagccaggcatggtggtgtgcctgtagtcctggctacttgggaggttgatgtgggaggatagcttgagcccaggaggcacaggttgcagtgagccaagatctcacyattgcactccagcctgggcaacacagggagaccctacctcaaacaaacaaacgaatgaacaaaaaagaatgcttaaaattcaacaataaactcaaattaaaagtaggcaaaatatttgaatagatatttatccaaagacaatacacaaatggaaaatatgcacatgaaaatatgctcaacatcaataatcatcaggaaaaatgcaaattggaacatgagataccacttccccacaactaggatggctaaaataaaaaagacaggcagtaacaagtgttgacaaggatgtggggaaattggaactctcagagattgttagtggaaatgtaaaatggcgcagcagctttggaaaacagtttggcaatttctcaaaaagttaaacatggagatgagatacac

SEQ ID NO: 782450 - DNA, 626 bp, Homo sapiens
tgcctcctgaacttgattgatcctcccacctcagcctcctgtgtagctgggaccacaggcgcacaccaccactcctggttatttcttgtatttttagtagagacagagttttgccatgttgatcaggcttatctcgaactcctgggctcatgtgatctgcctgccttggcctcccgaagagctgggattacaggcgtgagccaccgtgccyggcctgttatttgttattgtctgagcacatattatgggatgaccccaaagttatgttatgtagcttgattctcacaaccatcccatggggaagacatttttcttttttctttcttttgtttttgagatggattctcgctttgtcaccctggttggagtgcagtggcacgatctcagctcactgcaaccttcggctcccaggttcaagcaattctcctgcctcagcctccagagtggctgggattacaggtgcgcaccatcatacccagccaatttttgtatttttagtggagatgggatttcaccctattggccaggctgttctcaaactcctgacctcaagtggtccatctgcctcggcctcccaaagtactgggattacaggcatgagccaccatgcccgcccagggaagaca

SEQ ID NO: 782451 - DNA, 491 bp, Homo sapiens
agtgaaagaacaaagcttccacagcgtggaaggggacccgagcgggttgcccgggagtggtacttctttgcccattggtagatcaaaaggccattttgggcccaagcaacccctatacctgggctaagggagtgcatcatgtgggcagggccttattttggcctcacttgttcatttcatagcctcttggtcaaggcagggttggggctcagcatgacccaggagaaagggaggggaggaggtggttgctggaatggaaagcttgtggagctcccaggctgcatggggtcygcaggaacctgcgggagggagccttaggagccagcttgaagagagccctgtaatcagaggtctgtggactttgagtagccagaggcgaagccgggttagtctttggtggcagagctccccatgcaggccccataaactctctatcagcatagttgaggactggctttgctgggttactctaaaaggatggggagaggagg

SEQ ID NO: 782452 - DNA, 609 bp, Homo sapiens
cttgtcacgagtgtgcatgtgtttcttccccaccagattgctagctcctagagagcagaacctgggtctcagccattgcaattgccacagcacctggtacatggaaggtgcccagccaaggtgtgtggttgttgaacaaagggatcctgccatgaatccctttgtaagtgcaatgttcttttgaaacagagagtactaactccctagtgtaatttattgaggactgggatccccaggatgagggaactaaagagcactgaggccctcctcttattcactgaggttaagtgaaatttcagatcagggtacttagaaggagaaagaacaaagagagcatgtttggaggtggaggatctgataagattccccaatctctctgtctctctctctctctctctctctctctctctstctgtctgtcacacacacacacacataaacacacacacacactcccataagaaagaaacactctccttgcttgcacctccagctctacccctaaacttctgcccttgagactccccagacacattgcaaagttatcacaaaggatgattgatgctgacaggcaagctctttggcttgaacagacccttgtttaagacg

SEQ ID NO: 782453 - DNA, 637 bp, Homo sapiens
ctgattccatttaattcaggagcaacttgtcaagaagttagtgtcggcagagcactgtgcttcctgagactgaagttctgggccctgcttactaggttctgaaaggctggatgaggagatagaagtgtccaggctcattccagtacaagcagaatgcagcatgctgcgaagaagccagaaagggcaactgagggctcggccagctggaattggcatcrgtgcatagggtgtgtgggggcacatgtgagatggtggggaggggacatgctacagaagtgatgtgagttttgatagaagggtgagattctggcagtagaggtaaaaaaaactagaaaaggaagggaggaggaactgtgggcttaatggcaggtagtgatgagtcctgtctggcttagagagatggaaaaggtggtgaaagaggagatgagatcagaaaaacaggttggggtgggatcatggctgatccgacatggagtgcactgggactcaactgtaggctctgagcagatatttgagtggaagagaccaatcaaagttcgtccccaaaggatccccaaaagagtcctgtgcccgctggtccttggagatgttgctgatcgatgagatcagccagccagggcctctcaagtttcacatc

SEQ ID NO: 782454 - DNA, 576 bp, Homo sapiens
cttttgaaaagtgttagtgtcctttgcccactttttatgaagttgtttttttcttgtaaatttgcttaagttccttatagatgctggatattagacctttgtcagatgcatagtttgcaaaaatgttctccctttctgtaggttgtctgtttactctgttgatagtttcttttgctgtgcagaagctctttagtttaattatatcccatttgtcaatttttgttgttgttgcaattgcttttggtgttttcgtcataaaatctttgcccatgcctatgccctgaatggtattgcctaggttgtcttccagggtttttatagtctggggttttacatttaagtctttaatccatctcgagtcaatttgtgtatatagcataaggaaggggtgcagttttaatcttcttcatatagctagasagttattccagcgccatttattgaatagggcatcctttctccattgcttgtttttgtcagctttgtcaaagatcagataattgtaggtatcttgtcttatttctgagttctgtcttcggttctgttggtctatgtgtctgtttttgtaccagtacc

SEQ ID NO: 782455 - DNA, 546 bp, Homo sapiens
taaactatctgaaaatgaaattaagaaaaaaatttcacctataatagcatctgctataatttggatgttttcccccacaaaactcatgttgaaatttgatccccagtgttagagatggggcataatggtaggtgttttagtagtgggggcgggtcccttatgaaaggcttgctgccatcctcaggtcaatgagttcttattctattagttcctggaagagctggttgctaaaaagagcctggcatctccccgctgtctctctattgcttcctctctcatcatccgaactctgcacaagctggcccctcttcacctttccaagcagcctgaagctttcaccagaygcccaatcttacagtcagcagaattgtgaaccaaataaacctcttttctttataaattacagtctcaggtattcctttatagcaacagaaaatagactaagaaagcacttaaatatgaataccccatttttcatgtgatatttcacattgcatgcctatatcaaaacaccccatgtaccccataaatatatgcacctactat

SEQ ID NO: 782456 - DNA, 700 bp, Homo sapiens
gcaaaggatccagaatgacaaaaacagttttggaaaagaaggacaaaatgcagtacgtttacttctcaacttaaaatcttatataaagctatagtaaccaaaacaatgaggcactgtcataaacatagacaaatggatcaatggaacagaattaagagtccaggaataaacccttatttttatggtcaattgacttgcaacacgggtatgaatataatttaacggagaaaaggttatcttttctacaaatatttctggcacaattggatactcatataaaaaatgaatatgaacccttttctcatataatataccaatattaactcaaaatgtatcatagacatagaaataaaagccaaaactataaaactttcaaaagaaaaataggacaaaatattttcttttttttttatttgcaatccatttatttgggtagacttgaaatacaacagggacattcaaaagtttgagcaataatttatgctatatttatagcatagccagatttcattcccagaatttctatctcccctgtgatrttttgctctgatttatgaatttatttgtactaaaatcaggtaagtcaagcatttattctaaactcccagtctgttttttataacttatgtggtttgtacactttccaattattaattccttcaattattcattcagcaaatattgactgtcttagagacac

SEQ ID NO: 782457 - DNA, 590 bp, Homo sapiens
atattaatattccttgctaggaaaagaatttagtggtatctctcctacttgacgcgtccatttataggctctctgcaagaagaaaaatatggctctttttgcctgaccctgcaggcagtcagaccttatggttgtcttcccttgttccctaaaaatcgctgttattctgttctttttcaaggtgcactgatttcatatcattaaaacacacatgttttacaatcaatttatacagtyaacacaattatcacagtggtcctgaggtgacatacatcctcagcttatgaagataacaggattaagagattaaagtaaagacaggcataagaaattataaaagcattatttgggaactgataaatgtccatgaaatcttcacaatttatgttcctctgccacagctccagccagtccctctgtttggggtctctgacttcccacaacacttgacaatgaattacctgtttaaaccatcctcttggaggttaggtttcaacatatgaattttggggggacaccaacattgagatcatattaaccagtaaacataagtaaatgtttccctgagttctatgagccatcatagcaaa

SEQ ID NO: 782458 - DNA, 594 bp, Homo sapiens
acaggtgcgtaccatcacgcccagctaatttttgtatttttagtggagatagggtttcaccgtgttggccaggatggtctcgatctcttgacctcatgatccacacacctcagcctcccaaagtactgggattacagtcgtgagacactgtgcccagcctatttccttttcttgtgaggagataggaatagaatggctgtatcacatggtaaatgtataacttctttttgagcccaggtctcactctgtcattcaggctggagttcagtggcccactgcagccttaacatcccagtctcaagcaatcctctcacctcagcctcctgagtagctgggaccacaggtgccagccataacacctcactaatttttttttttttttttttgagacagagtcttgttatgttgcctgggctgtagtgctrtgggggaatctcagctcacttcaacctctgcctcccaggctcaagcgattctcctgcctcagcctcccaagtagctgggactacaggcacacaccaccatgcttggctaatttttgtatttttagtagagatgaagtttcaccattttggccaggctggtctcaaactc

SEQ ID NO: 782459 - DNA, 451 bp, Homo sapiens
ctgagagaatgaagtgctctccgtaggactttgggaaagaacaactggaatcctgctcctggtctgtcctggattccaccctatatgcctttctccttggctaatttgcatctgtatcttttcaatgtaataaaccgtaaccatgagtttagcagcttttctgagttctgtgagtctttccagtgaatcatcaaacctgtgggtggtcttggggacccctgatacwcctgatttttcaagaggttttgcagtgaaaggagaaaaggaatgagtgacagctgcaggaggtattggcccaagatggggattctgtgtaagagaggagatactggggcagacgtggaggcccattgaaatgacaaagtagataaggataggttggtaatgcaggagaaatgttattgagaagataaagtggaaggggatccattacacagcgcctctgatagga

SEQ ID NO: 782460 - DNA, 560 bp, Homo sapiens
ggcaggctgattgtgggtgagggggcagggaaagagggatccctttgaacgtgagccaggtggaactggctttggttacccagggccttgtgacacccagtttgaagtcagaattatcatcaaatgtaaggatatgctgcacaaagagataaaatgtagttggggtgagggtgagggacagggaggaggcagaaaattcactatacactcaagttcccttaacacagtaatctgccttcatagtcaaatgtgaaaacaatttgaaattgtagcccccaatgtccttaagcccaatatgtcatcagtcactcctgcctatggccctatccccggacactcaagtcataacatgttatgatgtatggagggagagaacatcaggagcagcctcctcctacggccagaaccttgaaaaatccccatcaggggctggagtggtccctggaatgccatggcaattaaagcagtggctgcragaaggccctgggagagggggtcgggtggagcaagctgttttagtgttgaagccttaacatcgggaggttggaggcctctagagc

SEQ ID NO: 782461 - DNA, 518 bp, Homo sapiens
tcaactggcagactttattttcctggatatctctttccagctgaccaacatgatctgtgtgaacctaaagtagtgtggcagagcagaaggaaaactggctatttagagatagaggaattggcacatgatcttttattaggtatgagaccttagatgagtcatttaatttcagtgagcctcagagcttcttcatctataaacatgttcatttgttaattcagcacrtatttcccaagggcaaaatatgtcccagatgcagaggatgccatgatgggaatagattccatctagaaaggaagaacaatgattaaacaattaccctactgcagattatgggttgtggtgacaatgtaggtatggtgaagggcacagagcaggggctctgacctgtaatgaggtcaaggaaggtttccccagggcaacaatgttgaatagaggccaggagatggggtagggagcagtggatgggggtggggtgagagagagctacagttgtataaggatccaaagctggaggg

SEQ ID NO: 782462 - DNA, 547 bp, Homo sapiens
ttaactggatcctttaatgcagtgactttagctgcatcatctgcaaaggagtttcccttttcacactggagttccctttcagatgccctctgcaatggattatagctactcccttgggcagcaaaatggcgtctaacagatttagaayttccaagtgatgttttataacggaacccttagcaattaggagttctcattccttccagatagcagcatgagcatgaagcaccagaaaggcatacttagaatcagtggaaatgctaactcttaaaccctttcccaactgtagggcaataagagccaataattcagccttttgagctgaggtagaagccagtaagggctgagcttcagttatgtcatgttgactgacaatagcatacctggcttttctgtttccctggtgcacaaagctacttccacatgtaaactgctctacctcaggattatctagaggctcatcctttaagtacaaccagttggaataaacttgctccataacttgtatgcgagaatgatctagggtgcctgtgaattcaggcagata

SEQ ID NO: 782463 - DNA, 547 bp, Homo sapiens
ttaactggatcctttaatgcagtgactttagctgcatcatctgcaaaggagtttcccttttcacactggagttccctttcagatgccctctgcaatggattatagctactcccttgggcagcaaaatggcgtctaacagatttagaatttccaagtgatgttttataacggaacccttagcaattaggagttctcattycttccagatagcagcatgagcatgaagcaccagaaaggcatacttagaatcagtggaaatgctaactcttaaaccctttcccaactgtagggcaataagagccaataattcagccttttgagctgaggtagaagccagtaagggctgagcttcagttatgtcatgttgactgacaatagcatacctggcttttctgtttccctggtgcacaaagctacttccacatgtaaactgctctacctcaggattatctagaggctcatcctttaagtacaaccagttggaataaacttgctccataacttgtatgcgagaatgatctagggtgcctgtgaattcaggcagata

SEQ ID NO: 782464 - DNA, 547 bp, Homo sapiens
ttaactggatcctttaatgcagtgactttagctgcatcatctgcaaaggagtttcccttttcacactggagttccctttcagatgccctctgcaatggattatagctactcccttgggcagcaaaatggcgtctaacagatttagaatttccaagtgatgttttataacggaacccttagcaattaggagttctcattccttccagatagcagcatgagcatgaagcaccagaaaggcatacttagaatcagtggaaatgctaactcttaaaccctttcccaactgtagggcaataagagccaataattcagccttttgwgctgaggtagaagccagtaagggctgagcttcagttatgtcatgttgactgacaatagcatacctggcttttctgtttccctggtgcacaaagctacttccacatgtaaactgctctacctcaggattatctagaggctcatcctttaagtacaaccagttggaataaacttgctccataacttgtatgcgagaatgatctagggtgcctgtgaattcaggcagata

SEQ ID NO: 782465 - DNA, 547 bp, Homo sapiens
ttaactggatcctttaatgcagtgactttagctgcatcatctgcaaaggagtttcccttttcacactggagttccctttcagatgccctctgcaatggattatagctactcccttgggcagcaaaatggcgtctaacagatttagaatttccaagtgatgttttataacggaacccttagcaattaggagttctcattccttccagatagcagcatgagcatgaagcaccagaaaggcatacttagaatcagtggaaatgctaactcttaaaccctttcccaactgtagggcaataagagccaataattcagccttttgagctgaggtagaagccagtaagggctgagcttcarttatgtcatgttgactgacaatagcatacctggcttttctgtttccctggtgcacaaagctacttccacatgtaaactgctctacctcaggattatctagaggctcatcctttaagtacaaccagttggaataaacttgctccataacttgtatgcgagaatgatctagggtgcctgtgaattcaggcagata

SEQ ID NO: 782466 - DNA, 545 bp, Homo sapiens
tctgtcttttatattttagcttttctcagccaatccttggtgctcgaagaagttgattggaaactctcagtctgtggatgaacttgtaatcttcattgttggtatctcactgggctccctggtaaagccctgatgttgtaactttggatcatttttcttgggttagtcatacttccagagaaggcttttttaatctccttctctagtataaagatgactattaaaattctaagagcctgttaggagatgaagacttagggtgtttcagtttcaatrtgtaaacttttgctaactcaccacattttccatatgatattcccatacccaactctacatggcatctaatttattcccttaagagaataatcctccagtcttctgtcagagttgaagtgggaagtcatcttattacaaaggagaaatgatttgggagtccaaatctttctttataagaatttgaggccaggtgttgtggctcatgcttctattccctccctttgataggatgagacaagagaatcacttgagcccaggagttcatgacc

SEQ ID NO: 782467 - DNA, 545 bp, Homo sapiens
tctgtcttttatattttagcttttctcagccaatccttggtgctcgaagaagttgattggaaactctcagtctgtggatgaacttgtaatcttcattgttggtatctcactgggctccctggtaaagccctgatgttgtaactttggatcatttttcttgggttagtcatacttccagagaaggcttttttaatctccttctctagtataaagatgactattaaaattctaagagcctgttaggagatgaagacttagggtgtttcagtttcaatgtgtaaacttttgctaactcaccacattttccatatgatattcccatacccaactctacatggcatctaatttattcccttaagagaataatcctccagtcttctgtcagagttgaagtrggaagtcatcttattacaaaggagaaatgatttgggagtccaaatctttctttataagaatttgaggccaggtgttgtggctcatgcttctattccctccctttgataggatgagacaagagaatcacttgagcccaggagttcatgacc

SEQ ID NO: 782468 - DNA, 649 bp, Homo sapiens
tttatgcatatgttcgttttatacaaataatcccagaatcataagttgtttttactatttcttgcatgtggacccatagagaaatctttctacattccaacaccagaacagtgacaaaacaatctaagaattacaataggatgggatatatgggaactatgacaaggtaatctcagaggtatctgtaggcacagttcttagttcactctacaggctctgagttgaaggaacagagaggcccaatctatagtcaaatccaggaaactgaaccccctagaggatatatttattcatccatttattcattcaacaaatatggaatccctgctctgggctaatcactggcaacccagatagtaataagactcctctcaaatgacagagtcctrtgataggattgtaaaatggcatccaacttagagaatgagataggcaaagtggtgtgtgtgtgtgtgtgtgtgtgtgtgtgtgtgtgtgttcatgttttgtgaaataatacgttattcatggcatattagtcagggttccctagagggacaggactaataggatatatatatatcagatatatatatataccagattaaggatgggtctgccttccccaccccactgactcaaatgttaatctcctttggcaacaccctca

SEQ ID NO: 782469 - DNA, 496 bp, Homo sapiens
agctcagagagccagtgtccagtagttcctgaaatgtctgatcatttccttttccccaatgcagttacccgggtacaaggctggaggtctcctcggggaaggacgggagaaagattcactgcataaattgtcagtaatgtagtggggtccttcctcaaggggacctggtctccccttcattcaaggggttctgggtctgttaactgactcaagtctggaaattgattgaggggctgtgattctctgtttttataattcaaattagtcttttgtctatttgacctagaatttttctgtttgtataatttaagtaggaatgcagtatgyttcctatcaatttcacttctaggaaccctgtgattaattaaccaatgccagagctctacatgagtcatactattctgatttccactttgcctctgttgtccattacatagctatgcccaccttacctttgacagttgagtgctgccacttggcccatgccacctcagga

SEQ ID NO: 782470 - DNA, 553 bp, Homo sapiens
attgatttttcttgattttctgctgagagtgaagaaataggggttgagtatgaggattgaaaaaatgaagatatgaaagtcattgaaggaaatgagagaaagtgttaattaaagatgaaagattgagaggcagggctaagggacaagctaaaatgggagaccatgaaatttttagcacatcaacgccaacccrtacgactacacaattatttttccagtatattcctctctctcttcacaggtacagaacaaaggagacagggagtaatagtactattgattctagtttggaattttactaggtggtataacagaagcaaaaggatgaaaaagaatcaaagatgcttgcagaagagtgattcagatatctgtataacccatgggatctaggttgcatacagaaaaaaagtagtcagaaaggtgttaataaaatgtgaggaaaatggagtgatcaagggacaggaagtgcatatgaggtcaaagtgtaatggaagaatattttaaggactggacattgggatcagacggcaggatcctggagtactgcccaagc

SEQ ID NO: 782471 - DNA, 580 bp, Homo sapiens
cacattctttgttattatccttttgcgctgattgaaaggctataaaatgtttttatctcttggttttagtattgtaagcgagtatgattccattctggagatttgtgaaaaatatcttgtcttgagtaaaatgaaaccattaaacacacacacgcccctatgcttattagtaacaggttaaaaaaaagtcactctgataatgacagcatgtgctcacctgcaacgcaacttctcccgtgactgcctggttctacatcagagtctgaattcttttaccaaattatgtctatcatcaaaacaaatgtcyggtgcattttgtgctctaacagggctgagagggccagatctaaggaaggatgtcctgggcctgaaggagcctgggccttgcctgccctgctgctggctgggccttttggggtatacagagttgtctctcttgttggagccacgaatgagacagctggaaaacacacattttatttcatctgtgatgtcagggctgctgtgctttctcccagtcctgtttcacgtatgaccctcagagggctgcttagagaatagtttattctcacttatttta

SEQ ID NO: 782472 - DNA, 580 bp, Homo sapiens
cacattctttgttattatccttttgcgctgattgaaaggctataaaatgtttttatctcttggttttagtattgtaagcgagtatgattccattctggagatttgtgaaaaatatcttgtcttgagtaaaatgaaaccattaaacacacacacgcccctatgcttattagtaacaggttaaaaaaaagtcactctgataatgacagcatgtgctcacctgcaacgcaacttctcccgtgactgcctggttctacatcagagtctgaattcttttaccaaattatgtctatcatcaaaacaaatgtctggtgcattttgtgctctaacagggctgagagggccagrtctaaggaaggatgtcctgggcctgaaggagcctgggccttgcctgccctgctgctggctgggccttttggggtatacagagttgtctctcttgttggagccacgaatgagacagctggaaaacacacattttatttcatctgtgatgtcagggctgctgtgctttctcccagtcctgtttcacgtatgaccctcagagggctgcttagagaatagtttattctcacttatttta

SEQ ID NO: 782473 - DNA, 580 bp, Homo sapiens
cacattctttgttattatccttttgcgctgattgaaaggctataaaatgtttttatctcttggttttagtattgtaagcgagtatgattccattctggagatttgtgaaaaatatcttgtcttgagtaaaatgaaaccattaaacacacacacgcccctatgcttattagtaacaggttaaaaaaaagtcactctgataatgacagcatgtgctcacctgcaacgcaacttctcccgtgactgcctggttctacatcagagtctgaattcttttaccaaattatgtctatcatcaaaacaaatgtctggtgcattttgtgctctaacagggctgagagggccagatmtaaggaaggatgtcctgggcctgaaggagcctgggccttgcctgccctgctgctggctgggccttttggggtatacagagttgtctctcttgttggagccacgaatgagacagctggaaaacacacattttatttcatctgtgatgtcagggctgctgtgctttctcccagtcctgtttcacgtatgaccctcagagggctgcttagagaatagtttattctcacttatttta

SEQ ID NO: 782474 - DNA, 572 bp, Homo sapiens
caacagaacataatttaaaacactgcttatgtcatactcgtgaatgtgcacagagtgcctggtttcaagggttcctggatttacagtgagtaggtaaaaatggtcacttcccggcaggcccaggaactttaagactataagtaaaatctaaagtctgctttggtttggcttcctagcccccagaagtttttaaatctgagaatcctgtgcgacaaatgtagggagaaaatgtttctgaagaaaagctgtaatacacctcttattagattgtagctctatgcattgttttccagctcttgttatctacctacagactagacttgaattatcctaattcctccaatccaactttcttccagagttactaaaattgaatactgctctcttcctgaagcccwgtaagctgaaattatataaattttaaggaacaagtcatatgtctgatgtttgaggaacacccagtaccacaaccagagacattcaaactgcaaaccaggctgagaagtggatggttccatgctgtagacagatttttccgacattagaacagaactctgtatcataataagact

SEQ ID NO: 782475 - DNA, 572 bp, Homo sapiens
caacagaacataatttaaaacactgcttatgtcatactcgtgaatgtgcacagagtgcctggtttcaagggttcctggatttacagtgagtaggtaaaaatggtcacttcccggcaggcccaggaactttaagactataagtaaaatctaaagtctgctttggtttggcttcctagcccccagaagtttttaaatctgagaatcctgtgcgacaaatgtagggagaaaatgtttctgaagaaaagctgtaatacacctcttattagattgtagctctatgcattgttttccagctcttgttatctacctacagactagacttgaattatcctaattcctccaatccaactttcttccagagttactaaaattgaatactgctctcttcctgaagccctgtaarctgaaattatataaattttaaggaacaagtcatatgtctgatgtttgaggaacacccagtaccacaaccagagacattcaaactgcaaaccaggctgagaagtggatggttccatgctgtagacagatttttccgacattagaacagaactctgtatcataataagact

SEQ ID NO: 782476 - DNA, 616 bp, Homo sapiens
gctctgtcacccaggctggagtgcagtagcgcaatcttggctgactacaacctccgcctcccgtgttcaagcaattctcctgcctcagccttccgagtagctgggacaacaggcgcctgccaccacgtccagctaatttttktatttttagtagagacaggctttctccatgttggccaggctggtctcaaactcctgacctcaggtgatccacccacctcggcctcccaaagtgctgggattacagacgtgagccaccgctcctggcctctattgtcttaagggcagaaaataggcttgtgtgatttcagtaaattggcttttcagtattttgattgaggtttactttggggtctactacatggttaaattttgtgaactgtccatttgtgtttgagaatattaataaaaaggcatctatttgttctgtatatttctattagaataagcttgtttactgacttactcaaatgtatgtcatttcttttggtttacaaaatcttttgatttctgagagtgaaatgcatgttaagtgtcctattactgggtctatttctccttgtattttgcttgtaattttcatttattatgccagatgcatgaacgttatgataaa

SEQ ID NO: 782477 - DNA, 616 bp, Homo sapiens
gctctgtcacccaggctggagtgcagtagcgcaatcttggctgactacaacctccgcctcccgtgttcaagcaattctcctgcctcagccttccgagtagctgggacaacaggcgcctgccaccacgtccagctaatttttgtatttttagtagagacaggctttctccatgttggccaggctggtctcaaactcctgacctcaggtgatccacccacctcggcctcccaaagtgctgggattacagacgtgagccaccgctcctggcctctattktcttaagggcagaaaataggcttgtgtgatttcagtaaattggcttttcagtattttgattgaggtttactttggggtctactacatggttaaattttgtgaactgtccatttgtgtttgagaatattaataaaaaggcatctatttgttctgtatatttctattagaataagcttgtttactgacttactcaaatgtatgtcatttcttttggtttacaaaatcttttgatttctgagagtgaaatgcatgttaagtgtcctattactgggtctatttctccttgtattttgcttgtaattttcatttattatgccagatgcatgaacgttatgataaa

SEQ ID NO: 782478 - DNA, 653 bp, Homo sapiens
tctttcaaactcctaggagctcccattggcagaacctaataagaagcctgctatgaagggaaatgcaagtaataaaagccagctatcttgcaagtgcagtttgcagagtgctgtggtttgagtgtttgtcccctccaaaaaacttgtgctaaaattgagctgccagtgtgacagtattaagaggtggaaactttgagggtgattaggccatgcggactccgacctcatgggcggaattaatgttgtcatgaaagggtaagtttgacccctcttgtctgtgccctgcctcccttctcagcccatctgccttctatcattaaaggacacrgcaacgcgaccctcgccaaatgctgttgcctggatcttggactccctggcctccgtaatggtaagaaaatgaatttctgttcattgtaaattatccagtctcagatattctgttacagcaacacaaactagactgagaaatgtagttttagccccagcattacagaacagaatatagacaatgagtcgagagactaaggtaaacagtaggcacagtcctcctactcgcttccattgatttcctttacccgtgtttgaactgccacacaaaacaactcatgcttattcccaataagacgcagccataatttgtaccaatgacattg

SEQ ID NO: 782479 - DNA, 581 bp, Homo sapiens
ttcagtgcatttgctgactctcaattagaagctggaaagcctgagaaccagagcagagatattttgagagcctcatagggctagggaaacaaaaattggagtttggtgtctgtcagagtatagcaggacccacctggactttcagttgtggcctttagaggactacaccccaggagtaagagtaaaccagatagagtagcccagataaagactgaaacctatccttgaatcaactcaaactttacccctagcctaagtatcagcaaagagactgagaagctgagcaaaatgttttgcccacttacatggcyggggagatgtaaactgaagtttaggaagggccttgcaaccacttcaggctttcacttggtgccctggaagaactacatttttaagagaaagtgtgagtaagagataaattattcttcagaaaaggtagaaacacagtctgaaataaacggaatcactaattgaattaaggtaattcagccttaacgtcaccttacctgccattagtaaaagcaaatcttttttacaggaaaattacatggtccagacactcaaattatctctagtttttg

SEQ ID NO: 782480 - DNA, 528 bp, Homo sapiens
atacatcttttgttatttttgtgctccactgaggtgcagcaatctctcacctggattccttagctcttgtgatggtattttcgtgcgtggatggttatttgaattgatgtttctgtgagtggataagcattggaaatttctgttccgccttcttgttgacatcacctctcttggtgtctcctgaattaaggattttaaaagatctagaggcccaccataatatgctggcctaaacttgctyaacttgtaaagcttctgaatccctagaatgtagtattatattaatcaatcagattttccccaaagtatgattgtgttagctcaactgttagaatatttatctttttttaatgagggattttagaccctgtgtaatgaaaactaatttggactctatatgttttatacattttgaatttcatgcaacttgaatttacagacctaattaattttcattctctttttaagagactcaagtttagcttccataatatatatagggttttaagtcccttgtgttaaaaaaaa

SEQ ID NO: 782481 - DNA, 528 bp, Homo sapiens
atacatcttttgttatttttgtgctccactgaggtgcagcaatctctcacctggattccttagctcttgtgatggtattttcgtgcgtggatggttatttgaattgatgtttctgtgagtggataagcattggaaatttctgttccgccttcttgttgacatcacctctcttggtgtctcctgaattaaggattttaaaagatctagaggcccaccataatatgctggcctaaacttgctcaacttgtaaascttctgaatccctagaatgtagtattatattaatcaatcagattttccccaaagtatgattgtgttagctcaactgttagaatatttatctttttttaatgagggattttagaccctgtgtaatgaaaactaatttggactctatatgttttatacattttgaatttcatgcaacttgaatttacagacctaattaattttcattctctttttaagagactcaagtttagcttccataatatatatagggttttaagtcccttgtgttaaaaaaaa

SEQ ID NO: 782482 - DNA, 634 bp, Homo sapiens
ttcacagggggattacaatcacaggggcgtttacattcacagggggattacaatcacaggggcgtttacattcacgggcgttcatattcacaggggtgttacactcaaaggggcatttacagtcataggggcgtttacattcacaggggatttactgtcacaggggcattatacttcacctccttgagcacatccttcctttagctgagcaactttgagtctgataacgcaccttcatcattcaggggttagccagagacgtggatagatagaaatttgggtttctctttctgactcattttcttctgtgtctcctcggaggcaggtgtcccagtcttggtgttttgcttcttcagccagaaaaactgtggctttgcaaccaaagtgccygctggcccacatgccatgtgcacggactgcacctggcttcaagcctaaagctgtgagaatgggcactccctttacgtaactgtacttctcctgatgtggaccccctaactagaaatcttcattttttttgttcactcttctatggcttttcaagaatctgctttctttagtgaagtcccaattttatagtagtttttttgcaggagggttgatccgatagcatttaataattcattataaaagg

SEQ ID NO: 782483 - DNA, 603 bp, Homo sapiens
cataaaattagcaagcgttacaaccagcattcaaatttctctttatgtagctctaaagacgttctgccttctgtgactttaaagaggtagtaggtggggagaactgggtacttccttccactcctgttttggaaatcatggctggagttcaggggctggtacagatgggacatgacatgtttcccacatatgtcagaaaaaggttgagacccactcaaatcacattactgccattcagcactagccatttttcacataatggcacttgattatgaactcagtgagtttcttaagatgttttttcttattcatgcgaatgttttagttggtcaaatattatgtatttggtttatctttccattttaaatttatattgtatgttagatttaytgttaaaaatattcatatccgtagtatttatgatttatctaaatactgtaactttaaatctgtaacttttctattatagaaaaaacttgtatatacttaggatttcagtagttggacagaggtatctttaatattttttgcagtttccctttacaaaaaaactctcatccttgcagtaggagttccatgatttgaacccctggagcaaaatca

SEQ ID NO: 782484 - DNA, 475 bp, Homo sapiens
actttggccaaactttctcatgggcctgtgatggttttaaaatgtgaattattttaatgcacaatgtatattagtattttggggctaacgtaggaaacaaataacctgtcaacctctggtttgtctccttaactttgatgctgttattggatgtataagatttcccacattaatgtggaaaacttactycatctttgtttatgatttgtatcttctgtgtctaatgtgaaagttttcatatgttgtggccttgaatatttttaaagaatatttttgtatacattttaaagttttggtttttggctgggtatggtggctcatgcctgtaatcccagcactttgggaggcccaggtgggcggatcccttgagctcaggagtttaacaccagcctgggcaacatggtgaaacccgtctctacaaaaaaatatgaaaattagccaggcaagctggtgcacctgtagtcccagccacttg

SEQ ID NO: 782485 - DNA, 602 bp, Homo sapiens
gcaagagatctagaattaaattggagcctgaagatgtgaccaaattgctgcaatctcataataaaacatgaacaggtgaggagttgcttcttacggatgaacaaagaaagcagtttattgagatggaatgtgctcctggtgaagatgctgtgaacgttgttgaaatgacatccaaggatttagatactgcataacttagctgataaagcagtggctttgagagggtttgagaggattaactccaaatttgaaaatacattctactctgggtaaaatgctatcagcatcatatgctatggagaaatctttcatgaaagaaagagccaatcagtgcagcaaacttcactgttgtctttttataagaaattgccacagtcatcccaacttctagcaaccaccatcctagtcagtcagcagtcatcaatrtcaaagcaagaccttccatgagcaaaaagattacagttgttgaaggctcgggtaattgttagcattttttagcaataacgtatttttaaattaaagtttgtatgctgtttttatatacataatgctattatacgcttaatagactacagcattgtataaatgtaacatttctattc

SEQ ID NO: 782486 - DNA, 591 bp, Homo sapiens
ggactataatctttaaaaaactaaaaacagttaaaaagatcactggtaaaaaaaaaatgtcttacaagtttatacatttggtctaaactaggcacccatttaccatactgtttggtaaatgttttaaggccataaactgcttctataactttyagtaattgcttaacttgtctgttttacagccactaaattcaaggtaaggcctgagagcatacagtgttagccaggtcccctggctaggccggagaaagttatggtctctgcaatcttatacatctttaaaattgcttgcttactaggttttttatcaaaaataaaagttgctaagagttaacactgtaatgtgcttaagactattggagaaacagttttacatgcaaggtatagtattagtccattttcacatggctgtaaagacatacccgagactaggtaatttataaacaaaagcagtttaattgactcacagttccacatagctggggaggcctcaggaaacttataatcatggcggaaggggaagaggcacatcttacatggtagcaggcaaaagagagcatgtgagagagatggaaaaactaccatttatga

SEQ ID NO: 782487 - DNA, 603 bp, Homo sapiens
tgatagggcatttatacccagaatataaaatgatctcaaacaactctataggaaaaaattcaataacacaacttaaaaatgttcaaaagatttgaatagacttttctcaaaagaagacacacaaatgacaaagaggcatatggaaaagtgttcaatacccctgatcatcagagaaatgcaaatcaaaactacagtgagatrtcatcttaacacagtcaaaatggcttttatccaaaagtcaggaaacagcacctgctggtgaggttttgaagaaaagggaaacctcgtacactgttggtgggaatgtaagttattgcaaccactatgaagaacaggttggaggttcctccaataaataaaataaaatccagcatcctcactgctaggtatatatctaaagaaaagagaacagtatattaaagagatatctgcactcccttatttgttgcagcactgttcacaatagccaaaatgtgaaagcaacctaagtgtctgttaacagatgaatggataaaggaaatgtggtactttaacgcaatggaacactattcagtgattaaaagaaaatgagattctgtcttttgcaacaacataaatggaact

SEQ ID NO: 782488 - DNA, 603 bp, Homo sapiens
tgatagggcatttatacccagaatataaaatgatctcaaacaactctataggaaaaaattcaataacacaacttaaaaatgttcaaaagatttgaatagacttttctcaaaagaagacacacaaatgacaaagaggcatatggaaaagtgttcaatacccctgatcatcagagaaatgcaaatcaaaactacagtgagatgtcatcttaacacagtcaaaatggcttttatccaaaagtcaggaaacagcacctgctggtgaggttttgaagaaaagggaaacctcgtacrctgttggtgggaatgtaagttattgcaaccactatgaagaacaggttggaggttcctccaataaataaaataaaatccagcatcctcactgctaggtatatatctaaagaaaagagaacagtatattaaagagatatctgcactcccttatttgttgcagcactgttcacaatagccaaaatgtgaaagcaacctaagtgtctgttaacagatgaatggataaaggaaatgtggtactttaacgcaatggaacactattcagtgattaaaagaaaatgagattctgtcttttgcaacaacataaatggaact

SEQ ID NO: 782489 - DNA, 614 bp, Homo sapiens
tgtttttacatgttctttgtttgttctaaagatcaaaacaattgaactcctgaagatagagaatagaagtatgattatcagaggctgagaaatgtagtgggggggtggtcagaaacgagatggggatggttaatgcacacaaaaataaactgtttgaaagaatgattaagacctactatttgcacaaaaaggggattatagtgaataataatttaattttacattttaaaataactaaaagagtgtaagtggattgtttataacacaaagggtaagtgcatgagaggatggatatccagttttccataatgtgattattatgtattgcatgcctgtatcaaaatagctcatgtaacccataaatatatacctgtactgtataccaacaaaaattaaagataaaatttaatgaagattatttgctaagaacagggagcttgatagaaacagaaattktttttaaaaacggcgatcaaaaagagtgaggaaaattatttttatcttgaccctgaaaattaaaatgaagtctaacagttcaatgggattttcaattatcatgtctgtaaagagagtcttggcatggaagataacaaagagataagaagtgtatcttg

SEQ ID NO: 782490 - DNA, 639 bp, Homo sapiens
agacacttcaaagctcactaggcttttgaaaatatacttcagtagtaatcatggaattgcaaattgaggctgggcatggtgtctcacgcctgtaattccagcaatttggaaggccaaggcgggtggatcacttaaggtcaggagtgtgagaccagcctggccaacatggtgaaaccccatctctactaaaagtgcaaaaaaattagccaggcatggtggcgcacacctgtaatctcagctactcgggtggctgaggcatgagaatcgcttgaacctgggagacggaggttgcagtcagccaagatcgcgccactgcactccagactgggtgatagtgcaagactctgtctcaaaaaaacaaagaaacaaacaaaaacaaacaaacaaacaaaacccagcaaattgaraaggtgagattattttacccatcagattggcaaaatggaaaaagatggtgaatatccagtgttaataagagtgaagagaaatggaaactctagtttactgttgggaagtataaattggcacagtctttttggaatgtactttggctatatctattaaaatctaacatatgtgctttctcttcattatatcgattctacttctacatatatagcctagggaaatgtttgaaaa

SEQ ID NO: 782491 - DNA, 611 bp, Homo sapiens
tcttttggggttttggacttacttgggactagttgtccttgtcttcttgcctatttcccccttttggagtgggaatgtctattctatgcttgtctcaccattattttggaagtaggtaactctcttggtttcacaggctcacagttggaaggaaatttgccttagtatgaatcctgcyttgagtcttacctgtatctgatttagataagactctgactttggacttttgagttgatgttggaatgagttaagacttctggggctatgagatggaatgaatatattttatatgtaagaaggacataaatcttgggggccagatgtgaaatgatatggtttgaatgtatcccccaaaagcatatattggaaacttaatcctcaatgtaacagtattgggaggtggggcctaatgggaggcgtttaggtcatgagggctccacattcataaatagattaatgctagttatgaattataaaagaggataacgctgcaagttcaatctcttgttctctcttgttctctctttgcccttctgccatggaggatgcagcagcaaggcccttgccagatgctgacccctcacttttggacttcccaggctccagaacca

SEQ ID NO: 782492 - DNA, 611 bp, Homo sapiens
tcttttggggttttggacttacttgggactagttgtccttgtcttcttgcctatttcccccttttggagtgggaatgtctattctatgcttgtctcaccattattttggaagtaggtaactctcttggtttcacaggctcacagttggaaggaaatttgccttagtatgaatcctgccttgagtcttacctgtatctgatttagataagactctgactttggacttttgagttgatgttggaatgagttaagacttctggggctatragatggaatgaatatattttatatgtaagaaggacataaatcttgggggccagatgtgaaatgatatggtttgaatgtatcccccaaaagcatatattggaaacttaatcctcaatgtaacagtattgggaggtggggcctaatgggaggcgtttaggtcatgagggctccacattcataaatagattaatgctagttatgaattataaaagaggataacgctgcaagttcaatctcttgttctctcttgttctctctttgcccttctgccatggaggatgcagcagcaaggcccttgccagatgctgacccctcacttttggacttcccaggctccagaacca

SEQ ID NO: 782493 - DNA, 641 bp, Homo sapiens
ggctcaagggtaggagctattgtggatccttgttaattctccttgcactaaattcagtccctctgttgtcccacaccttttgtgtcccatgcaagagggactgtggtgtagtggtaggaacagatgagcaattcagtagtagttgaccctagaagggatgtagggctatctccttagggcaagaccayggcacaacctggggtatggattaatgttcatccctagtggagggactagtagagtccagggttcttgccaactgggacaggggtgcagggcaaggctccagccttggtggggtcatgaacactgggcaggactccaaaacagaggctcgtcgtatagactgctcaactggatggtaatcacgggaaaggaattgtctaggaggtgaggcccatccaagagcttgaggatctgacttagtatggcaggagtctctcaaaatctttgtgcctcagattgagacattaagagtgatttcaatctctacatcatgggtgggaaaggggtttccaatatattctcaagcctacgaacaaggcaaagctgagtcaataattgagaatgtacttgtgccagacactgttctaagtgcttcacacacattaactcatgtaatcccacctcatgggatacag

SEQ ID NO: 782494 - DNA, 588 bp, Homo sapiens
taagaatcaatcccatgacttttgccaaagcaaaagggaaaaagaaactccttccagggccaggcatggtggctcacatctgtaatcccagcactctgggaggccaaggcaggaggattgcttgagtccaggagcttgagaccagcctgggcaacatggtaaaaaaaaaacaacaaaaaaaacccatctctacaaaaaatacaaaaagtacctgggcatggtggcatgcacctgtggtcccagctacttggggggctgaggtgggaggattgcttgaacycagggggtcgaagctgcagtgagctgtgatcgtgccactgcactccagcctgggtgacagagaaagaccctgtctcaaaacaaacaaacaaaacctccctccacagggacactgctagcaggaaagatgatgaagcttggagctgctggagtcatcacctgaatctgagaataaagctaacagaggagagcaccacagacacgtcaaaggaccagcttgagttacctccctggaagtgaccatgtctgcaggtactggaaatttcaatcatgtgagccaataaattcccctcttctggggaaacacat

SEQ ID NO: 782495 - DNA, 621 bp, Homo sapiens
tcaaattgttacaaagttcatctagaaaagtccttgtccctgtggagttttaccccctgctcctctggccaccctcctgatggatcccggtggtgccaggcaggaatgggctgcttcgggatccactgagctcccagggcctccctgctgcttcctctacccctgtatttcgctcagctcagctctctaacttgactcagctccaggtaaagtcaagaacttcctcaaacagaccttcagcttctccactgggggcgtgtgttcgggagaggggggtctccctttcccacttctgcagttggggcactcacagtatttggggtgtctcctgggtcctgcaggagcagtccacttccttcagagggtctgtgggtcctctcaggattgctggtttgttcttgcagtcgacctggggctaaaattcacaatgcaagcctcmgcacgctgctctgtccggagctgcaacctagtcctgcctcccatccgccatgatccctggtcttgctaatattttactaaggatgtttgtgcctatattcacaagggatattaatctgtagattccttttttatactgtcttctctggttttgctctcggggtaatactagcttcataaaat

SEQ ID NO: 782496 - DNA, 662 bp, Homo sapiens
gtgggagggctccctctctctggccacgtcccagatccaggggaaggcacagatatgagtctgctattttctttttcttttctttctttcttttttagagactgagtctcgctctgtcatccagtctggagtgcagtggcacgatcttggctcactgaacctccgcctcccaggttcaagcaattctcctgcctcagcctcctgagtagctgggattacaggcacctaccaccatgcccagctaatttttttattttcagtagagacgaggtttcgccatattggccaggctggtctcgaactcctgacatcaggtgatctgcccgcctcggcctcccacagtgctggattccaggcgtgagstgccgcacgcagctgagtctgctgttttcagaacttggtccccacttgcagggagatgccactgaggacaccgctgaagagatcttgaaaaattgaagaacaaaaaatttatgcgagattaattcattgcactttagtgcttgtcagaacattactgagatggtcgctgccaattaataatgaatctttatgtagcatcatttattttattttccttagcattaggggctcgagtattgcagtcagcatatgtattcaattatttattaaaaacacaggcaagaaatgacaatacaagc

SEQ ID NO: 782497 - DNA, 636 bp, Homo sapiens
cccccggtcacccctgtgattggacatgagcgcttcaaccactgaaaatagccgggggcttcccttgcttttcttcgcctgggagtgaccctgcccccctccctcttcgccaccacccgagggtctccataattgccctttccaccccagctcctcccccagggtctttaccatggaggcttctgggccatgtcagccgtggcctggagttgggcctctttcgtggtgagattttgaacgacccaagccaagcgtggtgtgcccaccctgattctccacatctctgggggtggctgatcaccggctgtcccctgaccaggggctgtttcttatggtctcatggaaagagccaggcaaccacagaaatctcytgaaatgctgcagattttaacccagatggaggccacctcttcgctcttattctggaagatctaggagagaagcctggggttggcgacacctggtcgcatgtttcagatgaagttctgggattggaacctggagttggtgaacacccgggtcccatgtcttagatgaatttttgggacaggagcccgggcttggtgaatacctggtcccacgtctcagatgaagttctgcgattggaacctgggcttggtgaatacctggtcccac

SEQ ID NO: 782498 - DNA, 615 bp, Homo sapiens
tcggggcaatgtctgctttggggcccagtgtccccccagtttgtcagatagccgtgcttctgcgtcgctgcctcctccaccctaaaatctcagccgaggaggcccaggaggacacttggaatatgcagagggggagacgtggacgagggatgaccaacaaaccaataaaaccctgacctggaggcgaaggttctaaacacggagtggggagtcaccggtgtggggtctccttcacaagcggccttckaaatcagaagagattccttccctgcttatgccaggggaactaagaatcagcccacaggcagtggattggccaaagtgacctttcaggacgctggccttgtgcctctaacatctcccgaagagctgatgaagccgagccacttgctgttgtgtgttgaaaatggtgcaagaccctacacaatcatccctgaacccataatgctgatgctctgatgtaaaaggaatattttccccttgagataaaatgccatcagatgccatctgtgccgcctgtaattttagccataaatcctcgttgtatttattggagatttgtttttcaagatggctaattttagtctccaattcaaccgcacactaattttcttg

SEQ ID NO: 782499 - DNA, 570 bp, Homo sapiens
ccaaataatacataaatagtccaaacacaaaagtagcctgtaaaagcctgcgtgtaggtaggcgtcgcttcctgctgaaggcttttcctgagcacagatacctttcatgcctgagatgaaaggacatctacttcttagcccacatttccacatggaggccagagcaggttgttgcctgcaactctggaccctggaaggtgctgaaggttagctcgggattgcaaatcttgaaggtgcgagtgaacagaggggtgagggctttgaagcaggatttgcaaagggcttggggagggcgtggctgaaaggaaaggacatgggttcagggtggccctctcatatcaccacttatgcgctgagtgttctggccaaatcgcgcccccctcccaattcgtatgttgaaactttaactaactccckcgagtaactgtatttagagagaggatcttttaaaaggtaattaagttaaaatgaggtctttgaggtggatcctagtctaatctgattgatgttttttttaagagacgagcatgtacaggaagcacccgggctgtgcacacacaggaaagacca

SEQ ID NO: 782500 - DNA, 570 bp, Homo sapiens
ccaaataatacataaatagtccaaacacaaaagtagcctgtaaaagcctgcgtgtaggtaggcgtcgcttcctgctgaaggcttttcctgagcacagatacctttcatgcctgagatgaaaggacatctacttcttagcccacatttccacatggaggccagagcaggttgttgcctgcaactctggaccctggaaggtgctgaaggttagctcgggattgcaaatcttgaaggtgcgagtgaacagaggggtgagggctttgaagcaggatttgcaaagggcttggggagggcgtggctgaaaggaaaggacatgggttcagggtggccctctcatatcaccacttatgcgctgagtgttctggccaaatcgcgcccccctcccaattcgtatgttgaaactttaactaactccctcragtaactgtatttagagagaggatcttttaaaaggtaattaagttaaaatgaggtctttgaggtggatcctagtctaatctgattgatgttttttttaagagacgagcatgtacaggaagcacccgggctgtgcacacacaggaaagacca

SEQ ID NO: 782501 - DNA, 607 bp, Homo sapiens
atctcacttagagcctagctattcttggtttgcgcacagtactaacgaaggtggttagctgaccttcctgtctacaaattgaattcaacaaataaaaagggagaaggaaaagctgcaggtaataaaggccgataaaggtggctggtggtgtcttcatgggcatcagaaataggtaggattatttgaaagtagcctcactaatggcaaaaactgagcggtctagggccattttgtgaaggggcaaagggggagaccacttckcattgtacagagcctttcatttctcactggaaaataaatgatgctcataatgatagctctgagatttagttcaagggccactgcccaaactatcaaagagcatcgtgcattttacagagattttcatcccaaacataatttttaagatgataattagaggcgatcttccatcaaccagaaaccttggctttctcaaatgactaagtcagggaaggttatatgctacgggatccactgctctttgtgtggatggagatgacaattagagaatttaagggaagcaaagggaaagtggaaggtggagagggggatcaatcaggattgctttgcatcctggacatgaatg

SEQ ID NO: 782502 - DNA, 607 bp, Homo sapiens
atctcacttagagcctagctattcttggtttgcgcacagtactaacgaaggtggttagctgaccttcctgtctacaaattgaattcaacaaataaaaagggagaaggaaaagctgcaggtaataaaggccgataaaggtggctggtggtgtcttcatgggcatcagaaataggtaggattatttgaaagtagcctcactaatggcaaaaactgagcggtctagggccattttgtgaaggggcaaagggggagaccacttctcattgtacagagcctttcatttctcactggaaaataaatgatgctcataatgatagctctgagatttagttcaagggccrctgcccaaactatcaaagagcatcgtgcattttacagagattttcatcccaaacataatttttaagatgataattagaggcgatcttccatcaaccagaaaccttggctttctcaaatgactaagtcagggaaggttatatgctacgggatccactgctctttgtgtggatggagatgacaattagagaatttaagggaagcaaagggaaagtggaaggtggagagggggatcaatcaggattgctttgcatcctggacatgaatg

SEQ ID NO: 782503 - DNA, 626 bp, Homo sapiens
ttacatttgctgaggagtgctttacttccaactatgtggtcaattttggaataagtgcaatgtggtgctgagaagaatgcatattctgttgatttgcggtggagagttctgtagatgtctattaggtccacttggtgcagagctgagttcaattcctggatatccttgttaaytttctgtctcgttgatctgtctaatgttgacagtggggtgttaaggtctcccattattattgtgtgggagtctaagtctctttgtaggtctctaaggacttgctttatgaatgtgggtgctcctgtattgggtgcatatatatttaggatagttagctctttttgttgaattgatgcctttaccattatgtaatggccttctttgtctcttctgatctttgttggtttaaagtctgttttatcagagactaggattgcaacccctgcttttttttgttttccatttgcttggtagatcttcctccatccagaaaagggttcttttgagctccaattctaggtgctactcactttaataactctacaacttcaacttcagagttttacacttcaaatgggaatagtttgacaaattcaagctgattgcaataccctacaggatgaatatctata

SEQ ID NO: 782504 - DNA, 632 bp, Homo sapiens
tcttcatggcagcccctcccatcatagacctggaagcctaggaggaaaaaatggtttcgtgggtgggcccagggtccccatggtgtgtgcagcctaggaacttggtgccctgcatcccagtcactccaaccattgctaaaaggggctacggtacagctcagtccatggcttcaaagggtgcaagccccaaaccttggcagcttccacatggtgttgagcctgcaggtgcacagaagtgaagaactaaggttgggaacctccacctagatttcagaaatgtatggaaactcctgaatgcccaggcaaaagtttcctgygggggtggggtcctcatgaagaacctctgctagggcagtgcagaagggaaatgtcagagcccgcacacagagtccctactgggcaccacctagtggagctgtgagaagagggccactgtcctccagaccccagaatggtagatccaccgacagcttgcactgtgcacctggaaaagctgcagatactcaatgccagctgtgaaagcagccagatggggggtgctataccctgcaaagccacaggagtggagctgcccaagactatggaaacctacctcttgcatcaatgtgacctggatgtgaggcatggagtca

SEQ ID NO: 782505 - DNA, 632 bp, Homo sapiens
tcttcatggcagcccctcccatcatagacctggaagcctaggaggaaaaaatggtttcgtgggtgggcccagggtccccatggtgtgtgcagcctaggaacttggtgccctgcatcccagtcactccaaccattgctaaaaggggctacggtacagctcagtccatggcttcaaagggtgcaagccccaaaccttggcagcttccacatggtgttgagcctgcaggtgcacagaagtgaagaactaaggttgggaacctccacctagatttcagaaatgtatggaaactcctgaatgcccaggcaaaagtttcctgtgggggtggggtcctcatgaagaacctctgctagggcagtgcagaagggaaatgtcagagccygcacacagagtccctactgggcaccacctagtggagctgtgagaagagggccactgtcctccagaccccagaatggtagatccaccgacagcttgcactgtgcacctggaaaagctgcagatactcaatgccagctgtgaaagcagccagatggggggtgctataccctgcaaagccacaggagtggagctgcccaagactatggaaacctacctcttgcatcaatgtgacctggatgtgaggcatggagtca

SEQ ID NO: 782506 - DNA, 607 bp, Homo sapiens
gagaaggaaataaaaggcatccaaattggtaaagaggaagtcaaattatccctgtttgctgatgatgtgactttatatctagagaaacctaagactccaccaaaaagatttgatcatgaattaaagttgcaagatacaaaatcaatgtacaaaaattagtagtatttctatacaccaataattatctatgtaagaaagaaatcaaaaagacaattccatttaaaataactacaaaaaaatacccaawagattttaccaagaaggtgaaagaaagatctctacaaagaaaactacaaaacactgatgaaataaattgtggataacaaaaacaaatggaaaaacattccatgcttatagatcagaggaattaatatcattaaaatggccatattgcccaaagcaattgacagatttaatgcaatccctatcaaaatatcaacatcatttttcacggaactagaaaaaaaaaaacaattcttaaattcgtgtggaaccaaaaagagcacaaatagccaatgcaatcttaaacaaaaagaacaaagctggaagcatcatgttacctgactttaaattctattacaaagctatagtaactgaaacagcatgg

SEQ ID NO: 782507 - DNA, 630 bp, Homo sapiens
agaatttaggactaagacctcaaaagcatatgcaaaaaacgaaaatagacaaatgagattttattaaactgaaaagcttctgcgcagcaaaagaaataatcaacagagtaaaaaaaccaacctgagaatggaagaaaatattcacaaactattgatctgacagggaactaatatccacaatatacaaggaactcaacaacagaaacaattccaagtaaaagtgggtaaggtatatgagtagacatttttaaaaggaagacagaccaatggccaagaagtatatgaaaaatgttygacatcactaatcatcatagaaatgcaaattaaaaccacaatgtaatatcaccttgctccaatcagaatgtctattattaaaaataaataaacaacatgttggcaaggatgcagagaaaagaggatgcttatacactattggtgggaatgcaaattagtaccacctatgaaaaaagtgtgacaatttctcaaggaactaaagatacaacaattcagtccagaaatctcactactgggtgtctaccaaaaggaaaagaaatcaatgtaccaaaaacatatctgcactggtttgtttatcacagcactgttcacaatagcaaagacatggaatcaacc

SEQ ID NO: 782508 - DNA, 631 bp, Homo sapiens
gtccaggctgaggtggtctcagatgaagatgaggaacttgcttagggctggaataaaggtgattcttgctatgattaagcaaagagactggtggcattttgctcctgacctaaagatctgtggaacttttaacttgagagcaatgacctgtaattgaaatttatgtttaaaagggaagcgtagcaaaaagtttggaaaatttgcagtctgaccatgtgatagaaaagaaaaactcattttctgaggcgaaatttcagccagatgcagaaagttgcaaggagctgattgctaattaccaagtaaatggggaaaattgtctccagggyaggttagaggtcttcatggcagcccctcccatcacaggctcagaggcctaggaggaaaaaatagtttcaggtaccaggcccagagccctgctgctgctctgtgcagcctcgagacttggatcacagccctgcatcacaggcaaggctaaaaggggccaatatacagctcaggccattgcttcagaggatacaagccccaagccttggtggcttacacatggtgttttgcctgcaggtgagccgaagtcaagaattgaagcttgagaacctctgcgtagatttcagaagatgtatagaaacaccag

SEQ ID NO: 782509 - DNA, 631 bp, Homo sapiens
gtccaggctgaggtggtctcagatgaagatgaggaacttgcttagggctggaataaaggtgattcttgctatgattaagcaaagagactggtggcattttgctcctgacctaaagatctgtggaacttttaacttgagagcaatgacctgtaattgaaatttatgtttaaaagggaagcgtagcaaaaagtttggaaaatttgcagtctgaccatgtgatagaaaagaaaaactcattttctgaggcgaaatttcagccagatgcagaaagttgcaaggagctgattgctaattaccaagtaaatggggaaaattgtctccagggtaggttagaggtcttcatggcagcccctcccatcacaggctcagaggcctaggaggaaaaaatagttycaggtaccaggcccagagccctgctgctgctctgtgcagcctcgagacttggatcacagccctgcatcacaggcaaggctaaaaggggccaatatacagctcaggccattgcttcagaggatacaagccccaagccttggtggcttacacatggtgttttgcctgcaggtgagccgaagtcaagaattgaagcttgagaacctctgcgtagatttcagaagatgtatagaaacaccag

SEQ ID NO: 782510 - DNA, 564 bp, Homo sapiens
ctgagagaagagataacagtgaactctggaggaagctaaggtgggtggaaaaagaagcagggtaatgatcccatttaaccatgatgctattcattagtaattggaagaaacaaatgccatgagcacaaattttctatytgttaaatgttaaaaataaagcatggcacacattagattgggtaaaatcctgaacactgacaactccaaatgctggcagacaggatatagaccaacagggacccttattcattgctggtgtgaaacaaatatggtacagtcacttcggaagagagttttatagtttctaacaaaactaaatatattcttcccataagatccagctgtcacactccaaagtatttatttaaatgagttgaaaacacagccacaaaaaaacctgcacacaaatatttatagcagctttatttatattttccaaaaggtggaaacgaccaaaagtttaagccatttttcaacaggttaatgaataaataaactgtggtaagtccttaccatggaatattattcagtagcaaaaagaaatgagctattaagtcacaaaaa

SEQ ID NO: 782511 - DNA, 548 bp, Homo sapiens
gctttaaaatgtgcccctgagtgatacagaactgttactcacacactccccacaccaataaaactttcttaaaaccttagggagcactgaatataatatattttaatgtcatttctccagtaataaatatattagtattctcatttctatgtttaataattttaaaacaatattttgacctatgccttagcattttgtcaattaaacattatttagttggttttatgtaaactgatttgyacctaaaataatctccaatcagaatatgccatctcatctattagatttccttctctcaacagatgttctgagtcctcattgtttccagattacaatcagtttgctcataacacagagatccagacatctgggccaagggaaaatgggcaaagccatttactcaggtatgggaggaaacacttcctcaaagtttacccagcagccattcccacatgtgatatcctgaaggtgctggtctgggctttgccagagttctgatacatgaaaataaagtggaccttaagtgtgattgcctgctatagtggaaa

SEQ ID NO: 782512 - DNA, 548 bp, Homo sapiens
gctttaaaatgtgcccctgagtgatacagaactgttactcacacactccccacaccaataaaactttcttaaaaccttagggagcactgaatataatatattttaatgtcatttctccagtaataaatatattagtattctcatttctatgtttaataattttaaaacaatattttgacctatgccttagcattttgtcaattaaacattatttagttggttttatgtaaactgatttgtmcctaaaataatctccaatcagaatatgccatctcatctattagatttccttctctcaacagatgttctgagtcctcattgtttccagattacaatcagtttgctcataacacagagatccagacatctgggccaagggaaaatgggcaaagccatttactcaggtatgggaggaaacacttcctcaaagtttacccagcagccattcccacatgtgatatcctgaaggtgctggtctgggctttgccagagttctgatacatgaaaataaagtggaccttaagtgtgattgcctgctatagtggaaa

SEQ ID NO: 782513 - DNA, 429 bp, Homo sapiens
cctgaggcagttgccaggcaaaataatgttgattctcctcaggagccaccctcaacacccctgtttacttctagacctataactagactaaagtccaggtgggcccctagaggagaggttgagagtgtgacccatgaggaggcgcactacactagaaaagaactgcttcagttttctaatttatataaacagaaatctagagaacaggtatgagamtggatattaagcatgagggataatgatggaagaaacacagagttggatcaggctgaatttattaatttgggcccactaagtagggactttgcatttaatgttgcagctcggggagttaaaaaaggttctaatagttcatttgcttggttagctgaaatgtggattaaaagatggcccattgttggtacatatacaccatggaatactatgcag

SEQ ID NO: 782514 - DNA, 599 bp, Homo sapiens
gccactgcatattgagttttctgattctcattgtaagcattcctaacataacaccctaggcaattgctaggtccttcttcagtgctctacaggctcttgcaggtagctctattagagaactcattgcatgcttcttgtaattatttatttacatgcctgcacctggcagcattgggatgtgaatttccaggctggtaaagaacttgacttattattcttttggagtgccacagtgcytggcacgcagttagtattcagtagctgccctttggttcaagaatggaaatcatgatgatgacattctcaataatcctcacattttgtctgtctacagtaaatcagtgataaaagctctactaatgtgggatttggaatggagaaacatattccccttttctttgtctaagggacaaagagcttgtcattttttcttgaaggagtttaagctcccgctgttatccccttgtttggattttcaaagagaaggacaatattttcacaagtccttttccttgtcatcttcgggattatgacacatgagagaaaaggaggagcagacaaacctacaagccagacccagctccagctctgagctgcac

SEQ ID NO: 782515 - DNA, 385 bp, Homo sapiens
tcagagtgagacctgctctcgtatctgtaaacactgtgttcaaggagagagacactcctttgaaacactggaatgcggacagacgtgcaggctccgagttaagcccgctcccaccagctactctccgataaagatacgctgtttgagcagcacagaggaggttcgttgaaaccgctgttgccrtagatgatgcctgtgacgcgccgccgcccttccactgtttcgccccgaacatctgcttaaatctaagtgattggactcaatagtgtggagaccagagctctaagccttttgcagcctccacattttgcaactggccccctggctcccaccttcactcttaacctgtctcttctcaatcctttgtcgccaccagacttcgggt

SEQ ID NO: 782516 - DNA, 633 bp, Homo sapiens
gtcagttcccatcctcactgcctcctccagctgtgaacctgcagccccaactggccagtgtgactttcgccaccaacaaccccacacttaccactgtggccttggaaaagcctctctgcatgtttgacagcaaagaggccctcactggcacccacgaggtctacctgtatgtcctggtcgactcaggtaagggtcctgcttccctctggctactccaaaaggggctctgacctgtctgcagggaggagggaaggaggcagatagaggaaccctccatgcctgtagtcgtctcattaaacaggtactgcagccacagacctgtccttgccttgcagggacatccagttagtgagggaagtaataacaccaccagtcactgaacacctacaccataccaggcactttgcacaccatagagctagtatctacaaccagcttgtaaggtagctattaccaatccccattacagagcagggaagcaagsctcagagaggtggaataaccccccctggacctcccagggctggagagtgaatcctgatctctctagtccccaagcccaaggtccttcctgaggcttcgaaaggtggctcaagattggtgtttctgagacaaaaccatgcatttggacct

SEQ ID NO: 782517 - DNA, 617 bp, Homo sapiens
ctagaccgcctccttcctaacctccatcttcatgggctgcctttggggttgtggtcagaaaattctcttggtctggtgtttctaaggcagtggctgttcccaagaagtgtcattgatgggatgtcccttactgtattccrgaatgcttgcgttcctctcagaccctcttttctctgcccctcattttccactctgtaactttctgcggtgtcttaggtcttaacatccatcgctggtaactcactaagtccatctgaccgtggaaaggaaaagctcacagtgtgaaaggcgacgatgaggctgctcccacctacgagggccctgcagtagcagactcggaaggatcagccggaaaatgcgagagcctgctcgaggtcccctcacctgctgagctgcaagacagacgcctgctgcaaacacctcatcttccgttagatcagccagcttacctggagcctgcaaaacctgaacttggggctcctggcctctattccattttttccatttctgtgagggttaagaggttctctgaaaaagcctgggaaattttatagtacaactgaaagggtgtgcactactttgtggaggctaaaagcttaacttgaaatgcatttttt

SEQ ID NO: 782518 - DNA, 617 bp, Homo sapiens
ctagaccgcctccttcctaacctccatcttcatgggctgcctttggggttgtggtcagaaaattctcttggtctggtgtttctaaggcagtggctgttcccaagaagtgtcattgatgggatgtcccttactgtattccggaatgcttgcrttcctctcagaccctcttttctctgcccctcattttccactctgtaactttctgcggtgtcttaggtcttaacatccatcgctggtaactcactaagtccatctgaccgtggaaaggaaaagctcacagtgtgaaaggcgacgatgaggctgctcccacctacgagggccctgcagtagcagactcggaaggatcagccggaaaatgcgagagcctgctcgaggtcccctcacctgctgagctgcaagacagacgcctgctgcaaacacctcatcttccgttagatcagccagcttacctggagcctgcaaaacctgaacttggggctcctggcctctattccattttttccatttctgtgagggttaagaggttctctgaaaaagcctgggaaattttatagtacaactgaaagggtgtgcactactttgtggaggctaaaagcttaacttgaaatgcatttttt

SEQ ID NO: 782519 - DNA, 654 bp, Homo sapiens
tttttctctgcctccaacacactctagttcaaaaaagtagtttgtgtgaaagctccaaaaaaagtttcaggaatcactgggggcaaattaagtttcaatcattaaattattgctttgctataatatctgtatttaccctgaaattcccattacagaaaaagattagaggaagacacagaaaaaaaaaatttaatattcaacatgcaaaacaacctttaaaagaaacatgaaatcataaagcaaagctaacagccaaccaacaaataccgcctagcaatgatttccactggatgtggragagggttaataaagacgctgttggtaacgcgtacagaactatcactggcaatcagcatactgagctatccagtggaggccagcatcgtgtttttgctaaaatacatgttgtagaagtcataattcatagtgaagaatctcaacaggttttcttacagatttaattactctcacacaaataattcatttggaaaccataaaagatacctatttacacctaaactgcctggccttccagagcggggactaaaggggcagggcggggaagaaagcgagcgtgtcgcgggctctgtggggttgcagggtcactgttattttgatctgctgagctcaaggactggaaacggaataaaaacg

SEQ ID NO: 782520 - DNA, 678 bp, Homo sapiens
agactttgtgtttgcaatgtttccgctttgactttcattctcttgctcccttcttttcaagtagaaagtttttaaaaagcctcatccggaaacagccccaggaactgctcctggttatcgggactggcgtcagcgcagcagtggcccccggaatccctgccctttgctcgtggagaagctgcatcgaggccgtcatcgaggctgcagagcagctggaggtgctgcaccccggagacgtcgccgagttccggaggaaagtgacaaaggaccgggacctgttggttgtcgcccatgatctgatccggaagatgtcacctgtaagtgtcagacaagtacctcttggggacagcttggttctgcagcaggttggatgagtctgtgaacctaatgttaaactctgcaggcctaacttgtgttcagtgctcagcagagtcgggctgatgagccagaaatccttgagtccatcggggtgtcgtcttttaaaattgaggggatgccagccacastgcagcgtggggctcctaaagtagctcctattaaatggagcctgactgtgtgagatcgtctcagggagattgtccagctgcactcagtatgaactttgtgattgtatattcacttagtgaagggatatcccttaggcgtgtttggtgtaagcaggccggccatatttcttca

SEQ ID NO: 782521 - DNA, 642 bp, Homo sapiens
aatggccctgcagcctccttgcgggaggggctgcctagaagaggagagaaggtgctcacaggtaaaggtggtcagaggacaataggtgtgtgtggacaggggagtggggagggactgcttgaagctgctgagcaaacagggccaagtgacctgcagcagatggtccttcagatgcatcccagctcagatattcggtgccagctgacaggtgggcctgccacggtggcacacagtaggtgctcaatgaatgtttgcagaatgaatgaataagcaygctccaacttctgctcaaaagtaaatcttgacaccttttcagaaagaaaccattgaaaccttgtcaaccattgaagttcttgtccatttcacttcataagcaccccccaccccacccctgcatgaggaaaggctcgcctgggcaggctaggctggggcctgctcactgggaagcctcccatgctaagcctgcctcctacaaaagggattcaaatttacttcctctctccactccagcctccagggtgtggcctgctgaggggccctgaatgcctgggactgccatgtccctgcagctgtgtgaccttagggggatgcacttgttctctgggactcagtttccccaacggtgaatgaaggggtgaatct

SEQ ID NO: 782522 - DNA, 642 bp, Homo sapiens
aatggccctgcagcctccttgcgggaggggctgcctagaagaggagagaaggtgctcacaggtaaaggtggtcagaggacaataggtgtgtgtggacaggggagtggggagggactgcttgaagctgctgagcaaacagggccaagtgacctgcagcagatggtccttcagatgcatcccagctcagatattcggtgccagctgacaggtgggcctgccacggtggcacacagtaggtgctcaatgaatgtttgcagaatgaatgaataagcacgctccaacttctgctcaaaagtaaatcttgacaccttttcagaaagaaaccattgaaaccttgtcaaccattgaagttcttgtccatttcacttcataagcaccccccaccccacccctgcatgaggaaaggctcgcctgggcaggctaggctggggcctgctcactgggaagcctcccatgctaagcctgcctcctacaaaagggattcaaatttacttcctctcyccactccagcctccagggtgtggcctgctgaggggccctgaatgcctgggactgccatgtccctgcagctgtgtgaccttagggggatgcacttgttctctgggactcagtttccccaacggtgaatgaaggggtgaatct

SEQ ID NO: 782523 - DNA, 693 bp, Homo sapiens
tcggctcacactatcggcctggatcccacgtctaccaagggagactgcgtggggtggtgacgggtgtgtaagcacgcgtgaggtccggccactgcacagtcagacacgccggctgctgcagtggggcaggcagctccgggtgccagcatgggccccagctctctgcgaggctacagctggaccaggcgcactgcaagcagcttccacagctggcactggggaacacagtggctctcagaagcttggagatgccagaaaccacagggacccaaagagggcatcacagccctggcttgggagactccccggtctgggctccccaaagggctgcagctcttccttccttctcttcccctgcaaygtggccagcaaggggcatgtctcagcactgtttgtgttatagctcttttagccttattcagtgggtcccaagttcttgtcctccactcaggaagaatgaggtacggaaacaagagggtgagcaagacgaagaggagctttattgagtgacaatagctcagaggaggccctggagagggcagttcctcactacagctggtcatccgacgtctgctcagctctggctgagcctggggcttctgtcagcctcagagagggggaagttcatgctgactggtccatgggcggccatgggcaggcccagaaaaggcaacacaagttcgcactccagtc

SEQ ID NO: 782524 - DNA, 693 bp, Homo sapiens
tcggctcacactatcggcctggatcccacgtctaccaagggagactgcgtggggtggtgacgggtgtgtaagcacgcgtgaggtccggccactgcacagtcagacacgccggctgctgcagtggggcaggcagctccgggtgccagcatgggccccagctctctgcgaggctacagctggaccaggcgcactgcaagcagcttccacagctggcactggggaacacagtggctctcagaagcttggagatgccagaaaccacagggacccaaagagggcatcacagccctggcttgggagactccccggtctgggctccccaaagggctgcagctcttccttccttctcttcccctgcaacgtggccagcaaggggcatgtctcagcactgtttgtgttatagctcttttagccttattcagtgggtcccaagttcttgtcctccactcaggaagaatgaggtacggaaacaagagggtgagcaagaygaagaggagctttattgagtgacaatagctcagaggaggccctggagagggcagttcctcactacagctggtcatccgacgtctgctcagctctggctgagcctggggcttctgtcagcctcagagagggggaagttcatgctgactggtccatgggcggccatgggcaggcccagaaaaggcaacacaagttcgcactccagtc

SEQ ID NO: 782525 - DNA, 671 bp, Homo sapiens
gtttctggtgtcctgaaccctcgccagcatttcgtggagtcagtgttctgggtcttggtcattctgataggtgtgcaggggtgtctcatggttttagtttacaactccctggagccatatgcttacctgtgtctatctgtcttcttttgtgaagtgtacattcragtcttttgcctgctttttttcattttttttttattttacattaagttcaggcatacatgctcagaacgtgcaggtttgttacatgggtacacacgtgccatggtggtttgctgcatctatcaacctgtcacctaggttttaagccccgcacgcattaggagtttgtcctaatgctctccctcccctttctccccaccccccgacaggccccggtattcccctccttgtgtccatgtgttctcattgttcaactcccacttatgaatgagaacatgcggtgtttggttttctgtccctgtggtgatttgctgagaatgatagcttccagcttcatccactttttaactgggttgctttcctgtagttgagttgtaagggttctttgtatatttgggatacaagtcctttatcagacatgtgttttgcaaacctttctcccagtcagtggcctgtctttttgttctcttaacagtgtcttccacagagcagcagtttttaattttaat

SEQ ID NO: 782526 - DNA, 671 bp, Homo sapiens
gtttctggtgtcctgaaccctcgccagcatttcgtggagtcagtgttctgggtcttggtcattctgataggtgtgcaggggtgtctcatggttttagtttacaactccctggagccatatgcttacctgtgtctatctgtcttcttttgtgaagtgtacattcgagtcttttgcctgctttttttcattttttttwtattttacattaagttcaggcatacatgctcagaacgtgcaggtttgttacatgggtacacacgtgccatggtggtttgctgcatctatcaacctgtcacctaggttttaagccccgcacgcattaggagtttgtcctaatgctctccctcccctttctccccaccccccgacaggccccggtattcccctccttgtgtccatgtgttctcattgttcaactcccacttatgaatgagaacatgcggtgtttggttttctgtccctgtggtgatttgctgagaatgatagcttccagcttcatccactttttaactgggttgctttcctgtagttgagttgtaagggttctttgtatatttgggatacaagtcctttatcagacatgtgttttgcaaacctttctcccagtcagtggcctgtctttttgttctcttaacagtgtcttccacagagcagcagtttttaattttaat

SEQ ID NO: 782527 - DNA, 671 bp, Homo sapiens
gtttctggtgtcctgaaccctcgccagcatttcgtggagtcagtgttctgggtcttggtcattctgataggtgtgcaggggtgtctcatggttttagtttacaactccctggagccatatgcttacctgtgtctatctgtcttcttttgtgaagtgtacattcgagtcttttgcctgctttttttcatttttttttwattttacattaagttcaggcatacatgctcagaacgtgcaggtttgttacatgggtacacacgtgccatggtggtttgctgcatctatcaacctgtcacctaggttttaagccccgcacgcattaggagtttgtcctaatgctctccctcccctttctccccaccccccgacaggccccggtattcccctccttgtgtccatgtgttctcattgttcaactcccacttatgaatgagaacatgcggtgtttggttttctgtccctgtggtgatttgctgagaatgatagcttccagcttcatccactttttaactgggttgctttcctgtagttgagttgtaagggttctttgtatatttgggatacaagtcctttatcagacatgtgttttgcaaacctttctcccagtcagtggcctgtctttttgttctcttaacagtgtcttccacagagcagcagtttttaattttaat

SEQ ID NO: 782528 - DNA, 671 bp, Homo sapiens
gtttctggtgtcctgaaccctcgccagcatttcgtggagtcagtgttctgggtcttggtcattctgataggtgtgcaggggtgtctcatggttttagtttacaactccctggagccatatgcttacctgtgtctatctgtcttcttttgtgaagtgtacattcgagtcttttgcctgctttttttcattttttttttattttacattaagttcaggcatacatgctcagaacgtgcaggtttgttacatggrtacacacgtgccatggtggtttgctgcatctatcaacctgtcacctaggttttaagccccgcacgcattaggagtttgtcctaatgctctccctcccctttctccccaccccccgacaggccccggtattcccctccttgtgtccatgtgttctcattgttcaactcccacttatgaatgagaacatgcggtgtttggttttctgtccctgtggtgatttgctgagaatgatagcttccagcttcatccactttttaactgggttgctttcctgtagttgagttgtaagggttctttgtatatttgggatacaagtcctttatcagacatgtgttttgcaaacctttctcccagtcagtggcctgtctttttgttctcttaacagtgtcttccacagagcagcagtttttaattttaat

SEQ ID NO: 782529 - DNA, 634 bp, Homo sapiens
caaatttctgtcaattccagacagattttgttaagtcaattgagttttttacattctaaaattcaaacactttatataaacatgtagtctaagagaacagaaagaaagagtaacaggtgaaaagttagttttcttccccagtgttccccatccaatacacaccttgacccaccaatgtggacccctaatcaccaggggtgagtcacaaaggactccagagcagcaggcaacaccacgctacactgggatgcaacatgagagccgattcgtcgatttagctggggaaaagttcatcaaaatgccagatagatagtaaaaacaggtaaggtggcaaagtacttggctaggaaataccaaaatcaaagagggagctattttctttaagctcttttttaccctcattccacatactttatataattcagtctttccagataatgaaattgttgctaaacttcttcatgttaacataaagtaccttattttgagaattaaactytcaatttattctcagtttcctaacttggttattaaataatctccctgaaagcaagaatagagcattttttggtcgaactaatatgcatgtgttacaaccatccacagcaccgacccttcacactgtctgatcacc

SEQ ID NO: 782530 - DNA, 534 bp, Homo sapiens
gatgtgcaaaaagacagtagcattaaatgtcacttaccacaagttgcttaaaaccaacacaaaatatggtacatgtcaaatatttattaaacatctatttgcacatggctaagtgctaaatactatgtaaaactgaacacaaaaggaaagaaygtgctacaatttggcagcggttagctcaacaacttctttctttcttacatgtatgcatgttgaaaataccattctattttcctctatcatttactaactacatttaactatgtaaagaaacaaggccaaatttcaaataagaatcctgtgaagttgataaacccatggacaaacatgcaatcctatctaagatttcctatagcccatatgacattctgcccacaaaggcaaaccaaatctaacacaatatattttcttctcaacaagtttttctcttaaaatactcacttcttctgatttcctcttctctcaatcacccattcttttaacatttttcttacttagtgagttctagttactgggatacaaagatgaattagt

SEQ ID NO: 782531 - DNA, 529 bp, Homo sapiens
cccctagacctgctgtggttcccaggcgcgcgccctctcaccatgtgttgctgagaccgtctgggacccctgggcacacagtagcggacatcatggagtgacagggccctgtgggtggaggtgtcaggaagaggtaccggcacttgggtggggagggctggctggggttgagtttctgctgcttctgcttcctgaggagcgcagccaggggtgggcccagcgattcgtgccgagtgggaagcccggacgctgtactgtggtgtctccagtccccaccccaggccccagttcctggtgaacttgggccaaaaagggaggctggrctttggagggtaggtgtgagtgcctttgctaaaactggcccctgccacctagtggccagcatgacaaggtgagactctaatgctaccactctctgcatcctgttctaggcttatctgactttgcctgcccagttgctccgtgccaggaggaggagccacttattccatgctggaggctggagctgggggcaccgcagctcaccttg

SEQ ID NO: 782532 - DNA, 589 bp, Homo sapiens
aacaggcactcttctatattgttgctagggaagcaagtcccctatggaggggaattagtagcgtattgcaaaatcatataggcatgaaccctttgacccaacaacggaactccacaaaatctatccccagcttacactggcaaaaatacagaaagactcatgtatatggctatctgttgcagcactggaaaatttaatacttctaaactcaaatgtttataaaaatcacaattaacgtaagattatatttaaaaagaaatgataatgaaaattatacaaattaaaagctgtgagatttaaaacagtattactttgagggaaatgtatatggtcttatttatgtagaaaagaraaagaaaaatcaaaagaaaagtaaaatttccagatttaccggaaatgaatgagttaatatccaacttagcaaaaaaaaaaaaaaaaaaaaaagaataaacctaaataatgtaaatggaagagaatacaaataaaaacagaaaggatgaaatagaaaagaaggaaaataatagaaatgacaaagccagaagttagttctttgagaaaagcaaactagacaaatctttagtaagattaa

SEQ ID NO: 782533 - DNA, 382 bp, Homo sapiens
aaaaaaatgctatgacaatatagggtcttctcgaaaattgtgaaggtgaaaaaggacattctggtatcgatttttttcctcttgtttccctccatctcacttccactatcttcaaggcccccaggctgctcagggtcccytgggttgacttaactctccaagcatcctcttggaattagtcccttccctgctcctttgtaacacagcccaatcattaatgaatatgactgataaactcctctgtgttcatgtgtggaagacttaatccattacctccatgtgatatacatggaaactgctagagacaatgcattcacctatcagagtaggtggaaattttacaccctattaaaatactggtggagttttatgaagatgtgga

SEQ ID NO: 782534 - DNA, 641 bp, Homo sapiens
tgctggtgtcggcccccagggagagcatggcaggccctggtggagaactggtctgagggcaggctcttaccaaacagagacagcagggactggagcgcgaagtgcacagtccgtcgattagcttgcttcccggttttcaggattacttcctcctgaccaacttcacagagatcaaaacctagaggaacaaagaatataagcatctgcttccttcgggaagattccagatcttgaacatgagcgctatagggctccttgtgcaacttcatggaatgcctgcaaggcccttcagcaagcatttgggcctggggcttccccatgtctgcacagaggttggtcatgtggcagaggggtcgggctgccccacccagaacatccactctacgcagcccccatttggcgtgtgtgtggctctcactgcctggctctcctctgtcccttcacggaaagcactatggaccagaactcrgtaaggctcactcacatgttttcttttccatttttttttcacagaagtacagtctatataaagactgtccaggacaaaaactggccactccattcagcattgacagcagtatttaaagctggtgcatggtgaggtgaagtttctcaagggcaaagacaatgccttcatgcat

SEQ ID NO: 782535 - DNA, 344 bp, Homo sapiens
gggaactcatgctttaatagacactgaaaatcacaaaggaggaaggccaagtgccttagcaatctcaataaaaatatgaagttctttttacatggtaaatttcataatataaaaagtttaatgtctggaaatggtgtaatttacaaaaaaagtccacgtaggccaaagatggctaacactgcatataaggaacgtgaatgccagygggaaggtgtctgaggaggggcagggccacaggtgtcctgacagggaacatctttgaaggatctggcacaaacaagggcccagttcacaaaccacaggtacactcattttagatagaacagcagaataggtgatgaaaa

SEQ ID NO: 782536 - DNA, 635 bp, Homo sapiens
ctatttctagagttttacatacactataaaaggatggaattttaccgacttgccctatggaaggattctacatccccaccccacgtaagtcaggcatagccatatgatttgctttggccaagggaatttgagtggaagtgacatgtgagacatccaarcagaagctttaagaggctcccccattctctcttttccttattccatgagatcagcatgttccagctgcttcttccagctgtgtccagagatacagctgaattcaacccatcacaaacatgcaattaagatataaatttttaggctgggcgcagtggctcacgcctgtaatcccagcactctgggaggctgaggcagatggattgcttgagctggggagttcgagaccagcctgagcaacatggtaaaaccctgtctccacaaaaaccacaaaaaattagctgggccttgtggcacacatctgtagtcccagctacttgggaggctgagatgagaggatcacctgagcccaggaggtcgaggctacggtgagccatgatcatgccactgcactacagcctgggagacagagtgagaccctgtctcaacaaaaaaacaaacaaacaaaagacataaacttttattaatataagacactg

SEQ ID NO: 782537 - DNA, 635 bp, Homo sapiens
ctatttctagagttttacatacactataaaaggatggaattttaccgacttgccctatggaaggattctacatccccaccccacgtaagtcaggcatagccatatgatttgctttggccaagggaatttgagtggaagtgacatgtgagacatccaagcagaagctttaagaggctcccccattctctcttttccttattccatgagatcagcatgttccagctgcttcttccagctgtgtccagagatacagctgaattcaacccatcacaaacatgcaattaagatataaatttttaggctkggcgcagtggctcacgcctgtaatcccagcactctgggaggctgaggcagatggattgcttgagctggggagttcgagaccagcctgagcaacatggtaaaaccctgtctccacaaaaaccacaaaaaattagctgggccttgtggcacacatctgtagtcccagctacttgggaggctgagatgagaggatcacctgagcccaggaggtcgaggctacggtgagccatgatcatgccactgcactacagcctgggagacagagtgagaccctgtctcaacaaaaaaacaaacaaacaaaagacataaacttttattaatataagacactg

SEQ ID NO: 782538 - DNA, 535 bp, Homo sapiens
tgccatttacattagcacaaaaataagtataaatctaacaaaatatgtacaagtctatgtgagcaaaactatcaaactctggtggaagaaactaaagaaaacctaaataaatggatagatattccatgttcatggataaaagactcaatactgttaatatatcagttcttccctatttaatctatagattcaacacgatcccaataaaaatcccaatgagtaattttgtggatgtcgacacatttattctaaaatgtatacagaaatgcaaaagaaccagaacaaccaacaaaatgctgaggaagaacaaagttggaggactgacactacctcacttcaagacttacaacaaaactatagtaatcaaggcagtgtggtcttggcaaaakaacagacaaataaatcaatggaacagaatagagaatttagaaatagacccacacaaatagtgaactgatctttaaaaagaagcaaaagcaatgcaatggagaaaggatagccttttcaacaaatggtggtggaacaacaggacgtc

SEQ ID NO: 782539 - DNA, 542 bp, Homo sapiens
gggatggggagagctgtgtgtgcagatgacaaaaataactactaactttgcatctgcagaatacatgggtgtactccttcctttttcaaatacttttatcaaattcaatccagactcaggccaggtaaggacttttatttgcattcttcaatgagaacactcggggcttgtatgctggacttatttgtccaaagtcacagaattcataaatggggtctctaggactcaaactcacattttctttcttgacttcctctgcctcttggtgtccaacttaaaagacagtgcagcctggggtgctgggttccagtgtagatgctaccaaccttgtagataccttcgcagcttctgagctatttcaccttttcataaaagcrcaggccactcagagtttccaccagagagaaatggcaggggctcacagggaccccccacccccccatggagattagagaaatacactcactacattctttatttgaagttaaaatcaatttgcagaaaagataagaagagaaacagcacctttgtatacattgttg

SEQ ID NO: 782540 - DNA, 659 bp, Homo sapiens
gtcattcatggcggcatgaaaatacattttgtctaacgtcacctttaagtcatgacagaatatgagaggaaatcagagggaccatgctgtcgtcctgggtgcaaaataaaagtcgagtttcgtgggtcctggccatttctaggaccagttatatttttgatgaagccacattggatgttaagtaaagtacgctctttgcctgtttctgggtaatggatctggagggattggaatacattttttgtattttttcaaaatattacaatgggcatgataatttttagcaagaatcagtgaagtaattaaaataaaaacattttatgctttatgcttttctagaaattgccattttgtttgtcaaccctgtgatttaataactcaatgcttgaatgctgctgcgtgataatgagggaaaaatgggaayaggagacatgtttgctgttggatgtggagtgcaaaaacacaattgtgatttggccaaagaacagctcactagcaaatatctacctccagggaaaaccgagttcacttgctctagcaaagctggcttcatggacggatgggaagattaagtggttaatttccataaagtctggaagagtgcctggcgtagcttaggcacatcaatcaatgtaagttatgcttgcggttattaaaat

SEQ ID NO: 782541 - DNA, 659 bp, Homo sapiens
gtcattcatggcggcatgaaaatacattttgtctaacgtcacctttaagtcatgacagaatatgagaggaaatcagagggaccatgctgtcgtcctgggtgcaaaataaaagtcgagtttcgtgggtcctggccatttctaggaccagttatatttttgatgaagccacattggatgttaagtaaagtacgctctttgcctgtttctgggtaatggatctggagggattggaatacattttttgtattttttcaaaatattacaatgggcatgataatttttagcaagaatcagtgaagtaattaaaataaaaacattttatgctttatgcttttctagaaattgccattttgtttgtcaaccctgtgatttaataactcaatgcttgaatgctgctgcgtgataatgagggaaaaatgggaacaggagacatgtttgcygttggatgtggagtgcaaaaacacaattgtgatttggccaaagaacagctcactagcaaatatctacctccagggaaaaccgagttcacttgctctagcaaagctggcttcatggacggatgggaagattaagtggttaatttccataaagtctggaagagtgcctggcgtagcttaggcacatcaatcaatgtaagttatgcttgcggttattaaaat

SEQ ID NO: 782542 - DNA, 659 bp, Homo sapiens
gtcattcatggcggcatgaaaatacattttgtctaacgtcacctttaagtcatgacagaatatgagaggaaatcagagggaccatgctgtcgtcctgggtgcaaaataaaagtcgagtttcgtgggtcctggccatttctaggaccagttatatttttgatgaagccacattggatgttaagtaaagtacgctctttgcctgtttctgggtaatggatctggagggattggaatacattttttgtattttttcaaaatattacaatgggcatgataatttttagcaagaatcagtgaagtaattaaaataaaaacattttatgctttatgcttttctagaaattgccattttgtttgtcaaccctgtgatttaataactcaatgcttgaatgctgctgcgtgataatgagggaaaaatgggaacaggagacatgtttgctgttggrtgtggagtgcaaaaacacaattgtgatttggccaaagaacagctcactagcaaatatctacctccagggaaaaccgagttcacttgctctagcaaagctggcttcatggacggatgggaagattaagtggttaatttccataaagtctggaagagtgcctggcgtagcttaggcacatcaatcaatgtaagttatgcttgcggttattaaaat

SEQ ID NO: 782543 - DNA, 475 bp, Homo sapiens
tatattagttttggaaactgtgatatttatgccagttagttaatagagaaagctcactttactttcttctttttccacagcccagaaccaatatatgtacaattacctaccttcctgttccactcatgcaaactaacagaatatgaagcaaggaatcagtgactctctctattcataaggagttwcctaattctgtgtaaataaatttcaaatatttcagtcatgcttgtcatttgtacaaagttttaagattctggaactcatctgagcttgtaatcattgctggtagggctcaagcttttagtctccaagggcctttcacttgtgacttgaacagtgaatccaaaagtaaaagctcggcatagggtgaatgtcgtgcaggtcacagagtggaccccacagcccagatgaaggttctctcagcaccaagaagggggacgaagggagggctcaggccagcaggagcctgggcagc

SEQ ID NO: 782544 - DNA, 624 bp, Homo sapiens
atctcaacaaaacatttttaaaattagtcaggtgtggtggcgtgcatgtgtagtcctagctacttgggaggccgaagtaggagaatcacttgagcccaggagttccaggctacagtaagctatgattgtgccactgcactttagcctgggagacagaacgagaccgtgtcaaaaaaaaaaaaaaaacctaccttcctgccttgtagccacatttctcaacccagcatctctgcctggagacctgaaaccccaygtgatgtaaagaaggcaaaatgacaaggtcagcctgctcagtagcaatttgaaacaacgcaggtagtttggaaagcaatccccataaggagaagggcagctgggggaggggacaggagtactctcttccctttattaaaatgagatgcttggcctagagcctgccaaggtccaaaggatgcacctgtacacaacactgtttactgaaataaaaaaacatcttaaatattttttttagctcggaatgaacaagaggaacaggaggagaagagagagatcaagaggaggctaacccgaaaggtaggtggttctccatgccaagagctgggacaggagagggtgggctgcctgccacacctctgccctctgctg

SEQ ID NO: 782545 - DNA, 593 bp, Homo sapiens
ggctttatggctcaacacctgagcctcctggaaggccttggccgcctcactgaagccccagcgtaccggctctgcaaggccctggggttaaaatagcaaaaatgccatctggcaagaggctggctttgttcagactgtgtgctgcgttgtcgctggggtggtggggacattttccaagccaccattagaatatgagctgtcacctgggcgagccccactcccccatgcccccagcccrctcgtcagcatccacgcaatcatggcaggagcccctgtggcagctgagccaccttgggttttcctcaattccatctcactgacttggtgatgacagccccaaagcaggcaggacaaatcccctctttcttcctagaaaagtacctgaaataacacgctcattgttagactccaggagttggtgctgaggaagggtccttggggctgggacacggagaacagccaccggtcactgtagacccttttgtcctggctgcctttcccctctattggcacatgttccttttccatcaaaaatttagttacaattatttttttaaaataagaagaccagaaagaacacacagggctgactg

SEQ ID NO: 782546 - DNA, 593 bp, Homo sapiens
ggctttatggctcaacacctgagcctcctggaaggccttggccgcctcactgaagccccagcgtaccggctctgcaaggccctggggttaaaatagcaaaaatgccatctggcaagaggctggctttgttcagactgtgtgctgcgttgtcgctggggtggtggggacattttccaagccaccattagaatatgagctgtcacctgggcgagccccactcccccatgcccccagcccgctcgtcagcatccacgcaatcatggcaggagcccctgtggcagctgagccaccttgggttttcctcarttccatctcactgacttggtgatgacagccccaaagcaggcaggacaaatcccctctttcttcctagaaaagtacctgaaataacacgctcattgttagactccaggagttggtgctgaggaagggtccttggggctgggacacggagaacagccaccggtcactgtagacccttttgtcctggctgcctttcccctctattggcacatgttccttttccatcaaaaatttagttacaattatttttttaaaataagaagaccagaaagaacacacagggctgactg

SEQ ID NO: 782547 - DNA, 593 bp, Homo sapiens
ggctttatggctcaacacctgagcctcctggaaggccttggccgcctcactgaagccccagcgtaccggctctgcaaggccctggggttaaaatagcaaaaatgccatctggcaagaggctggctttgttcagactgtgtgctgcgttgtcgctggggtggtggggacattttccaagccaccattagaatatgagctgtcacctgggcgagccccactcccccatgcccccagcccgctcgtcagcatccacgcaatcatggcaggagcccctgtggcagctgagccaccttgggttttcctcaattccatctcactgacttggtgatgacagccccaaagcaggcaggacaaatcccctctttcttcctagaaaagtacctgaaataacacgctcattgttagactccaggagttggtgctgaggaagggtcyttggggctgggacacggagaacagccaccggtcactgtagacccttttgtcctggctgcctttcccctctattggcacatgttccttttccatcaaaaatttagttacaattatttttttaaaataagaagaccagaaagaacacacagggctgactg

SEQ ID NO: 782548 - DNA, 633 bp, Homo sapiens
gaaggtctctcgctgcccatgtatctttgaaagagaggaaaccacagcctcttgttgattacacactacctatgtggtggagtttcttatcttcctttgcatttttctctcttctttatcttcttgaatcaacttggagccttctaccttaaggaactcatactctctagtttccaacttttttccttaaaagattcttcccaccaaacaagaatctattgactgctttcatccccagctcccggctgccgttatccccagctctgtgcctttataggaaccattgctaattaaccaaaaagtggagagaggaaaagacaggattcaggcaaaacatgagccatggaattacattttttggcctcttccatccttacttcctataatacccaatgtggaaatccaagygcagttggaatggagtggctgtcactgataaaagggctgctttgcagggtgggcaccaagtccccagccccactttcatcacccttcgccaccctggaggccatctatcgtgtacttcaccctcctgctcccattgtcatttgtattcaattaggtgggaaatggaccaacgtaaaccactaatgtgataaaccactaataagatgctgcattttgtaaatacgt

SEQ ID NO: 782549 - DNA, 513 bp, Homo sapiens
tgcaacttaaaccttcatgaataacaccattccagggtcaaggggtctcccaatttgagataagattttgtggtgtttgaatctgtttttcctttcccaaatcacttattttccctctgcttcaaattctccagttatggatggtcccaggctgattatcaatgtcttcttccttttgactttatgacttggactcccagcgcctccaatatgtcttcctgtttctggtcctagaggacatggaattggtcccagtccattgcatattttgtttttaagtcatgcactgttaatatttgagataatctctcagtacctctgttcctgctgcccatataacaaatatctgtgtgttgtcctattggcccrtgttgtgcctcatgctgagtgactcaagagccagagaaaagtggctatgtaaattggcctggatgtccaggcaccaaaactagaaaaggaaaggacaagcaggcctgaacaaaatcaggagatggattgatgaagagaggagta

SEQ ID NO: 782550 - DNA, 522 bp, Homo sapiens
tgcaaaagagtgcacactgtatgctgctatatatatatatgcacctgaagagcaggtaactaatctatgctgacaaaggtgtgactgactctagttgcagggtgggagctattgaaaggaaaagggtacaataaaaatttcaggaatgacagaaatgttttatatcttgatctgggtaatatatgtaaaaastgtatagactttatgtgaaaattcattgaattttacatttaagatctgtgcattttaccgagtgccaattatatctcaactttgaaaactgtaaaatactgaggtcatgtgatacaataaattagagattaatcagataagtattttttaaattctcataatcatataacaaaatgtctaaatagttcatcatttcacaaataataacataaattcagagacttgctatttctatgcccacaatttcaaaaggcaaacaagaataataaatgtttggaaagtgtccattaggatactctttcatctgaactgcaatgtgcttcttatctg

SEQ ID NO: 782551 - DNA, 451 bp, Homo sapiens
ctcctctcagagtacacatctgacaaaggactgggtgtggaggccattattgaaaagacagattggagtcaactagtagagatgagatcaccgggcctctgctttttagcctgtagacgcacggaaccattaaaactgtttatgaggaaaataacatgtcaaacrggaacagaaatattatctgtatagacggataaaatttaggaaaagaactgaagactttttccctcttacaggggtttctggtcagatagtgatctgtttgattaatagattcagatacattgttcaatgtaagagttgtcaagtcactctttccaactttccaaaatttccaggatacatcatatttataatacaatctcctgtatgcagacatcatctcccacaaaaaaaaacccactctcccatactgtgaaaatccaagatcagttttaatgaaacccactaa

SEQ ID NO: 782552 - DNA, 548 bp, Homo sapiens
gggaggagcgtttgtaccgagctccctgtaggtgggacgggtgacccccgccacccgggaaggcggaacgcagctcagcagagcagcttcccaccactccgagtaggggcagccccatggtacctctggggccaagtgtggagctgcctgtgaggctcccattcctcggcggacttttgagggtttgagggttagtctcctcctgtgtggattcttggctgcacttggcccctccaytaggaccagctgtggattcctggaaccttgacctgggccctcaccatacggagtagctctagggcttagaagggccggactctgcccccgatggcatggccactggagaagacagagtcatgcctgtcttcctcagactctcccgcatcctctgccaaggtctgttgggagcctcttcccggtgtcctgcccacctcaccctcagcccagatcacagagggtcctgctctcacaggagctggcctgggtgtcaggcaatgtcttgccctctggctggagccatgccatggggcaggcagccgctctcagga

SEQ ID NO: 782553 - DNA, 534 bp, Homo sapiens
caagggcgggcaaaggagggagaggggcgggggcagtttccagtcctgctggaggagcaccattggacacctgccctgttgcagacagggactgtgcctgaggtcacagggacaggacaagaagaggggacgggtggggacagcaggcatggcagaattctgcctcctgggtctttcctgcaccctgtgcctcctccagctcgaggggcgtctgctgcacctgcctcccatccctgcaygcttgggcccccctgggatctctctacacgaggccaaacagaaggcgctgcctcccgccccctcacacctggcttcctgaggaaccttcccaggcctcggggagaccctgtggctgcccctgtctctgcctccctccatggtaggaagaacagctgctgaggccaagacccccagaggggctgtggggcgggaatctccaggctggagatgagagggcagggccaggaggggtcactggaggctgagcttttggaggtgcgagtggagaagaattcatttttaagttcatcaccg

SEQ ID NO: 782554 - DNA, 534 bp, Homo sapiens
caagggcgggcaaaggagggagaggggcgggggcagtttccagtcctgctggaggagcaccattggacacctgccctgttgcagacagggactgtgcctgaggtcacagggacaggacaagaagaggggacgggtggggacagcaggcatggcagaattctgcctcctgggtctttcctgcaccctgtgcctcctccagctcgaggggcgtctgctgcacctgcctcccatccctgcatgcttgggcccccctgggatctctstacacgaggccaaacagaaggcgctgcctcccgccccctcacacctggcttcctgaggaaccttcccaggcctcggggagaccctgtggctgcccctgtctctgcctccctccatggtaggaagaacagctgctgaggccaagacccccagaggggctgtggggcgggaatctccaggctggagatgagagggcagggccaggaggggtcactggaggctgagcttttggaggtgcgagtggagaagaattcatttttaagttcatcaccg

SEQ ID NO: 782555 - DNA, 534 bp, Homo sapiens
caagggcgggcaaaggagggagaggggcgggggcagtttccagtcctgctggaggagcaccattggacacctgccctgttgcagacagggactgtgcctgaggtcacagggacaggacaagaagaggggacgggtggggacagcaggcatggcagaattctgcctcctgggtctttcctgcaccctgtgcctcctccagctcgaggggcgtctgctgcacctgcctcccatccctgcatgcttgggcccccctgggatctctctacacgaggccaaacagaaggcgctgcctcccgccccctcacacctggcttcctgaggaaccttcccaggcctcggggagaccctgtggctgcccctgtctctgcctccctycatggtaggaagaacagctgctgaggccaagacccccagaggggctgtggggcgggaatctccaggctggagatgagagggcagggccaggaggggtcactggaggctgagcttttggaggtgcgagtggagaagaattcatttttaagttcatcaccg

SEQ ID NO: 782556 - DNA, 534 bp, Homo sapiens
caagggcgggcaaaggagggagaggggcgggggcagtttccagtcctgctggaggagcaccattggacacctgccctgttgcagacagggactgtgcctgaggtcacagggacaggacaagaagaggggacgggtggggacagcaggcatggcagaattctgcctcctgggtctttcctgcaccctgtgcctcctccagctcgaggggcgtctgctgcacctgcctcccatccctgcatgcttgggcccccctgggatctctctacacgaggccaaacagaaggcgctgcctcccgccccctcacacctggcttcctgaggaaccttcccaggcctcggggagaccctgtggctgcccctgtctctgcctccctccatggtaggaagarcagctgctgaggccaagacccccagaggggctgtggggcgggaatctccaggctggagatgagagggcagggccaggaggggtcactggaggctgagcttttggaggtgcgagtggagaagaattcatttttaagttcatcaccg

SEQ ID NO: 782557 - DNA, 589 bp, Homo sapiens
cccacagacccctcgtgatggggtgggactgggttccacccacccggctcctcacagggttgggtttccctcgggtaaaacacccagcctggtgactccagaccctgccccgcagcctgacctggagcacatccctccgtctgcccggacttgtttccccatctgtaagacacggaatccagaccagattctccccaaagtcccatgcagccaagatcctgaaggccagaagtgcttatcgcagcctgtggtctggcctggctgtcgggagtaggtcttctgcacagaggagtggggaatttgcaggtgtgttctcttctctgcttgggagcgcgcctgcatctggcctgcatcagggccaaggggtctgggctgccctgagctccctcccgggagaatgtggctcagcccccrccggaaagtggaggggctctccctcgtggctggaaagcacctgagaaagctccaagagccactgaatgtggcccaagagccctgccaggctgcagcagtgagggctgagagggagttcagtcactaccctcttggtgtaacgggtttccaatcaacccatgaagaaatgtttcta

SEQ ID NO: 782558 - DNA, 589 bp, Homo sapiens
cccacagacccctcgtgatggggtgggactgggttccacccacccggctcctcacagggttgggtttccctcgggtaaaacacccagcctggtgactccagaccctgccccgcagcctgacctggagcacatccctccgtctgcccggacttgtttccccatctgtaagacacggaatccagaccagattctccccaaagtcccatgcagccaagatcctgaaggccagaagtgcttatcgcagcctgtggtctggcctggctgtcgggagtaggtcttctgcacagaggagtggggaatttgcaggtgtgttctcttctctgcttgggagcgcgcctgcatctggcctgcatcagggccaaggggtctgggctgccctgagctccctcccgggagaatgtggctcagcccccgccggaaagtggaggggctctccctcrtggctggaaagcacctgagaaagctccaagagccactgaatgtggcccaagagccctgccaggctgcagcagtgagggctgagagggagttcagtcactaccctcttggtgtaacgggtttccaatcaacccatgaagaaatgtttcta

SEQ ID NO: 782559 - DNA, 628 bp, Homo sapiens
tataatttatatattacggaattggaataaattaagcacgctgtggcccccttaggatgacttccccaagcttcataaatgcaaggcaacctttctcattagcactttcttcaaatctccaaatgagaagaccctcagacaggagaaacacttgagaatctcccccaacccccatctgcagaggaatgaggtgacaaggtcctgctgcccaggtctctctttttttttttttaagacaaggtctaactcccattgcccaggctgtagtgcagtggtgcaatcacaactcactgcagcctcgacctcccaaactcaagtgatcctcctgcctcagcctccagagtagctgggatcacaggcatgcaccatcacatccagctaatttttctgtatttttagtagagacggggtttcaccatgttgcccaggctggtcakgaactccaggcctcaagtgatctgcctgcctcggcctcccaaagtgctgggattacaggcatgagctactgtgcccggccctttaggtcttcttgatctatccaggagctcatcccttagaaatccaggaaggcgccccaagaacctcacatgagatgcctttcccctcacagaaattaccgttgtctgaa

SEQ ID NO: 782560 - DNA, 612 bp, Homo sapiens
ctttggggaaggctaggagaaaaattaatagcataaactttctctagtgtactgaggtccttcttcaaagggatccagcttccaattcattcattcattcattcacttattcattcacttattcattcattcgttcactyattcattcattcgttcactcattcattcattcactcattcattcattcatgggggcttagttgtgtaaactgggttaagtctgggaagttgattgagggctgtgattttctgttttaattatttttctgttttaattattcaagttagactttttttcatttgacctgtaagtttctgcttatacagaaaacttaaaagaatcaagtaacttataagatcaagtaagaatttcacgggtttcctgtctatttcacttctaggaacaccatgattaactatccaatgccatagatccacacaagtcagactattctgacggcagctttgcctctgccgtccattaggtaaccacactcaccttgccttggatggctgagtactgccacttggccgctgcactccaaatgcaattactcccgttgcatttaagttttccatttgagtgactgcggctcccactgtaagggctgg

SEQ ID NO: 782561 - DNA, 599 bp, Homo sapiens
ccattgatcacctgacctccataagccccttctctgactagtgggccacagtgagtgatatttttggtttcctggaatcagtatcagttcagtaaccagttatccccgaacaatctaattatttccctttcctcaatacatattcactctggtaaaaggtcacaggtccctttggggaaggctaggagaaaaattaatagcataaactttctctagtgtactgaggtccttcttcaaagggatccagcttccaattcattcattcattcattcacttattcattcacttattcattcattcgttcacttattcattcattcgttcactcattcattcattcactcattcattcattcatgggggcttagttgtgtaaactgggttaagtctgggaagttrattgagggctgtgattttctgttttaattatttttctgttttaattattcaagttagactttttttcatttgacctgtaagtttctgcttatacagaaaacttaaaagaatcaagtaacttataagatcaagtaagaatttcacgggtttcctgtctatttcacttctaggaacaccatgattaactatccaatgccat

SEQ ID NO: 782562 - DNA, 513 bp, Homo sapiens
agtaagctaaaaactcctgcacagcaagagaaataatcagcagagtacacagacaccccacagaatgggaaaaatatttgcaaactatgcatctgtcataggactaatatctagaatctatgataactcaaacaaatcagcaagaagaaaaaccaaataactgaatcaaaaaatgggcagaggacatgaatagataattctcaaaagtagatacacgaatggtcaacaaataygtgaaaagatgctcaacatcactaattttcaggaaaatgcaaactatgaccacaatgagataccaccttactcttgtaggaatggccataattagaaaatcaaaaaatatataatagatgttggtgtaaatgtgctgaaaaggtaacacttttacactgctggtgggaatgtaaaccagtacaaccactgtggaaaacagtatagagattctttaaagaactaaaagtagaactatcatttgattcaggaaccccaccactgggtatctaccccaaggaa

SEQ ID NO: 782563 - DNA, 518 bp, Homo sapiens
tacccaatgatgggctgaggtccccgccttgatgatggtggctgagggagctcttagttaaatgtgctgaagttttatcaggatggagagtgtgaactacctcagctcccctgctaggtcagcaggaaagctattcacctcacagcctcactcctgttctagtgtttcagctattcagataagacaggaacctcttttcttgtataaaaatgttgatgttccaagcagggaggaatcatcactctgcctttcatgtggcctgaatctgaagtgtgttcctcctgtggggctgcactcaccatggattgttccagaaaagctgtctgtaagtgcctccatgctgcaatcttgttggggaagccccagttgtgcckgcagtggaacgccacaggggataaaggaccccttctccaaagcctttcacaatcacagaggctgcttgactgttgcagtataggtgcagactttccctactgtgcccagcactgcagttgtgtctctgctctgataaactaccc

SEQ ID NO: 782564 - DNA, 624 bp, Homo sapiens
ctttccgcctctagaactggcagaaataaatttgtgttctttataaatcatccagtcttaggtattttgttatagcagcataaattgactaagacactgacttagcaggattatctggtaaaaatcaactttaaaaggaggtacgcagttgagcctatgagaaggttcaggaacttcactaaagattacccaagcaaagaatccttgtcagcctccctcttgtttaagaaaataagacacatcctttttttctttgaatgktataagtccattttctcatttaactagtttttcattaatgaggaagtgacttatctgttgcgactatgtagtagaaagtatttgctgaattctcatagcaggtaggcatttaatgaggggaggttggtgtctataaaaataaaagtaaaacaaggttaatagttggaaaaatctataaactcagtttctgagtccacagggcagccagtcaagatttttataagattgccaactagacacaaccaggagaaatgtctgccactgacagactggtactttggaaagactgacacactctgagcatatcttcagagggaaggcattgagagtgggtagaggaaggacatagatgtcgtactaaag

SEQ ID NO: 782565 - DNA, 556 bp, Homo sapiens
aggtacgggagttgaaagatgaaacggtcaattttagaaagaaccaagctgatctgatagagctgaaaatgtcacatcaagaatgtcataatacacttgcaagcattaacagcacagttgaccaagctgaggaaagaattttattaggttgcaaaagtaattgtggtttctgccattatttttaatgtcagagattacaattacttttgcaccaactgaatagcttgacaaaggaaagaattttcagacatgttyttcaaaataactcagtcagacaaaactttttaaaaataaagaagaatgaacaaacactctaagatataaaggattatgttaagaaacaaaatctacaactcactggtgtcccagaaagagaaggaggaaaagcaggcaacttgcaaaacatatttcagggtattatccataaaaatttccccaacccctttagaaacaattaaaattcaaattgaaaaatgcagagaatccctaggagctattataaaatattaccatccctaagaaccataatcatcagattctacaaggctgttataaa

SEQ ID NO: 782566 - DNA, 556 bp, Homo sapiens
aggtacgggagttgaaagatgaaacggtcaattttagaaagaaccaagctgatctgatagagctgaaaatgtcacatcaagaatgtcataatacacttgcaagcattaacagcacagttgaccaagctgaggaaagaattttattaggttgcaaaagtaattgtggtttctgccattatttttaatgtcagagattacaattacttttgcaccaactgaatagcttgacaaaggaaagaattttcagacatgttcttcaaaataactcagtcagacaaaactttttwaaaataaagaagaatgaacaaacactctaagatataaaggattatgttaagaaacaaaatctacaactcactggtgtcccagaaagagaaggaggaaaagcaggcaacttgcaaaacatatttcagggtattatccataaaaatttccccaacccctttagaaacaattaaaattcaaattgaaaaatgcagagaatccctaggagctattataaaatattaccatccctaagaaccataatcatcagattctacaaggctgttataaa

SEQ ID NO: 782567 - DNA, 556 bp, Homo sapiens
aggtacgggagttgaaagatgaaacggtcaattttagaaagaaccaagctgatctgatagagctgaaaatgtcacatcaagaatgtcataatacacttgcaagcattaacagcacagttgaccaagctgaggaaagaattttattaggttgcaaaagtaattgtggtttctgccattatttttaatgtcagagattacaattacttttgcaccaactgaatagcttgacaaaggaaagaattttcagacatgttcttcaaaataactcagtcagacaaaactttttaaaaataaagaagaatgaacaaacactytaagatataaaggattatgttaagaaacaaaatctacaactcactggtgtcccagaaagagaaggaggaaaagcaggcaacttgcaaaacatatttcagggtattatccataaaaatttccccaacccctttagaaacaattaaaattcaaattgaaaaatgcagagaatccctaggagctattataaaatattaccatccctaagaaccataatcatcagattctacaaggctgttataaa

SEQ ID NO: 782568 - DNA, 552 bp, Homo sapiens
ccagctgcatccatgttgttccaaagggtatgcttctgttctttattatgactgcatagtatttcaagatttatatgtaccacatttcctttaccaatccctcattgattggcaccttggttgattacatgtctttgctattgtgaatagtgctgcaacaaacttataagtrcatgtgtctttttggtagaacggtttattttgttttggatatatactcagtaatgagattgctgggtcaaatggtagttttgtttcgggttccttcagaaatctctaaactgctttccacacttgctggactaatttacatttgcaccagtgtgtaagtgatcccccttttatttttttgcaacctagccaacatatgctattttgaaatgtttaatcataggcattctgattggtgtgaaatggtaactcattgtggttttgacttgcatttctctaatgattagtaatgttgggcattttttgtatgtttgttggccacttgtatgttttcctttttgcccactttaattggtgttatttgtttattgcttgctaaat

SEQ ID NO: 782569 - DNA, 592 bp, Homo sapiens
acacctgtaatcccagctacttgggaggctgaggcaagagaatcgcttgaacctgggaggcagaggttgcagtgagctgaaatcgtgccaatgcactccagcctgggcaacttcatctcaaaaaaaaagaaaaaaaatgaaatttgaatgtatatggcagtgaatagatcatctctaagttagagtattctgtatttggttgtaatttctattgttctggcatattagatgttgcctctttaatctgttgtattttttcatgcaaaactgcttcagtattacatcataataatttgcccagttttcccaaggattgaaatgagtgctttattmttcaacaacatatcttttctgggaaaatatattattcttttgcctactattttcattggttaaaaaatacacgtaatgttttaaacaaaaaaaactttttaaaatatgttgtttaaattaatttaaacttttaaaagagaaactatagctggaaagcaaatatatagaaatattttaaatattattaatgaaattcaaaaacactcaaaaaaaaaaaagttcaacttgccataatgtgccttatcaagggagcatctat

SEQ ID NO: 782570 - DNA, 580 bp, Homo sapiens
tacctacatcacccctcccccaacctcagacagcacagcactaagagagacaccatttgctgaaggagagagaagtaaacataagactttgccttggaatccagtgccaggtctgccacaaaaaagcccagcaccagrcagaaccccatgtccccttgttcccagaccaaactgagggtcggactcctatttcttgtggcccagtaaagagatgcaaatgaactgcagaggaagagttttcatttctgcaaccggttacagggagaaggcctggaaattatcgccagaccaactcaaaattagagagttttcaggagcttatataccttctgagctatatgtctatgtgtaagtattcattcatctaaagaagtgtttaacttcttttaatctataactatagtctgcgtcctgaagaccttcctctgaagcctcagtaaatttacttaatctaaatgggtgcaggtgctgggttgattacccttatcttgtctcctgctgaatcatggaagtttggggagtttggggagtgccttcagatccccaattaacttgttgtggaggcctggggagtttctta

SEQ ID NO: 782571 - DNA, 580 bp, Homo sapiens
tacctacatcacccctcccccaacctcagacagcacagcactaagagagacaccatttgctgaaggagagagaagtaaacataagactttgccttggaatccagtgccaggtctgccacaaaaaagcccagcaccaggmagaaccccatgtccccttgttcccagaccaaactgagggtcggactcctatttcttgtggcccagtaaagagatgcaaatgaactgcagaggaagagttttcatttctgcaaccggttacagggagaaggcctggaaattatcgccagaccaactcaaaattagagagttttcaggagcttatataccttctgagctatatgtctatgtgtaagtattcattcatctaaagaagtgtttaacttcttttaatctataactatagtctgcgtcctgaagaccttcctctgaagcctcagtaaatttacttaatctaaatgggtgcaggtgctgggttgattacccttatcttgtctcctgctgaatcatggaagtttggggagtttggggagtgccttcagatccccaattaacttgttgtggaggcctggggagtttctta

SEQ ID NO: 782572 - DNA, 604 bp, Homo sapiens
aggacctaccaaatgacagggacaaaagtgatgtaacacaaacagggctgaaatgtgcctcttgcttgccacgtgtgggtgacaagaagaagagaggagaaaaagagagaagggctgtagccttttgaagagccagacstagagctccctgagccaggacttgacactctctttggggctatgcagttcctggtatttctaagcttctgggtgccaccaagttccctggtgccagctgtggaagctgcttgcagtactcctattccaggagcagccagcaaggagctggcgcctgtgccagcacctggagctgcccaccccaccgcagccaaggtgcctagctgtgtgcagtgactggaccccatgcttgttcccacatccctcagtgctttgcacctgggtcacctttggcagggatgggatttaggctggtactgcgagctgagtgcagccagctaggctgagtgggtggaatgagcctagtggacctgagcaaagctagggcaaaggcatcactgaccacagaggtttcaagccagaaaagcatcacctcaagaatcccatgagaattacaaccagattcagataagattcatattttgga

SEQ ID NO: 782573 - DNA, 604 bp, Homo sapiens
aggacctaccaaatgacagggacaaaagtgatgtaacacaaacagggctgaaatgtgcctcttgcttgccacgtgtgggtgacaagaagaagagaggagaaaaagagagaagggctgtagccttttgaagagccagacctagagctccctgagccaggacttgacactctctttggggctatgcagttcctggtrtttctaagcttctgggtgccaccaagttccctggtgccagctgtggaagctgcttgcagtactcctattccaggagcagccagcaaggagctggcgcctgtgccagcacctggagctgcccaccccaccgcagccaaggtgcctagctgtgtgcagtgactggaccccatgcttgttcccacatccctcagtgctttgcacctgggtcacctttggcagggatgggatttaggctggtactgcgagctgagtgcagccagctaggctgagtgggtggaatgagcctagtggacctgagcaaagctagggcaaaggcatcactgaccacagaggtttcaagccagaaaagcatcacctcaagaatcccatgagaattacaaccagattcagataagattcatattttgga

SEQ ID NO: 782574 - DNA, 597 bp, Homo sapiens
gagccctcatagaggcagtgaggaagggaaatgtggggtcagagcccccacatagagtcctccatggggcactgcctagtggagctgtgagaagaaggcgaccatccctccagactccagaatggtaaatccactgacagattgcaccatgcacctgaaaaagccggagacactcaatgccagcctgtgaaagcaaccaggagaggagctgtaccctgtaaagccacaggagtggaactgcctaaggccttgggagcccacctcttgcattcacatgacctggatgtgagacatggagccaaaatgatgatttcagaactttaagatttgactgctttattggattttggatctggatgagrcctgtagcccctttgttttggccaatttctcccatttggaatgagtgtatttacccaatgcctctatttaccattcctctattgtatataggaagtaactaacttaatattgattttatgggctcataggtggaaggaacttgccttgtctcagatgggactttggacttggacttctgagttaatgctgaaatgagttaagattttgaaggactgctagaagaccataattgtg

SEQ ID NO: 782575 - DNA, 606 bp, Homo sapiens
gatgttatggtgtggaagtgtggatgggtaaactacaaattcaatacaaatgagaaggcagaatggagataaacatatttgtctctttctctgagagttttatgaggtaaacactgtattatgtttttttttcaaaatcatttcctttcattatgtataaatgttcgcctaaatatgagaccattagaacacatttggcatcttagaaggaatgggaaagatagataatataaaatgagctactaggcaatacatttaagtggtttgttttttacaaaactgtcccaaaaaggagacaaggtgtctgacagctagtcttttaagtgtctttctctacaaaacatatctgaacatccaaatatggaagagaggaaattgggtacctcaaaatgactcttttaagagcttttctctggctmccaaagagatttgtttgttttcagaagatttattctgttattatcacatctgaaatgtgctagaaagaaagacttttgttagctcagaacaatagtaaatcagctatcctaagtgcatttctgtcttaaaggtttattttgttttgttataattgagatgagtcaaggagacaatggtatggaaaca

SEQ ID NO: 782576 - DNA, 586 bp, Homo sapiens
agagaggaaattgggtacctcaaaatgactcttttaagagcttttctctggctcccaaagagatttgtttgttttcagaagatttattctgttattatcacatctgaaatgtgctagaaagaaagacttttgttagctcagaacaatagtaaatcagctatcctaagtgcatttctgtcttaaaggtttattttgttttgttataattgagatgagtcaaggagacaatggtatggaaacacttttgattctgcattgggacaaaggtcagtaactcaagrccccagtgtccttggagtaaaaacattttataaatatctattggtgggaaatgctgctctagtgaggattacagcacacctctaagagcctggtggctaccaaaatgttagaaagagcaagtgtcttaggaaatacattttgtattctattttttgagtacactggacaagctaaatatagagtagaaattgctgtttagctgagataatctgcttaatgcattctgagagagttcgaatttttttttttttttaacagaatgactgccaacttttattctgcattagatggagtttttgtcagg

SEQ ID NO: 782577 - DNA, 629 bp, Homo sapiens
aattcttagattttcactttagatgtgggaactccggtgcttaattctatcctctttaattttatatctgtgatttcttctgctttgttttcagttctatttttttcctgcactgcaaaagagtttctaaagattgtatttaatattacaagcttcatttagtgctctatcatttggcatttacatttttacatagttttaaaattatatatatttctttgtattttttatctaattttatacaattttaaaaatcatgcacctctaatatctattgactaggtttagctttcatttcagagataacattaatagtgaaaaatattatcttaaatgcaaagatattcattatttaaaaattgatcaatgacattcaytaaattatcacagggacgaaaacataaaatgatcatctgtagagatgcagaaaaataatttgacaaaattcagcactgatttataagaattatcagcaaaataagaacagaaatgaaaattgaccaacaaccagaaatgacagcaacaacaaaataccaagtcagtaaagatggagagaaatagggaagcagtgaaggtagatgtcatttctgtttttagtggtggagtacaaggtgttcttgtgcttgaag

SEQ ID NO: 782578 - DNA, 626 bp, Homo sapiens
atatttggatgtacaaaacatattgagagcaaaatatgatggaaatttaggtgatgctctttgagcattgcttccattttccaataatgtaaccaggaatcactgttcatgtaattaaagaacaataagtctatgtgaatcaaaatatacatatacatgcaaatgttaaacctcagtaggaagaggcccattctcttgcttgctgatatatatatatatatatatatatayacacacacacacacacacacacacacatatgtatgttgtgtgtatatgtatatacacacaacaatctataggcttgccttttaaaatagtataagcaacaaattttaagagaaacaataatgagtgtgtaaaacattagatatgtgtatgtacctttgctattatttgtggaaatggggctataaaataagctcctttattttcttttgtaaaacatttctttaatatgaagtaatgcaatacgtatttatgttctaagtgttaatttccttggatataaaataatatcttgttcctttgattctcttacatataagtgtatttactcagatattactccaaatacaccagatatattcaaagttgaaaaaatatatactttggaatgtattatc

SEQ ID NO: 782579 - DNA, 622 bp, Homo sapiens
atgttgctgattgctcacttgctcaagccagaagcttagaatacatgcttgattcttcactttcctgtgggtttatgccaaatcaatttcaaatctatagatcttatcctctaaataacatacagcatgcctacttttttctctctctcgactactgtcacattaattcaaaagaaaaagactgatgattcctaacttcctggcttcagtaattggcaacgatgacatcactactaaggcttcacttctcacctctgcttccatatgagtgtaatgttattttctcctatgacagataagtttatttttcaccattaaaaggtaagaaactcackcataaccaaagttggaggagacagttattttttttccccagcttgcctgttaaaaccataaggaatgattaatctgccatggtgcttgatgtggcccagggatgtgctcagactcagtcatgtaggggcaggtggtattaacattagttcaaacatggaaccatggcatgtgttagaaataatggcttatattaggaaccggacataaaattgtcgtgagcaagaaagttacctcaatttgagtctactagaagtttcagagtgccatttcacatggccacaaagtt

SEQ ID NO: 782580 - DNA, 553 bp, Homo sapiens
aaactccattcaggcgtgagtgctgtagtgccgttggctgtgagttcaatgttaatgaatgaacaatgtatattatttatttattcttcatttaattaattattattattattttttttgagatagagtctcactctgttgctcaggctggagtgcagtggtgcagtcttggctcactgcaacctctgcctcctgggttcaagcgattcccctgccttmgcctcccaagtagctaagactacaggcatgcgccaccatgcctggctaatttttttttttttttttttttttgtagttttagtagagacggggtttcaccacgttggccaggctggtctcgaactccagacctcaaatgatctgcccgccttggcttcgcaaagtgctgggattacaggcgttagccactgtgcctggccaacaatatatattaaataagcacacatacaacaaaagtaggtgttggtaagcttacaaaagtgtgaccagtagcttgctgaaacctaactttttatttgttcatggaactttctagaccgtaactacactgaat

SEQ ID NO: 782581 - DNA, 616 bp, Homo sapiens
ccttcaagcacaagaacaccttgtactccaccactaaaaacagaaatgacatctaccttcactgcttccctatttctctccatctttactgacttggtattttgttgttgctgtcatttctggttgttggtcaattttcatttctgttcttattttgctgataattcttataaatcagtgctgaattttgtcaaattatttttctgcatctctacagatgatcattttatgttttcgtccctgtgataatttartgaatgtcattgatcaatttttaaataatgaatatctttgcatttaagataatatttttcactattaatgttatctctgaaatgaaagctaaacctagtcaatagatattagaggtgcatgatttttaaaattgtataaaattagataaaaaatacaaagaaatatatataattttaaaactatgtaaaaatgtaaatgccaaatgatagagcactaaatgaagcttgtaatattaaatacaatctttagaaactcttttgcagtgcaggaaaaaaatagaactgaaaacaaagcagaagaaatcacagatataaaattaaagaggatagaattaagcaccggagttcccacatctaaagtg

SEQ ID NO: 782582 - DNA, 582 bp, Homo sapiens
gatagagcactaaatgaagcttgtaatattaaatacaatctttagaaactcttttgcagtgcaggaaaaaaatagaactgaaaacaaagcagaagaaatcacagatataaaattaaagaggatagaattaagcacckgagttcccacatctaaagtgaaaatctaagaatttaaatatcattcaaatgcagactaaaatacaatataaaataaaatttcctgagctaatttttaaaatactgcttaatttgtaggtaaaaatgcagactaattttctgactatattactataaaaaccttctacaaatattttttaactaaaattataagaaaaacatccgccataaacacgtaagattagtattttcgtttctgaagtataaaatgtctggatagacttgagcttgttgctttagttttatatgtgaagactggaaaaattctgttttgttttgaaaaatattttgagctaaaaatgttgtattccacatttgttaggaatggaagtctttaaaatatgaaatatttccaattgaagaaaaatagtgaaaatgaactttatctgaataagattaatgaaaa

SEQ ID NO: 782583 - DNA, 609 bp, Homo sapiens
atatctaaaaatgtggttattgtgttgtgtagtgttaatgactgcatgtttgtgttgcaccataatctacatattaaagccccactccccaatgagatggtatttgcaggttggacttttggaagacaaatagatttagatgaactcattaagttggagcttttatgagtgcccttatgaaaagagagagagaagatcactcttactctttctcgcttgctctctctttctttgttatgtgaggacacagcaagaatatggaaagtggccatctggaagccaggaagaggaccctcacyagtaaccaaatgttccagcacctaaatcttgaatgtctcagtctccagaactgtgagaaagaaatatctatatttaagcacccagtttttggtattttttacagcaacccaagctgacgaatacctatggtaaatcaaggtttaacttataaaaaatagtcaaactatcttccaaagtggatgtgttatttttattttgcattttgaccaaaagggaatgagaggtcctgttgccctacatccttgccagcaattgatttgatcagctttataaattctaattattttaataagtaagtagtggcatctc

SEQ ID NO: 782584 - DNA, 528 bp, Homo sapiens
ggtgtgcagtaatatctcattgtggttttaatttgcgtttccctggtgatcagtgacgcagagctccttttcatgtacttggccatttctatgtctttgtagaaatgtctgttcaattattttgcccatttcttaatttgcttaatttttttttctgttaagttttatgagctccttatatatagatggtccctgaagtataataggrttatatctggataaacccatcataaataaaaaatcataagtcaaaatgaatttaatacctttataaatccagcataaagtcacaaaaatcatcagttgaactatcataaattagagatcatctgtattttggatattaaccctttatcagatatatggtttgcaaatatttttttttcatttcataggtcgtcttttcatttggttgattgtttcttttcccgtgaagatgctttttcgtttgattcagcagactacattaagacattgtgatgtgaagtagagccctaaaatgaagcagtagctgttaaggggatatgt

SEQ ID NO: 782585 - DNA, 528 bp, Homo sapiens
aaatccatccaaaacagtagaggaggtgtggatgcaggttacacttaggcacttcatgaatgagaaggaaagtaaggaggtagggggagggtgtcttggttgctgagattttgctggtggatcctgagtcaaaaattgttttctaacatttcctatgaccatgaatttagggtacaggatccatcaaaatgtaatttcaattckcaaaggtcatactctttctagatgagctgcaaccaccagtcacaatattacttaaaaatcttagacaatgtgatttaatgaatgtgagtcaaactctctcagtgagtcaaacccaaacagtccctgtagggactgttgacatcttgagagacagtatccctcgactgtacttccatagcaatttatacacatctctgttgcaccatttatcacgctgcctcctgagttgtaggtttgtgtgtgtcttttcctttgactcctttaggcacaggaccatgtctttcttcttggatcctcccagtacctccatagagccaaaaaatc

SEQ ID NO: 782586 - DNA, 622 bp, Homo sapiens
ttgagtcatctggaagaatccaaataaaattgaatccaacaaaaccaggtaagctttaacccagcaatacaatttactagaatataaaaaccaagctctctccagcatgcaaagatacagccagaaagtagctgtctacaagccaggaagagggycctcaccagaacctgaccatgtcaacctccagaactatgagaaataaaagtctgttgtttaagaaaaaaaaaaaaaaacagacaacaaaaacaaaaaacaccagcaccaatagcaacaatcctatagctttagtatgatatatcagtaggccaaaagagaaaatattatatttattttagtggcagaaatgacactttatataattcaattaaaagttaatattactactataaccagaatttttttatgataaaagataacttttttaagcagcacaatctagcataaaagtagaaccattctttcaaagtcaggaacaaggtgagaaatgttgctttattattttttaagcttgtttgtaaagttctagcaagggcaataagataagaaacaaaataattaataataattaagaagacagttctatcactattcactgaggatatgattcagaaaatacagaatc

SEQ ID NO: 782587 - DNA, 513 bp, Homo sapiens
aatctacagatttgaggcaatccctatcaaaatgttaatgacattctacacagaaatagaaaaaaaaaatcctaaaatttatatggaaccacaaagacccagaatagacaaagctatcttaaggaaaaagaacaaagccagagaaataacagtacctgacttcaagttatacttcagagctatagtaacaaaaacagcatggtactggcattaaaaacagacacatagaccaataaaacagaatagagcacccagaagcaaatccacacatctacagtgaactcatttttgacaacggtgccaagaatgtacactaggaaaaagtgtctcttcaataaatggtgctgtgaaaactggwtatacatatgcagaagaataaaactagacccctatctcttgccatataaaaaaatcaaataaaaatggattaaagacttaaattttagaccccaaactatgaaactactgtaagaaaacgttggggaaactttttaggacattagcctgagctaa

SEQ ID NO: 782588 - DNA, 618 bp, Homo sapiens
aaattcagttaaattatagatttgaatgatactattgactcccttgattgaattggcataataactgctgaatacacatttttctccccaagtgtacatggaacattcatcaagatggctcatatgctgggtaaaataacaagtctcaataaatttcaaaagatccaaatattataaagtgttttctaaccaaaatggaattaaatttgaaattaataagctatttagattttttttwaaaaaaagaaatattacgggagaatgttcctgaaatctagcacatttcatactgaacagtaaaagactcacactccagggattcagtattttttctcttctgtcaattaaaggaatttgattgttaatttaaaaacccagtctttataagtatgtgattctgattttattgtaagtgtttgttcctggtggttttggttttggagcttgcatactcccacaccaagaccctaagagtggagctacaaaggatggagcctgtctccattcactttggaggcctgcagaaaaacccaacactgtttttttttttttccaagttggataaactcttaacgtttcacagtggggtgttgattttcctggccagcctgctgaact

SEQ ID NO: 782589 - DNA, 588 bp, Homo sapiens
gttgaagagtgtttgtgtgtgtgtgcacgcgcacgtgcactgtgtgcacaatatatgtgtttccttattgatcctgcctggtgtatggagtccccgggatttctgggctagtgtcatcttccacatttccaattacaccaattacatatacgtttgtaagatattttcccatggttcttggataatctgttctttttattttccactcttgtttctgtttttttatgtgtaaatttaaacaaactgttcaaaagctattttttatgtccattttcatttatatctaatttcatgtttataatttcttctaatttgtcttcaagttgactgaatttttccwtggctgtatcgagtgtactaaaaaactcatgaaagatgttctttatctccgatcccatattttaaatttctagcatttatttgattctttttcacagtgtccatctctgtgttgaaatttctcatgtgttcatgcatgttgtccatgtttttgcactggaatctttgctgtgttgataatatttgttttatatttccagttgtttcattgtctggatgatattttagtctggttctcttgattgtctg

SEQ ID NO: 782590 - DNA, 600 bp, Homo sapiens
ttcccctcactttttctcttcacctcccaaaaattaccctaagtgtatataaaattctgcgtataccaaagaccttacttatgaagttgctgatgtctcaggtttatgtacaactctgagaacattcaagaaagtgctgcctggctcacacttgtaatcccagcactgtgggaggccaaggcaggtgtatcacctgaagtcaggagtttgagaccagcctagccaacatggtgaaaccccatggtgtatttttagtctccactaaaaatacaaaaaattagccgggcatggtagagcacatctgtgatcccagctacttgggaggctgaggcaggagaatcacttgaaccctggaggcagaggttgcagtgagctgagatcacaccactgcactcctgcctgggtgacagagcccaggctgcctcaaaamaaaaaaagaaaaagaaagaaagaaaaaagtgctccccaagcccttattctacccttatcccacgtatagtgtaacctctctggacttatgaggcactagcccacatggaaagagatcagggcactggaagaacgctttgctttctctacttcctatctcctccctatgta

SEQ ID NO: 782591 - DNA, 538 bp, Homo sapiens
tgtggtaattaaggggttaattaatcaaaaggatataacaatcttcaatgttaagggatctaataacaaacagagcttcaaaatatgtcaaataaaacctgatagaactgcaaggagaaatacataaatttacaattacagtcaaatatttcaacactcctatcttaataatcaatagaataagtagacagaaaataagtacatacagtcccagctacttggaaggctgaggtgggaggatcgcttgagtccaggagatggagtctgcagtgagccgacattgtgccactgcactrcagcctgggcaacagaaaccctgtctcaaaaaaaaataataatacttttaattctttaaaagcctgatttttttctttagttgacagtatttttcagttctaaaatttccatttggaaattttatgatggcagagccctcatgaactaatcaccttccaaaggccacacctcttaatactgccacattaaggattaagttccaacctacgaatgctgggagacacattcagattatagcagg

SEQ ID NO: 782592 - DNA, 580 bp, Homo sapiens
caaatcagtggtgaaaagacagtctattcaacaaatagtgctggaacaactgcatatctatatcaaaagaaataaaccttcaatccataccttgtactttttgcaaaaatgtatcagacctaaatgcaaaacctaaaagtataaaacttaaaaaaaatggaaraaaataattgtgactttgggttaagcaaagatttctaagagatgacacacaaagtatgctccatagaagaaaaacaagataaactggacttcatcgaaattgcaaacttcttatcccaattaccctgatttgaccattacacattgtattcatgtattgaaatcacatgtgcccccaaaatatgatgtatcaatataaaaattactaacatttcctctttaaaaacagtaaaaggcacccttaagagaatgcaaagaaaatatgcagtctgagagaaaatatttgcagaagctataactgataaagaacttgcatccagagtatataaagaactatcaaaacttaatgataaaacaacaatcctatttttttaaatggacaaaatacaaatggtcacttcaccaaaaaagatatgtg

SEQ ID NO: 782593 - DNA, 370 bp, Homo sapiens
cattttctttatccgttcatcagttgatggacattgagtttgcttccaaattttggctattgtaaatagtactgcaacaaacataggagtgcagatatccctttaatatactgatttcctttcctttgggtatatacccagcagtaggattgtggagtcatgtggtagctcaatgtttagttttttttttttttttttttttttttttttccaraacctccattgtactaacttacattacattctcaccaacagcatatatgggtttctttttctccacatcctcaccagcatttgttattctctgtcttttggatataagtcattttaattggcgtgaggtgatatcacattgtagttttgatttgca

SEQ ID NO: 782594 - DNA, 620 bp, Homo sapiens
tctgtatctagctgctctggtggggccttggagaacctttgtatctatactctgtatctaactaatctgatggggatgtggagaacctttatatctagctcagggattgtaaacgcaccaatcagcaccctgtcaaaacagaccacttggctctaccaatcagcgggatgtgggtggggccagataagacaataaaagcaggctgcccagccagcagtggcaaccmgctccggtccccttccacactgtggaggctttgctcttttgctctttgcaataaatcttgctgctgctcggtctttaggtccacgctgcttttatgagctgtaacactcaccgcgaagatctgcagcttcactcctgcgcccaccgagaccacaagcccaccgggaggaacgaacaactccagacgctctgccttaagagctgtaacattcaccgcgaaggtctgcagcttcactcctgagccagcgagaccacgaacccaccagaaggaagaaactccgaacacatctgaacatcagaaggaacaaactccagacgtgccaccttaagagctgtaacactcaccgcgcgggtccgcggcttcattctttaagtcagtgagaccaagaacccac

SEQ ID NO: 782595 - DNA, 549 bp, Homo sapiens
taaaatcttattggaacgcatatttacacattaactatggcaggtttcacactacaaaggcagaattcagtaactgcaacagaggctgtgtggcctgcaaagcctaaaatatttactctctggccctttataaacattgcttgcagacctctttgccggttctccccttcttccttaagatgtgtctgattttaacttagctatcatttttatctcaatggcttctagaagttctgtttggttatgttttttaaagctgtcatgttctttgtgtttcaatttattacattgtttttcttttcttttttttttttgagacgaagtcttgttccattgccaggctggagtgcagtggcacaatctyggctcactgcaacctctgcctcccgggttcaggcagttctcctgcctcagcctcccgagtagctgggactacaggcacatgccaccatgcctagctaatttttgtatttttagtagagacggggtttcaaaacatcttggccagggtggtctcaaaactcctgacctcatgatccgcctgtctcg

SEQ ID NO: 782596 - DNA, 644 bp, Homo sapiens
ggctgctatggatcccatcacccaggcactgagcacggcacccagcaggaagtttttcagccattgccccctcccaccctctcctctacagcggtccccagtgtctgctgctcccacctttgtgcctctgcgtacccagctattagctcccactgatgcacgaggacatgctatatctggttttctgttcctgccttacctctcttagaataatggcctccagctgcatccatgtgactgcaaagaacacgaactgattcttttttatggctgygtagtattccatggtgtctatgtaccacattttctttatgcagtccactgttgatgggcacctaggttgattccatgtctttgctgttgtgaatagtgccatgataaacatgtgagtgtatgtgtctttttgatagaagtatttattttcctttgagtcatgggattcctgagtgaaatggtatttccacttttagctctttgaaaaattggagacagggtcgttgcagagttgattaagttaaaacaaggccatgagggtgccgaatccatgtcaggggcgtccttagaagaagaggatatattaggacgcacagagacaccctgtgtccatgtgcacagaggggcacccacatggacaccacgaggag

SEQ ID NO: 782597 - DNA, 644 bp, Homo sapiens
ggctgctatggatcccatcacccaggcactgagcacggcacccagcaggaagtttttcagccattgccccctcccaccctctcctctacagcggtccccagtgtctgctgctcccacctttgtgcctctgcgtacccagctattagctcccactgatgcacgaggacatgctatatctggttttctgttcctgccttacctctcttagaataatggcctccagctgcatccatgtgactgcaaagaacacgaactgattcttttttatggctgcgtagtattccatggtgtctatgtaccacattttctttatscagtccactgttgatgggcacctaggttgattccatgtctttgctgttgtgaatagtgccatgataaacatgtgagtgtatgtgtctttttgatagaagtatttattttcctttgagtcatgggattcctgagtgaaatggtatttccacttttagctctttgaaaaattggagacagggtcgttgcagagttgattaagttaaaacaaggccatgagggtgccgaatccatgtcaggggcgtccttagaagaagaggatatattaggacgcacagagacaccctgtgtccatgtgcacagaggggcacccacatggacaccacgaggag

SEQ ID NO: 782598 - DNA, 469 bp, Homo sapiens
aaaaagaagcagaaccctttatcctttaaagaaagtgttttgacagattttccatgtaatgtaaagaaaataaagaagaaaattaagagtctctgcatattcatgatatttcccctgtggagcattttggtgctatttcgatagccgtgggtggtaccctctctggggaagtttctagctctaaatgacatggaacatatacatgctcgcatgagcacattgtatctgcatttataccaaatcctgggcaagatggggagctgaaatcatcactgtgagaaakggacattgactctgaaatacaccaaactttggcctgtgtttgagttcttccaattggctcatattcaaacacagaaatgtcattttaaagataaatcaaagctagtaaataaatattagacattttggtggtcagattctaaataactaagtgaaattgcatccacttaaaatattaagtagtttt

SEQ ID NO: 782599 - DNA, 634 bp, Homo sapiens
tctcatgtgccagattctgcttcctccagctttaggtacaaaggagggcaatgagccgcccttttacctatgttctctcaacacggatcatcaaaagggggcagaaggaagtgggaaggaggcctgagaagttgccaaggtagataagaagtcctcagagggtaccgcaggacattctggggckcagggttgggaggactttgtggagattgtgcttcagtcctgccccacaggactgtcatgagcactggtgggtttgaagggaatgtggacagaaggaagaggcactcactccctggaagggccatccttcatgtttaaaatagcctcagtcaaccctgccagatgacagtgagtcacaggatggtggatttcttacctgccccttggccagagccaccatcgttgcggccagcagcgtggcccggctccctttgtccaaaacaaacactaatgcaggcaggcagccctgtgggtgagaaggctcaggagggtgaaggcttgttttggaggtcatcccatttaatccttcccttctgcctttctctttgtttctcactgaagcccagaaagcttgcctggtcgtgattttttattattagtagtattaatactagtgtcttgcctttcggtt

SEQ ID NO: 782600 - DNA, 634 bp, Homo sapiens
tctcatgtgccagattctgcttcctccagctttaggtacaaaggagggcaatgagccgcccttttacctatgttctctcaacacggatcatcaaaagggggcagaaggaagtgggaaggaggcctgagaagttgccaaggtagataagaagtcctcagagggtaccgcaggacattctggggctcagggttgggaggactttgtggagattgtgcttcagtcctgccccacaggactgtcatgagcactggtgggtttgaagggaatgtggacagaaggaaraggcactcactccctggaagggccatccttcatgtttaaaatagcctcagtcaaccctgccagatgacagtgagtcacaggatggtggatttcttacctgccccttggccagagccaccatcgttgcggccagcagcgtggcccggctccctttgtccaaaacaaacactaatgcaggcaggcagccctgtgggtgagaaggctcaggagggtgaaggcttgttttggaggtcatcccatttaatccttcccttctgcctttctctttgtttctcactgaagcccagaaagcttgcctggtcgtgattttttattattagtagtattaatactagtgtcttgcctttcggtt

SEQ ID NO: 782601 - DNA, 634 bp, Homo sapiens
tctcatgtgccagattctgcttcctccagctttaggtacaaaggagggcaatgagccgcccttttacctatgttctctcaacacggatcatcaaaagggggcagaaggaagtgggaaggaggcctgagaagttgccaaggtagataagaagtcctcagagggtaccgcaggacattctggggctcagggttgggaggactttgtggagattgtgcttcagtcctgccccacaggactgtcatgagcactggtgggtttgaagggaatgtggacagaaggaagaggcactcactccctggaagggccatccttcatgtttaaaatagcctcagtcaaccctgccagatgacagtgagtcacaggatggtggatttcttacctgccccttggccagagccaccatcsttgcggccagcagcgtggcccggctccctttgtccaaaacaaacactaatgcaggcaggcagccctgtgggtgagaaggctcaggagggtgaaggcttgttttggaggtcatcccatttaatccttcccttctgcctttctctttgtttctcactgaagcccagaaagcttgcctggtcgtgattttttattattagtagtattaatactagtgtcttgcctttcggtt

SEQ ID NO: 782602 - DNA, 485 bp, Homo sapiens
ggcataacttaattcttttgttagtattttatagcaagaaaacttagttgaaatctgggcacagagtacttaatggatatagtaggtgagggaagaacacgaactgcctctgtataatagatatccctaaatacaaracattctaagcaaagcaggaagcctgtgagttctttattgtggccctcagtggcagccacgtgaggcttggcatagcagtcgtcctctggtgctcaggggacagtaactgaagctactagggaggatggggtgaccaggagaggtgaaaccagaactgtgctacaaaagagggagaggatttagatggaaagaaaaggaaggctactctgagccgatcacccctggcacagatgtagaggtgggaatgagaatggatatatagagagaggtggccggcctatctgtgtaggaccatgcccacggcaaatgggagaaatgtgtagtcaggtgaagtcaaaccatcaagg

SEQ ID NO: 782603 - DNA, 524 bp, Homo sapiens
gcaaggggatacccacaatggcttactctctctttcagaataacaggcagttccccaggccctatctctccattctcacctccctctgcctagaagggtcctcctggaagcacatctctgctcagcgcccctgctcagctgcggcttctggtgaggcctaccctggccacttcatttcaaattgcarctctccctggcacctccgccagctttactgtcactgttcacaccctacgctgtgttcctatttcctgctccttatctgtttctcttgttggagtgcaaattccacgaaggaagggttttgattctcttcagttcacaactgtgcccagcacctagtagacaacacacatgcagtgaacaaacacatcagtgcaagttcagtaagtgaattctcatggaaacaagctgtggatttagaagcaaaaggcttggggtcccatcctgagtccaccactcgtgcaaacgctccatgattcggtctcttacccctcaggtggggatgctaccagcctgaatga

SEQ ID NO: 782604 - DNA, 464 bp, Homo sapiens
taaaaaaatttaagtttataacataaaaaagttacagtaatctaaggttaatctactatttcgaaaagaaaactattttgcataaatttaatatatcctaagtgtacagtgtttataaagcctgcagtagttatggtcacgacctgggccttcagattcacgctccacacacwcactgactcacccagagcaacttcccgttctacaagccccattcatgctaagtgccctaaacaggtgcagcatttttaatctttgatactgtattttctattgtccctttcttatgtttagatacacgaatacttaccattgtatttcagttgcccacagtattccccacagtcacatagggcacaggtctgcagccctggagcaacaggctccaccacgcagcccaggtgtgtagcaggctgctccgcccaggtgtgtgtcggtgcactctgatgaaattgcctaatgat

SEQ ID NO: 782605 - DNA, 464 bp, Homo sapiens
taaaaaaatttaagtttataacataaaaaagttacagtaatctaaggttaatctactatttcgaaaagaaaactattttgcataaatttaatatatcctaagtgtacagtgtttataaagcctgcagtagttatggtcacgacctgggccttcagattcacgctccacacactcactgactcacccagagcaacttcccgttctacaagccccattcatgctaagtgccctaaacaggtgcagcatttttaatctttgatactgtattttctattgtccctttcttatgtttagatacasgaatacttaccattgtatttcagttgcccacagtattccccacagtcacatagggcacaggtctgcagccctggagcaacaggctccaccacgcagcccaggtgtgtagcaggctgctccgcccaggtgtgtgtcggtgcactctgatgaaattgcctaatgat

SEQ ID NO: 782606 - DNA, 617 bp, Homo sapiens
tcctgccttgttcttttcattaaagttttcttggcttttcttggccctttgtgcatccacatacgttttagaattattttgttaattaccacagaaaatcctgctgaggcttttatcaacatggcattagatttatagaccaattyagggaaaatgaatatatttacaataataacatttctaatctatgaacatggtatatcccccccacttaattagattatcttgaatttttctaaaaaatgttgtagttttttctgcatagcccttgtgcatcttttaaagaagttttagtgttaaatatttaatattttatgcttttgtacgtgaatctgttttagtatttcattttccaactgtgctaatacagaggaatataattgatttttaaaaatattcacctgtgtctaacaactttgctaaactaacttcttaattctaataatttatgctttctacatcgaaatattatcaacaaatagtggtagttttattatctcttagccagtctgcatctctttactgcactggctagaattactagtttaatgctgaataaatgtggtgatataaaatattcttgtttacttcctaatctcagatggaaaggtttcaac

SEQ ID NO: 782607 - DNA, 617 bp, Homo sapiens
tcctgccttgttcttttcattaaagttttcttggcttttcttggccctttgtgcatccacatacgttttagaattattttgttaattaccacagaaaatcctgctgaggcttttatcaacatggcattagatttatagaccaattcagggaaaatgaatatatttacaataataacatttctaatctatgaacatggtatatcccccccacttaattagattatcttgaatttttctaaaaaatgttgtagttttttctgcatagcccttgtgcatcttttaaagaagttttagtgtkaaatatttaatattttatgcttttgtacgtgaatctgttttagtatttcattttccaactgtgctaatacagaggaatataattgatttttaaaaatattcacctgtgtctaacaactttgctaaactaacttcttaattctaataatttatgctttctacatcgaaatattatcaacaaatagtggtagttttattatctcttagccagtctgcatctctttactgcactggctagaattactagtttaatgctgaataaatgtggtgatataaaatattcttgtttacttcctaatctcagatggaaaggtttcaac

SEQ ID NO: 782608 - DNA, 581 bp, Homo sapiens
aatattttacccaatgtgcaatcaaatcctgttctatatatagccatgccacacgcctgggcagagtggttcccgttgtggttttcacttcttgaggtggttagatttagcaaaaatgtggctactttattctttctgatccttttttagacatttaattttggcatttcactcccctcctattttttttttaaatggacacatatggtataaatattttagcactaaatagataatcattgagaataaaaatcatacatttcaattgtgtaaaattgttttctatgtctagaaataaactataatcttttaagtttaaatacaattttagaaagcattttctagtaaatttctgcagaaatgcatatataataatgacataaaattttttcagaaactcaatttattycttaattaaattaccatattatcaaaatgcatgaatatgatattattgtctttataagaaaaaaaattcacagtgtgcccaaatgcaagtaccacacactatggcattgagggtggcctgttttgaacaggtggtgagtcgggacagaggtggccctgctccgccctgcact

SEQ ID NO: 782609 - DNA, 581 bp, Homo sapiens
aatattttacccaatgtgcaatcaaatcctgttctatatatagccatgccacacgcctgggcagagtggttcccgttgtggttttcacttcttgaggtggttagatttagcaaaaatgtggctactttattctttctgatccttttttagacatttaattttggcatttcactcccctcctattttttttttaaatggacacatatggtataaatattttagcactaaatagataatcattgagaataaaaatcatacatttcaattgtgtaaaattgttttctatgtctagaaataaactataatcttttaagtttaaatacaattttagaaagcattttctagtaaatttctgcagaaatgcatatataataatgacataaaattttttcagaaactcaatttatttcttaattaaattaycatattatcaaaatgcatgaatatgatattattgtctttataagaaaaaaaattcacagtgtgcccaaatgcaagtaccacacactatggcattgagggtggcctgttttgaacaggtggtgagtcgggacagaggtggccctgctccgccctgcact

SEQ ID NO: 782610 - DNA, 561 bp, Homo sapiens
ccggtgatcataggtttgttcttgaaacgctctaaatattcaaggtgccagtgtggtaaattcaggagtttgtggtcataatgccttttgtttatttacttatttatttattattattttttgagatggggtttcacttgttggccaggctggtctcaaactcctgacctcaagtgatccgcccaggctggagtgaagtggcgtgatcttggctcactgcaacctccgctttcccagttcaagcgattcttgtgcctcagcctccygagtaactggagttacaggtgcatgccatcacacccagcgaatttttgtatttttagtagagacgcggtttcaccatgttggccatgctggtttcgaactcctgacctcaagtgatccactcacctcagcctcccaaagtgctgggattacaggcgtgagccacctcgcctggcccataatgccttttatatattgattaatcatgctctaatgtggaggactactatttggctgtaagatacagaggggagagttctggagtcaaacccacccggatttgagttctgattcttc

SEQ ID NO: 782611 - DNA, 561 bp, Homo sapiens
ccggtgatcataggtttgttcttgaaacgctctaaatattcaaggtgccagtgtggtaaattcaggagtttgtggtcataatgccttttgtttatttacttatttatttattattattttttgagatggggtttcacttgttggccaggctggtctcaaactcctgacctcaagtgatccgcccaggctggagtgaagtggcgtgatcttggctcactgcaacctccgctttcccagttcaagcgattcttgtgcctcagcctcccgagtaactggagttacaggtgcatgccaycacacccagcgaatttttgtatttttagtagagacgcggtttcaccatgttggccatgctggtttcgaactcctgacctcaagtgatccactcacctcagcctcccaaagtgctgggattacaggcgtgagccacctcgcctggcccataatgccttttatatattgattaatcatgctctaatgtggaggactactatttggctgtaagatacagaggggagagttctggagtcaaacccacccggatttgagttctgattcttc

SEQ ID NO: 782612 - DNA, 526 bp, Homo sapiens
acttgcaactcatcgtgtgtgcaaagccatcaacagccctttgtgacactatcttgggagacagagataatgtctccctctggggcaaaggtcaagtttgcttgcagcccatcataaaaaaatggggtttcccaagcttggactttgtcagctgtgacacacacccaccagatatgcaggatccaactggaactttccacctcacccccatgggacttggagagcaaggggaactgaggcacatatacaactcctctgcctgctgtgtgggagtaataaagctacttgtcctgagctcagggggctcaggtctgctgccagtgtgtacrgaaccactgcaggcccacctgttggcttgcaagtagggtaaaaccccgtagccttcagagtcctggcacccacctttcagagttactgagagaataggcagaggctgtatcatctgccaagcagcttggcagatggcagtccgtcaaaaatatgctattttttttctttttgacactaaggtctgattatatctaca

SEQ ID NO: 782613 - DNA, 617 bp, Homo sapiens
cgtggaggcaccgactaggtgcagggatccttggatggagattcgtggttttttttactacctcctgggattcagcaagaagtccctaacttttatctgtgggcataaaagagaaagagccttttgaaagagcataaccgttcccattgttacggtccagaccgactctgagaggtkcaccttctctcttctggatgttcaccctcgggagtagtgggtggctgtcagggcagctaatgcaggcaattttctttacctgtagggacataaagaaggatggattgaggtgggcgtgagcctatgagtggaaaggcaggtgactcatcagctccccgggaaaacgtgatgtgtacaagcaattaaaggtgcatttgcagcaagtggagaaggcaacccgaatctgcagcttgcattcatttccaagcatgaggggcattgacaggagcctctaaacaccttgaagctgttcttttcattctagaaaacaaatggggacgtgtatttccctgaaaaggtaactgacaacctttagtttccgattcttcctttgcccacgtgtgacacagcaacggtgagtgtgggagtggacaggcggagggtgtggcttctccacctga

SEQ ID NO: 782614 - DNA, 617 bp, Homo sapiens
cgtggaggcaccgactaggtgcagggatccttggatggagattcgtggttttttttactacctcctgggattcagcaagaagtccctaacttttatctgtgggcataaaagagaaagagccttttgaaagagcataaccgttcccattgttacggtccagaccgactctgagaggtgcaccttctctcttctggatgttcaccctcgggagtagtgggtggctgtcagggcagctaatgcaggcaattttctttacctgtagggacataaagaaggatggattgaggtgggcgtgagcctatgagtggaaaggcaggtgactcatcagctccccgggaaaaygtgatgtgtacaagcaattaaaggtgcatttgcagcaagtggagaaggcaacccgaatctgcagcttgcattcatttccaagcatgaggggcattgacaggagcctctaaacaccttgaagctgttcttttcattctagaaaacaaatggggacgtgtatttccctgaaaaggtaactgacaacctttagtttccgattcttcctttgcccacgtgtgacacagcaacggtgagtgtgggagtggacaggcggagggtgtggcttctccacctga

SEQ ID NO: 782615 - DNA, 617 bp, Homo sapiens
cgtggaggcaccgactaggtgcagggatccttggatggagattcgtggttttttttactacctcctgggattcagcaagaagtccctaacttttatctgtgggcataaaagagaaagagccttttgaaagagcataaccgttcccattgttacggtccagaccgactctgagaggtgcaccttctctcttctggatgttcaccctcgggagtagtgggtggctgtcagggcagctaatgcaggcaattttctttacctgtagggacataaagaaggatggattgaggtgggcgtgagcctatgagtggaaaggcaggtgactcatcagctccccgggaaaacgtgatgtgtacaagcaattaaaggtgcatttgcagcaagtggagaaggcaacccgaatctgcagcttgcattcatttccaagcatgaggggcrttgacaggagcctctaaacaccttgaagctgttcttttcattctagaaaacaaatggggacgtgtatttccctgaaaaggtaactgacaacctttagtttccgattcttcctttgcccacgtgtgacacagcaacggtgagtgtgggagtggacaggcggagggtgtggcttctccacctga

SEQ ID NO: 782616 - DNA, 537 bp, Homo sapiens
tgaggaaccacaggcctcttaggaagggtgggccaggctgtagctacgcaatcctgtgcaaactgctagactgttctgaggctgttttccagtgtgtgaaatgggaactgagcttgcctgtcacatgtggctgagtgtggtgatcgggtraggtaagaggcactgcagagctctggaggcagcgttctcaccatacacagtggacattgctatggctttgctttggtggctggagccacggcttgggggaaaggagagaggcgtggaagaggctcggaggcgaccaagctcacacgggagccaagatcacatggaagtctccggaacaagacaaacaagctggtgacctggcgtggccagtaattaccagcccgagtgcattcctgagcagaggagggccggccaggccatgtctggggaggtgcgtctggccgtggctttgggaagcagaagaggctggagcaggcaggtgggggtgaaggtgggtgggcctagggggggatgttagggacctgcacccaggagggcaggagctgc

SEQ ID NO: 782617 - DNA, 537 bp, Homo sapiens
tgaggaaccacaggcctcttaggaagggtgggccaggctgtagctacgcaatcctgtgcaaactgctagactgttctgaggctgttttccagtgtgtgaaatgggaactgagcttgcctgtcacatgtggctgagtgtggtgatcgggtaaggtaagaggcactgcagagctctggaggcagcgttctcaccatacacagtggacattgctatggctttgctttggtggctggagccacggcttgggggaaaggagagaggcgtggaagaggctcrgaggcgaccaagctcacacgggagccaagatcacatggaagtctccggaacaagacaaacaagctggtgacctggcgtggccagtaattaccagcccgagtgcattcctgagcagaggagggccggccaggccatgtctggggaggtgcgtctggccgtggctttgggaagcagaagaggctggagcaggcaggtgggggtgaaggtgggtgggcctagggggggatgttagggacctgcacccaggagggcaggagctgc

SEQ ID NO: 782618 - DNA, 547 bp, Homo sapiens
gagccagcaccatctccctggatctgggcaccttccaaccttgagaagactcaggacggcagaatggtgtgccgtgaggaagttaggaggcagctagcctcggaggcccctctgtggcagctgcccacttcctggacccaggctggccacaggctctcccgggcctgccagccttgcccagcatcctgcagtcagaaggaggaagaggagagaaaagggataaggagagaacaaagctgtcaacactcttttggagggacttraattaaatgcccagaattctggcatgaatggagagggctgctcccacaatatacctgtgccatgccgtgcatcaactctctgcatcctgattttagacaggaggactcaccagtttgaagaaatgatgctatttctagggctaagagccccgaaagaatccagatgggtccgtctggtgcattgtagagctgtaatgtaatgtaatgtagagtctcttatgtaacttactcctgaggcaacaatccagcctcactgcttgcacagcccaacaagcaacaagcag

SEQ ID NO: 782619 - DNA, 597 bp, Homo sapiens
acaactctgaataaatacaatggggcctttgggatggtgggattactgcacttacaagagaggccccagagagcttgctcgctctctctctctctttttttttttttttctttttttgagacagagtcttgctctgtcgcccaggctggagtgcagtgstgtaatctcggctcactgcaacctccacctcctgggttcaagcgattctcgtgcctcagcctccctagtagctgggattacaggcgcccaccaccacgcccagctaatttttgtatttttagtagagatgcggtttcactatgttggccaggctggtctccagctcctgacctcaggtgatctgcccgagtttgctctctctctctttctctctgccatgtgagggcagtgatgaggcagccatctagaggccaggaagacagccctcaccagaacctgaccgtggtggcagcttgatcttgggcttctgtccttacgaactgagaaactaaatctctgttgttgaagccatccagtctatattttgatctaagacacagcaacatttctgccaggttggaaggatgagagttagccatgtgaagtgaaggaggaagg

SEQ ID NO: 782620 - DNA, 597 bp, Homo sapiens
acaactctgaataaatacaatggggcctttgggatggtgggattactgcacttacaagagaggccccagagagcttgctcgctctctctctctctttttttttttttttctttttttgagacagagtcttgctctgtcgcccaggctggagtgcagtgctgtaatctcggctcactgcaacctccacctcctgggttcaagcgattctcgtgcctcagcctccctagtagctgggattacaggcgcccaccaccacgcccagctaatttttgtatttttagtagagatgcrgtttcactatgttggccaggctggtctccagctcctgacctcaggtgatctgcccgagtttgctctctctctctttctctctgccatgtgagggcagtgatgaggcagccatctagaggccaggaagacagccctcaccagaacctgaccgtggtggcagcttgatcttgggcttctgtccttacgaactgagaaactaaatctctgttgttgaagccatccagtctatattttgatctaagacacagcaacatttctgccaggttggaaggatgagagttagccatgtgaagtgaaggaggaagg

SEQ ID NO: 782621 - DNA, 630 bp, Homo sapiens
aacagtgtgaatgtacttaatgccactgaactacacccttaaaaatggttacaatggtattttttatgttgtgtatattttatcacaataaaaaaggcggtaatcaagagctgtcgctgtgtttattttctaagcttgggagtggggtgagggggtcctttcgagccattcagatcttggctccccaacatacatagctcagtgatcttgagcaagtcacttcacctttctgaacctgcttccttgttggtaatttcagtgtaatgatgctttctaggagccgcacgtgtgaaagcgtgcagcatacaagccagtgtgtagttgaaaattgcagcccttttggtactccctgacctggtatttttctttttcttcttcttttttttttyccaagtagctaggactacaggtgcgtgccatcacaccaaactaatttttttaattattatttttttagagatgggatcttgctatgttgtccaggctggtctcaaactcctggactcaagtgatctccacttcagcctcccaaaatgttgggattacaagtatgagccactacacctggcctgcttttttattttagggtttaatcatcaccctttggatccaatcagggggtagggactg

SEQ ID NO: 782622 - DNA, 639 bp, Homo sapiens
gcgcctggctttttttttttttttttttttaagagatcgagtttcactctgtcactcaggctggaatgcagtggcacgatcatagctcagtgcagcttcgaacttctgagctcaagcgactctccctcttcggcttccaaagtgctgggattacaggtatgagccaccgcacccagccaggctgactcattaggggctaatgcagctggtgactttaaattgaagccgatgctcatttaccattccaaaaatcctagggccctyaagaattatgctaaatctactctgcctgtgctctataaatggtacaacaaagcctggatgacagcacatctgtttacagcatggttgatggagtattttaagcccactgttgagacaaactgctcagaaaaaaagattcctttcaaaatattatcgcttattgacaatgcacctagtcacccaagagctctgatggagatgtacaaggagattaagttgttttcatgcttactaacacaacatccattctgtagcccacggatcaaggaataattttaacctttaagttttattatttaagaaatacattttgtaaggttacagctgtcatagatagtggttcctctcatggatctgggcagaggaaactgaaag

SEQ ID NO: 782623 - DNA, 494 bp, Homo sapiens
aaattaggtggtgaccagtggggaaggccagggagtgtagatgaggcctcagatgacctggtagagatgagactggaagaaagcggggaggggcggggaaaccatacccaaatctgggacgtgggcggattagggacacagctggcctgaagccctgtgtctgttgtggagggtggcaagagattgaagagggctttgaaaagctgggcccaccaacaaagtgttytgaacagtactgttgaatgaaaactgatgctggtaccaaaagtatatgaagagtagtgcttgccatcctgcctatggcaggataaaaaatcacagttattttagacttgtaaacacaaatgataaatcaaacaggctataatgggatgggaattaccattcatacagtgggatggggattaattttactagtagtacttgaattgttcatagaaaatttagaaacacaagaaaaaatgtaagtcactataaagccaccagtcaaaaat

SEQ ID NO: 782624 - DNA, 394 bp, Homo sapiens
catggccaagcactgcataaggcacatggattgagaaaacaaatataacagctgtaagggacagcagtacctgacatataacggacagttagtcaatgataattccccaccccactcacctcccttgttcgtgtccctctttcaggaaccaattccaatgcacagcttccagggatgagcaatggaggacagaatggaatagagcaggaactaagcaaggrtgctaatgcaagatatagccggtaggtggcagcagcgtccgtgaaatgagcccggtctcgggcagccttgcctaaatttctcccaagccaagctgtttgactgtgtgcacgtgtatgaacacaggtgtacggatgtgcatgtgtatgggtcaggtgtatgggtcacaggtgta

SEQ ID NO: 782625 - DNA, 630 bp, Homo sapiens
ttaattcttctctgtgtcttgataaagtaactatgaagagcccctggtctcaaaaggctaagcaggggacaactgaccaaagtgggtcaacaggaacttcacctaccctgcttgctaataattgttctgaccctaagatctaatccgattcctctattaagatttcttcactggttctcctaagtcttcagaatctagtccaaacttcttagtcttgcatataagatacttcacaatcttgctccatcaacttttccatccttacctttctgagtataatgaagaaaccaaattcttcttaactttgcctctaatttacatctttaacccatcttttcttactaattaatcttctgtaatttcaacctgttttctsctccccattttgtgatcatctccaagaaaagctacagcagttgactctttcaagccaccatcaatagtttttttcttcactcttgagggattagtcctcttagccctgacctactgcaaaagaccacagtttattcttctgggttccttgtgaatgaacatcaatcaccctgcatgttcttgtaaccaatctgttactttgtttttctctgtcatgaggattgatttcctgggagatcattttcttattcatca

SEQ ID NO: 782626 - DNA, 578 bp, Homo sapiens
caccgcccaggttcaagcaattctcttgcctcaacctcctgagtagctgggattacaggcacccgccaccacgcccggctaatttttgtatttttagtagagatggggtttcaccatgttggccaggctggtctcgaactgctgacctcaggtgatgcacccacctcagcctcccaaagtgctgggattacaggcattagccaccgtgcccgaccatgtttcataatctttatatatgtcgcatccttcttttggtagagcattcctaggtaccttctggttttgttgttactatgcattgttgctaataggttacaagtcaactgattaatgtacattaatattatgrccaaccatcttgataaacttctcttgttatttctagtattctacagatttagggttgtccatgtatacaaccatgccatctgcaaataagaatggttttgtttcttcctttggaatcttcaaaatttaaatttcttttttcttgtcataagttactgtctagaaaccccaatacatgtaaaatataagtggcgattgttttgtccaaacctgtggctggagttaccccc

SEQ ID NO: 782627 - DNA, 578 bp, Homo sapiens
caccgcccaggttcaagcaattctcttgcctcaacctcctgagtagctgggattacaggcacccgccaccacgcccggctaatttttgtatttttagtagagatggggtttcaccatgttggccaggctggtctcgaactgctgacctcaggtgatgcacccacctcagcctcccaaagtgctgggattacaggcattagccaccgtgcccgaccatgtttcataatctttatatatgtcgcatccttcttttggtagagcattcctaggtaccttctggttttgttgttactatgcattgttgctaataggttacaagtcaactgattaatgtacattaatattatgaccaaccrtcttgataaacttctcttgttatttctagtattctacagatttagggttgtccatgtatacaaccatgccatctgcaaataagaatggttttgtttcttcctttggaatcttcaaaatttaaatttcttttttcttgtcataagttactgtctagaaaccccaatacatgtaaaatataagtggcgattgttttgtccaaacctgtggctggagttaccccc

SEQ ID NO: 782628 - DNA, 623 bp, Homo sapiens
gctttttaagccccttatatatctgactaacaaataaaacctcccaagcacttaattcctacgcacataacaaattaaaagtacagtgaatcttaaagttttcttacatgtccaagcatattaatggccttaaaattatgggcaagcagtcagacaggttatgagaaatttatccagatatcattttaaaatttgtaagaattgtgttaaaaaggatggaagatggaaaattgtgtcaagtttaaagtatttgaaccaaaacatgaagactttcaagagtctcaagatataaaaattaaaacttccattctggtaaaggaaccaagaacctacattgggtaaargacgccctcttcactaaatagtattggaaaaattggatatccacatacagaagaatgaaactcaatccccatctctcaccatatacaaaaatcaactcaagagaaattaaaggcttaaatataagactgaaactttaaaaaatactagaagaaaacagggaaaatactttaggacatagatctaggcaaagatttcacagttaagacctcaaaagcacagacaacaaaaataataacagacaaatgtaactatattaaactaaaaagcttctgcacagc

SEQ ID NO: 782629 - DNA, 623 bp, Homo sapiens
gctttttaagccccttatatatctgactaacaaataaaacctcccaagcacttaattcctacgcacataacaaattaaaagtacagtgaatcttaaagttttcttacatgtccaagcatattaatggccttaaaattatgggcaagcagtcagacaggttatgagaaatttatccagatatcattttaaaatttgtaagaattgtgttaaaaaggatggaagatggaaaattgtgtcaagtttaaagtatttgaaccaaaacatgaagactttcaagagtctcaagatataaaaattaaaacttccattctggtaaaggaaccaagaacctacattgggtaaaggacgccctcttcactaaatagtattggaaaaattggatatccacatacrgaagaatgaaactcaatccccatctctcaccatatacaaaaatcaactcaagagaaattaaaggcttaaatataagactgaaactttaaaaaatactagaagaaaacagggaaaatactttaggacatagatctaggcaaagatttcacagttaagacctcaaaagcacagacaacaaaaataataacagacaaatgtaactatattaaactaaaaagcttctgcacagc

SEQ ID NO: 782630 - DNA, 604 bp, Homo sapiens
atccaatgtccatagtttacattaggcttcactcttggtgtcagacattctatggatttgtacaagtgtgtaatgacatgtacccatacctgtagtattatacagaatggtttctctgccctaaaaatcttctgtgccccacctattcatccytccctgagcctaccccatagaaaccactgatatttttaactatctctacaggtttgcctcttacagactgtcatatatttggaaacatacagtatgtaggctttttagactggcttctttcattttgtaatatgcattcaagtttccttcatgtcttcttatggcttaatagctcatttctttcagtgctgaataatatttcattgtctgaatgtaccaccgtttactcattcgcctactgatggacgtctcagttgctttcacattttgccaattcagaatacagtttctataaatatccatatacaggttttctgtgaaaagtttctactccctcaggtaaaagccaaggagttcaactggtggattgtatgataaaagtatgttttgttttgtaagaaacagccaaactgtcttccaaagtggctgtaccatttatttgccttcccat

SEQ ID NO: 782631 - DNA, 604 bp, Homo sapiens
atccaatgtccatagtttacattaggcttcactcttggtgtcagacattctatggatttgtacaagtgtgtaatgacatgtacccatacctgtagtattatacagaatggtttctctgccctaaaaatcttctgtgccccacctattcatccttccctgagcctaccccatagaaaccactgatatttttaactatctctacaggtttgcctcttacagactgtcatatatttggaaacatacagtatgtaggctttttagactggcttctttcattttgtaatatgcattcaagtttccttcatgtcttcttatggcttaatagctcatttctttcagtgctgaataatatttcattgtctgaatgtaccacygtttactcattcgcctactgatggacgtctcagttgctttcacattttgccaattcagaatacagtttctataaatatccatatacaggttttctgtgaaaagtttctactccctcaggtaaaagccaaggagttcaactggtggattgtatgataaaagtatgttttgttttgtaagaaacagccaaactgtcttccaaagtggctgtaccatttatttgccttcccat

SEQ ID NO: 782632 - DNA, 543 bp, Homo sapiens
tctaagcactgctttcactgcatcccacaaatttcgacaagatgtatttccattttcatttatttcaaaataattcttaacttcccttaagatttcttctgtgatccaattctattttagaagtatgttgtttcatcttcaggtatttggggattttgcagctatctttcrgttatttattcctaattgtgctctgagagcagacattgtatgatttctattgtttaaatttgttaaggcatattttatagcccaaaatgtggtctaccttggtggatgttacatatgagtttgagaagaatgtgcattgtgctattgcaggataaaattgtctatagatgtcaattatatcctcttgattgatggtgctgttgagttcaagttcaaccacgttcttgctgattttctgccttctggaactgttcctttctaataggggggtgttaaagtctccagttacactggtggatttatctatatctccttgaggctctattggtttgtgcctcatgcagttcaatgctctgttgttaggtacctctg

SEQ ID NO: 782633 - DNA, 543 bp, Homo sapiens
tctaagcactgctttcactgcatcccacaaatttcgacaagatgtatttccattttcatttatttcaaaataattcttaacttcccttaagatttcttctgtgatccaattctattttagaagtatgttgtttcatcttcaggtatttggggattttgcagctatctttcggttatttattcctaattgtgctctgagagcagacattgtatgatttctattgtttaaatttgttaaggcatattttatagcccaaaatgtggtctaccttggtgratgttacatatgagtttgagaagaatgtgcattgtgctattgcaggataaaattgtctatagatgtcaattatatcctcttgattgatggtgctgttgagttcaagttcaaccacgttcttgctgattttctgccttctggaactgttcctttctaataggggggtgttaaagtctccagttacactggtggatttatctatatctccttgaggctctattggtttgtgcctcatgcagttcaatgctctgttgttaggtacctctg

SEQ ID NO: 782634 - DNA, 529 bp, Homo sapiens
attcatttaaaaaattgcttattgagcacctattacattccagtcactgttccaggtactgaaaataaagtgtacaaataaagagacagcacatctcacgcctgtaatcccagcacttcgggaggctgaggcgggcagatcacgaggtgaggagtttgagaccagcctggccaacatggtgaaaccccgtctctactgaaaatacaaaaattagctgggtgtggtggtgggcacctgtaatcccagctactggtgagcctgaggcagaagaatggyttgaaggaggtggatgttgcagtgagctgagatcgtgacactgaactccaacctgggtgacagagcaagactctgtctcaaaaaataatgataaatatataaaataataaatatataaaaaataataaaaattaataataataataaaaagagacagcacatttgccctggtggaactgaaattctagtagtagacagaagaggcagcagacaagaatccaggaacaaataaatatgtactatgagaagcagt

SEQ ID NO: 782635 - DNA, 575 bp, Homo sapiens
tggtaatgataaacattagtgagttgctttagaaatgaaaaaatagacagcctctggggatttgaaaaacatatgcacttcaaatttgaaaatccaatttaactgtccattataaggagaataaaaaggtaaggataggataattttgcagttacacagcatttgactaaatctgattctgcgatgacaggcacactttaaaagctacaagtctgaatgcgaggagacagcaaatcatttatttatgattgtaatctarctcctgtctaacaagttagcgactgtgctgcttgctctctggctgcggacggcatgtgtacatttgtcagttaacactcttaaaaatatttctcatggaatttctgggtttggaggggaaaaaaaaacaaagaagagggaagataaaagagataatccttgtctaatttacctaaataggcagatgctgaaattgccaaagtttagaaagaaacaaaacttttgtctttaatttttgcggaaagcaactttggtaaatacgtgtgtgcgcaaatgcgtgcacacccacaaacacacacatgcttaaacatggtgct

SEQ ID NO: 782636 - DNA, 605 bp, Homo sapiens
gtgatgaggtttctgaccgacttttgaccaaatggatttccaactgcatttgaaaaggaaaataactttccaatgtaccaaataatgaaaaatgactgggcgagtttataactgttgatttagccaccaacttccccccagccctgactccggttctctggaggttttcattgagcattaattcactctctttctcagcgcacaaacaggtccttctgaatccattctgcagcgtattagcttcaaggcctgttggaaatggcttagcatctgctcttaatagacactgcagcgtgcggggtgggcgagggctgggatggggtctcacggcrtcaaagaacagacatgaaatttcagggaagcagcaccttgagaagctgttgcctggaacaagcacagaatatagcagggaaggtggcttttgggggcctcaagaggcacagacgtgagctaaaccactcataagccctccaacccattcagccacaaagaagatcaaggtaaagagtcaaagatgaatgccgggctggagcttttctggctatgctgcatttgaaacacgctgggagctctttttttaaatattttttattttttgagacaga

SEQ ID NO: 782637 - DNA, 545 bp, Homo sapiens
ctaaagaaatgggcttggggttggctgattactgagctagcagggacctcagatgttgtgggaaatctgcagttaatactttgggggcattttcatataaaatgtaggtgtctgaacttcacacctacctatggaataagaatcttcaagggtgtgacccagaaacctgcattttcaatattctctccccatcatgatctgatggtgagcagttcagaatcatctcattccccctccaccagcacctgttgtatgaatcttctctccggcttccctgacaaaaagatgcttgatctgttttgtttgcatacctccagtaatggggagctcactcactttcatagctattaagtccaaaccttaagcttatgaaacatcccaatgctgacccctggagacwtgcagaacaaacagctgcttctgcacaggttaccttgactgggggcagattacacatggtgtgtgtgtggacagtggccaaagagggggctgggactatattccaatgttgtcagaagtcatcattcagatgaaggaacagtaat

SEQ ID NO: 782638 - DNA, 628 bp, Homo sapiens
aatccaaggttgtttttcaatttgagttaatttttaatatctttattctcttcccaatcaccaaagcaatacattttctattgatttttaaaaatcaaatattgaaaatatgtatgactttaaaagcctcataaaattatacatctgcatatatattagcatttgataggagaaaaatctgcaagaatatacacgaaactgtcgacagaagctagccctggygtgtgcatggagaggggaattgaaagaagcttggctgcacgcaatatatttaaaggaaaatttaatgggcaccaagatatacagtggtgtttgttgtttttcttgttattttggatgatgtcggttgggctttattttggtttttgtttgtttgtttagtattataaaaatcaaacatgttcatggtggaaaaaaaatacagaaatatgtaaaagacccctgaactccagcctcccatttccgcccgtaagtggtaacccaactgtgagaagctccggtagggaagagtgtggctcttgggctggaattcaggctcttctgtttgctggctgtgtgactgtctccaagtcacttgcctactttgggcctcagtttcttcatctgtaaaatggggaggagacataat

SEQ ID NO: 782639 - DNA, 635 bp, Homo sapiens
cacagtggcttccattcctgacatttgaaccagctcctgcacttgaaggacaaggcagccactgggcagctccgggaggcgggaggcgtgactccttcatatcaggccatctggaggagcaccagatttccctcttgtgaaacaaccccccacagtggggatttaatggtcaccacacaagccccaaaaaaccaggccctgcagagccatgacttcacaggggagaaaaccagcccaagaggctgccctcacccaacacttagctctaagtccagactcttaaaggttctgttaaagatctgcggccaggcgcagtggctcacatctgtaatcccagcactttgggaggccgaggtgggcggatcacgaggtcaggagagcgagaccatcctggctaacacagtgaagccctgtctctactaaaaatacaaaaaatyagccaggtgtggtggcgggcacctgtagtaccagctacttgggaggctgaggcaggagaatggcgtgaacccaggaggcagagcttgcagtgagccgagatcacgccactgcactccaacctgggtgacagagcgagactccgtctcaaaaaaaaaaaaaaaaaaaaaagatttgcctagtgagcttggccaacccaa

SEQ ID NO: 782640 - DNA, 630 bp, Homo sapiens
gcagctccgggaggcgggaggcgtgactccttcatatcaggccatctggaggagcaccagatttccctcttgtgaaacaaccccccacagtggggatttaatggtcaccacacaagccccaaaaaaccaggccctgcagagccatgacttcacaggggagaaaaccagcccaagaggctgccctcacccaacacttagctctaagtccagactcttaaaggttctgttaaagatctgcggccaggcgcagtggctcacatctgtaatcccagcactttgggaggccgaggtgggcggatcacgaggtcaggagagcgagaccatcctggctaacacagtgaagccctgtctctactaaaaatacaaaaaattagccaggtgtggtggcgggcacctgtagtaccagctacttgggaggctgaggcaggagaatggcgtgaacccaggaggcagagcttgcagtgagccgagatcacgccactgcactccarcctgggtgacagagcgagactccgtctcaaaaaaaaaaaaaaaaaaaaaagatttgcctagtgagcttggccaacccaagagccttcctgggctctcaggtttcttgaggcaaaacttctaaagatgcaaatagaatcc

SEQ ID NO: 782641 - DNA, 633 bp, Homo sapiens
aagaccaaaaacagcagcaactgaatttgggaatgtggaagaccaaagagatatgggtgagtatgaccaacctgactagggccagtgaaggaaggttaagagtgacttccctaaatgggtcaactgccaggaagcaatgagggagtcacttagcctggtctacttttcagagggaaatggatcccaggaracaaaaagggatccagggcaagtaactttccctttaacaagaactttatcaactcaggagaggacctcgcttccctgtccccaaaacagtttttcatctgcattaacaaacagagctgcacaagctgggtgctggccatcaaggtctggctctcaaatgcccaggaacctgcattcaaaccaagctcctctggtgagtcctgtgcagctgttgaaaccgcaacccacaactggagaaacactatgcaatggggtgactccctgaggcttctttgccagatgaagtttttcaaggtaggtattccccaaagaccctcatactccatcggaaaaacctagagctccactccttggggttctactttagtaagttaaaggtgtatttttaacaaatctgagcaattctgatgggcagctaggtttcggaactactggtgagtctca

SEQ ID NO: 782642 - DNA, 630 bp, Homo sapiens
tcttgttgcccaggctggagtgcagtggtgtgatcttggctcactgcaacctctgcctcctgggttcgagcgattctcctgcctcagactctcgagtagctgggattacaggcatgtgccaccacgcccagctaattttgtatttttagtagagacggggtttctccatgttggtcaggctggtcttgaactcacgacctcaggtgatccaccctcrtcggcctcccaaagtgctgggattacaggcgtgagtcaccgctcctggcatgaactactgttataatggcattggccttggtgcccaggagtactcaaatcctttcctcaatcaccacatcttatacggatcaccacatcttatttctcctggagaaatgtacatggagaacagaacaaggcagacagatattttattgctcattagaactttgacctcaaatctcaatgccaacctccgggttaggcaggactccatggagagcccctttgcttagtctgaagagcccagaataaaggcaggccaaaagtcttgctccatttttgtatatcctaaagtctaatcccaagttgtacatcttatcccttcagtgagtcagagaaataggaacagtttttgaggtggaggttgag

SEQ ID NO: 782643 - DNA, 492 bp, Homo sapiens
tgagatactttcatatagtcatgtaatgtgtaataattacaccatggtaaatggggtgtctatcccctcaagcatttatcctttatgttacagacaattcaattatactcttttagttatttttgaatatataattaaattattattgacgatagtcacccatttgtgctatcaaatactaggtcctattcattcttcctattttttgtgcccattaaccatccccacttccccgccaccagtcccccaccattgcttttgctccrtcctgttgatatttacactcatggagcaaataaacacgttagtattattttgagtaatggtcaaacaaatgaaaaggtactcagcttctttagtaatggtgaaattacagattaaaataacaatgaaatactatttcatgcccaccaggagggcagaagtttaaaattctgtgaacactgggagttgtcattatggatatgatgcaacaggaacttttttatctgg

SEQ ID NO: 782644 - DNA, 556 bp, Homo sapiens
aaacaaacaaacagaaagtaatagttgaaatgcagaatttccaaagtgtttcaagtgcaaaattcaagatactgataagtgtgagcagtatagcaaagtttttatgaaacaaaaaatgacccccaacagctgatgtgttatttatacatagaggtgacccttgaacaatgtggaggttagggatacygaccccctatgcagtcaaaatttcacatatgacatttgactctctaaaaacttaactactaataggctactgttgactggaggctttacggataatataaacagtcaattaacgcatattttgtgggtcatatgtattatgtgctgtattcttacaataaagtacgctagagaaaataaaatgtttttgagaaaatcataaagaagagaaaatacatttactattcattaagtggaagtagatcatcataaaggtctccgtcgtcattgtcttgacattgagtggcgaaggtggaggggctggtcttgctgtctcagaggtgatagaagggaataagtggaggaggtggaaggagaggcaagagaagcc

SEQ ID NO: 782645 - DNA, 594 bp, Homo sapiens
tagccagcggagactctaccaccaagcacggttcgtctgcggctctgatgattgctgccttacattgagcacttactatgtgctaagcacttggtaaaaaccacctcattgaatagttagcagctgcagaggtgggtactgttatacccactttacagatgaggaaattgagacttggagaatttgagcaacttgacttagctcatagagcaataggtagagtacagacaaagagtccggatctatctgactccaaagcctcgttatggtgttagtttccattcaaagggtacttatcgattccttactaaggttaggggctgagagcaacatgggaagcaaagatgactcagacatgtcccctgcccttccggagctttccacatagtgagagatacatctggcactaactctgatagaaagcagagtgacagkgtgccagggacccctagaaaatttaacaaactatgggaatcccaggagaaatgagcacatctgctagaggatatccacaaagacttcacaaggggactgcttcttagaggtgggaagggagaggacgttccaggcagcagaaactgcctgagcagcaat

SEQ ID NO: 782646 - DNA, 578 bp, Homo sapiens
cgtcccctaccgctccccaccaccaccaccatcttttatctattaccacagtagcgttcccatgatcttctcccggcttcccctactctaacccattctctacccagtggccaggatgagctcataaaatgcaacaaaagcacatttgccctctttatatatyccccagtgaactctcatggtgacccatctgtccctccgacctcttacttgcccctctccttggtgtgggccactctcactttgctctggcccgtttcatcccctttctcttccttgggtttacggagccccttcctaccctttggaattattgctcccactgtctctgaatgctcctcccctgccccaccctttgaacagctgggagctgggttcctcctcatcttgcatttttcagctcgggtgtcacctcctcagagaagcacccccctgacttcccaatacaacatagtaatcccagtcccccaccctagtgactctgtagcaaatgactcaagttattccctttgcagcacttatcaagactttaatgacctcattgctgtggagtgtaggatccagatggtgaagacaat

SEQ ID NO: 782647 - DNA, 556 bp, Homo sapiens
ggtggaggttgcagtgagccaagatcgcgccactgcactctagcctaggtgacagagtgagactccatctcacaaaaaaaaaaaaaaaaaaatgcaattttttggagatttgcagcaatttaaaaactcaaggccaggcgcggtggctcacgcctgtaatcccagcacttcgagaggccgaggcgggtggatcatgagttcaggagatcaagaccatcctggctaacatggtgaaaccccgtctctactaaaaatacaccaaaattagccgggcgtggtggcgggtgcctgyagtcccagctactcgggacgctgaggcaggagaatggcgtgaacccaggaggcggagcttgcagtgagcccagattgtgccactgcactccagtctgggcaacagagtgagactccgtctcaaaaaaaaaaaacctcaaagatgaattgtgtagcctagaaatattttaaaaaattaagaaaaagatgccatgtataaaatatttgtagatactagtctattttatcatttactaccataaaatatacacaaatctattattaa

SEQ ID NO: 782648 - DNA, 563 bp, Homo sapiens
aacctagatgatgggttgataggtgcagcaaaccaccatggcacacgtatacctatataacaaatctgcacattctgcacatgtaccccagaacttaaaaaaaaaaaattgtcttagggaagaattcttacattaagtaatcctgtaatggaatatagttgacctgccgctgccctcttctggggaaaaatagagaagttcttgatcttcagaatttggcctatttgtacccacctatcagcttgaaggcagagaccaggactgaattataacaataacagcaacaacaataaaagtaatactaacagcattagcattgtgctaataagcatttatgatctcactgatgggtaccaacatcsctgtaaagtgagaactactatgaattccattttgtaagtgaagaagggctcagagatgaagtatctcaatcaagttcacgcagcttgtaagggatgaagtcaggattcacactcaggcagtcaggctttatttagtaccaccgtgctgtgatgctgctttgtgtcttcagggtctggcacgtggtgtaagtatgcaatatt

SEQ ID NO: 782649 - DNA, 603 bp, Homo sapiens
ttttaaattacttaaagcctatctccatgttcttgctttaaaaacaaatagaattgctcctaaagaaaactgctccctcattttggctctccatatatcagaattgttaaagtttggaaattttgaagtatagcagtatgatactaaattgttaattagtggggctttaaacctaacagtttatcaatatttgaaattactagggcctgatatattttcttaaggaaagtttgcctctagctttaagttggaaagtcactacaattactgtttagaaaagaatggaataattaatactttagaaaacttacattaggacttgtttacaaattatccataatggctatgtactgattgaataaaatstcaattatgaaagaaaaaatttaaatgaaaacatacgagccttgaaaaaacccaaatattcattttcctgtcaatagacaggaaaattaaaacaaaacataaatgcaaattaaatatattactaatttaactctcatttagtcaatagacaggaaaatgaatagaaaaaatttggtattttgtgatagcggaatgttatacagtggcaaaaaacaaatgaatataattgcatacagt

SEQ ID NO: 782650 - DNA, 622 bp, Homo sapiens
cttccagtattatgtttaatagcagtagtgaaagcaggcatccttgctttgtacctgattttagatgaaaagctttcagtccttcactattgaatatgatgtttgctgtgggtttttcatacatggctttattattattttacctagcgtaatgtcttcaaaggttcatcccattgtagcatatgttagaatttccttcctttwaaaggctgaataatattccattgtgcatatatactacatttgcttatccattcatctgtcaatggtcacttgggttgcttcaacattttagcaattgtgaagaatgcttctatgaacatgactgtacaaatatttttttcaagatcctgcttgtgattattttgggtatatgctcggaaatgggattgctggatcatatggtaattcaatttttaattttttgaggaattgccatactgttttccatagcagttgtaccattttacattcccactaacagtgcataagggtttcaatttatccacatccttgccaatatttattttgtcttaatagtaatcttcctaatgagggtggtatctcatagtggttttgatttgcatgtctctaataattagtgatagttagcatcttttca

SEQ ID NO: 782651 - DNA, 622 bp, Homo sapiens
cttccagtattatgtttaatagcagtagtgaaagcaggcatccttgctttgtacctgattttagatgaaaagctttcagtccttcactattgaatatgatgtttgctgtgggtttttcatacatggctttattattattttacctagcgtaatgtcttcaaaggttcatcccattgtagcatatgttagaatttccttcctttaaaaggctgaataatattccattgtgcatatatactacatttgcttatccattcatctgtcartggtcacttgggttgcttcaacattttagcaattgtgaagaatgcttctatgaacatgactgtacaaatatttttttcaagatcctgcttgtgattattttgggtatatgctcggaaatgggattgctggatcatatggtaattcaatttttaattttttgaggaattgccatactgttttccatagcagttgtaccattttacattcccactaacagtgcataagggtttcaatttatccacatccttgccaatatttattttgtcttaatagtaatcttcctaatgagggtggtatctcatagtggttttgatttgcatgtctctaataattagtgatagttagcatcttttca

SEQ ID NO: 782652 - DNA, 655 bp, Homo sapiens
ttgcgggccaccacttcatttacatggggtgaaccaatgtaaagtgtccaatgggaaacctctagtgggtatttggacccaagaagattctgtatctggagcccttgagccactgctcatgcctgttgccacattgtggagtgtactttcattttcaataaaaatctctgcttttgttgcttcattctttccttgctttatttgtgtgtttttttttttccaattctttgttcaaaataccaagaacatggacaccctccaccggtaacagtagcactgctrtataccaacatcaaccaagatgagaatcaaatcaagaactcaaccccattacaatagctgcaaaaaataaaatacttaggaatatacctaaccaaggaggtgaaagatctctacaaggaaaactaaaaaacactgatgaaagaaatcatagatgacacaaacaaatggaagcaaatcccatgctcatagatgggtagaatcactattgtgaaaatgactatactgccaaaagcagtctacaaactcaatgcaattcccatcaaaataccattatcattcttcacagaactagaaaaaacaaccctcaaattcatataaaaccaaaaaggagcctgcagagccaaaggaaaactaagcaagaagaacaaatctg

SEQ ID NO: 782653 - DNA, 561 bp, Homo sapiens
cttttaccaaaactacctttcaaaaagcacttaaaagttgaggccactgacaaaaggaaggaaaaatctcctacagtgattgttgttggaagaatgggaatgatagctcaattaatttagttaattcatactgccccagatgtccttgtcagcttgtcctctagtcttcagactttgtgaataaatcaggtggagtaagtaatttacatgttgtgtctcatttactttttgcaacaaacaaccgccctttactgataatggagattaaggctaaggggaactaaaagaatgttgtctacaatcacacagcaagtgatggaactgaaattcctgttggggtctttctggtttaaagtttattttaaagatcatttctactatatcccaattttaaaatatgcattasaaagaaaacagcaaaaacttcttttttctatttaaaaacaagcaaaaagaaggacataaaagttgcctatattcctgccatctagagagacttaattctgtcaagactgtaggacacattgaccatctttatttgttcctctgccccaaaagaaa

SEQ ID NO: 782654 - DNA, 612 bp, Homo sapiens
ggaatcatttgacatttgactttttgtgtctgacttatttcacttagtataatattctaaaggttcatctacattgtagcatcaaatttcattccttaaggctgaatagtatttcttcacatgtatataccagattttgtttatctattcatccatcgatggacactgtgttacatccaccttttggctattgtgaataatgcagctgtgaacactgttgtacaaatacctattctagtttctgctttcttttgggaatctacctagaagcagaattgctaggccatatggtaactstatgtttaatattttgaggatctgccacactgttttcaacattttacattcccacaaacaatgcataggggttccaatttctccacatctttgacatttataatttgcttttttgataactgccatcctaatggatgtgaagtggtattaatttgcatttccttaatgagtagttatgctgagcatcttttgatgtgcttattggccatctatatatcctttttggagaaatgtctattcaggtcctttgctaattttttttgtttttgtttttttttgagaggaagtttcactcttgttgcccaggctggagtg

SEQ ID NO: 782655 - DNA, 629 bp, Homo sapiens
caccaacagtgcaaaagctttcctgtttctctacatcctctccagcatctgttgtttcctgaccttttaatgatcgccattctaaatggtgtgagattgttatctcattgtggttttgatttgcatttctctaatgaccagtgatgatgagcatttttttcatatgtttgttggctgcataaatgtctttcttttgagaagtgtctgttcatatgctttgcccactttttgatgggattgtttgtttcttgtaaatctgtttaagttctttgtagattctggatattagccctttgtcagatggatagattgcaaaaattttctccaattctgtagatttcctgttccttctgatgatactgtctcttyctgtgcagaagctctttagtttaattagatcccatgtgtcaattttggcttttgttgccattgctttcagtgttttggacatgaagtctttgcccacccctatttcctgaatgttatttcctaggttttcttctaggatttttatggttttaggtcttatgtttaagtctttaatccatcatgagttaatttttgtataaggtgtaaggaaggggttcagtttcagttttctgcttatggctagccagttttcccaacac

SEQ ID NO: 782656 - DNA, 634 bp, Homo sapiens
tcaaaactcagttttaaaaaggaaatttaataaaatccctattggccttgtgttaatttaactgctttatctttttttttttttttttttttttttttgagacagagtctcgctctttcgcccaggctggagtgcagtggcgcgatctctgctcactgcaagctccgcctcccgggttcacgccattctcctgcctcagcctcccaagtagctgggattacaggtgcccgccaccacgcccggctaattttttgtattttcagtagagacggggtttcaccgtgttagccaggatggtctcgatctcctgacctcgtgatccgcctgcctyggcctcccaaagtgctgggattacaggcgtgagccaccgcgcccggccaactgctttatcttaatgcaaaggatgcaatttactaaaaacaaatagctaaacaaataatcttttcctcaatttttgtaaagcaattctaatggttctaattcccttacctagcaaggactgaaagaggcatctttaaaagcaccttctatggaaaaggattcagagaaaagttcctattcccccttatcacaaatggcacattacaggaaagcaaagagctgataaatgtacagaactgggtgttatctaaaa

SEQ ID NO: 782657 - DNA, 512 bp, Homo sapiens
gaggaaacttggtctgtacctccagctgataactccgcgccccacgctgcccccacccagttggcgccaaagaccacaggcggagcttgcgctacccctcctacttggaattgacactagctgggagggggctgccgaagacagctccctatacaacatggaacagaaagacttgtatttagtcggacccatgtctactttgccagaccctcggccactgcgggagggcagggsccaggcgcatttaaggcttaaatgcacatcacatggaaactgactctgccattcatttgatgcaaccatgggcaagtcacttgtccctctctggcctcagtttccctaaaccgagtgagtggcaatttttcaaaacgtctgccaactccaggacttgccgtttaaacctccctctccaagagaggagatactcacctggaggtgtcaggacacggccgagtcagtggcaaaagctccttttgtcgttggagatgacaagttccggagtgagctcggct

SEQ ID NO: 782658 - DNA, 550 bp, Homo sapiens
tcacatggaaactgactctgccattcatttgatgcaaccatgggcaagtcacttgtccctctctggcctcagtttccctaaaccgagtgagtggcaatttttcaaaacgtctgccaactccaggacttgccgtttaaacctccctctccaagagaggagatactcacctggaggtgtcaggacacggccgagtcagtggcaaaagctccttttgtcgttggagatgacaagttccggagygagctcggctgtctgattagaggaaaagagggaagagttacgcgaggcaatcgggagctccgagggtcccgcagcatccttgcctgggtgttcagccctgtcccgacttcgaggcttacctggatgggaaggtgggggccatcagggggtccaggggctggctcggccaggactacctgcaggtcgagaatgtagtcgatgacgcgctgtaggatttccacctggctaagctgagtgcctctcgggactccgggtaccagttcccgcaggcgggagtagcagtggttcatgtcgtccagcaagctcagcg

SEQ ID NO: 782659 - DNA, 583 bp, Homo sapiens
gggaagatgcttcctgccagcacgtgcctgaaggtttcacatgaagcatgggaagcgcaccctgtcgttcagtgacgtcattcttctccaggctggcccgccccctctgactaggcacccaaagtgagcatctgggcattgggcattcatgcttatcttcccccaccttctacatggtatyagtcccagcaggcatccctggggcagacgtgctttggctcaagatggccttcatttacgtttagttttttttaaaaccgtggaggttgcccacgggcctcggcacctggccctggcagcacagctctcaggcccagccctgggcgacctccttggccaagtctgcctttcaccctggggtgagcatcagtcctggctctgctggtccagatcttgcgctcagcacactctagggaataattccactccagagatggggctgcttcaaggtcttttctagctgattgtggcccctccattttccccattttcttatctccctgaccaaaattgctttgacttctaaatgtttctgcttcccagaatgcacctgacttatgaaatggggataatactcccagga

SEQ ID NO: 782660 - DNA, 597 bp, Homo sapiens
cctccttccagaatgtcaggaaactgagaatgcagattcctgcagaaagtggcctcttgttcactaaaggtaaaggtttcacctctggtgagattaaagaagaaaggcctcccaggtgatgctcattcacagggaacttgtacagattctggggggaggaaaaaagggggaaagggctgaaaacaaaactgttgggtgccatgcgcactacctgggtgacaggatcattcatgtcccaaacctcagcatcatgcaatataccctcgtaacatacctgtacatgcaatccctgaacctaaaataaaagtggaaattatttttctttaaaaagtgcaagtctggccactttgggaggccaaggcgggcagatcacctaagatcgggagtttgagaccattctgaccagtgtagagaaacccygtctctagtaaaaatacaaaattagccggtaaaaatacaaaattagccgggcgtggtggcgcatgcctgtaatcccagctactcgggcgactgaggcaggggaattgctggaacccagaaggcggaggttgcaatgagtggagattgtgccattgcactccagcctgggcaacaaga

SEQ ID NO: 782661 - DNA, 596 bp, Homo sapiens
gggaagagacagatctctaccaggagaactacaagccactgctcaaagaaatcagagaggacacaagcaaatggaaaaactttccatgctcatggataggaagaatcattgtggtgaaaatgaccatactgcccaaagcaatttatagattcaatgctattcctattaaactaccattgacattctttacagaactagagaaagaagaagctattttaatgaaaccaaaaatgagcctgaatagccaaggcaatcctaagcaaaaagaacaaacctagaggtatcacactacctgactgcaaactatactacagggttacagcaaccaaaacaacatggtactggtacaagaacagrcacacagatggatggaacagaatagagaacccagaaataagaccacacacctacaaacatctattttttctttcttctcctagccctcgatcatataacataaaatgaattgagttaacattatagtatttaagtattgttaactttatactgttaaagttacagactattaaggagaaaaatacatatcatttaaaaacttttcatccttttctggggaaagggaatggttaatgttt

SEQ ID NO: 782662 - DNA, 577 bp, Homo sapiens
atttagtaaagtctcaggacacaaaatcaatgtacacaaccggtagcattgctatacacaatgaccaagctaagaatcaaatcagcaactcaattcctcttacaatagctggaaaaataaaacctaaggaatatacctaaccaaggaggtgaaagatttctacaaggraaactataaaacactgctgaaataaatcacaaacaaatggaaaccccttccatgctcatggataggtagaatcaatattgtgaaaattaccatacttcccagagcaatctacagattcaatgcaattctcattgaaataccatcatcattcttcaaatgactagataaagcaattctaaaattcatatagaataaaaaaggtgcccacatagccaaagcaatactaagcaaaaagaacaaatctggaagcatcaaattacctgacttcaaattatactacagggctatagttaaccaaaacagcatggtaatggtataaaaataggcacataggccaatggaacagaatagaaaactcagaaataaagccagatatttacagccaactgatctttgaaaaagcaaacaa

SEQ ID NO: 782663 - DNA, 525 bp, Homo sapiens
cacgtgcaaatcatgggagctacaattcaagatgagatttgggtgggaacacagccaaactataccatttcacccttggcccttcccaaatcacatgtccacacatttcaaaaccaatcacaccttcccaagtcccctaaagtcttaactcatttcagcattaactcaaaagtccacattccaagtctcatctgagacaaggcaattcccttctaccaataagtctgtaaaattgaaagcaagttaattacttcctagatacaatgggggtacaggcattgggtaaatatagctgttccaaatggaagcaatttgccaaaayaaaggggctgcaggccccatacaagtccaaaatccagctgggcagtccaatcttaaggctctaaaatgatctactttgactccatgcctcacatcaggtcatgctgatacaagaggtgggttcctatggtcttgggcaacttcacccctgtggctttgcagagttcagccttcctcccagctgctttcatgggctggcattga

SEQ ID NO: 782664 - DNA, 643 bp, Homo sapiens
aaatcagaaatgaaaaagggcacattacaactgatactacagaaatacaaagtatcatagtagattactataaacaattatatgccaacatattggataacctagaagaaatcggtaactttctagaaaaatacaacctactaagactgaaacataaagaaacagaaaataaatttaccaataatgagtgaggagattgaattactaatctaaaacctcccaacagagaaaagcccaagacatgaaaactttaatgctgaattttaccaaatatttaaatagctaataccaatcctttaaaactcttccaaaaaactgagaactaaacactttttaactcattttatgaggcctgtattaccctgatacgaaagctagacaaggatastgcgagaaaagaaaactacaagttaatattcctgatgaaaatcgatgtaaaatttcttaacaaaagcatagcaaaacaaattaagagcacattaaaaggatcatacaccataaccaataaggatttatcccttgaatacaaggatgttttaacatatgtaaatcaataaatgtgattcaacactttaaaacaatgaaaggcaaaaatcatatgattatgtcaatatacacagaaaaaaataaaattcaacattct

SEQ ID NO: 782665 - DNA, 643 bp, Homo sapiens
aaatcagaaatgaaaaagggcacattacaactgatactacagaaatacaaagtatcatagtagattactataaacaattatatgccaacatattggataacctagaagaaatcggtaactttctagaaaaatacaacctactaagactgaaacataaagaaacagaaaataaatttaccaataatgagtgaggagattgaattactaatctaaaacctcccaacagagaaaagcccaagacatgaaaactttaatgctgaattttaccaaatatttaaatagctaataccaatcctttaaaactcttccaaaaaactgagaactaaacactttttaactcattttatgaggcctgtattaccctgatacgaaagctagacaaggatactgcgagaaaagawaactacaagttaatattcctgatgaaaatcgatgtaaaatttcttaacaaaagcatagcaaaacaaattaagagcacattaaaaggatcatacaccataaccaataaggatttatcccttgaatacaaggatgttttaacatatgtaaatcaataaatgtgattcaacactttaaaacaatgaaaggcaaaaatcatatgattatgtcaatatacacagaaaaaaataaaattcaacattct

SEQ ID NO: 782666 - DNA, 605 bp, Homo sapiens
tttttttttcagagtctcactctgtcacccaggctggagtccagtggcacgatctcggctcaccgcaacctctccctcccaggttcaagcaattttcctgccacagactcgtgagtagctaggattacaggagcgtgtcaccatgcccggctaatttttttttttttttttttagtagagacagggtttctccctgttggccaggctggtcttgaactcctgacctcatgatcttcctgcctcggcttcccaaagtgctgggactacagtcgtgagccaccatgccctgcyagcagtttgtttttttcccgaggcctctctccttggcttgaagatagccaccttctaactgtggcctcacatggtcatccctctcaagtgtggtctgtgtcctaacctcttattacaatgttctgtcatacggcattatgacccaccctaatgacctcattttaatttagttacttctttcaagactccatctccaaataccaaatacaatcagactctgaggcactgggggttagggctttcacatatgaatttttggggggacacaattcaatccataccattcagtatgacattcaaaagtaaaactgcat

SEQ ID NO: 782667 - DNA, 605 bp, Homo sapiens
tttttttttcagagtctcactctgtcacccaggctggagtccagtggcacgatctcggctcaccgcaacctctccctcccaggttcaagcaattttcctgccacagactcgtgagtagctaggattacaggagcgtgtcaccatgcccggctaatttttttttttttttttttagtagagacagggtttctccctgttggccaggctggtcttgaactcctgacctcatgatcttcctgcctcggcttcccaaagtgctgggactacagtcgtgagccaccatgccctgctagcagtttgtttttttcccgaggcctctctccttggcttgaagatagccaccttctaactgtgkcctcacatggtcatccctctcaagtgtggtctgtgtcctaacctcttattacaatgttctgtcatacggcattatgacccaccctaatgacctcattttaatttagttacttctttcaagactccatctccaaataccaaatacaatcagactctgaggcactgggggttagggctttcacatatgaatttttggggggacacaattcaatccataccattcagtatgacattcaaaagtaaaactgcat

SEQ ID NO: 782668 - DNA, 603 bp, Homo sapiens
ctgaggcactgggggttagggctttcacatatgaatttttggggggacacaattcaatccataccattcagtatgacattcaaaagtaaaactgcatgtgaacactttataagaactaaaggaaaggacataagctgtaaaatgggagtaaaggaatggcacagggatggtgttaaaggggtggggttaggatggtggttaaagagttgggctagaawtttcccttggtctaatataaaatgaaatgtagaaatagaggcaactcactcataaaaccagggcaatactacagcacgatcttttgataaatataaataattataagagtattctgcttcatttgtgtggacaattaactgtacactatcacttttcagtaataaataagtggttaaatggcaagttgtattatatgcttttgtgtactatgatttgaaactgaaagaattgaacactgtaatattatttcttataactatatgaaggagaataggcgctcaatccaagattgacggagtttctgtaagcccagacagtttctcacactcctaaaaaataaaaatatttttatcaaaaacacacatccttttgttttaagggctg

SEQ ID NO: 782669 - DNA, 568 bp, Homo sapiens
atgtgaggaattgtgtcttttttctcgttttcaagttcatccttctcatccttttaccactatctcttctaggcccctttgctgcaggtattggtgtgagattggaagtgtgggagttggagggaggagaaaaagaagctgcaccatccatgtattgccatatattgtcctggagccacccgtatcagcacacgtgcacatgcacacaagcacacacaagcacagcctctggcagccccttcagtattattgacytatgactgtgtttagaataatgcctgtggcatagaatgttctttatggtttttagctattcttattattgttttatgaacaaaagtgttccagcatcagattaatttgggaaggctttcattcctatgagatttacaataaaagtgataaaaagtttttaattagagaaatctgtttaactttagttattctagcattccaaaactgtttatttcgaaactcaccagatattatcttgtaaaagtgaggtctgtaaaagtattttagaaaatgctcacctagtcggacatctggagtttccagacagtattgc

SEQ ID NO: 782670 - DNA, 657 bp, Homo sapiens
cactggaaagagaaggtgggctccaactcagaagcaaagccaggccgaagtaaagcttgtgctatcaataaaaataatctattaaaacaagaaaatttctgcatactacttcaaaataatagtcaatctcacacttctgggtctttccgygaccctgcacgtctcagtcagtattccaaattcactcccactagtctgcatattttgttttattctgcaggtgcctagtttctggagtcaaaaagcccacttcacttcagtgcacacagatccatgccttcatcttgagctacagagtaatcaagaaaggaatgtccagcctagccacccacagatgggtggcagaggcttggaaaaataataaatctaccctagcatgtttcatctttttctaggctatggccacagcctcctgtctgaatctgtgcatgcattctgcctttccgcagtttgttctccacaatgcagtcaaggtattcttttcaaaatgcaaatctgatcctgtttcttgtcctagaacagtgttcccttcctctcatttcctgattaattcacccctatccttcagatttcaggaactcaaccatcacctccttgggaaacctactctggtcttcctgacatggttagataattatattatatgcctttatagta

SEQ ID NO: 782671 - DNA, 611 bp, Homo sapiens
cccctacctcatatctctgtgtcccaatcccttatttccatgccccaacctcttatatctctgcaccccaatcccttatttccatgccctgacctcttatctctgcgccccaaccccttttcccacttttctggaaggtaaraacccccgaacgccttccctccgtttctctactctctcttttctctaggcttgcttccttcactatgggcaaacttccaccctccattcctccttctactcccttggcctgtgttctcaaaaacttaaaacctcttcaactcacacctgacctaaaacctaaatgccttattttcttctgcaatgcctcttgaccccaatacaaactcgacagtagttccaaatagccagaaaatggcactttgaatttttccatcctgcgaaatctaaataattcttgtcataaaataggcaaacggtctgaggtgcctgacgtccaggcattcttttacacatcagtcccttcctagtctctgtgcccagtgcaactcgtcccaaatcttccttctttccctcccgcctgtcccctcagtaccaaccccaagtgtcgctgagtctttctaatcttccttttctacagacccatctga

SEQ ID NO: 782672 - DNA, 593 bp, Homo sapiens
ttatatatccacagaagttataacttcttataacaaatgctgttacagctcaaatctctgcataataaagcaattgctaaagccctgtgcagtgacccagttcaggcggtatcgtgtatataaaattccacagcgatttaaaaaaatcattctggtttgaattattttattaactccacattacaacttaattgtatggttaggtaacaactttaaagcagttaagccaaaacccacacagccacacctgaatataccagtctcagggagayaccagctagctatattgatgcaccctgttctagcacaaccctctgctcctcaggagaaggagaagggcaggaccattggaagagttagggacctacggcccccttctgtcatgtctgtgtctgcacagatctttccaaagagtagattattggcttagtgttaacctggaggaatatttctagttggggtgatgcagagccctgtcctcagaactgtctggttcacgatttttatcaacgactttgatgaagacatgtttatcaaactggcagttgacgcaaggctgggaggatagctaatgtgattagtgacttgatctt

SEQ ID NO: 782673 - DNA, 571 bp, Homo sapiens
ttatattctgccaaactaagtttcataagtgaagaagtaaagtccttttccagacaagcaaatgctaagttgatacctttcaactagaccagtcttacaagaggtccttaagggagtgctaaacagggaaacaaaagaccattattggccaccacaaaaacatacttaggtacatagctcacaggcataaatataaagcaaggatacaatcaagtctatgtaaaaaacagctaacaacaggatgaaaggatcaaattcacacatatctatactaaccttgaatgtcaatgggctaaatgccccacgtaaaagacagactggataaaaacatcagaccaaatcatctgttgtcttcaagagaccaatctcacatgtaacaacaccaacagcctcaaagtaaaagatggcmaaaaaaaaaatctaccatgcaatgaaaaacaaaaaagagcaagagtcacaattcttacatcagatgaaacagattttaaatcaataaaaatgaaggacaatgaagggcattacataacgataaaggttgcaatctgacaagaagactgaattatcctaaata

SEQ ID NO: 782674 - DNA, 631 bp, Homo sapiens
aattattattgcagagtagaacagatatataataaaaccatcataaattaaatattataaaagcaacaaactcagaagaaaagagaaatagaggttcttaattatatcatctttcagaggagttaatgatgattactgaaattaatatatgtaatttaaataaatctatgctgaatacaagttattgattaatttttttttaatttagagggacattttggtacctattmcctgatatgatgaagacaatatgaagtcctacaattttttcattcaccttagttgcatttttcattatattcatgtcaaattaaaattactagcttctattttaaaacagcatttatccaagcatattacttagaaattatgttgtcgttttctttctcatctacaaaattttgtctaaatttttatttccctctccacatatgtagaaaagttgtttaaataatctatatggaatattaatggtaatgatttctatttcaagtaatttattgctttcattaaaatcatgtcaaattaaaattgctagatgcaattttttaataactttttcccagtttttagtttggcttaatttagtttaggttgaatatgcattatcacttaaaattgtcatattatt

SEQ ID NO: 782675 - DNA, 540 bp, Homo sapiens
cagaaataagaccacacatctacaactatcttatcttcagcaaacctgacaaaaacaagcaatggggaaagggttccctatctgataagtggtgctgggagaactggctagccatatgcaggaaattgaaactggacccctttcttataccttatacaaaaatcaactcaagatggattaaagacttaaatgtaaaacccaaaactataaaaaccctagaagaaaatctaggcaataccatttaggacatagtcaggagcagagattttatracaaaaacatgaaaagcaattgcaacaaaagcaaaaattgaaaaatgggatctaattaaactaaagagcttctgcacagcaaaagaaactatcatcagagtgaacagacatgggagaatcaaagaaaagttttgcaatctatccatttaacaaaggtctaatatccagaatctacaaggaacttaaaacaaatttacaagaaaaaaccaaccccattaaaaagtgggcaaaggacatgaacagacacttctcaaaagaagacatttat

SEQ ID NO: 782676 - DNA, 651 bp, Homo sapiens
atgctaacttgaaagcatttctatttttttagactgagttccttagcacctctacaaagagtttcttaggctagtttggaatatcttagtaaaaactaatatatttatattcatttttaaaattatgccattattttactttcactccgctctgattgatttttttccctgtttggtcaacatttgtaaagttttttatttttagtttttgtatttcaataggtttttggggaacaggttgtgtttggctacatgaatacattatttagtggtgagttctgagattttggtgcacccatcacytgagcaatgttcaccgtacccaatgtgtagtctcttattcctccccaccccctaccctttcccctgagtccccagagtccaatatatcatggcaaggttttatcatatttttgtgttgccataaaatgattgtcaagtagattgttaaatttgaccagtcttcaaagtgttacagagggaacgctttcatatacattatttcttgaaaaatcaaccccacttaaattctactcaagagacttttattgatatatctttctctgatcacctgtattgaggacctactgtatgtcagacattgtgcttagttataagaagtaaagtatttaagacagacatactttctga

SEQ ID NO: 782677 - DNA, 618 bp, Homo sapiens
ttaatttacagagtgttggatggtaagagagaacagtaagataatttcagttttgaacatattcgattgcatgtatgaaagggatattcagtacacagttgaaaatgtgtatatgaatctctagagaaaaaaatgtactggtaacccaaaacatggagttatcagcctggcaatgatcactaaagctggagagtagaatatattcacagagaaagaagagcaatagcctagtatagacccataagagatgtttaagtatgagggagaagggactgctatgttttacactttaacatcccttgtattagttgttccttaacccatggtatcacacctgtggcttgagaagtaaatcatttataagaaagtctaaactctgaatgtaaayggttttttttctttttttcaagaaatttgattatgaaggagttggaggggttatgaagttaaagagtattttttttaacgggagagactagaaccacttttaatattgataagaaagtgggattatcctctcagtagtaaggaggaaagatggctttcatctcagtaggagggatataggaaagaataggacagatgctagtaatatctccttccttaaattccctctcc

SEQ ID NO: 782678 - DNA, 491 bp, Homo sapiens
agcaactcaggattttgcaattacatatagcgtcacaatcaaatacgtgttaggtaaatgtgttgggaaacttgattgtaatgataaaatagagatttttgttttcatcatttaactttgccaattcaaacagaataatgttatggaattccatgtcagagartaagttaacaatgacatattttatgctattaagtcctcaaaacaactaaataaagtaggtcttagtaattttcatgtttagatgagaaacttgagcattaggaaagtgggctaatatctccagtgacacatagatgttaagaggtgcatttgggattcaaactcatgtctttctgatccacaagtcctataataaaacaaatattctaatacagtaagacagaatttataattcaattaatcaaaaatatttattaagtgagtagtatttgggaggtagcattcctggtagagaagtagatataaataataaactcctaaataataaa

SEQ ID NO: 782679 - DNA, 627 bp, Homo sapiens
ttctgaaatcagaatgtcagcatcatcagttcctaaccagggctctcccctttgttgtaaatggctgtcttcttgctgtgtgctcacatgaatttttgtgtgcctgggcagtgtggcgggggagagagagaaaaagagagggaacctgtgtgtgcacatgctctgatgtgtcttcttataagggtactaatctcagcatgagggtcccagctttatgacatcatctaatcctaattacttcccccaaaccatatatccaaataccttcatattggaggttagggcttcaacatatacgttttggagagaacactaacattttatccataacaccaagttgttattactggcaacataatcatggtaattatattagtcagggttatccagagaaacaaaatcaatatgatttgtctctctctctctctctmtatatatatattatatctatatataatatagatataatatatagaaataattctatatataatatatattatacataatatattaaattatatattgtatatataatttaaaaaatggctcatgtgatattatggaggttggcaaagctaaagatctacagagtgaatctgtaaactggataccagagagagtgga

SEQ ID NO: 782680 - DNA, 642 bp, Homo sapiens
atgttttctctatgacactcttagctgactggcggctgtctagatgagggttcaaatccagactccatcactcacctgctacgtgacatgggcaccttctttagtcttgttgagctttgtttcctcatccttaaaaacaataccaatgacaacaacaaaactaccatgcagagcttccatgccctgcacagagactagcgagtaatgaagtaataatacagagtcagcccccattccctatgcartcgacttctgcaaggtccaagctcacagtgcaaattgctcctgcaaagctactttgattaggctcattccttgaccttcttccagacaaatacgtctcagacagggagaaaaaataagtccttcatacatcaactggtgttaccagacgtggcactgagtcccagagtgtggttctaagatggactgagttctgcttttccaatggcagcaacaccacgtggaagtgttgagggggcctccttccataggagctgaccgtggcatctgtgttttcaggtgtctgggcagttgcatgcaggagacttgggctggtgtgtcactcttctcacttcacactgagctgcctggttgcctgcgaaactctgcagggtctttgggttcctgttggaccagttc

SEQ ID NO: 782681 - DNA, 622 bp, Homo sapiens
tacattacattacatgaacctcagtcacttgttttcactgacatatacctgagtgagggcgggaagcaagcccagggttggggaaggtttgacaacatggtgtctagaatttatgccaattgcagtcagtagccgaagaggacartgccacagagaagcagccaaaggccaactcgggtgtccccagggcccgtgaggccagcgcacgtgagactggttcatcagttaccatcaaagctgcacggtgggtgcatgaggctgcagcaccacaactccatggccaaaatggcgctgctgggatcatgaggacccacggcctgccctcacctgacaatcaggaagaatttagactttgtcagtctcaaagaagaaaatgattataaaatccatacagtgttccagggttatctgacaagcaagaacaccagtaacttagttcattagatgccttccagcgacaggatgctacttagacaagttcccctgaaactcagggctgcaagtctctagattgattatctgcaaatgcagccatctgcttcctgctgtgacacttcattcctccgccctggctgcactgcagacagacgctggggagacctcgccttctcagggtggcact

SEQ ID NO: 782682 - DNA, 590 bp, Homo sapiens
cacaccttaattttcattctttcacagttggtctgatgaataagaggtaacagagacccttcatcatgttcagagagaaattataactactcaatggttaaaagagtatagtcacaagaaagaacatccaaaaaccagcatcaataacaacttacgatgttaaaaagacagtaatttgtagatatttcaaagataaattgagtcttcgtggtatgagggcatttcagcaaacgctttcatagcrtcaggatctcacagcacattaaatcccatctgggaaggttcacactcagggtcaggctttccctcattttggcagagcctgtacgttctactaaaactctactaaaatccaacaaatacttgctgaatgcaaacaagtgcgaaacccagggcaaaatgctctctggcttctgctcacttctgggcctggggcagccccacagaacaagccttgttccatcttcaaaacactagggatggggcagattttaccagaaccccatgggtacgggagcacttacagaccctctactgcagcatggaatctttcttcttgttttttaaactttatgtgacatttttcttca

SEQ ID NO: 782683 - DNA, 610 bp, Homo sapiens
gctgttggtgtcagcaacaatgaaacagaaactggggttacagctcagtctgcatatcacggccagtgaagtggaggaacaggcatttctttcgaagacctttctgcaggtgagttagttctccaagtcagcacaggacacagaatctggggctggagggatttggagggcgtcgtgtgcttctccaccttcttgtaccttctcttatcagctgcacatctcacccacctagaagattttgtgaagctgtctgttatataatttgtgttattaaaataataaaaacactgaatattctttctcccaccacatctttctcctttccccagagattctgacaggacttctgactgagagtcattgctmattcaaattgtatttttctaagagatcacagaactaacgttagttttcaaaaacagaaaagttatgaaatcacctgcccaaagtcattgagttggtaacagatgaatctgaaagagaatccagcattcctggcacccaatctcatgtacttttttctttttgactaattttgaaaacttgaaaaattttaattatgtcagaaaagcagtaaaacaagtaaccagcacttttccaagttcattct

SEQ ID NO: 782684 - DNA, 494 bp, Homo sapiens
ttttctgtgccaggatcctgtcctggattccctgttggactcagtcatcgtatcttctggctgctctgtgacagcttttcattttccttgtttttcatgacctggacccttttgaagagcaccgtagtctgtaggctgttccttaattttggtttgtttgctgttttctcatgattaggctggggctgtgggtttgcggaggacagctccctggtgaggcrctttcttgtcccgtcatatgggggatacaggacagggacaggcctcctcaccagcgatgttaaccttgatcccgttggctccgtggtgccggccacatctctccactgcaaacccactgccttccctttccacacgcggttctgcgggagcgagtgcccagggagccagcagtcaagaagacagcagctaatctccaccctgaggaatgtctatgtgtactctgtaattcttccataaaaaacgcctgtcccttctccccgatgtatttatta

SEQ ID NO: 782685 - DNA, 494 bp, Homo sapiens
ttttctgtgccaggatcctgtcctggattccctgttggactcagtcatcgtatcttctggctgctctgtgacagcttttcattttccttgtttttcatgacctggacccttttgaagagcaccgtagtctgtaggctgttccttaattttggtttgtttgctgttttctcatgattaggctggggctgtgggtttgcggaggacagctccctggtgaggcactttcttgtcccgtcatatgggggatacaggacagggacaggcctcctcaccagcgatgttaaccttgatcccgtkggctccgtggtgccggccacatctctccactgcaaacccactgccttccctttccacacgcggttctgcgggagcgagtgcccagggagccagcagtcaagaagacagcagctaatctccaccctgaggaatgtctatgtgtactctgtaattcttccataaaaaacgcctgtcccttctccccgatgtatttatta

SEQ ID NO: 782686 - DNA, 494 bp, Homo sapiens
ttttctgtgccaggatcctgtcctggattccctgttggactcagtcatcgtatcttctggctgctctgtgacagcttttcattttccttgtttttcatgacctggacccttttgaagagcaccgtagtctgtaggctgttccttaattttggtttgtttgctgttttctcatgattaggctggggctgtgggtttgcggaggacagctccctggtgaggcactttcttgtcccgtcatatgggggatacaggacagggacaggcctcctcaccagcgatgttaaccttgatcccgttggctccgtggtgccggccacatctcyccactgcaaacccactgccttccctttccacacgcggttctgcgggagcgagtgcccagggagccagcagtcaagaagacagcagctaatctccaccctgaggaatgtctatgtgtactctgtaattcttccataaaaaacgcctgtcccttctccccgatgtatttatta

SEQ ID NO: 782687 - DNA, 601 bp, Homo sapiens
aaaaacagatgtacttatcaaataagatggggttaagtaccatcaaaattaaatatttcttttcctttggctgacataggcactcgatccaagacatgattttattttctttgtggtgtgggataatgtgaaaaatgaaatctgtaaccctawattgaaggaaatcatagtcttaatggaaccactaaagaaattattccagaattatatatccttccagaaataacaaccctgtaatgtcagcaaatttggagtcagcctgggttacctactgcatacagcaggctctggtcatgttcattaaatctgcctgaggcttagtcaaacttgagtacatgacctttaagaattttaaaaaattcattaatcaatgttctttgcctgaattttgctgtttttgcttctttaacctattatttgtatcattgttttaggttggccaatcctcacacccattgaaaatgagaactgcaagcataacagttctagctgataattaacagaaggttctttcagctcagataccattgtcaaagttcaataatgatattgcaaaatgtcaccaaaaagcataataatgtgagataatcagttataagaa

SEQ ID NO: 782688 - DNA, 681 bp, Homo sapiens
cacacatccagctggtctattacaggcagccccaggccggaaagagatgcagtctacctaattaacttagataacccagtttctctacctcctgctctctcacctgctttccaggtttctgttttggcaaaatcttcagcattgccctggctgagctctcagctgaaaatggcagttctgtcagtcttggctccttcccacacatgcmtaaaatgggtctcaaatactgtatccaattcactacctggcttctctgtttcccttcatttctgtgatttcagaacttttatgacttctgccaggatggatacatcaatagaagagttttcttgctaaagcttaactacactggtgatttcagtttaagcttcctttaactttttgtgaaccctatacagtttatgtcacattgtggactcagtgcctgtctaaaagttacgagtttaaaatgtttcattagtcattgtcaagaagagacactggaactgacgagaagaaaccatcagattaaggaaccccataatgaggggtactgggacatggttcctattgagatagcatctcttaaaatatcttatggatttcctgatttaactgtcaccaggcccaccagggcctcttatatagttctgtcaatgcatacagaaaaattaccaaagtggtgagtttttagttttttca

SEQ ID NO: 782689 - DNA, 490 bp, Homo sapiens
attcactatcttgagaacagcatgggaaatacctgcctacatgattgaattacctcccactgggtccctcccacaccatgtggggattatggaagctagaattcagtatgagatttgggtgaggacacaatcaaaccatatcattccacccctggcccctcccaaatattatgtcctcacatgtcaaaatcaatcatgccttcccaacagttccccaaagccttaacttgtttcagcattaactcaaaagtccgcagttcaaagtctcatctgagacaagacaaatactttmtgcgtataagcctgtaaaatcaaaagcaagttacttcctaggtacaatgggggtacaggcagtgggtaaatacagccattccaaatgggagaaattcaccaaaacgaaggggctacagtccccttgcaagtctgaaatccaatggggcagtcaaatcttaaagctccaaaatgacctcctttgactctatgtctcaca

SEQ ID NO: 782690 - DNA, 603 bp, Homo sapiens
acccgaaaatgtggaagcaactttggaaatgggtaacagggagaggctggaacagtttggaaggctcagaagaggataggaaaatgtgggaaagtttggaacttcctagagacttgttgaatggctttgaccaaaatgttaacagtgatatgaacaataaggtccaggcggaggtggtctcagagggagatgaggaatttgttgggaaatggagtaaagtcactcttactatgcaaagacactgcaggcaytgtccacctgtattagaaacgggcataagataggcgggaaagagtgaaaataagaatttttttctagagttccctagagatctgtggaactttgaacttgagagagatgatttaaggtatctgacagaagacatttctaagcagcaaagcattcgagaagaagcagagcataaaagttcagaaaatttgtagcctgatgatgcaacagaaaagaaaaatctattttctgaggagactgggttgtagaaatttgcataagtaatgaggagccaaatgttaatcaccaagacaatggggcaaacgtctccagggcatgttagagaccctcacagcagaccctcccatcacaggc

SEQ ID NO: 782691 - DNA, 521 bp, Homo sapiens
caattacaataataaccataataacaataataatagcaaaaaacccaatagtacttgccatttatattacattagagccagaaattctatacagaaggagggtggcaccctagttggaaggaggtactgaggctaggagacaccttgtggttgaattggtatagcactttaccttcgattgagaagaygacaactgttaggatcaaagaatggggatgggctgggtgcagtggctcacacctgtaatcccagcactttgggagaccaagatggcggatcacctgaggtcaggagtttgagaccagcctggccaacatggtgaaaccccgtctctactaaacatacaaaagttagctgggcatgtttgtgggcacctgtacagctatttgggaggctgaggcaagagaatcacttgaacccgagagacggaggttgcatgagccaagaccatgccattgcacttcagcctgggcaacaagagtgaaactccatctcaaaaaaaaaaaaaaagaaaagaaaag

SEQ ID NO: 782692 - DNA, 521 bp, Homo sapiens
caattacaataataaccataataacaataataatagcaaaaaacccaatagtacttgccatttatattacattagagccagaaattctatacagaaggagggtggcaccctagttggaaggaggtactgaggctaggagacaccttgtggttgaattggtatagcactttaccttcgattgagaagacgacaactgttaggatcaaagaatggggatgggctgggtgcagtggctcacacctgtaatcccagcactttgggagaccaagatggcggatcacctgaggtcaggagtttgagaccagcctggccaacatggtgaaaccccgtctctactaaacatacaaaagttagctgggcatgtttgygggcacctgtacagctatttgggaggctgaggcaagagaatcacttgaacccgagagacggaggttgcatgagccaagaccatgccattgcacttcagcctgggcaacaagagtgaaactccatctcaaaaaaaaaaaaaaagaaaagaaaag

SEQ ID NO: 782693 - DNA, 521 bp, Homo sapiens
caattacaataataaccataataacaataataatagcaaaaaacccaatagtacttgccatttatattacattagagccagaaattctatacagaaggagggtggcaccctagttggaaggaggtactgaggctaggagacaccttgtggttgaattggtatagcactttaccttcgattgagaagacgacaactgttaggatcaaagaatggggatgggctgggtgcagtggctcacacctgtaatcccagcactttgggagaccaagatggcggatcacctgaggtcaggagtttgagaccagcctggccaacatggtgaaaccccgtctctactaaacatacaaaagttagctgggcatgtttgtgggcacctgtacagctayttgggaggctgaggcaagagaatcacttgaacccgagagacggaggttgcatgagccaagaccatgccattgcacttcagcctgggcaacaagagtgaaactccatctcaaaaaaaaaaaaaaagaaaagaaaag

SEQ ID NO: 782694 - DNA, 583 bp, Homo sapiens
atccacagtagccacatttacggcagtgcccatagttacccagctgatgatctctcaccggtagctactgttctttgtcataagtttcacttcctttttgttgtcaattgtcctttcctgtatcaccattgtaaactttttgatataaagagagcaagcttagatctttttaaaaaataatttttaaaattttattgtttactatttatttacctawggcatgcataaagaaaaatgaatgtactacaagtgtgaatactgtatgtaaaagttcaaatgaacacacccaggtaacccggatccggataggaaaatgcagtattgccagcaccaccttcagattctatccccaactaccatagataacgacagctttgatttctaggagcctagcttagctttgcatgtttctgaactttatttaaatgtttgtatgtacaaacattttgcttgtatgtagtttagtatgtttattttcattgctatataatatcccatttttttcatccattctagggttgggcatttacacagtctgtaatgtttagctaatatgaagagagttgttactcacattctagta

SEQ ID NO: 782695 - DNA, 583 bp, Homo sapiens
atccacagtagccacatttacggcagtgcccatagttacccagctgatgatctctcaccggtagctactgttctttgtcataagtttcacttcctttttgttgtcaattgtcctttcctgtatcaccattgtaaactttttgatataaagagagcaagcttagatctttttaaaaaataatttttaaaattttattgtttactatttatttacctatggcatgcataaagaaaaatgaatgtactacaagtgtgaatactgtatgtaaaagttcaaatgaacacacccaggtaacccggatccggataggaaaatgcagtattgccagcaccaccttcagattctatccccaactaccatagataacgacagctttgatttctaggagcctagcttagctttgcatgtttctgaactttatttaartgtttgtatgtacaaacattttgcttgtatgtagtttagtatgtttattttcattgctatataatatcccatttttttcatccattctagggttgggcatttacacagtctgtaatgtttagctaatatgaagagagttgttactcacattctagta

SEQ ID NO: 782696 - DNA, 556 bp, Homo sapiens
ttagaaagctgagaatctgcctatagggaaagttaagtggatttatggcagggagaaggcaggagatgagcttggaaatttagtcctcaaatgacaaggctaggggtttctcttaccccaatcttggcatgggagggccaccaagagttttaagcaggaaagtattatgagagttaattttttaraaaactcacttaggctgtgtgtaaagagtggattgattgcaattagggagatcaagttggggcttgcaaaaatctttgcaggtgatgggagtgttgcaatttaaaaagtggagatagaaggaaggagccagagatgccagagatagaattgacagttgatctaaaaaagaacaacagctgattgggtttgcctatctacaaaactttggaactggtgaaaaaaattaggaagcagatgtcttcagctggacatgttgagaatagaatctggtatgatcagttttacctaaagacacttagattcatattatatagatactgaattctcagtgcagtggtgatgaaggatgcctagctttttcctgtgtcca

SEQ ID NO: 782697 - DNA, 614 bp, Homo sapiens
ctctctaaatgatttgaacttgcttatggataatcaaggtcataatgtttgggacataaatgcctatatacttataccaaaatatatcagcagttacaattaaaatgatcttccatattatttgtcatatcaggactattactattactataattactatttttattatgctgaaggtatatgataaattttgagatgtgattgatggatgcttaggtttgaagaagcaaaattagagaaagagcttaaaggtgtctctgatatcttcctttctccctggatatgggctctgtaactactacattcaaatataatctggaatatctaaggtcctttcttcacaatcttccacaagggactgagaatcataatgagacacattaatgaagcctagttatcatctgataatactgtcattaacatttattatcacataattagattgtgcattagccatttctcagagccactttaaaagraaaaaaaaatacgaggacatatatgagaacaaacactgtaaggagtgcctgtatagtgataatgtttcagagtgaatgagacattttatcacctggcatattaacagtgtgaaaggacagggatcatatcaacct

SEQ ID NO: 782698 - DNA, 625 bp, Homo sapiens
ggcccggggttggctccctctaagggctgtgaggaagaatctgtttcatgcttttaccattgtttctagtggttttctggcaatctttgctgtttctccacatctttgccaacacttgtgttatctcttatcttttttgatagtagccatcatctcaggtatgaagtgttatctcattgtagtgttgatttgcattaccctgatgatgagtcagacaaaaaaaagactaatattgcagaatctcatttatatgtggaatcttaaaaagttaaacttatagaagtagacagcggaatggtggttactaggggcatggacatataaaaaagrgggtgggtcagtcaaatggtataaattgcagttataacaccaaaagctcagagtgtctgggtgctttcttgcatttgagtactttcctggtggcctgagagcatttcagatctcctagtgcacccagaagccaacccaaggatctggagaatggaaccacaagccagtcttgttgtcccaggaattcagcatgcagcttaggagtgccgagccaagatctgtggccattactcaagcaggggaggagcctacactcagaataggtggggattgatggggtggcacaggaaatggt

SEQ ID NO: 782699 - DNA, 543 bp, Homo sapiens
caacaggtggtgatcccccgagtccagcccacccgcccagcagtgcgcaggcagccaggggttcaaggacccacccacatccgtgcctgacaagtctcccctccacccgactcctgctgcccttagcatatcctcccctcgagggcccccagtgagatttgctggcctgggtgtcagaatgcccctggggtcactcggaccatcttctttaatgtcttcacctgcttaggccatcgagtcagtggaaaggaaaaagcaagagaaaaagcaagaacaagaggacaacttggccgagatcaccaacctcctgygtggggacctgctctccgagaacccgcagcaggcagccagctccttcgggccccaccgcgtggtccctgaccgctggaagggcatgacccaggagcagctggagcagatccgcctagtccagaagcagcaaatccaggagaagctggtgactgccccgcccctttttccagagcccatagagccaggctctttgctcccactgccttccaggcacaaatgtagttgtagcag

SEQ ID NO: 782700 - DNA, 543 bp, Homo sapiens
caacaggtggtgatcccccgagtccagcccacccgcccagcagtgcgcaggcagccaggggttcaaggacccacccacatccgtgcctgacaagtctcccctccacccgactcctgctgcccttagcatatcctcccctcgagggcccccagtgagatttgctggcctgggtgtcagaatgcccctggggtcactcggaccatcttctttaatgtcttcacctgcttaggccatcgagtcagtggaaaggaaaaagcaagagaaaaagcaagaacaagaggacaacttggccgagatcaccaacctcctgcgtggggacctgctctccgagaacccrcagcaggcagccagctccttcgggccccaccgcgtggtccctgaccgctggaagggcatgacccaggagcagctggagcagatccgcctagtccagaagcagcaaatccaggagaagctggtgactgccccgcccctttttccagagcccatagagccaggctctttgctcccactgccttccaggcacaaatgtagttgtagcag

SEQ ID NO: 782701 - DNA, 573 bp, Homo sapiens
ctgccagcaggacacctgctgcttctcacctctcatctccgaacctctctgcttctcccagtggagaaaaagcctccatcctcacagcagcgatcccaaagagagaccccctcctgccccacacccctccaccaagtctcctggaaggattctcatcgccctgcttggtcatgtgccacgcttgagccaaggggactgcgggggcagaggccagggtgctgtgactggcagtgccatctgaaccactggggctgaggcaggcagtaccccaacagaaaaggggctgcagcagacagcgcgacacagagcaagcgcccaagaaatgttcattttgtgaacggccaggattaggagtgagcaggcagaagccaaagggaaaccagacgagggcacccagcatgcctagcccctcatatcyggcccaccctccagacatttgctcggtgcccagtccctgcttggtaggggcgcaaaactggtgcagtgcagagagtcagacagagcccctgcctgatggacaggcacggaccacacaccccacaaagggggacacttgatattgcgtggtgccca

SEQ ID NO: 782702 - DNA, 533 bp, Homo sapiens
gtccacgaacatgggatgtattgccatgtgtttttgtcatctatgatttctttcagcagtgttttatagttctctttgtagagatcgctcacctccttggttaagtatattcctaagcattttattttttgtgtctaggtactgtaaaagggattgagttcaaactccygacctcaggtgatccatccgccccagcctcccaaagtgctgggattacaggcgtggaccaacctggtgaaactccatctctactaaaaatacaaaaattagccaggcatggtggcgggtgcctgtaatccgagctactcaggaggcagaggcaggagaactgctgaacctgggaggcagaggttgcagtgagccgagatcgcgccattgcactccagcctgggcaacaagagcgagactccatctcaaaggtaaaaaaaaaaaaaaagggattgagttcttgtgattgtcagcttgatcattgctggagtatggcaatgctactgatttgtgtacattgattttgtaacttgagactttactta

SEQ ID NO: 782703 - DNA, 533 bp, Homo sapiens
gtccacgaacatgggatgtattgccatgtgtttttgtcatctatgatttctttcagcagtgttttatagttctctttgtagagatcgctcacctccttggttaagtatattcctaagcattttattttttgtgtctaggtactgtaaaagggattgagttcaaactcctgacctcaggtgatccatccgccccagcctcccaaagtgctgggattacaggcgtggaccaacctggtgaaactccatctctactaaaaatacaaaaattagccrggcatggtggcgggtgcctgtaatccgagctactcaggaggcagaggcaggagaactgctgaacctgggaggcagaggttgcagtgagccgagatcgcgccattgcactccagcctgggcaacaagagcgagactccatctcaaaggtaaaaaaaaaaaaaaagggattgagttcttgtgattgtcagcttgatcattgctggagtatggcaatgctactgatttgtgtacattgattttgtaacttgagactttactta

SEQ ID NO: 782704 - DNA, 613 bp, Homo sapiens
taataagatggactgtcggagtccatagatagggatgctggggtctcgtctcacattgattgggtgctagaattataaggagggagaaatgaattttaaaaggaccgttcttcagcagagaataaaaggtctactttgaaggcaaaatattaacatctttttataggccattccttccacccagttcttagaaatttactatatgtcctctcctgttcaccaaagccttttataccaagtagggaggagatagtcactccacaaggttacagtaatattcaggctctcaaagaacatagcatgccagggcaggaagtcgggggtcagggagggttcacaaggaattgaagacaattcctgcctgctggaaagatacggamggcagggtcactcaagacttccatatgagctgtagacactcaaccatgctgcaacacagacatgacagccggtaagttctgccaagccctgaatacgctttacactttctttttttgtgtgtgggggggacggagtttagctcttgttgcccaggctggagtgcaatggcgtgatcttggctcactgcaacctccgcctcccgggctcaagggattcttctgcctcagcctcc

SEQ ID NO: 782705 - DNA, 548 bp, Homo sapiens
aaaagcacaagttgcctgaatagggatctcttccctggttttgtttatctcaaaacctaggcttagtgccagagtgtggatgtttatgtgtgtgtgtcggggagggggtaatgcaaagtggggagggagggagggaaagaccattgatggggagaaagtagaatcaaacagagagagaaagagagagggagagagcgagatcatgaagaccaaacttgcagtttggttttgaggagaagggaatttctggaaacagcaggaaaccagagcagatgactattaaggggttttaagggggttggaccccaggcattggggcttccggtctgggcattgactgcacatctgagcccawcctcacggaggcaacattggtatcagccaacaggatgccgagagggcttggacaacagctctaacaaaggcaacagtgtggacctacactcattggacatacccaaagctgggtgtatgtgtaagacccttgagaccttcacaggatcctgtggggcaagaagggaaccccaaatatgaatttcctgccaggt

SEQ ID NO: 782706 - DNA, 611 bp, Homo sapiens
cagggctgaaggcctgagagcccctggcaagtcactggttcaagtgacaagttcaagagtccaaaagctgaagaacttggagtttgatgtttgaaggcaggaagcatccagcacgggagaaagatgaagaccagaagactcagccagtcaaatccttccaaattctgcctgcttttttttagctgcactggcagctgattagatggtgtccacccagattgagggtgggtctggctctcccagtccaccgattctgacgttaatctcctttggcaayaccctcacaaacacacccaggaacaatactttgcatcctttaatccgatcaagttgatactcagtattaaccatcatagcctccatgacccaaatacctcctaccaggccccacctccattggggattacaatacaacattaaaattgggaggacaaatagccacactatatctggaggttaaatgattcacctaacgtttcaacctaataagtggcagatccaggaattgaattcagccaagtggattccagagcccaggctcttgtccatcaaactacatggcttccaggcatctctctttggtttggtccacctcccatgagctagcatgt

SEQ ID NO: 782707 - DNA, 669 bp, Homo sapiens
ggatcctgacatcaaactgtacctagacttctccatttggaactgggaagggcaagtcacacttatcttttgcatttttgtctctatcttccaaacctcctcttattttaatggctcctaatcatgaaggcaggcaatagcttttactagttagttacacatggcctgttggtagtcatcatagactcttccttcccacagctaatcagtcaccaagtcccactgatcctacctcctaagtatctctggaattcactactttctttatctttcccctgcctgtacctgagtctctctggcctcatcactcagcatgatccagctatacctgtggtccagccataaagaactagttcraagttctcaaaaggtagctcattctctcttgggcttttttatgctatctcctttaactggaaagactttctctaccttgttggcttaatgcattcctacttagatattaagaattaccccacctctgatatcaccagagaaatctctgacttctcctgcccacctacgcctgacattaggacctctgtctctgcagcactccaggaaagcttctcttgtcacagctctcactcagagcacaccagccttgtttccctcacatgttaagctgaatgagtggcagtcatggaagacaacttagaattcctggta

SEQ ID NO: 782708 - DNA, 585 bp, Homo sapiens
ggctcacaggttcaagcaattcttctgcctcagcctcccgcatagctggcactacaggcgtgtgccaccacgcccagctaatttttgtatttttagtagagacagggtttcaccatgttggcccacatggtctccatctcctgacctcgtgatcttcccgcctcggcctcccaaagtgctaggtgtgagccactgcacccggcctgctcttgttttcaatatttctcctgaattataaaatttgaaaatgatytgtttttgttttcaaaagaactttattttgtaattaaatctttgtatgtctctttatttattgacttaccaactttagattgttagttaaagttgtcatctgtttcctggagtggttatttttgctggaagctacctgtggagggtgatcggacccatgtcttccttcctgtgacttctgggttcacctcactttattattatttttctgcctcctgtggatgactcacccttaagtctagccttaagtaaatatttgatatctaccaggagcattcaggaaaaaaaaatcacacttattggtgatagatcagaggaattcccattaaagtc

SEQ ID NO: 782709 - DNA, 565 bp, Homo sapiens
ttaaatatagatgctacatcacaaactctagctaaaataaactatatgccgctcaatgaatgtcaataagtacacagagaaagaatcattgtacctttttgtagcatagtccaagacacccaccactaagtgctttgtttgtttgataaagggctctctctttaggcccccataggcttttgactggtattagtggaaagctagggggatagcagaagtaaggagacaacggggtgcaatcaataaagctgctgcattgaggaaatgatgtgtggtggcaggagctagcttggaagttccacaagtagactggaatatcataattaaccttttggaattgctgaccacaaagcatcatttctaaaagtatggtccaaggctcactggyagtttgcaagggactactgatggggagcaagctgttctatcactgcaagctctctcttcagttattaagccaaataactctccttcctttagattgatttttacagacaaccaaagcttatatattagcaatctatttaataatagattagatagtggcaagaatagaatagataat

SEQ ID NO: 782710 - DNA, 621 bp, Homo sapiens
cactttctccttaaatggatatttggcttgttttaattttttttctgttaccaatgatgctggaatgcacacacctccttgtgcataagtattggccttctttgggatacatagggaagcgtaaatgcattttacattttaagtggcattgccaacttatccttcaagatgatagtatagcagccttttaattttagaaattaagaaggttaagaaggtaaggcacagagattttatagcttgccaratagcataacaatttaggaactagaaatcaaatatcctatttcctttatagatttctagtgtctacatcaaattttttccaaatttataaaagaagaaaataatgtatattaaactagccccatgaaattttgcttcatacttttcctattctttaccagcaaagcaaaaccagttctgattggtcatttaaatcaatgagttgaatacaaacagaagtataattgccaaattatgggttttgggaaactatggtgaacacgagattctttacttgtctgttttaggttatttttccaggttatgtgatcctgtgatcacatatctgccaacattttcatgttttgggtatttcctaatgtaattgaatttctc

SEQ ID NO: 782711 - DNA, 657 bp, Homo sapiens
caccccgggcagtgaggggcttagcgccctctcttatgtgggtggggccacataagagaataaaagcaggctgccagaaacagcagtggcaacgtgtttgggttcctttccccacagtgggagctttgttctttcaytctttgcaataaatcttgctactgctcactgtttgggtctacgttgcatttatgagccctaacactcaccatgaaggtctgcagcttctttgttgaagctaataatatcacgaactcacgggtagaaacaaacaactccagctgcgccaccttaggagctctaacactcaccgtgaaggtctgcaggttcactcctgagccagcgagacctagaacctccccacccccgtaaactgcacacgtctgaacatgaaaaggaacatactccagacacaccacctttaagaattttagcacccaccacggagatctgcggctttttccttgaagtcagtgagacaacccatcaattccggacacatcagaactcaattctgaactgctgggatgggcgattctgatttccctttggctaggggtggtctaaatgctttctctgtggagcggcctcggcttggttcagcccgcttttgttttctactgtgacagggcagcactgagttcaaagcaaagtgtaaca

SEQ ID NO: 782712 - DNA, 657 bp, Homo sapiens
caccccgggcagtgaggggcttagcgccctctcttatgtgggtggggccacataagagaataaaagcaggctgccagaaacagcagtggcaacgtgtttgggttcctttccccacagtgggagctttgttctttcattctttgcaataaatcttgctactgctcactgtttgggtctacgttgcatttatgagccctaacactcaccatgaaggtctgcagcttctttgttgaagctaataatatcacgaactcacgggtagaaacaaacaactccagcygcgccaccttaggagctctaacactcaccgtgaaggtctgcaggttcactcctgagccagcgagacctagaacctccccacccccgtaaactgcacacgtctgaacatgaaaaggaacatactccagacacaccacctttaagaattttagcacccaccacggagatctgcggctttttccttgaagtcagtgagacaacccatcaattccggacacatcagaactcaattctgaactgctgggatgggcgattctgatttccctttggctaggggtggtctaaatgctttctctgtggagcggcctcggcttggttcagcccgcttttgttttctactgtgacagggcagcactgagttcaaagcaaagtgtaaca

SEQ ID NO: 782713 - DNA, 657 bp, Homo sapiens
caccccgggcagtgaggggcttagcgccctctcttatgtgggtggggccacataagagaataaaagcaggctgccagaaacagcagtggcaacgtgtttgggttcctttccccacagtgggagctttgttctttcattctttgcaataaatcttgctactgctcactgtttgggtctacgttgcatttatgagccctaacactcaccatgaaggtctgcagcttctttgttgaagctaataatatcacgaactcacgggtagaaacaaacaactccagctgcgccaccttaggagctctaacactcaccgtgaaggtctgcaggttcactcctgagccagcgagacctagaacctccccacccccgtaaactgcacacgtctgaacatgaaaaggaacatactccagacacaccacctttaagaattttagcacycaccacggagatctgcggctttttccttgaagtcagtgagacaacccatcaattccggacacatcagaactcaattctgaactgctgggatgggcgattctgatttccctttggctaggggtggtctaaatgctttctctgtggagcggcctcggcttggttcagcccgcttttgttttctactgtgacagggcagcactgagttcaaagcaaagtgtaaca

SEQ ID NO: 782714 - DNA, 657 bp, Homo sapiens
caccccgggcagtgaggggcttagcgccctctcttatgtgggtggggccacataagagaataaaagcaggctgccagaaacagcagtggcaacgtgtttgggttcctttccccacagtgggagctttgttctttcattctttgcaataaatcttgctactgctcactgtttgggtctacgttgcatttatgagccctaacactcaccatgaaggtctgcagcttctttgttgaagctaataatatcacgaactcacgggtagaaacaaacaactccagctgcgccaccttaggagctctaacactcaccgtgaaggtctgcaggttcactcctgagccagcgagacctagaacctccccacccccgtaaactgcacacgtctgaacatgaaaaggaacatactccagacacaccacctttaagaattttagcacccaccacggagatctgcggctttttccttgaagtcagtgagacaacccatyaattccggacacatcagaactcaattctgaactgctgggatgggcgattctgatttccctttggctaggggtggtctaaatgctttctctgtggagcggcctcggcttggttcagcccgcttttgttttctactgtgacagggcagcactgagttcaaagcaaagtgtaaca

SEQ ID NO: 782715 - DNA, 643 bp, Homo sapiens
ataaagggacatatcccatcaaaataactccagccacaatctagcttttgggtgacaagtttatgctctccaggagaacagtacaacagagtactagtagcaaagatcagcactctaataggctctttccaagacagaggatagcagagctcagagacatgtttccaacaagaacttcagtgatgkctcaatatttatgggtggttttgaatcaagtattttctcttagtattttcccctcaaaccatctggattgtaactatctggctcctgggttttgccccctcctttttttttttgtaaagtaggcaaaatgttaccaataatatcaaaacaagcagatgtggtcaaataagttatgcctgcagtgaatgcttttgcactaaagatcaaaagtagatgacatattcaattcaatagaggctacatcctagaatcacaaacagaaagaaagcctttggaaaaaaactgttttctctgtcttaaggaaatgtccatgaatacatcctatgagcataaataagctcaaactgcaccttttaaacattcttcgggttataccttctaattcatgactcttctttaagttttacccagttactaagaaaactgatattttcaatatatggatcacattttgggg

SEQ ID NO: 782716 - DNA, 643 bp, Homo sapiens
ataaagggacatatcccatcaaaataactccagccacaatctagcttttgggtgacaagtttatgctctccaggagaacagtacaacagagtactagtagcaaagatcagcactctaataggctctttccaagacagaggatagcagagctcagagacatgtttccaacaagaacttcagtgatggctcaatatttatgggtggttttgaatcaagtattttctcttagtattttcccctcaaaccatctggattgtaactatctggctcctgggttttgccccctcctttttttttttgtaaagtaggcaaaatgttaccaataatatcaaaacaagcagatgtggtcaaataagttatgcctgcagtgaatgcttttgcactaaagatcaaaagtagatgacatattcaattcaatagaggctacatcctagaatcacaaacagaaagaaagcctttggaaaaaaactgttttctctgtcttaagsaaatgtccatgaatacatcctatgagcataaataagctcaaactgcaccttttaaacattcttcgggttataccttctaattcatgactcttctttaagttttacccagttactaagaaaactgatattttcaatatatggatcacattttgggg

SEQ ID NO: 782717 - DNA, 550 bp, Homo sapiens
atatgaataaagctacagttggtttcacattttggcgacactacttagacactgctcaagcatccatgctctcattttgtctggacctcttctctcttttactctggtttccatcatgtttctctattccttgccagtccgtactggattagtcattattgccaaagtgtcagtcacgattgtcactgttcggcagtcactgtggttaaattcttggwctgtatgtctgcaacagtcaaacttcagttgaataattaatatttatttatgaactgatattattagttgttaaaatttcttttctcaggctgggtgtggtggctcacacctgtaatcccagcactttgggaggccgaggcgggcggatcatgaggtcaggagattgagaccatcatggacaacatggtgaaaccacgtctctattaaaaatacaaaaattagctgggatggtggcatatgcctgtaatcccagctactcaggagactgaagcaggagaatcgcttgaaccagggagtcagaggttgcagtgagccgagatggcgccactgt

SEQ ID NO: 782718 - DNA, 592 bp, Homo sapiens
actcctaagttaacatgttttcccccacaattgtgttcacctaattcatacttgaaggcaaaggtacacacagaatttctaactcatccatgtgcagaaaattgtagagtaatcagaaatcagggacagaagactcacattgaaaaaacaagagataaaggataaagagaactcaaagctaaattacaaagcatttttatgatgcttccttttgttggaattgtgaaactttggtgatttttgcaaagggaaataatgtgatgaattcattttctagataaaaataatttggcagcttcttcagactctccccttctgaagtacgagagawgatgggagggtgctaccttatgtaattatattagtccattttcacactgctgataaagacacatctgagactgagctatttacaaaagaaagaggtttaactggacttacagttccacgtgactggggaaacctcacaatcatggcagaaggcaaggaggagcaagtcccatcttacgtggatagcagcaggcaaaaaatgagagagcttgtgcaggagaatgcctctttttaaaaccattagatctcatgagacttattc

SEQ ID NO: 782719 - DNA, 593 bp, Homo sapiens
acactcggaatctctctccagactcatacccaccactgataaattaattctgcggattcacagtcaccccttgaagcttctattgcccccaagttaagcagatgtgacaccactttccttcaaatatatatctgcatctgaacagatagatggataggtagatctagatagagagacgtatctagatatcactgtataaatctagacagttatatcccaactcaacaaagctgttgctagggatagagaaggattgttaatttttattttatatacttttttacgatgcgaaattttacaagtacatattacttttgcaataaatctttcaaaaacctataaaaatatatgcatatacattttagagccaccgatgagacaatgygcttttgacttgggaaattctcagcatatagacttttagggatcatgtatttcacacaaatcactttcaggtctttcatctcattttaagcatgtacttcctatgtgccacatagcttttctgtgttttaattcatttgctcccattgtctggatgagaaaactaaggctgagagaggggaagccacagctcaggggacatggtgggg

SEQ ID NO: 782720 - DNA, 646 bp, Homo sapiens
cttttcctttctcttctctcctcaaatcccctccctgttgggtccccggcctgtctatcccctgatcctcggagaaaggggtgaagaggagggagtctaagtgcatgggggcaaggaactgtccacttccctttccaggtgagccaagcttgrctggggcaagcacctatcggcaacggtctgagaatactcaccaccaacaatcctaataactcagtcttaacaaggataagagcaaaaaaaaaaatatgaacagcctcatgaatatcagcccaaggggagcaggagtgagctgttcagagatgaaagtgcacagaaataaaagctcaatttaatctgctttaaaacccttcaacttaacgtttgtgcttcaaactctgagagtgagaactgattgcggataaatagtttcttaccatgcctggaagctattacacccctctccaacacagtttcctattcagcagtcccagttttcattaccagctctaataagtcttaacattattaaatgccaagcggacgataggaaaaaacggactcagggagggatctctctttagtgcttaaagaggagagctcttaaaccccttctttggtggctccctgccatgagaggggcaactcccccagagaaagcattttt

SEQ ID NO: 782721 - DNA, 584 bp, Homo sapiens
gctcattttgaagaggtcagtagttagggatgtataagttctgactggctaaacagtctggttaaatagtttatcaccttataatcatatcttcttgtcctgtcaatttttttaaataccgaggatgaatagtactttataaacattactagctttctaagaaaagctgatatgcagtacattaaatatagccagagatttccttttttttttttttttttttttttgaggcagggtcttactctgtcacccaggctggagtgcactggtgtgatcttggctcatcatagcctcaacctcccaggctcaatgatcctcctgccgcagccccccaagtagctgggactataggcacatgccaccacgcccagctaatttttgtatttktatttttatttttatttttttagagacagggctttgccactttgcccaggctggtctcgaactcctgggctcaagagatccacctgcctcggcctcccaaagtgctgggattttacaggtgtgagccaccaagcccaactggccttttttttttttgaaacagagtttcactccgacttcattacccaggctggaat

SEQ ID NO: 782722 - DNA, 535 bp, Homo sapiens
tacgaagcttagtttggctgcatatgaaattctgggttgaaaattcttttctttaagaatgttgaatattggcccccactctcttctggcttatagagtttctgccgagagatcagctgttagtctgatgggcttccctttgagggtaacctgacctttctctctggctrcgcttaatattttttccttcatttcaaccttggtgaatctgacaattatgtgtcttggggttactcttctcgaggagtatctttgtggtgttctccgtgtttcctgaatttgaatgttagcctgccttgctaggttggggaagttctcctggataatatccggaagaatgttttccaacttggttccattctccccgtcactttcaggtacactaatcaaatgtagatttggtcttttcacatagtcccatatttcttggaggctttgttcgtttctttttactcttttttctctaaacttctcttctcgcttcatttcatttatttgatcttcagtcactgatacactttcttccacttgatcg

SEQ ID NO: 782723 - DNA, 609 bp, Homo sapiens
tgttaaaaaaaaaaaaacaaatttttcttcaataataaattaacctcaacttactataattttttgactcttataataacatttagcttacaacacaaacacattgtacatctgcacagaagtatttctttttttgtttgtttttttgagacaaggtctgtgtcacccaggctggagtgcagtggcacatacagctcactacctcgaactcctgagctcaagccattgtccagcctcagcttcccaagtagctaggactacaggcacttgctaccatgcccacctaattttttatttttttgtagagatgatgtcttgttctcttgcccaggctggtctcaaattcctggcctcaagcagccctttcacctcagcctcycaaagtgctgggattatgagcatgaacaccatgtctggccttttcttttgtaacgtttttctgttttttaattttttaatttttttttaactttttaaacttttttgttaaaaactaagatgcaaacacacacattaggctaggctacgcagggctaggatcatcaatatactttcatctacctccacatcctgtcccactgggaggtcttcaggggcagtaacacatac

SEQ ID NO: 782724 - DNA, 625 bp, Homo sapiens
ttttgcacattttaatgcaatattaaactttagaatttttaatttgaaatattttaactaaaaatcctttttccaaagtgtaattacttgaaaacttgatttttcaacagatgtttactgattactactatatgtgcagcactgtaaaatattctaaattgcaaaagacatactctctggcattaaaaaacttacagcccagtaaaacaaataaaatgtcagatttttaaaacattttaatgcagttctgcagagcataaattatacacattgaaaggcaaaataaaagccaaccgttgtgcaaataagaaaaccaattctaagaccttactggttgtcttcatgggatttccttatcacagytaacaaaagtgttctttgcaagtggcaagaacaatttagacgtcagatttgcaagtattgtttgtggtattataattagcactgtgtcaagagactaatttataataagcgcctaaattttcacttacttgtctcttcaaatctgaaaacaagtaaacttatttccaccctcaggttcagccttacccattacaccagaaaaacaatacaacacaaaactgtccttagaaggtgaaatatcagtaattcactgtctcatcac

SEQ ID NO: 782725 - DNA, 651 bp, Homo sapiens
aacagcagatatctcagcagaaactctacaagctagaagggattgggccctatcttcaaccgcctcaagcaaaacaattatcagccaagaattttgtatccagtgaatctaagcatcatacatgaaggaaagatacagtcattttcagacaaacaaatgatctgagaatttgccattaccaagccaccactacaagaattgtgaaaaggagctctaaatcttgaaacaaatcctggaaacccatcaaaccagaacctctttaaagcataaatcacacaggacctataaaacaaaaatacaagttaaaaagaaaaaaaaamaaaaaacgaataaaagtacacaggcaacaaagagcatgattaacgcaatggtacctcacatttcaatactaacattgaatgtaaatggcctaaatgctccacttaaaagacacagaagtgcagaatggataagaactcatgaaccaaatatctgctgccttcaggagacttatctaacacataagaactcacataaacttaaagaggtagaaaaaggcatttcatgcaaatggacaccaaaagtgagcggggggagctattcttatatcagataaaacaaactttaaagcaacaatatttaaaagagacaaagatggacattatataatgg

SEQ ID NO: 782726 - DNA, 555 bp, Homo sapiens
ggttgctttatagtgtcactgctttgtgtacttaaatgtgtttttgaaatggttcataaagttcttccctttcaatatttagtgcttccttcaggagctcttataaggcaggtctggtggtgatggatttcatcagcatttgcttgtctggaaaatatcttatttctccttcaattatgaagcttagtttggctggatatgaaattccttgttggaatttctttcagaatgttaartattggcccctaatctcttctggcttttagagtttctgctgggagttctactttttgtcttatgccattctctttgtaggtgacctgacatttctctctagctgcctataaaattttttccttcatttgaccttagataatttgatgactatatatcttgggaataattttcttaagaaatatcttactggagttttcagcatttactgaattttaatgttggcctctctagcaagattggggaagttctcaggaatgttatcttgaaataagctttccaagtttgtcccattctcctcatctctttcaggacaccaaa

SEQ ID NO: 782727 - DNA, 702 bp, Homo sapiens
ctactctgaggagtgcaggcgtgggatccaggttacaaagtgggtcagctagggtgccaggaacacaacgtgggtccctgactgagggggacagtcttaggcatgcagagatttggccagactcttatgggtgactgtgccttagtcacmtctgtcccccacacctattacagtacctggctcctaataaatgctcaataaacgttcatcgagcgactgcctgactgcagcttcccagtcttaaatcaccagctccccagtgtggttgcagacgcagatctcctgcaggcctcacctgcactcctggggcctcaccccaaggcctctcctactcctgagcccttactcaggctgtgcctcagcctggaacgcctttccttgtttctctgcctgatgacattctaatcttttggccgggtgcagtgatgaatgcctggaatcccagcactttgggaggccaaggcaggcagatcccctgaggtcaggagttcgaaaccagcctggccaatatggtgaaaccctgtctctactaaaaatacaaaaaaattagctgggcatggtagtatatgcctataatcccagctacttgggaggctgaggcaagagaattgcttgaacccggcaggcagaggttgcagtcagctggcactcggtaggtgtaagctccaattagccgtcattgtcaccaacaccctgagcaca

SEQ ID NO: 782728 - DNA, 702 bp, Homo sapiens
ctactctgaggagtgcaggcgtgggatccaggttacaaagtgggtcagctagggtgccaggaacacaacgtgggtccctgactgagggggacagtcttaggcatgcagagatttggccagactcttatgggtgactgtgccttagtcacctctgtcccccacacctattacagtacctggctcctaataaatgctcmataaacgttcatcgagcgactgcctgactgcagcttcccagtcttaaatcaccagctccccagtgtggttgcagacgcagatctcctgcaggcctcacctgcactcctggggcctcaccccaaggcctctcctactcctgagcccttactcaggctgtgcctcagcctggaacgcctttccttgtttctctgcctgatgacattctaatcttttggccgggtgcagtgatgaatgcctggaatcccagcactttgggaggccaaggcaggcagatcccctgaggtcaggagttcgaaaccagcctggccaatatggtgaaaccctgtctctactaaaaatacaaaaaaattagctgggcatggtagtatatgcctataatcccagctacttgggaggctgaggcaagagaattgcttgaacccggcaggcagaggttgcagtcagctggcactcggtaggtgtaagctccaattagccgtcattgtcaccaacaccctgagcaca

SEQ ID NO: 782729 - DNA, 595 bp, Homo sapiens
ggttgtagttattaccagtctcaaagaattcatgattcattcagtgatggaagcatttcaagcctgtaatttgggtgcctgctttcactaactcagggacttgaacacaaaattctcagtttaaaatgcagatgtactcttgaccaagctatgcaaactgtaaagtatcttttaactaaaagataagaggattttgatctgctacctgagtccttttatgttctyttgaagatgatttttgacatcctctgatcacacacaaaacatcagcctttaatatacatattaccaattttatactattaaaatatacattccagatttgttgaacaaaagagttttggtgcatgttgctatgtggatgaaatgcaagatcttgttatgaccttgtgatccttgaataagctcaacattcagtggtctgaaaccatgccaaagaccttggtgatcccaccaccctccctgagtctgtcattcccacttccataccactgttgaggcaaagttcagaggatctcataattagcaaaatagcagctttcataaaaagaactttcttcagccctatcccagccacatatggggtgtaataaag

SEQ ID NO: 782730 - DNA, 662 bp, Homo sapiens
aattgggcataaaactaatattgaaatgacttatcatggcaatgtgtacatttatttatcaacaattacacgaactaattataaaagcccaattgtgtaatttcgataaatatccaattactttcacctttatactcactgattagtttccaaattcataatatttttattgttatgcttgattgtatataagtaataattttaatgataattcaatgcagaggaactcataaaaatgaaagccggccaggcgcagtggctcacgcctgtaatcccagcactttgggaggctgaggcgggtggatcacgaggtcaggagttcgagaccarcctgaccaacatggtgaaaccctgtctctattaaaaatacaaaaattagtcgggcatggtggcgcgcacctttaatcccaactactcaggaggctgaggcaggagaatcgcttgaacccgggaggcagaggttgcagtgggctgagatcgcgtcattggactccagcctggacgacagagcgagactctgtctaaaaaaaaaaaaaaaaaaaagcctgcgccatcccccaaattgattgtaatgtacatatatatttttgttgttgttgcaggtaagtaggctatggaaaacttaaaataattttaagcataaaactattacattattcaaa

SEQ ID NO: 782731 - DNA, 671 bp, Homo sapiens
tagcgcatgatagatgctcaataaacatttctgactgacttgaatgcccattccaaattatgtttcactgttttaaacatcacaaactgatcacttttattgtcagctactcccagaacttcttttctctcctgtgattttcactctttagttaatcattgagtgttttagagatataagaccaaaacagtatatccaccatgaagtcattttacagttctatgcttctatctgcatttcctggtgctgctttctatcttataagaacacaacactaccaaaagcaaacatgacttcttaaagcaattttaaaaagtagcctcttgtcctccaagggagcttaacctctgctgaagaacaagaaattaacttcagattctgaccaaatttttgmcaagagcctaaagttccttggaggaatggtataataatcatgcttgtggttgtagtgattgcaatgttagcaatcctggcctgaaaatatttttactgtaggcatagaacatgaacttttcagtaagccaaaaatagtgaatggtgatcattgatggaggtgaggataaaaggttagaaccagaattaaagtctcagctgaactcagagatacatgcaaaagttggatcagtacagctaggcagtcaagatctaagcaatggtacaggcatagcaga

SEQ ID NO: 782732 - DNA, 610 bp, Homo sapiens
atcaatcaaccacagaatatatatatttccatatgttcagccataaagcatctcagtacattttaaaaaaatcaaaatcataccaaacatactctcagaccacagaggaataaaaatagatgtcaataccaaaaagatctctcaaaaccacacaattacatgaaaagtaaaaacttgctcctgagtgacttttgggtaaacagtgacattcaggcagaaatcaaaaacatatttgaaataaatgaaagcagagacataacataccaaaatctctgcgattcaccaaaggaagtgccaagaggaaagtttatggcactaaatggctacctcagaaatttagaaggatctcaaattagtgatctaatatcacacctagagaaacyagaaatacaaaatcaaactaaccccaaagctagcaggagaaagaaataactaaaatcagcagaactaaataaaattgagacgcaaaattttgtacaaagaatcagtgaagctagaagttggtgttttgaaatgataaacaagatcaatagaccgctagctatattaacaaaaaaagaggaaggtctagagaagcacaaccagaaatggcaaaaatggcattacaacc

SEQ ID NO: 782733 - DNA, 614 bp, Homo sapiens
cagatgcctgccagatgttgctttatcttgtgggagaggaattccttcttcaagtgttttgaggtttatgcttggtgaaattatagagcgagtactttcttgccgttccttttttttttcttttattccttcagtaaacattagcaaccactatctcwgggactgtgattacaaagataagtagcatagtttctgccaccttaagctctcaattaaaaaaaacatgtagagcaattaagcagactattgcaataaacggtatctactgctctgacacgaagtgcacaaggtgatgtaggaacccagaggatgggtacctaatgcattctgtgctggaatcagggaacgcttcctgaaagaggtgtcaggaaggataaccacatattagacagggggtaaaaggtcttttaggcagagggaacagcatgtgagatgacacagggatgaagtagcctagtgtgcagaggaaatggcaaattattcatgaaagaagtttaatgtcctgtgtttgttcgtttgtgttgctacaaaggaatacctgaggctgagtaattttataaagggtttatttgactgattgttctgcagggtgtacaagaagcatagcatcagca

SEQ ID NO: 782734 - DNA, 513 bp, Homo sapiens
cttcctctgcattaaaccaagggagatcaggtatttccagctcactcacagtgggccatcttttaatccatattttggctaaccaagcaaataattagaaccttttttaaatccccgagctgcaacattaaatgcagactccctacttagtggrcctaaatcaataaattcagcctggtccaactctgtattccttccaccattatcccatacccttgatgtccattcccatacctgttctccagatttctgcttatgtaagttagaaaacaggttctttttgagtgtagcacacctcctcatgggtcacattctgaacctcacctctaggggcccgctgggactttagtctagttataggtctagaagcaaacaggggtgttgggggtggctcctgagaagaatcaacatcatcttgcctggtaactacctcgggggaggccattactgttgcctcaggcagcgcagagtttatctcctcagacaaaagtggaaatgctgttggcagcatgg

SEQ ID NO: 782735 - DNA, 614 bp, Homo sapiens
cagatgcctgccagatgttgctttatcttgtgggagaggaattccttcttcaagtgttttgaggtttatgcttggtgaaattatagagcgagtactttcttgccgttccttttttttttcttttattccttcagtaaacattagcaaccactatctcagggactgtgattacaaagataagtagcatagtttctgccaccttaagctctcaattaaaaaaaacatgtagagcaattaagcagactattgcaataaacggtatctactgctctgacacgaagtgcacaaggtgatgtaggaacccagaggatgggtacctaatgcattctgtgctggaatcagggaacgcttcctgaaagaggtgtcaggaaggataaccacatattagacagggggtaaaaggtcttttaggcagagggaacagcatgtgagatgacacagggatgaagtagcctagtgtgcagaggaaatggcraattattcatgaaagaagtttaatgtcctgtgtttgttcgtttgtgttgctacaaaggaatacctgaggctgagtaattttataaagggtttatttgactgattgttctgcagggtgtacaagaagcatagcatcagca

SEQ ID NO: 782736 - DNA, 639 bp, Homo sapiens
ttccaattattttactttcaacatttgtttatccttatcttttaaatgtttgtcttgtaaaacacatgtaacttaattcattgatttttttgaagggttttttgtgtctctatctccttcagttctgctgtgatcttagttatttcttgtcttctgctaaatttttaatttgtttgctgttgcttctctagttcttttaattttgatgttagagtgtcagttttagatctttcttgctttctcttgtgggcatttagtgctataaatttccctttacaaactgctttaaatgtgtcccagagattctggtacattgtgtcttcgtkctcattggtttcaaatgacatctttatttctcccttcattttgttatttaccaagtatattattttgctagggctgccataatacagtaccaaaaactgcatggcttaaacacaaaaattgattgtctcacacttttagatgctggaagtctgagatcaaggtgtcagtagcattggttccttcagatgtctgtaaggaaatatcttctctacaccagttctctagttcctggggcgtttctggcaatctttggcattcttttgtttatagaggcatcagcccgatctccaccttcatcttttcatggtgttc

SEQ ID NO: 782737 - DNA, 548 bp, Homo sapiens
ataaaccaatatgtccatcagtaggtgaatggataaataaactgtggtatacccatacaatgaataactatggttattcaacactatatgaaaagacatggaggaaactcaaatgcctgtgagtagaagaaatcaatcagaaaaggttacatactgcatgagtccaactgatgcaggacaagcaagccccagtattaagtcttagccagggaaggtttttggcttcacccaraaaagaattcaagggtgggctgggtggtattaaataacaacttttattgacatggcagaagtactgttccttgtggagcagggttaccccataggcagtggtgtgcagggtagcagctcagaggcaggtttgcactcatattcaaccccacttttaattatatgcaaattaatggtagattatgcagaaatctataaaatgagggtggtaacttctgggttgatgggttgttgcaatggaaagggggcagtaacttctgggtgttgtcatggcagtggtaaactgacatggcacactggtgagcctgtgttatggg

SEQ ID NO: 782738 - DNA, 514 bp, Homo sapiens
gctacccaggaggctgaggcaggagaatcggttgaacctgggaagtggaggttacagtgagctgagatcgtgccactgcactctagcctgggcaacagagcaagactttatctcaaaaacaaaaaaagagaaacaacaaaaagttaaaaagcactaagatgaacttaaagtgtagagtttttattagtcttccttttgctttatgtttgtttacrcaatcagtgttgtcatccgtttaaaataatgagttataagataatatttgcaagcctcacggcaacctcaaatcaaaaagcacacaataagtgagactgtgtctcaaaaagaaaagaagaaaaaacacacaatggatacacacacacaaaaaagcaagaaattaaatcataccaccagagaaaatcaccttcattaaaaggaagacaaggaaaaaaaaaaaaaaaaaaaaaaaaaagagaagaccacaaaacagtgagaaaagaaataacaaaatagcaggagtaagtccctgcttagc

SEQ ID NO: 782739 - DNA, 683 bp, Homo sapiens
atataacagcaacctgaatcatcatcctgtttaattagcatctcagagcagcctcagaacaccaaagcaactgggtcacagtagtattatagcacactgatgacaactggttttgttcaagccttgcagattaccctccactactgtgcctaagayggctcttatccagcatggcacacacttctgctcatgctcacaatatttacttactcatgtttgtccatctcccctaaactgtgagacttgttcttgcaccccccaaggactggcacaccataggcactgtaaatgtgggctgatggaatgaatgcaatgtctgacaaacttgagagcctgaagacaactaatgaggatactcttcaatgagttacaaaactgatgctggtggagcttggagaatgtggaacaaggtatgtgttcatttttggccaccagcaaaaagttttttgtccttttaattatgcctcctacatctaggatggaagccgctgtcctcccagctatcaatgccaactacgtggcagctagatgggctacatacaaggagctacccttcaaggccctgtgagcatttctttgatgcaactctgcatcctatcaagcttcttaaagactacttcaaagtgttagccaaagcaatacatacatagccctaggtgttttggtccttacttccttagagc

SEQ ID NO: 782740 - DNA, 640 bp, Homo sapiens
agatgattggtaataaaaactctcttcaaggcttctgcttctcccccttcaaaatggagatcaaagaatcatgctgtgagggtccgtcaagaagaaaagactttcagcaacagagcatgtggtgtggcataaaataatgacaattataatgttcaaaggaatagcatagaaatcacacagtaaaacttctttattatgcttttcagggactggatgtttttactttattatgtgaggaagggttagattacagacccttagctattccacaaagcaatagaaggcagaawttcttcttccgctacaggaagcacgcttcgattaagggctttttctttttcttctttttttttctttaagttactgcattactatatcatacttcactatatttactaaaaagtcatgctgtttctggaagtagagttacatctaggaaatactaggtgaatgctggttagatatgcatgtgtgcctaaacaacacgtttattatactcatgcatactagaaatagggctgtattttcttcaattttaatcagtactaatgagaataataaatcaaaacaaataggagagatatattttgccaggaggaaagagaactagttcttctgtaaattttactggtgaattttt

SEQ ID NO: 782741 - DNA, 640 bp, Homo sapiens
gttgaattttctggattttccaagattaagtgatcaaccttaacaatgagtgaaagaccattcaacaggaagaattgtcatttcctttgctctaaacccaaacgatgtattttttgaaagctttattgatttatatatttatgtgttgtgctaggcgaccgactagatatatgtttcagcatacctactaggaaaatatccccattattctcaattttacctaatccaggcaaagcactggacttgctttaaggaacatttttactctttctgaagtggagtgcctgtcatgtatcaggtgcaatgcttggactttaygttcttgtgattaatccttacaataggcctgtgaagtaattctcattctgtttgacagtagagaagaaggaagcccttgaccaaggtctagtgccagtaatggtggtgatggggtttgaacctaagtctgtttcactctaaagtgtaaccaaattttatgttttagacttgcttttctaacaataaaaagtcagtgacatgctctttctgtgtgtaagcactcacacacacacacacaaacacacatccgtattacatatgcttatatatgtattaaaagattatggacatttgatatatatacatatactaaaatgtataa

SEQ ID NO: 782742 - DNA, 640 bp, Homo sapiens
gttgaattttctggattttccaagattaagtgatcaaccttaacaatgagtgaaagaccattcaacaggaagaattgtcatttcctttgctctaaacccaaacgatgtattttttgaaagctttattgatttatatatttatgtgttgtgctaggcgaccgactagatatatgtttcagcatacctactaggaaaatatccccattattctcaattttacctaatccaggcaaagcactggacttgctttaaggaacatttttactctttctgaagtggagtgcctgtcatgtatcaggtgcaatgcttggactttacgttcttgtgattaatccttacaataggcctgtgaagtaattctcattctgtttgacagtagagaagaaggaagcccttgaccaaggtctagtgccagtaatggtggtgatggggkttgaacctaagtctgtttcactctaaagtgtaaccaaattttatgttttagacttgcttttctaacaataaaaagtcagtgacatgctctttctgtgtgtaagcactcacacacacacacacaaacacacatccgtattacatatgcttatatatgtattaaaagattatggacatttgatatatatacatatactaaaatgtataa

SEQ ID NO: 782743 - DNA, 444 bp, Homo sapiens
ttgtaagtattaccccaaaatgagcagtgtgaactcaaagggtttatcattgtctctcaggcaaaggtaatatttgaattatttagcaaaggactttgagcaattggaagagatactcagctgctggtctctagcgctctaacagggtggatgccccccgctctgccggcactgatgtttaagttgctggattatgaggaagtctggggattccttggggagaaaagraagtgatgacatattgaagcacaacgacatattgaagagactcgggggctggggtgataaacttcagagccgtggctatttaccaattggagtgtaagtattttaatattttaacaaacataattgccattctggtatgtaccaacttcatctcagatctgtccttaagaaataggcaaattctttattgcctctctgaatggttcatataaattc

SEQ ID NO: 782744 - DNA, 615 bp, Homo sapiens
tccaagcaatcaatgtcccttggtgttcctttcaaacagcagtaagtgacctgaatttattttccacatttccaaatcttaatgaaaatcagacaatggtctatatgttcatttgtgttcttacttaataaaatgtgggttttagacaatattttgccagtcatgaattcctakagaaggaactctttgggagaacagactagtgatctatagacatgatgacctccaactcagatcttctgtagctaaccactgaccgggagaacatgtatgaaaaacatcttcaaaggcattgaaaaattaacatttatcaaaaacaaaatacattttatttcatttgaacttagacctttactatctaatggctatggtactatttaaatgtcaaagtgtgatctagcatcagcctaatctggttagaaatgcaaactcttgggccacatctcagacttactggaccagaagctctgtgggtgggacccagaaatctgtgtttcattcacatgccctccaggggattgtcctgctaaagtttgagaatcatggaagctttttaacctctcattatagctttataagcagcaactcactggattcctatcaacatcctgtgag

SEQ ID NO: 782745 - DNA, 609 bp, Homo sapiens
tggctgtggtaacttcttaaaataagacaatgaagtttgatgcatcgattaacttttcctttcaggaaagatttctctgtaccatgagaagctatttgatagcattttacccacagtacaactttttcaacattggagtcagtcctctcaaactgccactgctttatctgtgaagtttgtgtaatattctaaatcctttgttgttatttcagcaatgttcacagcatcttcaccaggagttgattccatcccaagaaaccactttctttgctcatcataagaagaaactcttcattcatttaagttttatctcatgattgcagcaatttagtcacagcttcaggctccacatctaattcggttatcttactgtttctgccacagcagcagtgactttctccaccatagtcttsaactcctcaaagtcatccatgagggttggaatcaacatcttccaaattcctgttaatgctgatattttgacctcctcctgtaaatcacaaatgttcttaatggcatctagatggtgaatcctttccagaaagttttcaatttattttgctcttattcatcagagaaatcattaactatagcagctataatgttatt

SEQ ID NO: 782746 - DNA, 639 bp, Homo sapiens
aagaaccttgcttggtttcctatgtatcttttctggttagatcatctgtctttaacgctgatttattttccattacagtcaacatcctgagtctgtttctaacagtggaatcttcatattgatagagtctttcatggtaagattctttacatggtrtgttcgagctttcttactaaacttaatgaagatcaagactaacctgctcaaaagcactgagttagaatcctgaagatctgaatgattagctgggtgaactgttatgtaatctgaggaccctcagatgctcagctgagaaatgagggcggcagcatctgtctacctctctgggtcattatgaacacagcatggtgaaataggtgagaatttatcatgaactgtaaatcaacagtcaaaggaaaatattattttatattaatagtttaataatgattattatcaggaaagagaataaaagacattctaataagtattttattttatagtatttatttagagaaaagttgaatattttacagagtaaaataaacatcaccacagattttaccacagagagataaatgttatttatattgggtgaatatcatctcagactttgctgtgtttgaataatcagtagcaactggatagatagaagtggtt

SEQ ID NO: 782747 - DNA, 521 bp, Homo sapiens
atggaagtagcgggatccgctgtggacttgagagggggttctgggagagggaaagcccaccggtggggcggcgcctcctcgcctggctttacctccggtggcccggcgtggatcgcggggaggaggaagtgaagggaggagggtgtgatagaatccagcgacaactgaagaaaccggactctggccagagaagtgagccgaggagggcggaaaaaggcccccttgatcttggcattgatggcttacttcatggaatgtttaaggaatccctctctcaggagatacctgagccttcggatgcaggggactctctgaagttggggcactgatgagacctacttgagtgacgggagaggttggrcccgaccagcactgaggtgccaagactcctaggctgattctcctctgtaaccctaggcctcctgtccctgcctgctctgggtgctcatggaaccagctgctgccctgcacttctcccggccagcctccctcctcctcctcctcagcctgtgtgcactggt

SEQ ID NO: 782748 - DNA, 582 bp, Homo sapiens
aaacaaattgacaggaatccataatctgggaatgcaacccggaattattaaggtggatatgttgtgtgtttgtatcgtgctatgatttatgcagtgatacagttgacaggagtcacaagtcaaatgggagacgtttacctggagttggtcctttttagccgccagaaagatacagggattaaaaacacaaattgtaaattgagtgrtaatatttcttacaaaggtaacattaaaactgtgttgagtcctattactattattggatagtgtcctgacccagatgctgccattcataaatgggagtgctaacttccatatcgactgctgaattgggcccctctttccttgatgacgccgctgaggcaaaggcggactaaagcctgttccgtgccaagccagttgcgtggcagattaggattgaatcccaatgcgatatagcgaagaaatgttaaatgttcaccaccagtggcagcgaagtttgttccatgaggtctgattctcatctctcccaaatgaccacagggaccccagtcaataatgtctcccattaacatagacttgtctagctaaggggtcaagaca

SEQ ID NO: 782749 - DNA, 612 bp, Homo sapiens
ttttctagctggtgaaaactcaaaactcaagtctgctcttcatctcatcctgaacctcaataagcgatcgttggtagtgcaaatatttcagctctaagaaattaattaaaattaaattcgcttttaaatgaaatattrtggatgagggtgtccagcaccgattttgatccaaaacaaagatcggtaaaagtcctcccccacccaattgtacaaatagagctggaaaatgtctccttttcatcctagaacactacttccttaatttcctccactggtgcctagtttcaagtatcctgtgcatcttcccagaaattttatatgtatgttaacattaataatatgtaatatatttctgggaagatgcatatatatgcatatatgtatacacacatatatacatatatagatgtatatctccactcatctttgactgaagtgatatcatttaacatatgtagtgttatttcattctttatatgaattacataatatgccatagcatggattgtatcattatattacaaacacgtcgcaccttaaatccagattgcctgccatcaggtggtctggcccattgtcactgacagttcttggaaaaggctcttctgtttg

SEQ ID NO: 782750 - DNA, 583 bp, Homo sapiens
gataatagttaggtcaaaccaaacttgattgcacagccatacctaaagaatgtaaagacaacaccaatgcagagagaactccatagggacatgtcataagcctctatccttaccctgatctgttcaatgacaggtaggaagaaatagaaggaatattcatcaaatccgctagtggcattaagttagaaaggacagttaaggcactgaataactaaattaggattcataatcattctgaaagcctaaaacatgtgaccaaaaaattgaacagtcataaatgtaagtmatgacattaaggataataataattccattacacaaaaatggtgtaaatctagatcactgcagtttatgtaaaaaagatctaaagtttacagtacatcactgatagtttttaaagcaaatgtgatctaatgccaaacagcggaagtataatccgagtcaaaggaagtagtacattatcctctcaggtacttttcaaagcacatccaaagagctatgtttaccattaggcactgcattttaagaaaaatgctgacaagcaggagagttttcagagaaaggtctagatacatcacataga

SEQ ID NO: 782751 - DNA, 545 bp, Homo sapiens
agaactggtttaactagtattttggcttgttttgggtgcacctgtgacctaatttacaagaccaagattaattaaatgttcatgcacaattaaaagacaattttacttcagtagtatgatgcttaatttctgcttatagaattcattttttattagttataaattatgctagatgacatagagaggaatatcaaatgcagaggattcttagcctgagatccatggacctcaagtgtttcaygaacaccttgagatagttttcaaaatggtatatgtgtgtatctaggggcatctttctgagaaagggatttcctagattttattcaatatgatctggagtccagagcaaaaaaatattgtacaaatctttgctctactaacttcttgacattgggaatttgagggagaggaattttccatcagctttttgttttttgggaaataaataaaatgactatgagcaaacatgaagacaattcccaaaccaattcccaaagactggtaccagtagctcctggtgcagaaccaacttcagcatggcaggg

SEQ ID NO: 782752 - DNA, 605 bp, Homo sapiens
aacaacaaaataggatcctacttacaaagggacacattcagaaaacaagaaaaagctcttggatattaaagattaagataacagggaaaaatgtttaaattgacaccatgtgtaggagataaaagtgaggcaatctcccagaaaatagcacacaaagatagaaaataggaaagaaaagataagaaaattaggtgatccatccctggaggtccaacttccaaccaacaggagtcagagaaagagaaatgcaaagaaaatggttgagtgaaaattattaaagaaatatataagaaagttctcttctatggaggatctcattagaaacttccagagaaaaaaggcaggtgacaaaatattagaaatctgaatggcatctgacttccaaggcaacactgggttctaaaagacartggaggagtttctgcaaaattctgagtgaaaacaattttcagcataatgatatatactcaatcaaattacttatcaagtgtgagggagggataattgcattttcagatattaagccctcagtctcaaaaaagttacctctgatgcaccatttctaaggaagctagtggaggatgcaggccacaaaacaaaggaat

SEQ ID NO: 782753 - DNA, 631 bp, Homo sapiens
tcaaatagtaggatttcagacaacctggcagaaccggtgttactcatttgttagtttgtgtccttttcttaaaattggggtggggatgaggatgggatggggagtaatttgaggggcaggaagattccactgtgccaatcaaaacacattttgttggcgatatcctgctctccatagaacccttcgaaatgtatttaatatattgtccttactttaccaatctcttcatttctcacagagcctcctagaacctccagctaatgaagccatctcatttgttgtggagcttctgagggttctttacacccaattgttagtcatacgagaattcagttgtcaatggtcactctgaagggtgtgatgttttcagtgtaaacagcattcctctcaagtaaacatgaggaaaaagatgcctcactttgtgattactgaggcaacaaaacccgactggctctggtccaattctgcgtagatsactgggaccgcagaaatattttcggcctctaaattgttggtctttggccaaggcaatccaagggttggcacaggtgcccagggagatgtgagtggtagctgctctaccatcaacatcctcagaaaccttttctgttttctcttctctttcatctcc

SEQ ID NO: 782754 - DNA, 614 bp, Homo sapiens
tgtttggggtatttcttacacatagtaaaagaaaagtcaacaattatatcagtacttcccctgttaagataactgagtgccacctagtgttcaatttctgcaactactaagcttacaaattcaatactgctattaaaacccaggttctgaaaacggcattttggaaatcttttttttttttttttatgtttacggtggcaaaatacgactatgaaaagaacatgatatcaaaatcagtataaaaatagccacaggctacttaaatatgacaaacagacttattttttttcttcaamtgcagacttctgcctccctcaaattgtatcaaaatctcaagggaatatctaggtaactggaatatacacaatgactctatacaatcaagaggccagggcttaatcagattccgtgaggacaaggcaaatgatttcttcaaaacacccattttcttactggaagtggtaggaaaagcagcaatgcatggttttttttttttttttttttgtaattagtagacatggtcttctacccataagctccattacattaaaagaacaaagtgggcttaacatctcacttaagataattcagcattattatcagttttaaaaaaa

SEQ ID NO: 782755 - DNA, 506 bp, Homo sapiens
agtttcctataaaaacatttggtttggatatgtttgttagcttttagtcgacacttgaaaaaggcggttggaaggttctaagtctttttggatactcttttctcttatcccccaggccgtgggtgtgtagaggccttggtggtgcagtggtagaattctcgcctcccacgtgggagacccgggttcaattcccggccaatgcagcaggtacttcttcatttcattatggccytttacccgtcttttacgctgcaaaattatactgcataacctaatagtgcatttaggggcttggccaccacaaggtaaagtgacaacattactcacgagagtagcggcaagagacattcaggacactaacccaggacccatgcaattgttggactcaaacagcttagcaaagtggcaagcacgaagtctttccggtgagtcactgcagttttgatattggtacctgttactttcatctattcacggggcggatccctgcaaacccgaagaatcat

SEQ ID NO: 782756 - DNA, 535 bp, Homo sapiens
aaaaacagaccgtacgccaagggtcatgtcttttttcgtattggtttgtgtcttagttgttaatcctacagtggaggcctggggaataagaagtaacatgtggcctgcacgccataggagaaaaagcgagcatcagccgtatcggctttgtaacacaaattagctatcgtgaagtccgctcagctcttccmtttctaccctggctgctttttgcagggattggtccgtggtctccagtctcttgggttctcaccctgtgtgaaaatcttcgtgtttttccctaccccccaagtcacctcttacacagcctctgcttccaagcgcagcccccacaggagtttgtaggatttctgtgctagcggggagtgtgttctcacctcatagagccaggtagaaattatgcagatgggcgctgttctctgggaagaaagcagggcctttggggctctcagtgtccccgttgggttgtagacataacactcttactttgcgtaggggaacggctctgccggcccccaggtgccctagcgcatat

SEQ ID NO: 782757 - DNA, 566 bp, Homo sapiens
aaagcaagcttatttaagtagcaaagaataacgtgaaggttagtaagtatagcttatacttaaaatacaatgaattgaaagctcatggcacttcatagagtaggaagaagaaacttaatagaaagtggtagttgggcgagaaggactgcaagggagttatttggaaaatgcattttttatttctgcatcattttgttcacaaattattcytaatcttttgtgaatttgtggatttcttgaactcaaaccagacttaaaaatacagttatagcacagaaaaaaatctttaatggcaaaataaaagctaagcaagagagcctttcaaaacacatgaaaataacacacacatacaaaaaaaaaagaataaagagatgtacaagtgacacctcctcaaccttctcacttggtgtacatatgcacagtaaattattttgggctcagccaagcatgggagcaattcaaatagatccatatgatattctctgattagaaactcttgtggagtaagttggtgagtgtatctttgcctaaaacagtcatgtcaaaatatagcttcctatagcata

SEQ ID NO: 782758 - DNA, 380 bp, Homo sapiens
ctttcaaaacacatgaaaataacacacacatacaaaaaaaaaagaataaagagatgtacaagtgacacctcctcaaccttctcacttggtgtacatatgcacagtaaattattttgggctcagccaagcatgggagcaattcaaatagatccatatgataktctctgattagaaactcttgtggagtaagttggtgagtgtatctttgcctaaaacagtcatgtcaaaatatagcttcctatagcatatttatttagtatcattttggtgaaaaagtggttatacagaatagaaaagagttgtccaaaactaagtggttgacctttccagagccattacctgcagaattgttatgtaagtctgttccatactcataaagg

SEQ ID NO: 782759 - DNA, 624 bp, Homo sapiens
agcatgggagcaattcaaatagatccatatgatattctctgattagaaactcttgtggagtaagttggtgagtgtatctttgcctaaaacagtcatgtcaaaatatagcttcctatagcatatttatttagtatcattttggtgaaaaagtggttatacagaatagaaaagagttgtccaaaactaagtggttgacctttccagagccattacctgcagaattgttatgtaagtctgttccatactcrtaaaggaatactcagctgacccaactgattttctcgtgttttttccttcaagggctagtagaagtctatatgttgtggtggaaaacaacctcagccctatagtccaacatttgcctatcaaaacttgtcctatgatttataaaactagaacctcactggtaagtcacattcctagagtctcccccatccctaaccccagtcacggaaaataaatcaaatcattgtcactctttcttaacaaagagcatacatttaaaacttgagtaaaattacaggtaccgtctgggtccttcaagggggaacttgaagtctcaataccgcagttgtccaatcagaggatccaagatgaatatactcaaggactttatgcttggca

SEQ ID NO: 782760 - DNA, 629 bp, Homo sapiens
tgcctaaaacagtcatgtcaaaatatagcttcctatagcatatttatttagtatcattttggtgaaaaagtggttatacagaatagaaaagagttgtccaaaactaagtggttgacctttccagagccattacctgcagaattgttatgtaagtctgttccatactcataaaggaatactcagctgacccaactgattttctcgtgttttttccttcaagggctagtagaagtctatatgttgtggtggaaaacaacctcagccctatagtccaacatttgcctatcaaaacttgtcctatgatttataaaactagaacctcactggtaagtcacattcctagagtctcccccatccctaaccccagtcacggaaaataaatcaaatcattgtcactctttcttaacaaagagcatacatttaaaacttgagtaaaattacaggtaccgtctgggkccttcaagggggaacttgaagtctcaataccgcagttgtccaatcagaggatccaagatgaatatactcaaggactttatgcttggcatcctctggagacagtacataaccaccagcttggtttaactggagattcatttgggttaggagaaattatgtaggcaatgtactta

SEQ ID NO: 782761 - DNA, 677 bp, Homo sapiens
ataattccttttccttgagtgttgacaggatgtataacttcctttactgattgaatgtggtcaaggtgaagggattttgcagacgtaatcaaagctcttaatgagtggactttaaatcaatcaaaggggaggttatactgggtgggtcagagctaatcaggtgagtccttttaaagaaggtcagacacggagcgctatagagactttcttcaacactggctttgaagcaagctgccatgcattttacaatcacaaggaaatgaattctgtcaacaacctgaatgaaattggaagcagatctttccctatttgagcctacaaatgagaacagggcttcgaaggcacctcgatttcagcctcgtgagaccctgagcagagagcccagctaagctgtgtccacatttctcacctacagaagccgtgagatgataaacaggtgttgtttgaagctgttaaatttggaacaatttgttasgcagcaataaacaactaatacagctggcaggtggcagagctgagatgcaggaacttccctgtttcctgtaaggcccacactttttccactgcagacacccccacccccactccccaacacacatattccattgtttccattttgggctggacttgccctcagagggaattctgattattaaacaggcaggatggaaatggaa

SEQ ID NO: 782762 - DNA, 579 bp, Homo sapiens
ggatcctgactgggggtgaagcagggcatccctgagatgggagaaaaggcacagagcctgagttcagagcccagctcagaaggaggcccccaagtcctagcaggtccccatggcactcaccctggagggcttgctgtgatggaagaagggatggcacttggagaagagctagggagcccagtggggcaaggtctcagagacttcaggacatgctgtggggctgtggccacaggactaactctggagaatctcagggaagtggaaaagtgaggggtgggagggtctggacaggatgcagagctgacctttggggaatattatggccaaggagaagtacggggattgggttctgggcctcaccctgcttctgagtcactgtgtgacacaggacaagccacttgscttctctgagtttggtctgcacatcttagaataagagatattaactaagggatctctgagaccctctcagctccctcagagggtcaggccttgtctcggtatagttctgtgtgatgcccccctccctccccctacaccccaccctctaccttatctggtaagtggctttctagctca

SEQ ID NO: 782763 - DNA, 700 bp, Homo sapiens
cttctctccccttggctcctgggatcccctcttctcctgggtctcctcctatctccctggctgctcctcctttatttgctttgctagttccttcttggcaccttgaccagtaacccttgagctgtccccaggctctgtctttggtcctcttcttgtcctttctcactcccttggacctttacatgccattcctatgcagatggctccccaatttacatgtcagcccgacacctccctgaactccaggcttatacatccagctgcctactcaccatctccctcatctcggttaaagcractcaggccaaaaacctggagctgtggtggacccgtcttgctctcataccgcatgtcacatctatcagcaaaactactggtcctttttcaaaacatctccagaactgactgcttctcttcacctccacagccacctcctggtcctccataccagtctcggccccctctctcctggatgattgcagtggcctcctaactgctctcctcactgcctccctccccactaagaatctcttcctcacagagcagcagagtgatctcatgtcatcctatttcatttgtcagattctatctctcctctgctgattctcattaggtcagagaaaaatccagagtccttacaatggaccatctgcccctacagggactgagccccgaaccacaaccaccttgctgaccttgg

SEQ ID NO: 782764 - DNA, 700 bp, Homo sapiens
cttctctccccttggctcctgggatcccctcttctcctgggtctcctcctatctccctggctgctcctcctttatttgctttgctagttccttcttggcaccttgaccagtaacccttgagctgtccccaggctctgtctttggtcctcttcttgtcctttctcactcccttggacctttacatgccattcctatgcagatggctccccaatttacatgtcagcccgacacctccctgaactccaggcttatacatccagctgcctactcaccatctccctcatctcggttaaagcaactcaggccaaaaacctggagctgtggtggacccgtcttgctctcatacygcatgtcacatctatcagcaaaactactggtcctttttcaaaacatctccagaactgactgcttctcttcacctccacagccacctcctggtcctccataccagtctcggccccctctctcctggatgattgcagtggcctcctaactgctctcctcactgcctccctccccactaagaatctcttcctcacagagcagcagagtgatctcatgtcatcctatttcatttgtcagattctatctctcctctgctgattctcattaggtcagagaaaaatccagagtccttacaatggaccatctgcccctacagggactgagccccgaaccacaaccaccttgctgaccttgg

SEQ ID NO: 782765 - DNA, 520 bp, Homo sapiens
taataaaggaatgttatgaacaactttttgccaacaaattcaataactcaggcaaactcaagaaatttcttaaaatatgtgccaaaactaacagaagaggaaatagaagtgctgagtaaccctatatctaatatttaaattgaattygtaattaaaaaccttttctgcaaaggaagctctggggccagatggcaaattctgcccaacatttgtgaaataaataatacaaattttccacaaattctttctgataataaaggtgggggcatttcaaaatttattttgaggccagcataactctgacatcaaacactgacaagcacattagaaaaaagaaaattaactcaagaacatggatgcaaaaaccactaaaaattattaaaacatacaatctagaaatacatcataaccaagcaaaaatgatcaggaattcaaggttattaacatttgaaaatcaatcaacagacccacaaccaacattatattgaaggggcaaaagctggaatcattccccttaaaa

SEQ ID NO: 782766 - DNA, 520 bp, Homo sapiens
taataaaggaatgttatgaacaactttttgccaacaaattcaataactcaggcaaactcaagaaatttcttaaaatatgtgccaaaactaacagaagaggaaatagaagtgctgagtaaccctatatctaatatttaaattgaatttrtaattaaaaaccttttctgcaaaggaagctctggggccagatggcaaattctgcccaacatttgtgaaataaataatacaaattttccacaaattctttctgataataaaggtgggggcatttcaaaatttattttgaggccagcataactctgacatcaaacactgacaagcacattagaaaaaagaaaattaactcaagaacatggatgcaaaaaccactaaaaattattaaaacatacaatctagaaatacatcataaccaagcaaaaatgatcaggaattcaaggttattaacatttgaaaatcaatcaacagacccacaaccaacattatattgaaggggcaaaagctggaatcattccccttaaaa

SEQ ID NO: 782767 - DNA, 603 bp, Homo sapiens
cccagaagctttgggctctagggttacttgtaacagcaaacatttgagaacaaccaaatcaacccaacagaagggattcatttaattaaactcagcctcatccacttggcagagtgttccacagtgaataaaaacagtgattacactcatgrcaacatggcgattgcctaatgccataatgttgagttaaaaatgcaaaaacaaaaaaaacacaccagcatgtttaattatacatacagatcaataataactgtgtcaaaagagccaaaaagaaagaatgctcaaagcaatgaagctgaaatgtcaaacacagttgttttcagagtgttgaaaatataaagtttttgttgtatttttccttttataaaacagatcttatgatttagagcagctttagatttaccaaaaatcaagaggataatacaaagaatcaccatatagtttgcacctgatttcccctattactaacatctaatactgttagggtatatttattaaaaagtaatgagtcaatatatgcatgttattatcaacagaagttcatactttattcagcttcctttggtttttacctatttcctttttctgttacaggatcctatg

SEQ ID NO: 782768 - DNA, 513 bp, Homo sapiens
catacaatgtgctcggctggtgcctagtatatcgtataagctcaataaatggtggcttaactttgagtcatttcccttttccaaaaatgtgactgatatctcagcactggacactactcagtagcctcaagtccaacctccagcccagtcctccaggcccttgctaacctgtctcttgccatctctactctttcctgcccacctgtctgagctgccagccatccagaacactcactgttcttcaaacgtggctcaycctttcctgatgctgtgtgctctgtgtggtattatcttcctcactgacctctctctccacccacttccctgttcacgagcccatggcctagcccaccttcccttggtctggctccagtcacacctcctccaggaagccttccaagatgccccagttgggcagacctcctctcttatctgaagtcctgtgcccccagcttagagaactcctgccttcagaaaggaaattttttcctgattgacctttaccttcccttg

SEQ ID NO: 782769 - DNA, 430 bp, Homo sapiens
tatgaatttgataaagaagaactgaagtttatattgctgtaccattagaatgtacacttctattacagaattatatatatattctttgtatgtttatataaaataaataaaaataaaatataggaaataaatataatatataaaacataatatattttataaaatgttttatataaatataaaaatatatttattacrtatgtaatattttatgtatttaatttgtatatgtatataaaatatataatataaaatatgtgagagagatatatttttttgagagacaaggtctcattctattgctcaggttggagtgcagtggcacgatcatagctcactgtaatctcaaactcctgggctcaagcaattcttccctctcagcttcctgagtagttgggattacagcggtgcacaccacgcctagctaatt

SEQ ID NO: 782770 - DNA, 643 bp, Homo sapiens
tcctggaaaactatatattactttagaaatagcttttccctttttctaaagtgggaggaagagctggtatatttattaagcggaccatgaccttttctgcaaacagatacttgaacgtaccttgtactagatactgttttaaaaagcaaccttttgctgtgacaaatgacccataaacacatagttcatttgaggtgtttttgctttttctgccaaagttggggtggtgtttttgtgggcaaatggcagattttcaacgttttgtttatcaaagcattttgaaaasagaagcagggccacttgttttctagcaaacaggaatagcttctatttcagtaactttaatttctctaccaaggacacttcaatcagtaagaaaaaatatatttacgagtgaaataaaaacaagaattatttggagcacttttcaaaatgcagcattgtaagaataagtaaacaatataatttttaaaggacttcatcttttgttaacctctcaaaaaagtaatgaaattagcattgctgagtgtaaatgtttttaaaaatgttttataatgttttgttattgttcctcaccactgtgtgatgaaaaacattttattcttctaatgtcaaataatctgtgatgcagaaagaatgggag

SEQ ID NO: 782771 - DNA, 643 bp, Homo sapiens
tcctggaaaactatatattactttagaaatagcttttccctttttctaaagtgggaggaagagctggtatatttattaagcggaccatgaccttttctgcaaacagatacttgaacgtaccttgtactagatactgttttaaaaagcaaccttttgctgtgacaaatgacccataaacacatagttcatttgaggtgtttttgctttttctgccaaagttggggtggtgtttttgtgggcaaatggcagattttcaacgttttgtttatcaaagcattttgaaaagagaagcagggccacttgttttctagcaaacaggaatagcttctatttcagtaaytttaatttctctaccaaggacacttcaatcagtaagaaaaaatatatttacgagtgaaataaaaacaagaattatttggagcacttttcaaaatgcagcattgtaagaataagtaaacaatataatttttaaaggacttcatcttttgttaacctctcaaaaaagtaatgaaattagcattgctgagtgtaaatgtttttaaaaatgttttataatgttttgttattgttcctcaccactgtgtgatgaaaaacattttattcttctaatgtcaaataatctgtgatgcagaaagaatgggag

SEQ ID NO: 782772 - DNA, 595 bp, Homo sapiens
gtgtccactggggagccagtcctgcagatgtgctggctgagggcctggaactggctgcacatgcagcgaatggctgaccagggagagaggggccttaggatccatgaggagagagaggccctgagtgaagaagacaggagaatgcatacacatttttgttggggttgactacttcattatgggggtgctgsgagacatgaggaaggctgaactggcacctgctgcagctgtggctaaggccgtggggcaggcctcagatgtcttgagcagccaccagcctgggtcagtgccctctcttcctctctttgaagagctagacttgtatccttgctgcctcacccatgagcatctctgttcctggtttcctctccgagtatgcactgactcactcacctccctatctttatctctgagaacttcgagacttgcctgtgctctgagcagtggctttaatgttgatgactttgtgaccatgtggtatcagcagaagccagggaatcttctctgggttcaactgtactcctcaagtccactgtggggattagaaatccaggggcttggctgggcaccgtggctcacacctgtaatcccagca

SEQ ID NO: 782773 - DNA, 643 bp, Homo sapiens
tatcattatatgcttggtatacacatataaaaaactaacacaggaacagaaaaccaaacaccacgggttctcactcataagtgggagctgaacaatgagaacacatggacacagggaggggaacatcacataccagagcctgtcgaggagtgggaggaaaggggagggagagcattaggacaaatacctaatgcacgtggggcttaaaacctagatgatggactgacaggtgcagcaaaccaccatggcaaatgtatacctatgtcacaaaccagcacatgtatcccagaayttaaagtaaataaattaattttttaaaaaaagcttcataaacaaaaaaaatcaagcttttaaatggttcatgggatattttaaacatcacaaagagtcaaattttgggataaatgttggtaaatgttgactcttagacaaggtccaagttcaaatgattttgaaacatctatgagttcatggacatccaccattatttataactgaaagaacatataccacaactacagctaatattaatagatgatttagagaactagagaatgtcagtgctggaagagtctttagaggttgcctagttttaaccatcccagttttccataagaaaatgagatccagagaagacagtctt

SEQ ID NO: 782774 - DNA, 608 bp, Homo sapiens
gaacagcgggggagtgaagaatcacagacccaggaccaaagctcggtgcctccctgggctttgtgcctccagtgctgacaatccggggcccaatggttaagagacgccaggtgagcacatggtgtggcccaattccacaccgtggctgttgtctctgggaaaactgaggtctgttttggccaacagtggccagtgtttaatatgtgctaggtgtgtgtggactgtggaaatgtaaatgtggtgattcttgccatgcccaccccccmaactgcatactatttgctaggtaaaggttcacatgtgcatgcatacatacctgtctgcctatgtgtgactatagtcacatgttcacgttcagagagaaatatccacaacgtcaccaagaatgagaaaggccacctctaccgcaagacgaaatcgagtattttcacaccacaataaccatgtaagtcactctgcaacactgccagccaggaaatctcttccgtcccctctacaacttcctctgaagctacctttaaggatcatagcctccagtctcttctagggaagattttaaccctctatttttaactctgtgaggaaagctcatcaatgatcccatgact

SEQ ID NO: 782775 - DNA, 654 bp, Homo sapiens
ttgggatggaagtgatacagtcccccttgggagcgataccaaagtgcttaccgagcacttgcttcaagctgagatgactgaactctcctcccctctcctgccccttcctctgatatcctaaataaagggagagagttcacagctcctggacagtattcgcagaacatgtactgcaccctttcctcaggatgtatttagtgaatcctaatcttgagaaagactgactccctgaactttaaggttagaaataattagacaagaaaatcccttctctggatttcttgtaactgtcaaaaatgatgagtagtggaaaaatggcttcaggtcatacttctcgctctccctgaacctttgcactgtattgtgtataaaaagaatataatgtccctgtgtcatgatagggtgaatgttgctatttctgccttttgactgttcattatcatttgctatcataagccaagggcytgatagatagctgcagaaacctaaataaatgcaataattactcaggactgttcaacccactcatcctctcattcacctctcctgtactacagaaaatacctccttttgtcttggcaaacacaatttggaaaaatggtttaagccctggcagcaatagatagctaattatattctattttgattgcctta

SEQ ID NO: 782776 - DNA, 569 bp, Homo sapiens
tgtttaaatgcccaggactagaggagctaactctttaaacatccagaacgaattagttattttcgcttttccctcccctactaaaagcttctcttacgttgctctaaagcagatgacacagatgtggttcgcattccttccaatcccagtggagaaactgagggctcaagagaggagcaaggtgwacatgaccccctctatatttgtcaggggaggaagtttcagcccatggaggaaagaggagaagggctgtcttagtttaatgggcttactagttcccaagaaataaaatcaatgctgtgcagagatggaaacagaaactgtcatgcaggccaggttcagggcagactggctgggaaagataactcatcatctatccagacgttcttggtctcaggagagagtggttaagggaacacggctctgcacgccacccctgcctccaaatcccagtagagggcaagccccaggcctagtccactctggggaacctgcagtcaccaggcagggaagaagtatgtcgcgcctttgcagacaccacagacctcattttacaaagaatgggatta

SEQ ID NO: 782777 - DNA, 569 bp, Homo sapiens
tgtttaaatgcccaggactagaggagctaactctttaaacatccagaacgaattagttattttcgcttttccctcccctactaaaagcttctcttacgttgctctaaagcagatgacacagatgtggttcgcattccttccaatcccagtggagaaactgagggctcaagagaggagcaaggtgaacatgaccccctytatatttgtcaggggaggaagtttcagcccatggaggaaagaggagaagggctgtcttagtttaatgggcttactagttcccaagaaataaaatcaatgctgtgcagagatggaaacagaaactgtcatgcaggccaggttcagggcagactggctgggaaagataactcatcatctatccagacgttcttggtctcaggagagagtggttaagggaacacggctctgcacgccacccctgcctccaaatcccagtagagggcaagccccaggcctagtccactctggggaacctgcagtcaccaggcagggaagaagtatgtcgcgcctttgcagacaccacagacctcattttacaaagaatgggatta

SEQ ID NO: 782778 - DNA, 624 bp, Homo sapiens
tcttagtttaatgggcttactagttcccaagaaataaaatcaatgctgtgcagagatggaaacagaaactgtcatgcaggccaggttcagggcagactggctgggaaagataactcatcatctatccagacgttcttggtctcaggagagagtggttaagggaacacggctctgcacgccacccctgcctccaaatcccagtagagggcaagccccaggcctagtccactctggggaacctgcagtcaccaggcagggaagaagtatgtcgcgcctttgcagacaccacagacctcattttacaaagaatgggattagactgtgaggtctkttgtaggggaggaacatgggaagggtcggcacatttaaatgatataccccgccccaccccctccacctcgaagcctgggagctccatagatgacaaatcagagtcctaggctgggaggcctcattcctctggaggaccctgggatcgtaaggcccagtgccgttccctaaacagcctcagttttgagccttcatcttcctcgtggagtaaagaactggctagggtttactggaagttaatgtgtatgtctgtgcttctaagaaaggtgttccgaagcgggagagagggacgga

SEQ ID NO: 782779 - DNA, 582 bp, Homo sapiens
ccaggcagcctcattccaggatcccagaacttagcccatttgtccctaatgtacatttgcattttgtttttgtagagagcctgtcataggctgaaacttcacttatttagaaacagagaattcgtgttttctaacagcaccagaggatcttggcgttgataggatccacagagacgttcrgtccaatccctgccacatcccctcaaggggagcagccatcttccctgtcctcaacctaggaacagggactcactacatacatcctgtagcactcttctcccatctcagagagctgggaccattggaaatggctttctttccttaagctgaaatgggctttttctttttcatttttcttagagacaggatctcactgtcacccaggctggagtgcagtggccaatcttggctcactgcagccttgaactcttgggctcaagcaatcctcttaccccagcctcccaagtagctgggattactatgccagctaatttgtaagatttttgtaaagatagggatctcatgatggctggtctcaaacatctaaactcaagggattctcccacctcggccttgcctaat

SEQ ID NO: 782780 - DNA, 639 bp, Homo sapiens
catgttgctattgagtaagtcatcagcatgatgactatagctcatcttgccacactctcatgagcctgaggggcagtatatgtagttactaactgcttctctatcaatgaataccagagctcagctctcttctaaagttgggaccaaaagcctactggtgttctaaagtgctccatgcacagccacaggccccagtcaaacccatctgtggtcacatgcatataaaattcaaatggrcacccttggtcaatcactcatagagcctgcatctgctgaatagcccggttggctgccaggaaggcagtttcagccgcactatctcaatcccaggcaagagaggcattgctgcttctaaatctgcaagggagtcagaggttaacataatatcatcaacaagaccatgacataaggtggggctatgcatgtagtcctgtggcagcactgtgaaaatccattgttgccctctcctgaaggcaaactgttcctggctctctagagcaatgtcaattgagaagaatgcattggccaagtccactacataggggtactgtcccagttctgttgtcaagcagtccaccaaacccatgatagacggcacagctgccaacccgtgtaaaacttccaccccccagaatgtat

SEQ ID NO: 782781 - DNA, 523 bp, Homo sapiens
actgccctcacgtttaattaccttccaccagttcccccccatgacacatggggattatgaaagctataattcaagatgagatttgggtggagaaatagccaaaccatataattccacccctggcccctctcaaatctcatgtcctcacatttcaaaactcaatcatgccctcccaactgtcccccaaggtcttaactcattccagcattaagtcaaaaatccaagttcaaagtctcatctgagacaaggcaagtcccttctgcctatgagcctrtaaaatcaaaagcatgttagttacttcctagatacagtgggggtacaggcgttgggtaaatacactgattccaaatgggagaaattgccaaaacaaaagagttacagaccccatgcaagtccaaaacccaatagggcagtcattaacattaaagttccaaaatgatctcctttgacttcatgtctcacatccaggtcacactgatgcaagaggtgggcttccaatggccttgggcagctctgcccctgt

SEQ ID NO: 782782 - DNA, 523 bp, Homo sapiens
actgccctcacgtttaattaccttccaccagttcccccccatgacacatggggattatgaaagctataattcaagatgagatttgggtggagaaatagccaaaccatataattccacccctggcccctctcaaatctcatgtcctcacatttcaaaactcaatcatgccctcccaactgtcccccaaggtcttaactcattccagcattaagtcaaaaatccaagttcaaagtctcatctgagacaaggcaagtcccttctgcctatgagcctataaaatcaaaagcatgttagttacttcctagatacartgggggtacaggcgttgggtaaatacactgattccaaatgggagaaattgccaaaacaaaagagttacagaccccatgcaagtccaaaacccaatagggcagtcattaacattaaagttccaaaatgatctcctttgacttcatgtctcacatccaggtcacactgatgcaagaggtgggcttccaatggccttgggcagctctgcccctgt

SEQ ID NO: 782783 - DNA, 582 bp, Homo sapiens
gaatttcagctaaacagccaatacatttttttccgatagaacagaaattgattatagcttttttatttttcacaactaaggccaaattccctaggggaattaccacatgtcctttttttttttttttttgagacaagtctcgctctgtcgaccatgctggagtgcagtggcacgatctcgctcactgcaacctccgcctcccggattcaagcgattctcctgcgtcagcctcccgcgtagctgagattgcaggcgcccgccactacgcccagstaattttttgtatttttagtagagacggggtttcaccatgttggccaggctggtctcgaactcctgacctcaagtgatctgcccgcctcagcctcccgaagtgctgggattacaggcgtgagccaccacgcccggctccgaaatttttaacataagtataatatactaagtttagtattgtgttaaaaatgtgtgcattgttgtctggcaacacaccctgagccagtctcaggaaataccttagcactttcagtaggaacttgggcaaatgatctctgtgaacctcagacccatcatccaggaagtggg

SEQ ID NO: 782784 - DNA, 476 bp, Homo sapiens
tccatatataattgttaatcagcgtttctgcaggggaacagggctaatacttcctattctgccatctttctcttgtaactcctaacccagaattttaaatccagtggaaatgtccttcaaaaataagagtgaaataaagacattttctattaaatgawagctgaaaaatacttctccagcagacttgcacctgcactgcaagccaaccaaccaaaccaaaaccaaaaccaaaccctaaagaaaaacaaaaaacttcagtctgaagggaagtgacagctggaaactcagatctacaagaaggaattaagagcatcagaatggtgaatatgtatgtgaatataaaagccttgctttttagttaatttccttaaaaaacaagtgatcatttaaagcaaaaataatatcattttaagctggcagttataatgtacagagaagtaaaatatataagaatactacaaaagatgggtgtttta

SEQ ID NO: 782785 - DNA, 621 bp, Homo sapiens
aggagtatctgttacaagttcattcattcccacaaccagcacttatgaagcacacaccactgtcattcatttctacttcatcagctaactttccttttgacctataccttgttcaggtctcccaatggcggttgaaaatacaggttaattttcccttatctgaaatgcttggggtcagaagatttttgaattttggatttttttcagattttggaatatttgcattataccagttgggcatccctaaccaaagatccaaaatccaaaatgctccaatgagcatttcctttgagcatcatgctggtgctcaaacagctcagattttggaacatttcagatttggaatgctcaacctgtaccctgcttgtcctcttccrctctgacatttctttcttaactgtcatggcagcttcatctgtagccctcattcttgttaaattatctgccttctagcttctccacagctccataaaaatgtaagggagcccagggaagggtaatcaagcaggacagactggatcaggataggcttcttggaggaaactgagtatcaactgaaggttttgtatatttattgcatattgaaaattttgaataggtcactttcttggcatggacctc

SEQ ID NO: 782786 - DNA, 527 bp, Homo sapiens
aaagtctcccattctcaaataccttttgtgatgagattttgccactgttgtcattcaaggggtggagtctctttttccttcccttgaatctgttctggcctatgacttgctttgaccagtggaatacagcagaaatgacattgtaagagagagtgctgctgtagctcttggctcactgccataagactgccatgctgtaaggaagcccaagctagctatacagaggtcaygtggatgagaaccaaaatgcccaagttaaagcccagccaggcctagtgctcaaataattcaccacctgaatgcagctctattagtaactccaggtgagaccagtagaaccgcctagtcaacccgcataatcctgaggaacaataagctgagcttgttttcagccactaagtttagagttttatttttgatgcaacaatacataactgaaaaacagtagacatgcatcaagttcttttattccctcttttcattttttcctttgtgatctccttagtcacactttcaatatatctctg

SEQ ID NO: 782787 - DNA, 469 bp, Homo sapiens
aataaaatacaattgccaagtcaattattttttccaggaagacaatttttagtgcagttcttaaaaaggataaccttattctagcctctttttgttgtcagtgacagaaactccattcaaactgaattagatggcgaattccaaagtagcttcagtatagctgtgagcaaacgaygtcatttgcacccgagtctctccatcttgatctggcattggcctcagtcagggctcctgtgttggggtgaaggtggatacttaagttcaggctgacttcctccagcagagcaacacccagcaggtatagagcccttctttactgatagcacaagcaagaagtcctggaagtgatgggctgtcccaagggacctcatgcccctctctgaggtcactgtgaaaggaggatgtatccctcttgttttctaggtttaggatgcatactggccagtaaaggcagggtatgggggtgccc

SEQ ID NO: 782788 - DNA, 615 bp, Homo sapiens
gccctgggtgctggaaatgatgaggtagagtgagaggagatgggtgtaatggtgccaaagataattccaactatttagaaattttacctagaacactgcatttttaaaaaataataattcaaattgtcaatttccccatcattcattttttcttaaccatttctgcctcttcactttctgttcttccaaagtgatctttaattatttgtttcagctctctctcctttcttttctttctctagatgtctcaacaagctgagaaatggttaaattcaaactacaggaaaaggaggtgagattaacagagtgacttgtcagctagtcrgcattgagaagcctcaaatcccagaatccgacaacatttttcctggattttgaccatagtctctgtttagttcacagacaacctatccatatatagtcaactcttcagtaattacactcagaagatagactttgagactcatccaagaagtaaagggtcacattgtcttctgagtttaatttctcacctcagctgtttatttgctctgaataaagcctgtgggattagaaagggaatcagttacatatcccaaagcaactcttttagctacagcaatcagtccgagttcc

SEQ ID NO: 782789 - DNA, 555 bp, Homo sapiens
cgagactccgtctagaaaaaaaaaaaattgtggctccagccattatgaactgtgtggggacaaatcagcatcttaggagcttgatgacttgaaacgtgacatgcagtgaaggcaaacttcttcctcctcctgagagatgtcagggctagggagctgtgaaacgaatggaacagagccagtgcccagccagccccagttccctctctccttctggggacttgttgacagtatctcgttactattgcaggcaatgtccccttctgctgaatgatccaaggacaycaaactttgcctgatcgacaggggaggctgctaagctgcacctgctccctgtaagagtggagtcaggccaaggcatagaggcacacaaatactagctttcagacttgctaggactacgtccagtctcatcacagctgtccacgtggaagtctctttgaggtcaagcaaacaaattcaacacagtcaaactttaaaccattctgtgggtgaaaggtttctgaagaatagacagatcttattctgcagtttaatgtttctggctaatctatgtaa

SEQ ID NO: 782790 - DNA, 684 bp, Homo sapiens
cgaggatcctttcccttcccactcctgccattatacaatcatcaactcacatagcccctcactctgtgatcctcccaacagatcatgattgcgctttggattcccatagtactgtgtttgtacttcattccttaaattagtgtaaccartgtttaaattaaatatttaaattaatttaacccatacttacttccccatcactttgtaaatttcttgtggaaaaagagtatcttactaatcttgtgtgcctttcatgtttcttcgcacatagctttctatacatatttgttgaattaatgagtcaagagaaaaggaagactgtctaagatgggtcgattgatgccaaagtgtttgcagacaatacattttgtagatgctcatatttttatatggctgctctagccttttaaaatatgccatatttggctgagcgcggtggctcacgcctgtaatcccagcactttgggaggccaaggtgggaagactgcttgagctcaggagtttgagaccagcctgggcaacatgggaaaactccatctctacaaaaaaatacaaaaattagccacacatagtggtatatgcttttagtcccagctacttgggaggctgaggtcagggaatcacttgagcccaggaggttgaggctacagtgagccgtgatcacgccactatactccagcctgt

SEQ ID NO: 782791 - DNA, 684 bp, Homo sapiens
cgaggatcctttcccttcccactcctgccattatacaatcatcaactcacatagcccctcactctgtgatcctcccaacagatcatgattgcgctttggattcccatagtactgtgtttgtacttcattccttaaattagtgtaaccaatgtttaaattaaatatttaaattaatttaacccatacttacttccccatcactttgtaaatttcttgtggaaaaagagtatcttactaatcttgtgtgcctttcatgtttcttcgcacatagctttctatacatatttgttgaattaatgagtcaagagaaaaggaagactgtctaagatgggtcrattgatgccaaagtgtttgcagacaatacattttgtagatgctcatatttttatatggctgctctagccttttaaaatatgccatatttggctgagcgcggtggctcacgcctgtaatcccagcactttgggaggccaaggtgggaagactgcttgagctcaggagtttgagaccagcctgggcaacatgggaaaactccatctctacaaaaaaatacaaaaattagccacacatagtggtatatgcttttagtcccagctacttgggaggctgaggtcagggaatcacttgagcccaggaggttgaggctacagtgagccgtgatcacgccactatactccagcctgt

SEQ ID NO: 782792 - DNA, 589 bp, Homo sapiens
agactgattataatatattctctataacctaccaaggttgaggaatgggattatcaaaatgtgtggctaatggaagctatatgacttaataatatgaataatctcccgataagtaagagaactaaatgcttttattataaaaactgtagcagtatttagtcagtacattaatatctggcaacccttaaagatgtactgtcacttactgggttgctctttgacctttgtcaattcatttaacctttttgggcctaattttcttcatctataaaatggaaacaaaatcatttctccttcataaaggtggtattaaggaatatgtaaaacagtaaatgtcaaaatatcctatacatatgtgagattattttttattatcttgctatgtttgaagtgttagagtcaccgttcatagaayttcagattaatagaatcataacaacaggatttattttaattgagattttaggttagtgaggaaaaggtgggatcataagctaatagacatctatacatgaaatactgttttcaaaaatgtaaggtttgcaaataattgatttggcttagaaaatccacgttgctcaacccataa

SEQ ID NO: 782793 - DNA, 636 bp, Homo sapiens
agtgtagtattgtctgcagtaactctttgtttagtcatgaaatatgttacttgccattccacatgtacccaatacagtgttaaaaagagtcctgttcagctaggataaatcacagaacaagtatagtaagaacatcaccaagtaattatayagtatgtctttgagatttgtgtctccaagtttctgaatatttcattttgaaagagtaacttagaaaacgtaaagagaagttccacagaagtgcctgggagagctgatctttaccaaattcagtaaaaatttcagaggtgaataaaataaacctggacaattcataataacctacagaagacacatcgttttcattgttttccattggctaacatatccggtaggaagttaaatttcactgtcttttgcatagcacagaatttgttttcctaatcacctttcctacatattgaacaacgtctcggtcataatcatggcatatgctgcattgaacccaaggtgaaaatcattcttttttttctcacctgagggaaatttcactttttttactgaatgaaggaagcacttaaagtataaattaaaataaagataactactattaaatttggttaggctcatataaaaaaaaatagtaaaatggcagtc

SEQ ID NO: 782794 - DNA, 522 bp, Homo sapiens
ggagggcaacacaggtgaacgcacacagataggcgcagtccccggccgttcgcacctcagcatcggtggcacttgtcatgattcaggttgcccttgctttcagcaaattcaacccttttgaatgcttgtttttatagaaactaaattagagagggattattcatttacaaacaaattgttcattttaaccagagtcttaagtaactgayacctctgtgctagttataatttttttaatctcaacttggatacacattttcaagaatatatctattaggtaaagtacactcacataaggaaaagtagatggttaattgcctggctatttaattcccaatatcataatcttggacactcctttcaataaaccttcacctagccaattcccaagaaatcacttcctcaagtgagttaaactgggcaacggttaagcaataggagtgtctttttttcagatgccagcacagagccacttgtccctgttaatcacgaagactggaaaacaagcagagctatgtgacg

SEQ ID NO: 782795 - DNA, 522 bp, Homo sapiens
ggagggcaacacaggtgaacgcacacagataggcgcagtccccggccgttcgcacctcagcatcggtggcacttgtcatgattcaggttgcccttgctttcagcaaattcaacccttttgaatgcttgtttttatagaaactaaattagagagggattattcatttacaaacaaattgttcattttaaccagagtcttaagtaactgatacctctgtgctagttataatttttttaatctcaacttggatacacattttcaagaatrtatctattaggtaaagtacactcacataaggaaaagtagatggttaattgcctggctatttaattcccaatatcataatcttggacactcctttcaataaaccttcacctagccaattcccaagaaatcacttcctcaagtgagttaaactgggcaacggttaagcaataggagtgtctttttttcagatgccagcacagagccacttgtccctgttaatcacgaagactggaaaacaagcagagctatgtgacg

SEQ ID NO: 782796 - DNA, 579 bp, Homo sapiens
taggacaggaagggaatttagaccgcatgctcttgattgcacagtctgggagggtatggggtggtaaggagagcaaatgttcagctaggccagtagaatgttgccaccaatctgtcactaacgcagctgccaaaattttcacattgccgagaaagtaagtctttaaagcaaaggctctttgtgccttctttttggaagtttcttgctaatttcctcctctgcttccctggcgatctgagagctagagcttttgtaccatcaactctcagcaaatagaagctgggccagcaggctgcaaagcaaagggtctcattaaaccacagccctttgcaagtcaggtccgggcacatgtttggcaycaattttctacactggggcatattccaaaatacataaggctctcaatttttctgtttctttaaaagaaattctccaaagtcagataaagttaaggaatttgaaaggtgtttaaggtggaggtttccactaggaataattattccaaggagctgagttccaaatttgacatcctcagggtaagacgagaatctaacacatcatagcaataatgactgtctg

SEQ ID NO: 782797 - DNA, 624 bp, Homo sapiens
ggttgatttctcctgaagcctctctccttgacttgtagaccttcatcttctccctgtgtggtcttccctctgtgggtggctgtgtcctcatctcctcttcttataaggactcctgtcatattggattagggcccacccatgtgacctcattttaacttaattacttctgtgaagaccctatctctaaacacagtcacatttggagttccttggtgttaaagtttcaacatgaatttggggtgggggtcacaattcagtccatcacacacctaacrtgggtgtaatgtgtctacaggaacagtttgattgagcaacaccacaggttgcattcccagagaagcaaattttgagatggagattggcatgctggaagtttgtggagagtgctcctgggaaactgtcaaggcaagagaggaagcaggattaggcagaggaggaagctgaaatcaggataaagaccccagcaagtcacagaggccctccaaagctgggatgtccttccatgttgtctgaactgaggcaaggtagttggaagtttatgccccttcctagacagtcactgtaaacaggccacccgagggaggaggtgtgctgtgcctcagctggggacaatctcaagagggg

SEQ ID NO: 782798 - DNA, 633 bp, Homo sapiens
tcttcttaccttcattctccaaaaagatccattatgaatcaaaacagaaaaacctctggggattaaaggcaaatcaactctgtttctgttgatttttaacatctttgagttaactctaacctgtatacctcaagtttttgccttactrtttgttaaaattaccattctgctccagaaaatctggtttacccatgatttctaaatatgctgctactgcctagaacatgccactcttatcattacccgtttaaattccactcattctacaatgtctgtcaacccatagcatcttcactaaatggcatagcccacagaagtttctctcatctctaaacttatttgctacttataactgctttatatttcagaggaattattatttctctaaggatgaggactgtgcatgacactgtttacagtttctaacacatagtagatacttgataagtgcaggatattttggcagatgttattagtattagtgttagaataatcaatcaaggaaatgagtaaagcacatttaataacatgtataattaaaaacagctttgaatcatatttgtattcagaggacttctttctgcatagaatcacaacagtacagttagaattgtattccttgttcaagcttaa

SEQ ID NO: 782799 - DNA, 621 bp, Homo sapiens
cataggggaggtaaaatgagggaaatcacaaaaattgtgacaatttctagattagacatagtgtaggtgttgtcatgtctgcagtgtagaagtcaccttggaaagagtttgctcatatttcttaaacattttttagggttgtcttagagatgatccaagaacattttctttcattcattcaacaaacttttactgagcactcagtgtgcgtaggatgagctaggctaggagataaggatgcagtggtgagtaggataaataaaattcctctgctaaagaagcatatgctctagtagggaagacacaaaaaagtrtatatttagcatgtagtatgtagcaactagagctaggaggaaaagtaagataggggaaagggacagcattgtctttgggaggacccagggtggagacagtagccactctcccctgttcagaacccaggagcacagagtgcaggtcacagctcaaagggcattgtatttggctgtccaatgtggctgttctttttttttttttttttaatacaagcatccatttttgttttaagacatgaaatgagggaatgaccacatatcctctctgtctctaattggagacagtgagtttgggcagttaagatcc

SEQ ID NO: 782800 - DNA, 621 bp, Homo sapiens
cataggggaggtaaaatgagggaaatcacaaaaattgtgacaatttctagattagacatagtgtaggtgttgtcatgtctgcagtgtagaagtcaccttggaaagagtttgctcatatttcttaaacattttttagggttgtcttagagatgatccaagaacattttctttcattcattcaacaaacttttactgagcactcagtgtgcgtaggatgagctaggctaggagataaggatgcagtggtgagtaggataaataaaattcctctgctaaagaagcatatgctctagtagggaagacacaaaaaagtgtatatttagcatgtagtatgtagcaactagagctaggaggaaaagtaagataggggaaagggacagcattgtctttgggaggacccagggtggagacrgtagccactctcccctgttcagaacccaggagcacagagtgcaggtcacagctcaaagggcattgtatttggctgtccaatgtggctgttctttttttttttttttttaatacaagcatccatttttgttttaagacatgaaatgagggaatgaccacatatcctctctgtctctaattggagacagtgagtttgggcagttaagatcc

SEQ ID NO: 782801 - DNA, 563 bp, Homo sapiens
tctgtcacatactggggccaatcattgggtcttgttggtaggaaatcccactgtcaggttgctgggagcattgcaaagcagactgaaggaattccctgatgggtaggtgaggaagccgtgaaggcacctcccgacccaggccatgcaatgtgaggctgaggtgccaggtacttcaatggcgggatcctggtgacctggtgctgtccagggcacttcctgtgctcagctgttagtctgggccctctaacaagccagtgccaagatgggattaggtgtgtgagattttattaaaggaccatgagaggaaatggggaagaggctgggaacactgggagagctataagactgaaatgcaaatctgaccccaacggaaggagggaggaaggggaagstaggtggaagcattttagacttctgtgtagcctagggaatgttcaagaaggcctttgacagtcctggagcctcagagtgccatgtctcacaggagcgggtcagctgtagcatccttgctgctctcatctatgaccagagcttctggggaagcagggcctccatacaaacac

SEQ ID NO: 782802 - DNA, 489 bp, Homo sapiens
gtgggtgtgaggcctgaggaaaagcgatgggttgacagcacctcctagagtttggtcttgactcagcgaagttgggaagagtaagtgaaaagccagcatgaagacaacgactcaaggtctttgtaggacattttaaattcaagrcatttatgttattaagagaaaaaaacccaagaacaatataacactcatgaaataaccctgttcaataaaattgtaaaggtgtatacaatttattcattcttaggactcacacgatagatgttcccagatgcttcccatggactatatatcctactggtgtaggtgggagtaaggtgagagccaggattccaatcccagcagttttcaaatcccagaccttcaactaaggtcaacatcagatctggaagaggaaagaggtgcagtttcttttctaattccatcaggatcattctgggtctggccacagggcacactgcactgttctcctatctcagaggagagggt

SEQ ID NO: 782803 - DNA, 627 bp, Homo sapiens
acctggtgtcagtggaaggtaaggcgcttaaggcagaaataattaaataaatcttcattggaagctaaatgtgagaatcaatgtggaagacacagaccaacaaagtgggtgtgttccaaagtctgttacaagttggaatgcttttgtgagaaaagttaaaagaagggaatgagactcctcctatcagytttttttttttaattttcttttgttttactgacctggcaaggctcaaatagagttgagtttttgttttgtttttgttttttccattggaaggtacaatacagaggttacaatcattgactttagctgacaacataacaagttaaacattttccttgcaagacaaccagtgaaacttcatgatcagaatcaaatcagtgtccttctcactgtaagtgggtgaagcttcatcaataattgcagagtttgaggcactcatgaactcaagatcagattctttactcagggacagaatgtaagccaatcataagaccttccacaggtggttaatttggactcctgaaaaatgtgacctgtaagttttcactggcaatatgcaggtgcacatatgacaaataataaccaggacctttatatcacccccaactggtggggaatggg

SEQ ID NO: 782804 - DNA, 605 bp, Homo sapiens
ataaagtttataagtatggttgcaatttcttccagagtagccttaacctaagccctgagaccactcaggtcctcagtggcacctctcttccaccagcaggagtgaaaaaattgctaccttaggtgatataaaacccacaagaccattsaatacatggagatttttattttgattttgtagggacgactcctctgtttttataaagctattttaactataaaacatttttgtgattttgatgtggccaaagatctcccaacaatactactttcagattttagttttctgtctaatatctgggaaagattagacccttccctgcttcagactcaggactatgcaggtcacatattagtgaaattccatcagtgtttgtgaagttcatgaatgaatgaattttttttttccgacaaattctccctctgtcacccagagtggagtgcaatggtgcaatcttggttcactgcaaccattgcctcttgggttcaagcgattctcccacctcagcctcctgagtagctggattacaggcatgtgccatcgtccctgtctaattcttgtatttttgtagagacggggtttcaccttgttggcctggctcgtct

SEQ ID NO: 782805 - DNA, 505 bp, Homo sapiens
aattgatcatattagaacccaaactcataccaaccttgaccttcatgaagtactcaagtgtttctgctcttcttcctcatgtgatgtagaaagtattaaaagtgatgagtttaggccgggcacggtggttcacgcctgtaatctcagcactttcagaggccgaggtgggtgcatcacctgtggtcaggagttccagaccagcctgggcaacatggtgaaactctgtctctactaaaaatacaaaaactagttgtgtgtggtggcctgtgcctgtaattccagctaactggaagactgaggcaggagaatcacttgaaccgggaggcagaggttgcagtgagscgagatcacaccattgcactccagcctggaaaacaagagtgaaactccatctcaaaaaaaaattaataaataaatacattataaataaataaattaattaatgctttaaagaaaaaagaaataaactttgcctacaaatttcatatgcaattgaatacctctt

SEQ ID NO: 782806 - DNA, 567 bp, Homo sapiens
tttaactctgaaatattttgataaatttgatgtggccaaggatccctcaacaaagatactttcaagttttctttctttctgtctaatatcaggaagagattcaacccttccctgtctcacactcaggactttgaaggacacatattagtaaaactccatgtttgtgaagggaatcrgtgaatgagtcctggactttcaccctatccctaaatctttcattttgatggatcaatatctaattcgatcagttaatctttaagaaagccaaaaatccaataaggattaactgggtagagattaagaagtctagtcaaatgtagctctctctgtctctcagttcaatctagcctatttcccaggctggagtggagtggtataatgtcagctcactgcaacttctgcctcctgggttcaagtgatcctcctacctcagcctccctagtagcttggactacaggcgcagaccactgcacctggctaatttttgctgtcttagtagagtcagggttttaccatgttggccaggctcgtcttgaattcctgatctcagatgatccacctgcctcg

SEQ ID NO: 782807 - DNA, 629 bp, Homo sapiens
gaaacgtgcctgccgtcccagctaattgagtggttgaggcacaagaatcacttgagccctgaaggaaaggattgcaatgagcccagattgcaccactgcactccagcctaaatgacaaactgagattttgtctccaaaacaaaacaaagaacaagaatgggtgggaaatacttaaaatgatcaaattytatttggttgctttgatgttctacagctgaaactcaatcacagacaaagtagtatttcattatttttccatcagtaactcaataactagatatttctggtggataaattgctacaacacgttaaaagttttcattcaggtgctctttatttctgatattccttggtaaccatccttgcagggataacattctcatcactgtagaactttagcttctctttccgactctgtaggacacgggtccctgaagttctcattgatgtcacctcaacattttcctccagccttgccccctgctgttatgttttctctctcacactgagcacttgcctgtgcttcctttaagttgcatgtggcctggacacagtcactcatgccagtaatcccagcactttaggaagctgaggcaggaggatcccagagcaacacagagaaaccctgt

SEQ ID NO: 782808 - DNA, 423 bp, Homo sapiens
gcctctgggaagcaggacagggcccaggctccaggccatctggcccagaaattctcatcaacatcccgcaaatccagcacttgaagtttccacctcctgtgggtaaagtaagggagaggctcagaatttagagggactcatccctgacctttgctttcattctcatcccataaatcagctgctcctgtcctcagtgctccctgttctctytgtcttttctcaatcccttttccctttggattctgagtggtccccacttctattccctttaccttccactgagtaaaggccggtttctgttcccacagtggaccctgtatggtgagcagtcctttctctgaggatctggacaatggccaaagcctccctgagcttcctcgccaacaccatcagaagactctgggccgcacttgggttacttct

SEQ ID NO: 782809 - DNA, 423 bp, Homo sapiens
gcctctgggaagcaggacagggcccaggctccaggccatctggcccagaaattctcatcaacatcccgcaaatccagcacttgaagtttccacctcctgtgggtaaagtaagggagaggctcagaatttagagggactcatccctgacctttgctttcattctcatcccataaatcagctgctcctgtcctcagtgctccctgttctctttgtcttttctcaatcccttttccctttggattctgagtggtccccacttctattccctttaccttccactgartaaaggccggtttctgttcccacagtggaccctgtatggtgagcagtcctttctctgaggatctggacaatggccaaagcctccctgagcttcctcgccaacaccatcagaagactctgggccgcacttgggttacttct

SEQ ID NO: 782810 - DNA, 426 bp, Homo sapiens
tgatggtattccacagcatttggaaggtatgtatagaaatgctaactgtagctgggcatgctggcttactcctgtaatcccagcactttgggagtctgaggggggcagatctcctgaggtcaggagtttgaggccagcatggccaacatggcaaaaccctgtgtctactaaaaatacaaaaattagctgggcatggtggtgagtgcctgtaatccaagctactcaggaggctgaagcaggagaatcacatgtaactaggaggcagaaatttcagtgarccaaaccacaccatggcactccagcctgggcaacaatagggaaactccatctcaaaaaaaaaatcaaccagaaactgtaaaagtgctaccatgctattctagagcactgtaactctaagatgaaggttcctatagacatcacttccac

SEQ ID NO: 782811 - DNA, 588 bp, Homo sapiens
ccccagattcatgtagataatagctccagctttggctaatatgtccctccctaataaaggtgtgggactttcaggcataacaagaaaggcatgtgaaaagagcaaagtctcccaattacaactgaggaggtgggagaaatacctggttacaggccatcccaggattcctttgatggtaacactcagtgagggtgatgacatgagctggcgcttgccccaggcaccctcagtcctattgttggatcatctggttggggrcttcaggcctagagaacctttgtcctctggggcagtgcgccttccagtgatttccttggcataatggacatgggcgagggggcagcttgtttcttgttggacaatcttttttaaagtgtccttgcaaagaacactggtaacaagtcctactgggtgattggcctgctccattttctgttctctgaacgaccaaggtttgtttgtctgaggatgatgaaggctgtggcctttctctgatcttgcttttccttttcggcttgttcctcttggtccctattatagaacaccaaggttgccaggtttaataatgcctccagattttgttcaggc

SEQ ID NO: 782812 - DNA, 530 bp, Homo sapiens
tgcaaacaatgacagaagcagtcagctatcatggtagggacattgaccttctctattctttggccctcctgatctatttccagtagtctctcttttgggggcaccccctccaacttttattgctcaaaaggactacagtgctgaaagggactaggctattattctccgaacagttgtcttgatatccaaactgttttttgcacacaatttttacacacgcttattttatctatacagrgaccttgggggaaagggagagaaaatatcattaatcaactattaagcttttacatgttaacacatgaggagacagagaaactgagagaaatggtttgccccaagtctcagttgactagtggtagagtttgactagaacctagaccacactaccaatgattttctgcctttgtctgtgacctgtgttcaagctcagggagtactgtccacctttgtcatatttcccaggtaattcttttgccttgtttaccactgtggctgggagagatccccaggcaggaaggcttcagtcc

SEQ ID NO: 782813 - DNA, 649 bp, Homo sapiens
attatgggttttggttaaaaaaaaaaaaaaaagaccccttccctgaaatacacttcactggaatcatgtacatggtatagaaagtgaaacaaagaaagaatagatgctgggtaggtaaccaacaatgtctatagcagtagaattcagagagggagtggcatttgagctggatgttgaggggtgaataagagctcaccagatagcaagggtcaacagtgcatttctagtgaaggaaacagcttgtgcctttgtgcaagagcctaccacacttgacgcctgggctgccagttccatgggagcaaagtggaagagggaaagggggcttggaagaggtgggggcagtctaggaaggatcacacatcccttacaaagtatttgttttcagtctgcaggcaatggagaaaaaatgatagtatttatttgacgacaggraatatgaggttaaatttcttccaggaagaggtagcctcacagactggagtatagagaacagagaggctagcaacaagaagagagctgcaaagtttcaggttaaagatgttaagttcctggctaaatcaagctggatgtggatgcagagctagggacatataaggagcctttgtgaaatcacatttcctcctgaaatcccttctcagggtcactaaaa

SEQ ID NO: 782814 - DNA, 494 bp, Homo sapiens
gagcaaggaaaagcagggtggtgtgatggcccacctggaagccacacagggtaaggggagtgcccatccccagccaagggaggtggtgagtgatcatgctaccctgcccaggaaaccatgcattttccatggatctgttcaacctgcagatcagaycattctcatgagcccatgccaccagggccttgggtcctaagcacagagctgtgcagattctcagaggccactggcctggagactgtcaaagactactgagttcccagggggaggggccactgtcttcactgcagctgcctgttgactaagatgactgagctccctgcaggaggggcggcagccatcactgtagctccagtctaccattttatcctatgccagtgctgggagactggaaggtttggacccaggaggaattcctcacagcgtagctcagctcagcagctgtggcagatcatgggcagactgcctctttaggccagaccctgactcatccc

SEQ ID NO: 782815 - DNA, 588 bp, Homo sapiens
agcctccagaaattccatgagttctgtttgctgaggggccttgagttctcaataaagctgaagttgcagaagccccaagggaattcggtggcccacactgcatacccagggacaggcctggctgtctcattcctgtaaatatatatgttttattaatgagaactctgttgagctttcagagaaagtaagaaacttatttctgttcattctgggtaaactactarcctagctttttccaaatactatctattgcaagatggtcattttcaattgtaggggaagaaaactgtgcctgaataagggaaaggatttgggggtcagaagaatcaggctcatgaacagcagcagggactttgcaggttttatcattacccaaccagggagacaggtagaagcatccctatttcacaaatgaggatatagaaactcaggtaatttgaataatttgcccaggatcatagaggtggaaagtagcagaactgggtcctgcaggtctgcacacagagcaggctcctaagtaatatctgtggatttgaaattccatgggcaaatttagctagaagaagagaagaccttctctgattaatt

SEQ ID NO: 782816 - DNA, 489 bp, Homo sapiens
gatatagctcagtaccactgaagccaataaacttgaacctactgtggatccagcccatgtagaagccagaattcaccatgcaggagacaatgtcctgatcaaatactccctgtgggcttttttttttttttttttacaaatgaagaggttttcactctacttctcagaacattgagctgaactgctgtgggggacaaaaatggtgtgatctggtagtgaggctctgatggacagccgcttgtaggtcaatcttgaaatgaatggctaagctaagatgctaaaaaaagctcttgctcaggccctatccaataccttcccccttaactgkgaggccccttcacttcgtttttactggattttatcttcagaaaagagaaaatagcactcaaagctattattctatttatatcatcttaaagtgtttctttctggggagataaagaaatggtatgcccatcatttcactagggcatggcacctttgttattt

SEQ ID NO: 782817 - DNA, 646 bp, Homo sapiens
ttcctgaagtctcctcttgcagtcggcttgacagaatggattaggctctggctggatcattctacagcagcacaattaaacagtggcaggcccagcatctgtcatttgtatgagtggattgaggctggtgggagatgcatgaggatcagccatgggaatcagaaatcttttgttagtgcagaggcctgaggctgcccaaccactgtgcccaagtccaaggtcagcgcgaatacattctaggcttgagagagagaaagaggctggtatgcacagtacaggggcactgaratgcaaaaagcagaaaacattttgagctgatgagtgagttgccttcagcaaaaaaatggcccacgcaaggaaacatcctcacaccccaaatcagaacaagtttgggaagagaacagaaaacaaccctgtgaattttaactatgtctgtgaatattttccctaggaaagataagggaagtgagtgcagaatgagttaatgctgccaaaaggattaagtggaataaaaatggtgtttacaaatataccagggaaaagaagcatttggggaaaatatgtccataaataagtaaagaggattgaaatctactgcgagtctaacaagaccaaggtgctgaattgctttttcctatctgtcttt

SEQ ID NO: 782818 - DNA, 646 bp, Homo sapiens
ttcctgaagtctcctcttgcagtcggcttgacagaatggattaggctctggctggatcattctacagcagcacaattaaacagtggcaggcccagcatctgtcatttgtatgagtggattgaggctggtgggagatgcatgaggatcagccatgggaatcagaaatcttttgttagtgcagaggcctgaggctgcccaaccactgtgcccaagtccaaggtcagcgcgaatacattctaggcttgagagagagaaagaggctggtatgcacagtacaggggcactgagatgcaaaaagcagaaaacattttgagctgatgagtgagttgccttcagcaaaaaaatggcccacgcaaggmaacatcctcacaccccaaatcagaacaagtttgggaagagaacagaaaacaaccctgtgaattttaactatgtctgtgaatattttccctaggaaagataagggaagtgagtgcagaatgagttaatgctgccaaaaggattaagtggaataaaaatggtgtttacaaatataccagggaaaagaagcatttggggaaaatatgtccataaataagtaaagaggattgaaatctactgcgagtctaacaagaccaaggtgctgaattgctttttcctatctgtcttt

SEQ ID NO: 782819 - DNA, 567 bp, Homo sapiens
agtctccatgattttgacttgttgatcctccttgctattcacaaatctaaaaagatggttttaactacttgtcttaaatgttggtatttgaagcttcctaggacaaggctgaagtagcaggccatatggggtgacagccctgacccatgccaggtgggctgccagggtttcattaactaggactgggggtacaggtcttggatcccatttctgaggtatggttgtgcatagattttcccaccacacacatctggccactgaggttaggcacgttagagsagaaagccagactgtgacaaagtcttacttggttgtgaggcagggtagaggctttatattattattgttgtagttactgaaaaatatttacagtaataacattggagacaagcaggttgctgacattgctacttattccacaatattcctgaaatcctacagtctgaaccaagtgtggaatttttcacaaactgtgacaaactgagatcttttagagcagaagcatccctgaaatcacaccacagttgctgccaacttggcctaaacacagagcccagtggtgctggc

SEQ ID NO: 782820 - DNA, 655 bp, Homo sapiens
taaatttatttctcatggttcttgaggctgagaaatccaacatcaaggcataagtagacttagtgtctgtgctctggttcataggtggtgacttctagttgtgtcgtcacacggtggaaggggtgagctctgtggggtctgttttataagggcactaattcccttatggtacaatcacctctcaatggccccacattaccctgggggtttcgaaatatgaatttgggggacatacaaacatttaggccttagtagcaaataaactttagaatcagtttgttgatatygacgaaataacttgttgggattttgattgaggttgcattaaatctaaagatcaagttgggaggaattgatatcttaataacattgagtcttcctactcgtaaacatgaaatatctttcagtttatttagttctttgatatctctcatctgagttttgtggttttcctcattttccttctctctaaagaacttttaaatatattttttgcaaggcaggcctactgacaagaaattctttcaactttgtttgagaaagtatttctccctcacttttgaaggattatttcacagggtacagaatcctagcctggttgttgttgttttttttacttcaattctaaatatttcactgtattctcttcttgctt

SEQ ID NO: 782821 - DNA, 612 bp, Homo sapiens
gaatgtgcttaataccactgaactgtacacttgatattggtgacatggtaaatggtaaattaaatttcatgctacgtatatctcactataataaaaaattgaacagcaaaaaaaaaaaaaaagaaaaaacaagaaggcaatagaatagatggctatacaccatgatgctgacacytagtctgagttatggaatgtattgtatatgttatctgggagaaaaagacacaatgagctctttgacacacttaaaacggatcataagggattattcaagccattgttgtctccaggaaggtaaatgtctaatcaagaaaagatagttggatattctcttaagtatccagagatgtggtctcactaacccccttcataggccttctgaatgtttcccactcctgaactcagtgtctgcatgtgacgcaaagccttaatgatattattactatctattactaccactgctactaatatagcagctaatgttcattgagcactttctatgatctcagtctaactctatgaggtagttacaattattactaccattttaaagatgagaagagacaacacatggaatatgtgtgctctcttcgtatatggttatttatttta

SEQ ID NO: 782822 - DNA, 605 bp, Homo sapiens
gtgtttcagaatgctcttgcattcttgggattcctctgttggatggtaagttctatcatggagtagaacgtgactagcttatttaccattgtgtacccatcctggcacacattaggcacttggatcatttttggatgaatgaatatatgaatgcacttacaggaggtgctataaacctgggaagtgcttagacaggagtagtgaaagtaatgaagtttaaaagagaaaagttagacagtctgagaaaaaagargtaatagagtggtttggtagtaatgctttaggaactctggtttcattgtatgaaagctaatggttacccagatcttcagaatttccactgatgtccatgtaggaaaaaggaccttaaattaaggaacatgagattatcatcaaatgtaaggaggaaactatgagagtgtggaatgtggccacagggaagacaatggtctttaaaagtctttcaagtctgttaagaacaatttttttgtgtgtgtgggtttggggggtggacacaattatcctgaaatcttgggtaatggattagatgattcatggtaggaaaagctaatttgttttactaaaaatattatgtgtagctatat

SEQ ID NO: 782823 - DNA, 477 bp, Homo sapiens
accaaagaaatacagatagcaagtaaactgtgttaacctgttcctattactataacaaaaagtaccttagactgagtaatttataaacagaattttattgctcacagtttgaaggctgggatgtctaagatcaaggcactggcagatttagtgtctgctaagggctcaytcctcgtcactttctgtgtgtttttacatagcaaaagggatgaatgctgtgccctcgcatggcagaaggggcaagcatgctccctttaacctctttataaggtcactaaacccattaatatagatggagccttcatgacttattcacttcccagaaggcctcacttctttatactataacgttgaggattaagatataacatatgaatgctgtgggaacatcaccattcagaccacagaataagcatctgaaaaggttctcagtataatatgtgattagggaattgcaaattaataaaacaattcaat

SEQ ID NO: 782824 - DNA, 620 bp, Homo sapiens
aactcagaagactagacatatctacacattttagaagacagaaagtaaatggatgtatagttatttatgtaacagaggaggaatagttaaaatttaaatatccgcagagggagaagtaaattcctataacacaatagaaaggcttaggaaggcttatgtttagaaactgaagggactaagaaactctgaaggcagattttactggtttggggtaaatagaaacaagaagattggttgaaagtctggatatgtagtaagaccccaaatccctttacaaaacccatttctcttcttttagggcatagtcatggagtagataatatatatttttcaaaagttttttgataccataaaaacaaatgacacatagatatattcgtataatttcattacaatgtgcacaaaacttataatcatttgatagccatatcaaatgattatctmtcactgttctcttataagctttttctgtgcctttcaggcaacacagtgtgcaaaaagtagattttcaataaaaaataatgaccttcaatgaacaatgtgtgcaaattgtcttttttttttaaccaaagcagagtttatgggatgagggatttctagaacctataacttccaaaatc

SEQ ID NO: 782825 - DNA, 673 bp, Homo sapiens
tttatgtttttcttttcttggatcctgttttgctggaaaaaaagtgttttgtttttttttagtcaactgaattatttttctctattttgccttgccacttttaaggcatgcatgagacgggagagaactctgtttccctcattaaaccccaggaattaaaagtggatgaatccctctcaaaaacctgtttttgcctcctacctatggctgtttaktaggctttagaagctgcatgttctcctagctctgtctcttaaagggctccacccagaggccaataatccaagtaggagaatggcaaattaaagatcttatgtctgctggattttcttctgcctgtgtagttatattttgtgttgtgtgtgtgatgtctataaaaaaagagttttaattggcacaaaggaagacaagcacttggatcaaatattttgtaaagggaagataaaagctgtggtaccttttaattaatgtgactttaatctttgagaaataaaaacagccttaaagattttggtagaatgcagatatcatcaaaatgtaaataggtgaactaaattatgcaggactgatactagtcttgctaaagattttaaggttacaaagtgactttttggttttttgagaacctttcaacttgccagcttcacaattggtaaggcctggggacatatgg

SEQ ID NO: 782826 - DNA, 589 bp, Homo sapiens
cgtagaacagagtcttacgtgtagaaaacactactgcaaaaagaatgctgtttagatggccggaacgcaagctagaaatcagtggtagagttaattgcagttgtccagatgacagataatggtaggttgggctcacatcctagtggtgagaatagtgagaaatttatggactcaagaaatatctcatttgtagaattgagaatgtttgttcatgagttaacatgcaggggagtggtgggaaaagaagagtcaggatgactaaggattttggacagatcaatggaaaggatgcagttgcaaattytgaagtaggaaagattgagaaaggagcagatttgaagggaaaatcaggaacttggtttgaatattttatgtttgagatacctattggatgttcaagcagaggtgttaactaggctattgggtatactagcttggtgtttaggagaacaactggcaagattataaatgtgggagtctttcaactatagattattcttaaagccatgcaattggacaagatcaccaaaggagcaagtgtagataaaaaagcaaagaggtccagggagtgagctctgggcccttcaaa

SEQ ID NO: 782827 - DNA, 517 bp, Homo sapiens
aaaagcagcaatagtaagtttgtggctctcttccttggttggctagatttttgagttgatagaaattgggcttttctgaacagtatttgtgacacatatattcaatgggctcctgtggtatgttatgtgtggatgaacctattttcttgctctagacatcagacctttagacctttaggtattgtctccttcrtaagtgaataaagttttaaaaaagtgtgaactcctctattaaaatattgttctaaaaagtttattaaatatagacatatagcaataatcatattttatatactgatttacaattgtacatacaatagtgattagattccatctttaaataaaagttattttaactcaattaataaaagcttatgtttgtcattgcacaatataaatatttctagagaatacctcaaaatcatttggtaaagaaatagtgtaatgacatgtgtgccttcttactagcttaccttaaattactctttattacacacttatgaataactgctaatca

SEQ ID NO: 782828 - DNA, 608 bp, Homo sapiens
ggcccagttagtttcagtcatgaagtttttgaaatatctatttaaggaatcatgttattttgaaccatttgtccagattatacgaacaggaaattcttataaatttgttatatgaagtcaaataaaccttgatataaaaaatttcttaacattacaccaaaggaaatttacaggccaatatctctcatgattacagacacaaaagttcttaaaaatttatcaaaacatatgcattaatgtgttttaaactagcataatacattgtgttcatyggtgctatgttgccaaaccttatttgttttaggttccactactattttatacatatttaatctctgtaactgtatacattttattatctcactttagtgtttatatatttaacacattggtaaagttctttttaatgtgtctttctaatctctaatttaaattactgaaactaagcacataattaaacatttatctccattcctgcttgtcagcaataatgttcagctttcaaaatttccagtactgcagcactggtggcacgtgttataccatctattagttatttttgtacatgcattgcctcctggctacatttcaactgaatttaagagcat

SEQ ID NO: 782829 - DNA, 492 bp, Homo sapiens
tttcagccctccgaatttattaagtaagagagataacgagaaggtggggggggtgattgtcaggtaattgtcactcagccgtttggttcacagcaggcttgtgagactgcatccttcgaacaataggtgctagatttcccagtatataacttcaaggarcccagcaccagggagtgatggccctgagcaaactttttggtggcaggcgcagtgtgagtttgcctacatcctgtattcatgataaacagtttgctgtttgatcatatagccttcagtggaatgctgagttgatcacatcccatgggcctttggctccctacatatccccctttgtgtttacaaattaatagaaagaatgtaagtccaggcttggcagcacccattttctgattggcggtccatccgattttacagactatgaacagaagacagagacaaaacaacattattccaagaactacatataagatgttaatgtggtgccttacatag

SEQ ID NO: 782830 - DNA, 492 bp, Homo sapiens
tttcagccctccgaatttattaagtaagagagataacgagaaggtggggggggtgattgtcaggtaattgtcactcagccgtttggttcacagcaggcttgtgagactgcatccttcgaacaataggtgctagatttcccagtatataacttcaaggagcccagyaccagggagtgatggccctgagcaaactttttggtggcaggcgcagtgtgagtttgcctacatcctgtattcatgataaacagtttgctgtttgatcatatagccttcagtggaatgctgagttgatcacatcccatgggcctttggctccctacatatccccctttgtgtttacaaattaatagaaagaatgtaagtccaggcttggcagcacccattttctgattggcggtccatccgattttacagactatgaacagaagacagagacaaaacaacattattccaagaactacatataagatgttaatgtggtgccttacatag

SEQ ID NO: 782831 - DNA, 646 bp, Homo sapiens
tacacaaatacgagtgtggttaaaatgacaatgcaattgctgctgcaactgcaagatttgtacttgttctcctaaccatagaaacatggatttcaacattggcccttcagtttgtaactcagtgtagccacgcttggttggctgtgcacatccagttctccatgtactgagctgtttgaatagaatgatgcaaagctacagaggacatcacaacagaagtcattaktgtgaccaaggaaacaatagcaaaaattatcatgcctaaggctctacggacacaatgagtaagctgagttagaagaagtttcaacaaaatgcaaggcaagggtggcaacccaaggctcagacagattaataggaatccatagcccagggatgcaacctaaaatcaaagtagagatattatgtgtttgcaatgtgctatgattaatgcagtgatacaaatggcaagatttacaggtcaattggatactgtttacctggagctggtccttcttagctgacaaaaagtcataaggattaaaaacacaaactgtaaattgagtggtgatattctttacaaatgtaacattaagactgcattgcttactattgctattattggatagtatcccaattgagatgctgtcattcataaatgggagtg

SEQ ID NO: 782832 - DNA, 593 bp, Homo sapiens
tcttaatttgctgggatccatggggttgggacctgctgagcctgaccacttggctccctggcttcagcacccctttccaggggagtgaatgcttctgtctcactggcattccaggtgccactaggatatggaaaaaaaaaaaaaaaacctcctacagctcctttgatgtctgcccaatagctgcccwgttttgcacgtgaaacgcagggccctgatggggtaaggaccccagggaatcttctggtctgtgggttgtgaagaccgggggaccagcacaatacctgggctggagtgcacggttcctcaggcttagtccctcctggcttcccttaggtaggggagaaaattcctgacccctggctcttcccaggtgaggtgatgccccaccctgcttcggctcgccctccatgggctgcacccactgtctaaccagtcccaattagatgaaccaggtacctcagttggaaatgcagaaatcacccaccttctgcttcgatctcactgggagatgcagactggagctcttcctattgggcttcttgtcagcaatctccagctttgttcatttttagaaattattttctttgtctttg

SEQ ID NO: 782833 - DNA, 548 bp, Homo sapiens
catcaggtggggacaaggttaggcatgtctaagttcagaccctccttgggcggtgcttgctgtggctgctgtgggggatgggggtgtggttcccaagtaaatggagttgtttccagaaggattatggctgcctctgctgtgtcatgcaggttgccagagaagttggggaaatctggctgccacgggcctcagccagctcccatgcaacccaaaggctggtcttgctcccgtcatgctcctcccctctactgacagaaccgagtttgttttcaggcaatgggcaagcagggctgaagacttgccccaggctataagcctcccagctgcaatagtaagcaggacttttgtacctccccacctgtcaagtstgcacacaagattcacaccctcccccaagttctggccaggaaatctcacattcagtgggaattgttacaaagttcaggtggatattttctttctgtgttattttcccagttcctctggcaaccctccccaaggatcccagtgagtcaaatcagaaatggcttccctgggcacccagagag

SEQ ID NO: 782834 - DNA, 602 bp, Homo sapiens
aatgcaactaaaacaaaaataaataagtgggacttaattaaactaaaatgcttctgcacaacaaaaggaacagtcatcagagtaaacagacaatgcacagattgggagaaaatctttacaatctatccatccaacagaggactaatatccggaatctcctgggaactcaaacaaattagcaagaaaaaacaaataacctcatcaaaaagcggggtaaggacataaatacacaattctcaaaagaagatatacaaatggccaacaaacataaaaaatgatcaacatcaccaatgatcagggaaatgttaatcaaaaccacaatgtaataccaccttacccccccccaaaagaatgatcataatcaaaaaacaaaaactaatagatgctggtatggatgtggtgraaagggaacacttctacactgctggtgggaatgtaaactagtacaaccactagaaaaaacagtgtggagattccttagggaactaaaagtagaactaacatttgatccagcaatcccactacccacagaaaaagtcattatacaaaaaagatatctgcacatgcatgtttatagcagcacaattcacaattgcaaaaat

SEQ ID NO: 782835 - DNA, 625 bp, Homo sapiens
atgctgcttggctccctggattcagccccctttctagggatatgtatggacagatttcccaccttgccagggatcccagggccagagtatgtaaaactcctgtgtctttgtgtatgcctaagcagctgctctgctgagactccacacagctctgtgtatctgacccaaggccctggtggcatgagctcttgagggggtctcctgacctgcaggtggcaaagatctgtrggaaaagtgtggtttctcaggtggggttgcactatcagtcactgcctcccttggcttgggtgggggttcctttggctctgtgccactcccaggtgggccatcaccctgctccctgcttttcttcattctctgtgggtcgagttgtttgcctggtcagtcccaaagtgagaacctggctatttcagttgaagatgctggattcactcaccccttttaatttctttctgcaagtgctgcatactgcagctgtttctaatccttttcttgattttctaaatgtacattgtgtcatccatgaaaaatgatagtatgattcttcctttcctagaccaatggcttttatttctttttcttgttctgtttcactgaccaaggcatctgataaaataaaggatgg

SEQ ID NO: 782836 - DNA, 600 bp, Homo sapiens
gctttggctttggctttggctactcgggcacattttttggtccatatgaatattaggagagttttttttttctaattctgtgacaaatgacattggtaatttgataagaattgcattgaatctacagattgcttttggcagcataggcattttaatgatataaattcttctaatccacaggcatagaatttcaatttttttgtgtcatctatgatttttttcaacaatattttggagttctccttatagagttatttcmcctccatggttaaaggcattcctaggtattctatttttgtatgtgtgtgcctattgtaaatgggatttataactttttgagttataaaaaatcatttataactttttgagtaaattgtaggtgtgtatatttatggggtacatgagatgttttgatacagacatgcaatgtgtaatcatcacattatggaaaatgtggtatccatccccccagcatttatcttgtatgttacaaacaatccaattatattttttagttattttgaaatgtacaattaaggtattattgactatagtcacccttttgtgctagcaaatactaggtctcattcatcctttcta

SEQ ID NO: 782837 - DNA, 641 bp, Homo sapiens
atatatatgacggactactactcagccataaaaaggaatgaattgatgacatttgcagcaacctggatgagattggatactattattcgaagtgaagtaactcaggaatggaaaaccaaacatcatatgttctcactcataagtgggagctaaactatgagggtgcaaaagcataagaataacaaaatggacttcgggtactcaaagggaaagggtgggaatggggtgagggataaaagactacaaattgggtgcagtgtatactgctcgggcgatgggtgcaccaaaatctcacaagccaccgctaaagaacttactcatgtaaccaaacaccatctgttccccagtaacatacagaaataaaaaattaaaaattaaaaacacagacaagattccttccctcatggaacttaccatctatgaaggaaagaagaagacaattaacaaataaacaatatataatataatgtcatatcatgawaatttgtagaagaaaaaaaattaaggctgggtaagtgtctcagaagacagtgtgtctttttttttttttttataggatggtcaaggcataatgaccatactgtaacttcctgtagctatgaatttctattaccttcaaggctttttggtatccaagatat

SEQ ID NO: 782838 - DNA, 574 bp, Homo sapiens
ttgggtgcatgtgtatttacaattgttacatcctcttgttgaattgacccctttatttatttatttacttttatttatttatttttttgagatgaagtctagctctgtcacccaggctggagtgcagtggaacaatctcggctcactgcaagcttcgcctcctgggttcacrccattctcctgcctcagtctccggagtagctgggattataggcacccgccaccacgcctggctaatttttttgtatttttagtagagacagggtttcatcttgttagccagaagggtctcaatttcctgacctcgtgatccactggcgtcagcctcccaaagtgctgggattacaggcatgacccaccgtgcctggccccctttattattatatgatgaccttctttggatcttcttaaagtttttcatcacactttcaccatcacactggaaatttaattaatgccataagactagaatatgaaataaaacccacacaaattggaaagaaagaaataaaatggccctttttcagatgatactatcatatatgtagaaaatctgtaagaacaaaaaactttc

SEQ ID NO: 782839 - DNA, 493 bp, Homo sapiens
ctctctgaaagatgccttcaaaggaatgaaaggcaagccacaaagtatatattagataaagtgtcttagtcctagaatatacaatgaactttaaggactcgattgatgataatggggaaaaacaatgaaaaactaaaawagatttgaatggattctttatcaaagaaaatataacctataaaaagatgttcaaaagcattagttattacagatatgcaaattaaaatactatgcaatatcactacacacctattagaatgactaaaattaaaaagtctcacatgacaagttggcaataatgtggtttaacataagttctcctaaactgtgttgattgacctttgtatgttgaaactcactcgcattcctccaagtagggatacatcctacttggtcatagtgtaccatccttttcatatgctgctaggcttaattttcaaatatattgttgaggaatttctcatctgtatccataagggataacagtctatat

SEQ ID NO: 782840 - DNA, 634 bp, Homo sapiens
aaaagagtacatttatgtcgttgagatatctcagagcactatttgcaaatgaactgttaattcttgcttttacagttctgggaaaatcttcagaatattcttggcaaatagaagctttttattctttcttcttttggcatagacattgcacagaaaaatctgagctctttggaatcattcctgaaacaaaaattacaggggactctacttagaaatagtttaatattcaactgaaatactgcagatgcgaacttatcrctattaaattcagttattccttattacatgatttaatttgataaaattaaattatacccagagagctaaggtcttaatagtactgcccgtatgtgagtggatttccaaagagtggagtcgaagaatgttctttaataattctccatcgttaaaaatttagattagtcccattgcttttaagatttttataattatataaataggtttacaacatcacctggataatgtagagaattacctgcattaccacatttttaacacattctggctcgcactgccagtctttctttgtagattgactatcaacagcatgtatttggtaccttgaagtgatgtttcaaataaacctaggggctagacaaattaattggagtac

SEQ ID NO: 782841 - DNA, 630 bp, Homo sapiens
tactcaatacataattttgaatatataaatgaaattttcaaaaacatctttactgcctaaattcaggtagcaggaagggaataagataaggttctcattaatagcctatggcccattaaccacactcaagtaaaaaaaaaaagcatgtgaagcatggcacccctcttcatccttgagacccaggatatgagtagcagacatgggtagcaggagaccattctcccttcactgttcccctggaaagagtttgctttctttctcttttctttttctttttttcttttttctttctttcttcttttttttttttttttttttgagaccgagttttgctctgtcgctcaagctggagtgcaataccctatctcagctcactgcaacctccgcctcccrggttcaagcgattctcctgcctcagcctcctgagtagctgggattacaggcatgcgccaccatgcccgactaattttgtatttttagtagagacggggtttcaccaggttggtcaggctggtctcgaactcctgacctcagatgatccacccgcctcggcctcccaaagtgttgggattacaggcgttagccaccacgcctggatggaaagcattttctaaccaggaggagaaacac

SEQ ID NO: 782842 - DNA, 478 bp, Homo sapiens
ggctgcattactagtaagtggcaaaacctcaattggaatcaagtttgtaactgcagttacagaattccttctcttcttgcccaaattctagcctcaaacagtgaggggacaggctccttatattagctgggagttggtccctcatgtcatgtcccagactccttgattctcacaactctgcctgctcttctaactctactatcttcatcaggcacaaatcatgtgaacccatcaacatttgaaatttgacattttaatccttaaaccaatgcacagaggactttcataattatgatttgttttattaagttgtcatattgtctttcagatayggcgcttctgggataacaggaactaggtaaaaaatgaaacaggctaaaaggcaaacagaaaggtcagtattaaaagtattgaaatgaagtcaagccattagcctattccaacatcctgtttcagtttgtgtttttttttttctccc

SEQ ID NO: 782843 - DNA, 524 bp, Homo sapiens
taagaaaatcctgttttttctgtcttcaaagtatatccaaaatataattagctctctcaacctcaattcctgccacccagatccaagccatcatcatatctagcctagaattttgcataatagcttcttaattggtctcactgctacatactttcttcccttcaatgtatcctcaacaaaatagcagagagaacttttcaaaacataattgtcagtcaagatagagtaacaagaatcagattagtcctcctgcctcaggcaagaggaaaccagaaaaatgttaatcaggttttcaggcattggaaaacagatgacacagaaatacaaactctgaaagatgacaacaamgtaagcactaattatttcatcagtttatttcctgtaagcagtgtctaggctacatctgagacaggagtaacccattcagggtctgcggtcttgctgaactaaggagatgcaaatagaaacctggtaagaaaacttgaaagggttagaaatttgcagcacagattactggagaatag

SEQ ID NO: 782844 - DNA, 612 bp, Homo sapiens
gaatggtattatattagtagtcaggctagattagcttagacctaagattgctatgaaccacatctaacaaagatagaatgaagccttgaaagaattcaattaattctaagtaactcatctggaagccagagcaaaatccaacactattttgtagatasaataaattctactaaccaaaaggtaaatctccctggtatgcaaagaagcaggaaaatatgacccattactcatattaacgagaaaaatatcaatcaacagagaaatccagaaataatagagatgattgaactaacatccagggatgttaaagcaattataaattcttatatagaatacatacttttcatgtgtttaataagctagacaaatatattagcatgatgaggagaaagaataaaaaagtgctagatgaaacttgtgaaggaaaaaaatgcaataactgaaatgaaaaatacactggatgctattacaagcaagttagattttgcagaaaaaaatcagaaaactttaaaacatagaaaaaattatttgaattgaagcacagagagaaaaaaagtgaaacatgaacataagtagagcatgagtgagctatgggacaatattaagctacaa

SEQ ID NO: 782845 - DNA, 605 bp, Homo sapiens
atttattttttcttaagttctttctagattctggatattagacctttctctgttgcatagttgtaaatattttctcccattctctaggttttctgcttactccattgattctttccgtccgcccttcctccctttctctctctctgtctctccttccttcctttctctctttcctttctatctttcctacctttctatctctcttttcttttctcttttcctttcttttctttctgtgtctcactctgtcacccaggctggagtgcagtggcaccatcttgactcattgccacctctgcttcccgggctcaagtgattctccagcctcagcctcccaagaagctggcactacaggcacgagccaccaatgcccagctaattattgtattttayttattttttatagagatggggttttgccatgttgaccagggtggtttcaaactcctgagctcaaagtgatctgcctgcctcgtgctcccaaagtgcatggattacaagtgtgagccacagtgcctggccagttgataattagccatgaagaacctctttagtttaatcaggtcccacttgtcaatttttgttgcaattgcttttgaggattt

SEQ ID NO: 782846 - DNA, 592 bp, Homo sapiens
ggtttagcacttctgagaggtctcaaatgtagactaaccagctcttatacgcatttcctggatgagcctttttaagctaattttttggaggttccctgtagggtttttgcacattgtggggtgtcaacccctcagacgcttctactcagcgtcccccccaccctgcccccagtaacccaggggcatcttttggctgggatgaraaaaataccatttctcttcagagcagagaaaagtcagtctctctcatttatctacaaaacaacagttcagttcccaatgcacagacaaaccaattgaaattatttttttgaggaaagtaaatggagaagactaattagaatgtacctccaaactacaattaggatcccaaacaacaacttcctaggaaaaaagaaagaaagaaagaaaaacagctaagatcctttcctgtaaactgttctcagccaccactaactttgtagctcttaggagtccaccattacacatgccaaggtcaaatcctctaacagtacaagttaatctctgggattccccaaagccaaacatataaggtagtgcaatacaggaaatcagagctttagacttaaga

SEQ ID NO: 782847 - DNA, 541 bp, Homo sapiens
gcacatagaaagatattcaacatcattagtcattttggacatgtgaaacaaaaacatgttgagatacccctacactcctctagaatgtccgaaattaaaaaaaaaaaaaaaacttaaagtatttggtaggtatttagagcaaatagggctctcatatactgcaggtggcaacgtcaaatggtacagcctctttgcaaaacagcttagtggtttttgaaaacattaaacatgcaactagtgtatgattcataaatttatcttctagctaactacccaagagaaataaaaacrtatgtccacaaactgatttcttacccaaatgctcatagcagttttatctataatagtcaaaaactggaaaaaacctaatgtatatcatcaggtcaataaacaaatcattacatatgcattagtataccactctgcaatgaatatcaattaactattgttagaaacaatggtgaatggatctccacaaacaattaggcccaataaaagaaactccactaaagatggtatataatacatgattgtatttata

SEQ ID NO: 782848 - DNA, 681 bp, Homo sapiens
taactggattgcttgtaactcaaaggataaatgcttgaggggatccataccctattctccatgatgtgattatttcacattgcatgcccgtatcaaaacatctgatgtaccctataaatatactacacatccacaaaaattactaataaaaaataaaataaaatrttattccctgagtatgatgagttacagtgattgtttttaaatgttaaaccaaccttgaatttttggaattaaaccctacttggtcatgattcatcaccctttttatgtattgctatctatttgttcatactttgttgaaaatttttgtttctgtattcatgagggatattggtttgaaatgttcttttttaaaaaaaattctatgtaaggtttggtattagagttatgtttgcttactaaaagattgagaagtgatccttcttctattttctgctgaagtttaagattggtattatttcttccttgaatgagagaattcaacagcagggttattttcaatgtttttgatacattttttataaatgacaaatttctttatgaatttacaaactcaattgatatgaggatattcatgttctttgtttctgaagttgttaatttttcttaattgtctttttcaaaaatgttggttattttgccaaagttatcaaattgttgccataaagttgctcatat

SEQ ID NO: 782849 - DNA, 511 bp, Homo sapiens
aaaaattactaataaaaaataaaataaaatattattccctgagtatgatgagttacagtgattgtttttaaatgttaaaccaaccttgaatttttggaattaaaccctacttggtcatgattcatcaccctttttatgtattgctatctatttgttcatactttgttgaaaatttttgtttctgtattcatgagggatattggtttgaaatgttcttttttaaaaaaaattctatgtaaggtttggtattagagttatgtttrcttactaaaagattgagaagtgatccttcttctattttctgctgaagtttaagattggtattatttcttccttgaatgagagaattcaacagcagggttattttcaatgtttttgatacattttttataaatgacaaatttctttatgaatttacaaactcaattgatatgaggatattcatgttctttgtttctgaagttgttaatttttcttaattgtctttttcaaaaatgttggttattttgcc

SEQ ID NO: 782850 - DNA, 498 bp, Homo sapiens
ttgtttctgaagttgttaatttttcttaattgtctttttcaaaaatgttggttattttgccaaagttatcaaattgttgccataaagttgctcatattattctattatctttttaatatctgaaagatctgtaaacaaaaaataaattcctaaggtcccccaaccatttgaatgggcttcctcctcagccagagcagtcttaaaatttcatttcacctgaaagactggttcaggccatgacatgagctggggggttggacatgcctcattatagctctctgccattaacatcaacacagactttaagtctgataaaaaacattttacaatctgttctctctgaagcctattacctgaagrtttcctctgcaattaagaactttggtctccccagtcctttatcttatcacagacattcctttctgttgaccacaggtctttagataaactcaaccaattgtcaaccagaaaatttgtaaatatacctataagctggaa

SEQ ID NO: 782851 - DNA, 632 bp, Homo sapiens
cagcaattttacataataatcataattgctacttctaacatacaataaaacatgtcagaatcacagaaatatagaattctggaacacatactaataacacatttataaatccaaagaagggtaaacacttttatatttgacaatacttcttgtatgattttattatattaaataagctgaatatgtctcttttggacttcaggggactaatagtaatgaagaccaaagttagaatttgactttggaaagtytgtcaaatatgaaaagtttaaaacacttgatatcataaaataggatcacaggccatagtaaaataaatcattcatttaaccaaagtgataaacatttaaaaaaaaagtgaaaatctttattctttgaaaaggagacttaattttccaaacaataagccctaatgaaaacaacatgaggccaatttaatttgtttttcaacattttataaacaatatataaaattgtaattatcttgaccatgagatataatttccataagcctttttgcaacctttataacctttattaaccagtagggtaatgcttcaagaaaatcttgttaatctgacaaggggacctatatgttggttttgcatcagcatgcattcaacatcaatggt

SEQ ID NO: 782852 - DNA, 632 bp, Homo sapiens
cagcaattttacataataatcataattgctacttctaacatacaataaaacatgtcagaatcacagaaatatagaattctggaacacatactaataacacatttataaatccaaagaagggtaaacacttttatatttgacaatacttcttgtatgattttattatattaaataagctgaatatgtctcttttggacttcaggggactaatagtaatgaagaccaaagttagaatttgactttggaaagtttgtcaaatatgaaaagtttaaaacacttgatatcataaaataggawcacaggccatagtaaaataaatcattcatttaaccaaagtgataaacatttaaaaaaaaagtgaaaatctttattctttgaaaaggagacttaattttccaaacaataagccctaatgaaaacaacatgaggccaatttaatttgtttttcaacattttataaacaatatataaaattgtaattatcttgaccatgagatataatttccataagcctttttgcaacctttataacctttattaaccagtagggtaatgcttcaagaaaatcttgttaatctgacaaggggacctatatgttggttttgcatcagcatgcattcaacatcaatggt

SEQ ID NO: 782853 - DNA, 628 bp, Homo sapiens
ccacatcttccaaggcacggagcaatgaggggtgcgtgagcgagcatggggtccagttgctgcacacagccaggcacactggctgcagtggggcaggcagctccaggtgccagcatgggctccggctcccttcaaggctgtggctggaccaggcataccataagaagcttccacagctgacaccagggcatgcagtgacacccaaaagcttggagatgccaggaactgcaaagccctaaagaaggtgtcataacccttgctcaaggagctccaaggtctaggctccccaaagggccacagcacttctctccttctctctcttcttcttcttgtcatctgcaatgtggcaagyaaggggcatgtttcagccctggttgtgttactgttcttttagccccctcattcagtggttcctgagttcttgtcctgtgtctaggaagaatgaggtacacagacaagtggagggagagcaagatgaaaaggagctttattaagtaatagaacagctcagaggagacctacagtgggtagcccatctccatagccagggtgtcccaatgagtgttcagttcttagcagagagggtagctcctctctactaggcagtttgtcccaacaagttttcagc

SEQ ID NO: 782854 - DNA, 546 bp, Homo sapiens
ccataaacacaatggtttatttctggagctggtgggagaaatgggagctggtggtcactgcagtctattccacctgcctgtgataaatcatccagaacatggatctggcagggatgggagcaatcttaaatgccatagacacctactattcttaccaagattcagtagattttctttaataaatgttcctcaatttaattgacctttcatcaatttmcagagactaaatagttatttttgacaactttgtccaattttattgctgtgttttgggaagaagatttattgagctctcacacagtcattccagaagtcctcccatgagcatgaataacagaattcctacatgcttgttatcttgccatgttttataaatgtataagaagcaaaaatttactgaaaatgtttgcttttgtatattgtagcaaattaattctaaggcattatttgttgctatttaccaacttttcctgatatatttattttgtctggtagtaatgaggaagcataatggagaagaatttggtagattcagtgacagaagac

SEQ ID NO: 782855 - DNA, 562 bp, Homo sapiens
cccatctcacacagatggattcacagaaatgcctgttctggaaccagttgtttagagtagtcatcttacctctgctctttcatttttgtttttctggtaaggaaaaccttctaaacttcttttataccaagtttatttattatatgtaggggtgggcatctattttataattactcctaggcctgaatcagtgaatataaaarctaaaataaatatctttcataataaagtgtgttataattaatcatccataacagagttggggagatattggctagagaaattatgtatgttagtatatgtaaattatattatcatgaattttatttcagaatgacaaagagcatgtatcaggataaattagattgtctctggtatcaaatgaccttaaaatttcagtgcatttcaactacaaagtttatttcttgctcatgctatctgatttgttccagccagctatgactctgctctgtcattgccttcaccctgggactgaaactgaaaaagcatcctctatctgagaacttgccaatcctggtggcagagggaagaagggaatagg

SEQ ID NO: 782856 - DNA, 497 bp, Homo sapiens
ttctcccttttctacacttaaatggaggaggaagagaaaaaaattcctggaaaccgatttaataccacactcatttaccctcattaattcaaagggattcttacccatgtttactaagaaacaaattaactaactttacatacaattttattcaaaaattatttcctcagttgaattgactgtcaraaagtctttgcttttgggaaaagagcatcacatgggtaatctaagagtggaaatgccattttctcaggtaccagaatgtgccagctacaacagagaaaagggggaaaacgtgtagtgtacagtgagccctccatatccacacattctgcatttgagattcaaccaactctggattgaaaatatttatttaaaaggcaataaaaaaaccacaacaataaaaaaattatataaattttaaaatacagtataacaattatttacgtagcatttacattgtattaggtattataagtaatctagagattatttaa

SEQ ID NO: 782857 - DNA, 612 bp, Homo sapiens
atgatggaaacccgtctctactaaaaatacaaaaattagccgggcatgatggcacacgcctgtagtcccagctactcagggagctgaggcgggagaatcgcttgaacctgggaggcagaggttgcagtgagctgagatcacaccactgcactccagcctagcgacagagcgagactctgtctaaaaacaaaaaaaagaaaaagtggtaaaatatgtataacataaaacttaaccatcttagccatttttaaatgtacagttcagtgatgttaaatatattcacgttgtgcaatcagtctccagaactttatcctcttgctaaactaaaactctttacccattgaacacaattccccatccttccttccccagcccctggtaactgcctttctactttctgtcttaatgaattagactccctaagtacctcatctaagtggaatctgggccaggcacagtggctcaygcctgtaatcccagcattttgggagcctgaggcaggaggattgcctgagcccaggagtttgagaccagcctgggcaacatagggcgacctcgtctctgcaaaaaaaaaaaaaaagaagaagaagaagaaagaaagagaaggaagga

SEQ ID NO: 782858 - DNA, 608 bp, Homo sapiens
ctcccccaaagaggagaacagtccctcccactcgattccttcagcttcattcaggaagacacagggaggagagatgctgcttctgcgctttgctctcattcctctctcatggccttgaaatgtattattatgcaaatgtgaattttgatactgaatttaagaagaggttgttggatttttttttttttttttttttttttcaaaaaaaaaagtcccacatgtggtcatcgtcgcttctttatgttgtaaggtgaattgtaactatgcattctgcaaagggggtggggaggagagggcaraaaggggaagggagtagcgttgcatccttgttcttcagtttctgtgtccatggtgtccccgtgtcctggaggggaaggggagtgagagacgaatgtggtaaggtcagcacagtgagatagagacctctgagtcctcttgccactgttgctggcaggtctgatggccaggtaaattccagggggcctgcagttcctgtcaaccaatgtggttcaggattcttgatcctagccgtgcagtgttaatccagtgcagcaatggaactccacaggctccagtgttctctggaaaaagtactcatcctttcctga

SEQ ID NO: 782859 - DNA, 620 bp, Homo sapiens
gatccaagcatttcaacattacaaattagaaaaaaaggaacaaaataacaaaataaaattagaagaatataagagctaaaaataatgacattattttctttttagcgaagtaaacaataataatgacataaagaaaaaacatgtatctaaataaaatcaaaggtcgtcctttgaaaaaacatggtacatttggtgaagcaaatgaaaataagagagtataacatattaaaaaagagaaaggtgrtataaccataaatagacaagatattaaattttaaaatattatgtataactctgtaataagaaatttgagaatttcgagagtgataatttttctagtaaataaaatgaaattcaaccgaggagaagaaaatcacgtaacagtttaagaaagttatttaaatacctttataaaaaccacctcaggtctagatccttttttttccaaatgattttaaaaatatatcctttaaggaaagataactctgataatatttaaattatctcagtccatataaaaataaagcttttccattcattttatatatccaacataattttcatgccaaaacaggatacaaataatgcaaaaataaaactagagataaattttacctata

SEQ ID NO: 782860 - DNA, 629 bp, Homo sapiens
ctttattttttgtttgagacagagtcttgctctgtcacccaggttggagtgcagtggcgcaatcttggctcaccgcaacctccgcctcccaggttcaagcggttctcttgcctcatcctcccgaggagccaccatgcccggctaatttttgtatttttagtatagacggagttttgccttgttggccaggctggycttaaactcctaacctcaggtgatcagcccgcctccgcttcccaaagtgctaggattacaggtatgagccactgtgcccggccaagactttgtttactgtctacagaatgcctagcactactcaaccaatacttgatggatgaatatcagtagatattgacaagggttttaagaaattcaatctctatctatgataaaaggcttggtaaaatggaaacaaacagctactttttaaaatgacaaaagagaaaagtatctcatatccaaattttgctttctgtttaatgttgaaataatccaagcatttctattagattcagaacaaaacaaggatgtcctctattccagatataagtgccaaagcaattaaacaagagactgaaataaaaggtatgcctgtttttaaaaaggaggtaaaaacagttattatttgc

SEQ ID NO: 782861 - DNA, 596 bp, Homo sapiens
tttcattttaactctacttcttaaattcacaattggatttgggtttgtttcaagttgttcacaatttactaacgaaatgtgcatctctcattcttcccccaaaagaaagaagtcatccactccagctacatataagtctccaatttctgtcttacaactaaacgtgaaaaccgaaataccactcattgaaaaaaaaatrtacagagaattggcaggctgcatgtttatgtgaaccttcagaaaacatggaaacacgcagccccaactcaccaggaaaatcaacacttgtgatcaaactattttgtgacattttatgtcttttatacatttcacttcatatccagtattccagttttgcaccggcttgcctgtatcaaccccaaatcgcctgagagcaatctagtactgtagcagaaccgtttcaacatgaagagttctgctcatcgcctgtggcgtggtcttcgaaacacctgaatcaaacattgattcccctccccctgctatttaaaaccgagggacgtcaggcttgggttgtaggtaaagaaaagccacagtaatcaaacaagcaaccaaaatacccgaacacggaacacgct

SEQ ID NO: 782862 - DNA, 534 bp, Homo sapiens
gctcagtaatggccacttggagcaggaatatgatctttatatggaagactcagtggatccttatcaccttcatagaaaggtactcacctcccacgtcaagagaaaagccaacatgtttttcctccaatgcataaaaggaacttccatagggctggcaggagtcaggctgttcaagacaactggaaggagttgaataacatctatccagtgagtcctgcaagacttcaggctctactacctccagcagctccctgctgagcctggaaaaggaggaaaaagtaaagaataagccaggggaaatcagacacaacagagccccaactaggtttcatgggtagcatagggaagtggttaaaaaactaamaggatagatccattaatgaggtaacaaattattgccttcatgttgggacagaacagggccaaatggaaaagaatgaaagagaaagacagatagacacacacacacacacacacacacagagagagagagagagagagagagagagagaacgagctcagtgaattgtccag

SEQ ID NO: 782863 - DNA, 545 bp, Homo sapiens
tcagtggatccttatcaccttcatagaaaggtactcacctcccacgtcaagagaaaagccaacatgtttttcctccaatgcataaaaggaacttccatagggctggcaggagtcaggctgttcaagacaactggaaggagttgaataacatctatccagtgagtcctgcaagacttcaggctctactacctccagcagctccctgctgagcctggaaaaggaggaaaaagtaaagaataagccaggggaaatcagacacaacagagccccaactaggtttcatgggtagcatagggaagtggttaaaaaactaaaaggatagatccattaatgmggtaacaaattattgccttcatgttgggacagaacagggccaaatggaaaagaatgaaagagaaagacagatagacacacacacacacacacacacacagagagagagagagagagagagagagagagaacgagctcagtgaattgtccaggtgacacactgatgagggagtaacaggacactctgagttagtgccctcaggacacacagc

SEQ ID NO: 782864 - DNA, 574 bp, Homo sapiens
atggccacttggagcaggaatatgatctttatatggaagactcagtggatccttatcaccttcatagaaaggtactcacctcccacgtcaagagaaaagccaacatgtttttcctccaatgcataaaaggaacttccatagggctggcaggagtcaggctgttcaagacaactggaaggagttgaataacatctatccagtgagtcctgcaagacttcaggctctactacctccagcagctccctgctgagcctggaaaaggaggaaaaagtaaagaataagccaggggaaatcagacacaacagagccccaactaggtttcatgggtagcatagggaagtggttaaaaaactaaaaggatagatccattaatgaggtaacaamttattgccttcatgttgggacagaacagggccaaatggaaaagaatgaaagagaaagacagatagacacacacacacacacacacacacagagagagagagagagagagagagagagagaacgagctcagtgaattgtccaggtgacacactgatgagggagtaacaggacactctgagttagtgccctc

SEQ ID NO: 782865 - DNA, 521 bp, Homo sapiens
gaatatgatctttatatggaagactcagtggatccttatcaccttcatagaaaggtactcacctcccacgtcaagagaaaagccaacatgtttttcctccaatgcataaaaggaacttccatagggctggcaggagtcaggctgttcaagacaactggaaggagttgaataacatctatccagtgagtcctgcaagacttcaggctctactacctccagcagctccctgctgagcctggaaaaggaggaaaaagtaaagaataagccaggggaaatcagacacaacagagccccaactaggtttcatgggtagcatagggaagtggttaaaaaactaaaaggatagatccattaatgaggtaacaaattrttgccttcatgttgggacagaacagggccaaatggaaaagaatgaaagagaaagacagatagacacacacacacacacacacacacagagagagagagagagagagagagagagagaacgagctcagtgaattgtccaggtgacacactga

SEQ ID NO: 782866 - DNA, 608 bp, Homo sapiens
tgatctttatatggaagactcagtggatccttatcaccttcatagaaaggtactcacctcccacgtcaagagaaaagccaacatgtttttcctccaatgcataaaaggaacttccatagggctggcaggagtcaggctgttcaagacaactggaaggagttgaataacatctatccagtgagtcctgcaagacttcaggctctactacctccagcagctccctgctgagcctggaaaaggaggaaaaagtaaagaataagccaggggaaatcagacacaacagagccccaactaggtttcatgggtagcatagggaagtggttaaaaaactaaaaggatagatccattaatgaggtaacaaattattgccttcatgttgggacagaacagggccaaatggaaaagaatgaaagrgaaagacagatagacacacacacacacacacacacacagagagagagagagagagagagagagagagaacgagctcagtgaattgtccaggtgacacactgatgagggagtaacaggacactctgagttagtgccctcaggacacacagcatacagggatcatgaaaagactgtgctcaataattttccataaa

SEQ ID NO: 782867 - DNA, 509 bp, Homo sapiens
atctttatatggaagactcagtggatccttatcaccttcatagaaaggtactcacctcccacgtcaagagaaaagccaacatgtttttcctccaatgcataaaaggaacttccatagggctggcaggagtcaggctgttcaagacaactggaaggagttgaataacatctatccagtgagtcctgcaagacttcaggctctactacctccagcagctccctgctgagcctggaaaaggaggaaaaagtaaagaataagccaggggaaatcagacacaacagagccccaactaggtttcatgggtagcatagggaagtggttaaaaaactaaaaggatagatccattaatgaggtaacaaattattgccttcatgttgggacagaacagggccaaatggaaaagaatgaaagagaaagacagatagacacacamacacacacacacacacagagagagagagagagagagagagagagagaacgagctcagtgaattgtccaggtgacac

SEQ ID NO: 782868 - DNA, 610 bp, Homo sapiens
ggatccttatcaccttcatagaaaggtactcacctcccacgtcaagagaaaagccaacatgtttttcctccaatgcataaaaggaacttccatagggctggcaggagtcaggctgttcaagacaactggaaggagttgaataacatctatccagtgagtcctgcaagacttcaggctctactacctccagcagctccctgctgagcctggaaaaggaggaaaaagtaaagaataagccaggggaaatcagacacaacagagccccaactaggtttcatgggtagcatagggaagtggttaaaaaactaaaaggatagatccattaatgaggtaacaaattattgccttcatgttgggacagaacagggccaaatggaaaagaatgaaagagaaagacagatagacacacacacacacacacacacacagagagagagagagagagagagagagagagaacgagctcagtgaattstccaggtgacacactgatgagggagtaacaggacactctgagttagtgccctcaggacacacagcatacagggatcatgaaaagactgtgctcaataattttccataaaatgtgctcaagtttccatgcagtcgc

SEQ ID NO: 782869 - DNA, 569 bp, Homo sapiens
gaatatgatctttatatggaagactcagtggatccttatcaccttcatagaaaggtactcacctcccacgtcaagagaaaagccaacatgtttttcctccaatgcataaaaggaacttccatagggctggcaggagtcaggctgttcaagacaactggaaggagttgaataacatctatccagtgagtcctgcaagacttcaggctctactacctccagcagctccctgctgagcctggaaaaggaggaaaaagtaaagaataagccaggggaaatcagacacaacagagccccaactaggtttcatgggtagcatagggaagtggttaaaaaactaaaaggatagatccattaatgaggtaacaaattattgccttcatgttgggacagaacagggccaaatggaaaagaatgaaagagaaagacagatagacacacacacacacacacacacacagagagagagagagagagagagagagagagaacgagctcagtgaattgtccaggtgacrcactgatgagggagtaacaggacactctgagttagtgccctcaggacacacagc

SEQ ID NO: 782870 - DNA, 637 bp, Homo sapiens
ccctatctggaagaccaggtggaggcttatcaccttcatagtaaggtactcactgtccacgtcaagagccaagccaaggtactgttcctccaatgagtaaacagcactgctgtagggctggcctaagtcaggcagttcaagataacctgaaggagtcgaataacatctacccagtgagtcctgcaagacttcaggctctttctcatccagcagctccctgctgagcctggaaaagtaggaaaaagtaaagaataagccagggggaatcagaaaccacacagccccagctagatttcatggctaacataaggaactgtttaaaaagaaaaaggacagatccattaatgaggtaatgaattattgcctttaggttggsatagaccagggccaggtagaaaagaatgaaagagaaagacagggagaggcagagagagagagagagaggagaaagtgagctcagcgagttggccgggtgacacactgatgaaggggtcaaaggacactctgagttagtgccctcgggacacacagggaacagtgatcatgaaaagagtggactcaataattttccataaacttgctcaagattccatgcagttgccatacagcctttgaggtatggtcaacctatagaaag

SEQ ID NO: 782871 - DNA, 490 bp, Homo sapiens
aaattccctattctggtagatcgttatcccaatatcatttgtcccaagtttgtgcaaatggttatgccatatttttccaatcgatttaaagcaattgcccccaaatggttgctaggagaaaaactgcactattcagccctgtctcatcaaatactcagattgttcatggtagcgaggattttagacgctgaaattagagtgaaggatgaaatctacaagatctacaaaattgagacaaaatcagagttgtgtgaatttgtcacatctgcccaggtccaatgtcatgagagtaggattagggcgccacaggcatggcctgagrctaggaagagcgccttgctcactgacccatcccttgtctgggcttccaagtggaactagagcttcattcaacctacatgtgcctataggtcctccctgtggcaatgacatccctcagctcagtaagggccacttgcagtaggaatatgaccctaaccagaagactcag

SEQ ID NO: 782872 - DNA, 638 bp, Homo sapiens
aaccagaagactcagtggatccttatcaccttcatagaaaggtactcaccatccatgtcaacagccaagccaacacgctgttgctccaatatgtaaaaggcacttctgtagggctggcatgagtcagtcagttcaagacaacctgaaggagttgaataacatctatccagtgagtcctgcaagacttcaggccctttctcatccagcagctccctgctgagcctggaaaagtgggaaaaagtaaagaataagccagggggaatcagaaaccacacagccccagctagatttcatggctaacgtaaggaagagtttgaaaakaaaaaggacagatccattaatgaggtaacaaattattgcctttatgttgggatagaacagggccaggtagaaaacaatgaaagagaaagacagagagagagagagacagagacagagagagagacagagacagagagagagaaagtgacctagtgaattggccaggtgacatactggtaagggagtaaaaggacactctgagttagtgccctcatgacacacagcaaactgtgatcatgaaaagagtgagctcaatagttttccataaaatatgctcaaaattcgatgcagtggccatgagagtacagcttttgaag

SEQ ID NO: 782873 - DNA, 548 bp, Homo sapiens
ggccctttctcatccagcagctccctgctgagcctggaaaagtgggaaaaagtaaagaataagccagggggaatcagaaaccacacagccccagctagatttcatggctaacgtaaggaagagtttgaaaataaaaaggwcagatccattaatgaggtaacaaattattgcctttatgttgggatagaacagggccaggtagaaaacaatgaaagagaaagacagagagagagagagacagagacagagagagagacagagacagagagagagaaagtgacctagtgaattggccaggtgacatactggtaagggagtaaaaggacactctgagttagtgccctcatgacacacagcaaactgtgatcatgaaaagagtgagctcaatagttttccataaaatatgctcaaaattcgatgcagtggccatgagagtacagcttttgaagtatggtcaacctgtggtacgttagtaaatgataaggggaggaagaaatggaaacctaaacatctactgcaatgaaaaccaacagcaatgacaggaggag

SEQ ID NO: 782874 - DNA, 597 bp, Homo sapiens
gggccacttgcagtaggaatatgaccctaaccagaagactcagtggatccttatcaccttcatagaaaggtactcaccatccatgtcaacagccaagccaacacgctgttgctccaatatgtaaaaggcacttctgtagggctggcatgagtcagtcagttcaagacaacctgaaggagttgaataacatctatccagtgagtcctgcaagacttcaggccctttctcatccagcagctccctgctgagcctggaaaagtgggaaaaagtaaagaataagccagggggaatcagaaaccacacagccccagctagatttcatggctaacgtaaggaagagtttgaaaataaaaaggacagatccattaatgaggtaacaaattattgcctttatgttgggatagaacagggccaggtagaaaacaatgaaagagaaagacagagagagasagagacagagacagagagagagacagagacagagagagagaaagtgacctagtgaattggccaggtgacatactggtaagggagtaaaaggacactctgagttagtgccctcatgacacacagcaaactgtgatcatgaaaagagtg

SEQ ID NO: 782875 - DNA, 652 bp, Homo sapiens
tcagtggatccttatcaccttcatagaaaggtactcacctcccacgtcaagagaaaagccaacatgcttttcctccaatgcataaaaggaacttccatagggctggcaggagtcaggctgttcaagacaactggaaggagttgaataacatctatccagtgagtcctgcaagacttcaggctctactacctccagcagctccctgctgagcctggaaaaggaggaaaaagtaaagaataagccaggggaaatcagacacaacagagccccaactaggtttcatgggtagcatagggaagtggttaaaaaactaaaaggatagatccattaatgakgtaacaaattattgccttcatgttgggacagaacagggccaaatggaaaagaatgaaagagaaagacagatagacacacacacacacacacacacacacacacagagagagagagagagagagagagagagaacgagctcagtgaattgtccaggtgacacactgatgagggagtaacaggacactctgagttagtgccctcaggacacacagcatacagggatcatgaaaagactgtgctcaataattttccataaaatgtgctcaagtttccatgcagtcgccatgagaatacagtttttgaagtctggtccacc

SEQ ID NO: 782876 - DNA, 516 bp, Homo sapiens
atgatctttatatggaagactcagtggatccttatcaccttcatagaaaggtactcacctcccacgtcaagagaaaagccaacatgcttttcctccaatgcataaaaggaacttccatagggctggcaggagtcaggctgttcaagacaactggaaggagttgaataacatctatccagtgagtcctgcaagacttcaggctctactacctccagcagctccctgctgagcctggaaaaggaggaaaaagtaaagaataagccaggggaaatcagacacaacagagccccaactaggtttcatgggtagcatagggaagtggttaaaaaactaaaaggatagatccattaatgaggtaacaaattrttgccttcatgttgggacagaacagggccaaatggaaaagaatgaaagagaaagacagatagacacacacacacacacacacacacacacacagagagagagagagagagagagagagagaacgagctcagtgaattgtccaggtgacac

SEQ ID NO: 782877 - DNA, 585 bp, Homo sapiens
atccttatcaccttcatagaaaggtactcacctcccacgtcaagagaaaagccaacatgcttttcctccaatgcataaaaggaacttccatagggctggcaggagtcaggctgttcaagacaactggaaggagttgaataacatctatccagtgagtcctgcaagacttcaggctctactacctccagcagctccctgctgagcctggaaaaggaggaaaaagtaaagaataagccaggggaaatcagacacaacagagccccaactaggtttcatgggtagcatagggaagtggttaaaaaactaaaaggatagatccattaatgaggtaacaaattattgccttcatrttgggacagaacagggccaaatggaaaagaatgaaagagaaagacagatagacacacacacacacacacacacacacacacagagagagagagagagagagagagagagaacgagctcagtgaattgtccaggtgacacactgatgagggagtaacaggacactctgagttagtgccctcaggacacacagcatacagggatcatgaaaagactgtgctcaataattttccataa

SEQ ID NO: 782878 - DNA, 596 bp, Homo sapiens
tggatccttatcaccttcatagaaaggtactcacctcccacgtcaagagaaaagccaacatgcttttcctccaatgcataaaaggaacttccatagggctggcaggagtcaggctgttcaagacaactggaaggagttgaataacatctatccagtgagtcctgcaagacttcaggctctactacctccagcagctccctgctgagcctggaaaaggaggaaaaagtaaagaataagccaggggaaatcagacacaacagagccccaactaggtttcatgggtagcatagggaagtggttaaaaaactaaaaggatagatccattaatgaggtaacaaattattgccttcatgttgggacagaacagggccaaatggaaaagaatgaaagagaaagacagatagacacacamacacacacacacacacacacacagagagagagagagagagagagagagagaacgagctcagtgaattgtccaggtgacacactgatgagggagtaacaggacactctgagttagtgccctcaggacacacagcatacagggatcatgaaaagactgtgctcaataattttccataaaatgtgct

SEQ ID NO: 782879 - DNA, 564 bp, Homo sapiens
atgatctttatatggaagactcagtggatccttatcaccttcatagaaaggtactcacctcccacgtcaagagaaaagccaacatgcttttcctccaatgcataaaaggaacttccatagggctggcaggagtcaggctgttcaagacaactggaaggagttgaataacatctatccagtgagtcctgcaagacttcaggctctactacctccagcagctccctgctgagcctggaaaaggaggaaaaagtaaagaataagccaggggaaatcagacacaacagagccccaactaggtttcatgggtagcatagggaagtggttaaaaaactaaaaggatagatccattaatgaggtaacaaattattgccttcatgttgggacagaacagggccaaatggaaaagaatgaaagagaaagacagatagacacacacacacacacacacacacacacacagagagagagagagagagagagagagagaacgagctcagtgaattgtccaggtgacrcactgatgagggagtaacaggacactctgagttagtgccctcaggacac

SEQ ID NO: 782880 - DNA, 624 bp, Homo sapiens
gctagataataatttcttacctatagtttgaaaaaatgttaaaagaatactaggagttgatgaggacatatttatgaaattgctgttttaaagtaaaagttcatacaactttactagaaaaaaatttgtaattgataaaaaaattttgaaagttgtatgtctttgacccaaaagttytacttcaaagaatccaatctaagataatcagacatgtttactcacatacacatgtatatgcacacagaaatacgtggacaaacatgagaaatagtttaaaatatttagaaataagttattgattaaatgtgttctggtagaaccttgatgataaaaatttatgcccacttggttataatgtattattctatttacataatgccaaatttgatttgataatgtttgtttagaatatttgcatctatacttacaattgagattggcctataattttctcttctctttttttttttttttttttttttttttttgattttgctatcaggtcacacttgctccaaaaaatcagttaaactgttttccacattgtttttcttctatggaaaagtttttgttaaactggaattattttttacttgactgtttgatataaatctccagaaagca

SEQ ID NO: 782881 - DNA, 624 bp, Homo sapiens
gctagataataatttcttacctatagtttgaaaaaatgttaaaagaatactaggagttgatgaggacatatttatgaaattgctgttttaaagtaaaagttcatacaactttactagaaaaaaatttgtaattgataaaaaaattttgaaagttgtatgtctttgacccaaaagttctacttcaaagaatccaatytaagataatcagacatgtttactcacatacacatgtatatgcacacagaaatacgtggacaaacatgagaaatagtttaaaatatttagaaataagttattgattaaatgtgttctggtagaaccttgatgataaaaatttatgcccacttggttataatgtattattctatttacataatgccaaatttgatttgataatgtttgtttagaatatttgcatctatacttacaattgagattggcctataattttctcttctctttttttttttttttttttttttttttttgattttgctatcaggtcacacttgctccaaaaaatcagttaaactgttttccacattgtttttcttctatggaaaagtttttgttaaactggaattattttttacttgactgtttgatataaatctccagaaagca

SEQ ID NO: 782882 - DNA, 504 bp, Homo sapiens
gaaaccatttttttttccctaggcttctgggcctatgatgggagaggttgctgtgaggacctctgacataccctggagacattttccccattgtcttggggattaacatttggcacctcattatttacacaaatttctgcagctggcttgaatttmtccttagaaaatgggattttcttttctattgcattgtcaggctgtaaattttcctaacttatatgctctgtttcccttttgaaactgaatgcctataacagcaccaaagtaatctcttgaatgccttgccacttagaaatttcttccaccagataccctaaatcatctttctcaaattctaagttccacaaatatctaggacaggggcaaaatgccaccagtctctttgctaaaacgtaacaagagtcacctttactccagttccctacaagttcctcatctccatctgagaccacctcagcctggaccttattgttcatgtcactatcagcatttttgccaaagcca

SEQ ID NO: 782883 - DNA, 504 bp, Homo sapiens
gaaaccatttttttttccctaggcttctgggcctatgatgggagaggttgctgtgaggacctctgacataccctggagacattttccccattgtcttggggattaacatttggcacctcattatttacacaaatttctgcagctggcttgaatttatccttagaaaatgggattttcttttctattgcattgtcaggctgtaaattttcctaacttatatgctctgtttcccttttgaaactgaatgcctataacagcaccaaagtmatctcttgaatgccttgccacttagaaatttcttccaccagataccctaaatcatctttctcaaattctaagttccacaaatatctaggacaggggcaaaatgccaccagtctctttgctaaaacgtaacaagagtcacctttactccagttccctacaagttcctcatctccatctgagaccacctcagcctggaccttattgttcatgtcactatcagcatttttgccaaagcca

SEQ ID NO: 782884 - DNA, 610 bp, Homo sapiens
aaaaccacatgattatctcaatagatgcagaaaaggcctatgacaaaattcaacacccattcatgctaaaaactcccaataaactaggtattgatggaatgtatctcaaaataataagagctatttatgacaaacacacagccaatatcatgctgaataggcaaaaactggaagcattccccttgaaaaccggcacaagacaaggatgccctctctcaccactcctatgcaacatagtattggaagttctggccagggcaatcagtcaagaaaaagaaataaaagttattcaaataggataagaggaagtcaaattgtctctgtttgcaaatgacataattgtatatttagaaaaccccatcatctcagcccaaaatctccttaagctgataagcaacttcagtaaaatctcaggatgmaaaatcaatgtgcaaaaatcacaagcattcctatacaccaataatagagagccaaatcatgagtgaactcccattcacaactgccacaaagagaatgaaatacctaggaatacaacttacaagggatgtgaaggacttcttcaaggagaaatacaaaccactgctcaaggaaataagagaggacacaaaca

SEQ ID NO: 782885 - DNA, 692 bp, Homo sapiens
cattttatttcttttccttgccttgttacactggctaggacttctaataaaatgtttaatagttgtgtgagaatggacattcttactttgttccaaattttagggatataacatttagtcttagtctttaactaaaaagtgctgttagctacagctttttgtaaatgccttatcagatcgagaaagttttcttatattacyagtgaattgaaagtttttgtctggaatgcttgttgaatggcatcaaatgctttttctacatgaatcagtatcatcatttaaccattgttatttaatatcttaatatagtggatcacgatgattgatatttgcatattaaacaagacatattcctggcttacacctcaatttgcttttgtttattattttatataaatattgctaggttataattgctactcttttattgagaagttttgaatctatgtctgtgaaaggtgttggtcaatttctttttttttttcctacacattcattctatggttttgctaccagaaaaggggtctcgtctcagaccccaaaagctagttcttggatttcatacagtaagaattcatggtgagtcacagagcatagtaaagtgaaaacagtttattagcgactcctctattacagaaaagggcaccctcacaaagcaaaaggaggaatgcccttaccttaaatgtagtgtt

SEQ ID NO: 782886 - DNA, 584 bp, Homo sapiens
atgtttttaagaacagtgttctttattacaaaagcttgtgatcagcttgtgacaagctattagtattgttatttttctgttacttttgatttcagcaagaatgtatgagtgtactattatctttaatgcaaaatctattcttaaaataaaaaacgctatttgttcttaaaatattgggacattttcataagtcctgggtctttatttagttagtgtattagtcaaggttccctaaagggatggaactaattggatagatgaacatatgaagtggaatttattaagagaattgactcacacaatcacaacgtgaaatcccacaataggtcgtctgcaagctgaggagccaggaagccagtccaagtcctaaaacctcaaaagtagggaagccgatagtgcagccttcagtctgtggccaaaggcctgagagctcctggcaaaatcactggtgtaartccaagagtccaaaagctgaagaacttggagtctgatgttcgagggcaggaaacatctagcacaagagaaagatggaggccggaagactcagccagtctaatccttctatgttcttctgcctgctttta

SEQ ID NO: 782887 - DNA, 584 bp, Homo sapiens
tctatgacagtgcctagcacatagtactcaatacctatttggtgaatagatgaggcaatctcacatgtgggaagggctgaccaaggtgggccctcaagatgtctgaaaggggccagggggagggtatgtgaggaagacatggtttcagtcccagttctagcccttgcagctgtgtgaccttgcaatagttatttaatctaagtgttattttccttatatgtacaatagggatggtaacagtttctatcccatagaggtattctaaggattaaaagggaaaatacatataaaggacacagcagagtacctgggaaattgtcaataagtgttagttcttayggttattgtgatcatttttgtggtttttacaatgacactactgtggaggagtcaatgcttaagactaaggcccctgtgtcaattgccattataaggatttgtgcctaccctatatggcaacctattttccctggaaagaaacacaggaacgtgtcctttgttgaagtcctttctagaagacagagaattatgattggaaaataaggtaaatgccctgttattgtgtggcttgaattttaggcagg

SEQ ID NO: 782888 - DNA, 610 bp, Homo sapiens
cagagaagtgcaaatcaaaaccacaatgagatacgatctcacaccagttaggatggtgatcattaaaaaggcaggaaacaacaggtgctggagagggtgtggagaaataggaacactcttacactgttggtgggactgtaaactagttcaaccattgtggaagacattgtgattcctcaaggatctagaaytagaaataccattttacccagccatcccattactgggtatatacccaaaggattataaatcatgctgctataaggacacatgcacatgtatgtttattgcagcactattcacaatagcaaagacttggaaccaacccaaatgtccatcagtgatagagtggattaagaaaatgtggcacatataccccatggaatactatgcagccataaaaaaggatgagttagtgtcctttgtaggacatggatgaagctggaaaccatcattctcaggaaactatcgcaaggacagaaaaccaaacactgcatgttctcactcataggtgggaattgaacaatgagaacacttggacacaggaaggggaacatcacacaccggggcctgtcgtggggtggagggagtggggagggatagcattagg

SEQ ID NO: 782889 - DNA, 586 bp, Homo sapiens
gctgcaggtccccctcgctcttggtgtggtcgccattgatggcaatgaacaggcattctccaaacaggtgaaggacatacagggagttgctgttttccatggagaagcaggtgtaggtgtccgagagcttctccagcatcgtcatggaggagatgatgaccggggctaggagggggctgagctggtcctgtagggcagggagctcttcttcctcattctctgactgcccgaacttcagctggagactctcttcaaactcctcatccgtccagtagaagagggcctctgtgccctcaatggccaccaagatgcacttcatcttggtaaggagcacartggagcgtccagacagccagaggttcagaaagggctgcagcagacagactctgtgactgcctcatcggagagcagcacaacatccctggtcctgcaaatgcggatcgcggcgtgcacagcaccccgcctgcgggacagaaatgttttctgaactgaaaaagggggactacaggtgcctgccaggccctccatatacatacatccccctatgtctgtgtctagaagtgagatacaccgttatttctgtttt

SEQ ID NO: 782890 - DNA, 674 bp, Homo sapiens
tctccgcaggggacatgcccagtggccagcattgcaacatgcaggggagcccaaagcagtgccttcccatgaggtctttatggtgaacggtggttcctcccagtccagatgcagtttacccatcgggagatccttatcccgagggactttatccctagtcatgcagctgacctcccacctttcaggtttccagaggagcagagccagaaagtgagcccagggtcaaaagtgcctttagagaaggagagggggttggctagcctttctccacgcccacccacacrttccctggcacatggagactgcaaggcagaaggtcggagcccccaggatggcctggagggatggaagaatgggcctagtgcagagccagaggcctggcttcacctctaggccttgccacagacatgcctgccaccttgggcaagttacatctcctgtgcgggacccagttccctcatcggtgaagtgggctaacagtacctcctctgtaggactcttgtgagattagaagggccatcagtaaagcttacagccctccgtaggactccctatgttggcattagtgtcatgcaaatcattagaaatccatattgaagtctgcaacactcagagaggacttgggatccccgatgccattccctgctccaccccttcctagctgtgaggccttc

SEQ ID NO: 782891 - DNA, 593 bp, Homo sapiens
gagcctaacacctgcccatcacagcatctcttctgatctgtggctctgcaaccttgggcaagctcctcaacctttctaagccccagtctcctcttctgtaaagtaggggtggccatcaccaccttgctgggaggatgggaggcttcagcaggctgatgtgagcaaagggccagaccctggtgatgtgggcagcatcctttctccctcctctctccctcccatgcccgggggactcacctgacaggcatccttcttgcccttgcggtagccggcacacagcatgcgtggcgtcacctggtagcgatagrcctcgctgcacaggtcctgtgggatcaactgcacatccactttctgcagagcgttgctgatggggcctgtccgtggtcaagggcagaagtgagatctcaggagcctggagcccctgttctctattctccctaacattattccctttgcatctcaggagcctacttctctcctgctctgcccacccttacccctgctagggtcgcacctgcccctctgcctccctgtcactttattctagctctttctctgtggggttcatggtgacagcccccgaccaaagccca

SEQ ID NO: 782892 - DNA, 602 bp, Homo sapiens
aaacaggcattgctgtgacccacagagggagacctcgcccacagccctctccaccctggcaggatgtgtacccagggctcagcctgtgggcgcttcagcagaggcgggacactgccccctctcatcccgggtcaccagggacctgtagtgtgcttgcggcagagggcaggtgggcaggcagggtggggtctcaccgtgaggtgccaggagcagtgggtttggggygagtagtagctggggaagtacggggtgctgaggacgccctgggagtcgagcctgttgtccagcgtcaggttcacttcacaggctggaccaggagagcagctgttacacaggggtcccctggctgcacctcccagcaggctggcgcagcttgtaaccccaccacccctaccacctctgccagcaaattgctgtggttgaatgtgattgtgtgaatctgggtctcagtttcctcatctgtaaaatgaggacagtaatagcacacacctcatagggtagtagagtggattaaaaagacataaacattcaaacagcctggcatgtagtaagtgctcgatccgtgttagttattgatatttgcgggacagcactcgccagtt

SEQ ID NO: 782893 - DNA, 610 bp, Homo sapiens
cttgacttctgttacttatgtaactggcatgcttactatagacaattagagatattaaataaaaagaaaaataatcactcataatgccaccgccacgagggaactggcttacgctgttggcacatttccttccaggcggttctccacagatttacattatagacacccctctgtctgtgcaattgtttatctctcttcatttgggaaacattaaagaccacaaatctatatttcagaaccatactttawtgcctgcgaaatagtctacctttcaacgactgaatttatttaaccaatttccttctgctgaacactcacattaattctacatttttgctattaaaaatactgctgcattaaatctatttggacataaactttggctgcatcgtgacaacttatgtagggcagattcccagaaggagaacttttctagagctcaggatttggcgagccagagcgttttccatcagagttggcggtggccactccgggcaggatgtggggaactggccttgccgagggccctcggtgccaggagtctgcaggtggctcactgcccagtgcccacataggacaccaccttcagtcccctgccagcccggagtga

SEQ ID NO: 782894 - DNA, 623 bp, Homo sapiens
tgtagctcccatcattcccacgtgttgtgggagataattggatcatgggggcagttctcatggtagtgaataatctcacgacatctgatggttttataacaggaaaccccttttgcttggctcatttctctcttgccgccacctttcgccttctgccacgattgtgaggcctccccagccacrtggaaccgtgagtctattaaacttcttttccagtcttggctttgtctttatcagcagcgtgaaaacaggctaatacagacacagtgacatatgtatttagtcttctacctgatttcctgatacatgacttctaaaatccttggaccctccaaaaggacagtgtctttttgtatgctaatgtttggctggtgactggcagcccccagtggtttctggaggaggcctggttaccgggaagaccgagacaagattagagaattaggactttgagccccatccttcaatctccccgaaaggagaggggctgaagtttgagttgattatcaattgccactgatttaatcaatcacgcctgcataatgaggcttccataaaaccccaacaggactggattcggagagcttacaggcagccagacacacgggggcttccgggaaagt

SEQ ID NO: 782895 - DNA, 623 bp, Homo sapiens
tgtagctcccatcattcccacgtgttgtgggagataattggatcatgggggcagttctcatggtagtgaataatctcacgacatctgatggttttataacaggaaaccccttttgcttggctcatttctctcttgccgccacctttcgccttctgccacgattgtgaggcctccccagccacgtggaaccrtgagtctattaaacttcttttccagtcttggctttgtctttatcagcagcgtgaaaacaggctaatacagacacagtgacatatgtatttagtcttctacctgatttcctgatacatgacttctaaaatccttggaccctccaaaaggacagtgtctttttgtatgctaatgtttggctggtgactggcagcccccagtggtttctggaggaggcctggttaccgggaagaccgagacaagattagagaattaggactttgagccccatccttcaatctccccgaaaggagaggggctgaagtttgagttgattatcaattgccactgatttaatcaatcacgcctgcataatgaggcttccataaaaccccaacaggactggattcggagagcttacaggcagccagacacacgggggcttccgggaaagt

SEQ ID NO: 782896 - DNA, 623 bp, Homo sapiens
tgtagctcccatcattcccacgtgttgtgggagataattggatcatgggggcagttctcatggtagtgaataatctcacgacatctgatggttttataacaggaaaccccttttgcttggctcatttctctcttgccgccacctttcgccttctgccacgattgtgaggcctccccagccacgtggaaccgtgagtctattaaacttcttttccagtcttggctttgtctttatcagcagcgtgaaaacaggctaatacagacacagtgacatatgtatttagtcttctacctgatttcctgatacatgacttctaaaatccttggaccctccaaaaggacagtgtctttttgtatgctaatgwttggctggtgactggcagcccccagtggtttctggaggaggcctggttaccgggaagaccgagacaagattagagaattaggactttgagccccatccttcaatctccccgaaaggagaggggctgaagtttgagttgattatcaattgccactgatttaatcaatcacgcctgcataatgaggcttccataaaaccccaacaggactggattcggagagcttacaggcagccagacacacgggggcttccgggaaagt

SEQ ID NO: 782897 - DNA, 648 bp, Homo sapiens
gtcacccagccaggcagcccaggatccagcagggaaacagggagcctggcctctacagagtggccaaggacaggccaccactgccctccctctggggcgccaccttcccacagccacacgggcgatgcggggctcggccgaccccgcggggcctctacctcagcgatcttctggtcatatgcctccatgaacgtgtccacttccaccctcagggcctcagggtcgggcacagagtctgcgtagtcactgatccaytctgaggaaaagggagccagggaaacggggcttcctcaggcctggcatttgggccccaccccagggcctgccaggcaaattgggaccttttcccacagggcccggggcacaggtgctaaggagatcccaggggctgcaagctgcgccctcgctctgcctgcccagtatgcctgtgccgctctgtgccaggggctcaggctaatgactccctggggacccagacacagccccatggtcctcctgcccaggcctccacatgctgctctcagggagcatggacttggcttgtgacattcagacactgtccccatagagtgtcctgccaacccggagcccagaaaggaggcgccagacccctcccgcagtactaactgtgaatgccactcttcacag

SEQ ID NO: 782898 - DNA, 648 bp, Homo sapiens
gtcacccagccaggcagcccaggatccagcagggaaacagggagcctggcctctacagagtggccaaggacaggccaccactgccctccctctggggcgccaccttcccacagccacacgggcgatgcggggctcggccgaccccgcggggcctctacctcagcgatcttctggtcatatgcctccatgaacgtgtccacttccaccctcagggcctcagggtcgggcacagagtctgcgtagtcactgatccactctgaggaaaagggagccagggaaacggggcttcctcaggcctggcatttgggccccaccccagggcctgccaggcaaattgggaccttttcccacagggcccggggcacaggygctaaggagatcccaggggctgcaagctgcgccctcgctctgcctgcccagtatgcctgtgccgctctgtgccaggggctcaggctaatgactccctggggacccagacacagccccatggtcctcctgcccaggcctccacatgctgctctcagggagcatggacttggcttgtgacattcagacactgtccccatagagtgtcctgccaacccggagcccagaaaggaggcgccagacccctcccgcagtactaactgtgaatgccactcttcacag

SEQ ID NO: 782899 - DNA, 641 bp, Homo sapiens
ggggggctcaaggttaagatctcgcctggccccgttctgttccttgcctactgtgtttcgtgtacacagagggcacttgtgtgggtcactcctgtaagcctgggtgggggtccgcaggcggggggagtcccttgtcacctgtgcctgaagcccagtttctgtgtccacgccccagctcctcccctggcctcatttcgagtgcctggggrctgctcggtagtgaacaaatcgagagataccctacttgctatcatcatgggaaaagccgaagcagggagggagggcatatattgagggcgagagtcgggggcgtgcaagaaaggcccaggccgggcacatggcaggtgcatactcgtgctggcttggggagggaggcagcctgaagccagtgggtctccatcctaaccctgggctcatgaaagctgaaggaagtgtttcccacccatctcgggtcttcttggctcagctcatccctctggctgggctggagtcaaggcggagcacagagccctcctggacttcacagtggtacccaaggcctgcgactcacttcaccctgaagctcattaacagggcaaggtcaaagtaggaccattcgcgccagtgtcagacccatgggaaggaggggagccagcatcgtg

SEQ ID NO: 782900 - DNA, 676 bp, Homo sapiens
gcagctctgtggatccacggagcccaggctccatttctgcctcagcctggcctgaccccatagccagccccacccctgaggcggcgccacacagagaagctgtcactactcatccctgcctcagtcagcctcagtcctgcactgcctacccgccccctccactgtccccacaccccacccagtccacctgcccgaaagcctcctggcccttgacttcctgacaccttcttagtttgcacagagaggttaagtaacttgtccagggctgcacagctgagaagcagagcctggaggggacagtggcagcctgactccagggtccctgctctcactcaggacaccctcttacctctgcatcatcagcattgctcagcattgtgtcatttgagaggcctggggccatctgttaggaagtrggggcaggtggggacaggaaagggttcaggatcaaggtagtgatgaggggagtaagcccagcacacccaaggggcttaaagccaccggggtacctcacaatccaggaagaagcagggagaacgcttgaggctggggcatcggggaggtgagccctgtccagcctggatgccctccgctgagctctgctgacaccaccccacgctcagcatgcactggcctctcctctttcccaggtgaaatttcactcatctttataacc

SEQ ID NO: 782901 - DNA, 474 bp, Homo sapiens
tcacccatctcgcagctcctctgcatctgggcatccccagtgaaactgtggcactagttggggaagaacagagccaacccaggggccagcaggagtccagccccaaaccaggacccggccactgttttggaaccaactccttcagtgttaccctacaacaccctcgccccatgaaggctccacctccagccctgggctcgccggagttacccagtcagacgatgccatttctgctccctcctgaargaggaagtgtccaggatgagaacttcaggcaaagaggtgcctgtggatgggcagtgggagaagacttggagacagagcatctgtggctaaggacagggagatttggggtggtcatcacaaagaggagggcctgagggagggaaggcaccgttcctggggctgagaagtgaccccatccctgactctacacaaggaaaaatgagatgtggcctcgtggactaggctgga

SEQ ID NO: 782902 - DNA, 675 bp, Homo sapiens
aacagctttctcctgcagggcccgtgatgcagaggctgcacagggctggcctggaaaggggcccctgctccaactgtccccagctctgtggcctgggcaggttaccccacctctctgtgcctctgacccctcctctgtaagatgggaatggtccctgcaggcctagggcagcctcacatgagcccacccccacgcagcacttagaagagaggcctgggcctcagaattcggttctaccatgattttaaaataatgttaacacgcagagtgaaacatcaggaaggaattgagctgaaaggttaaaagctatcttttaagggtgaagagttttattctcttttgcattttcctaatgggttggggagtgggtgggcagaaatactgagagggtggggaatatacccctggaaaggccagagttgggccygagctgggagagatcaccccagcccccctgccagcatcccctcctcttcctctcccctcagtcttcctgcctgggaaggcagcagaaattctcagggctgtggaggggtgggggaggcccagggccgtcccgggagctgtgttcagtggacatgagccccgaggactccaggagggctccctgcatgggccggtttctctcttgtgccttcagaaatccgatggagcggatgtatcgagacacattct

SEQ ID NO: 782903 - DNA, 608 bp, Homo sapiens
gtcttcctgggggtaaaaactacttactcactaagggaataattcagtcatttcaaaccatttttgagggtctctactcagcagtttgatgttgtgtaatgattcaggattcttctctgtgaccctgatgggccattccgattcctatttatagatgcttatctcaagaccttctgtgtgggtagtctcagagcccttgggactgccttcgtccacaaccttgggtttgagtcatatcactaccgaattcttccctctgttcatggaaatctggtaactacatcaacgaggtaktttctacagaactgattgggttttttgtttctttgcctcataagatataaaaatgtctaaaggccctggaatgtcacagtattaatagctgatgtgtatggaaggcctactatgtactgggcataattctatgtgttcttcatttgttaattcactcaatcctttttttttctttttttttttttttgagatggagtctcactctgtcgccaggctggagtgcagtggcgcgattatattcacctagaagtttgtgaacactgttcctctttcagtaaaatccatgttatagatgctgctggattttaggcatc

SEQ ID NO: 782904 - DNA, 529 bp, Homo sapiens
ctcaaaatttgtatgttaggccaggtgcggcggctcatgcctgtaatcccagcactttgggaggccgaggcgggcggatcacaaggtcaggagatcgagaccatcctggctaacatggtgaaacctcgtttctactaaaaatacaaaaaaagtagccgggtgtggtggcgggtgcctgtagtcccagctacttgggaggctgatgcaggagaatggcatgaacctgggaggcagagcttgcagtgagccaagattgcaccactgcactccaggctgggcgacagtgcgagactccatctcaaaaaaaaaaaaaaaaatatatatatatatatatatrtgtgtgtgtgtgtgtgtgtgtgtgtgttaaaaactgatagccaatgcaatagtattaagaggtggggcttttggaaggtgattaggctccactctcataaatgggattagtgctcttataaaagaggccagagggagcatgcttgccccttccaccatctatgaggaatgggccctcaccagataccaaatc

SEQ ID NO: 782905 - DNA, 505 bp, Homo sapiens
aaaagaaatatagatctccattatccctttaacagtgcagagtaatccactgtatggatgtgacattattcatgtatataatcagaagttaatggatctaaatgtactgttttcagttttttgaaattacagacaggctgcgatgaatatccttaaacacatgtcttcatgcacttgcccagttatcttcttgggataccrttggtgggatttagagaaaaatcactcacattagggagggtatatactgctgactttgacccatcaaatccagccatggattctctgcaaactgaggggccacccagctccctgaacagtggtcttattctgctgggtccttgtgagggcgtagcatagcctcacatcctaaattaaagtcagttcaccggctgctgctcgggtaactggcgagagaaaagagcctttgcctctccgcagccggggaatttccaaatcctgaaattgtcctgtccagacacagtaaatagtttggccacaacaa

SEQ ID NO: 782906 - DNA, 505 bp, Homo sapiens
aaaagaaatatagatctccattatccctttaacagtgcagagtaatccactgtatggatgtgacattattcatgtatataatcagaagttaatggatctaaatgtactgttttcagttttttgaaattacagacaggctgcgatgaatatccttaaacacatgtcttcatgcacttgcccagttatcttcttgggataccgttggtgggatttagagaaaaatcactcacattagggaggrtatatactgctgactttgacccatcaaatccagccatggattctctgcaaactgaggggccacccagctccctgaacagtggtcttattctgctgggtccttgtgagggcgtagcatagcctcacatcctaaattaaagtcagttcaccggctgctgctcgggtaactggcgagagaaaagagcctttgcctctccgcagccggggaatttccaaatcctgaaattgtcctgtccagacacagtaaatagtttggccacaacaa

SEQ ID NO: 782907 - DNA, 581 bp, Homo sapiens
cctattgctgagacctgtacctcttagtggctcttcccctggctacataaaggtttaaaatgactgctgtttgtaaagagtcgattaaaattttaacctagggtcttacattattcacctccagttacaagaaggaatacggggtaccataggaacacatgggagggacatcttattcagtttgtgggtaagtggggaacatggcatttagaggctgacacccatgagtaattcattagtcaggtaataagagggaaccagtactaacttaagagagtgcatttagctggagctcaatacttatttgtagaatgaatgactagtaaaacacctcttacattcgccaaactttctctttttttctcagtattctagttccatcaatcttgtcatgctttttttcttacacttctagtttatatagacatttcaaatactgtgtttsttgcctcagcagagggaatattctgaaagatactaattctgcagtgtgtggatttgcattaacctaaaggggtttagtatagatttactggaaagaaaaaaaatctgtaggattatgaaccaaaaaataaaaaacc

SEQ ID NO: 782908 - DNA, 557 bp, Homo sapiens
tctttttttctttttttttttttgagatggagtcttgctctgtcgcccaggctggagtgcagtgacatgatcttggctcactgcaacttccgcctcctgggttcaagcgattctcctgcctcagcctcccgagtagctgggattacaggtgcatgccaccatgcctrgctaattttttgtattttcagtagagacgggtttcacagtgttagccaggatggtctcgatttcctgacctcatgatccgcccacctcggcctccccaagtgctgggattacaggcgtgaaccactgcgcccagcaacagtatcttaaacaacaaaaagtgatgtatttagcaatgcaactgctaacacacagttacaaacttcctcttgacaaaaaaatctttactacaattcacctaatgagaatttatttattaaacaagagtatcctttatttctgaaatatataagctataaacttaatcctggatattctatatgaatttaatgttaattttaaactagttctgaactttaaaacgttctggccatggaatggaagggttattt

SEQ ID NO: 782909 - DNA, 572 bp, Homo sapiens
gagaccatcctggctaacatggtgaaaccccgtctctactaaaaatacaaaaaaaattagctgggcgtggtggcgggtgcctgtagtcccagctattcgggaggctgaggcaggagaatggcgtgaacccgggaggcggagcttgcagtgagccgagatcatgtcactgcactccagcctgggcgagagcgagactctgtctcaaaaaaaaagaaagaaagaaaaacaaacgaagaaacaaaaaacctcgagtgggaacagagggagattggagccaatggtagcatctctgatgagttccctggaagtgacwacctgggttcataaaacagtcaacagagagacccaagaccagtccctgtctcgccaagtgcacggtcccctgagggaaggacccctaaaggggatgactttttagctgaactttccaggaagaacaggagtttgccagcgggggaaatggcgagaggccttcacagcagatgaagcagatcagaacacggaggaaggcagagatcaggggcttgctcagcccacccatgaacggtgagcattttcactgggactggacg

SEQ ID NO: 782910 - DNA, 611 bp, Homo sapiens
ggtttttttgttttttttttttttttttttttttttttagatagagtctcgctcagtcacctaggttggagtgcagtggtgcaaccttggctcactgcaacctctgcctcccgggttcacaggtgtgcgccaccatacctggctaatttttgtatttttagtagagatggggtttcaccatgttggtcaggctggtctcgaactcctgacctcatgatccacccgcctcggcctcccgaggtactggtattacaggtgtgagccaccgcacctggccaaatatgggtacttaagccacactcgttccaatggkgggattccaatggggcagtccccattggaatatccatgcctgttgctgggggcctcctgtgtgctcttggcttgcactgatacctgggaggtaggtgtcatgatttccatctgcaaaaggaggcagctgaggcaggagaaggtggtgcaagggccccaggccatacagtatttgtaactgggtctggtggccttgcagaggaaggtggaggattttgagttggtctttcctgtggtcttcctgggtaacccccttggggaatcacgtcccagagaggaggggagcattgcctggggcc

SEQ ID NO: 782911 - DNA, 589 bp, Homo sapiens
cgtttcccagcagtgctaaccttcccggggctgccagatcgccgacatacacgcacacacacacagagtgcacacacatgcacacacgtgcagccgcatttcctggtgcgcttgctgtgagggcacaggggtgggtaggctggcaggcacgtgaagttgccatcagccccgagggaccgtgagcgagttgggacttgggggagaaaaaaatgggggcggacgtcagctccctgggcggccgccgccaccgcctccgcctccccgaggcccctcctgcattcctgggcagcgaagcccctcgctaagacgggggctgatgtcatcccgggctgctcagccaggggacccgggggccctggtggctgcctccggaagtgagctagccgcctgccggccgacaggtttggaatctccagccagaggacagaaaacctgcatgggtcaggtgagcgggstctggccgagggcagccgggcagggggcagcagggtgcggcagcttgcccaccggaacctcccagggtgcacctcaggggggctgcctacctgaagggaagtgaggacgagggtgcccaaaggccgccccctcc

SEQ ID NO: 782912 - DNA, 625 bp, Homo sapiens
ttgatcataaacatggttaatggttattgagcacttgctacatgttttatatggtttaccttatttcactgctcagaaaacagtgctcatgagagatctgcattcaggaccctgtgctcataagcatatggtcagaactacccattcagtcttctgtctaccgtatagctgctttccatccattcttccatccattcctccattttgtattcatccatccacctacccattcatccactcatgcatgcaygcatgcatgcatccatccatccatccatatatgcatccatccatatatgcatccatgcatccatgtgtgtattcatctatcatttcattcatctttccttccatccacatacctgtactttcttccttctttccatctactaccttccattccatccacttattctttatttctttctttccctccctccttccctccctcccttccttccttccttccagctctttctttcatccatccatccatctcatctaacaatatttgttaagtacctactctgtgccaggcactgttctgggcaccaaggatgcagcagggttcagtgccttcgtagtcctgacattctagtggggagaagcaggcacaaaagtccgt

SEQ ID NO: 782913 - DNA, 608 bp, Homo sapiens
cctgcccctccttgatttttattgggcggagaggaaggtacatgcatagatgtatacatcaccctcagtctagacattggtgtcccttccagatgcaaagatactggcctgagagggccttgagattccacaaggggaactttccatctggtacaggaccccctttatttagagaagagagcctcagcccagacaaagaaacaacttggccaaggtgacaccgcctctttggagcaagcctgaaggcagarctttgccgcagagttgggtttccttttgctgccctcccctgtgactgagtaccttgcatgctgttttttcagcctgagcctggttggcctccagttattattgaaatgagtggatgtttccgggaacacagcaaatccatagagtttaattaatgaatgtgccagagggcttggcagctggattcttgtgtttaccatgggtttggctggcaggcaattcaggaagaactttaaggagggtggggtccatctccctagccctgcttgctctcctggtattggtatgtgtgtgtgtgtgtgtacccgaaatctgattctcccaacacttttataggcatgtgatgcatacggtttttt

SEQ ID NO: 782914 - DNA, 625 bp, Homo sapiens
ttgatcataaacatggttaatggttattgagcacttgctacatgttttatatggtttaccttatttcactgctcagaaaacagtgctcatgagagatctgcattcaggaccctgtgctcataagcatatggtcagaactacccattcagtcttctgtctaccgtatagctgctttccatccattcttccatccattcctccattttgtattcatccatccacctacccattcatccactcatgcatgcacgcatgcatgcatccatccatccatccatatatgcatccatccatatatgcatccatgcatccatgtgtgtattcatctatcatttcattcatctttccttccatccacatacctgtmctttcttccttctttccatctactaccttccattccatccacttattctttatttctttctttccctccctccttccctccctcccttccttccttccttccagctctttctttcatccatccatccatctcatctaacaatatttgttaagtacctactctgtgccaggcactgttctgggcaccaaggatgcagcagggttcagtgccttcgtagtcctgacattctagtggggagaagcaggcacaaaagtccgt

SEQ ID NO: 782915 - DNA, 639 bp, Homo sapiens
ggcttggaacccggatttgcaggccctttcccggggattctgcatcgggagctgtgcccggaagccaggccaggcagggatggggatttcgtgacaaatggtggggaggaaggagcttcccttgcatcccagctcttccttgcccagaatgttggttggatcgtccagtttttcaagcagaactgatgatcctgattttattttatttatttatttattttgagatggactcttgctctgttgccaaggctagagtgcagtggcatggtcttggctcwccgcaacctctgctgcctgagttcaagtgattctcctgactcagcctcctgagtagctgggattacaggcgtgcaccatcacgcctggctaatttttgtatttttagtagagacagggtttcgccatgttggccaggctggtctcaaactcctgacctcatgtgatggtccacctcggcctcccaaagtgctgggattacaggtgtgagccaccgcgcctggcccaatcctgatttcaatgtgacatctcaccatgtgctcaggccacattctagctgccttcggttcacactctgggtatcagaggtcttgttattcacacttgttatctcactggatccttgccacaactctgggagac

SEQ ID NO: 782916 - DNA, 534 bp, Homo sapiens
aacatggccttactctggctctaccaggcgcctgcttccctaacacgaccaggcactcacagctaagattttttttgtttgttttgtttgtttgttttttgtgtttgtttgtttgttttttgagatggagtctcgctctgtcacccaggctggagtgcagaggcgcaatctcggctcactgcagcctctgcctcctgggttcaagcaattctccagcctcagcctcccgaatagctgggattacaggcatgtgccactatgcctggataatttttgytatagtagagacggggtttcgctctgttggccaggctggtctcaaaattctgacctcaagtgatccacccacattggcctcccaaagtgctgggattacaggcgtgagccactgcaccccgcataagatgtgttgagcccttactgtgtactggattctgaacactttgtacgtagtacctcattcatgcctcccagcgaccctgcgggggcaggcactgtcatcatccttattttacgtgaaggagtgggggccca

SEQ ID NO: 782917 - DNA, 611 bp, Homo sapiens
gtttttttgtttttgtccacacagatgcagacatgaaacaatagacagtgaacttgccctaaaatctcacccatcagaagtaaccaacaggtaaggtttcaggtattcctgccttaaattgggcaatcaaaatatactatttccaacttgttctcagttaacagtaaattctgggcaccttcccttctcgtgaatagaaagattccctgttcttttgatgactgcatagtgcactgtgctgtaagttctttaaataacttcgggttatttctgatttttttgctaccatgaaaatgctgtaaatgaacctctaaaaggcaattcaaaacatgcaggatagagtattatttagtgctaaaaagaaatgacctattggctgggtggggtggcacacgcctgttatcccagcactctggggggccgaggcgggcggatcacgaggtcaggatatcgagaccatcctsgctaacacggtgaaaccccatctctactaaaaatacaaaaaattagctgggtttggtggcgggcacctgttatcccagctactcgggaggctgaggcaggagaatcatttgaacccaggaagaggaggttgcagtgagtggagatcg

SEQ ID NO: 782918 - DNA, 594 bp, Homo sapiens
cttgttctgtttcaccctctgtctgcctacccatctgttccttttccctctttccttacctcccaaggtccccgacacacaggatcaccatagggcttgggaactgccctccaatgtgtgctgtgggcaattggtaaaaatgttttcaaaataaaaccatagaagtctttaatttacttggcctctgaggcgttgccgaactggcagattgtttggctacacactgaagtggttgttatttcattactttttatctataaaagtagggataataatagttcaggtccrtgaggctgttgagagggtttagctggtggtgtacatgaagcccttaacacgacaattggctctcagcagatgctcagtgaatagaagcaaattgtttatgttaaaaattttcaacatacagaaaagtagactagaataattaaccccacatgtatgtatatgtgtgtgtgtgtgtgtgtgtgtgtatagttacatcacctatatttgatatatttcaccattttgctatactatgttttcccatcccgccttttcttgtggttgctgaagtaattaacaaagcagtcacagcgttttgtgctatat

SEQ ID NO: 782919 - DNA, 478 bp, Homo sapiens
aattttattttatttattttatttattttaatttttacagacggggtctcactctgtcccccaggctggagtgcaacggggcaatctcagctcactgcagcctcaacctcctgagctcaagtgatcctcccacctcagccccctaaatagctgggactacagtgcacgccaccacacctagcttatttttgtattttttgtagagatggggttttgccatgttacccaggttgatctcaaactcctgagctcargcagtctgcctgcctcggcctcccaaagtgctgggattacaggcgtgagccaccacacctggccaataacttgcaaattttagaaaaccattaggttttcaaattgattatcagagaattacacgcagtatttccttgtaatacctttaattttcctctatgctcatgtctattgcattttctctttgcaatgaaaaaaaaaacaaacaaactttccaaatact

SEQ ID NO: 782920 - DNA, 501 bp, Homo sapiens
gcttggccatctgcacctgcctgacaacaactcactggatcctaccatggtgggcaccatccttggcactgaggccatgccctctccaccggatgagccacccaagctctgggcgtcgctgtcctctttcataaaattggagaaactgtayctgtgtatcggggttcagggatgattaagagaccagcatacaactcagcctaatgaataccttaaaactctcctgccaccatggccagtcccaggaaaggcaggggaccaaggacaggaacagagttagtcacagcctccaggaagccacggctgctggaggccttctcaagccctggtctggaagcactgctggccctgccagaaccagccccagtgctgtctcagaggccggcccactcaccacaaacacgtcacccttgacgctgtccttctccaccacgtaccagggctctctcaggccacctatgtttgctctctggcccaaggtatacaggaaccaacctacag

SEQ ID NO: 782921 - DNA, 601 bp, Homo sapiens
atcccttagtggccacgcccgcctccctgtccacttcccgtcttcgtcgttgcggttcaggtgttcgctccactctgcggcaccaaaggcccgtcacgtgcttcccctgcccagacaccccaaacaccgaaactgtcatccgaaggccccgcacctgccgcctgtcggatgctgaagaacgaatcccaggtggagaggacagcaccccaaaagggatgggggatggattggggcgtctgagccccgtggagtatgtcagcctttcagagcgacccgctccacgctgcgatgtggtccttaagaagttagggccgggcacggcgcctcacgctgtaatcccagcactttgggagccaaggtgggcggatcatctgaggtcaggagttcgagaccaacctggccaacatggtaaaaccccaactctaytagaaatacaaaaattagctgggtgtggtggcaggcgcctgtaatcccagctagtcgggagtctgaggcaggagaattgcttgaacccgggaggcggaggttgcagtgagcggagatggaacacccctgcactccagcctgggtgacagagaacgactccgtctcaaaaaaaaaa

SEQ ID NO: 782922 - DNA, 343 bp, Homo sapiens
cccgtcatgggcgaggtctggaggccggtccagctgtcccagggccacgcacagcagcctggaagaagagctggcctcaggacaggtgttcatgttgtccagagtccattcccagaactctctgtgcttggccagccaggataggggtgcccacaggtcctgccgtcagaggctcaggatggcyaagtgaggcttacctctgggctccgtgggacaggcctctccgaacagccacatccagggtggctgctgcagcagaggctggagtggctgctataccactgttcacctgtgggatgaataaacagtggagaatgaggcaccaaccaactcccaagccagg

SEQ ID NO: 782923 - DNA, 677 bp, Homo sapiens
gactctgctcctccacctcttgtggagggcctgacatcagtcaggcttgcccgcagttatccagaggcctaaacgtctccctgtgatgctgtgcttcagcggtcacactcctagtccactttcatgttccatcctgtacacctggctctgccttctagatagcagtagtaaattagtgacaatactaatagtccctgatatgcagaaataatggcgtaagctgtctttctctctgtctcctctctctctctgcctcggctgccaggcagggaagggmctcctgtccagtggacacatgacccacgtgaccttacctatcattggagatgactcacattctttaccctgccccttctgccttgtatccaataaataacagcgcagcccgacattcggggccactaccggtctccatgcattggtagtagtggtctcctgggcccagctgccttttctcttatctctttgtcttctgtctttatttctacactctctcgtcgccgcacacggagagacccactgaccctgtggggctggtccctacagagctgccccagtccaaaggggactcgatcaatggaggccttgcccatcaagagaccccagccatgacgtgcccaggtggggagacaggctggggctgcctgagaatggatcctcgtgagtgggttagcagt

SEQ ID NO: 782924 - DNA, 658 bp, Homo sapiens
tccttcttgagttttcagctgagcattgatcagtgcatgatgtgagtaaaatacccaggcctggaaaagaaccagctggaaggaggagcaagaacaatccttaaaagttgacacagtgccagaaatagctgtgcccacagccagagaagaaaaacctcgtaattcacatgtagaatccrtgggagggtgttgtctcaggagcgtagaaagtccagcctttgactgaaggctgctccggcccagactgacaaagtatgatagcctcaaaagaagcaagctgttcccaaataattggattacatcccagaacaaagtttaagaatatttataggaatataaaattatccagcacccagcaaggtataaaatggacactgacatctggttacaaaatgaaaaagtgaaaaacgtaacccaaaaggagaaaatttagtcaattggaaccaacccccccgaaataacatggtggaattagcagacaaggacattaaaacagttataaatatgttccatgtgttcaagaaagtagaagacatgagcaggttaagtggagacacgaaagatatataaaagacaattttatcttctaggaatgaaaaattcaatgcctagaatgaaaaatatattggacagaattatcagcagactagacaatgca

SEQ ID NO: 782925 - DNA, 658 bp, Homo sapiens
tccttcttgagttttcagctgagcattgatcagtgcatgatgtgagtaaaatacccaggcctggaaaagaaccagctggaaggaggagcaagaacaatccttaaaagttgacacagtgccagaaatagctgtgcccacagccagagaagaaaaacctcgtaattcacatgtagaatccatgggagggtgttgtctcaggagcgtagaaagtccagccyttgactgaaggctgctccggcccagactgacaaagtatgatagcctcaaaagaagcaagctgttcccaaataattggattacatcccagaacaaagtttaagaatatttataggaatataaaattatccagcacccagcaaggtataaaatggacactgacatctggttacaaaatgaaaaagtgaaaaacgtaacccaaaaggagaaaatttagtcaattggaaccaacccccccgaaataacatggtggaattagcagacaaggacattaaaacagttataaatatgttccatgtgttcaagaaagtagaagacatgagcaggttaagtggagacacgaaagatatataaaagacaattttatcttctaggaatgaaaaattcaatgcctagaatgaaaaatatattggacagaattatcagcagactagacaatgca

SEQ ID NO: 782926 - DNA, 623 bp, Homo sapiens
attatttgttaaaagcatacattttagccaagtgatatctttgcctatttatctattaactatatatcaatcaattatatatatgtgtgtgtatatatatagatatacacacacacatacatgctaagatttgaatgtgttccctccggacttcaggtgctgaaacttaatggccaatgtgatgctattaagaggtagtgccttttttttttttttttttttgagatggagtcttgctctgtcacccaggctggagtgcagtggcgccatctcagctcactgcaagctccgcctccttggttcacgccattcttccaccccagcctcccaagtagctgggattacaggcacccgccaccacgcctggcaatttttttgtatttttagtagatatggggtttcatcgtgttaaccaggatggtcctgatctcctgacmtcgtgatccacctgcctcggcctcccaaagtgctaggattacaggcgtgagccaccctgtccggctgcaaggtagcgcctttaaggggtgattaggtcatgagggttcctcccctcatgactaggattaaggccctcataaaagaggcttcacacagtctggcatgcccttctgccttccattatg

SEQ ID NO: 782927 - DNA, 641 bp, Homo sapiens
catttcccctctctgggcctcagtttgcccatctgtaaaatggagcagtaatagtaactgcccccatcccccaaaaatatatgccatcgataacacacaggagaaagtgtctgcacactgtagagagctgtgcccaccagaggagccagctccaccccctctcctaatccacagggcagggactgaagaggctattcccagggcccagcccagatggggcttaaactccagtcagacaggagccaatttccctggctcattatcccaaaccaaattaggggcagcccaggctgtgccactcgtggcttaattgggactcacagacaccccgccccgtgccttctttctttcccacacccctgtccccagccaggccgtgccttaggggagccagaggctgcctgggccttgccacctgggccctcgcagaygccccagtgtaatcaattagacccaggccaggccggctcgggatgggggcgccgctgggcagctgggcccagcatcgatcccggcccctctcgacccccagggaggggaggcagccaagagagccgtgcagatggcggtctccacggccctctgcccccaccccccaccccagagctgcctgtgggtgtactcagcccggacagagaacg

SEQ ID NO: 782928 - DNA, 556 bp, Homo sapiens
gagactggataatttataaaggaaagaggtttgatggactcacagttccacacacctggggaggcctcacaatcatggtggaaggtgaaggaggagcaaagtcatgtcttacgtggcagcagacaagagagcatgtgcaggggaactcccctttataaaaccatcagatctcgtgagacttattaactttcatgaaaacagcatgggaaagatygggctccatgattcaatgacttcccactgggtccctcccacaacacatgggaattatgggaactacaattcaagatgagatttggatggggacacagccaaaccatatcaaatacatagctaattttgtttcctctatacctcctattttctttagattattttgaagcaagtctagagattatatatatatatatatatatatatatatatatataatttcatctgtgagtatttctatatgcagtcctgaaagataaaaactctttcagaatacaaaagtgaaagtggaatacaatgccactgcgaaaaaaatgctcccttaatattatccagtagtcaa

SEQ ID NO: 782929 - DNA, 643 bp, Homo sapiens
gcatgtagaaatgagatgtgagaaaatgagagctgtcacttcagaggagaggctttaaagttaccgatatgtggggctgtttgttactgcaacacaacctacatccttctgactgatacaatgagcatggatcattttataaaaagccatagagtgtttttttttcctaatcagaaggaggagagaggaggaggcagaaaaggagggaaggagggagggaaaaagaaaattagaagcaaatatgccaaagtgttcatgtaattaattttgtgaggtggaaacctgcatccttgttagtcctttgaagttttcatatttcttttcattaaacatttttttcatgaaatgaaatcaacagtaatagcttgagaggccactgccacctcagcacaaagtccccatgatagacacccaagtccacctgctggaccaagcctgccacgctgaccaccagccacagaccacttgtggcatccgccaacgcttgatacagtcccagaggasaccctcgagttagcagagaggtcggacagacctcaggccagaccttctgggccctccagccatgcaagcactggcaccaagggtctgctccatcttgcacagttagccaacctcacaatgcaagggctacagccccact

SEQ ID NO: 782930 - DNA, 727 bp, Homo sapiens
tgtcatgtgggatcctgagtgggatcttggatcagaaaaaggatgttaggttaaaaacgaacaaaactgaataaaatatgggcttttgttaatgagaatgttagcaacattggtttaatactcgcatcaaatgtaccatgctgatgcaagatgctaaaaataggrgaactaggggcagggtgtgtgggaactctctgtattatcatcttaatttcacttgtaagtctacaaatgttctttaaaaaagtctacttaaaattttttgaagataccaaataactactttataaaaaggtttgaaagcacctgtgaaagctacattgagtccaaccctttgacccagcaattccactcctaaatatatacccaaaagtaatgagatcttgtgtccaccaaaggcatataaaataaaattcagtcaggcatggtggctcatgcctgtaatcccagcactttgggaggctgaggcgagtggatcacctcaggtcgggagttcaagaccagcctggccaacatggtgaaaccccatctctactaaaaatacaaaaattagctcggcgtggtagagcatgcctgtatcccagctactcgggaggctaaggcaggagaattgcttgaacccaggaggcggaggttgcagtgggccaagatcgtgccactgcactccagcctgagtgacagagtgagactccacctcaaaaaaaaagaaaagaaaattcataacagc

SEQ ID NO: 782931 - DNA, 707 bp, Homo sapiens
gaaatcttaacttattccaccattaactcaaaagccccacatctggtctaaagtctcacctgagacccactcctcagtacagtttctgtgttagaccactcatgcattgctataaagaaatacatgagactgaataattcataaagaaaagataattaattggctcatggttctgcagactgtacaaccacggcttcaacatctgcttrgcttctgtgagggcctctggaatcttacaagcatcacagttgattccaaaacgtatgcagaaattggaaaacattgaatagccaaaaaaaaaagttcaaaaagaaaaataagtttggaggacttttacgacataatttcaagacttgctataaagttatgatagtgaagacagtacaataatggcataaacatagacaaataaaagcactagaacagaatagaggccagaaggaaactcatgtttatacggtcaattgatttctttttaccttaggtgctaaagcaagttaaggaaaagaaaaaactttttaacaaatggtacccaaacaactgactatacctacatctataaccctgaggggttaccctccattctttagctgagtactgatcagcacatgcgtgtgaggaagtgacctcagattagaaaaagaaacactggaacaaagcttaaaatcaagcctcagaaggatccaactgtttccaagtaactgatt

SEQ ID NO: 782932 - DNA, 610 bp, Homo sapiens
ttatggggacaatttactgaaattaccatctgctccctgtcatttctcttccatggctccctgatatgaacagagtcaagttcaagttcgaagtcctttgcaaaccacagcctactaggagctaagccttgtagggctcagcactccccagtcccaggccttggctccaccggctgctccctgctctcatgccttcactcacggggcctgagatagcctggctttcgctccctggtggacttctgctcatctctgaacatggggtatgagccttccctcccccaaggagacttccttgacagctgccaccccagcaaggggctggaaggctgcttggtggaaggcccttctcagagtcttcatcatacacttctcgatttctcgcrgtactcaccacactgactcataaggctccattggagagtctgtctccctgaaaaatatccagcacctgggctgggaaggagtcttactcactgtgttagtttcctagggctgccaaaaatgtcatggcctagaacaacagaaattcatctgcttgccgttctggaggccggatgtctaaaatcaaggtgtcagcaaggccacattctctgtgaaggctctaggg

SEQ ID NO: 782933 - DNA, 615 bp, Homo sapiens
ggcatgagtagtgctgtgataatttcacaacaacaacaaaaaactcttgaaggaatttctcactgtgttctatgctagtagagaatttgttcaaatgctgctgagattgcccaggcacaaattgggcacagtcagaatcataggtttcataaagtttttaaattttttttttctaagtaagctaattggctgccctaattatcaaacccacagttttgtattgttcaggtatactcacktaaggagatatgttcccccaaacctgtttctcatagacttccgcatgattccaccatacatacactgacatccagaaccttagaaatcattacctctatatctaatctgtcagcctttggttctaactcaaaaatgcagccccaaatctgtcggatttcttcattccatcattgccaccttaatccaagtccctgtcatctgtcctttacactgttgcagacctcttcaatgagcttccttctccgttcctccccactataggcccatcctccagacagaagccagaggtggttttgtgtcagtttttatgtaaataataatatgtcactcctttgcttagaaccctccattgacttccttagtacttgaaagaaa

SEQ ID NO: 782934 - DNA, 562 bp, Homo sapiens
cccaagaaccccagatactgaaaaaagagaagttgctttcccaaaacagagttttttcctatgatcagctcatgatcatctctctccctttatctttcttaaccctaaaaaaccagttttactattcatccatcctaacaaggtaaattagccaagaccttaccacacctcctttacactttcatcttcccccttttagctgcctttagcagccttatggatggggtttcacatctccctatattctgtacaggctgtgtgtgtgcatgcatgtgtgtccctgtgtgtgtgtatctgtgtctgtctctgtgtccctctgtgtgtatatctgtgtgtttctgtgtccctgtgtgtatgtatctaygtctgtctctgtgtgtgtgtgtgtatctctgtctgtgtgtgtgtgtatttgtgtgtgtgggggggggtgggtatgtgtggtgtgtttctctgtattccttttcatttctccctaggtggctgtgcccagatcgcctctctactccttcagataaaaagcaaagggctttggggaggctgaggcaggaggttcacttga

SEQ ID NO: 782935 - DNA, 577 bp, Homo sapiens
atcttttttattcatattttgcataacatataacttggattcccaattcttgagctacagtcaacctgtttgccaattatagtatcttaaaacatctgtagtagtctcaggatatttaatcagaaatgcattgaaaatataatctacattaaattctgcaaggccaggcacggtggctcacgcctgtaatcccagcactttgggtggccaaggcaggcagatcacgaggtcaggagtttgagaccagcctggccaacatggtgaaactccatctccactaaagatacaaaaaatcagccggstgtggtggcaggtgcctgtaatcctagctactcgggaggctgaggcaggagaatcatttgaacctgggaggcggaggttgcagttagttgagattgcgccattgcactccagcccggccgacagtgtgagactccatctcaaaaataaaataaaatcaagtaaattcttcaaattaggatacacaagaaaaggataaataatgaaaaaaaactatacctaagcaacagaaaaatccacataatttttttattttttggctatattaattcaataa

SEQ ID NO: 782936 - DNA, 729 bp, Homo sapiens
gtgcttgaaccaagacttctccagggatccaaaagtagatgtttatgcaccttctatttacgacattggcaccaaccagccaattacagcagtggagataaggccatgaaatacagacataacttctggggtctactgctagaaattaaaagatagttcctaaagaatggggaactgctttaagttgagaaaccaatgcaaaagtatattttaaacgatttctgaaaaaatacactccatgcccatattacagaaattctcggtattatcctaatwaaaaatctggaatagtctgtgagacagattcaactgcagtgtagtatataataaaaatagagtacctggttttaaataccatatatactgtgataataattagattcctatctccagaccagatattccctctgagtaaacagactcacagtgaacttccaacttcatatcctatgtgagtatctcaaagtcctaacatgtccagaaaatccttatgcctaccctactctttctcatactatgtttgttgctcaaacaaaaacccagaaatctatcctggatttctcaatttctgtcagcccccatactgcatccaagcttgttaattctggttccaaaatatatttcaaattcttacttctatccccagtgttaccacggtagtagagacaactatatgccatttggattaccataacaacattttccaattaacccaacttgcacttattt

SEQ ID NO: 782937 - DNA, 581 bp, Homo sapiens
ctaaaagcagacttcccagcagaaactgtataagcaagaagagagtggggtcccattttcggacttaaaaacaaaactgtcaaccatgaatttgttattttactagtataagcttcataaatgaaagagaatagtctttcccaaacaggaaagtgctaacggaattcatcaccactaaaccagtcctataagaaatactccagggaattctaaacatggaaaygaaagattgatactcaccatcataaaagcacacaaaagtataaaactcatagatcttataaaataattagacaaataagactgcaaagtaactaggtaacagtaaacattatgacaagaagaaaccctacatatcaatattaatcttgaccataaatgccttaaatactccatttaaaagacaaacattggcagaacagatttgtaaaaaacatgacacaaccagatgctgcttacaagaaacccacctatctggaaaggacacttgtaggctgaaggtgaagaagtggaaaaagatactccattcaaatggaagccaaaagtgagtaggaatagctacatttatatcagataaaaca

SEQ ID NO: 782938 - DNA, 581 bp, Homo sapiens
ctaaaagcagacttcccagcagaaactgtataagcaagaagagagtggggtcccattttcggacttaaaaacaaaactgtcaaccatgaatttgttattttactagtataagcttcataaatgaaagagaatagtctttcccaaacaggaaagtgctaacggaattcatcaccactaaaccagtcctataagaaatactccagggaattctaaacatggaaatgaaagattgatactcaccatcataaaagcacacaaaagtataaaactcatagatcttayaaaataattagacaaataagactgcaaagtaactaggtaacagtaaacattatgacaagaagaaaccctacatatcaatattaatcttgaccataaatgccttaaatactccatttaaaagacaaacattggcagaacagatttgtaaaaaacatgacacaaccagatgctgcttacaagaaacccacctatctggaaaggacacttgtaggctgaaggtgaagaagtggaaaaagatactccattcaaatggaagccaaaagtgagtaggaatagctacatttatatcagataaaaca

SEQ ID NO: 782939 - DNA, 581 bp, Homo sapiens
ctaaaagcagacttcccagcagaaactgtataagcaagaagagagtggggtcccattttcggacttaaaaacaaaactgtcaaccatgaatttgttattttactagtataagcttcataaatgaaagagaatagtctttcccaaacaggaaagtgctaacggaattcatcaccactaaaccagtcctataagaaatactccagggaattctaaacatggaaatgaaagattgatactcaccatcataaaagcacacaaaagtataaaactcatagatcttataaaataattagacaaatragactgcaaagtaactaggtaacagtaaacattatgacaagaagaaaccctacatatcaatattaatcttgaccataaatgccttaaatactccatttaaaagacaaacattggcagaacagatttgtaaaaaacatgacacaaccagatgctgcttacaagaaacccacctatctggaaaggacacttgtaggctgaaggtgaagaagtggaaaaagatactccattcaaatggaagccaaaagtgagtaggaatagctacatttatatcagataaaaca

SEQ ID NO: 782940 - DNA, 683 bp, Homo sapiens
caaaatttaacatatggttttaaaaaattactcaaaaaagcctttaactttttaaataaagaacattataaatcttcaagaataatttccatggagtagtcaccaaagaagaatgttgaattcttaaatgttaaatcaccgttaaaattgaaaaaatatccaacttcagagtaataaagcaattttaaataataaatttttactttcaacttttattttagatacaggggggtacatatacaggcctgttacatggttatttatattgcacccaggtagtgagcacagtacccaataggtagttttgtaacccatgcccccatgccctctgtagtagtctgcagtgtccactgttctcatatttatgtccctgagtatccaacgttccatacgaaatttagaatagcctttttttaattctgtgaagaattacattggtagtttaatagygatagcattgaacctgtagattgcactgggcagtgtggccattttaacgatattaattcttccaattcatgagaatagagtgttttctatttgtatcatctccaatttctttcagtagtgttttttaatattccttatagagatctttcacctccttggttagatgtattcccaggtatttcattttttgtgtggctattatgaatgagattgtgttcttcatttgattctca

SEQ ID NO: 782941 - DNA, 632 bp, Homo sapiens
atttaggcaatatacacatgtcttctacagctatcttacagcattcattcatccatcagtcatcaaatatttactgaaagcttattatatgccaagcacacaggccagtcttcttgacacacacacagacatatctgtcctcttttcttctgcaaggctgttgtgcccactcttctcacttcctcttgtgtcattccaattctattaaatcacttgactatagcctcatctggtccaggaagctttccctggcttctccaggccacctctgctgtctatgggccttgtgaggttaaaatcttctaagattgtgtaacccttagagggcccattagtctggcctggaaaggaacaatgttggcaaaaaccagggtatgctgagatgaccttggccagcaaaccatcttcctacygaagttgtgagcatgttgacagcagggatgtgtccactatgttccatggtaatgcttggcattgttccctacccagagtgggtactctatcagggcttcttaactagtggatctgttatgctcaataggagatgctgttcagagaaatgatcctagagcccagttgcaaaagaaaaggaactgtatactaaagcaaaaaaccttcccacaactccccac

SEQ ID NO: 782942 - DNA, 613 bp, Homo sapiens
agcctcaccagcatctgctaatttgtttttactttttaataatagccgttctgactagtgtgaaatggtatctcattgtgggttgttttttctttctttttttttttttttttttgagatggagtcttgctctgttgcccaggctggagtgcagtggcgtgatctcggctcactgcaacctctgcctcctgggttcaagtgattctccttcctcagcctcccaagtagctgggactacaggcrcgtgccaccacactgggctaattttttgtatttttagtgtagacggggtttcaccgtgttagccaggatggtcttgatctcctgatccacccgtcttggcctcccaaagtactgggattacaggcgtgagccaccgtgcctggccctcattgtggttctgattttcatttctctgatgattagtgatattgaccattttttcatgtttgttggctgcttgtatgtcttcttttgagaagtgtctgtttatgtctttgctcactttttaatggggttgttttctgtttgttgaattgtttatttcttatagattctggatgttagatctttgtcagatacatagtttgcaaatatgcaaatattttctccc

SEQ ID NO: 782943 - DNA, 643 bp, Homo sapiens
caaagcagctcatgaagagacccacagggagagtaatccaggtctctggccctcaattccagctaagccaccacctgacaactagcaccaatttgccagctgtgtaggtgaaccatcttggaaatgaatcctccacccaattcataagctaaataaattgttattttaagccactaaatgggtttacaaagcaacaatacataactagaacactgatacttgacaccytgtaggtgaactttttttctttctcttgagaagtttaggctctttcgttaatccctcatgaagtttaatgttaacaccttttttctttccttttcatttccttccttcttttttttctgacatttggtgatcctttttaataacaataataataataataataaatcctgcaattctagggaatgtctttgataatcttcttttggtaattatctccctttcattttctctgttctttctttctggaactctgtgtgagacaaattggatctgctgattgattttcaaattctctttccttttgttcatctttttttctatttttcttccaaccctgatattgaatttttaagttgagctatcagatatttaactttcaagagctctgtcttgttctttgattctcccttttaaa

SEQ ID NO: 782944 - DNA, 488 bp, Homo sapiens
cttgccccagtttggcctgtggctgcaggcctggctcagccccattgctgctttctgttgtgtggggcagctgccctctgccagcagagggcagagggccacaatgttacagccttctgtgtacccagtttcagtgggtcctgagttcttgtcccatgaccaagaagaataggatcaygctgagaattgaagagtgaggaaggtggagaatttaattgagcaatgaaacagatctcagcagagaggggacacaagggtggtcccctacccaaagtcaggtggcctctctcccattgtggctgggtccagggcttttatgggctcagattggggagtgtatgctgattggtttgtgagtatgcaaaaagattaaaacaaaggcaacactcaaagttgggcatgacagtgtaaaatgttaattagggaaggggaggtatatgtaaaataggcgaaggctggggatcaatcagaggaaagtgtgccaaatg

SEQ ID NO: 782945 - DNA, 656 bp, Homo sapiens
tcgatttgctaatatatataatttataatttgattagcaaattaaatccatatatatttatatatgtaacccacatatatatttttatacatatagcaaatatatctttaacaaaaaatataacaactatatctgtggctacctatcagggatgggtataatataggaaggcatattggtatgcatgtggttccccaactgtatacagttgtaaaaattctttgagctatatactttaggttcgtgtaaggtagtcagttaagagtctagcatcacttgcttatctgtctgtcctagaacctctggtgtctcaggtttttctgatgaaaagaaattgagttctccaaaaataattagtaggtttcatcatattagttaaaaataatactagaggaacataaatttagaatatcctgtgaaggacagtgcaccttaaaagttttcagaacctcagacatgctgtagatcaaacacaacacgccattcttcattgcagctcttttgaatgcattatttaaatrctatctttcaatgtttccttcagatttctaatacttaaatatactgttatatttttctcagtctgagggaaaaggccataccaatgctggagatgcaatatatgaggtggtgagtctacagcgagagtctgacaa

SEQ ID NO: 782946 - DNA, 652 bp, Homo sapiens
ctgtgttgattaacagtggtaacagtgctctagctaggacttctggtgctatattgaataacagtggtgatagtgggcatcctggttgtgttccagatcttagaggaaaggctttcagtttttctccattcagtatggtactagctgttggtctgtcatatatggcttttattatgttgaggtatgttccttctatctcaagcttttttgagggtttttaatcatgaagggatgtkgaattttatcaaatgctttttcagtatcaattcaaatgatcatagtttttttccttcattctgttgatacgatgtatcacattgatagatttgaaccatccctgcatcccagggataaatctcaattggtcatcatgaatgatctttctataatgtattgttgaattctgtttgctggtattttgttgatgatttttgcgtgagtatttatcagagatattggcctatacttttcttttttttgatatgcgtttgtctggttttggtatcagggtaatactggccttgtagaatgagtctggacatttggaagagttccctcgtcctctgttttgcagtagttcgatttggattggtgttagttctttaaatgtttgatagaattcaacagtgaagtcatcggttcctgggctttt

SEQ ID NO: 782947 - DNA, 622 bp, Homo sapiens
tcacctgcataaccctgctcctctggccacagtagactcgtcctagggtggggacaggcccctgacccactttgaaattgagatccataatgagttttaaatttgctgggtggctgatacgtaccatgaaacctctttagctataggcagccatattttccactaggtggacagtagagcagagaaaatctgtttgtaaagaaagaaaaaacagagatgagagacacagaactgccaggtgaacctagaattggtttctgagagctttctaattctaatgatactggaggtccagtatcattcctgccctgagggtttgtgatacactcctgtatccttataatcaaatctcctgctttgatgttcagaaaacaccactggatttctgacacttgcacacaaaatgtttaaacgaaatacacacttctgggagatgtcatttattagaacctctgaaaattcctctacctgcttgagtgcargcacatgatcacctgcaccaagtgtagcaagcgcatgagcaagtgccccatctgccggcagtatgtggtgcaagtcattcacatgttcaaatcctgaaaacaaggatctcccaacagggaacttgcccctaaaattgatc

SEQ ID NO: 782948 - DNA, 667 bp, Homo sapiens
aattaagggtgctattctatactggatcttggatccccaaaaggagggagataccatgagagaagacagtgcagtgcttctaccatgcatttcattggaaggcaacccaaagccagtttggcttattttgtaatcagcccatcccctgtgggagtctcatctcttagtgtggggtagggatgtttccatatcttctggtgaccaagagcatgcttctctgatttaaatgtgcaaagagttaagtattcctccataactactattagccatcgcttaaggtatatttcctacctagttatcaaaactgttagataacacaatgcaaaacagaacagagcctttaaatttgagaatgaattatctgcttctaattcctggggtttcatgaggaaaatagggttttgtttcccaaggagtcccaggctaccagaagttatcttaggacctctcttgtgtgcattatgagtggcaagacaaaaaatggagaaaaataattcaattgactgaaaattwaaaaaaaaacactttttccagaaaagcaagatccaagaagagaaaaacataaaggccttttaaatatacctacaacttgaatatacacttttaattaagctgagcactctttaagaaaatccttttaaatcccttgttactctactttagccat

SEQ ID NO: 782949 - DNA, 501 bp, Homo sapiens
tgtttttgttttcatttgctacatgaaattgcacagtatataactcaatacattctgcttctaaattactgcaaatggaaggtagtggtttttttacagaaaaagtaaacaaaagctttaaaacctagcttatccagacaaataacctgagtggagaggaaggtggctgtgttataatgttggaatgtggtatgcatgaarctttccttataccaaataccctatatcagctcattatcaagattgatcataaatgcagtattatgtgttgcttaatgactggaatacattctgagaaatgtgtccttaggtgattctgttattgtgtgaacatcacagattataccaatgtagatggtgtggcctactacacacctaagctataaggtatagcctattgctcctaggctacaaatctgcacagcatgttactgtgataaatactgtaggcaattataatacatggtaagtatttgtgtatctaaacatagataaggtcga

SEQ ID NO: 782950 - DNA, 664 bp, Homo sapiens
atgtaaatacaatataaaaataagtaaattaagccaggcacagtggctcatgcctataatcccagaactttgggaggccaaggcgggcagatctcttgaggtcaggaattcgagatcagcctggtcaacatggtgaaatcccgtctctactaaaaatacacaaaaaaattagccaggtgtggtggcaggtgcctgtaatcccagctactggggaggctaaggtgytagaatcacttgaaccctggaggcggaggttgcagtgagccgagatcatgccatgtcactccagcctaggcaacagagaaagactccatctcaaaaagaaaaaaataataataagtaaattgtgacatcaacaacataacctgtggggaaagaagttaaaatatagacattttgtatgcaaagttaagttgttatcattgtaaaatagacgattataactataagatgttttatgtaaccatatggtaatcacaaagaaaagaaaacccatagtagacacacaaaagataaagacaaaggaatcaaataatacaactacaaaaaattatctaatcacaaagacagcaagagagcaagacaccaactataaaacagtcagaaaacaatcaataaaaaggcagtagtaagtattgtctatcaataatgactttaatgtaaa

SEQ ID NO: 782951 - DNA, 501 bp, Homo sapiens
atgattggttttgaaatgtgaggacacgagatctgggaggggccacaagcagaatgatagagtttggctgtgtccccacacaaatcttaccttgaattataataatacccatgtgtcaaggaaggggccagctggagataattggatcatggtggggtgtgttttccccatattattctcatgayagtgaataagttttatgagaactgatagttttataaatgggaattctgctgcacaaactctcttgcttgccaccatataagatgacactttgcttctcctttgccttccaccatgattatgaggcctcacaagccatgtggaactgtaagtcaattacactcttttctttgtaaattacccagtctcaggtatgtctttattagcagcatgagaactgcctgattcagatgttttatgacagttgcattcattttagaaagatatttctttaagtcagataagaaaattccagagagagtctctctgtaaatatgg

SEQ ID NO: 782952 - DNA, 604 bp, Homo sapiens
tatctatattgaagaatttaattaattatcattcaatttatgtgggatggatgagcagttgatggagcttatactgggaaagactaatattccacaaagccacccctaagcctctatattacctggtatacacacaaatctctcttttttgtttgctattgtctgtttatatctrtctcctcttaggtcttggaatgtctcaggcctagggatgaggtctgagtgctctctgattcccaaacttcttcagcaatagcctagcacagagaagttttctgtaaatgttaagatgaatgaatccaccaactggggaagagactcactggaggtgtgacccactgacattatccccacagtgtggattattcccagcatgactcagctagacaggatgaaaaacagccttggagaaggacttggcaagtttctctgccactaacttactgtgagatcccaggcaaagtcttttccctctctaggtctcagctactgcatctgagaaaggagaacattggagtggagagtctttaaggtacctcctacctctgcttgtctgtaaggaataataacattaaataccatttatgtattggaacttgcattg

SEQ ID NO: 782953 - DNA, 574 bp, Homo sapiens
atcagcctgaccaatgtggtgaaatgctgtctctactaaaaatacaaaaattagctgggcgtggtggcatgggcctatagtcccagctacttgggaggttgaggcaagagaattgcttgaacctgaaaggcagaggttgcagtgagccaacattgtgccactgcactccagcctgagtgacagagtgatactccatctcaaaaaaaaaaaaagaaagaaataagccaggcacagaaagacaaatatcccatgttctcactcacgtggtagctaaaaaagtygatctcctagaggtaaagagtagaattatagatatcagaggctgggaagggtaagggggataaatagaggttggttaatggatacaaacatacagttagataggagtaagttctagtgttcaatagcgcaataaagtgactacagttaatcatttactttatatttcaaaatatcaagaagaaaagacttgcaagattccaaacacaaagagaagataaatgtttgaggtgatggatataccaattaccctgatttgatcattatgtgttgtatgcgtgtatcaaagtatcac

SEQ ID NO: 782954 - DNA, 500 bp, Homo sapiens
ggtgattgtgagtcctcagttcttgtcttcttggtttaaagaatttaagcaagagacacacagcaagggagatacagccataaaccagtttattacaaaattgaaagagcactctgagagctgagtcagagtgggctgctcaagagtgagacacccctggctgacactagggaagctccctttaggggagttttacatgattattcttaagagggtgggaaagggcattgctagtaagtatgttatgggtggtcctctaggtgcacatgttcggtaactgtacatgtttgttcatacatcacatctcattagcatcttaaatctccayccagcagtgtgtttttcactagtataatgagcaaaaagtcagtccaaggacaagtaaaattaaagtgcatgctttctactggctgaagtccccactgaagttaggtcttgcctaagccagaggagcatgaccacaaagcaagcattgtgttaacacatcctgatagacatgg

SEQ ID NO: 782955 - DNA, 497 bp, Homo sapiens
tacaatccaaccagcaatgtatgagagccccaatttattcacagctcaccaacacttgttactgtcttttcttcttatgttagccattttagtggatgtgacatggtctcctaatacatgaaagattttggttttgatttgcattttcytaatgactgatgttgttgaacatcttatgttacgatcagagaatgtaaacctgtcaattcccaacattaaaacatttatcagattttttggtggccaagttatttgaaggaattttgtaaaagttccattactataagagaataaagtatgttttccctcttgttttggtataacatcctttttatgtttttaaaatttaacttgttcatgccttttattttattttactctttatttattttactttctcttttcctcttcatcccattcttacttccattgtcttaagttcctcttttttaagtagatatttttcctttcttaacaagaatgactaaatctacagt

SEQ ID NO: 782956 - DNA, 559 bp, Homo sapiens
aaactaattagaacaaagatacaacataccagaatctctgggacacagctaaggcaatgttaagagggaaattcatagcactaaatgcccacatcaaaaagttagaaagatcttaaattaacaatctatcattacaactgaaagaattagagaagcaataacaaatcaatccccaaactagcagaatacaagaaataactggctagccatatgcggaagattgaaactggaccccttccttacatcatataaaaaaattaactcaagatggattaaagacttaaatgtaaaccctaaactataaaarccccagaagaaaacctaggcaataccattcaggacataggcatgggcaaagatttcgtgataaagacaccagaaacaattgcaacaaaagcaaaaattgacaaatgggatcaaatttaactaaagagcttctgcacagcaaaataaactatcaacagagtaaacagacaacctacagaatgggagaaaatttaaagaaatgtaaagaaatgtaaagaaatttaaagaaatgtaaagaaatttacagtagaaa

SEQ ID NO: 782957 - DNA, 656 bp, Homo sapiens
aaaattcttgtaatttcctgagtggataggggtgccaggaacatctgttgttctaatatttggtctttgaccctagttcttgacacagagctcttaatcccatgcaatttcctgggtgataggagcatcttttgttctaatgagatgacctttttttttttttttgagatggartctcgctgtattgcccaggctggattgcagtggcgtgatctcggctcactgcaagctccgcctcctgggttcatgccattctcctgcctcagcctcccaagtagctgggactacaggcgcccaccaccatgcccggctaatttttcatatttttttttttagtagagatggggtttcaccgtgttagtcaggatggtctcaatctcctgaccatgagatgattcttgatgggctcctggatagcttcaggagtggggctgatcaccagaaagaccaagctgtgattagaagcttggaactttcagcctcaccctcatcctctggggagggaagaggggctgcagattgagatgatcatcatgcctatgtgatgatgtatccataaaaatccctataaaccaacccctgatttatagccaattggccagaagtacagaggcctggacttgtgattggtgtctgaagtaggacagtcttgtggg

SEQ ID NO: 782958 - DNA, 544 bp, Homo sapiens
ccatgagtgctcattgcttattagctgtggtatttcactgggcaatctctgggtatagtgaacttacgggaataataataaatatcacagtgctaaaatggttaatattctataagcaacaagggaaattaaccctgaagtgcacagtaccttaagaaatgataatggcaaattctaaaatgaacaatatcatgggattaaaaatcaacatggagacgccacagtaagatgcaacttaacgttagatccatgcaacttgcaggtaaaaacaaaaccgtttattaattcattcaaattgtatttaccaagtgagaaagatagagatgttaactatttaaggtctagttaacataaactaaaaagctactggacttctaacaaaawactctgtctaaagagttaggtcttttaatatataaactgtttcatttcctaaatatctatccgtaggatattcttacatgtttctttcacattttaatgtgtgaacttgaggacttaaagattcttttacttagcattaaaacatatgcttaagaactgc

SEQ ID NO: 782959 - DNA, 619 bp, Homo sapiens
ccacctttatgagttttgcctcacccctacatcacctgcactattattgacttaatattttgctttaaattgacttctaaaatgtgaataggtgctgccccttcctttgaactgttatgtaatcaataacacatgaaattacaggcccagtcatctgagccattaatagaagtgactactgtttactgaatgcctgctgggtgtcaggtacttcatatggtttaccacttratataaaaattacctgagaaaaactattaacatctccactctcagatatgtgcttttagcccctatgccatctgattcgtcattcccaagactggacatgtttcttcattcttgtctcaccaaatctggcctccccttatccccttttgaatcaacctaaaggtttctctctttggctgtgaaggtcaagactttttatgagttgagtgatttatctttttctttgtcatctattatctttcagttcaatgctttatgagttttgaccacgtgccaggcactatgttataaaggtaaacaaacagatttctgctcttgattagttcaaggcagatacagaaatagataatttaacataatgtggttaagtgtcatgagtgccatgata

SEQ ID NO: 782960 - DNA, 555 bp, Homo sapiens
tgccagtatttcatagtcttggagactcagtattctaaactacaaggttttctggataactgaagacatattacttaaaaagtaaatatttggccgggtgcagtggctcatgcctgtaatcccagcactctgggaggccaagatgggtggatcacctgaggtcaggagtttgagaccagcctgaccaacatagtgaaaccctctctactaaaaatacaaaattagctgggcatggtggttcatgcctgtaatctcagctacttgggatgctgaggcaggagaaccrcttaaacccaggaggcagaggttgcagtgagccgagatcgcaccattgcactccagcctggacaacaagagtgaaactccatctcaaaaaaacaaaagcaaataaataaagattttattttaatcatttaatatataaatatttctaaaataggttgtactcatccttgcattcataaaatgagaagctttaaggaaagttaatcatttcctattgctttaagtattgaatatggataccagttcttacaatataatttgggttcctca

SEQ ID NO: 782961 - DNA, 618 bp, Homo sapiens
taaaacagaaaggaagcttgatacatgtttgtgagagcatattgccttgacataggtatttactactcataaaacattattttcatctcattggttttttataatcttggaagccctttattattttgtattctggtaatctccaaatttatttttattaattggctttttgttggtttctttaataattagaaaacagtaaaattctctcatagaaggcctactaggttggccagtctttggaaagatraacaaacaaacaaaaacttacaaagttctgtctaaggttgtaagtaaaaagaaatgggagtgtcacatttctgaattataacttgttcataggctacagcattttatatttattcatctcagctgaggcaccaacatccagtgttcttttcaattagatttttctgaagcaattaggcttcttgcatccatctatcatgttacaaggtctatgatccaaatgtcccaaacacatctgaataaagaaaactcggtttactttcatgtaaagcgagtgttggcaatgtgtgtcaggcatagaggcctaacagaaataatcacctgatacaattatagataaatgcacctgcatttatttaatatactttc

SEQ ID NO: 782962 - DNA, 618 bp, Homo sapiens
taaaacagaaaggaagcttgatacatgtttgtgagagcatattgccttgacataggtatttactactcataaaacattattttcatctcattggttttttataatcttggaagccctttattattttgtattctggtaatctccaaatttatttttattaattggctttttgttggtttctttaataattagaaaacagtaaaattctctcatagaaggcctactaggttggccagtctttggaaagatgaacaaacaaacaaaaacttacaaagttctgtctaaggttgtaagtaaaragaaatgggagtgtcacatttctgaattataacttgttcataggctacagcattttatatttattcatctcagctgaggcaccaacatccagtgttcttttcaattagatttttctgaagcaattaggcttcttgcatccatctatcatgttacaaggtctatgatccaaatgtcccaaacacatctgaataaagaaaactcggtttactttcatgtaaagcgagtgttggcaatgtgtgtcaggcatagaggcctaacagaaataatcacctgatacaattatagataaatgcacctgcatttatttaatatactttc

SEQ ID NO: 782963 - DNA, 618 bp, Homo sapiens
taaaacagaaaggaagcttgatacatgtttgtgagagcatattgccttgacataggtatttactactcataaaacattattttcatctcattggttttttataatcttggaagccctttattattttgtattctggtaatctccaaatttatttttattaattggctttttgttggtttctttaataattagaaaacagtaaaattctctcatagaaggcctactaggttggccagtctttggaaagatgaacaaacaaacaaaaacttacaaagttctgtctaaggttgtaagtaaaaagaaatgggagtgtcacatttctgaattataacttgttcataggctacagcattttatrtttattcatctcagctgaggcaccaacatccagtgttcttttcaattagatttttctgaagcaattaggcttcttgcatccatctatcatgttacaaggtctatgatccaaatgtcccaaacacatctgaataaagaaaactcggtttactttcatgtaaagcgagtgttggcaatgtgtgtcaggcatagaggcctaacagaaataatcacctgatacaattatagataaatgcacctgcatttatttaatatactttc

SEQ ID NO: 782964 - DNA, 587 bp, Homo sapiens
ctcttatttcctcagacccctcaatcttcactatgtgctgcagatgtcatctccaaaatctatctgaaatttgtccgctgatctccatctttcctgctaccatcatagtcacagccatcatcttctctcagttggattactgttgtaacctcccaactggtgtccttgcctcccatcttaccccttcttacaaacaattttccaaacaacagccagaataatctttttgaaaattcagctcagatgatatcactcccctacttaaaacttgaaggatattcccacagcaccttgaataaaatccaacttcttaccctatcttaaacctacataatctgamcatgtcaacattccaagctcatgtcttgtcattctctcacttgaccaatgggatccatctgcaccttctatgcaaagtttactcccatttagggttgtctactagctattccctctagctggaatactctctgtatctttacaagattgacatgttattcagattctcaactaaataacagttcagaggccttccctaaccactcatgttaagaagtcatctagttatagtgatatcctactttaac

SEQ ID NO: 782965 - DNA, 572 bp, Homo sapiens
tccaagttcttcagttttggaactcagactggctctctttgctcctgagcatgcagacagcctattgtgggaccttgagattgcgtgagttaatacttattaaactcccctttacatatattatatacatatattccattagttctgtttctctagagaaccctgacyaatacagtctcgttatgttgtgttgggagcaagccccccagaatccggccataaactggccccaaaactggccataaataaaatctctgcagcactgtaacatgtccataatggccctgatgcccaagctggaaggttgtgggtttacgggaatgagggcaaggaacacccggcccgcccagggaggaaaaccgcttaaaggcattcttaagccacaaacgaaacttgaacgatctgtgtcttaaaggcatgttcctgctgcaattaattcggcccatcccttcgtttcccttaagggatacttttagttaatttaatatctatagaaacaatgctaatgactggtttgctgtcaataaatatgtgggtaaatctttgttcggggctgtcagctccgaaggctg

SEQ ID NO: 782966 - DNA, 572 bp, Homo sapiens
tccaagttcttcagttttggaactcagactggctctctttgctcctgagcatgcagacagcctattgtgggaccttgagattgcgtgagttaatacttattaaactcccctttacatatattatatacatatattccattagttctgtttctctagagaaccctgaccaatacagtctcgttatgttgtgttgggagcaagccccccagaatccggccataaactggccccaaaactggccataaataaaatctctgcagcactgtaacatgtccataatggccctgatgcccaagctggaaggttgtgggkttacgggaatgagggcaaggaacacccggcccgcccagggaggaaaaccgcttaaaggcattcttaagccacaaacgaaacttgaacgatctgtgtcttaaaggcatgttcctgctgcaattaattcggcccatcccttcgtttcccttaagggatacttttagttaatttaatatctatagaaacaatgctaatgactggtttgctgtcaataaatatgtgggtaaatctttgttcggggctgtcagctccgaaggctg

SEQ ID NO: 782967 - DNA, 572 bp, Homo sapiens
tccaagttcttcagttttggaactcagactggctctctttgctcctgagcatgcagacagcctattgtgggaccttgagattgcgtgagttaatacttattaaactcccctttacatatattatatacatatattccattagttctgtttctctagagaaccctgaccaatacagtctcgttatgttgtgttgggagcaagccccccagaatccggccataaactggccccaaaactggccataaataaaatctctgcagcactgtaacatgtccataatggccctgatgcccaagctggaaggttgtgggtttacgggaatgagggcaaggaacacccggcccgcccagggaggaaaaccgcttaaaggcattcttaagccacaaacgaaacwtgaacgatctgtgtcttaaaggcatgttcctgctgcaattaattcggcccatcccttcgtttcccttaagggatacttttagttaatttaatatctatagaaacaatgctaatgactggtttgctgtcaataaatatgtgggtaaatctttgttcggggctgtcagctccgaaggctg

SEQ ID NO: 782968 - DNA, 634 bp, Homo sapiens
atatggctaaggaattagcttctcagagcttcagtgtatctacaatatggagatgacgtaattaccccagtactgatactgtgtacttggcacacaataaaccataaaaaaagttttatcaccattgctgccctccttctcttcttcttcattccaaaggaaagaaagaaatgaaccatcaatacagaactcttaagttcctctctttagaatgttatttcctccaaatcttccatggttgacccttctatgttattcagactgtggctccgatttggcctaaagtagtcctcatcatctccctttcccaccctccatcactttatcacatggttatattgtattttcttcagagctcttattgccatctaaaatkatcctgtgaacttgtttaacattttacccccttatcatgtaaatcttacgaaagcagaaactttgtctaatttgttcactgctgaatcctccagagactagaacatggcatggaacataacagatgcttaacacatttgctgaataaaggagtgaatcataagggactagacatgttaaaaattggaagcctgaccagatgatagagagaagtctactataactagtcattcagggctcaattctaaattagtattat

SEQ ID NO: 782969 - DNA, 735 bp, Homo sapiens
ggtgtttggatcatgggggtggatccctcatgaatggcttggtggcgttcccttggtgatgaatgagttcttgctctgcaagttcacatgagatctggttgtttagagtatggcacctcccttctctctcttggtcccttctctgaccatgtcacatgcctgctcccccactgccttctgccrtgagtggaaagcttcctgaggcttcatgagaagccaagcagatgctggagccttgcttatacagactgcagaaccgtgagccaaataaatctctcttctttataaattacccagcctcagtattcttttatagcaatacaaaatggactaacacagccatgcagatagactctggcaaaatcccccctcaaccattcaatctcatgttatcctagattatgacatcacttaaaactgctccattaaaaaaaactcttttaattcatacatcccaccatatagccttaactttaaaagcttccaataacctattaaattatggctactactcctacgctacttcagctaaacctcaagcaattcaatcagtccattttctctctaaccactactcacctgcctttttcctactgccttatattcatcttggactgcatggtctatacattcaataaattctgccaatactttaaaatccatgcctttctctctgtgttacctggctaccaaaccttaactaaaaccaactaactgccttctccatgcttgtac

SEQ ID NO: 782970 - DNA, 634 bp, Homo sapiens
aagcctgatttatgggtatcactgaacattttttactatgaaatttatctataagaaacatgcaaattaaaacatcacctctacggcttcccaggcccatttcctgtactttggatcatgagtcagtctccacatatacatgtaagtctccataacttctggccgtaagatgtagtatttttcattttgtcttgtagcgatggcttcaacaccaccatcaaatctgaaagcttctggtcccagtttcataactaaaggacatggaatgaatgaataagggttattttcctggasagtgcttacagtcaataacttaaatgaaactagaaagtacagtcatccctcagtatctatgagggactggttccaggaccctccgaggataacaaaatccatggatccttgagtcccttatataaaatggcaaagtattcgcatacaacctgggtacatcctcccatatactttaaatcaccttgtttacttatactacttaatacagtgtaaatgttatgtaactaggtgttatactgtattgtttagggaataaagataagaacaaaaactctataaatgttcactacagacagaaccatccattttttgggaacatttctgatctgcagttgtggaa

SEQ ID NO: 782971 - DNA, 634 bp, Homo sapiens
aagcctgatttatgggtatcactgaacattttttactatgaaatttatctataagaaacatgcaaattaaaacatcacctctacggcttcccaggcccatttcctgtactttggatcatgagtcagtctccacatatacatgtaagtctccataacttctggccgtaagatgtagtatttttcattttgtcttgtagcgatggcttcaacaccaccatcaaatctgaaagcttctggtcccagtttcataactaaaggacatggaatgaatgaataagggttattttcctggacagtgcttacagtcaataacttaaatgaaactagaaagtacagtcatccctcagtatctatgagggactggttccaggaccctccraggataacaaaatccatggatccttgagtcccttatataaaatggcaaagtattcgcatacaacctgggtacatcctcccatatactttaaatcaccttgtttacttatactacttaatacagtgtaaatgttatgtaactaggtgttatactgtattgtttagggaataaagataagaacaaaaactctataaatgttcactacagacagaaccatccattttttgggaacatttctgatctgcagttgtggaa

SEQ ID NO: 782972 - DNA, 644 bp, Homo sapiens
attcctaaataaataaaaaaccacgtttactgtctgttatccgggagcatggaagacaaagtgagcaattttagcagaattctacagatccaagtagatctgtgcaacaaacctgcatttggggggctcctggttaatggaaccatctgtatttaattgcttactgtagcatctctctgaaacagtggtttccaatctttctcaggtcacaggctctcctcctcctcttttgagaatctgattaaacttttgtatcttcattcctgaaaaatacacatatacgcacaccccctgagaccccagtcatgggcccctgggtcaataatcactcatctgacaccatgccaaaaatttgttgtgtttatatgttctttggtgtgcactctaraaatgtaccagaattgtgctgtttatattaaaacatgtgcacatactacctacatatgtgaatgacattttctctactgaatgattacatgaaataatgtgtatgaagatatatcctaaaaagtcaaatgtgagaatgtcaacattgttcttcttatttgcactggccatttaaacattcaacactaaagctgctgggtgacgttgcagctggtaagttatggaaactgctcttaaatatgatctttccattctca

SEQ ID NO: 782973 - DNA, 644 bp, Homo sapiens
attcctaaataaataaaaaaccacgtttactgtctgttatccgggagcatggaagacaaagtgagcaattttagcagaattctacagatccaagtagatctgtgcaacaaacctgcatttggggggctcctggttaatggaaccatctgtatttaattgcttactgtagcatctctctgaaacagtggtttccaatctttctcaggtcacaggctctcctcctcctcttttgagaatctgattaaacttttgtatcttcattcctgaaaaatacacatatacgcacaccccctgagaccccagtcatgggcccctgggtcaataatcactcatctgacaccatgccaaaaatttgttgtgtttatatgttctttggtgtgcactctagaaatgtaccagaattgtgctgtttatrttaaaacatgtgcacatactacctacatatgtgaatgacattttctctactgaatgattacatgaaataatgtgtatgaagatatatcctaaaaagtcaaatgtgagaatgtcaacattgttcttcttatttgcactggccatttaaacattcaacactaaagctgctgggtgacgttgcagctggtaagttatggaaactgctcttaaatatgatctttccattctca

SEQ ID NO: 782974 - DNA, 629 bp, Homo sapiens
tcttgggagtttgaggctgaaatgaagtgccattgaactctagcctgagtgacagagtgaaaccttgtctcttagagagagagacagagagagaaagagaaggaggaggagaaggaagaggaggaggagaaagggtagaaaaaatatctgaagaggtactggctaaaaactccagattttgtgaaagccatgaatttaccaatattaaaaaaccagcaaacacaagcaggataactataacaagaaccaccctagctatggacatcaaactcaaacttctgatagccaaagataatgagaaaatcttgaaagtacccagaaaataaataacacattacatacatggaaacaatgacaagattaatggctgacttctcagaaacaatgaacagccataagacgcaagaatggcatcttcaaaatttgataaaaaatctgaaaaccaayaacccttctttatgtattttttaaacaacaatatatctgatgaaacttttcttcaaaagtgaaagggaagtatttttggattggcaaaaaatgagataatttgtcaccagcaaacctgctgtaaaagaaatactagaagaacatatttaggttgcagggaatagctacagaggaaaaaacta

SEQ ID NO: 782975 - DNA, 629 bp, Homo sapiens
tcttgggagtttgaggctgaaatgaagtgccattgaactctagcctgagtgacagagtgaaaccttgtctcttagagagagagacagagagagaaagagaaggaggaggagaaggaagaggaggaggagaaagggtagaaaaaatatctgaagaggtactggctaaaaactccagattttgtgaaagccatgaatttaccaatattaaaaaaccagcaaacacaagcaggataactataacaagaaccaccctagctatggacatcaaactcaaacttctgatagccaaagataatgagaaaatcttgaaagtacccagaaaataaataacacattacatacatggaaacaatgacaagattaatggctgacttctcagaaacaatgaacagccataagacgcaagaatggcatcttcaaaatttgataaaaaatctgaaaaccaataacccttctttatrtattttttaaacaacaatatatctgatgaaacttttcttcaaaagtgaaagggaagtatttttggattggcaaaaaatgagataatttgtcaccagcaaacctgctgtaaaagaaatactagaagaacatatttaggttgcagggaatagctacagaggaaaaaacta

SEQ ID NO: 782976 - DNA, 578 bp, Homo sapiens
ggaacttttcaggttcaatggatcctcaataagattgcagcccagttttcttcagaaaccatagagttcagaaggcattggaatgttgacaaatttagaggtcagaaaaaaaaagactgtcatgcaggaattgtgtgtctggaaaaactctccttcagaaataatggattttatatatatatawatatatatatatacacacatatatatacatatatatacatatatatgactatacatagtactacatatatataactatatatagtactactatgaaattatatatatagtactatatatagtagtcatactataaaagctagtagtaatatgtatatttttggtgtttatatgtgtgtgtgtgtgtgtgtgtgtgtgcatatatatatagtactatatatagtagtcctataaaagctagtagtaacatgtatatttttggtgtttaattcttcctttgtttttcctatttggtttaaaagaaaatgcccattgactaatgaatgaataaacaacatgtagtgtatttctacaatggaatatgatttagccataaaaggaatgaaatactgata

SEQ ID NO: 782977 - DNA, 578 bp, Homo sapiens
ggaacttttcaggttcaatggatcctcaataagattgcagcccagttttcttcagaaaccatagagttcagaaggcattggaatgttgacaaatttagaggtcagaaaaaaaaagactgtcatgcaggaattgtgtgtctggaaaaactctccttcagaaataatggattttatatatatataaatatatatatatacacacatatatatacatatatatacatatatatgactatacatagtacyacatatatataactatatatagtactactatgaaattatatatatagtactatatatagtagtcatactataaaagctagtagtaatatgtatatttttggtgtttatatgtgtgtgtgtgtgtgtgtgtgtgtgcatatatatatagtactatatatagtagtcctataaaagctagtagtaacatgtatatttttggtgtttaattcttcctttgtttttcctatttggtttaaaagaaaatgcccattgactaatgaatgaataaacaacatgtagtgtatttctacaatggaatatgatttagccataaaaggaatgaaatactgata

SEQ ID NO: 782978 - DNA, 441 bp, Homo sapiens
ggggagagaaaaacgagaagggccctgttagaagttgtgtgtgcatgtgtgtgtgtgtgtgtagatcaggagggggtttctagggacctggggaaaggagagctaagggcaggtgctaaggggcccagccctgttaattccaaggtcyggaattaattccaggatactgcacttcctacagtaccactttatggccatatccaagtccagccctgagcagcctatggtcacagaaaatcgtgagaataatcagagaaaaatgacacgttacatacatgagaacaattatgagaatgaccagtccatgtgttcataatttgtcatcagaaactatggtggtcagaagacaatgaaatggcatttttttgagtgctgtaagaaaacaacctaactcagaattgcacatccagtaaaaatattttcagggaagaaaaatgaaaa

SEQ ID NO: 782979 - DNA, 612 bp, Homo sapiens
accaacatactataaggatcaaatgcaattatttatttaaattccttctgtaaacagaaaagcacaatgccaggtaagttctcatgatgattgttaatatcatcatcattatcattcgaccacttatgaacggtgtggccttatgtaggtaactgttaactggtaaaatgatgatggtaatactgtctcgttgtgaaggtgagcccarcacagtagttgacactgaataaatgctcaatacagagctgccactgctattgaccttggtctgttacatggttcttgttcatatttccctccgggacaagttgttactccctggtaggtaggagagctcctaactaggcttcatcatcccccctctctcggtcacaccaaaactttggccaaagcaaccaattagaatgcccattaaagatgtcttgatcacattgggttccagcagtaagtcaaagaaattccaaatatcagtgtcccttgttctctcatataactttaagccttttagtttaaatgttgcagctctgattttccagtaatgtgaataaagtgaacaatgtgtataaatcggtgatcaatttttctaaacatccagtgactcactcatagcca

SEQ ID NO: 782980 - DNA, 612 bp, Homo sapiens
accaacatactataaggatcaaatgcaattatttatttaaattccttctgtaaacagaaaagcacaatgccaggtaagttctcatgatgattgttaatatcatcatcattatcattcgaccacttatgaacggtgtggccttatgtaggtaactgttaactggtaaaatgatgatggtaatactgtctcgttgtgaaggtgagcccagcacagtagttgacactgaataaatgctcaatacagagctgccactgctattgaccttggtctgttacatggttcttgttcatatttccctccgggacaagttgttactccctggtaggtaggagagctcctaactaggcttyatcatcccccctctctcggtcacaccaaaactttggccaaagcaaccaattagaatgcccattaaagatgtcttgatcacattgggttccagcagtaagtcaaagaaattccaaatatcagtgtcccttgttctctcatataactttaagccttttagtttaaatgttgcagctctgattttccagtaatgtgaataaagtgaacaatgtgtataaatcggtgatcaatttttctaaacatccagtgactcactcatagcca

SEQ ID NO: 782981 - DNA, 612 bp, Homo sapiens
accaacatactataaggatcaaatgcaattatttatttaaattccttctgtaaacagaaaagcacaatgccaggtaagttctcatgatgattgttaatatcatcatcattatcattcgaccacttatgaacggtgtggccttatgtaggtaactgttaactggtaaaatgatgatggtaatactgtctcgttgtgaaggtgagcccagcacagtagttgacactgaataaatgctcaatacagagctgccactgctattgaccttggtctgttacatggttcttgttcatatttccctccgggacaagttgttactccctggtaggtaggagagctcctaactaggcttcatcatcccccctctctcggkcacaccaaaactttggccaaagcaaccaattagaatgcccattaaagatgtcttgatcacattgggttccagcagtaagtcaaagaaattccaaatatcagtgtcccttgttctctcatataactttaagccttttagtttaaatgttgcagctctgattttccagtaatgtgaataaagtgaacaatgtgtataaatcggtgatcaatttttctaaacatccagtgactcactcatagcca

SEQ ID NO: 782982 - DNA, 659 bp, Homo sapiens
taaccattgtctgagcttgagaatgtatctactgcaaatttatgtgggaatggagatctcattcttgttttaaccattgacagattagaaagtgtataaagcagcttgacattaattgcagttcaaacattagttgtcaaagtaattttactatagttaagcttcacatatataagtgacatttgccttatgattttaggttgaattcattaataaacattatttagtctgtagcaaaggctaatttccaaagctattcagtgtttgataataatggtttaaaccagttcttctctttcagaaaaaattcagtgtyatccctcagctcaaaatttttattgcaataaaactttaccactgctaaaccataaaactgccatgtttaatgtttagcttctatctctgacaaaaattcatggaaccgacagtaaaatctacaatcgtaaatgaagttcaccactggtacgactggtttaataatacacaacagattaatgtatttttcacaagatacctgtaacagatactacaacaaataaacataggcttaaaaatttttacatctttacaagcattgcaaatttgtctaagtctttttctgctccagttatatttttactaccctcaattgtaacacatcatagcagattctacttcat

SEQ ID NO: 782983 - DNA, 639 bp, Homo sapiens
cttccgatcctaaaacctaatgcttactgagcgcttatgacctcagagcttctgtctttagtactccacgagcactgtctcctccaatccacacagcaatgctgtaagttgtgtattattatcatcatcctcatttcgtagttgaggaaactgagacacagaaagtttcatgaacatgcccatggccacacggttgggaacaagtgaagccagggtttgtttgtttgtttgtttgtttgtttgttttgtagagatggagtcgctctgtcacccaggctggaatgcagtggcgtgatctcggctcactgcaacctccacctcccgggttcaagcaattctcctgcctcagcctcctgagtacctgggactataggtgccagccgccactcccagctaatttcttttgtattttaatagaaacggggtttcgccgtgttgcccaggctggtctcaaactcctgagctcaggcaatccaccygcctcggcctcccaaagtgctaggattataggcatgagccaccatgcccggctgaagccaggatttgaggtaggtaacttaggacttaggactcacactctcggccaccatgtgtaaatcttttgccttgattagctttggaattcacacttcttcagaa

SEQ ID NO: 782984 - DNA, 592 bp, Homo sapiens
ttccatttcctgtcctacagtctcttccccctacttcttgagaaaaggcagaccatgatttactggccctcttggccctcaaaaaacatctgatgcggggaagtggagctcaaacatggccaaggacagcatctctggctctattatctgggtgaccacaaaagccacttaggggcagatgacactccaaccttcaataagaagtcctggggccacctcctccccagccaccagcctggccctgagacaacttatgcccacagttaacgactccatttgcacttagtgcctttcaggcctgggtgcacaccccagagaatggtaacctaggcatcaccgtatacgccatacacatagccagaaaggacacagataggcttcccattttgctcatagcatcacattttttcattgatatttatgttttaactsttctatatttttagatcctctgcatcaaataagtaactgccgttaatgaactagtctcactttctatactgtcttgattattgatgtgatggttaatcccgaatgtcaacttgattggaatgaaggatacaaaatattaatcttgggtgtgtctgggtgg

SEQ ID NO: 782985 - DNA, 538 bp, Homo sapiens
tcaacagaaactgattccaagtgagccgaaatgttggatttaacagacttcaaacatttatcataaatatttcaaaaacgtctgaaaaacatgcccaaagaattgaaggaaaatatggtatcaataagtgaacagatayggcaatctcaagggagaaaaatgaaaccagaaaaactaaaagcctagatctgaacaaaacatttactaaaataaatgcattagactggctaagcaacggattgatgcttggttctgccatctgcaatgaacctgaatacagaataatctgaagaacataaagagaaagagatgaatgaaaaataagtagaattcccaaaaatgtgacaacaggaagcagtaccttaattggactctagagagaggaaaggaggaaaagacatctgaagacacaacaactgaaatatctcccaaaagctcaataaacctcaaacagaataacacaaacaaaacttcttctagacacaccttagtcaaatggtagaaagccaaggataaacaaaatcttgaaagcagccag

SEQ ID NO: 782986 - DNA, 584 bp, Homo sapiens
aataaatcacctttaagaaagaaaaaaatgacatattgtggtcagtgctaggaatatggaacttcatctgtttccactgattgcattgtttaagctgtctgtaagaaatctctgcccccaggaaatcctcaaagcatagaggaaattgtactagaaaaatccattacattgacccctgctggggggttgactcamgtggcaaaaaatgatggtaaaatattaagtgtcttaatattatgctccatacagtcactgcctcttattagataacaaggcaaattttcaaatacatcgctctgaatttctagaagcctgtttaggatggacacaaggttgaagacaaacccagtgtgtgcaatcaaggaggatggaaacataagaaggaaatgaatgaatgacctggactgagagctctttgtagtcaggaaagagaagcattacgagagttgactacatgctagctactgtgtcaaactctttgcattcatttcatagaatcttcactttaaccagggcgccaaggcaaggagaggctaaacaacttgcctgaggtcacatagctggtaagaaatagagttgcccaa

SEQ ID NO: 782987 - DNA, 616 bp, Homo sapiens
ataacatccaaaaaaattaaatacttagggataaatatggcaaaacatggaaaatatctatctgtacactgaaagctacaaaacagtgtttagagaaattaaagaagacttaactatatagagtccaaagactcaayagtgttaagatgtatactctccacaaattgatctatagattcactgcaattccaaggaaaattaccttcaatttttttttggataaattgacaactgattgtaagattaatatgtaaatataaagaaccacgaataggccggttgtggtggctcacacctgtaatcccaacactttgggaggccgagatgggcagatcacgaggtcaggagatcgagaccatcctggctaacacggtgaaaccacgtctcttctaaaaaatcgacaaaaaaaattagccgggcgtggtggcggccacctgtagtcccagctactcgggaggctgaggcaggagaatggcgtgaacacgggaagcagagcttgcagtgagctgagatcccgccactgcactccagcctgggtgacagagagagactctgtctcaaaaaaaaaaaaaaaaaagaaccacgaatatccaaaacatctttaataaagaataac

SEQ ID NO: 782988 - DNA, 544 bp, Homo sapiens
atgatgctggcatttgctcctgggggagcctcaggaagcttccaatcatggcagaaggtgagtggagccagcatatcacatggcaagcgcaggggcaggaaagctgttttaaataaccagatcttgcaygaactcatagaatgagaactcactcattaccatgaggacagcaccaagcaattcatgagggatccactcccatgattgaaacacctcccactaggcccacctccaacactggtggccacatttcatcgtgagatttggagggaacagaatatccaaaccatataaatggtgggtacttgtcattatacatttgtctgaacccacagaatgtacagcaccaagagcaaaccctaatgtaaactatggcatctggctgataagcatgtgtcaatgtagattcatatatgtaccattttggtggtatattgatagtggtggaggctgggcatgtgggggcagagagtatataggaaatctctatactgtctactcaagtttgttgttaaatttaaaccactctaaaatataaaatata

SEQ ID NO: 782989 - DNA, 544 bp, Homo sapiens
atgatgctggcatttgctcctgggggagcctcaggaagcttccaatcatggcagaaggtgagtggagccagcatatcacatggcaagcgcaggggcaggaaagctgttttaaataaccagatcttgcacgaactcatagaatgagaactcactcattaccatgaggacagcaccaagcaattcatgagggatccactcccatgattgaaacacctcccactaggcccacctccaacactggtggccacatttcatcgtgagatttggagggaacagaatatccamaccatataaatggtgggtacttgtcattatacatttgtctgaacccacagaatgtacagcaccaagagcaaaccctaatgtaaactatggcatctggctgataagcatgtgtcaatgtagattcatatatgtaccattttggtggtatattgatagtggtggaggctgggcatgtgggggcagagagtatataggaaatctctatactgtctactcaagtttgttgttaaatttaaaccactctaaaatataaaatata

SEQ ID NO: 782990 - DNA, 571 bp, Homo sapiens
gctccttcaataactgatggataaagacctgctaactgcaactttgtttaagcaacattctagaagaagacacccacacatcagggtcccagtagcaagactaaagttgatctatgtggcaaataaaggctgaaatctgaattttcaggattgagaatgtatgtctctatgaatagagcttatgtctgatagtgttgtggtaaagaaaaagtgggactcttcttaatctgaaacaatgaaagttgaaaggagggtatctggtgaaattgtataaaatcatgcgaaacagagttggcctgtctttccatgttgcacaacagcagggggcaccatgcatcattgacattgtgatcagcaccccctggagttctgcagtgtggcagccctggagcaaatctcacaatcccagaactatgggacaayggaggaagctgggaagatatacatttaagataaataaaataatttctacctaatatgactgatgagaacattttagactttaatttctgaaaaaaaatatgcaggctaaatatataaatggcaacaaaatgaataatgatagtattgg

SEQ ID NO: 782991 - DNA, 550 bp, Homo sapiens
ctgggtgaagccagctgggctcctgagtctggtggggacgtggagaacctttacctctagctcagggatcgtaaatacaacaatcagcactctgtgtctagctcaaggtttgtaaacacaccaatcagcaccctgtgtctagctcagggtttgtgaatgcaccaatccacactctgtatctactctgtactactctggtggggccttggagaacctttatgtctagctcagggattgtaaatacaccaatcggcactctgtatctagctcaaggtttgtaaacacaccaatcagcaccctgtgtctagctcagsgtttgtgaatgcaccaatccacactctgcatctactctgtactactctggtggggccttggagaacctttgtgtggacactgtatctagctaatctggtggggacgtggagaacctttgtgtctagctcagggattgtacactcaccagtcagcgccctcaaaacataccactcggctctaccagtaagcaagatgtgggtggggccagataagagaataaaagcaggctgcgcga

SEQ ID NO: 782992 - DNA, 616 bp, Homo sapiens
tagtttgctgagaatgatggtttccagcttcatccatgtcccggcaaaggacatgaactcattcttttctatggctacatggtgtatatgtaccacattttctttatccagtctgtcactgatgggcatttgggttggttccaagtcttagctgttgtaaatggtgctgcaataaacatatgtgtgcatgtgtctttatagtagaattatttataatcccttgagtatatacccagtaatgtgattgctgggttaaatagtatttctggctctagatctttgagaaatcgccacactgtcttccacaatggctgaactaatttacatttccactaacagtgtaaaagtgttcctatttctccccagcattgccarcatctgttgtttcctgactttttttttcccaatgaaatgatttgaatggacacttaaaactgttcatgagtatacaagatgataaagaaaacatttattaaatgaataaaagctaaaaagtgaaatgttacaagcaaatatcaaatatcccgaatctctagaattttattgttgaatatgccttagttattacaagtggtctttattcttggtgacttagggattcccaagaaatgtgcaa

SEQ ID NO: 782993 - DNA, 565 bp, Homo sapiens
cccacctatccccgacaggtcccagtgtgtgtggttcccctccctgtgtccatgtgttttcattgttcagctcccacttataagtgagaacatgcagtgtttggtcttctgttcgtgtgttagtttgctgagaatgatggcttccagctccatccatgtctctgcaaaggatgtgatcttgttccttttcatggctgtgtagtaytcagtggtgtatatgtaccacattttctttatccagtctatcattgataggcattggggttgattccatgcctttgctattgtgaatagtgctgcaaagtacatatgtgtgcatgtatctttataataaaatgatttatattcctttgggtataaacccagtaatgggattgctgggtcaaatggtatttctggttctaggtctttgaggaattgccacactgtcttacacaatggttgaactcaggcatcctataaaatgggagaaaatttttgcaatctatccatctgacaaaggtctaatatccagaatctataaggagcatcactgattattagagaaatgcaaatcaaaaccaga

SEQ ID NO: 782994 - DNA, 608 bp, Homo sapiens
aagtattagcaaggatgtggagaagggaatccttatatactaatggtagtaatgtaaattaatacagccattattgaaatcagcatggaggttcctcaaaaaaagatagaattaccatatgatccagcaactatatttctgagtacatagccaaagagattgaaattaatatgttaaaaatatattggtagattttcctctaatttggtcttaacgtctctctttgaagaggagccagaaactctagccctgctctgatgggctccagtggaggtggttgtggttgtggatgttttcagtgtytttttcgtggaatacttctatatcctgatggagagctaatgcctaattgtcctatttatgaccaggtgtccctctcactggaaactcattttcactggcagacacccttgtggctcttgtctgactagtgtgtccagttcattcctaccaagataaccactctttaagagagccttgtccagaaaagaagttaatttcacgtatgtcagtcacgcgagacgcaagtaaaaaaaaacacgtaatagaagtagttttattacttaaagatccagagagaagaaggaaactttcctcacaggcctaac

SEQ ID NO: 782995 - DNA, 595 bp, Homo sapiens
tgctgagcgagaccacttggctccctggcttcagcctcctttccaggggagtaaatggttctgtctcgctggggttccaggcatcactagggtaggaaaaatactccttcatctagctctgtgtctgcccaaatggccacccagttttgtgcttgaaacctaaggccctggtggtgtaggcacacaagggaatctcctgatctacagattgcaaaaaccatggraaaagtgtagtaacaagctaggcagcactgtccctcatggctcccctggctcggggaaagaggtcccctggcctcttgaacttcctgggtaagcaactccccacccttcttctgcttgccctccatgggtttgacctgctgcctaaccagtcctaatgagaggaacggggtacctcagttggaaatgcagaaatcacctgccatctggattggtcttgctgggagctgcaaaccagaactgctcctatttggccgtcttcggcttcatccttttgtgtttttaagaacagtcttccctatgaattttaccaaaaagtgtactcagtacagtagtttactaactctacttttgtcatacactagaaacatct

SEQ ID NO: 782996 - DNA, 645 bp, Homo sapiens
cccaccctaataacctccttttaccttaattacctttttttaaaaaataatttttttttctatactgaatctcactctgttgcctaggctggagtgcaatggtgtgatctcagctcactgcaacctcctcctcccgggatcaagggattctcctgcctcagtctcccaagtagctgggattacaggtgcctgccaccatgctcggctaatttttgtatttttagtagagacggggatttcaccatgttgcccaggctggtcttgaactcctgacctcaggtgatccacctgccttggcctcccaaagttctgggattacaggcataagccaccacgcctggcccactttaattacctttttaaagactcaatctccaaatacagtcacattctgaactactgggggttaggayctcaagatagggattttggggaaacacaattcagcccataacatgtattcaggtcccctttctgcccagactttaatgcaaatatagattcaccagtctgtccaaaaaaaaggccactgagaaaggaggccacacttccaggaggaaattacatcggggaggaataaatacaagcctgtggaggtgtggttactagaaggggaagctgaaaatctgtttcttatctgcctac

SEQ ID NO: 782997 - DNA, 572 bp, Homo sapiens
atccacatccaacatcatactgaatatgcaaaagttggaagtattccccatgaaaacctacacaaggcaaggatgatcactctaaccacccgtgttcaacatagtactggaattcctagccagagcaatcaggcagaagaaagaaagaaaagttatccaaataacaagagaagaagtcaaactatctctatttggagatgtcatgatgctatatctataagaccccatagtcttttcgccaaagcttcttgttctgaaaaaataacttcagcaaagtttcaggagacaaattcgatgtagaaaaatcagtactatcccaacacaccaataacatccaaasagagccaaatcaaaaacgcaatcccattcataactgacatgaaaagaataaaatgctttggaatatagctaaccacagaggtgagagatctctacaatgagaattacaaaacactgctcaaagaaatcagagatgacacaaacaaatagaaaagcattccatgctcatgaataggaagaatcaatattgttaaaatggccattccaaagcaatgtacagattcagtgttact

SEQ ID NO: 782998 - DNA, 541 bp, Homo sapiens
ctgaagcactcagaaccttttctccattctattggatttgccttcaggccctcaatatttctcctttggacagtagcaacggatattccttcatttcattaccttcattgctatcaaccctccaggcaattgttttctgatcatttactcagttccttagcaagggctccttttacctatagaagtttctttaagaataaaacaaaacaaaatcataagtgaaggagaacatataaaattctaactgaggcagaagtgtggagcatgtaagtacttcctcacttctatgtcagccagtaaggaaagtcctgaaagacactttggaaaccactggtytaaagggaaaaacttaaattgcttaacatggtaaatcaaaaactggtttcagaagctggcttttccctccctttctattccaaccacatcacctataagtcttctaccttaaagctctgctccagtctcttcaacttaactgctactccccataacacactgggctttttctcatctatctgtactcttctatctgcttggaatg

SEQ ID NO: 782999 - DNA, 642 bp, Homo sapiens
gtgcttatagcccatggtggatccaatagctctctctagagcagcttttccaaaagtggactttgcacacaccagccccttccagatgcatcatctcaccccaagagataactcaataaacagttgagcatacactattttagatctccatggcccaacaaggtagccattagcatatcaaagactctgacaagtcctgcagcaaaacaccattgaacattgtttgaaacaaccaatcccaatcttgtttgaccacagagttccattatttctgctcaacagctgataacatctgaacacacgttgggagatgccaccctcatttcctgctttctaggaaatggcaaggggagtcagagctgtgaggaacaccctctcgcagggatgagtggctccacctctacagaaatcatctccagtcatgtgcaccatcgctaggccattcctcctgttctyaccttccttgtctgattcagcccccacagcggcctggagaggtcactagcatcaatgtctccatcatacagatgaggaaattgaggttcacaaaggttaagtgggcacatagccagtaagtggcagatccggtagacaaacccacagcttctgattctaaaccccacattcgttcttctgtatgtt

SEQ ID NO: 783000 - DNA, 567 bp, Homo sapiens
ttctagagtgagtgtatttttttttcaaattaaaatcagcaatgactgagggtacctgttcttcagcctcctgttgagtgtttgaaattttcaggcattttgattttagccactctaaaagatgtgtagtggtatcctgttttactttgtaattccctagtgacataagatgctaatcatctttttacatkattatttgcaatgtgtatatattctttggtgtagtgtgtatctactcagatcttttgtccatttttattggattgctttcttgttattgagttgagggttctgaatatatttttgatacacatcttcagtcagattttttttgcaaaacttttatcctcgtttctcgtttttcctttttgttctcttaacagaattttttcatttttatgaagccaaacttatcaattttttctttcacagatgttcctttttgggttgtatctaagaagttttctcgaaccatagttacttaggttttcccctgtggtatcttctatgtgtttcataggttttttaaaattttattttcacatttaggtctgtgattgaatttat

SEQ ID NO: 783001 - DNA, 567 bp, Homo sapiens
ttctagagtgagtgtatttttttttcaaattaaaatcagcaatgactgagggtacctgttcttcagcctcctgttgagtgtttgaaattttcaggcattttgattttagccactctaaaagatgtgtagtggtatcctgttttactttgtaattccctagtgacataagatgctaatcatctttttacatgattatttgcaatgtgtatatattctttggtgtagtgtgtatctactcagatcttttgtccatttttattggattgctttcttgttattgagttgagggttctgaatatatttttgatacacatcttcagtcagattttttttgcaaaacttttakcctcgtttctcgtttttcctttttgttctcttaacagaattttttcatttttatgaagccaaacttatcaattttttctttcacagatgttcctttttgggttgtatctaagaagttttctcgaaccatagttacttaggttttcccctgtggtatcttctatgtgtttcataggttttttaaaattttattttcacatttaggtctgtgattgaatttat

SEQ ID NO: 783002 - DNA, 672 bp, Homo sapiens
ccatatgtccccaggccttaccaattgtgaagctggcaagttgaaaggttctcaaaaaaccaaaaagtcactttgtaaccttaaaatctttagcaagactagtatcagtcctgcataatttagttcacctatttacattttgatgatatctgcattctaccaaaatctttaaggctgtttttatttctcaaagattaaagtcacattaattaaaaggtaccacagcttttatcttccctttacaaaatatttgatccaagtgcttgtcttcctttgtgccaattaaaactctttttttatagacatcacacacacaacacaaaatataactacacaggcagaagaaaatccagcagacataagatctttaatttgccattctcctacttggattattggcctctgggtggagccctttaagagacagagctaggagaacatgcagcttctaaagcctamtaaacagccataggtaggaggcaaaaacaggtttttgagagggattcatccacttttaattcctggggtttaatgagggaaacagagttctctcccgtctcatgcatgccttaaaagtggcaaggcaaaatagagaaaaataattcagttgactaaaaaaaaacaaaacactttttttccagcaaaacaggatccaagaaaagaaaaacataa

SEQ ID NO: 783003 - DNA, 537 bp, Homo sapiens
ttcaacaaaggaaatagatgacttacaaaatgaaaccccatggctggtctcaaaaatctcattgggaatggattcaagcaaacagtagaacaaatcaatataaaatgctgtagcccaataattctgtatccatctagaatgatgtttatttcaaaggtaaaggaaacattctcaaatgtgtaacaactcaarggttttagcatctatacatgtttcttgaaaaatcttgaaaaaagtggtctctcttaatatccagttttgctttacaagagaaacaacctttgagctactttcctggagacttaatttgtagtgcaccagaaaaattgtccttgacaaatagatttttgtagcaattctagtattagagattgctttaagttaaaatgaaattcttttaaaatgcgaatacttatgggaaagctaacatattcaagcatttcagtcattgaccacaccttaatgaatacatttaattgaccagttttttcctcctaacagctaagctgaggtcaggtgaacctgctgcttaagaaa

SEQ ID NO: 783004 - DNA, 606 bp, Homo sapiens
ttgagtattaagtatcatgttgttgcctatagggttttggtaaatactctttatcaggttgaggaagttcccctctattcctagtttgatgaggactttttatcatgaaagggtattggattttgataaaagtttttttccgaatctattgmaatgatcatgtagtttttgctttatattctattgatatgatgcattacattaattgattttctgaagttgacctatccttgcaaaactggaatacattccacttggttatggtgtgtcatcctttttatatgatgcagcattcagtttgctagtattttgttgaaggaattttgcatctaagttcatgggaaatattgctctgtagttttcttctcctgtgccatctgtgcggttttggtatcagggtaacactggtcttgtagaaagagttgagaagtgttcctgtctcatctgttttctcgaagagactttgcacaattggtgtcaatgtttatttaaatgtttagtagaattcttcagtgaaactatctgggccttgaaatttctttttggaggatcttctaactatgagtttaaattttttaaaggtataggactattcagatcgtctat

SEQ ID NO: 783005 - DNA, 484 bp, Homo sapiens
agtcccaatgtcttgtgagtattcaaatcaacatagtcttcaaggaacgaaggtatgctgaaggctacccatattctcttggccataataatttttctttgtttagtcattcttatttcaaagtctaccctttccaggatttttttccaraatgaattcttatcattctcaggccatctgcagaatccataattatctctctttttatgtatctggtagtcatttatgaagcatgtattacatataagacatgttttccctcaaagattctttacctcctcaaattcagtaaccttcccctctattctactttggctgatgactatctgtaaagtctttacatttcaatatctggcaggtatctagggacccaggtaccccactgtgatgatgagcaccccactgtgtgatgaacggcagaagtggctgtgggggtaaggggagtagaagcaagaggaaatgaacttcccattttaagtgtaca

SEQ ID NO: 783006 - DNA, 394 bp, Homo sapiens
ctacacatataaaaccttaaggactctgatgaaagtatcctagacctgataaataacttcattaaagtttcaggatacaaaagtcaacatgcaaaaatcagtagcatttctacacaccaataatgttcaacctgagagccaactcaagartgcaatttcatttacaatagacacacacaaaaatcttaggaattcacctaaccaagaaggtgaactagctctacgaggagaactacaaaacactgccaaatgaaatcatacatggcagaaacaagtggaaaaacattccatgctcatggattggaagaatcactataatttaaatgaccatatggcctgaagcactcaacgattaaatactattcctatcaaattaccaatgccattttttaca

SEQ ID NO: 783007 - DNA, 622 bp, Homo sapiens
tcacttctcagaagaagatatacaaacatccaataaacatatgaagaaatgcttaatatcactaatcatcagagagatgcaaaacaaaaccacaatgagatatgatctcagtcctgtcagaacagttatcatttaaaagtcaaaatataactaatgttgttgaggctgcagagaaaaggggatgtttacatactgtaagaatgtaagttagtgcagccactgtggaaagcagtttggcgatttctcaaagaactaaaaatagaactaccattcaactaggcaatcccacaagtgggtatatacccaaaggaaaataaatgattctaccagaaggacacatgcactcttatgttcattgcagcrctatacacaatagcaaagacatggaatcaacccaggtgcccatcaacagtggattggataaataaaatgtggtacatatcacaaaatactacacagccataaacaagaatgaaatcatatccctgcagcagcatggctgtagctggagtccattatcccaagcaagttaacatagaaaccaaaaaccaaatattgcatgttctcacttataagtgggagctaaacattagttgcacacggacataaacataagaacatg

SEQ ID NO: 783008 - DNA, 561 bp, Homo sapiens
gcatccctgacctctgtccactagatgacagaaatgaatgaatctgactgtatttcaaatgagtaatagaatcatattaaagaataagaactaacccaagaaacttttcaacccagtattttgactatgtgccctcaggcaaagacaaaaacaatccttaggaaatactgaatgtgttagggagtttgttttacagtggtatgaattagtacttctgaaaccatattctgtatattagaggactgagataatatacagagaataacagaaagtcatgttcctcactgttggagaagggaatgacacatacagaaagaagaagactagaaagaattctgctgtggtattaaattggaattgggggyatctataaggattcacaatctttaatactttttaaaaatataatacagaaatagctacagatatatgtatataaatggtgtatacatacatgtatatataaacatgtatctataggtatacatatgtatatatctgtatacatctatatacacacaaatacatgtatacatgtataaatatgtatttttccctagc

SEQ ID NO: 783009 - DNA, 613 bp, Homo sapiens
aaaatcaaatctcgaagcactcatataaatagatcagaagaataatagcaaactaaatccaaaataataaaagcaaaaaccatgcaatagagaaaacctaactaagccaaaaattgcttctttgaaaagtttaatgataatgaaaaactcccgggaagactgatcaaagaaaaaaaaggtacatgatataaattacaaataccaggaataaaaaaggagtcattatagatattttatatatcaaaagaataaaaatatatattattactgactttatgctagtcaattaaatatgtaaatgaaatgaaaaatttccttgaagaaaatacagcttattaacaatgacaagaagcataaaatcttaataatagacattaatcaaaagaaatatgtaaytaaaaaacattcaacaaagttcttaggtggctttagcaatgaattctacgaactgttcagtaagaaataataccaaatacatataaacttttctagagaatagaagaaatttttttaattctatttttgagtgcagcataacttgatacttagatactaaactttcagagacattacaagaaaggaaaattacaaatgcaaaaatcctaaacaaaat

SEQ ID NO: 783010 - DNA, 481 bp, Homo sapiens
gtaattaggataaatccaaatagaagtgaaataaaagatatataatcagattagagtacttgccagaaaagcaatgatttttttaaaaagctatgcagcatggggaaaattttgctatctgttattataaatattatatttatatagtttgtttagttgcagactgaatgagaggtaagattttgttgttacatttttcttttaaaccatctctagacctctttgcttctaggtagaaagtcttgttttgtagtatggttcgtaaatgttgtccggaaggtgtcacaggttaactcttattaatgctttttttttttttttgaggaaaggagtggrcaggcaccaattctgtctataaactccttttatttcatactgagaataggcgagatttgattgtttcacattgttatcttgttttgattgatagtcacatccttcccatttgggcattagtgatatggaaaagttagactctttt

SEQ ID NO: 783011 - DNA, 652 bp, Homo sapiens
acccccagtatctgcggtgacacctgtgaaggcccagctgtttcctcggtagttcccatacttgggaaagaccacagggttgtttcaggtagccttatggagagggctggcattttggtgaattcaccattggtctagtttctggatctgtaatactgaggaccagcttcttatgaggataaatctcagtggaatttatttatgttatccaaatgcacaggaggattacttataatttagaattcagttattaatttttaaagcctcaaattctttgtggaatagttcagaatataaataatggaaggctgggtggcaaygtggagagaacatatggtctagatttagacaaaagagtttctgagaacttcatttgggtagataaccttgagcaacttcttaacagctctaacctggaattttccatgagaaatgaagataatattatgtcatcaggttagtttgactctagaatactcagctcaagggcaagggatactggctggggaaaacatcacaggctgctaaggctgactccagcaattatagctgcgtgccccaggaagcagggccccagagaagtagctgtctaggtactcatcaggctagggcattaccaggtgtctcaatttggtggttggatcattgcagt

SEQ ID NO: 783012 - DNA, 652 bp, Homo sapiens
acccccagtatctgcggtgacacctgtgaaggcccagctgtttcctcggtagttcccatacttgggaaagaccacagggttgtttcaggtagccttatggagagggctggcattttggtgaattcaccattggtctagtttctggatctgtaatactgaggaccagcttcttatgaggataaatctcagtggaatttatttatgttatccaaatgcacaggaggattacttataatttagaattcagttattaatttttaaagcctcaaattctttgtggaatagttcagaatataaataatggaaggctgggtggcaatktggagagaacatatggtctagatttagacaaaagagtttctgagaacttcatttgggtagataaccttgagcaacttcttaacagctctaacctggaattttccatgagaaatgaagataatattatgtcatcaggttagtttgactctagaatactcagctcaagggcaagggatactggctggggaaaacatcacaggctgctaaggctgactccagcaattatagctgcgtgccccaggaagcagggccccagagaagtagctgtctaggtactcatcaggctagggcattaccaggtgtctcaatttggtggttggatcattgcagt

SEQ ID NO: 783013 - DNA, 593 bp, Homo sapiens
ccaatatctcattttccccaccctcctctgcttgctttcaacaaagctttattccacaaagaattgtgtccttctgcattcttttgtattccttagaacacatcagaggtgggaggagtaaaaggggtgtgtgtgcgttttcgtgtgtgtgtgatagtgaatgtataaatgaaaagatgaagatctagttgttctaccagataactgaaagcatatggataggctaagcacttcctctgaaaaaaaaaattgcacttacagtgtattctcattatttacaagaatttaaatgttttttccttgcagagtttcacatattttacactagaatcatatatactaaatttcattatcatcattatcaaaatggtacagtttaaactcttggtgtytggtagaattgcgtttatctaacataaatgctggggagcttggctattgttattttaacaggcaaatgctgagaaacatttcacttatattttatttatggttatagaaaagtaaaagcagagattcattttataaagaagtttgtgctttttttgctgaaaaattgaaaagctaaaagcacacatacaatatacattatt

SEQ ID NO: 783014 - DNA, 621 bp, Homo sapiens
aaataaaggttaggtatcttgtggaaaggtactgtaagacaacatacacatgctgtttctcatcagattttcactcactcatttgtggaattcattgatgattattgcctgaatcaattattagtgtaattgcaaaatgtagttttaaaactccatcattctttctgtctttattacctggaatttaattgtgaattacatcttttccttctttttaattcatgtattaatttatatcagtatggcctcaaagattgtcttttattcaatgagtcacaatctatgactatcaatattattttggtgctcaatttgtcctagatttagccattagaaggccttttagactggttcctttgtcattttggcaggttttcgtaattttgggggcataktcttactttctgggacataagatgtaccaaatcaatcttatactttccctgctcccagcctatcatcagccatttctccaaagagccctggttcctttagtggaggatgatattcagtaaccaatatctaggccctaggtatgttcattacgagggattgtcattgcttctaggccctctcagtggacagagcttagagataaatgcttgcatacacatatgtaca

SEQ ID NO: 783015 - DNA, 498 bp, Homo sapiens
gtgagaagtattgactttggaacacatactaaagcatttctgatttgaatatttgtgtatttttaaaattattaaaccttccttttttacggaaaaaatgaagatgcctgtcctaagtgtctcacaaggcattgcagaatacactgaaaacattatttgtaaaataatytgaaatattatacagtgtgatgatgcttttctgctattttactaagaagggaagggaatgccactaggcattataagtctccacaagagtacagtcacacacatgtgcacatgcccccccccccaagtcacgtgtgcacacacatgcctaacatctactgttctaagtgcctgggctgccacacccatcttcctgttcttgcctaacaccaacagcctttctgtaactagggaaacaattttggttcttaatacagagagaatttaagtagaagtcctggcaaaggataaagaacaggaacgtatctccagagccccctttccttggca

SEQ ID NO: 783016 - DNA, 635 bp, Homo sapiens
ctaggttaagagagaaaatggaatggatagactaaaggttcttccaggtggagacactatctggggggtaattttctcttttctctttcttaccccaaatattttccccatagcgaaggtgagaaggctgagtaccccatgcagtctttmcacatgactctacccaccactgggaaaaagagccctgctatgagctgccaactgtgtgcctccacatctccttacaagagcattcaccaccacattctgtaggcagttggctcaggagtgttaggcacagagacccaggaaataaatggcttccctaaagcaatgaagcagttcagccctaccagagaaccccagcactgggggagggagttcaagagtggacagtgtcccagagtttcccatggagccctgcacgcattcccatgcacggcacctgaccatgtgtggactaggggagcctctgcaatggctgggaactaacgctttcccagcacctaccatacagacaatcaggagtcaaatgttcacaccatcctagggaagctgcccggggaactcccagacttttaaaataggggtctaggcacaatgtgatactcacaaggcccacaaagagagtgaagagcagagagcaggcgttgccg

SEQ ID NO: 783017 - DNA, 423 bp, Homo sapiens
tgcagcgctacgttttccattctatgagataactccatctgtgcttcttttctagggctgtggcagcaaagtaccacaaaccgggtggcttaaaatgacagaaatgtattgtctcatagttgcgaaggctggaggtccaaactcaagttgtcagcagggcggtgcttcctctgcaacctgtggaggggatgctcactcacctctcccagcccctagttgctgccaatccttggcatttcctggcttgcggctgcagcacctcagtccctgcctctactgctycattgcctctctttcccccatgtctatctgtgtccaaatttcccttcctcataaggacatttttcactggattagggcccaaacctaatccagtgtgacctcatcttgacttgactacatctctaaagattttatttccaa

SEQ ID NO: 783018 - DNA, 653 bp, Homo sapiens
gttttaaaacagattattattaacatcagactactgagttcacttataggaatatagagaaataacactacacatttatatataatctgtctactttcaaagaaaggatttgaagtaggctcttcagagtaaatgagctaaatacaatcagctttttctgtctggaaattcaagaatctaacgagtgcacccaaagaatggcaaacatagcattttcttcaggactgtcacagtgccctgcttccaaaggatacgacacgcaaagagttcacagctgtgctgtcatcgcaagtttaaatttaacactggtgatatcataaccatggaatataattttttaaaaatatcacagctgaatttttagattacktagtatcattaagaagtgagctccaccaggcttgatagagactactgacatttaagagcatacaatgaaggaaatttatttaaaaatcagctgtgtcacatactgtgttaagactttcatacctatgatctcacttagcctcacaacaaccccgtgagctaagtagcattattcttattctgtacactagcaacttaagatttgaagaggttaaataccttctccaggatcacacagatggtaaatgactgaacaaggagactcacccaagtcttcctgattc

SEQ ID NO: 783019 - DNA, 641 bp, Homo sapiens
gggtaaatacagccattccaaatgggggaaattggccaaaacaaaggggttacagggcctatgcaagtctgaaatccagcggggcagtcaaattttaaagctccaaaatgatttcctttgactccaggtctcacatccaggtcatgctgatgcaagaggtgggttcccatggtcttgggcagctctgcctctgtggctttgcagggtaccgcctccctcatagctgctttcaggggctggcattgagtgcttgtggcttttccaggtgcatggtgcaagctgtcagtggatctaccattctggggtctggaggatggtggccttcttctcacagctccactgggtggtactccagtagggactgtgcttgggggttccaaccccacatttcccttctgtgctgccctagcagaggttctccatgaggaacctgctcctgcagcaagcttctgcctggtcatccaggtgtttccatacatcttctgaactctakgaaaaggttaccaaaccccagttcttgacttgtgtgtactcacaggctcaacaccacatggaagctgccatggtttggggcttgcaccctctgaagccacagccagagctctatgttggacccttcagccatagctggagcagcttag

SEQ ID NO: 783020 - DNA, 545 bp, Homo sapiens
tatgtaaacaacctaaatgcccaccaagagacaaattgatgaagtaattattgtatatacatacaatggaatattattccaccttaaaaaagagagaatcctgacatttgtgacaacatggacagtcctggagaacattatgctaaatgaaataagccagacacaggaagaaaaatactgcatgatctsacttatatgtggactcttaaatagtcaaacccataaaagcagaaagtagaatggcagttgccaggcacttaaggaagggggaaatggggaggtgatgttcaaaaggtgcgaagtttcagttatgcagaatgagtaagtttagagatctacacagcgtagtgcctatcgctaacaatactgtatcgtgtgcttaaaatttgctaagagggtagatcttatgctaagtgttcttaccaaaaaaagaagaaaaaatataataataaagagagtaaggaaactttgggaggtgatggatatgcttatggccttgatgatgatgatagtttcacaggtatatacttatcctcaaactcatt

SEQ ID NO: 783021 - DNA, 636 bp, Homo sapiens
cttgaagaaactcaagcttttaaaaagtctgagtttcagaagactcagacatatcagagaaaaaaaagaaaaaaagtgtgagccaaagattccatctttaaactttcaagaactcaagtaattttgtattcaaggactctttctgaggattctactaggggtcaagtttcatacaactaaaagatgattgcaaaattttagccaaaaaaacagatcttaaggattgaacatgttcaattatataaatctaagactaaaacaaatgtaagaataagtgctgacgaatgctctctggcaaagtagaaatacaattaaaaatgggagcaaagaagaaatgtagaagaataagctcaatgattacgcacaggtaaaaggtgaaagttaaagcatgtcgtttaaacaagcaaaccagcctggcacagcggatcacgcctgtaattccagcactttgggaatccgaggccagaggatcacttaagcytgagtccaggtgttcaagaccagcctgggcaatgtagcaagacctctatctcttaaaaaaaaaattaataaaaaaaaataaactaggaaaccaaatagtaaaaacctaggtaagaaaaatgagggctggctgggcgcagtggctcacgcctgtaa

SEQ ID NO: 783022 - DNA, 493 bp, Homo sapiens
tcttgtgggaagtctatgacttattatttctaggacctggtgggaatatagtaagtgctcaataaatatttgttgaaggaaaaaaaaaaggaaggctgcattaaatttgaagatatttcttagatgagctgtgaatgttacttgtcatcccaggtatttctttttttgtctaatacccctacataaatcaaacacccactatcccaaggaaagaacacttctgttgtagaaagggcagcagataatgagccctggcctcattcaccccctctctctctctacacacacacacacacacacayacacacacacactacacacacacaccttaagagtttgttatcaccaggcatggtggctcacgcctgtaaccccagcactttgggaggctgaggaggatggatcccccaaggtcaggagttcaagaccagcctgacaaacatgttgaaatgcagtctctactaaaaacaaaaaaaattagctgagcgtggtg

SEQ ID NO: 783023 - DNA, 480 bp, Homo sapiens
agggaagcaattaaaggatataaataaagtcaatttggctactatactgggaaaggactctaggagggctagactggaaggaatatcaatcaggaaactattgtgattgtctagttgagggatgaaggtcacttgtgccaaggtggtgacaccaagttgatgagacacattccattcaggttactttttgaaaggagcacccacaggcttgttgatcmatggcatctcatggaggcagtgagggatagagcagagtaaaggctcagtgatggtgtgaatggtgttaggggaacatgctgaggatgatattgagaattctgttttggatatattaaggttgatgtatctattcttactgatgtcagtgagaagaattagaatggctggtggaaatttggggatggctgaatttgttttaatatagagaagaattttctaatgatcactactattcaaaatgaaagggactgacgtaattat

SEQ ID NO: 783024 - DNA, 478 bp, Homo sapiens
cctgtagccccttttggccagtgtctcctattcagaatggctgtaattatccatttcctgtgcctccattgttatctaggtagtaactaatttgcttttgattttaatggctcataggcagagggacttgccttctctcagatgagactttggactctggacttttgagttaaygctgaaatgagttaagactggggggctgttgggaaggtatgattggttttgaaatgtgaggacatgagatttgggtggcgccaggggcagaatgatatggtttggctgtgtccctacccaaatctcatcttgaattcccacgtgttgtgagagggacctggtgggaggtaaatgaatcatgagggcaggtctttcctgtgctgttcttgtgatagtgagtaagtctcacaagatctgatggttattataaggggaagttttttggcacaagttctctttctgcctgctgccacccatgtaagat

SEQ ID NO: 783025 - DNA, 633 bp, Homo sapiens
aatgcagaaaatgtatttgatagaatctaacctccattcaggataaaaacaaccataaaaatgcagacattgaagaaacatatctcaaaataacaaaagccatatatgacaaacctacagcccgcatcatactgaatgggctgcagttcaatctgagcctgaatatccctccaccccagtgccatagatctcacagaattattgttagaattaaattatgcacaattatatattaaacatatcatatattattatatgcatatattatctaaattaattttcctaatattcacatcaatttgtattttaatacaacatataagaaaattggagcacctagggattaagtaacttgctcaaggtcatacagttagtaacagacaaagccaaaatttgaaacaagcagtttrcatccataactcatgctgttaatcataatacatatggcctctcaataaatgcagaaaacttttataaagttcagctccattcattgtttcaatatgacttgtattttaaataaactagaaatacaggagagtttatttactaactacacataggtaatttctaccaaaaaaaaagcatatgaaatggtgaaatagtagatggcttcctttaaaatcataagaa

SEQ ID NO: 783026 - DNA, 633 bp, Homo sapiens
aatgcagaaaatgtatttgatagaatctaacctccattcaggataaaaacaaccataaaaatgcagacattgaagaaacatatctcaaaataacaaaagccatatatgacaaacctacagcccgcatcatactgaatgggctgcagttcaatctgagcctgaatatccctccaccccagtgccatagatctcacagaattattgttagaattaaattatgcacaattatatattaaacatatcatatattattatatgcatatattatctaaattaattttcctaatattcacatcaatttgtattttaatacaacatataagaaaattggagcacctagggattaagtaacttgctcaaggtcatacagttagtaacagacaaagccaaaatttgaaacaagcagtttacatccataactcatgctgttaatcataatacatatggcctctcaataaatgcagaaaacttttataaagytcagctccattcattgtttcaatatgacttgtattttaaataaactagaaatacaggagagtttatttactaactacacataggtaatttctaccaaaaaaaaagcatatgaaatggtgaaatagtagatggcttcctttaaaatcataagaa

SEQ ID NO: 783027 - DNA, 434 bp, Homo sapiens
aaatcaggtgtttgacctcccatgaagggatttttgctgcttctaagccaaactctaactgcaggtgaaaaacaggcagtcctgcaggctgcagaggatttcggagatgagcagtatgtctcctataataggcaaaaagggaaaagagaaaatcgggaaggtgaagaaataggggaaacaccactgctgataggaagcgaagtagtacctcttgacaactctaattggaaccccccyccccggacttttctctggtatttttccttctttcatagtttcaaatgcttctatcttcttttacaatgttcttccaatctggaaaaagttaattttcgaaaccttaaaatgcttggtttagaggaaagggaacccagaagcctgacatgccagcaaaatggtaaaaatttcttaccagtcaggcttttgtcttctct

SEQ ID NO: 783028 - DNA, 599 bp, Homo sapiens
gctgtggcagcaggctagagggagttgtgggagcagagaaaggaacgcagtggagaggctggggttccaagcaaatgccacctgcttcacaggggggcagtcttgcaaggcaggtgcaaaatgacatttggatcctccttgtttttctgatcataggacattctgccatcacacayacacacgatatccccatttcttgcagtctgagggtgtcaacatataactccccttttccttacctgcattgcagaaccacttgaaaaatataacaatgaaacagattgaggtcgaaatattgccttcattattcataaggcaggtggagcatgtgactcagtgtgagggcaggtgggcttactaggtcactggctggggagagaatcacaagcctcccccaacagcttcatgtattgcttagagcagaaaaaaaatcacatgttcagtagagacaagaagcccatgagaaagactgagcacatggtgcacacatgtgaaatgttcagccgcgtctcacttggcttggctctgacaacatgtcagcaataaagtaattattttaaagataactgcttagttcattgttgttccctggaattttt

SEQ ID NO: 783029 - DNA, 585 bp, Homo sapiens
aaacagtgataattgggttttatatcgtttacattcaggctgttggtgttatgcaaaccaaaaccatatctatagatagaaaaatacaatgcactaatgagaaagtacaatttattacattttcatttgttttcagaaatgatgaagcaaaatccacctggtccataccacaaatggtatataaaatgaatcaaccattgaaaggctgattttagaaaattgccatttttatttttcaagattcagtagcagaatcttatttacaatyttctcaaaataagatttgtaaatctatatttgttaggagtcaagccaatgtgagaagatttcaaatccaacgttacttataaacagatatttaatatgttttccattgtcttcattagacagcatctgaaaataatttatttatttttatttagaacccaaagacttcaaggaaatattttaatgtatttgactctatgctaatatacatataaacttcagaacttacatgtataggtacctataataaaaaagcagtgtaataaattgttgtcataggtgtaaacattcattttatctgctgttcctttatagtta

SEQ ID NO: 783030 - DNA, 573 bp, Homo sapiens
cagtatgaggtaaatatctatgcacaaaagcagggattctaaatcacattctgcaaaccacacatttgatggtgcagttagcccatctcctcaaaaatgtttgtggtgaagtttccttgaaaaagcttgggcttaaagcatgtcacttagatgacagatttagaaagaatttcggtcattacagtgagaagtcctctttggctcagtcaggctaacccgctccaagggtaggagaggataattcaccaggcggtgcatctaatggacatcgtctctggatgagggaggtagagagagcctgtggttcttttaaatgcattgatttctstacggagtagcattcaaatatgtaactgatcatggactccaggtaagtgatgatggactcccctggttgtagaattgctaccgggtgttcagatgtctcaggcaaggaaagcagtgaaaacagaggcaaaggaaacccttgtgggattcactcatctggtttcatactgagtcactgtctcacggggatgaagtaccgttggagttcactcttgataacagggagaaagaattatgcgctgttaa

SEQ ID NO: 783031 - DNA, 624 bp, Homo sapiens
gcttgtaattggtgtatagatatacttgtgatttttgcacactgattttgtatcctgagacactgctgaagttgcttatcagcttaaggaaatttgggatgagatgatggggttttctaaatatataatcatgtcatctgcaaacagagacaatttgacttcctcttttcrtaattgaataccctttatttctttctcttgtctgattgccctggccagaacttccaatactatgctgaataggagtggtgagagagggtatacttgtcttgtgccagctttcaaagggaatgcttccagtttttgcccattcagtatgatattggctgtgggtttgtcataaatagctcttattattttgaggtatgtcccatcaatacctagtttattgagagtttttatcatgaagggctgttgaattttgtcaaaggtcttttctgcatctattaagataagcatgtgggttttgtcgttggttctgtttatgtgatggattacgtttattgatttgcatgtgttgaaccagccttgcatcccagggatgaagccaacttgatcatggtggataagtttttgatgtgctgctggattcggcttgccactattttattgaggatttttgca

SEQ ID NO: 783032 - DNA, 624 bp, Homo sapiens
gcttgtaattggtgtatagatatacttgtgatttttgcacactgattttgtatcctgagacactgctgaagttgcttatcagcttaaggaaatttgggatgagatgatggggttttctaaatatataatcatgtcatctgcaaacagagacaatttgacttcctcttttcataattgaataccctttatttctttctcttgtctgattgccctggccagaacttccaatactatgctgaataggagtggtgagagagggtatmcttgtcttgtgccagctttcaaagggaatgcttccagtttttgcccattcagtatgatattggctgtgggtttgtcataaatagctcttattattttgaggtatgtcccatcaatacctagtttattgagagtttttatcatgaagggctgttgaattttgtcaaaggtcttttctgcatctattaagataagcatgtgggttttgtcgttggttctgtttatgtgatggattacgtttattgatttgcatgtgttgaaccagccttgcatcccagggatgaagccaacttgatcatggtggataagtttttgatgtgctgctggattcggcttgccactattttattgaggatttttgca

SEQ ID NO: 783033 - DNA, 587 bp, Homo sapiens
gtttaataatatgaacactgccaaaaaatgggttcaaagtcgcctggagaaacagtttcttcttctggagtccatctcagcagcagcgattttctcccacattcattcccaagttaggcagatgtgtagaagtacctgggcttggcattgcccagaaggtcatcttcgtagttggggaggcagcagaagaagaaggcacagccratcaggataatcgtggctgcccacccaaagccgtaggcccagttatagatgtaagtgacagcagggttggcatgaagggtgaaggtctgggtgtacttcacggggtaaattaccagggagatgatctggaacacagctaaagggaagaaaaaaatcccagggtatgaatgcatacatgcatgaaggaataaatacacattagcgacagattacctccttccaccaagtttctgccttgaaataagtataaaatctacctggaggcaggaggaatctggttaggcagaggccaaaaaagattcttgactactgtgtgtaagagatgcctggcactgagcagcatcacacacatatgccaaatatgtgaaaaacacacaaaaaaa

SEQ ID NO: 783034 - DNA, 587 bp, Homo sapiens
gtttaataatatgaacactgccaaaaaatgggttcaaagtcgcctggagaaacagtttcttcttctggagtccatctcagcagcagcgattttctcccacattcattcccaagttaggcagatgtgtagaagtacctgggcttggcattgcccagaaggtcatcttcgtagttggggaggcagcagaagaagaaggcacagccaatcaggataatcgtggctgcccacccaaagccgtaggcccagttatagatgtaagtgacagcasggttggcatgaagggtgaaggtctgggtgtacttcacggggtaaattaccagggagatgatctggaacacagctaaagggaagaaaaaaatcccagggtatgaatgcatacatgcatgaaggaataaatacacattagcgacagattacctccttccaccaagtttctgccttgaaataagtataaaatctacctggaggcaggaggaatctggttaggcagaggccaaaaaagattcttgactactgtgtgtaagagatgcctggcactgagcagcatcacacacatatgccaaatatgtgaaaaacacacaaaaaaa

SEQ ID NO: 783035 - DNA, 644 bp, Homo sapiens
atattttttattctggtaaaatatatataacatttatcattttcactttcaattgttcactctaagtgtacaattcagtggtattaaatgaattcacaatgttgtataaccattaccactatctatacccaaaactttttcatctgtacataaactcagtatctcttaaaaaataactccccattcttccctccccccagcccctggtaacttttattctactccctgtctctgtaaatttgcctattccaggtagctcatgtaaatggaataatatatttgtccttctgtgcctggcttatttcacttagcataatgttttcaaggtccatcatgttgtagcatatatcaaaatttcattcctttttatggctgaataatattccactgtatgtatatacgcattttgtttgtccatgcatctgttgatggacactttggttgtttccaccttttggctgttgtgaatagtgttgctatgaacatgggttacaagtatcttcargttcttgtttttaattcttttggatatacacttaggagtggaatgctgggtcatatagtatttactaggatttttcaactaacattaatgtctcagtgtgttatttattatttatttatttattgagatggagtcttgc

SEQ ID NO: 783036 - DNA, 605 bp, Homo sapiens
caaaaaatctgcctgtggttccttcactgtatgtgtgtgcagagaaaggcagaaaagcttctatccatgtcattgtctctcttgcccatgtgccagtaatttgaataagatgagaatgggccaggcgcagcggctcacgcctgtaatcccactactttgggagaccaaggcgggtgaatcacgaggtcaggagttagagaccagcctggccaacatggtgaaacctcatytctactaaaaatacaaaaattagctgggcgtggtggtgggcacctgtaatcccagctactcaggagactgaggcaggagaatcgcttgaacccaggaggcagaggttgcagtgagcagagatcacgacaatgcactccagccctgcgacagtgcgagactccgtctcaaaaaaaaaaaaaaggtgagaatgtgcttttccagaataaccccagttgtatctagaatttgttttcaatataaaggcaggtatgagaatgttttgaacaacagaattaatccatctagattagaatgctgtgtggcatgaccattctcgaattttgaaagcctgagctggttgtgggcaaggggatattcattaatgacataaattt

SEQ ID NO: 783037 - DNA, 583 bp, Homo sapiens
cagagtaatccaagtttatgattaccaagaacaacctccccgctaggttactaaatgacataaattcactggcttgatgggagctaagctatgatgcaaaggcaaaaggatgatacagtggactttgaggacttgggggaaagggtaggaggtgggtgaggggcaagactacacattgggtacagtgtacgctgctagggtgatgggggcaccaaaaatctcaraaatcacctctaaataacgtcttcatgtaaccaaacaccacctgttcccccaaaacccactgaaattaaaataatgaaacactaaaaaaagactataagaacaattcatagtcacagttactgttcaaatataccacagacacttttgtgtcatgtagaaaaagttactatcatgatggacaggatttaattgaaactctgtgcattggttgctttctggagattaaggtcaatatagtcattccagataaagtaattacatgtaaatcatatttatcagcatatttaactagtaaattcaagtaaaataaaatcagggtaagtattttgagtgctgcattatcaagtctgcaaaatat

SEQ ID NO: 783038 - DNA, 583 bp, Homo sapiens
cagagtaatccaagtttatgattaccaagaacaacctccccgctaggttactaaatgacataaattcactggcttgatgggagctaagctatgatgcaaaggcaaaaggatgatacagtggactttgaggacttgggggaaagggtaggaggtgggtgaggggcaagactacacattgggtacagtgtacgctgctagggtgatgggggcaccaaaaatctcagaaatcacctctaaataacgtcttcatgtaaccaaacaccacctgttcccccaaaacccactgaaattaaaataatgaaacactaaaaaaagactataagaacaattcatagtcacagttactgttcaaatataccacagacacttttgtgtcatgtaraaaaagttactatcatgatggacaggatttaattgaaactctgtgcattggttgctttctggagattaaggtcaatatagtcattccagataaagtaattacatgtaaatcatatttatcagcatatttaactagtaaattcaagtaaaataaaatcagggtaagtattttgagtgctgcattatcaagtctgcaaaatat

SEQ ID NO: 783039 - DNA, 591 bp, Homo sapiens
aaaaaaaaaaggaaagaaagaaagaaaaagaaaaaaaagaaaagaaaatgataaaagaagtgtttatcactgtactgctatgcaagaagttgaggtaatatcctttgaaagttcctgaaaagaaagaattctaagcaaaatcaaaatcttcatttttgttaaagttcacagtagggaaagtgttaaatctttttttctcctgtaagttctcctcttaaaggaaagacagaaattcagcaaagatctctatcccctcggacctccaacatttttctgaactgtaaaaaagataagaaaaaaactgagccacaatcacccttgtatgttatgtacatgtattgacttcatattgctcccattcatgttaagaagaacccaggtgataaaaacttaaatgaactcctgatgaraggaaaatatatgtatattttatcatttgtttcaagaatttaaataaattattaatatgtacattcatactataaagctctacaacagtggtccccaaccttttgggcaccagggactggtttcgtggaagacaatttttccatggactggcggcaggcagggggttgggaagactgaagt

SEQ ID NO: 783040 - DNA, 647 bp, Homo sapiens
ccagccccacctgctcacacaggacctccagtccccttaaaaagtcccaactaagtatatctaggattccagcaagggagacttacaagagcccacaggcagtctgacagccagtcacaacaccatctgccatggcttctttcctgcaccagctccccctagcgtcctcaggaaggaacccctctgccgcctctgcagatggcgccctcagtaagaatcctaatgcccagttgcccccacagacagcagagtccatacttccaggaaagaggggtccttgycatgggtcccacactttagaaagcctgcatatcacaaacaagcacaaataaattcactgaaaaatccacagcacctttatcataggcatccagatgtcctgtaaccctaaaccccgcgacaacggtttaagccccgagggaaatgcttctcttgcccaatctctttgcaccagtcaaagagtgactgagttggaatgccctgaaggttcgtggattgtgacattgcagtgtggagttagacatcatttccaaagcagagaagattcaagcagcattaatgcttaggtaaaagaaaagacttaagagtcatttctctcagatggtgtggacgcaacagattctcgcataacaagtgtaaccatgcca

SEQ ID NO: 783041 - DNA, 647 bp, Homo sapiens
gccaattgctgtactttcatgatacacatggagtatccacagtatcacaagggctattttttccataatccaacttatttgtattattggtagtgagctactgttgacgtccccacgttagcaatttagtggctatactgatgataagcatttccatgcatcatgtggtcaacagcatttgctaccaagtgccacgttccatgctcagcagtgggaccacaggatgakcgagacaaagttcctgacctttagcagcaatatcgaacaagtgagattgtcaagaaagaaaaaatccttgtaaaacataccatacccctacgattcagtcatcatgctcccaggtatttaacgaagggagtaaacccacacctggatgtttatagcagctttattcataatcgccaaaacttggaagcaagaaagatgcccatcagtgggtgactggataaagaaactgtgatccatctggtcagtgaactattacaaagccataaaaagacatgaaagattcctaaatgcacgttattgtacaagtgaaagaaggcaatgtgaaaagactcatcctgttagacattccagaaaagccttctgcctttttctatggagatggtagaaaacccactggttgcgagggatttggagtacaa

SEQ ID NO: 783042 - DNA, 647 bp, Homo sapiens
gccaattgctgtactttcatgatacacatggagtatccacagtatcacaagggctattttttccataatccaacttatttgtattattggtagtgagctactgttgacgtccccacgttagcaatttagtggctatactgatgataagcatttccatgcatcatgtggtcaacagcatttgctaccaagtgccacgttccatgctcagcagtgggaccacaggatgatcgagacaaagttcctgacctttagcagcaatatcgaacaagtgagattgtcaagaaagaaaaaatccttgtaaaacataccatacccctacgattcagtcatcatgctcccaggtatttaacgaagggagtaaacccacacctggatgtttatagcagctttattcataatcgccaaaacttggaagcaagaaagatgcccwtcagtgggtgactggataaagaaactgtgatccatctggtcagtgaactattacaaagccataaaaagacatgaaagattcctaaatgcacgttattgtacaagtgaaagaaggcaatgtgaaaagactcatcctgttagacattccagaaaagccttctgcctttttctatggagatggtagaaaacccactggttgcgagggatttggagtacaa

SEQ ID NO: 783043 - DNA, 602 bp, Homo sapiens
agcccctgagtactcagcaggatccttcacttggatgcccgctatgcaggcttcctcagcacagggaaggtcactcatcacccacaggcccttgatcgttatccaccctttgatgctgtcagattccagaacacgctgcactagtctcttccttcatagggagagagggaaggtgttatgagaaaatctctcatcaatctgacctagctccccaaaaagatgtaacttttaaaatgtcagatggaaatatttaaaaagtgttacatgcctgtatagttttagtattttacttaaagggaatgtggctgtctttactggctacaaccagtttaattcaagaagggctgctggtcatcaggggaacaagcaaggtttggtgctgcccagagtctccagctaatacacaatatggacatacccttccagggcagcgagaagagagtggstccttgtgcagtgaagctgacatccaccaactaaggcttctggaagcatgtggagactcacagggagtgggcagggtctcagcatctggctagcggtgaaagaccctgagaagaaggtgctttccgtgtggattggctcactgttcttgcccagta

SEQ ID NO: 783044 - DNA, 665 bp, Homo sapiens
gacagtgttagggatagggtagaagtcaagaatacattcattcaaggccaggtgaggtggctcactcctgtaatcccagcactttgggaggcagaggcaggtggattatctgaggtcaggagtttgagaaaagcctggccgacatggtaaaaccctacctctaccaaaattacaaaaattagccaggtgcggtggtctgtgcctatagtccaagctaccagggaggttgaggcaggaggatcgcttgaacccaggaggcagaggttgcagtgaattgacaatacaccactgcactccagcctgggaaataggcaagattcaaaaaaaaaaaaaaaaaaaaaagaaaaaagagagagagagaactacatttgtacatttgatttgacttcttaaactctacccagttaatcctgattggatttttkgctttcttccagatttactgattgagttagatattcatccatcgaagtgaaagaattagggatagggtgaaagtccaggactcattcagtgattcactccataaacatggagttttactaatatgtgtccttcaaagtcctgagtgtgagagagggaagggttgaatctcttcctgacattagagaaaagaaaaaacttgaaagtacctttgttgagggatccttggccacatcaaattt

SEQ ID NO: 783045 - DNA, 500 bp, Homo sapiens
ttttttccaggttttccaggagagaatccactttctgttttatctgggtcaactcctgcttaatggcctgaaggtcatctcctttcagctttccagacttggaagatccccgctttccactcttagaattgaagccacttttgccccttcgtgaggtgtttcctgatatgcgctggcgtttcgagggcactacagccagagcaataggaggaggaggaggtacacgtgctgggaaactgtacatcccaycataataatcccgttgcaagttatagtccaagtcaaaagaggagccgtacatctctgctgctgatcgtttcacacctgcgtttcctcggttcacttttggctctgcagccaggttaatatctacaacctggctagcaatcattctgccatcctctcctgctacagcagcccgggcatttttctccttatcatattgaacgaaggcaaagcccttatgaacagagcagcccgcaattttgccatacttggaa

SEQ ID NO: 783046 - DNA, 513 bp, Homo sapiens
aattgatcatattagaacccaaactcataccaaccttgaccttcatgaagtactcaagtgtttctgctcttcttcctcatgtgatgtagaaagtattaaaagtgatgagtttaggccaggcactaactggttcacgcctgtaatctcagcactttcagaggccgaggtgggtgcatcacctgtggtcagsagttccagaccagcctgggcaacatggtgaaactctctctctactaaaaatacaaaaactagttgtgtgtggtggcctgtgcctgtaattccagctaactggaagactgaggcaggagaatcacttgaaccgggaggcagaggttgcagtgaggcgagatcgcaccattgcactccagcctggaaagcaagagtgaaactccatctcaaaaaaaaattaataaataaatatattataaataaataaattaattaatgctttaaagaaaaaagaaataaactttgcctacaaatttcatatgcaattgaatacctcttaaattt

SEQ ID NO: 783047 - DNA, 513 bp, Homo sapiens
aattgatcatattagaacccaaactcataccaaccttgaccttcatgaagtactcaagtgtttctgctcttcttcctcatgtgatgtagaaagtattaaaagtgatgagtttaggccaggcactaactggttcacgcctgtaatctcagcactttcagaggccgaggtgggtgcatcacctgtggtcagcagttccagaccagcctgggcaacatggtgaaactctstctctactaaaaatacaaaaactagttgtgtgtggtggcctgtgcctgtaattccagctaactggaagactgaggcaggagaatcacttgaaccgggaggcagaggttgcagtgaggcgagatcgcaccattgcactccagcctggaaagcaagagtgaaactccatctcaaaaaaaaattaataaataaatatattataaataaataaattaattaatgctttaaagaaaaaagaaataaactttgcctacaaatttcatatgcaattgaatacctcttaaattt

SEQ ID NO: 783048 - DNA, 594 bp, Homo sapiens
accccagctgatgttgcaggatcctgtctgggtttgtcctttatgcctgaatctccactgggcttctgtggcccagggatgtggttttctgcctgacagatgaggaaagggagctttagggattctgtgaacttgatccattcctataaatgatggtgaaatgactcagcctcaaatggaattattttttttccttctttttttttaatacagagtctctctctgtcacccaggctggagtgtagtggcatgatctctgctcactgcaacctacacctcctgggttcaaacgattcttctgcctcagcttcccaagtagctggaattgcaggctccccccaccacacctggctaatttttggatttttagtagagaggaggttttgccatgttcagcaggctggtctcaaactcctgatctcaaggaatccaccagtctcagcctcccaaagtkctgggattacaggtgtgagttactgggccggctctaaggtggaattgacctcggtggcaaagctcttcatcacacatcattctaagtgttgaccatcaggccatcagaatgaccctggacttgggcaaaaaggtctccat

SEQ ID NO: 783049 - DNA, 549 bp, Homo sapiens
gaggcaggaggatcccataagcccagctgaggcaggaggatcccagagcaacacagagaaaccctgtctcaaattgtctttaataaaaattttggaattattaaaaaatgaaataaataagaaaagagaaaaatagcttgcacctacatagtagattttagtgtccaagtgcctggaagagaactttggatttctctaccccactgggcatgccttccctagcagcaaagatggagctccagttcctcagacagtgatcagccacaggaagggcagggggtggggccaatgaagatcctcttgggctgcctgacttccctcagtgtacacatcagctcagcccgaagtggggtsaagatctcccaattgacacgaaccaaggaattcaaactctcctcaggggcaggatacgtctccaggcttaacttgctcagcccactggtgtggcgcagcaggtccttcagggcacccatagacatacaatttctgccaaagtagaaggtggtgagctgggagcagcggctcaggccaggcaggatggcactgagt

SEQ ID NO: 783050 - DNA, 580 bp, Homo sapiens
agaaattgacagtgttaggaatagggtggaaatcaagaattcactcattaaaggccgggtgaggtggctcacacctgtaatccctgcactttgagagtccaagttggctggatcacctgaggtcaggcgatcaagacctgcaaggccaacatgatgaaaccccagctctacaaaaacacaaaaattagcctggcatgatggcaggtgcctgtaatccagctactcaggaggctgaggtgggagaatcgcttgaatccagggggcaatggttgcagtgagccaagattgcaccattgcacaccgttctgggtgacagaggtagactttgtcmcaaaaaaaaaaaaaaaaaaaaaaaaaaagaattcattcattcatgaactccgcaaacactgatggaattttactgatatatgacctatatagtcctgagtttgaggcagggaagggtttgatctgttctggatagtagacagaaaaataaaacctgaaagtagtgttgggagatctttggccacatcaaaattataaaattgttttatagttaaaacagctttatagaaacaaagaagtcatccctaca

SEQ ID NO: 783051 - DNA, 530 bp, Homo sapiens
agggtgcgtgtggtcctgggttccagattctttctctggatccaagtgtcccttgggatgttgtccacccagagcacagtccctatatcttgtctcctctgccccttccctggaaaggtagggatggggcccttctgccagcacccagcagggtcccacgtccctcactcaggctyggtggccggttgctgaaccagccctgtttgtattcttcgttcctctcaaagccactctgtgtgctgaactaggttaccgctttgctctaggcagcctgcctttgcctatttcctcctagaaattggcctactttgaggccagccttgctgggtgtacacacctgataagcccctgagaaatcaggggactgctgggaggccctgctgctcgaaagcgccttggggacctcacctgcctgcagccactcctccagcaactgtgtctcctttcggcatccaggcttaaaactccctcatagaataacagacccaaatggtccccttgctgcctgcacacagccatatgaatcagac

SEQ ID NO: 783052 - DNA, 530 bp, Homo sapiens
agggtgcgtgtggtcctgggttccagattctttctctggatccaagtgtcccttgggatgttgtccacccagagcacagtccctatatcttgtctcctctgccccttccctggaaaggtagggatggggcccttctgccagcacccagcagggtcccacgtccctcactcaggcttggyggccggttgctgaaccagccctgtttgtattcttcgttcctctcaaagccactctgtgtgctgaactaggttaccgctttgctctaggcagcctgcctttgcctatttcctcctagaaattggcctactttgaggccagccttgctgggtgtacacacctgataagcccctgagaaatcaggggactgctgggaggccctgctgctcgaaagcgccttggggacctcacctgcctgcagccactcctccagcaactgtgtctcctttcggcatccaggcttaaaactccctcatagaataacagacccaaatggtccccttgctgcctgcacacagccatatgaatcagac

SEQ ID NO: 783053 - DNA, 443 bp, Homo sapiens
atggaggcattggatggaactagttcttgccttttggcccaaggtcatgctctgttgggtttcattggccttgggaaatggtagcttagtctcaaaggtgacaaaatatgggcgagacattttgggagccaggttctatcctttctgtcatgtgcaataaagtgggtcaaatctgccatcagaggcagagaccccaggctctgggctaatcctgcaaattcaaaaacgaaaatgtggagacggcacagccttccggcctgygcagcaaagtgctcgtgtgcccagatccctcagtctgtgtcttccaaagcctcccagggtagaaagcattcgtgtgtgaggacttctcccagccacagggaatgtggggggtggtcccttcctggcaaggccaggagtccacattagtgcttcctttctcaagaagccagtccccaccacag

SEQ ID NO: 783054 - DNA, 482 bp, Homo sapiens
ctggatataaaaactgattagcgacataactaggttgaactcaaatgtgatgaaaactggtagtgcggctcctcttctgcaggaaggcttggaatatctgtgcattcctaggatacgtgacacaggttttctacccgtgcagggccattgggaggcgcaggaggaagatgagggctgatctgctccatggaccacttgtatccgcaacccgggggctggtgtgtcaccccttttcctcaycctcttcccacacaccaccctttctctactttctctcttctcttctccctctcccccgcctaccgaaggtcaccttctctggtttgaatggggcctgccttttagagctttaggaagaaagcctcaacacccccttgagtggaatctttctgcttcccttctgggctttgctaagaaaacaaaatctacgctgttggagtagctgctggaggtgaggaggggaagagtgaacgccttgaagc

SEQ ID NO: 783055 - DNA, 602 bp, Homo sapiens
gaatattgagctgcagtgatataattattttatccagattagtaaggtcaatatttattgtactgctcagaggacattttatatttagttctggataacatagttcatgaagctcatttccagtggagcaagtcaagagatgaattgattgagatggtgaatatctaggaatacttgccacttaaagaataattggagaaactgtgatgctccttaggaaggataagactgagataagctctattagtcagaactcttttggttggaaatgattcatattgacttaagagaaaagggaaattgattgacttatgtaactgaaaaaaacaaaagtagacytgacatcaggctcaaatgatatccggttatcaaaccatgtcttatctttttcttctatctcttggctttgacttatttggttttattttcaggaaaatacctctgcatgaggtgatgcctgaaattctgagcttgtatcattctaaaactttaaccgtgaataagaagagagattctcttgctgaagggcttcataaaaacaaccagaattgtcactttaaaaggatgactcaccatgatcaagtgggatttatccctgggat

SEQ ID NO: 783056 - DNA, 616 bp, Homo sapiens
gtcttactaatagtctttctctagagactctctcccctagctggatttgaaaaagtaagcaaccatgttgggaggtacatgtggcaagtaactgggatagcctctacttgctgagggtaacctccagctgaccaccagcaagaagccaggaccctcagtcctatgctaaggaaaaaaattctgccaacaatctgagtgaacttggaagtggattyttctccagctgagtctccagaggaaacctcagccccagctaacatcttgaatagctaagactttacagccctgtaaggcccagaacagaggacctgctaagttgtgcctaaactcctgttctacagaaaccatgagatataataataagtatgcattgctttaaacctctatgtttgtggtaatttgttacccagcagtagataactaatacaagaaagtaggtagtctatattatgcaatttgttatatagctgtttatgatcagaaaaatacactgggaatctaaatttcttcaatattttagagttactttcttttcagtataagaagccaataagaaaataatagcttctttgcaaacattataaaccacccttttaaatctgttttagtcctttaa

SEQ ID NO: 783057 - DNA, 693 bp, Homo sapiens
ttttgtaataaatatttgctatccttttttttaggtgatctcaagctagttagccaatatgatcactctttcctatactaatttattttattttatttttttttagagacagagtcttgctctgtcactcaggctggagtgcaggggtgcraatgtagctcactgcagccttaccctcctgggctcaagcaatcctcctgcctcagcctcccgagtagctgggactgtgggcatgtgccttcatggccagctaaatttgaatttctggcctcaagtggtcttcctgcctcggactcccaaagtattgggattatgggcatgagccaccacactggcctctagtcatttttatataaagagagaccagcatagtgaagtaaatttatatgctttttgttaacctaagaaatatttaatgaacatctattaaaaattgagactctatctggaccttggggtggagaggagagagagatagaaatatgagtaaactgaggtttttgcctacatctggtagagaagaatacagctgtatataaatcattcctaataccacaaagagtgtgaatgtttcgtaagaaggagtgaatagaagggaaaaattgtagctggagaaaatcaggaaaggcttaatggagtaggtgccctgggaactgggtctgaacttctggtggaaggatgttaatctagaaa

SEQ ID NO: 783058 - DNA, 613 bp, Homo sapiens
attagccatgcgtggtggcaggcacctgtaatcccagctatgcaggaggctgcggcaggggaattgctcgaacccgggaggtggaggttgctgtgagctgagattgcgccactgtaccactgcacttcagcctgggtgacagagtgagacactgtctcaaaaaaaaaatcttttattttaggtttgggggtacatgtaaggctttgttacatagttaarcacgtctcatgggggtttgttgtacagattgtttcatcgctcaggtatcaagaccagtactcaatagttactgttcctgctcctttcactcctcccaccctcaagtagactccagtgtctgttgtttccttctttatgttcataagttcttatcatttaaccctacttataagtgagaatatgcggtatttggttttctgttcctgtgttagtttgctaaggataacatcctccagctttatccaagttcccacaaagtacatgatctcattcttttttttatgactccatagtattccgtggtgtatatgcaccacactttctttatccattctgtcattgatgggcatttaggttgatttcaggtctttgctattgtgaatagtgctgcagt

SEQ ID NO: 783059 - DNA, 613 bp, Homo sapiens
attagccatgcgtggtggcaggcacctgtaatcccagctatgcaggaggctgcggcaggggaattgctcgaacccgggaggtggaggttgctgtgagctgagattgcgccactgtaccactgcacttcagcctgggtgacagagtgagacactgtctcaaaaaaaaaatcttttattttaggtttgggggtacatgtaaggctttgttacatagttaagcacgtctcatgggggtttgttgtacagattgtttcatcgctcaggtatcaagaccagtactcaatagttactgttcctgctyctttcactcctcccaccctcaagtagactccagtgtctgttgtttccttctttatgttcataagttcttatcatttaaccctacttataagtgagaatatgcggtatttggttttctgttcctgtgttagtttgctaaggataacatcctccagctttatccaagttcccacaaagtacatgatctcattcttttttttatgactccatagtattccgtggtgtatatgcaccacactttctttatccattctgtcattgatgggcatttaggttgatttcaggtctttgctattgtgaatagtgctgcagt

SEQ ID NO: 783060 - DNA, 610 bp, Homo sapiens
aatattgtcctacaaaaatgaaggagaaattaagacatttccagataaacaaaagttgagggagttcattaccactagaactgccctgcaagaaatgctaaagggagtcctgcaggttgaaatgaaaggacattagacagtaacttgaagccatatgaagaaataaaaatctcagtaaaggtaaagaagggcgattataaaagctggtgttattstaacaatggtttgtaactctgctttttgtttcctccatgatgtaagagactgatacattttttaaaagcaattattagtctaaaacctagtagtgttataattttggtttttaattccacattttgtttctctataatttaagaagttaatgcattaaaaattattagtttatgtttttgacacacaatgtataaagatgtaattatgtggcatgaacaattgaaaggagagtggacagagatgtaaaggagcagtgtttttatgttattgaagttaagttggtatgaatcccaattagaatatataacttcaggatattaaatacagtccctatggtgactacaaagaaaatagaatatatacaaaaggaaatgaaaaaggaattgaaactatg

SEQ ID NO: 783061 - DNA, 552 bp, Homo sapiens
aacaggaatgaggaatggtctgatttacatggatggtggccttcaagtgagtgtagggagactggactggaggagaatgagacaggaggcaggacagtccactggagaagaggccactgcagttgtgtaggtgagagaagagggagccagcccagggccggtggtgggataatgagcattgaacatttactggagggcggggaaattgatggtactgatatgtaccccygagggtggggtagattcaaaagcatctttgtcttgttgtatgtatgatgtgaagggaaagccgactaatagatttctaggtggttggtgttatcagcagcagaggcagagaggtccaagggggagaagttttcctgaggaacatgttgagtttagctttggacatgatacttttgtggctcccacaggatagcgaggtgcagagattggcagatcattggaactgcaagtcaaaaacgacagtaggggagaacacagagatactgatttgatgatgctgtcagagaagagatgctctaatccagagagaacatagtaaaaaca

SEQ ID NO: 783062 - DNA, 518 bp, Homo sapiens
gcttaacatcattagttgttggggatatgcaaaatcaaacaacaatgatatatctctacatgtattggaatggctaaattagaaggactgaccatatcaagtattggtgaggaagcagaactcatacatgttggtaggactgtaaaaaggtaaaaccgtatggaaaacaatttggcagtttcttaaaaagttaagcataaaccaactatatagtccagccattctacttcaagatgtcacccaagaaaaatgaaagcataaccttcttcaatgcctctttcagtgatatgatgttaaacaaacaaaaaaaacccctatgttcayacaaagacttgtatataaatgttgatattagcttcatttgtagtagccacaaaaacttgtacataaatgttgacattaactttatttgtagtagccgcaaagtggaaatgattcaaaggtccatccacaaaggtacatgaataaacaaactgtggtatttaaaactctagacagtgagagaaagtagatcagtg

SEQ ID NO: 783063 - DNA, 559 bp, Homo sapiens
ttccaaagacaactaaagatttctacagtctctcttataactgatccattttttcaaaagatgtccctttgggaaggaattctcatttttagaattttagtccagaggaagtatttttttttcagataggtgaaatagaataagcagaaaattcttattttttactgttttakataccattgatgcctgcttattttaaaacaaaacacaataaaaacatgataccatctgatgagttgctttggttttactttttttttttttttttttttttttttttttttagtttatacaagtttcttattaggtcagcaaattgtaaaacacataatttgccaaggcttttgaagccagcagatactgggtgaagttgctgtatgaatataataataagaaccgtttttgttcagcttgatgaaaaaactattcatgttctaaatgaaaatgtgaagatcatctaattctgacagaaaaccacctgtggacatggtcttgtttctttttatttcttctgttttctacaaaagatggcaatatttatttaaagtgctttaacagg

SEQ ID NO: 783064 - DNA, 561 bp, Homo sapiens
agactattcctttaccgtgctgtgtaaagatggttaccaattccttagtaagaagaaagtggaggccaggcgaggtggctcaatttatcccagcactttgggaggccgaggtgggcagatcacttgaggtcaggagtttgagaccagcctggccaacatggcaaaactccatctctacttaaaaaaatacaaaaattakccgggcatggtggcatgtgcctgtagtcccagctactcgggaagctgaggcaggagaatctcttgaacccaggaggtggaggttgcagtgagccgagaacgcgccattgcactccagccctggcgatggagcaagactctgtctcaaaaaaataaaaaaagaagaaagtggaaatttctatacaaacttgctataagatttttacagtgtgttgtataaatatgtttttaaaattgtattgagttttacatgtatagagtgtggatttagttcttaaatgtgggagttatattttcttctttttacttcacttcagcaaccacattatcagcaaatctacctctaaaacatatcttaaatct

SEQ ID NO: 783065 - DNA, 652 bp, Homo sapiens
ttgtggtctgatttgcatttctctgataattagtgatcttgggcacttttttcatattcctgttggccattttatgtcttttgagaaatgtctcttttgaaatagatctttgcctatttttaaaattggattctttgggatttttgctatattgttgtttgagctccttatatattctggttattaatctgttgtcagatgaatagtttgctaatgctttctcctcctgtgggttgtctcttcaacttgctgattattttctttgcgtcacggaagcgttttagcttgatgtaaccccatttgtctgtttttgctttggttgccttacttttgaggtcttacagaaaaaagtctttgcccagaccartgtcctggagtgtttccccctaggctttcttctagtaatttcacagtttcaggtcttagatttaagtctttaatccatttttatttgatttttgtggatggtgagagacagaggtttagtttcattcttcttcatatggatatccagttttcccagtcatactgatatccagttttcccagcactggttatcgaagagcctgtcctttccccattgtatgttcttggtgcctttgttgaaaatgagctggctataaatgtgtgagtttatatctgggttattgat

SEQ ID NO: 783066 - DNA, 574 bp, Homo sapiens
ccctataaaatctacagacaggtgaatatgaggtatcacattccagataagctaaccttgggcaaaagccactgcagccataaactggtagaaacacttaaatgttaatgaattgctagaggctgagtctggattagcctaaaggtaagaaattccttgggcacctcaccttaggaggaccacaacacttttacctctaagaatcccatcaggttctcaaggattgaagactcatgaaaaattccctcacgtctagcacagggaatgagaaaagtaatcatttaaaatgcacctrgaatgttctccataagaaatatcttcaaatatagttaacttatctttgacagaagaacaaaagcaaatcaatgaagaaaagataatattttcaataaatggcactggaacaattggacagccatatgcaatggcaacagaatttagacatagaccctacactttttacaaaaatgccttaaaatagattatagaactatttatataatacaaaactataacatttctagaatatgacacagaaaatataggttactttggattcagtgatgagctttta

SEQ ID NO: 783067 - DNA, 485 bp, Homo sapiens
cctccaggagctagagaacaaagccaggggctcagtaccagctccccagagttagagcacacacatcaggagtgctgagctgtgccctggagccctaaaatcttccagaaatgaacccagtcaactgaacctaccttataccacaatcaaacccccaagataatcaaagatgataaagaaaaaaaaaagtcaatccattcagaggagaacaacttcaaagatrggaggaatatcacctcacacagatgagaaagagctagcacaagaactctggcaactcaaaaagccagtgtcttcttacctccaaataactgtactagttaaccagcaatgatttttaaccagaccaaaatggctgaaatgacagaaatagaattgagaatatggataggaacaaagaccactgaaatccaggagaaagttgaaaccctatccaaggaatttaagaaatacaataaaaatgatttaagagataaaagaaaaaa

SEQ ID NO: 783068 - DNA, 614 bp, Homo sapiens
attttaggaaagaacaaaatgtatctgactgaactataaaaaactcacttcaagaatttcagagtacaattgcaagtattaacagcagaatcgaccaagctgaggaaagaatctcagagctggaagactggttctttgaaacaactcattaggattaaaaataaataaagacaaataagagaaatatgagattacataaagataccaaatctatgactcactggtgttcttgaaagaaaggragagaaagcaaacaacttggaaaatatatttgaggatatcattcatgaaaacttccccaacctagctaaagagcttccacacagcaaaagaaaccatcaacagagtgaacagacaacctacagaatgggaggaaatattcgcaaactatgcttccaacaaaggtctaatatccagaacctataaggaactttaacaaatcaacaagcaaaaaacaaccccattaaaaagtgggtaaaggacatgaacagatagttttcaaaagaaaagacacatgcagccaacaaacatatgagaaaaatctcagtatcactcatcgtttgagaaacataaatcaaagctacaatgagataccatctcacaccagtcagaat

SEQ ID NO: 783069 - DNA, 576 bp, Homo sapiens
ttgttacataagtatattgtgtgacactggggtttggggtacaaatggtcccatcacccacatagtgagcacagtacccaataggtagtttttcagccgctgtccccatctgtctccaccattccctacccgtgtagtcaccggtgtttattgttttcatctttatgttcatgtgtacccaatgtttagctcccacttataagtgagaacatgtgatatttggtktttttcttcctgtgttaatttgcttaggataatggcctccacctgaatccatattgctggaaatgacataatttcattctattttaccgctgtgtagcattctatagcatatatgtaccacatttgctttatccaatccattgttggcgggcaagcaccagagtataattttcttttcttttctatttttttttttttttagatgaggtctgactttgtcacccaggcaagagtcccatggcacaatcacagcccactgcagccttgaccttctgggctcagatgatgttcccacctcaggttcccaagtagctgggactacaggcatgtaccaccactcctggctaaatt

SEQ ID NO: 783070 - DNA, 549 bp, Homo sapiens
cttacattctcaggagttaatatattcctgagagaggaagaacacacccctgtgagatggtatgaatctcttcatgaaggatccacttcatggcccaaatacctcccactgggccccatgatgtcccaatgcatcagcactggcaattaaactttaacatgmgttttggtggagacaaacttcacccaaactacagcaccatgctttctctccaggatccgggccagtggaagagcatggctggtggtgggtaactgaggaaaaaggtagcctggttgctatgacctgaatgtgtgtgtcccccaccaaattcatgtgttgaaatcccaagtcccagtggaatggtattagaagatgggggactttggtgagtgctccctcatgaatgggattagtgtccttataaaaggagccccagagagctgccccaccccttctactgtgtgaagatgcagcaagaagttactaagaggaataagccctcaccagacaccaaatctgccagcacctggatctcggacttcctaacctccagaaatgtgaggaata

SEQ ID NO: 783071 - DNA, 370 bp, Homo sapiens
tattctgttggtcacagagaataaccctgctgccatgtgggaggggttgtgaaaggaaaataaatattgcggcctcaaaatcactcaagctgggaactgcttagggcaaacctgtctcccattctattcaaagtcacccctctgctcactgagataaatgcgtatctgattrcctcctttggagaggctaatcagaagctcaaaagagtgcaaccatttgtctcttatctacctatgacctggaagctctctccccgctgagtcttcctgcctttgcttctagttgtcccacctttccagactgaaccaatgctcatcttacatatgttgattgatagctcgtgtctccctaaaatatataaaaccaaac

SEQ ID NO: 783072 - DNA, 670 bp, Homo sapiens
aaattaaaaaaatagcttcagctaaatatccaatttcattctttacaaattctaccttccacaaaacactaggagaggaacaaaattcagccaagttgttctttgccagtgtatataataggtcacctttccttcagtttctaataacatgttcctcatttccatctgagacctcatccaaatggcctttactgtccatatttctattagcattctgttcataacctataagctatcctgtaagaatgctgaggctttctttatagctctcctcctctcctgagccctcaccagaatcaccctcactagccaattcacagcaactgtaggcttttctaaatcatgcacttcaaaactattccaggctctaytcacttacctagttccaaacctgcttcgacattttaggtatttgttactatagcacccctacttctcaataccaattttctgtcttagtctttcaagctgctacaacaaaataccaccaactgggtggtgttacacgtgtctgtgtgaagagaccaccaaaaaggctttgtgtgagcaataaagctttttaatcacctgggtgcaggcggactgagtctgaaaaaggagtctgcaaagggagataggggtggggcagttttataggatttgggtaggcagtggaaaattacagttaaaa

SEQ ID NO: 783073 - DNA, 670 bp, Homo sapiens
aaattaaaaaaatagcttcagctaaatatccaatttcattctttacaaattctaccttccacaaaacactaggagaggaacaaaattcagccaagttgttctttgccagtgtatataataggtcacctttccttcagtttctaataacatgttcctcatttccatctgagacctcatccaaatggcctttactgtccatatttctattagcattctgttcataacctataagctatcctgtaagaatgctgaggctttctttatagctctcctcctctcctgagccctcaccagaatcaccctcactagccaattcacagcaactgtaggcttttctaaatcatgcacttcaaaactattccaggctctatycacttacctagttccaaacctgcttcgacattttaggtatttgttactatagcacccctacttctcaataccaattttctgtcttagtctttcaagctgctacaacaaaataccaccaactgggtggtgttacacgtgtctgtgtgaagagaccaccaaaaaggctttgtgtgagcaataaagctttttaatcacctgggtgcaggcggactgagtctgaaaaaggagtctgcaaagggagataggggtggggcagttttataggatttgggtaggcagtggaaaattacagttaaaa

SEQ ID NO: 783074 - DNA, 600 bp, Homo sapiens
tttgagaatcactgccccaccaggtttccaagtcctgttcattgtcaatgtggttgtcattcattcagtcagcacttcccagggttcaggtgggcaggggatgtgagtaagtacaaccacatcctcttatgttccagctggaggttccacttcacccagacctcctgtattagaatcttgggataaaaatggagctgacgtatgcaattcaccaaagttccacaygtatctgttatacaaacctctggttcaaaagccctgtattactgcttcagtaccagacttgactccagtccccttcctgccttaatttcccacctccccatcctgtgttccactcatacccttagcttccctgcagccttacttaagaatagggcatttgctcttcatagatgccatttcaatgagagttccctctcaagaaagctaagtctttttttattctccaagattttatctgtatccatttggcaggagagtagattctattatgatcattacccatatggacaagcagccaagatttaatatctgttggtcaataatagctttcataactaatagctcttgatgaccatctagaggggagtgtgacct

SEQ ID NO: 783075 - DNA, 521 bp, Homo sapiens
ttcctgaggccaggttgaggcactgctgcttgtgccacagtcagcaagtgaccagggagcagtgctggatggcctctgcatgggagaataaccttgcccggcactggaatgcagggcttgaatgagccacagtggagcgcttaagtataaaaagagaggcaggtgagtctcggcaatctgaggcagaaactatccctagagagggagttagttgtccaagtcccatgagagaaaagtgacaatgtgcaggtgatagcatggcaaggtaacagtgggsaggatagagggagggcagcagtgtattggggtgcaggacgtggtgggtgcatggagaagtgaggtttcaatccactccgcttcaaccacactggactccttactgtccctggatcatgccgggctcagtctctgattagggcctttgcactgcctgcttcttcatcctgggatcattcttccctatacatccatggcactgagcctctttcaagtcaaatgccaccttttcattgaggcctata

SEQ ID NO: 783076 - DNA, 589 bp, Homo sapiens
ttattcacgctgctgataaagacatacttgagactgagcaatttatacagggtttaatggacttacagtttcatgtggcttgggaggcctcacaatcgtggtggaaggcaaggaggagaatcttatgtggatgacagcaggcaaagagagagcttgtgcaggagactcccatttttaaaaccatcagatctcgtgagacccattcgctatcacaagaacagcatgggaaagaccagcccccatgattcagtcatttcccactgggtccctcccacaacacatgagaattatgtgatctacaagatgagatttaggtggggacgcagagccaaaccacatcattgagcctctgtgacatgtagcagccctacagggaactgccaacaaaattagttttaaaaagscttgtccaggaagcatacatgggagctggtcactttgctctttcagccctcatagaggtgcttagacctctggagagagacactgagacaggtaagagggcagaaatgactaagaggtaacacactgtggagtcccaaaaccagcacacgcttcagcccacaaaaagcctaggccacagctctgt

SEQ ID NO: 783077 - DNA, 606 bp, Homo sapiens
tcctatccatgagcatggaacatttttccatttgtttgtgtcatctctgatttctttcagcagtgtttttaattctcattgtagagatctttcacctccttgtttagctgtattcctgggtttttaatttaatttaattttttgtctcactgaatttaatatcattwttttcccaggatttcataaattattttttcattagaatctgttgatagataattattgtgttcttttgaggtatcatattttcttgctttttaatgtttcttttgtccttaacattgatatttgtgcatcaggtataacagttgctccttctaatttttttgtatttgctttggtaggggaggactttttcctgaacacatacctatatgttggttgggtagaaaatttttgctttgcttctgggtgccgtgccgtagtgtcatctctgtgtgactcctttagctgtaaacaacatcagtagtgtctatgatgtcctcagtggcttagtgtgcagtttttagtgaaggctaaagcaaagttttgctgcagatgaggatgccagctgggcccctccttgagctgcagtggtggcagtggcaggccaagtgtgcctgttct

SEQ ID NO: 783078 - DNA, 629 bp, Homo sapiens
gctgggactgatatgcactttgttctcagactctatgctatgtctgcactgccatattgttctccacaatgacataggagggggagaaagaagaaaaacaatatgtcactctgtttggagattggtaggctacagaaacagtatcaattcagacgctcctaaaaacagccttgctgaaaagcttttgacccagagcgcgtcaggatgcttctagtccaattgtttccaattatacctaattcacctacaggagaaatttatcttctcacaaagcaccagggggacccacgatatttgctagtgactaacaaaaaatgcatttaggagttaatacatcacttccaaactggtcttcgtctgcttgagtttccaacaagccttgcagattctcctaaattcccacttattctcyatacttttttcagcaaccaaatcctattttcgaatatgacaagaaataaaatgattttaggcactagagttgagaatttatagataaatgttacacttcgatgcttaattcaaataaccacacaacggtagcacttagtcttttaatctttcagcaaactcattggcaacttgagttaagagtaaaattcaaaaacctggtctccgcagttaacaaa

SEQ ID NO: 783079 - DNA, 629 bp, Homo sapiens
gctgggactgatatgcactttgttctcagactctatgctatgtctgcactgccatattgttctccacaatgacataggagggggagaaagaagaaaaacaatatgtcactctgtttggagattggtaggctacagaaacagtatcaattcagacgctcctaaaaacagccttgctgaaaagcttttgacccagagcgcgtcaggatgcttctagtccaattgtttccaattatacctaattcacctacaggagaaatttatcttctcacaaagcaccagggggacccacgatatttgctagtgactaacaaaaaatgcatttaggagttaatacatcacttccaaactggtcttcgtctgcttgagtttccaacaagccttgcagattctcctaaattcccacttattctccatacttttttcagcmaccaaatcctattttcgaatatgacaagaaataaaatgattttaggcactagagttgagaatttatagataaatgttacacttcgatgcttaattcaaataaccacacaacggtagcacttagtcttttaatctttcagcaaactcattggcaacttgagttaagagtaaaattcaaaaacctggtctccgcagttaacaaa

SEQ ID NO: 783080 - DNA, 569 bp, Homo sapiens
tggagaagtgatctcgaagtagctgcattaaaaaaaaaatctgacagtaacattttctggggtttactttttaattccctctgtagctagaaacagacattaaaattaatgccagcccgagtgtaaaggataccttagtaacaaacttgcttcattttagattcataatttctcattactaaagaacatttgtattttaggttttcgaaacactacaacatccacaaggatactgcagtagattacaacgtgtttttgaagaatctcagcataaataacgacttgaaccttagatattgtatgggaaatcaaggtaagtatttttaaagtatatagytaaagatttcaatatcttttggcatggtaattcctgttctttggatcattcctgaggaaatactttcaaatataggaaatacattatctacaaagctagccatggtatcattatttataagaataacgtcaatgcctaagaataggaaaaggctaaatgagtcacaatatagccatgtggtaaaatctacagccaggaacaaggatatccatgaagagttaataataacaca

SEQ ID NO: 783081 - DNA, 605 bp, Homo sapiens
tgagtgttcccttttctctgcagccttgccagcatctgttgttttttgacttttttttttttttgagatgcagtctcactctttcatcaggctggagtgcagcagcgcgatcccggctcactgcaacctctgcctcttgggttcaagcgattcttctgcctcagcctcctgagtagctgggattacaggcgcwtgccaccacacttagctaattttaattttttttttttaagtagagatggggtttcaccatgttagccaggatggtctcgatctcttgacctcgtgatctgcccaccttggcctcccaaagtgctgggattacaggtgtgagccaccacgccctgccttttttgactttttaataatagccaatctgattggtgtaagatggtatctccttgtggcttcaatttgcatttctctgatgattagtgattatgagcattttttcatatgtttgttggccgtgtgtatgtcttcttcttttgagaagtgtctgttcgtgtcctttgtccattttttaatggggttatttgttttctgcttgttgatattgtgtttaaattccttacagattttagatattaggactttgtcagatg

SEQ ID NO: 783082 - DNA, 610 bp, Homo sapiens
tccatgcatccataacccattcattcattcattcattcatcattcatcccttcatccattcattcatccatttacctatctatccatcatccacccacccatccgttcacccatctgtcccattcattcatcatccatccattcatccacccacccacccatccatccatccactcacccacccatccatccatccacttaacagttattcattgatccaggccctagtcttggctctggactcatgcctattcaagaccttcctccatctctaggcttctgttttcttagtctgggcaatggtgctgtggagggtgaggggtgaaggagggactggggttggggagagtaatgccrtttcagccgcttaatattccctgacatgggtgtgtggttatttggatctctattcttagcctttgatcccagtcagcaattctcatttcaccaccatttattgaacgtgttccgtgtgtgaagcacctgcacacatgagctcctttcatcttaagcacacaccacacacctatatccttattcattctcatttcacaggcaaggaagctgaagttagaggaatcaggctgctttccccaggttacctgaataa

SEQ ID NO: 783083 - DNA, 604 bp, Homo sapiens
actatttactatgatgagtctgcatggggatttctttgcatttattctactttgaggtcacagggtttctcagatgtatagatgaatgtgttcagcaaatctgggaaatttccaggcattatttgttcacatatttgttctgtcttttctccttttcttctcaagtaaacctgtgatgaggatgttggtgactgaaagttgtcccacattgctctgaggttctattcatttttcttccattttctgtttttcagattgcatatctctatgaatctatattcacattcactgattccttcttctgccagttctaaaccaccattgaccccctctaaaaaaatctttttcaattatttttcaactccaacattttcacttgattctttyatagtttctttttattcatagtctgtatttgagtctctattgatagtttctattcatactctcactgtcttcatgtcttcctttacttctttcttgtagaaagtaaaagttcctcttcaaagtttcccttcttgttaaagaataaatcatgagtgttagaaataatagtttcttttaaagactaactttatgctagacatgctcatggacatgtagt

SEQ ID NO: 783084 - DNA, 569 bp, Homo sapiens
tgtacattttattttaaaaaaaatcatgacaataaattcatacattgccaaataacaggtgtctgctatctgattctgtcagataaactttataccttttctggaatatatgagttagaaaacttcaggtatcagactcagctgcctcaagtactgacataccaggcatttctctgtttaatcatcactcaactcatggatgaaagtattaggaaacagaagggattatgaagataactaaagttattactggcacttgaactgaatttstcttaaaatatcagtttactttgatatgtgctacaaagaccttaaccatgtttctgtctgattcttttgtgaaatgaaggtatcaatacagaatgaactgttttgataagctccctcacaattttaaagtatagagttaatctctaagaactaataagcaatgattccattttcttgattttatttttatgagccacagttttatatcccactgcttatctgatttgaaaatggttgtaatattttgagaaagttaatatcgagtcatgccaaaaccttaataaacttagtcttgaact

SEQ ID NO: 783085 - DNA, 589 bp, Homo sapiens
ttttgtcattacttgttttggttgtttttgagagggtgctgtattagtgagggttctccagagaaacagagccaatgggatatatagagatatataggtaggaagagatttattatgaaggattggcttacacaattatgaaggctgagaaatcttatatcgtctgtctataagctagaggcctaggaaaacgagtagggcagttccagttcaaacytgaagggccagagaaccaggggagccaatggtgtgtaagtgtcagttgagtccaaaggccccagaaccaggggcatcagtatccaagttgaatgtcccagatcaagacagagtgaattcattcttcctccaccattttgttcagttcaagccctccgtggattggatggtgccctcctgtattcggcagatcttctttattcattccatcaattcaaacacaaatctcttccagaaacagcctcacagacacacccggaagtaatatttcatcagccatcagccttagcccagtcaagttgacatataaaattaatcatgacaggtgttttttagcacagacagtagtaaatcactactactttgagcactc

SEQ ID NO: 783086 - DNA, 629 bp, Homo sapiens
cggtattgatttctttgggtttatgttgtttggactttgctcacctgcttgaatttgtaggttttgcctcttgccaaatttgaaaagttttccggcattattttcttaagtacttttaagccctactatcttttccctcttcttccaagactccaatgacataaatttagatcttctgttaatagtaccacaagtccctaagtgtctgttttttttttttttaattcagcctacttttctgttgtttgctgtttagattgggtaatttccatgrttctatcttgaagtctgtgaattctttcctctgtcccttccatattgctcttaaacccatctattgagttttgaaaatttcaaatattgtgtttttcagttctaaaattaatatttagttcctcttttcatcttccattccattgctgagacattccgattcttcatttgtttgaaatgtgttctaatgggttactgaggccttaaaatctttatcacataattatcacataattctaacatcattgttctcttggtgttggcctttatccggcatctttttttttttccatttagtttgagatcttagtggttattggtataatgggtaacattctattgaaacctagacattt

SEQ ID NO: 783087 - DNA, 619 bp, Homo sapiens
aatgagagaaactggccaaaatgaagggctataggccccatacaagcccaaaatccaatagggcagtcattaaacattaaagttccaaaatgatctcctttgactccatgtctcatatctaggtcatgctgatgcaagaggtgggctcccacagccttgggcagctctgcccctgtggccttgcagggtacagcccttctcttggttgctttcacaggctggcattgagtgtgtgcagcttttccaggtgcatggtgcaagttatcagtggatctaccattctggggtctggaggatggtggccttcttctcacagctccattaggtggtgccccagtgagcactctgttgggaatctgaccccacatttctcttttacactgccctagcagaggttctccatgagagacctgctcctgcagcaaactcctgcctgggcatccaggtgtttccatatakcctctgaaatctaggcggaggttctccaacctcaattcctgattttgtacacctgcaggcccaacaccacatgtaagctgcgaatgcttggggcttgcaccctctgaagcaatggcctgagttgtacattggcctcttttaatcccagtgggagctgaag

SEQ ID NO: 783088 - DNA, 629 bp, Homo sapiens
actagcaataaaaatatataatgcagtaaacacataaccagtaacactcatttgttatcattattaagtattatgtgtggtacatcattgaatgtactatgctttcacatgactggcagcacagtaagtttgtttacaccagcatcaccacaaacacttaagtaatgtattgtgactgctacaacatcactagactatggaaattttccagctccattattatcttatgggaccactgttgtataagcagtccgttgtcgactaaaacatcattaytgatgctcgactgtatacagagatagagaacagtggggtgcgggagaaggaagaaatagggagaaataggtcaaaggatacaaagtagcagatatgtagagtgagcacgtctagacatctagagatgcgcaacatgagaattatagctaataaaattgtattatattagagattttgttaaataagtaaatttaacaaaaaaggatataaaaataactacatgaggtgatcgatatgttaatctacttcactatagtaactattttattattcctttagttcccataacataatgttgtaaacctcaaatatacaaaataaaatttatttgttaaaaagctggcccccacatc

SEQ ID NO: 783089 - DNA, 619 bp, Homo sapiens
ggacagtaataataggatatatatatatatatgaaagggagtttattaaggagtattgactcacacaatcacaaggtaaagtcccacaataggctgtcagcaagctgaggagcaaagaagccagtctgagccccagaacctcaaaagtagcgaagtcgacagtgtagccttcagtctgtggccaaaggcctgcgagcccctggcaaatgactggtgtaagtctaacagtccagaagctaaagaagttagagtccgatgtttgagggcagaaagcatccagaatgggagaaagatgaaggccggaagactcagccagtttagtccttccatgttcctctgcctgcttttatcctagccgccctggcagctsattagatggtgcccacccagattgagggtaggtctgcctctcccagtccactgactcaaatgttaatgtcttttggcaacaccttcacagacacacccaggaacaatactttgcatccttcaatccaatgaagttgacattcaatattaaccatcacagtgcatttcctaatagaaaagggcatactcttacatgacttttgtacaatcttcaaaattaggaaacttaacatcaatacaatactattat

SEQ ID NO: 783090 - DNA, 619 bp, Homo sapiens
ggacagtaataataggatatatatatatatatgaaagggagtttattaaggagtattgactcacacaatcacaaggtaaagtcccacaataggctgtcagcaagctgaggagcaaagaagccagtctgagccccagaacctcaaaagtagcgaagtcgacagtgtagccttcagtctgtggccaaaggcctgcgagcccctggcaaatgactggtgtaagtctaacagtccagaagctaaagaagttagagtccgatgtttgagggcagaaagcatccagaatgggagaaagatgaaggccggaagactcagccagtttagtccttccatgttcctctgcctgcttttatcctagccgccctggcagctcattagatggtgcccacccagattgagggtaggtctgcctctcccagtccactgactcaaatgttaatgtcttttggcaacaccytcacagacacacccaggaacaatactttgcatccttcaatccaatgaagttgacattcaatattaaccatcacagtgcatttcctaatagaaaagggcatactcttacatgacttttgtacaatcttcaaaattaggaaacttaacatcaatacaatactattat

SEQ ID NO: 783091 - DNA, 621 bp, Homo sapiens
taattttatgtttaactttgtaagaaacttccagactcttgccatgcagtggcatcatttatgctcctaccagcaacgtaggagtttcaatttatccacattctcaccaatacttcttattattcttttaagaaaattatagccattctactgggtgttaaatggtatctcattgtggttttggtatgcattttcctaatgattaatgatgttgagcatctttccatgtgttaaatggccacttgtatttttttttggagaaatatctattcagatcatttgtcttcattttaatcaggtgctctttatattgttgagttgcaagagtcstttatatattctagatagtggactcttatcaaatacgtgtgattggcaaacattttctcccattctgtgggttgtcttcttactttcttgatggtgtcctttttatatgttgatgaagttcaacttatttgtttttaattttgttgcttatgcttttggtatcatatctaaaataacccattgcctaatccaagatcatgcagatttatagctattttcctactaagagttttatagttttaattcttacagttaggtctctgaactattttgagttaaattttgtgtatg

SEQ ID NO: 783092 - DNA, 608 bp, Homo sapiens
cagaaagcgtcgactcacagcacatcagaaaagagcagactctggatttgctgtttttaagaactaatacttaactaggaaagtctggtttttttttttttttttttttttttttttttttgagagggagtcttgctttgtcgcccaggccagactgcggattgcagtggcgcaatctcggctcactgcaagctccgcttcccrggttcacgccattctcctgcctcagcctcccgagtagctgggactacaagcgcccgccaccgcgcccgcctaattttttgtatttttagtagaggcagggtttcaccttgttagccaggatggtctcgatctcctgacttcatgatccacccgcctcggcctcccaaagtgctcggattacaggcgtgagccaccgcgcccggcccattcttgaagttagtgtgaagcaagaacctactcaatattggacgcagtaggtatctacagtccaagatacttgcgagcctgaggtcgtggggggattgcttgaacctaagaatttaccaaaggattactttagctcaggagttaagtgttctaataagtttacaccactgcgttcaaatctgggtgcctataagatc

SEQ ID NO: 783093 - DNA, 631 bp, Homo sapiens
gtcactaaaactacaagataccactctatgcctaaaagaaggcctacaatttaaaaagactgatactatcaggtactgggaaagatgtagagtgaagcaaccggaagttgcataaagttatggtggcaatggaaaatggtataaacactttggaaaacagttgggtaatttcttaaaaaattaaatgtgtacctatcatatgacccatttagtccattctgaactacttatttacccaaaagaaataaaagcggtggttcacataaagacttctaaaaaacrttcatagcagctttactcataatagccaaaacctggaaataattgtttatcaacaggttaacagataaataaattgctatacatcatacaatggactacccactagccaacaaaaagaaatgaagatgcaacagcatggatgaatcttgaaataatcatgctgagtaaaagaattagacagaaaagagtacatattgtaggatcccatttcaattaaattctaaagggcacaacctactgaatagtgacacaaggcagctgaatgtacctggtgatggaagaggacaagatggagagttacaaagtggtgtaagaaaactgtgggggtgacaaatgtgttcattatttt

SEQ ID NO: 783094 - DNA, 612 bp, Homo sapiens
tagagatggggtcttgctacatcgcccaggctggtcttgaactcctgggctccagcaatcctccctcctcggcctcccaaagtgctgggattaccggcatgagccaccacccggcctgcttagccactcttaagagagcgtttgttagcgacaaattctcttagttttccttcatctgagaatgcccatttgtccattcttgcagggcatttttgtttgatggggttttttttctttcaataaggggaaaaatgtgccacttccttctggccttcagagttccatatgagaaatctattgtcacttgtgatgttttccctttatagatgaggtgtcatttctttctcacagctttcaagactttttatttgcctttaagtttacagaagttcaactatgatgtcccttggaatgtctttktgttcatcctgtttggtcgtcactaagctaagctggttacgtctatagctttgtcttttgccagagttggtaagtttttggtcatgatttcttcaaatatgtttcgaggaccacctctttgtactctccttctgtgactgcaatggcaggaatgtcaggtattccatgtggatcccacaggtcctgaagttc

SEQ ID NO: 783095 - DNA, 612 bp, Homo sapiens
tagagatggggtcttgctacatcgcccaggctggtcttgaactcctgggctccagcaatcctccctcctcggcctcccaaagtgctgggattaccggcatgagccaccacccggcctgcttagccactcttaagagagcgtttgttagcgacaaattctcttagttttccttcatctgagaatgcccatttgtccattcttgcagggcatttttgtttgatggggttttttttctttcaataaggggaaaaatgtgccacttccttctggccttcagagttccatatgagaaatctattgtcacttgtgatgttttccctttatagatgaggtgtcatttctttctcacagctttcaagactttttatttgcctttaagtttacagaagttcaactatgatgtcccttggaatgtctttttgttcatcctgtttggtsgtcactaagctaagctggttacgtctatagctttgtcttttgccagagttggtaagtttttggtcatgatttcttcaaatatgtttcgaggaccacctctttgtactctccttctgtgactgcaatggcaggaatgtcaggtattccatgtggatcccacaggtcctgaagttc

SEQ ID NO: 783096 - DNA, 616 bp, Homo sapiens
caaaaattaaccgggcatggtcgcaggtgcctcgaattccagctactcaggcagctgaggtgggagaattgcttgaacctgggaggcagaggcctcaatgagcagagatgtgcaccctgcatctaacctggcaacacagcaaaactctgcttcaaaaaaataaaaattagtctgggcatggtggctcacacctgtaatcccagcacttttggaggttgaggtggttggatcacctgaggtcrggagttcgagaccagcctgaccaacatggagaaatcccatctctactaaaaatacaaaattagccacatgtggtggcgcatgcctataatcccagctacttgggaggctgaggcaggacaatcacttgaacccgggaggcagaggttgcggtgagccaagatcacaccattgtactctagcctaggcaacaagagcgaaactctgtctcaaaaaaaaaaaaatagaatgatattaaatgttaaaaatacaatgcttcattagctcacccaaaaaagattccaaagcacataagacaagcctatgccttatttgtaggcccttgacataaatgaagttaagggcaccaccacttagctttcacataaacatgggt

SEQ ID NO: 783097 - DNA, 641 bp, Homo sapiens
gtgcggcacacgtaggtcattgcttacttagatggcagtgaaccattcacgctcgggaagcaccactcctccccagacctggcagcattctccctggctcctttttcttgctgaaatatttctccaggagtgtttttggggttgactctcaagggggctgataggactgaggatggcttcctgcgtgcccatatttcatggcggtgagcaggacgcagccctgggttccagggtcctttcctctcgcgtctgaagctgtcaccccctttctttttgcatccgttgtctgtgctgcaattctaatgtcagcaccactcgcgttcctgtgagggttacctgctttttctctttggaagtttttagcaattttgactcaaaatgtagatgcttttctttgaaattacacagaacattttaactttaaaatgtaattaacgctctgcaggccytttcagtttgaggatgtgcgtcttttcttaattgggggaagttcctagtcatttttcagatacctcctcttatctattcatttttcctcttctaagcactgaatatttctcctccctcacctctgcctcctcaatcccttcagatccttctaaaagagctcagagcctgacttgtctcactcgttcattttc

SEQ ID NO: 783098 - DNA, 585 bp, Homo sapiens
caataatagagcactgatagttcatggcataatctggcaatagagatacacaaatatcaccattggagactcctatcaaccactttataagaagctaggatctgggtgactgtgtatagggcatttcaaacattttcagcaaactaatgaatactagatggttgcttctattgtcactagacaaaggggaaataaaagaatgagctcagggattctaattcccaactcaagtatcacataaatgacctgaaaactcctttgtgtgccctcaagtaaacccttagcccaggtagcccctcagctgagattgctgaaaatcaaactcagaatctcatcctgtggctagctgaattataatgcaagttgaactatttggagttttgatraagcatattcctcatttgggtgtgttgctccagctcatgtaacaagtgacctgaaaggctgctggtgttgagaacaagagaaggccgtgcagcaggtccaggtgtccgtgcatgctactctgccacagggaccatgtgacccagcagatccaatattgctcgaagcatcagtggcagataagtttggagcctttggcag

SEQ ID NO: 783099 - DNA, 515 bp, Homo sapiens
aatgctcactgaagggtgacctcagcagagcaggacgttaataacaggtaaataagatgacccattctgtagatgtcagtctctttccccagccacccctgtcatcaccccaggtctcagaaacaaagtggccatggtggcagggatgaggttatgcatgggctcaggattgtggactcacactcaccaaggccgaactctctacagccaccaatatgtccagtctaccagcagcagagaccaacactgagtccccagtatgacaccatctcccagagtgatcagccarccacttagtgacaggttgattacctacgaccttttccaccatggaacgggcagtatttgttctaagtggaatacacactttgcatatggatttgccctccctgagtacagtgcttctgctgaaactaccacctgtgggtttacggaacgccttctccactgtcatggtatccacacagcatttcttctggttaaggaactcacatcacagcaaaagaaatgccgcg

SEQ ID NO: 783100 - DNA, 383 bp, Homo sapiens
ctctattcctttcccttcaccatgttttcttatttcctgttccccttccctattggtaacctttttttttcttttcatttttagcttccagtttatccttccttttttactataagcaaataaacatattatactgtatgtacattcatatacacatatgggtatatatagtaatatacacatatgaatatawacattcatacccccctttcttagaataaatgatagtttataatatatgcttttcctaccttgctttttcacataatatacgctggaaaccagtcctcagcaatgtatagtgctattcctcattccttttcataattgcatagtattgctttgtgtagatgtgtgttagtttttttttgtctcattgataa

SEQ ID NO: 783101 - DNA, 617 bp, Homo sapiens
aaccgaatttccacaaagcaaacaaaaacataaagtggggaaaggacaccctattcaaaaaatggtgctgggataattggctagccacatgtataagaatgaaactggatcctcatctctcaccttatacaaaaataaattcaagatggattaaggacttaaacctaagacctgaaactctaaaaattctagaagacaacattggaaaaaacccttatagacattggcttaggcaaggatttcatgaccaagaacccaaaagcaaatacaataaaaacaaagagaaatattgggacctaattaaactaaagagcttttgcacagygaaaggaacagtcagcagagtaaagagacaactcacagacggggagaaaatcttcacaatctgtatatctgacaaaggactaatatccagaatctacaacgaactgaaacacatcagtaagaaaaaaacaatctcatcaaaaagtgggctaaggatattagtagacaattgtcaaatgaaggtatacaaatggcaaacaaacatttgaaaaaatgctcaacatcagtaatgatcagggaaatgcaaatcaaaaccacaatgtgataccactttactcctgcaagaattacca

SEQ ID NO: 783102 - DNA, 509 bp, Homo sapiens
gagaggttttcaggggttcttactctgccatgtcttctgacgtcactcctatctattcatttttaatttaatatgtttgtggtcatagaaattactttttatgctttcaatctttctaaaattgtggagaattaatttatagcttatcatatgatctattttggtgaacakactatagatatttaaaaaattgagcattttgcacttggatctaatgctctattgatgccaattagatcatgtttgttaatattgttttgtttatttttattttattttatgttgcagggtacatgtacaggatgtgcaggtttgttacctaggtaaatgtgtaccgtggtggtttgctgtacctatcaacccatcacctaggtattaaccctcacatgcattagttatatatcctgatgctctccccccctctgcccccacgacaggctccagtctgtgttggtcccctccctgtgtccatgtgttctcattgttcagctcctacttaaaagtgagaa

SEQ ID NO: 783103 - DNA, 571 bp, Homo sapiens
tacattgattttttatcctgaaactttactgaagtcatttatcagttccagaagactttggcagagtctttagtgttttctaagtacagaatcatatactcagtgaagagaggtaattttacttcctctcttcctattttgatgccttttatttctttctcttgcctggtttctctggcaaggacttctaatagtatgttaaatgggagtggtgaaagcgggcatccttgtcttgttccttttctcaaggggaatgcttccagcttttgccctttcagtatgatgttggctgtggatttgtcctaratggtgcttattttgagacagattcctttgatgcctagtttgttgaggatttttatcacgaaggaatgttggattttatcaaagtttctttttgcatctattgaaatgatcatatggtatgtttttaattctgtttatatgatgaatcatatttattgatttggatatgttaaaccaaccctacatccaaagcctacttgatcatgttgaattagccttttgaagtgtttctgcattcggtttgctagtattttgtggagaattt

SEQ ID NO: 783104 - DNA, 631 bp, Homo sapiens
tatgtaattattttctccctctctgtcacttatattatttgttatggtaaatctaaagctgctgtaacaaagggactccccaatgtagtggcttccagaataaataaatttcttgtatagcaacaaatccagatactagtggttcagattgatcgctggctacgctgaaagtagttattcaggtattctgaggtccttttcatcttgttgttctaccatcctttagagtagggatcagcaaattgtagcctgtgggttaaatctggctctctgtctgtttttggtaaataaaggtttattagcrcgcagcctcactcatttgtgtatctgttgcctatggctgcttttgtactgcaatagcagtgttaaactgttgtaataaagaccctatgtggcccttaaagcctaaaatatttactgtctggaactttacagaaaaagtttgcccacctctgcccaagagaattgtcttgattagcatagtcaaaaatgggtcccagacacctcacgtttaagtttaagagacagtggaagagccagggtttgttttatactagagatgacacagaagttacacatatcactttaattcacatcctattgaccaaaattagccgtaagcctcagataa

SEQ ID NO: 783105 - DNA, 606 bp, Homo sapiens
atcttatacttgtgggctaaggtggggagatacaaggggaggatgtgaatgaggctttgaaatgggggaaaaggcggcagtgaggtgtggctgtagctcaggaatagtcagggaagcagataatttagttaaaatatctcggcctaacaagggaactgggcaggtggggataactaaaaggagtgcttaaaaaagagtattgtctaagttggcaccagagttggggagttttaagaggtttagaagcctggccgtcaatactcacaacagttatggagacgagggaaacaggcccttaaaaagaaggtaatgtggagtgggtagcctccgtattgattgagaaggggacagatttaccctccactgtgagagttacctgaagatcggcatccgtgatagtctagggggcttccgaggcgatcgggcagcatcagtcttcagtcgctaagccaagaasatctgggaaggagtcagacagagagccttgggccggaattccaggggctctgggagtgactgccaggtgagttgaacagtccgattttcagtggggtcctgcacagatgggacacagcttaggaggaatcctgggctgcggtcattcct

SEQ ID NO: 783106 - DNA, 612 bp, Homo sapiens
ggcacattcagtcattcattttatattcctagtttatgccaggcaccaggctgggacctggagatttagagataacaaataacattggttcttgccctcagaaaagggagagagatgcaaagggaaatttcattatgagctgattagagctctgctagagggaagcacaggagctgtgggggctcaggggaggttcacagctctgaatggatcagggaaggctttttggaggagtggggttttgacctgattctccaaggaggaacaggagtatgccaagtggagaaaatatggcttggtcagtaggtgttcactgaaaacctcaagtgccagggactgtgctatggcttgtactgggtgttggggagatgaatcaratgagggcccggcctcaaagatctcacagtctggtcccattagctcaatcttgtcagggtccctccacgagtggcctccaactcatacatgctgtccagagcctgtcacctcttctgggtgggcagtgaaggaacaagagagcactgatccctggcctctgtcatgtcatcctgtggtagggatcgaggcagtggtgaggagcctgcagggaagcctgaagatgaacaacataga

SEQ ID NO: 783107 - DNA, 587 bp, Homo sapiens
gtctcgctctgtcgcccaggctggagagcagtggcgcagtctcggctcactgcaagctccgcctcccgggttcacgccgttctcctgccgcagcctccggagtagctgggactacaggtgcccaccaccacgcctggctaatttttgtatttttagtagagatgggttttcaccttgttagccaggatggtctcgatctcctgacctcatgatctgcccgctttggcctcccaaagtgctgggattacaggcgtgagccactgcacctggctttattttttatttttaattttwatttttatttttttattttttgagatggagtctcgctctgttgcccaggctggagtgcagtggtgcgatcttggctcactgcaagctccacctcccgggttcacgctattctcctgcctcagcctccctagtagctgggactacaggcgcccgcccccacgcccggctaattttttgtatttttagtagagacggggtttcaccataatagccaggatggtctcaatctcctgaccttgtgatccgcctgcctcggcctcccaaagtgctgggattacaggcgtgagccaccg

SEQ ID NO: 783108 - DNA, 530 bp, Homo sapiens
ctggctggcactgaccagtgttgccatgacccacacacacaccctgctactaagttctcagtgagttcccgagttccttccagtgaccgcatgggtctcagggccgctctctggtgccagggaacctgggaaacctcaaaggcagctgggaggtgccagactgcacctgacaggtgtttgtccaagcaagaatgagaaatattcgccagaaataagaagaattacctttcagctcttcgaccatcrcgtgtaacttggaaaactgttacacagggaagaggagagtgatgagaactagcccttcgctgctgctttggaaaatgtagaggggctgagaaacgaagctctgcatagcctctcctgctggctcctcagggcccctctgcaggctgcggtttggcctcagggagcactgagggtgcagaacgggggctctggagggctccaggcctggtgggagccagggcagccaggccatcccaggaagacagagcaggcaccgtagcctcatagtgaggtgttaaaataag

SEQ ID NO: 783109 - DNA, 562 bp, Homo sapiens
cttggtaggtggctttttttttttttttaggaaaatatctagaacatggtgtttccatgagacaggaagaaagggagttaagttgttttgcaaaataaatagatatattcccattttaagatggcagtttattctcactgtaaccttgaaaccttgaaatacatgataaaagactttgggtatcagtcaaatagagacagagatgaaaatgaaacaaagtgaaggtgcccagaactttaatcccaraaagagtgttggggcacagatttctttagctgtgtggcacacatgaagggccaaaacaatgttctcttaatcagaacaaaagactaagttaacaggagtggctaaggtaatatctaaaaactcatttgactacctcaagatggcagaaatgcaaggacaaactatccttccatgttcaaaaataagtcataatcagaaaacaagtgcagcatatatatttttaaaagtcccttcaaaaagctagaaagaaacagagaaaacaaatggtgaagaacacctctcaaaacatgtttctacagggcagattaaagttcac

SEQ ID NO: 783110 - DNA, 543 bp, Homo sapiens
tctcggtgcctcctcagcctcggtgtccactctggctgcacttgagcccttcagcccactgctgcactatgggagcccctctctgggctggccgaggccggagccggctccctctgcttgcggggaggtgtggaggtagaggcgctggcgggaatcgaggctgtgcrcggtgctcgcaggccagtgccagttccaggtgggcgtgcctcggcaagccccgcactcagagcagctgccagccccaggcaatgaggggcttagcacctgggccagcagctgtggagggtgccccagtcccccagcactgccggcccgccacgccgtgctggaattctcaccgagcctcactcgcctccccccggggcagggctcgggacctgcagcctgccatgcctgggcccccacccccggtgggctcccctgcagcctccccaatgggcaccaccccctgctgcatggcgcctggtcctatccaccgcccaagggctgagatgtgtgggcgcatggctcaggactgtcaggcagctccccggggacaggccc

SEQ ID NO: 783111 - DNA, 543 bp, Homo sapiens
tctcggtgcctcctcagcctcggtgtccactctggctgcacttgagcccttcagcccactgctgcactatgggagcccctctctgggctggccgaggccggagccggctccctctgcttgcggggaggtgtggaggtagaggcgctggcgggaatcgaggctgtgcgcggtgctcgcaggccagtgccagttccaggtgggcgtgcctcggcaagccccgcactcagagcagctgccagccccaggcaatgaggggcttagcacctgggccagcagctgtggagggtgccccagtcccccagcactgccggcccgccacgccgtgctggaattctcaccgagcctcactygcctccccccggggcagggctcgggacctgcagcctgccatgcctgggcccccacccccggtgggctcccctgcagcctccccaatgggcaccaccccctgctgcatggcgcctggtcctatccaccgcccaagggctgagatgtgtgggcgcatggctcaggactgtcaggcagctccccggggacaggccc

SEQ ID NO: 783112 - DNA, 658 bp, Homo sapiens
gaagtagcaataggactaggtcatggctgaccccttcccggggtctctaccaattcccttctcccattgacatagacacagagtagatcagaagttggattcattagcagacattcacctcaggaatgagatgctagtctttccttcttttaaacctagtgagtaattatctctattagcaattatcttggagagtcaacctcacaaacattctctactaggtcactgaattataacaccctcctaaaatacctaatcttctatttattgagtatggagagaggtgactggatgagggtccctaaatttgttcagtggcctctaaagaacctaaaatgagggctaacctcattgcaagctccccttagaaggcggtggtattgtcaggctggttttgcagcagcttctgggctttagcagggatttctagaaaayagacaatggaaaacatcactttcaactttctgatagacattaaataaaaaggtgagggggtagaacaaagaggaagggagagagaagggaggaaagataagaagaagaaaaatgaacaaaaggtttgggtctttaagatgttattagaatactgctcttggtgaagacctaaatctcccttaatttttataccataaaagcaaatattatttcatatactcct

SEQ ID NO: 783113 - DNA, 463 bp, Homo sapiens
cttctccctctcaacacttgtcacaattgtcgtgcaacatttaactgtgaaatttgtttcacttctcttcattctactgaaattttagtttcaaaattataaaatccacgtgtatgcatactctgtactgctatatgttctttgcatacagaaggacctaattggatatttattcagtgagatcgttttattaacgaagagaaaaaagtctccatgaaattttggatgctatgtcatgcatggasttacaattgcctaaaaccattgggtttctttgtaacctaaactctcatgcctaattatgtggacctaagtacagaactataaatgtatttattgcttttaaacaccatcctattagattgagcccactcattggatttaaattatctcccactttcatatcatctgataaggtgataatcaagtcactgacaaaagggctgattaggacaaaactaga

SEQ ID NO: 783114 - DNA, 513 bp, Homo sapiens
taaatcttgctgcttctcactctttgggtccacactgcctttatgagctgtaacactcactgtgaaggtctgcagctttactcctgaagccagtgagaccacgaacccaccaggaggaacgaacaactccagatgcgctgccttaagagctgtaacactcactgtgaagctctgcagcttcaatcctgagccagcaagaccacgaacccaccagaaggaagaaactgcgaacayatccgaacatcagaaggaacaaactccagacacgccacctttaagaactgttaacactcaccgcgagggttcgcggcttcattcttgaagtcagtgagaccaagaacccaccaattccagacacactgggaccaatatattcctggcaaattatctttgcacaagcaaaatgatacaaatagaagactttgagaaaaatggaaaagcattctatacattgtccccacaaagccattctgtttttattgtttcctttattccagtaggctaggtcaagct

SEQ ID NO: 783115 - DNA, 513 bp, Homo sapiens
taaatcttgctgcttctcactctttgggtccacactgcctttatgagctgtaacactcactgtgaaggtctgcagctttactcctgaagccagtgagaccacgaacccaccaggaggaacgaacaactccagatgcgctgccttaagagctgtaacactcactgtgaagctctgcagcttcaatcctgagccagcaagaccacgaacccaccagaaggaagaaactgcgaacatatccgaacatcagaaggaacaaactccagacacgccacctttaagaactgttaacactcaccgcgagggttcgcggcttcattcttsaagtcagtgagaccaagaacccaccaattccagacacactgggaccaatatattcctggcaaattatctttgcacaagcaaaatgatacaaatagaagactttgagaaaaatggaaaagcattctatacattgtccccacaaagccattctgtttttattgtttcctttattccagtaggctaggtcaagct

SEQ ID NO: 783116 - DNA, 553 bp, Homo sapiens
ctgtgctccactcttgaccacgcgatgttattttaacctcaccaattcacatgtcctacagactcccaacatcatttacctcccaagctgactgaaagctccacggggccatgggttctgagtctcctaatggtgccctgcactggagggtggacaaaatgactgatttccatgagataaattcttgtattcagaaaatgaagagaagatagttattagaaaaagcacactgacgatgttctgtctctcccaaataacaaggtttgtgaagtcttgttctgtaagacagaggaagaagagactgaggattttgygcattggagactctgtggatggtgctgataaattattcttctccctctgcaaataattaaagcttatgttttaaggcaaactaaggaccagagcaaaaagtactttcagcagataacatgctgtaagtttctgtttacatttctatcactaagaatggacacttcttaaatctgccgtgttcatagttgtaaattttctaaagcatgggatggacttggctccttgttattgtattttt

SEQ ID NO: 783117 - DNA, 517 bp, Homo sapiens
tttcttttttttatttttttgagacagagtctcgctctgtcgcccaggctggagtgcagtggcgtgatctcagctcactgcaagctctgcctcccgggttcacgccattctcctgcctcagcctcccgagtagctgggactacaggtgcctaccaccacacctggctaattttttgtatttttagtagagacggggtttcactgtgttggccaggatggtctygatctcctgaccttgtgatccgcctgccttggcctcccaaagtgctgggattacaggcgtgagccaccgcacccagcctgatctactttctgtcactatacattagtttgcatttcctataattttatataaataaaaatcacatagtgtgtactactttttgtctgccttctttcacttagcataattattttgagatttatctatgttgcagcatgtattaatagttcattcaatttttgttgttgaatagtgttccattgtgtttagaagcatgtggaagccaaaggcaga

SEQ ID NO: 783118 - DNA, 652 bp, Homo sapiens
aaatctttgctatgttgatttcaaaccatttgttaggtttgcttaacctgagtttcctcatctgtaaaatggggagaataatatctacctctaagccccgctgtcaggattagatagaacatgctaaagaaagggcaagtaccatctakttttcttttcaccacgcaaatcatcacaagctcttcctcattccaggaaaaccttcatagtgttcattcatgatcagatcagaagtagtgtaaaaaatataggggtttcgggaggcggagcttgcagtgagctgagatcgcgccactgcactccagcctgggtgacacagcgagactccatctcaaaaaaaaaaaaaaaaaaaaaaaaaaaatatatatatatatgggtttgacctcaggcggccttgggtccaaatctggtctcaggtgctcactagctgtgcagcccaggcctcagttttctcataggtaaagtggggataattatgcttactttgcaccaaaagttaatgtcacatggtgctgacagatcttgcctatgattctttctatttatctggaattggaaattagaacctacagctgagagcaaaaggcagtgattgaccttctgtttaagacagtggttctcagtctgagactgttttgtttcccagagggca

SEQ ID NO: 783119 - DNA, 596 bp, Homo sapiens
cggagcttgcagtgagctgagatcgcgccactgcactccagcctgggtgacacagcgagactccatctcaaaaaaaaaaaaaaaaaaaaaaaaaaaatatatatatatatgggtttgacctcaggcggccttgggtccaaatctggtctcaggtgctcactagctgtgcagcccaggcctcagttttctcataggtaaagtggggataattatgcttactttgcaccaaaagttaatgtcacatggtgctgacagatyttgcctatgattctttctatttatctggaattggaaattagaacctacagctgagagcaaaaggcagtgattgaccttctgtttaagacagtggttctcagtctgagactgttttgtttcccagagggcatctgggcaatgtctgaagacattttgattgtcacacctgcgggttgctatgggcatttagtgagtagaggagaggatgctactcaacatcctgcagtgcacagattagctccccccgagagttatgtggccccaaatatccatagtgcagagactgagaaaacctagtataaaatcattataattattattattattatttttgagac

SEQ ID NO: 783120 - DNA, 596 bp, Homo sapiens
cggagcttgcagtgagctgagatcgcgccactgcactccagcctgggtgacacagcgagactccatctcaaaaaaaaaaaaaaaaaaaaaaaaaaaatatatatatatatgggtttgacctcaggcggccttgggtccaaatctggtctcaggtgctcactagctgtgcagcccaggcctcagttttctcataggtaaagtggggataattatgcttactttgcaccaaaagttaatgtcacatggtgctgacagatcttgcctatgattctttctatttatctggaattggaaattagaacctacagctgagagcaaaaggcagtgattgaccttctgtttaagacagtggttytcagtctgagactgttttgtttcccagagggcatctgggcaatgtctgaagacattttgattgtcacacctgcgggttgctatgggcatttagtgagtagaggagaggatgctactcaacatcctgcagtgcacagattagctccccccgagagttatgtggccccaaatatccatagtgcagagactgagaaaacctagtataaaatcattataattattattattattatttttgagac

SEQ ID NO: 783121 - DNA, 637 bp, Homo sapiens
agatgatttttttcctccacttagtagcttttatgaaaatttctctttaggataatactcaaaggactgcccgtgtggaaattctggatcagccagcttggggtagctgtgaagatgagtagcatcctagrtatgggatactgcatgtcaaaatacagagatctgtgggttgctccgatgagctgaatgacccagaagataaaagaggaaggttgagatcactgtagaagcagtgaggtataaaaggcaactcagtgtgtcacataaccctgctcctaaactctgaaatatgccataaactcataatagcatgtaaaatgcatactgtgcatgtatttcttgcagaaaccagcaagaaactgagctcggctccctggctcacatagacatggaacagagatcacatctgtgagtggaggagccagacttttcatataagcacgtaagcatctgcgatttatacaactcctggggagggaaagcttatggtttcttaaggctcaggaaatgggaattctaggaagcctacttgcctctttaagatcacgaggacgtagctgacctaaaggccacacttaccctgaatgcaaccttgacattttcttccttagatgtaaaacttttgaagttggctgat

SEQ ID NO: 783122 - DNA, 465 bp, Homo sapiens
tctagtgcctactctggaaacactcatttgttaggtacaccttgctctctgaaatccaccctccaccttgttgataaatacaatgtttgtttatcttcaaggttcatctgtcatgtcttctaattcttttggtgaggatatcatgatctctatttcctgcctcagttccatttgccttggtgagtgtggggaggttgataagccacatttactcaaaatgcrtatcttctcctgatgggcttctggtgattttaactacactcagatccgaagctcttctctcagagtgaaaatgttcagcttcactgtggctccaggggactggacatgatttggagtttctcattggctccagggttgtatgtgcactgaaaacaactggcccagaattttgtattatgtatatatcaccaaactccataacctgcacacttatgggaagatgtgtgatagaaggaaaagact

SEQ ID NO: 783123 - DNA, 638 bp, Homo sapiens
catccctatgatttcccctttagtggatccgcttacaaacatgctattgtttttcttctagcaaaactttactttgatcccacctgtctctgtagctaccacgccattcctctggtcccctttatgaaagagctcctcaaagattgtatgtaccaacatttgcagttcgtctcctttcattccctcttaagaccactcaaatcaggcagaccccctaccagtccagtaaaactgctcttgtcaaagttattagggacctccttgttgctaaatccagtagcctgttctcagtccttaccttattccacctctcaatagcatcaacactgcygatcactccctcctccatgactctttcttcatttggcttctaggacaccccacacgctcctggtttcccacccattatcttttgctgattcttcctcttaacgttggagggcccaggacccagtccttggacctcctctctgtccccactgttgccgtttgtcatctcaccagtatcctggtttaaatactatctgaatgctggctcaaatttctatctctagcccagacctcttcctctgaactgcatacttgcatttccagttgtttacttcacatcttctatgttcagatctgaaaatctgaac

SEQ ID NO: 783124 - DNA, 597 bp, Homo sapiens
tggtttcgagtcacacagatttgatgaaagcctcatggataaaactatctgcatcacttaaaattctctcttgggtgattgctgctcaggtatatcatggaatcaatgtgatatgggtcagatgagctctcaggcactttagtggaattcttcatacttgtatttgatgtactttcaaaaaggttcattytaatcctatgtatatgtagttggagtggaaaatgcacagattttcattttatagtttataatggacacacttttcccccacaaccctcggatgcaagaaatgtcccacctctatacattttcgtaaatcagattctatcttctatgctccaacttgttagagcacaaagacgaccaataccagtgatgattttgactctccccctcggctagagtcttacagtgacaagaaaatttccataaggttcctatgactttcattccactttgatagccactgaaatgctcattgtttaagtccttttggtccattttgaaagaccgtttgcttaccctccctccatgtttctttgggaaatgggaaactttgtcaagtctactaggtgaagttatctgtgaggaacttgt

SEQ ID NO: 783125 - DNA, 383 bp, Homo sapiens
actgatgactatctgataggtgacatcagtaaaaataaataagtatatatggatctgtcccattggggtccccctctttaacctacctgcctgcaaaactggatatgttctactgcactgcagccagcatggggcatgarcaaacacctgcattctagtggcagttctcaaagctcattttcttttggtctcactcttcagccttggtaggcttaaggcagctattctgggtaagattgacagcttcacagaccccaactttcccttgaatgcatcatcctgaagtctcaactcaggggtaaaaactagaatgcctgaaggttgctgcagatccaagacacggtctccaatttaccattatccataatgaaagtggtattttg

SEQ ID NO: 783126 - DNA, 581 bp, Homo sapiens
actacctgttgctctattctactgtggttgagctagcacccaagccacaaaatgaagtccttcccacttttccctaccctttccacaagcagaaaattctctcccatgaccactattgactgctccaggcccatggcaagtaatgtgtagctatcacagatgttcattcaatgcccaagggctcttcagtcagcttgtggcraatgctttcatgcctagggctctcccttcagggcagtgggcacccctctgacctaaggcaggtgcagaaatgccatccaagagccatggcctggaatcagggaccccacatgccgacttggtgccctatcccactgttgccaagctggtacctaaactgcaagaggaagtcccctttattcttccttctccttttctcaagtaaaaggagtccctctccatagccaccacagctaggaatatgctgggtcacacctaaagccagcacatctctgagtctcacccaaggcctgcggcaagtactgccttgctactactgttgattattcagggcccaagagtgatgaatcttggtagcaggtgatgaatcttgccaagat

SEQ ID NO: 783127 - DNA, 606 bp, Homo sapiens
agctatgggtatggaagaggtcaccccagaaaagtgtggtaagtaaaaagatacaagtgatagaacactgggaagcaacattgcttaagggataagcataaaagaggaacatatacatgatatcagaaaaaaagagaatcaaaagatggcaggaaagccagaaagatactgtcttagaaagctaaaaaaagaatattttaagaagtagttaacacgtcaatagtgataaatttagcagaggttaagaaagtaaaggmccaaaaaaaaaaaaaaaatcactgggttaacacaaaagtttttggtaacctctgaaatggtaggagacccagaatatatatagagagaattggccatttacagaatgaggcacaatagacaggcttttaatttatccgtgaagtgggagtcaggaccttcaaatgtggaactatgaaggcaagatgaaacatagtaagtttaaggagagtggagaagtttttaaataaatactattagaaataaaagagagttgtctgtgaaacagaataatttccaggcaggattaatggcctagctgagaataaagaacaaattggtagagttttctagcacatttcatagttatcc

SEQ ID NO: 783128 - DNA, 569 bp, Homo sapiens
taactaaatgcataggaagttactagtctcaaatgttttgtgttagaaaaaagctttactattcaagccaacaactggaattgctctctatgactagaagactgtgggtgctgaaactagagattatttttgttttatttagcatgaccatatgtattttctgtctgaagaatctacagtgtagtagatccaatgtagtaaatttgtaatacgaaaaaaaaaacagctctgaaagttttacaaaaattattaaactaggagtagctacttgtcaaccttggttaagaggaggtattgtctttcctgtaggatcacagtgacagagacaaacaaagctcttcaataaacactggctgaatgagtgtgaatggacagaatgaygttattaatcgctttggtaactggggatcttatctgctctcccctcatcactgagtaacatccacattagaaaagagatgatgtgctttgtcttttttgtctaatctctctcttattggcaacactcactgaactgagaaaaataagtgaacaggggagtcagtccaaataaagggcttaaattcctg

SEQ ID NO: 783129 - DNA, 592 bp, Homo sapiens
ttaatattttacatttagataggcaacgccaggtaagaagaccaagaaaatttattggctcaaattcaatgggcaacacccacagtgttggtgactttgtaatatcacactgtggttacatctaaataatattgacacaatatcactacagaaaaatgtatttggaattgtgaatctataaaactgtggcttcatggaagaacacacatggggtcctataatagatttctttttaaacattaaaatgtgggttttagaatgaagatttttttttttttttttttttttttttttttttaatgaggcagagtttcgcccttgttgcccaggctggagtgcaatggwgcgatctcggctcactgcaacctccacctcccgggttcaagtgattctcttgcctcagccttctgagcagctgggattacaggggcgcaccaccacgcccagctagtttttgtatttttagtagagatggggttttgccatgttggccaggctggtctggaactcctgacctaaggtgatccacccacctcagccttgccaatgatccacccacctcagcctcccaaagtgctaggattacaggtgt

SEQ ID NO: 783130 - DNA, 564 bp, Homo sapiens
aatgtatttggaattgtgaatctataaaactgtggcttcatggaagaacacacatggggtcctataatagatttctttttaaacattaaaatgtgggttttagaatgaagatttttttttttttttttttttttttttttttttaatgaggcagagtttcgcccttgttgcccaggctggagtgcaatggtgcgatctcggctcactgcaacctccacctcccgggttcaagtgattctcytgcctcagccttctgagcagctgggattacaggggcgcaccaccacgcccagctagtttttgtatttttagtagagatggggttttgccatgttggccaggctggtctggaactcctgacctaaggtgatccacccacctcagccttgccaatgatccacccacctcagcctcccaaagtgctaggattacaggtgtgagccatcgcacccggcccatacttcatttctcattgggaaaatcatgggtgggaacacaattcccttaaatggtaggatcctaaacttttaaccacaaggttgtttcattcatatatctgactgt

SEQ ID NO: 783131 - DNA, 647 bp, Homo sapiens
gatcattttggaacgttaagatttgactgccctgctggattttggacttgcatggggcctatagccccttagttttggccaatttctcccatttggaatggctgtatttaccaaatgcctattctcccattgtatctaggaagtaactaacttgtttttgatttcacaggctcataggcagaagagacttgccttgcttcagatgggactttggatttagacttttgggttaatgctgaaatgagttaaractttgcgggactgttgggaaggcataacttgttttgaaatgtgaggacatgagatttgggatggggccagggtggatttggctgtgtccccagcaaaatctcaacttgaattgtatctcccagaattcctacatgttgtgggagggacccagggggaggtaattgaatcatgggggccagtctttcccatgctattctcctgatagtgaataagtcttacaagatctgatgtgtttatcaggggtttctgcttttgcgtctcctcattttctcttgctacaactatgtaagaagtgcctttcacttcccgccgtgattctgatgactccccacccatgtgaaactgttaagtccaattatacctctttttgttgtcagttttgggtatgtcttcat

SEQ ID NO: 783132 - DNA, 571 bp, Homo sapiens
tctttgtcaaaacaaaaatatcttaaaattttacttagggctagatatttttatatctaatgagaaattttaaacctcaattttttcttcctcactatatcccaattaatgttgatgtatgcatattaaaaatgaaacattttatacaaaattagcaaggcatggtggtgcatgcctgtaatcccagctactcgggaggctgaggcaagagaattgcttgggcccgggaggcggaggttgcggtgagccaaratcacgccattgcgctccagcctgggcaacaagagcaaaactgtctcaaaaaaagaaaataaataaaataaaataaatcacaccaataatactttcaaatgtataaacctttaaggtatgaagtaaaacaaaccttaccttagacacagggtcttattcctttgtggaagcttatttttctaatctggaaaacaagatgagtattgaatattttatacatatgatgataaaatatgaaacagtactttttcatattttatcatatttttaagatgtagattgaaactaatgtacattttatactatattagtaaattga

SEQ ID NO: 783133 - DNA, 657 bp, Homo sapiens
ggaaaaggatatggcctacttggtcaaggtgaattagctttttgatgtgctgctagattcgatttgctagtattgtgttgaggatttttacatcaatattcatcaagaatattggcctgaagttttcttttcttttttttttttcttgtgtctctgccagattttggtatgaagctgatgctggcctcatagaatgaattatagatgatcycccctccttaaggttttggagtagtttcaataggaatggaagcagcttttttttttttttttttcatgtatctggtagaattcagctgtgaatctgagtggttttacttcttggaaggctttttactactgattaaatttcagaactcattattggtctgttcagggattcagtttcttcctggttcagtcttgggaggttgtatgtgtcgaagaatttatctgtttcttctatattttctagtttgtatgcacagaggtgttcatagtagtctctgaaggtttttagtatttctgtagggtcaatgataatgtaccctttgtcatttctaactgggtttacttggatcttctgtctttttttctttagtaagttagactgcaaactagactaacaatttttttcaaataacctatttctagattcattgatcttttgtacagctt

SEQ ID NO: 783134 - DNA, 530 bp, Homo sapiens
aatacatgtgtagggagaggaaagagaactaaacatattttacagacaaatgaaatcaactttaactgaaacccagagaaaaaagggaaaaatgaaacttcttaacgtggggcaagtattagtagactcctttaagagagattctggtagacaggtcactttcatagcagaaagtggttgtgcaaatatgtaaaattcttggtatattaagatgaaaaatctaaataggttacctgtgaaaagattcaaatggaaatayactaacatagaattgataaattatagggttgtaagcagatacaattcttataagaaacgtacatgcgatgtgtatgcaaaggcttatactttggaagtccatgttaaaatattaatagtgattctttgtgagtggtgagaatgttatttttatttttttataactttctatgttgtctgaagtttttgccatgtgtattttattttcagttagaaaaatatgtaatatcctctattaaatatgctaatatattttcattgtaaaagcttct

SEQ ID NO: 783135 - DNA, 530 bp, Homo sapiens
aatacatgtgtagggagaggaaagagaactaaacatattttacagacaaatgaaatcaactttaactgaaacccagagaaaaaagggaaaaatgaaacttcttaacgtggggcaagtattagtagactcctttaagagagattctggtagacaggtcactttcatagcagaaagtggttgtgcaaatatgtaaaattcttggtatattaagatgaaaaatctaaataggttacctgtgaaaagattcaaatggaaatacactaacatagaattgataaattatagrgttgtaagcagatacaattcttataagaaacgtacatgcgatgtgtatgcaaaggcttatactttggaagtccatgttaaaatattaatagtgattctttgtgagtggtgagaatgttatttttatttttttataactttctatgttgtctgaagtttttgccatgtgtattttattttcagttagaaaaatatgtaatatcctctattaaatatgctaatatattttcattgtaaaagcttct

SEQ ID NO: 783136 - DNA, 599 bp, Homo sapiens
tgaaggacggacagtggttcaataccagaaaaaaacggttgtgtttaccacttaccaccatcattatttctgtatgattttcttcccaacgtccttgcttcttcgatgccatcaccatctatgctcctcatctcttgtatttctccagcaaagctccacgttgctattgaaattcaccagaaatattctttgtgattctgtctttgcctggaatggtttttacccaacatgtacctatagttggctttctcacctctcttgggtttttattccatgatcactttctcttcgatccaaaattgcatttgtgcctgccacacaaatacatattccctacccgactactaggttartagctctttgtagtgcttattcacatctaacatactggataatacccatgtttatcatgtttattgtctctcaattacctctagaatatcagctccaccatcgcagggatctctgactaccaggcaactcccttgtaatgttaataatctgttccagaaaatcatatgttctgtgtgaaaatgttaaccaggaatccatttcctattattagtagtagacagaaaataatgtattacatataaacc

SEQ ID NO: 783137 - DNA, 401 bp, Homo sapiens
tctaatctcacaaagagatcataaaagtgagtagagatctcttaataaaaatttcaatacgttttcttatatatatttcaaagtaacagatttctaaacacaatatatacataaataaaattgtgaagaaagccaaaaaaatgaagaaagwattttcaagtcctaaaaagcaaagcgtttttaaaaattttttattttaaattcagggatacatatgcaggtttgttacataggtaaatgtgtatcatgggggttggtatacagattatttcatcaccaggtattaagcctagaatccattagttatattttctgatcctctccctcctcccattctccaccctcaaataggcccagtgtgtgttgtttccctctatgtgtccatttgttctcatcattta

SEQ ID NO: 783138 - DNA, 401 bp, Homo sapiens
tctaatctcacaaagagatcataaaagtgagtagagatctcttaataaaaatttcaatacgttttcttatatatatttcaaagtaacagatttctaaacacaatatatacataaataaaattgtgaagaaagccaaaaaaatgaagaaagtattttcaagtcctaaaaagcaaagcgtttttaaaaattttttattttaaattcagggatacatatgcaggtttgtyacataggtaaatgtgtatcatgggggttggtatacagattatttcatcaccaggtattaagcctagaatccattagttatattttctgatcctctccctcctcccattctccaccctcaaataggcccagtgtgtgttgtttccctctatgtgtccatttgttctcatcattta

SEQ ID NO: 783139 - DNA, 614 bp, Homo sapiens
tttcactttttgatgcctcagttcatcttttgaaagccacgagtaacagtagttattgtttatatctttatgacctatctgatagatcataaagattaaatgagtacatgcattaaaaaacaaaaacttcagcacagtgtgcaggcagatagcccttattaatatgtcacgtcctctcctcctttccacccctgttgactaaacagatactagaaaagcagattttgagaattgtctattyatatccttagcccactttttgacgggattgtttgtttttttcttagtgatttgtctgagttcattgtagaatacaaatggccaagaaacacatgaaaaaatgcccaacatcactaacgatcagggaaatgcaaatcaaaaccacaatgcaataccaccttattcctgcaagaatggccataatgaataaataaaaaatacagtagatgttggtgtggatgcggtgaacagggaacacttctacactgctggtgggaatgtaaattggtacagccactgtggaaaacagtgtggagattccttaattaacaaaaagtagaattcccatttgatccagcaatcccactactgggtatctactgagagaaaaagaa

SEQ ID NO: 783140 - DNA, 614 bp, Homo sapiens
tttcactttttgatgcctcagttcatcttttgaaagccacgagtaacagtagttattgtttatatctttatgacctatctgatagatcataaagattaaatgagtacatgcattaaaaaacaaaaacttcagcacagtgtgcaggcagatagcccttattaatatgtcacgtcctctcctcctttccacccctgttgactaaacagatactagaaaagcagattttgagaattgtctatttatatccttagcccactttttgacgggattgtttgtttttttcttagtgatttgtctgagttcattgtagaatacaaatggccaagaaacacatgaaaaaatgcccaacatcactaaygatcagggaaatgcaaatcaaaaccacaatgcaataccaccttattcctgcaagaatggccataatgaataaataaaaaatacagtagatgttggtgtggatgcggtgaacagggaacacttctacactgctggtgggaatgtaaattggtacagccactgtggaaaacagtgtggagattccttaattaacaaaaagtagaattcccatttgatccagcaatcccactactgggtatctactgagagaaaaagaa

SEQ ID NO: 783141 - DNA, 441 bp, Homo sapiens
aggaagcttctaagtagtaggactatgtagctggactatgggtgtgtgtgggtagctggactatgggtgtgtgtgccaccacacccggctaatttttaattttttttgtagtgatgaggtcttgctatgttgcccaggctcaaattttctttatgaatttgtattaacacccaaaatcttattaaaacaatctctggctagcattgcgatcttgagcaagacacactctgcacttayctccagaggccctttcagctcaatgaattgttactactttggggtatgtggtgtttaaagttctggtgggacatacatccttgtatgttaagttgcctttccttcttagctagcatttatttactttcctagtacttgagtttctcttccactttctctttgttttacctgtttttggttaaccttttacttaggctatggatt

SEQ ID NO: 783142 - DNA, 558 bp, Homo sapiens
gttaatttgcaggcccctgaccattgaacataagctggtacaagaaaaaggcttttccccgttcccaacagaatgaatgaatgaataacaaattgatactcatatcatacaacactataagtgatgtattttctcaggcagggaagtaactgtgggtattcagcttcatatctgcacaaaaatagaaataggatgttaaaaaagagtttgctacatgatgattccaaactgactaaaataaattctgaaccataattactaaggtatatgaggccaatcatcaraaaagaaaacagtaaggtcttccatcttcctgcagatatttgagtcaaatgaaaataatgtcacttttttttttcttttttttttttagacagggtctggctctgtcaccaaggctggagtgcagtggcgcaatcctagctcactgcagccttgacctctcgggctcaagcagagaggtccatatggattggaggccttctcccatccatatctctctcctcccagtttgagatattaggttggtgcaaaagtaattgtggtttttgccattat

SEQ ID NO: 783143 - DNA, 558 bp, Homo sapiens
gttaatttgcaggcccctgaccattgaacataagctggtacaagaaaaaggcttttccccgttcccaacagaatgaatgaatgaataacaaattgatactcatatcatacaacactataagtgatgtattttctcaggcagggaagtaactgtgggtattcagcttcatatctgcacaaaaatagaaataggatgttaaaaaagagtttgctacatgatgattccaaactgactaaaataaattctgaaccataattactaaggtatatgaggccaatcatcagaaaagaaaacagtaaggtcttccatcttcctgcagatatttgagtcaaatgaaaataatgtcacttttttttttcttttttttttttagacagggtctggctctgtcaccaaggctggagtgcagtggcrcaatcctagctcactgcagccttgacctctcgggctcaagcagagaggtccatatggattggaggccttctcccatccatatctctctcctcccagtttgagatattaggttggtgcaaaagtaattgtggtttttgccattat

SEQ ID NO: 783144 - DNA, 467 bp, Homo sapiens
gtagataacattaaactgaaaatgtttcttgacgttaaactgagaaatgcttctaatgaccaggaagacagaattgaaagtagccttaattaattgaagtgattactgtaaaacaggttaaaattgcatagggaacactgcctgcctggcgaagcattgcatggtgtgaggagtgggcacmggcgcagcactcaggtgttttgcgtttgtctagaaacactgtcctttcagtccttaagcctcatggacagctgtttctcggggactgtcagggtctcaattttgaattgtcttactgattttagatgagatagtttatattccagagggcttttttttttttttgagacggagtcccactctgtcgcccaggctggagtgtgatctccactcaccgcaacctccatctcgcgggttcaagcgattctcctgcctcagcctcccaagtagctggaattacaggcgca

SEQ ID NO: 783145 - DNA, 578 bp, Homo sapiens
taatcccagcactttgggaggccaaggtaggagggtggcttgaaaccaggaattcgagaccagcctaggcaacagagcgagaccctgtctctacaaaaaaaaaaaaaaaaaaaaggcaaaaaaccccccagaattagccaggtgtggtggcacatgcctatagtcccagctactcgggaggctgaggcgggaggattgcttgagcccaggagtttgaggctgccatgagctatgatcacaccactgcactccagcataaaaagcttggttatttatcttagttaaagctgtccttaaagaatttataaatggttgcaaayatttctgaaaatcatagatgtatggtttctatggttcctggttactttatccagtaaagtaacatgacagcttattttatggatagtcactagattgtaaacctttggaagttgggactgttccattcatcatcttcacattccccactgtgcaaagcacagtttgctcatttgttttgtttcatttttttccctttcaactatagttttcacatgtaaaccatcaaattataagagattaaagataatttaggattt

SEQ ID NO: 783146 - DNA, 578 bp, Homo sapiens
taatgccttttttgtcctttttgatctttgctcagttaaagcctgttttgtctggaactaggcttgtgaccctcgctattttctgttttccatttgcttggtagatttttgtccatccctttaatttgagcctatgtgtgtcattgcatgtgagatgggtctctcgaagaaagcatgccaatgtgtcttggttctttatscagcttgccactctgtgtcttttaattgtgacgtttagctcatttacatttaaggttagtattaacatgtgtggatttgattctgtcatctgttagctggttattttgcaggcttctttatgtggttgctttttattgtcactggtctgtgtacttcagcgtgtttttgcagtggctagtaatggcctttctttccatatttagtgcttcctttaggtgctcttgtaaggtatgtctggtggtaatgaatttctttagcatttgctggtctgaaaaaaatcctacttctccttcacttattaagcttagtttggccaaatatgaaattctgggttggaatttttttaggaatattgaatattggtccccagtctcttc

SEQ ID NO: 783147 - DNA, 578 bp, Homo sapiens
taatgccttttttgtcctttttgatctttgctcagttaaagcctgttttgtctggaactaggcttgtgaccctcgctattttctgttttccatttgcttggtagatttttgtccatccctttaatttgagcctatgtgtgtcattgcatgtgagatgggtctctcgaagaaagcatgccaatgtgtcttggttctttatgcagcttgccactctgtgtcttttaattgtgacgtttagctcatttacatttaaggttagtattaacatgtgtggatttgattctgtcatctgttagctggttattttgcaggcttstttatgtggttgctttttattgtcactggtctgtgtacttcagcgtgtttttgcagtggctagtaatggcctttctttccatatttagtgcttcctttaggtgctcttgtaaggtatgtctggtggtaatgaatttctttagcatttgctggtctgaaaaaaatcctacttctccttcacttattaagcttagtttggccaaatatgaaattctgggttggaatttttttaggaatattgaatattggtccccagtctcttc

SEQ ID NO: 783148 - DNA, 581 bp, Homo sapiens
tgtgtccttttattggagaatgatactagaaactaagatacgagcacaggatgtgctttttgctactatggtgtcattccttccataataaggccatatgtgagaagcccacagctaatattacacttgagtaaaaaattgaaagtctttcttctgaaaattgaagcaagataagggtgccaactctcaccacttctattcaacatagtgctggaagacttacagaaattttgcaagaaaaagaatarcaattttccatagaggaaagaaaaagaaataaaattggatatattggaggcagagcaagatagcagagtagaaagctccatgtgttgtcacctttgcaaagacaccaatttatcaactatctacacagaaaaaaaaaaccttcataaaaaaacaaaaaatcaggtgagcattcacagtacctgattttaacttcatatctctgaaagaggcactgaaaagatggaaaaaacagtcctgcatcaccaaaatcctcccccaccccaagcagcagcactacagtgctgagaacatttctggatgctgggaaaggcagaacacagcaattgtgaggc

SEQ ID NO: 783149 - DNA, 612 bp, Homo sapiens
aacatgatgtcaccaaatgaacgaaataaggaactaggaaccagtccttgagaaagagagatatatgaccttacagagaactcaaaatagctgtgttgaggaaacttaaagaaattcaagataacatagacaagaaatttaattatatcaggtaaatttaacaaagatgttgaaacaattaaaaagaatcaagcaaaaattctggagctgaaaaaatgcatttggcacactaaaggatgcattggggtccattaatagcagaatggatcaagcagaaaaagaattagtgagyttgaagatagcctatttaaaagtacaaaatcaaaagagataaaagaaaaaatatataaaagaatgaagcatgcctgtagcatctgaaaaatagactcacaatggcaagtttaagggttatcggccttaaaggagaggtggagagatgggggtagcaagtttattcaaaaggataacagagaactgcccacacgtagagaaagatatcaatcgcccagtacaaaaaggttatagaacactaagcagatttaacccaaggaagacttccttgaggcatttaataatcaaactaccaaaggtcaaaaataaggaaaggatcct

SEQ ID NO: 783150 - DNA, 660 bp, Homo sapiens
aattcttaggaaataagaattaggaaagttgagaaatcatgtctctttacatccttttctaggtcatgtgaaaatttctggagtaaaaattctgtgtctcctttggtgcttgctacaactttggataattctcttattaaaaaatgttccagccgggcgcagtggctcaygcctgtaatcccagcactttgggaggccaaggcgggcggatcacaaggtcaggagatcgagaccatcctggctaacacagcgaaaccctgtctctactaaaaatacaaaaaattagcccggtgtggtggtgggcgcctgtagtcccagctacttgggaggctgaggcaggagaatggcatgaacccgggaggcggagcttgcagtgagccgagattgcaccactggactccagcctgggtgacagagtgagactttctctcagaaaaaaaaaaaaaaaaggaaaaaaaaatttgttccttcttatatatacagagatttaagtgtctttttcttgtcctcttgaaaaaggacaatttggtcagcttcttaaagatacttgttaagttacacatcagtcagcttctaaccaagttccagtaactgggctacaattttttcatgtatgtgtgtgaagttttgttagaaaataaaaaggaagtgagacaaggt

SEQ ID NO: 783151 - DNA, 627 bp, Homo sapiens
ttaagaactggaacaagtcaaggatgcccactctcaccacttctattcaacatagtactggaagttctagccagaacagtcagaaataaaaagcatccaaacaggaaaagaagaagtcaaactatctctcttcagtratgatatgttctatacctaggaaaccccgaagactctgccaaaaggctagtagaactgatacattattttagcaaggtttcaggatataaaaatccatgcggaaaaatgagtaacatttctacataccaataatatccaggcttagagtcaaatcaagaacacaatcccatttacaacaaccacaaggaaaatgaaatatctagatacaggtaaccaagaaggtgaaagatttctacaagaagaactataaacactgcagaaagaaattagagatcacacaaatagatggaaaaatatcccatactcatggattggaagactcaatatcattaaaacagccatactgtgtaaggcaatttacagattcaacactattgctaacaaactattagtgtcattcttcacaaaattagaaaaaaactattctaaaattcataccgaaccaaaggagagcccaaataaccaaagcaatcctacacaaaaaagaac

SEQ ID NO: 783152 - DNA, 566 bp, Homo sapiens
acaccttctggcagcacaaggaactgggtggttgagggcctcctgtggctgttgagaatgaagagctattggcctttgggtaaggggcaaggaatcctagaatgtggcccaaagaaggtggtgggagagtctgatcttgattttaggagttggtgagtagtaggggaatgggatcccattcaagggaagatgtagrcatcaggagagaatcaagttatccaagcagagtgactttgaggttggtaatgggaaactaagtaggaagctgaagggagaggggaggtcagagtgtaattgcccaacaggttcttcctgcccactgcaccgagaaaaccaattcactgagatggcagtatggcagtaaagaaagagttaaattaacatgaggttagccacgcagaagatagagtttattacccacaacatccttcccaagaactcggaagctagggtttttatgaataatttggcaggcaggcagggggctaggaaatgggtgctgctgattagctgggggtaaaatcatatgggtgtgggaaatggtcctcgcatgctgagtctgcctc

SEQ ID NO: 783153 - DNA, 697 bp, Homo sapiens
atccccagtacctcagaatgtgaacttattttgaaacagtgtcattacagatgtaactaggtaaagtaggctgggcagggtagctcacgcctttaagcctggcactttgggaagccaaggtgggtgggtcacttgagcccaggagttcgagatcggcctgggcaacatagggagacctcatctctaccaaaaagtagtacaaaaattagctgggcatcatggcatgcgcctgtaatctcagctactttggaggctgagtcaggaggatcacttgagcctgtgaggttgaggctgcagtgagctgtgatcacgccactgcactccatcctgggcaacagagcaagaccttgtctcaaaacaaacaaacaaaacgaaacacaaaataattaggtaaattgggataaagtcatactggagtagggtgggccccaaatccaacatgactkgtatctgtataagagacccagggaaatgggcctggtgttcatatcagacacagggaaacagctctgtgatgatggaggcagattggagtgatgtgtctacaagccaaggaacacccaaggattgtcggctgacaccaacagctaagaagaggcaagggaagattctctctacgaggttcagagggagtgtagctgatgtctggtttctggcctctggagcttggagaggatccctgttctttaagccactg

SEQ ID NO: 783154 - DNA, 618 bp, Homo sapiens
tttccaaaaacctaaaacacatttcaatgactacattttgggaggtgttattcaacatacatgtttttctttgagatagtgaagaagctctcttttttttttaatccattgtctctcaaaagtatggttacttgctcttataatcttgttttctacatttattttatgggtttaccatctctctctatccactacccagcccccagtctctgctagaatatacagttcatcagacaactatccccagtggctcccaggaactgccacgtagaaggagctcagaggccaggcatggtggcttacgcctgtaatcccagtactttgggaagctgagaagagtgaatcacttgagctcaggagttgagactagcctaggcaatatggcaaaactccatctatacaaaaaatgcraaaattagcatggtggtgcctgcctatagtcccagctattcaggaggctgaggtgggaggatcacttaagcccgggggtcaaggctgcagtgagctgtgatggtgccactgcactccagcctgagtgacacaatgagaccctgtctcaaaacaaaacaaaaaggagctcagaaaatatttgtggagtgaatgcactgttgagtgaat

SEQ ID NO: 783155 - DNA, 609 bp, Homo sapiens
gaataaacttgtcctgcctgaaagtaccccagttgtctagcagaagaaaatgccaatatacaaataattttaagtacaatcatcagcaacccatcaaatgcaatcaggcacataaagaagaaaacatattggacaagaaacagcagaatcaattttaaaaaaataaagtcagatgcccaaagactccaaatactggaattatcagacccagaagataaaacaactatgattactgtatttagagaaaaaagacaagcttatataaatctgtagggtacaggaaagaataaaaggaaaaaaattaaaaagaagaaaaaataaaaacaacagcaaaaataaagaataaaagctaatataaacaatctgaaaaaatagagaacttctggaattgaaaaataatagaattaagaacttaaaaggatggttgactagcaggttasactagctacagaaaaattaatgaactgggaggtaagtcagaagaaaacacttagaattgggcaaggagagacaaaaagatagaaaatatagaggaaagggcaagaaaaaatagagcagagtgaagagtgagaatgtctaatatacatttgatcatttgattcaaagagt

SEQ ID NO: 783156 - DNA, 647 bp, Homo sapiens
tgcttgatatgatgtgtatcccatgccttgagctgtgtgatggaagaaaataacttgttacttttttcttttagtagatacaaatccacttcaagggttttttttgggaggaggttttttttaaacattaattttttttgtttttgtttttgtttttktttttttttagagacttggtctcattatgttgcatgggcctcaaactcctgggctcaagcaatcctcccacctcagcctcccaaagtgctgggattacaggcatgagccactgcacccgaccataaatccattttgatctcattgattagctgatgcagctgtggttatagttgctgcaatttgtggttgtggcatctgttaaaggattttcacttttagtagtggttaattagagaatttttatgaacgccgcaagctagaaaaccaaaacaactgaaatcctttgtaagatatattttaaaacattttcttgtatgcattggaatgctcatctgttattgtaggaaatgacggtcaaaatctagctgaaggttagtaccacagaggtagaccagcattcaaatgcccagagtattatgtattttccaattaccaagaaacagctgtgaggttgatctgagataaaggatgatgacaaaagccaaaat

SEQ ID NO: 783157 - DNA, 647 bp, Homo sapiens
tgcttgatatgatgtgtatcccatgccttgagctgtgtgatggaagaaaataacttgttacttttttcttttagtagatacaaatccacttcaagggttttttttgggaggaggttttttttaaacattaattttttttgtttttgtttttgtttttttttttttttagagacttggtctcattatgttgcatgggcctcaaactcctgggctcaagcaatcctcccacctcagcctcccaaagtgctgggattacaggcatgagccactgcaccygaccataaatccattttgatctcattgattagctgatgcagctgtggttatagttgctgcaatttgtggttgtggcatctgttaaaggattttcacttttagtagtggttaattagagaatttttatgaacgccgcaagctagaaaaccaaaacaactgaaatcctttgtaagatatattttaaaacattttcttgtatgcattggaatgctcatctgttattgtaggaaatgacggtcaaaatctagctgaaggttagtaccacagaggtagaccagcattcaaatgcccagagtattatgtattttccaattaccaagaaacagctgtgaggttgatctgagataaaggatgatgacaaaagccaaaat

SEQ ID NO: 783158 - DNA, 647 bp, Homo sapiens
tgcttgatatgatgtgtatcccatgccttgagctgtgtgatggaagaaaataacttgttacttttttcttttagtagatacaaatccacttcaagggttttttttgggaggaggttttttttaaacattaattttttttgtttttgtttttgtttttttttttttttagagacttggtctcattatgttgcatgggcctcaaactcctgggctcaagcaatcctcccacctcagcctcccaaagtgctgggattacaggcatgagccactgcacccgaccataaatccattttgatctcattgattagctgatgcagctgtggttatagttgctgcaatttgtggttgtggcatctgttaaaggattttcacttttagtagtggttaattagagaatttttatgaacgccrcaagctagaaaaccaaaacaactgaaatcctttgtaagatatattttaaaacattttcttgtatgcattggaatgctcatctgttattgtaggaaatgacggtcaaaatctagctgaaggttagtaccacagaggtagaccagcattcaaatgcccagagtattatgtattttccaattaccaagaaacagctgtgaggttgatctgagataaaggatgatgacaaaagccaaaat

SEQ ID NO: 783159 - DNA, 598 bp, Homo sapiens
aaagcatgttccatagatggaaacattaaactccatccaaattaaaaggttctgaaattttaagagatgctgttaagaaaatgaaaaggcaagccacaaattgaaaaaatatttgcaaaatcacagatctgataaagtgtctagaatatggaaagaattctcaaaactcaaaattaagcaaacatctcaatgaaaaaattaggaaaagctttgagtaggcactgcatcaactcagatagacaggtggcaaataagtatatgaaaagatgctcaacatcagtcattagggaaatgcaaatttagtgagatactactatatagctattagaatggcaacaaaacaaaactgacaatattaaagtgctcttgagtgcttggagtaactggaactctcatacgttgttggtgccagagggcacagccactttggaaaacagygtagcagtttctcgtaaagttaaacatatactttccatgtagcccagaaatccagctcctaggtattcacccaagtgaaatgaaatcttatgttcatgtaagtgactgtctatggaagcttgatctgtaattatgaaaaagttgaaagaacccaaatgtc

SEQ ID NO: 783160 - DNA, 670 bp, Homo sapiens
atcccagctcagatggtgaactttttaaagattcaaagaacagatattactcctaaataaaaagtttcagagtatatataaccatgaaaagcttcccaatttattgagcaaaattagtataatcttaattttaaaatgttaacaaagatagcagaccagaaaataaaattagtctcatttatgaatcctactcataaattttacaaaaagaattggccatttaaatttattagcatgtttaaaatatattttccatagtcaaatgagatttacccaaaggatacgggataattaaacaagaagagacctgttacacgttgagaatccccaatttgaaaatccaaaattcaaaatgctccaaaatctgmaactttttgacccaacacggcactcaaagggaatgctcactggagaatatcagagtttagactttcagattagggtgctcatctataacacaaatctttcaaaacccccaaaaataaaaattccagaacatttctggtaagaggcatttcagtagagatgttcaacctgtaataaatcacaactgttggtcaaatttttaaattatataataatatccaaagatttccagaagttatctgatatttaacatccactctgatttttagaaacttctttagaagccagtaattttaaaaatcta

SEQ ID NO: 783161 - DNA, 670 bp, Homo sapiens
atcccagctcagatggtgaactttttaaagattcaaagaacagatattactcctaaataaaaagtttcagagtatatataaccatgaaaagcttcccaatttattgagcaaaattagtataatcttaattttaaaatgttaacaaagatagcagaccagaaaataaaattagtctcatttatgaatcctactcataaattttacaaaaagaattggccatttaaatttattagcatgtttaaaatatattttccatagtcaaatgagatttacccaaaggatacgggataattaaacaagaagagacctgttacacgttgagaatccccaatttgaaaatccaaaattcaaaatgctccaaaatctgaaactttttgacccaacacggcactcaaagggaatgctcactggagaatatcagagtttagactttcarattagggtgctcatctataacacaaatctttcaaaacccccaaaaataaaaattccagaacatttctggtaagaggcatttcagtagagatgttcaacctgtaataaatcacaactgttggtcaaatttttaaattatataataatatccaaagatttccagaagttatctgatatttaacatccactctgatttttagaaacttctttagaagccagtaattttaaaaatcta

SEQ ID NO: 783162 - DNA, 539 bp, Homo sapiens
ctgatatggtttggatctggaaccccaccaaatctcatgttgaattataatccccagtgtttgaggtggggcctggtaggaggtggttgaatcatggggctggattttccataaatgttttaacactatcttcttggtgctgttcttatgacagtgagtgagttctcatgagatctgataatgtaaaagtgtgtaacacctctcccttccctttctcctgctcatgcttcaaccatgtawtatgccttctccccctttcccttctgccatgattgtaagtttcctgaggcctcctcagaagcctagcagataccagcaacatgtttcctgtacagactgcagagctgtgagccaattaaacctcttgtctttataaattacccagtctcaggtatttctttatagcaattcaagaacagactaatacactctctttgataatgatatgattctatacctagaaaaatcttaaggactcaagagaaaatctcctagaacagataaacaacttcagtaaagtttttcggatacaaaatcaa

SEQ ID NO: 783163 - DNA, 279 bp, Homo sapiens
tgcattgaatggggaggaagagttaggaagtgaccctcaagaatttgggaccttctttgttcattttacagtcatatatgttcaatgtaagttccactgtccttgttttaatgctttcatgagatgatatagataaattgraatatatggtttttaactaaattcaagataacacaagtctccattttatgtaatttaattttttagactccacctgtgatcttatggcgcagctcgatggcagttggaggtgcaagtgattcccaataatgaatcacc

SEQ ID NO: 783164 - DNA, 548 bp, Homo sapiens
cctcctgagtagctggaactacaggcacatgtcaccacacctggctaatttttgtattttttgtagagatagggttttaccatgttgcccaggctggtctccaattcctgggctcaagctatccacctgcctcagcttccccctttactcatttttaatggggtcatcattttatcattgaattgttgcagatatctcccattctctgggttgtgttttcattttcatgttagtgtcttttgaaacacaaaagttttaacttttattaagctaaattgatctgtttttttaattgtgcttttartgtcatatttaaaaaactgttgcctaatctaaggtcacaaaaatttatacctctgttttcctctaataatttcattgttttacctaacttcattttttttccatgtggctatccagcatccctgcaccatttgttgagtctattctatttcataattgtcacccttatccaaaattcattgactgtaagagattatttctggatttttatttttattccatcaaactgtatgtctatctttatg

SEQ ID NO: 783165 - DNA, 560 bp, Homo sapiens
gtggtcatagtgtattccagaatatatacctctagccagatagttgaaaggcttggattcagtttgttgggtattctaagcatctttaccaaagaaatcagtcttgaagcaggatttagagaaagaatggatttcgactggacatggtgcctcatgcctgtaatcccagcactttgggaggctgagatgggyggattgcttgagcccaggagtttgaggccagcctgggttacatggtgagaccctgtctctacaagaaataaaaaaattagctgagcatggtggcatgcgcctgttgtcccagctacttgagaggtagaggtgggaggatcccctgagaccctgtctccaaaaaaaaaaaaagatttcatttgttttaagtttggttaaggcttataggaaaaggagccagagaagtgagaagaataatatttgaaaatagaccaggattgtaatattaatttgaatatcagatactttattccatttaaacaacagttttattctaatttgaggtttgaaatttaacatatgaaaacttggaatttaaaagaattttt

SEQ ID NO: 783166 - DNA, 667 bp, Homo sapiens
gcctcccaaagcgctgggattacaggtgtgagccaccacacctggcatttaatcatttttgcatttacattgcttgtatatgatcatgcgtgttataactgtagaataagtgaattaatgaatgaaagatctaagcaataattattgagggctctaaacagggcagtagaaatttaggcagaattttgcaggtagagggcaggcttagggagagaagattcaaaaatggcttgaacatttcttatttctatgctatatatttygttatgatgcctttcactggagtagggaacagacacaacacttctcaggtaactgagaatgagttcatgttggagcatatttatttggaggtcctgtggaagagataagagttggatttatgggtctgcaacccagagggaaaaacctgggctgaagatacagatgcaagaaacataagcacatagattaatgattgaagtcagggtagtggattgcacagggcaaaaaatataaagtaaaaaggctagagcatggggactttggggtcactaatatataaggagtaggtagaagtagagaatacaatatggaaaacagactagtcagaagcataggattgtttatcagagaagtctggtctttgaagtcattgagaagaaagtttcaagaaaaaaactattag

SEQ ID NO: 783167 - DNA, 497 bp, Homo sapiens
atgaacatatattatttaaatgttattaaaatgttataacttgctgtttagggtctaacatgatatttttagtatttcccaggtcattggaaattctaagtaacattgtgatgaatatatacaagaccataatataatatcacgggttctttacccattcttctactgttggatatctaacttgcttctcaattttctattgtcaacactgttgttgttacaattttggtatattaattattttatgtttctgattatttatttaaagtattttcctccaaattamtgatgtcgtttttaaggtttctgactgatctcagctttgcggttatgatacgaagctcaggtattaagctgatttgctcacattttcagtatgcttccaccaaatcagcttaggctactgtggccaaaagacctaggtttcagccacaggtatggttaaatgcatgacttttagcaattgttttttgtaattgttttagattgataattct

SEQ ID NO: 783168 - DNA, 612 bp, Homo sapiens
caacctcttttatgtgggcaaggcctgggggccaagtacattttattcttcaaagaaataattatattaactataaaataccctttagagagttctcaggattagaggggtgaaattcagataacttccactttagcactgatacttgaagatacaattatttaatcataattccagaatacatttaaaggcaaaaaatggcatcagtgattgatgtttsataacatacattttttttcgaaagtagaggagagcaaattctgattaattattcccttggctgtagtctcaagtcctggaaagtatggaggccctctttatgatgaggactgtagaaatggagttctttgttttaagtaactaactgactctgctctcctgagtttctcaacttaaaggggaacagaaataattttcagcaagcttcttttcacaaatatatgcagaaaaacatttgccactgaaaatgtatttggttttctttcataaagataaaattcacactgaatttccgagcaaaatttgattcagtggcatttcttgttttttcatactgttccttctacctggaatgtcctttcctacgatgttcgaatgttcaaattctacaaa

SEQ ID NO: 783169 - DNA, 670 bp, Homo sapiens
aaataattgaaaatggataaattaaatttcatgttaaataataccaatattttaattgctaacctgaaataatcagtcctgaaatgttatggaaagttccactttttcaaatgattaaataaaaaaagaatgtaatactgtagaaatgagaaaaatgcttggcacacaatagcaccatttaagacgacaatatcagcaaaggaaatttagataagagctactgaaatgggataagattcaaggaacatttttaagarctactacaaagactttcgctggggattttaaaacaggggaacagatggggaaaataattgtctaacatttatgttaatgtaccataaaactccaattatccaggctgcttggggaatcaggtgtttggtttaatttttttggttagccgagggttactctaaaacccagtagtatctcagtcattgttgaaaatcattccaaattggtttaatagtgcctaggaattataattgtgtgtttcttggtgtataagacaatgtttcaaggtcattgttctgaacataaattctgattgggcaaaactatgatggtagacagaatgttgagtgaatctaggatacccaggaagtaatttttagaaaataaatatataacataaatatatatagcattgatttgctctttcttctaa

SEQ ID NO: 783170 - DNA, 562 bp, Homo sapiens
attcagtattcataagtaggttccagcttattacagaaagtaatttccataaccaggtctcatgtacaaaatagatgcaaatgcccttctagagggtctgtctcagcactcaaaaagttggattttcttaccttacagtttgccatcttgtgctttatagatgtaccaagccgatattaaatttattttatatatatatatatatatatatatatwtatatatttgatacctattatgatttgaggggcctaggacatacctctttacaagagagatatggtaccttcctccatggaatttataatctagtgaaagaaagagataacatacagttgaataaataagatgattatttagagtgatataacttatggaaattataaaacaggtttcagcatgcaatgaagtgttacaaatacaaatgttacactcacagaccaactccttcataaagtactttctttccttgtaactcatgacaagtgtcacaaattcatttacttaaactatttattgaatatctactcgattgcatttttctaggcaatgtggataaacaaa

SEQ ID NO: 783171 - DNA, 620 bp, Homo sapiens
atgtgaatgagcctaagcaggccctgaggcacaagcaagttatgtgaggaaatgactcaaatcctatggtctctatccaaactgcctgtatccaaactgccttctctctcccccagcttgcacctatgacctcatggcgagttttctagcatcagttgacagaggaagaaaagacttgggcctggtttaccaatggttttgcacaatatgcaggcaccacctcaaaggggaaagctgcagcattataacccctgttggggacatccttgaaggaaaatcctcccaatggacagaacagcaagaagggcagctggttatttactttgcttggtagcagaaatagctagacrtgtgaatatatgcccttccatgggctgtagccaatggtgtgattagattatcagggtttagaaaaaaaaaaaaacattggtggaaaattgatgacaaagagagatatgtggatagatcttcctgaatgggaatacaacatgaaactatttgtgttcactaagtgctcaccaaagggtgagctcagcctcaaaggtgaggactttactaatcaagtggataggatgacccatttgctgagtatcaatcagtctttcccaggccacccggtc

SEQ ID NO: 783172 - DNA, 601 bp, Homo sapiens
attatgggagctacaatttaagatgagatttgggtggggacacagccaaatcatatcagaagtggagcaggagatgacatcaaatttgtgttttcttaatcaagtctggcattgggcaggactgctacaggtggtaacagcaatcatggtacttctccttgagcatacttcctgagcctcctttctctactgaactcttccaagagccagtgagaaaggatttattagccctgttttacaggtgaggaaacgagttcaaagagaagaagcagcttgcccagggtggcacagagcaagtggcagtgctaagactggtactcaggccttttcagtcctagtcctcattgctttacactgtgctaagctgtcaacacagcagatcatataacaacttagaggaacagcatccattgtttcattttatcttcccacyggctctgaaagcaaacaaggtgggtattattgtccccattttacacatgagcaaactgacactgagagatcagaagtaccttggttcaagtgcagctgagaggggcacagagtgagatgaggtatgcacagatacacaagaaagaagcttaagaatgtctttaataac

SEQ ID NO: 783173 - DNA, 488 bp, Homo sapiens
acaggtggagctgtttgaagggcaataggatatgtaataacaatgcacatctagctttgatggaaactaaataaaggaacttgagattcgttagcaagtagcagaaatttctcaatcttgggaaaattggcatttcaggccagatattctttgtggtgagatatttcgggccagatattcctgtgcgttgtagtatgtttggcagcttccgkggtctccaccctctagatgccgggagcacctcctccaaatcccattgtgacaagcaaaacaatgtcagacattgccacgtgtccccttgaagggtagaaatcacccccagtcacttgagaaccactggcatacaggtagcatttaaagtcacgggagaggaaaaaattacccagggtaagcgtatggaggaagaagagagagcaagaacacagctctggataataccaacatttaaggattgggaaggaagaagttgagccagagaaatggagatg

SEQ ID NO: 783174 - DNA, 551 bp, Homo sapiens
gctgtttgaagggcaataggatatgtaataacaatgcacatctagctttgatggaaactaaataaaggaacttgagattcgttagcaagtagcagaaatttctcaatcttgggaaaattggcatttcaggccagatattctttgtggtgagatatttcgggccagatattcctgtgcgttgtagtatgtttggcagcttccgtggtctccaccctctagatgccgggagcacctcctccaaatcccattgtgacaagcaaaacaatgtcagacattgccacgtgtccccttgaagggtagaaatcacccccagtcacttgagaaccactggcatacaggtagcatttaaagtcacgggagaggaaaaaattacccagggtaagcgtayggaggaagaagagagagcaagaacacagctctggataataccaacatttaaggattgggaaggaagaagttgagccagagaaatggagatgctggagaggtaggagtggagaaagactggtggagctgaaaccacatggagcaagtttgaaggaggatgtggt

SEQ ID NO: 783175 - DNA, 650 bp, Homo sapiens
ctggaactctgatcttccttttttcaatgaaggcccaaatcattactctttttttaccctttctcaaaggaccttttcctccaggacaatgagtatagcctctttaaagaacttagcctttttcaaaagaaagggaattatcttgcaggaagcttctgcttttggctctgtaacttcttaggcatcccattatcacagggcataaaattgtctggctacttgcttgaaagggtagaaagggaaaaatacagggaggacaaagccatgataatatttcagtatggctcctcccataaacaaatatatgggtatggaaagctaaggtaataagctgctttcarttagagttatggaacaagagaaacattttctatgtggttgtagagtctgtgactccgttactgagagcaagtgctcaggtcacatgacatactttagcaacaggatcccttaaccgggtcagttgctcctgtgaggcctttgggtgactgagggcaagaccacccagccatagcaattctaatgcgatattatttatgtcacatggaaaattgatggttctgggccctggggcaagattccaccacacttttgagttatggattgaggtcattttatgatcccaccaatgatattggtcaatagaaata

SEQ ID NO: 783176 - DNA, 577 bp, Homo sapiens
atttgtgaaatttgtcacataaagtaacataaatgattacatgtgaacacatttcagaaccagcataaaacagaccatgttctctgaccacgatacaattgatagtaatcaataacaaagagataatgtaaaagaacctacatgtttgaaaattcaaaattcatttgtaagtaactcatgagtcaatatgtattacagtggaattttaaaaatactaattaaagaacaatagaaaaggtttaatatcaaaactttccctctctttttctctcagttatgtatcaaaaatatatttaataaagggcttatatctagactacaraaataactcttacgactcaataataagacaaaaaatgaggaaaacacatattgataagatttatgaatggctagtgatcacataagttgttgaacatcactagactttggggaaatgtaaattaaaactacagtgagatgactttaaatattattgagaataattaaaaaagaccgaaaataccaagtgttggtgaaaatatggagcaattggaaatctcaaacactgttttccaaagtagttgtaaaattgtat

SEQ ID NO: 783177 - DNA, 577 bp, Homo sapiens
atttgtgaaatttgtcacataaagtaacataaatgattacatgtgaacacatttcagaaccagcataaaacagaccatgttctctgaccacgatacaattgatagtaatcaataacaaagagataatgtaaaagaacctacatgtttgaaaattcaaaattcatttgtaagtaactcatgagtcaatatgtattacagtggaattttaaaaatactaattaaagaacaatagaaaaggtttaatatcaaaactttccctctctttttctctcagttatgtatcaaaaatatatttaataaagggcttatatctagactacagaaataactcttaygactcaataataagacaaaaaatgaggaaaacacatattgataagatttatgaatggctagtgatcacataagttgttgaacatcactagactttggggaaatgtaaattaaaactacagtgagatgactttaaatattattgagaataattaaaaaagaccgaaaataccaagtgttggtgaaaatatggagcaattggaaatctcaaacactgttttccaaagtagttgtaaaattgtat

SEQ ID NO: 783178 - DNA, 623 bp, Homo sapiens
atttgtataagtaaagagaagccaaatgttaatagccaagacaatggggaggcctcaaaggcatttcagagagctccaagacagcccctctcctgacaagcccagaggcctagaagagaagaatgatttagtgggccaggcccagggctccactgccctgaacagcattgagacactgcttcctgaatcccagctcctccagcttcagccatggcttaaaaggtctcagaaacagcttgggccactgcctcagagggagcaaaccaaaagccttggcaattttcacgtggtgctaagcctgcagatgcagcgagtacaaccattgaggctcaggagcctctgtcttgattttagaggatgtatggaractcctggatgtcaaggaagaagcctgctgcacgggtggagccatcatgaggaaactctacttgggcagtgtggaggaaaaatgtggagttggcgcccccacacagagtccccactgaggcactgcctagtggagctgtaagaagagagccactgtccttcagattccagaatggtagctctactgacagcctgcactatgtgcctggaaaagcttcaggcaatcaatgccagacagtgaaagcagctgggggagc

SEQ ID NO: 783179 - DNA, 598 bp, Homo sapiens
gagagaatgagtgctgagccaaaagggaagccccttataaaattatcacatcttgtgagaactgactcaccatcatgagaatagcatgggggaatccccctatgatctacttacctcccatgaggtccctcccccaacacatggggattaaaaatcagattacaattcaagataaaatttgggtagggacacagagccagtccatatcattccacttctgacccctctccaattgcatctttctcacatttcaaaacacaattatgctgtcccaacagttttccaaattcttaactcatttcagcattaacccaaaagtccaagtccaaagtctcatctgaaacaaggtaaatcccttcaacctaggagcctgtaaaatcaaaakccagttagttacttccaagatacaatgggggtaaaagcattgggtaaatgctcctgttccaaaaaggaaaaattggcaaaaacaaaggggctacataccctatgcaagtctgaaatccagcggggcagtcaaatcttaaagctccaacatgatctccttttactccatgtctcacacccaggtcacactgatgtaagaggtgggctcccacaa

SEQ ID NO: 783180 - DNA, 566 bp, Homo sapiens
tagtctaaggtaagtgttctatttgcgggcaaatatttcttggcttgttgaatgtaaaaacaactatatgcgctcatttcattttcacataatctaaaataaataaatcaaagaaatagttgattcacatttcatgtcttcttgtgagatattttagtcatgaaagaattactattaataattatactaataatttaaagataattgctgttaatgataatggcaacatcattgtccacttactgaacatctattatgtgccaggtactctgctaaagtacttcatgtgctttttctcactgaatcctcaccataatcctataaggtagatgatattatctgcatttcataggtgaggaggctgtgggtcagataataggattagatacatttcatcaggttacacaattggtaaaaggcagagttggkaatcaacttcagttttgttgattgctagaatgtaagctacatgaaagtacaaatgcctatcttatttattactgtatcttcagtgcttaaaatggtgcataataaacagcaggcactcaataatattttaaaatcca

SEQ ID NO: 783181 - DNA, 563 bp, Homo sapiens
tacacttaaaattggagatggtatattaaaattaagatggtatattttatgtgtttttatcaaaataaaaagtcatgccatttcttcattgaatggaatatttatctataaataattgaataaataattcaatcttttattttacttaaatcacatggcgatagtgtgattctgtgggtcagcaatatcacagtggacaaatgaaagcgttatgaatagggcagacaagttataatggataattacatggtcatcaacacagattttgctggtaacccaagaattgtagtgttcttaataacgtatgttttaatagatagaaatagttttttwaaaaaaaaattatttccataagcttttggggaacgggtggtatttggttacataagttctttagtgttgatttgtgagattttggtgcacccatcactcaagtagtatacactgaacccaatttgtagtctttcatccctcaccccctcctgctctttttcctgagtccccaaagtccactgtatcattcttatgtctttgcatcctcatagattagctcccagttatga

SEQ ID NO: 783182 - DNA, 619 bp, Homo sapiens
gttttttatctcagtaatgtgagattgatttatcatttgaaaaacaaactttgtacttcattaaccaatgaaggaagaaaaaaatctcaataaatgcagcaaaagcttgtgagaaaattcactatatattcatgataaaaattctcagaaaactgggtagaaaagtaaactctcagtcagataacttgtatctgtgaaaaaactactccaactaacaaactaacatcatgctcatgatttaacactgaattccttctggttaagagaaaacaartaagatatatacagctttgaaaggaacattaaaactgtattcacagaatacatctctctagatagacagatagatagatagatagatagatagatagatagatagatagatagattatcctaaattatctttttaaaaaattactagaactggtaagtaaatttaccaacatgacaggacaaaaggccaccgtgtataagattagatgtattcctgtatcctaggcatggagaattagaaattaaaaaatttaaaatgccatttgtaacagtatgaaatatatatatgggtaaatatactaaaatgtgcttgtaagacctgtacatgtaaaattattaaacactg

SEQ ID NO: 783183 - DNA, 612 bp, Homo sapiens
gaaactttaacaccccactgtcaatattagacagatcaacgagacagaaagttaacaaggatatccaggaattaaactcagctctgcactgagcggacctaatagacatctacagaactctacaccccaaatcaacagaatatatatacattcttctcagcaccacatcacagttattacaaaattcaccacatagttggaagtaaagctctcctcagcaaatgtaaaagaacagaaattataacaaactgtctctcagaccacagtgcaatcaaactagaactcaggattaagaaactcactcaaaaccgctcaactacatgggwcctgaacaacctgctcctgaatgactactgggtacataaagaaatgaaggcagaaataaagatgttctttgaaaccaatgagaacaaagacacaacataacagaatctctgggacacattcaaagcagtgggtagagggaaatttatagcaccaaatgtccacaagagaaagcaggaaagatctaaaattgacaccctaacatcacaattaaaagaactagaaaagcaagagcaaacacattcaaaagctagcagaaggcaagaaataactaaaatcagagcggaa

SEQ ID NO: 783184 - DNA, 612 bp, Homo sapiens
gaaactttaacaccccactgtcaatattagacagatcaacgagacagaaagttaacaaggatatccaggaattaaactcagctctgcactgagcggacctaatagacatctacagaactctacaccccaaatcaacagaatatatatacattcttctcagcaccacatcacagttattacaaaattcaccacatagttggaagtaaagctctcctcagcaaatgtaaaagaacagaaattataacaaactgtctctcagaccacagtgcaatcaaactagaactcaggattaagaaactcactcaaaaccgctcaactacatgggtmctgaacaacctgctcctgaatgactactgggtacataaagaaatgaaggcagaaataaagatgttctttgaaaccaatgagaacaaagacacaacataacagaatctctgggacacattcaaagcagtgggtagagggaaatttatagcaccaaatgtccacaagagaaagcaggaaagatctaaaattgacaccctaacatcacaattaaaagaactagaaaagcaagagcaaacacattcaaaagctagcagaaggcaagaaataactaaaatcagagcggaa

SEQ ID NO: 783185 - DNA, 618 bp, Homo sapiens
aaaccacaatgtgataccacctcactcctgcaagaatggccataatcaaaaaataaaaaaataacggatgttggcatggatgtggaaagggaacacttacactgttggtgggaatgtaaactagcacaaccactatggaaacagtgtggagattccttaaagaactaaaagtagatctaccatttgattcagcaatcccactactcagtatctacccagaggaaaagaagtcattatacaaaaaaagatacttgcacacatatgtttatagcagcacaatttgcaattgcaaaaatatgaagccagccccaatgcccatcaattaaggagtggataaagaaaatatgatatatatatatatagactactamtcagccataaaaaggaatgaattaatggcattcacagcaacctggatggaattggagaccattagtataagtgaagtaactcagaaatggaaaaccaaacatcgtatgttctcattcataattgggtgagctctcttgaaagtaagagaaataattcaaatgagcctgagaataaatggaaatttatggtttcatattaataaaaattccaaaagtgaatttgttttaaggtaatactggctggaga

SEQ ID NO: 783186 - DNA, 643 bp, Homo sapiens
tgccagccagagaaccaggaatgtcagtgatgtaattgagaaacatgggcgctgatggtataagtcctagtctgaggctaaaggcctgagatcctggggggccactggtgtaagtcccagagtccaaaggctggagaatccagaaggctctgatgtctgagggcagtagaagatacatgcttcagctgaaggaaagtgattgagaatctgcccttcctccatctttttgttctaattggkccttcaacagattgaatgatacctgctcacattggtgagggtgaatcttctttactgagtctgctgactcacatgctaatctcttcctgaaacactgtcagtaatgcacccagaaataatgtttgaccagctgtctgggcattccttaacacatccaagttgacatgtaaattatccatcacaagtctaccccttgttaacctggcacccatctgtatcttgttaaaccataattaatctccacatgaagacagtaacaatttatatttccacctaacaggatacaactatcctgcatataactgaaaatatatgagttccctccctagaagacacagtgaagtctctaagtgatgttcgctcttctgatatcccgtaactcaaatactatgatggaaaatta

SEQ ID NO: 783187 - DNA, 623 bp, Homo sapiens
ccttctcactgtacctcttactgaaataggtagtaggattcacgccagagggaaaggaaccttagctggacagaacttgcatgatgagatttcctaatcccagtaaggaccaggcctgttgcagcctctacaaagcaacccacarcactaagcgaagagacaagctgcagccttttcagtctaattttctttgcatttatagtagatcaacagttgtttaacctacacatagttgaaagaaagagtttggatgaatttcattttctagtaattggaggctagccttctaaaaagttcacatattttggttcttaatcttgttaaagaaaaagatttttttttaaattgaacccctgtttgtcattctcttattaaggtagaaaaatatttttaaattattgctacatttttaggatcatgtctttgtatccacccagagtctagcacaagactgggcactggtaagtccacaaaaaattcttttgtttttaaaattccaatgaatcatcattttgtggtattttgtgtgtgtctacatagctgatatcctctctttttcaaacatatacagcctgaaatacatctattattaatctaatatctttaatttcttaattaaagat

SEQ ID NO: 783188 - DNA, 623 bp, Homo sapiens
ccttctcactgtacctcttactgaaataggtagtaggattcacgccagagggaaaggaaccttagctggacagaacttgcatgatgagatttcctaatcccagtaaggaccaggcctgttgcagcctctacaaagcaacccacagcactaagcgaagagacaagctgcagccttttcagtctaattttctttgcatttatagtagatcaacagttgtttaacctacacatagttgaaagaaagagtttggatgaatttcattttctagtaattggaggctagccttctaaaaagttcacatattttggttcttaatcttgttaaagaaaaagattttttttwaaattgaacccctgtttgtcattctcttattaaggtagaaaaatatttttaaattattgctacatttttaggatcatgtctttgtatccacccagagtctagcacaagactgggcactggtaagtccacaaaaaattcttttgtttttaaaattccaatgaatcatcattttgtggtattttgtgtgtgtctacatagctgatatcctctctttttcaaacatatacagcctgaaatacatctattattaatctaatatctttaatttcttaattaaagat

SEQ ID NO: 783189 - DNA, 651 bp, Homo sapiens
atccctgagctagacataaaggttctccacgtccccaccagactcaggggcccagctggcttcatccagtggatcccgcaccagggctgcaagtggagctgcctgccagtcccgcgccgtgcgcccacactcttcagcccttgggtggttgatgggactgggcaccgtggagcagggggcggcgctcatcggggaggcttgggccgcacaggagcccacggagggggtgggaggctcaggcatggtgggctgcaggtcccgaggcctgcgccgcgggaaggcagctaaggcccggcgagaaatcgagcgcagcgccggtgggctagcactgctgggggacccagtacaccttccgcagccgctggcccgggtgctaagcccctcattgcccggggccggcaggtgctccgagtgcggggcccaccaagcccacgcccaaccggaactccagctggcccccaagcaycgcgcgcagccccagttcccgctcgcgcttctccctccacacctacccgcaagctgagggagccggctccggccttggccagcccagaaaggggctcccacagtgcagcggcgggctgaagggctcctcaagtgccgccaaagtgggagcccaggcagaggaggcgccgagagcgagcgagggct

SEQ ID NO: 783190 - DNA, 651 bp, Homo sapiens
atccctgagctagacataaaggttctccacgtccccaccagactcaggggcccagctggcttcatccagtggatcccgcaccagggctgcaagtggagctgcctgccagtcccgcgccgtgcgcccacactcttcagcccttgggtggttgatgggactgggcaccgtggagcagggggcggcgctcatcggggaggcttgggccgcacaggagcccacggagggggtgggaggctcaggcatggtgggctgcaggtcccgaggcctgcgccgcgggaaggcagctaaggcccggcgagaaatcgagcgcagcgccggtgggctagcactgctgggggacccagtacaccttccgcagccgctggcccgggtgctaagcccctcattgcccggggccggcaggtgctccgagtgcggggcccaccaagcccacgcccaaccggaactccagctggcccccaagcaccgcgcgcagccccrgttcccgctcgcgcttctccctccacacctacccgcaagctgagggagccggctccggccttggccagcccagaaaggggctcccacagtgcagcggcgggctgaagggctcctcaagtgccgccaaagtgggagcccaggcagaggaggcgccgagagcgagcgagggct

SEQ ID NO: 783191 - DNA, 651 bp, Homo sapiens
atccctgagctagacataaaggttctccacgtccccaccagactcaggggcccagctggcttcatccagtggatcccgcaccagggctgcaagtggagctgcctgccagtcccgcgccgtgcgcccacactcttcagcccttgggtggttgatgggactgggcaccgtggagcagggggcggcgctcatcggggaggcttgggccgcacaggagcccacggagggggtgggaggctcaggcatggtgggctgcaggtcccgaggcctgcgccgcgggaaggcagctaaggcccggcgagaaatcgagcgcagcgccggtgggctagcactgctgggggacccagtacaccttccgcagccgctggcccgggtgctaagcccctcattgcccggggccggcaggtgctccgagtgcggggcccaccaagcccacgcccaaccggaactccagctggcccccaagcaccgcgcgcagccccagttccckctcgcgcttctccctccacacctacccgcaagctgagggagccggctccggccttggccagcccagaaaggggctcccacagtgcagcggcgggctgaagggctcctcaagtgccgccaaagtgggagcccaggcagaggaggcgccgagagcgagcgagggct

SEQ ID NO: 783192 - DNA, 593 bp, Homo sapiens
tcaaaaattctttatcagaaatgggcagatccaggaagcagaaaatcagtaaggatatagttgaaatcaacaacatcatcaatcaactagatataatggccatctatagacttcatccaagaacagcagaatactctttcttctcaaactcacatggaacattaatcaatatagaccatgttctgggctgtaaaacataacttaacaaatttaaaagaatagaaatcatacaatgayttatctcagatgacattagagttaactagaaatcaataacagaaagatcattggaaaatctcccacatacttggagattaagcaatacacttctaaataatacatgggtcaaagaagaaatgccaagagcaattaaaagatacttcaaactacatgaaaatgaaaacacaacttatcaaaatttatagaatgctgtgaaagcagtgcttagggggaatttatggcaatgaatatatacatattagaaatagcataaaaatacctaggaataaatttaaccaaggaagtgaaagacctgtatgctgaatactgcaattgcttaaagaaattaaagaagacctaaataattggaaaga

SEQ ID NO: 783193 - DNA, 593 bp, Homo sapiens
tcaaaaattctttatcagaaatgggcagatccaggaagcagaaaatcagtaaggatatagttgaaatcaacaacatcatcaatcaactagatataatggccatctatagacttcatccaagaacagcagaatactctttcttctcaaactcacatggaacattaatcaatatagaccatgttctgggctgtaaaacataacttaacaaatttaaaagaatagaaatcatacaatgatttatctcagatgacattagagttaactagaaatcaataacagaaagatcattggaaaatctcccacatacttggagattaagcaatacacttctaaataatacatgggtcaaagaagaaatgccaagagcaattaaaagatacttcraactacatgaaaatgaaaacacaacttatcaaaatttatagaatgctgtgaaagcagtgcttagggggaatttatggcaatgaatatatacatattagaaatagcataaaaatacctaggaataaatttaaccaaggaagtgaaagacctgtatgctgaatactgcaattgcttaaagaaattaaagaagacctaaataattggaaaga

SEQ ID NO: 783194 - DNA, 540 bp, Homo sapiens
aacaatggaggagcttaaggatctgagctacaagaatggaagccagccaaggtagcagtaaggccaattcctattaaggaatgttggcatcataaagtatgcaattggatctttttttgtgtgagacggaatctcactctgttgcccaggctggagtgcagcggtgcgatctcggctcactgcaacctctgcatcccaggttcaagcaattctccagcctcasccccccaagtagctgggattacaggcatgcaccaccatgcccaactaatttttgtatttttagtagagatggggtttcaccatgttggccaggctggtctcaaactcctgacctcaactgatccacccgcctcagcctcccagagtgttgggattacaggcatgagccactgcgccctccagcaattggatcttaatttgagattctacaataagaaattctgactcctgcatcaacccagtagcagggctttttatcttccctgttttcagttgaaagccatgttcttggcaaagctgaacacagacagcatcatc

SEQ ID NO: 783195 - DNA, 463 bp, Homo sapiens
gttttttcgaggatataggagaaattacttggcaaatcctttcaacatagggcatactgcccttattatcagaggcagtgttggttaatggaataaacacttcactgggattgaagaaccctgaattctaatatctgagttagtaaaatgctgtacagcattaagcaagtcactaacttccttgaatctttgtttgttcggyaacaaaacaatagggataagagtatctgttccttttgttttacagaactttgtagggaataagaaagatgtaagattttaaaaagatcctctgaatttaaacatttgaaggaagaggtttaggacactgcttctcaaactatggtccgtagatcagcagcaccagcatcacccgggaacttgccagaaatgcaaattgttaggcccaaccccagacctactgaatcaaaaactctggtggtgagtttagcaatgtgtttaa

SEQ ID NO: 783196 - DNA, 598 bp, Homo sapiens
tacatttattgtgatcattgatatggttaagtatagcatgttgctattcacttttgggttttgttcggttgtatgtcttagtgtcttttttcctcttatacctcttcttttctgtcttttggattaatttaattttatttgcatkctgtcttctctttgttggcttttcagctaattctgtactgttattttattggttgctataggtttatattagttatctctaacatataacagtctatattcaagtgatattataataattcacacataatatactaacattataatagcatactttcatttctcttgtgtttaccttaaagctttgtacattaacatagattataagctgcagactacattcttaaaatttttttaaagattcaattaagtttcaaaatatttacataataagaaaaggttattatagatttacccatggagttatcattttaagcatttcttgtttctctgattagatccatacttccatctggtatcattgaccttctgcctgaaggacttcctccaaaatttcatgtactataaggctgccagagatgaattctttcagattttcttttttcttttacac

SEQ ID NO: 783197 - DNA, 626 bp, Homo sapiens
tgccacagcaggctaaaagcaatttggcagaggtggattggttcttattgacacagtccacaagtgtaccaacacatgtgctcctagccggttggccagaactagccacaaggccccagcctaactgtagggatcctgggacatgtaagaaaacacatggaatttagtggatgctaattgtatctgtgaaactctttccccaaccaagcacactgattggaaggatgaggcaggtactaagatttgatgcatcaaatttatattgaatcctggagcaagatcatgccaaagaaaagctagtgcttcacattctgatcatgcagagagagcccagccatcactctctcagagtctgacatccggctctgctgtctttgtgcagtgcctagaataagatggtcagcagaggatttatgtatytcctacttcccctcttttctgtgactttcctccagtacaggctgagtgtttagagggccttgttgcatactgtccagccatttacaattcctgtttcctgggagcagttcatcctcatatctccagacatcaagaatttgacagcatgaaggaaggatgccacataattaatgtcatttatgttaactaaaatcatgttatctaaa

SEQ ID NO: 783198 - DNA, 592 bp, Homo sapiens
cttccttacctccgttgtggagtagtagactgatttcatcttgatattctgggtcaatcaccccagccaacactgtaactcccttcttaccctgttgacttaaaggtaggaggagaccaaagtgtccaggtggcaatcataacttccagtttaatagaattkttgttgtgtctcctggtggcagcattcctccctctggaactaagacctctaggccagcagagcataatgtcacgggaaaaagaagcaaacattttgttagtatatcactagtggtgatggtgagtggtgccacttccacttccaccccttgattcctggccccgtgaatcctggctatgggagaaactgttccatatattggatgctgattcagagcatacacggcctcctggagaacttagccccagtcctgcaaaatatagtcacgtagttgatgttttaattatgacttcaaaaggccattccacttttctatcaatccagctgcttcagtatgatgggcaacatggtaagaccagtgaattccatgagcataagcccactgctgcacttctttagccgtaaagttagtgccttggtcagaggcaat

SEQ ID NO: 783199 - DNA, 580 bp, Homo sapiens
gtaggaaaacagaaaaaaatgattctaaaagagcatttgtctagttagaaactgtgtcacttgtatcgtttaccgtgaggcatccttgagaggtacatgatttccaaacagccacctaaatcataggtactgcttttggaacagatgtaaataggaaaagcrccagtccagtacccccactaaagaccatcgttagaaagctctcgcagtgctttccagcttagaggagtgtagttcccttcaggtacttaagccagtgttcggtaaagcagcacccaaaatgccttttgttaaatgtgttctaactcgttcctcttgctgatgctatcacaggctaatgattgtctaagtccttcagagaagctgtgtggttttgtatagctgtgagtaaaaccacacccattcaggaaatgcaatgtactttcttctaacaggcatcatcaaaacagatgctgatttacatggtaggtccccttctttagtgacaatttgagagctttgaagggaggcatttgccgtgcatcagaagaaatcagaattaaactggcacacgtgcacattgttggagtaaaaaggaaaa

SEQ ID NO: 783200 - DNA, 580 bp, Homo sapiens
gtaggaaaacagaaaaaaatgattctaaaagagcatttgtctagttagaaactgtgtcacttgtatcgtttaccgtgaggcatccttgagaggtacatgatttccaaacagccacctaaatcataggtactgcttttggaacagatgtaaataggaaaagcgccagtccagtacccccactaaagaccatcgttagaaagctctcgcagtgctttccagcttagaggagtgtagttcccttcaggtacttaagccagtgttcggtaaagcagcacccaaaatgccttttgttaaatgtgttctaactcgttcctcttgctgatgctatcacaggctaatgattgtctaagtccttcagagaagctgtgtggttttgtatagctgtgagtaaaaccacacccattcaggaaatgcaatgtrctttcttctaacaggcatcatcaaaacagatgctgatttacatggtaggtccccttctttagtgacaatttgagagctttgaagggaggcatttgccgtgcatcagaagaaatcagaattaaactggcacacgtgcacattgttggagtaaaaaggaaaa

SEQ ID NO: 783201 - DNA, 577 bp, Homo sapiens
tgataaatcttgctgctgttcagtcttttgggtctgtgccatctttaagagctgtaacagtcaccgcaaaggttagcggctccattcttgaagtcagcgagaccacgaacccaccagaaggaaccaactccagacacagaatcagctaggagacgtgggtgctttctgtatagtgcttcctaccaaaagcctagaaaatcttggggcgtggagaaaagaaaatccatcaagtaaaggcttgatcacctcttggaaaacccatattcattgtcccaacagtgactaatacgtctaactgtgggcctgggtaggatattatgagaaacctgttcttttggtgcccacctttcttttctgagcaacacgtggtcttctgagtgaggcaggagtccggcatatgcgtgatgatgtaatatgttaggcagccaggccctcacctkttcaaaggttcgatcttgaaaaatcaaaggtggatatgtgagaaataagcccatataggaataagaatgacaatggaagtggaaaatgtaagttgggactgatgttctgctgctttgagtactgaaattctctgctg

SEQ ID NO: 783202 - DNA, 577 bp, Homo sapiens
tgataaatcttgctgctgttcagtcttttgggtctgtgccatctttaagagctgtaacagtcaccgcaaaggttagcggctccattcttgaagtcagcgagaccacgaacccaccagaaggaaccaactccagacacagaatcagctaggagacgtgggtgctttctgtatagtgcttcctaccaaaagcctagaaaatcttggggcgtggagaaaagaaaatccatcaagtaaaggcttgatcacctcttggaaaacccatattcattgtcccaacagtgactaatacgtctaactgtgggcctgggtaggatattatgagaaacctgttcttttggtgcccacctttcttttctgagcaacacgtggtcttctgagtgaggcaggagtccggcatatgcgtgatgatgtaatatgttaggcagccaggccctcaccttytcaaaggttcgatcttgaaaaatcaaaggtggatatgtgagaaataagcccatataggaataagaatgacaatggaagtggaaaatgtaagttgggactgatgttctgctgctttgagtactgaaattctctgctg

SEQ ID NO: 783203 - DNA, 643 bp, Homo sapiens
gtactggtagcatttgtaaacaattcattcttattttttttccaaagtgcattgcaaaatagtcttgcctgtattttcctgtttgcagtctatttcattaaatttctgcaattctaaattagaatagcatctaatagaccacatatgaaatgtgcttgctattaattcagacattttatggcatattcattagtcaaatccttagtatttatttatgaagtcacattactctgtccagtaattaacagaagtggatgaatatgcatctctaattttttttttagcaaaagaaatagcttacagtaagtatttataattacgtcagctcaatgtttacagcacttgaatggcgatatgtgtagtttctgtcatttagacttcatagataatttttgtacagaaatgctttgttgttgatgctttgcttccttcacacatatatcacagattaccgaaacaatcattagtccttcagytgcaacggataagactcttctttatccttaattttctgagctcctttctaggcattttatgttcttacacagatgctaatgctaattaatgctttaatatgaaagatactggcaaataaaactgttacattttacccataagttgtaaattcagcttagttgcccta

SEQ ID NO: 783204 - DNA, 533 bp, Homo sapiens
ggagagcgtgttggggccgggactctcctcccgtggacctgacaactctgccttccccggtgtggtctcgctgttccctttgagagtgcgatgctgccgcttcagccaggacgttctcaaaattagcagaagggcttccttcctgaaatcgtgcctatttaggattttcttagtcattacgaaaaagtatagatagagttcataaatgacttcatctattcggtatcaaatgaacaacacttcaggcatgttgaatgagcaatctaaaggaarcatttatttgtttaatttttccagtgccttcaataaggctttcatttccaaataactcctttgtgtattgctgttcatacaatggctatatatttaccatttaacagtattgccccaaagcgtaagagtgagaaaaatccaaatttgaattaaattctccctgagcctcgcagtggccgtcacacgttcccctcctgcttttcgcgtctctaggatctccgagtgtcttgactacaacaaaccgttcagagttctcaaga

SEQ ID NO: 783205 - DNA, 492 bp, Homo sapiens
ctcaaacccaggaggcggaggttgcactgacccagatcagccactgcactccagcctgggtgacagagcgagatcctgactccaaaaaacaaagaatacaatgagcatattatttgctaacaactaacattgtttaaagataaatgtatcccctgtctctcagctctttgggcactgtraatattttgtaatttagtctttaagcccctcccccctgcccacttccacccgcccagctcctctggggccaggcctcttcctttctgctctcacaccacccctctaaactggtctgtcagtctgtccggttgtcagggctgactggctgacttgataaacttgttccaccaaaggcgtttccccctgggcaattcgtttctttcccaactctctccccgcagaccctggaggatggtttgtgtcttaacaggagcattccaaggacaaaatctaatgacgcagtggtggcaggagttttgttcatggacacag

SEQ ID NO: 783206 - DNA, 628 bp, Homo sapiens
gggaaatatctatgtaaataatttggaattctattataagaaatatgtgttccttctctcccatttatttattcaatcatgtatttatgtcaatgtgagctcatatatttgctgtattctttacgttatgacacagtactatgttagtttcttttttgctcaaattcttacagcgttggccatggggagatttttcaggttggctcttgcgcccctctgacatgccccatcctcgtgttattcaagggctttcttgctttttgccacttcaagatcctgcaggctcatcctgtattttccctgacccagccctagaatgagccrtttctccaaagagccctggttcccctcactggagaattgtgtttggaaaccaagatgtgggctcaagatgtgcttgaggcggctgcacttccttgcttctaggccctcttggcagacagagctagacatcgattctgcacacccattggtgtatacacacggcttcaattatttgtgtattcgtctcctggcatctatactaagatacacttgagttcacaccgatgtctctgacttcaatccagcagcctctccccttctgcatctgcaacttccctctccagcgggaagaaagctggcttcc

SEQ ID NO: 783207 - DNA, 589 bp, Homo sapiens
aagcctggcacctcagaggcgtacagccagaataagtaactcagaatgaacagtggacgggagcgactggcaggtgaggaaatgcttgatttgtgaaatgtgaatacacgtacgtccagggtgagaccagcccggtcaacagatacacattagtcatagggaaactgtaaggccaactcctggaccaagattctgagcaaaagattttagataaaagtaaatgtatccagaatcacaaacagaaagtgcacactggttaccggggaatggtgagatgatttgccagaaggattaccaagagcaccatcaaaaaccattccatttgcacgtggtrggaataatccttctcaaaccaggagcttggccagagctgctttgtggtccttcctggtctccataggcctatgcacgtctctagagttgaccaactgtgtggtcaggctgtggcaatgagcaaggaggtgttggtgacttgaagagctccttcctgaccttgcaactctagcatgtggggaaggaatgaaagaaaaggcttaggtttgggaaaatttgatcattctgttagtctgtcggcaaacttcttgagctt

SEQ ID NO: 783208 - DNA, 651 bp, Homo sapiens
acttttgctgagaacaaaataatttctgttctttgttgcacccagtttgtactgaagggcataaccttgaatatttgaaaaggaaaactctcttcagttcaatggaagatataggacatgttaagtaagaaacagcaagctctttaaatcagtgaatagctgtattggggggaaaaatgtggttcatcccaaggcagccaaaagttgacctggtgaactgtctggttggttttatgccctatttaaacacacattaaacagatctgaagtgtcttaaaatgkaaaaatgtcttcgttcaaataataagaacttaataaaattcttcattacttcactggagccttatttgacaatactaaattttttctcctaggcttacatgatagattctatcacagaatctttctctcccaccaccttttttttaaattccctttggctcttaactctaccattatgacagcaacacttaaagctgacctttttttgacagagttagcaattctcctccaggctatgtagtgattcttcaatgcttatgtgtaaattatgcaactgtctcatacttcacagaaacattttataatcctgtgtactattccatcattggtttaatgaaaacattaacacttggtttccataatatttac

SEQ ID NO: 783209 - DNA, 651 bp, Homo sapiens
acttttgctgagaacaaaataatttctgttctttgttgcacccagtttgtactgaagggcataaccttgaatatttgaaaaggaaaactctcttcagttcaatggaagatataggacatgttaagtaagaaacagcaagctctttaaatcagtgaatagctgtattggggggaaaaatgtggttcatcccaaggcagccaaaagttgacctggtgaactgtctggttggttttatgccctatttaaacacacattaaacagatctgaagtgtcttaaaatggaaaaatgtcttcsttcaaataataagaacttaataaaattcttcattacttcactggagccttatttgacaatactaaattttttctcctaggcttacatgatagattctatcacagaatctttctctcccaccaccttttttttaaattccctttggctcttaactctaccattatgacagcaacacttaaagctgacctttttttgacagagttagcaattctcctccaggctatgtagtgattcttcaatgcttatgtgtaaattatgcaactgtctcatacttcacagaaacattttataatcctgtgtactattccatcattggtttaatgaaaacattaacacttggtttccataatatttac

SEQ ID NO: 783210 - DNA, 502 bp, Homo sapiens
aaggcactagactctgggctggagcggtggagaggtggggccagctcaagagccacaactggggacctgtggtggtgcgagcttgggggtgcagagcaggacgttcagaggaggcagggctcaagaaacggcagcaaggctactgggaaaaacaccctcaggagtgaggaagagcagatcattgccattgargaagcccttggctcctgtggagagatctgagactttgcctcagcacagtcctcaaaggtatctgcatgggatggaagtggggtggcagcagctggcatggctggagctgtaccttagaaagggtaagcttgcaacacaatgtaaaatacattggacagtaaggccagatcaaaacattggcgtacaactgctaaaaaataacaatagccaaaaatcaagatgaatttttttttttgctatatgaaatctagatagtgtacatttaatttcatttaatttcagaagtagaaatctatagcaagatctctag

SEQ ID NO: 783211 - DNA, 591 bp, Homo sapiens
tcagcattactgtggcacccatcttccttattctccccccttccacctgttggggtctttggtagcaaaatggcttcaaaactgagagggtgagcagaatctgagggaaattacacaaggagacaccatctgagaattagggatcacgtcctacacatccttacaaactttgccttacctggcaaggggccttgcatctggcatcagtgcacaggtacttttaaaatcaatgtgccaatgagacatatgttttcttatcctattgaaaatggtaagttcttaatatgsgtttcttgaatattaatgaatagtttttttatcacacttgtaatttagaaccctttgctataaaagtaaaaggcactgttcaggatatcttctcttctggttttctgattttctaaatactgtttgttttttcagagtgcacactatatcatatttatataattcagttacataaataaatatgtgtgtatatgtatgtatgtgtgtgtatatctgacaattattatgatttttcaaagctcatggtgaaattccagaccaaaccaaaaaaagtgtccaaagggcaatgctggttgacatttc

SEQ ID NO: 783212 - DNA, 591 bp, Homo sapiens
tcagcattactgtggcacccatcttccttattctccccccttccacctgttggggtctttggtagcaaaatggcttcaaaactgagagggtgagcagaatctgagggaaattacacaaggagacaccatctgagaattagggatcacgtcctacacatccttacaaactttgccttacctggcaaggggccttgcatctggcatcagtgcacaggtacttttaaaatcaatgtgccaatgagacatatgttttcttatcctattgaaaatggtaagttcttaatatgcgtttcttgaatattaatgaatagttttyttatcacacttgtaatttagaaccctttgctataaaagtaaaaggcactgttcaggatatcttctcttctggttttctgattttctaaatactgtttgttttttcagagtgcacactatatcatatttatataattcagttacataaataaatatgtgtgtatatgtatgtatgtgtgtgtatatctgacaattattatgatttttcaaagctcatggtgaaattccagaccaaaccaaaaaaagtgtccaaagggcaatgctggttgacatttc

SEQ ID NO: 783213 - DNA, 633 bp, Homo sapiens
taacaagcatgaatagtgatgcaaattacatgctacagaattcaaaggtaaaaacacaaatgaagatccatacatcctatgtgttagaggaatggaaagagctaatgaagtagtgttttgtggaggagtagatgctgacctaggcttgaaggatggaaggactctmgacaggcagaaactggagtggagagaatagcatcaaaaaagaattggtccctcagattctctttggcaagtagaattcatattctctggaaaccaaattgtttatcgattctctgggactgcttcaatatgatagcagtaattttattatggtttaagtttttcattttgtttcataggttggttgcccgtgttttcttcaataatatcacagtgtttgtagtgaacacttcattcatgaggtggaggcttgtacctcctgaacatttcttggctttgtgttagcctttgattgtttctaaaaccattccctaggcctgtaatacatccatgcctcttgtctgcagaaagtttgaaagtagtgaagttgatctaaacatttttgtgaacaagtgagctgtaagtacagtttcaaagctgcagcagctgtttgtgtctttgccttgcaatctggtgtcttaactggaa

SEQ ID NO: 783214 - DNA, 548 bp, Homo sapiens
gctttctttggacaccagactttctccttaaggtaattaaagcctgcaggtcttagttacaaagctagttgacacgatttagcagagcactttgagtttagacaaatgctagacttgaaatgaaagaaagggattgactcttagctgcttatttggaaaagttatttgtgtttgtttgtttttgtttttgtttttctttgtgcctggtcagtccagtttctgaatacctggttaccttcactgtgggttgggaccatatctagctrtctcagagaggcttgtcctgacacctttctatttgctgaggcccaccagtgcttcccctggctgttcaaggtagagcctatttcactgggaacctgtaggcaccactgagaggtctggccagaggtgaccttaaggcttgtctgttttatccatgggttactaggctgtgcaaagactatgttactcagagaaaaaaagaactgattctagtcctaccccagcagctagaaagacagccctctatctgaccaatggcatacttgaaagaaataatattttga

SEQ ID NO: 783215 - DNA, 630 bp, Homo sapiens
aacccttactacataaaacgttctaaacttgggaacactaacttttgcactgtttcccaccgagccacagagctcgcaccagcatcacgctctccctttgccaggatctgagctcgctggaggaaaatacaagttcctctttcagcttctttccttcacttctggagacaagctttccagctaccaaaacagaacgtttcccaggttttcctcccacacctatgaactttgttccttgattaaatcctagtttcccctctaaacagaactggacyatgtccaaccaatgtcttcagtttctgcaaacattaactctgatgttttttttcaagaggtttgtgttcggcttttgagtaggttccggaggctgccagtggaaagtctgaggggggtatcagcagcattttaccccatcccccgcatcccctctggccagcaggacaggaaaaggaagcctgtttgcgtgcacgagcctgctgaccggcctttgccatgcgctgtgctttcctttgtagacacagagggactgcgagggaggatgagcaactccttcctaagctggtagggtacatggctccaagaaacgctcctggtctggagtggaatgtaggaccgttctcctctcacagc
